United States Patent Application Publication US 2014/0325702 A1 - sequence listing, part 33

SEQ ID NO: 59403 - DNA, 4681 bp, Heterodera glycines
atgcttatgcgtttccgatgcccaaaattccctctcctctctgacatccaagcagcatttttgcaaattgctttggaaccggaggatagggaagtcaccaaattcctctgggtgaaggatgtcagtaaaccactgacaccagcaaatctgatcacttaccgattttgccgagtggcattcggagtgatcagttcccccttcattttggctgcgactttgcagcaccatttgaaggggtatgaatctccagtggccaaagaattggcccaatccttatatgtggataacacactccttgagtgtgaatccgcagaagaggctttgcataaatatgcagagtccaaagcaatccttaaagaaggattttttaatttaagggaatttgttacaaattccccggaggtaatgaaggcgattcctgaggaggatcgcctgaacaagcctaaggtaaaagtcctagggctcatttgggacacagacaaagacgaaattgtctttgagttcccaactaatggcttagaaaaggtggcaacacgccgtcttgttctaagcttccttgcctcattatttgaccctctcggtctaatggggccgtgcattcagcccctgaagcttttcttccaaactctttgggaagaaaagaagggctgggatgatgttctttctgagaaagaacaaactcaatgggaatccttccaagaaaattggaaggatcagaccattataatcccacggagatcaatgctacaagggaacccatcccttcaattacatgcttttgtggatgcttcgatccacacatttgcagccgcaatttatctaagagcggcagaaggtaaccaaatttcagtttggcttattttctccaaaaatagactcaagcctaaaaatacctcaaaagcattaacaattcctagaatggaactcatggccattctaatagggataaggggtcttaaatttatcgccgatcaaattcggcgaccaatttctaatctccatctttggggcgattcacaaatcgctctaaattgggttgcttcaaaagaagcacaaccgaaattcattgagagacgagttcaatggcctaaagaaatggaatttaaaataaaagatcctccagaaaatctggaggaagtgtctctggataacgaagagaaagttttcttcgttaataccagaacaaaggaactgattgagagtcctctgattgaccccaaaagattcagctcttggacaaaaattgtccaagtgacactctatgtcttaaggtttctccgtctgaaacttattcagaggggaaatcctcatcagcttttcgagagtcatagaaaagaaatcgtgaaagtgtccgaaaagggaccattttcagcagaagatgttcacctagcagagaaccttctgatccgcatagaccaaataaaaaatgctgaagatttcctcagctatccttctcttaaggatagtgaagggattttgaggctaaaaaccaggttgggacggtgtgaccaaccttttggttttagccatccaattattctcggaggacaatcctccatccgagacttaattatcttaaaatgccaccagaaaaggcatcattttggggtggaaggcaccctcactgagttcttactcgggtattggacacctcgagcaagaactaaggtcaaaaaagcactgaaaggatgccttcggtgcaaaaggatgcaggcataccagtttgcattgccaaaaatgcctcctttacctgacgagcgagtatgccgtcaggctcctttcaaaacaatcggcattgactttctcggtccaaccgaaacacggttggccggagagaaagtcaaggcatggatacttcttatgacttgcctcgtaacacgagcagttcatttggaggccatgcttgacacaactgccgagtcattcctcaatgttctccgacgtttcataagtcggagaggtaagcccgatttaatttggagtgacaatgccacttcatttaaattggctcaaaaaaccattgagcatttgaccactccaggagtggatcaaaacacgcaggaatttttcgcacttaataaaattaagtggcgattcattccacaaatcagcccgtgggcaggtggcgtttatgaacgccttgtccaattgtgcaaaaattgcttcaaaaggactttggggagaaaagtcctcagttatgatcaactcataacttttgtggctgaagttgaagccacattaaaccatcgccctattacttctgtgtcagaagggatggatgagttcctgccccttcgtccagtggacttccttcaaccggaagtccgaattcactgggacacgaatggtgaagaattcgatccatcggatcgaaatctttcatcccaccaaaaattagttgccctttttcaggcaactaaagaatcccatgaatttttctgggaaatgtggcaaaaagaatacctcctccttctgcgggagagaggtaaatgggaccacaagagtccccgtcttcaggacagaacagaaccaaaggagggaatgatcgtcctcattcatgaggagttcactccccgaaaccaatggtctttgggaaagatcattgagcttaatggccgaccaggggccattagaagcgttcagttggaactcccaattcatgggataaaatcaaagaggtatggaaccatgcctcggaaaatcattatcacccgtccggtgaataagattttcccattggaagtaggattagataatcctacagaaaatgaagaaaaatttgaagagagttcaaatggaactcctcaaataacaaatgagaaagaaatctctcatttggaagctccaatggatgaaaaggagactgaaactcttcaattggttgatcaaccaattgaccaaaaccggcatggcatgatcactcgcagcaaagcaaagatggggacagttttgaactgtctttccatcctttttgctatgtttgcgttggttggagcttatccaaccaatcattgcaatgaatgcaaacttctttgctttaacaaaggcgttaaagcaaagattccaaaagaaatcaacaaagttgagctctgctgtgcagagaactgttacattcatgcgaatgtaaagaagctcacttacgagctgcccaaggagatcctcctaaatgacttcaaatgcgaaggtcatttctggatggattcgaaacacatgttcaaaaaagacattttatgtccagcagttgatgagtgtgaactcatcgaatgctatttttgcattgaacagttagcgaatccaacctgttatccattgatttcatcaatgttagcagggggactttgcttatcattcataagcataagctttgtggctttttccatattaaaagtcctgttttcaggactttatatggtcatttggctgataattcaatttatcaggccaataatttatttagctggcccaaatcggcctccgaaagataggaggccaagggcaacagcttctcaaaattggacatcacgccgtgtttacagaacaatggcgtttgttgtccttatggctaactctctccagaatttgactggagcagagaccatagcagtcatggccaaatcggaaaaatgcattaaaaatgcgacaagcatgagatgcattgttgaaaactcagcaatgctgacgttgctgccagttggccaaacaaacactcttcttctgaaaacagaggaaggtgttctccttggctcaattaacgttgtgctgaaggctttagctttggaatgccaaagcttcactaaagcctggcaacgttcatacgcaattaatgtgttggccggtaaaaggtgccctaagatgggctcctgtgaaggaaagtattgtagcgaggttcgccacaatacttccattcctgagctaaaagatgccaacgatttaccaggcaattcattttgcctggacagcacagccttttggggcaacaaatgcctcttaggcggtagtgcgtgccttttttatcgttggtatgctcaggaaaagtccaagacagtctatgaaatcatgggctgtaattcctgggaatttattgtttatacaataattcgcctggaaactttgggcgaaaaacccaagtccactcaggtgttcctttatccaggaagaaccctgaaatggaacaacatcagtattactccgatcggagtaacttttccgcccgctcccgtcttaaactcagattttgtttttgacgggagcaatatggctctgacccgagagccattggcaattgacttcaactgtaaaaatcggcaagaagcaattgatttcaattgcagtcttggagttcaggcatgcactgattgcatacctgaccattcatcaggtttagtgaactgcaattgccgttcacataaccttgaaaagttaatggaaagtccagagaggagacttccattaaacatcaaaaattaccaactcagaaatactgggagaaaagtaattgccttgacaggattcagtcctgtccaattaaaccttcaaatcgaaggtcttcaaatggctttggaacttcaccaaagcctttgcaccattttgccgttgaacatatctggctgttacagatgttcaacgggagcacaattccgttatgtgtgctcgactaattttggcaattctcttgccgaaa

SEQ ID NO: 59404 - DNA, 633 bp, Heterodera glycines
gtaacagccagatatgttcaacggcaaaatggtgcaaaggctttggtgaagttccaaagccatttgaagaccttcgatttgaaggtttaattggacaggactgaatcctgtcaaggcaattacttttctcccagtatttctgagttggtaatttttgatgtttaatggaagtctcctctctggactttccattaacttttcaaggttatgtgaacggcaattgcagttcactaaacctgatgaatggtcaggtatgcaatcagtgcatgcctgaactccaagactgcaattgaaatcaattgcttcttgccgatttttacagttgaagtcaattgccaatggctctcgggtcagagccatattgctcccgtcaaaaacaaaatctgagtttaagacgggagcgggcggaaaagttactccgatcggagtaatactgatgttgttccatttcagggttcttcctggataaaggaacacctgagtggacttgggtttttcgcccaaagtttccaggcgaattattgtataaacaataaattcccaggaattacagcccatgatttcatagactgtcttggacttttcctgagcataccaacgataaaaaaggcacgcactaccgcctaagaggca

SEQ ID NO: 59405 - DNA, 274 bp, Heterodera glycines
atgctttcaacgaaattccgtcaacaattgttggcactgaattcgattgtgcaatttgtctcgatccaattccgagtggcacaagtgtgaagcctttgccagcatgcaatgttaagccaatttagaattttaaaaaatttaaaatttcattttttagcatatttttcatgaagattgcctaagcacttggtattttttgaaaacccaattggattatattttcatattattaaattttgatgattcaaacgaacgaatgattcatattttttaa

SEQ ID NO: 59406 - DNA, 1456 bp, Heterodera glycines
  unsure (1)..(1456): unsure at all n locations
cgtcaagcagtgccggaagtcgcaataatgaatcatcaaaaaggaatggcacttcacactccgcgagccaaaagaatgttggcactgtgccgcccaatgtgccgattgttctagtcatcggtagttttggactcaaaaccgaaaattttcgaaaagtgattttagcagggtttaatttgaaaaataaaatgcataattaaatttttttttaaataattataaatttgctttttctcagcaatttttttaaataaaatttaattggtttgaatcaaggtaaaaaataagcaagtgattgaaaaaaaaatcagtgacgtgtccaacagcgctcaaatggccaaactaagctttaaccaggctcttagcgccagttcagatttagttgtaggaccgtattacatttgtggaggattatggactttttttaaataaaaaattaacaattttgtttttaattattgttcatcaagaatcaatgtgttttcacaaggttcatttaaaatggcaatgaccaatgacggggaggctaattaacgaaaaagcattcaattagtaatttatttttgtctttaaggagcgccgggctccagcaaatcaaaatttgcgcaaaatatcgccaaaaaatatgatggattcgtgttcatcagcatgggcgaactgttgcgcagaaaagtgcagcaaaatggggagaatgaattgtgggcaaaaattggcaaaaagatggacgccggagaaatgattcccatggtgggcgaagtccaactttttttttaataaatatttattcaaatatattattaaaaattttatttattatactactcgtataaaatatggtgcgtttaatctgcaaaatttcattaaatttcaaaagttatgactaatgaaattcaaaaaattttggttttcaagtttggttgctttagcgtaaaattataagcaaaattttgtagtttttttaataacggcatagcacctaaaaatacgccttaaatggttgcaaaacaataaattttctattttttttttaaatcatcatattttaaggaaaacctcattttatttcgtaaagaaatttttcaaataccttttttaatctggcatattaaaaccaaaaaatgcactcactaatttactaattaatgccataatttgtaaattcactcactaatttattaattaatgccatcattagtgtgttttcgcctttgtcagagaatatgccgtgaattgatttacgcgtctgtccatgaacgctgtcccaacagttggggcttcgtcgtggagggctttccgcgcacgttggcccaggccgaggacatcgaggcacagctgggccacattgacttggcactgctcatcgactgcacggaacagttctgcaaggacgcgttgcgaaagcgntacacgcgggacaaggaggagggagcggagagggcgggtaatgggggaaaaa

SEQ ID NO: 59407 - DNA, 595 bp, Heterodera glycines
aaattttttgaatattatacaattgtgctttttgctctctatcaatttattataaaaaaattcacttcccttcgaaattgaaggcagaatgctcatttgaagctacgcaaatataaattaatatttgctataagaactgactatttagtcaacagaaaacaaataaatcataaaattagaacaaaaaatgattttattttagaatgcaaactgaagatgcataataagctaatatattcgaatttattttgaaataactgttcaacagattattagttgtttctaagaaataatgataggaagcttatctgaaatgtgtgctcacccaggttaatttgtcatttcctgcaataaatgttttcatataaaggtttaaaaaattcgatcgggtttagaaacgttcaacaaatgcatagataaattttttgaatattatacaatcgtgctttttgctctctatcaatttattataaaaaaattcacttcccttcgaaattgaaggcagaatgctcatttgaagctacgcaaatataaattaatatttgctataagaactgactatttagtcaacagaaaacaaataaatcataaaatt

SEQ ID NO: 59408 - DNA, 755 bp, Heterodera glycines
caccgatcaaactattactagaaatcgtacataatcggtacaatttgatcaattagtctaatgatctcagatcgtaaaagcgatacattggaagattaaattgtcatcttgcgttagatagatcagcaagattgggcaataatcagcgaaattgttgatgattggtgtctttccctaatattagacaaattaactaacaaataaatgttttaaatgagaatcgtcaaatgaatccttttagtgatcatcaagcagttgatcttttgggttcctcaagcaaatcagttcattattttatgaagctaatcacttcgaattcattcggtcccaaattctgcagaaatgccagccggcctccctccgccttgttgacaaccaacagttccaaatgggccaagcaatgcgcgtcgaatctgcttccctttggtacacttttgagcgtcagttggcccgtctgtacgtgacacggtggaagggctttcgagtcagtcgttccgaaaaatgccattttttattacgcaataaataaaattcattggtgccgaaatgcccgagggggtgcgatcttagctttctctatcctggtcaaatcgtttctttctttgtattttttttgctgtcagattgaccaaatggtggccgtcacttgtgtgttcgagggcaccgccgaggaagtggaaaggcagcagaaggcactgataaaattggctgatctgttcggcggaatggacgccggcgaggaaaatggactctat

SEQ ID NO: 59409 - DNA, 204 bp, Heterodera glycines
atgcccattaaaatttgctctcagttcgccccaattggccgtcctccgccgcccaccgcccctccggcgccgcacagccgaagcattgcgcagcagcaggcacagccgtggcgcattgcgccagaacatttgtcgcccaaggaatggaaagtgccgcgcgaggaagagacggaaaagacatcgatcagacacaaagacaaagtg

SEQ ID NO: 59410 - DNA, 54 bp, Heterodera glycines
atggctgctcgtaaattgagtggaaatgcaagaaaaggaaatggaaaatcgcga

SEQ ID NO: 59411 - DNA, 472 bp, Heterodera glycines
  unsure (1)..(472): unsure at all n locations
atgagtagtcagcaacaacagttggatgtgcttattgtcatagatggtaccaacattgataagccttgtgtattttttgatcttttcaaatttcaacatttaacttatttaatttaaaggttgatattttttcgagttctggctttgttgcttcttgtctcaattgggtttcaaagcttcattctcctaatgtaattgttgcgttatccaatcaaccgaatgatgtagcagccgaacttttaaagtcggtttatataaatgaaataaaaaatgtttcaataacttacagaaaatgggcttctaaattcaagcagcttcaggtactacttttattttanatttattaaatgttctanatgaacttaattttgcaggcatttggtgtttcaattgccaatctttnaacgatngtcttcgtgaaagtgattttcgacaaatcttagaaatgatttcatgctcatacaanatttag

SEQ ID NO: 59412 - DNA, 132 bp, Heterodera glycines
atggctgtgtccatcacccaaagcacggagagcggcacgctctactcattggcacagatccgtcgcattgcgaacattgcgcattcgcatggcattcccttgcacatggacggggcgcgattcgcaaacgca

SEQ ID NO: 59413 - DNA, 1888 bp, Heterodera glycines
atgattcaagccgacttgctttcttcattggatgggaaaattaaaataattgttaaaatcagcacatctgattacaaggtaattgtgttttcattatgttatcctaattaatattaaaatattgttgttgataagcatataataaaattattgtgagaaaatgaaattaacaattaatgaagaaataaaaattactaataataacaataataataataataatatgataagtttttttagaaagcctttaaaattttattttaaggtgccagcggtttttaaaaaattttactacataaaaatgtttgcaccaaatcaagagtcaataaaaagtgtaagttccaaaaattattttctatttataaaagaaatgggaggagtccttcgttgcaaataaacgccccagggaagactgaaaatttatggtgggatttttagaatcaaaaatttttttatgataaaacgtaaaatgccaaaaacgaaaatagctaaatacaaaaattaatgaattaattaaaaatttttttctaagttttaaatcacaattttttttaagattttggaaatttttgcacaaaaaattccgaaggcagatttaaattatgaaaaaatcgccaaattgtgcgaggaagaaggtctgaccggggccgatttgcgcgaagtctgcaattacgcctttctcgaagtcgtctcaaagcgaaaatcaaccgccattactgacgactttgagattgctgtcaaaacaataagcaatcaaaaaaaatttgtactaaaaaggcatgaaaaaaaacaaattttaaaaactttagattgacggaaagagtggtgaaatcggtctacaacaaattcaacatgaaaatgaccaaatcgttgaaattttgggaaagagggacattggagtccaaacagttggactccgacaagaatcgacaaaattaacaatttttgaaaaaaaattaatttgtaaattaaattaaataattcttatttattggacatattttataactaaaatttgtcgtttttctaaaaattaaggtacgcatgaagcgtgccatgccgtgttaatgtccaattcggattattgtgaccctgtcgaaatgaccgtcaattacgacgggagtggtttcgtgggttttaaaaaaattattgatcactattttttttaaagattagactttaaattttttttaaatatttcaccaatatctgacaaaaaattttcgggattgttgtccggacgtaattttatccggatgtgtttttgtctttttgtgtttgtatggacgtttttatgtactgttgtgatttttccgggcgtgatttccggaaaattctcaaaaaatacattaataaaatttgtaatattcagacagaaaaaaaaaggattaacacccattgcgtgtcaaaagaagaattcctgggagatattgaaattctactcgctggagccattggcgaagaagtcatttataaccgccgtttcaacggatcggaaaccgacataaaaaaagctacatcggtaataaaaatataaaaattaaaaagttatgaataagactcgttatgctacgaagtctttaaaaaatgagaaaatgtaattaaattaaaaatgataaagtagcattagacataaattgaggttttttaattttagctcgctgcagctatggtcaaagaatatgggttttatcccgaagaaattgggtaccaaaactttttggtaattaattatctcaaggaaaaaatttacaatattgttttgaaaaggtggaaaaaccgtcagaagaaacaggcgccatgattgaaaaattgattagaaaaattctgaaggaatgtgctgaaagggccgaaacaatgattagaaacaaaaaggtaaaacaataaa

SEQ ID NO: 59414 - DNA, 747 bp, Heterodera glycines
atgaacttccgtggtgcaacggaagcatatgccattgttcattcaatgccatttgccaaactttcacatcaggttgtcaaacttagcatccatatgcctaatcaacaaccgattgtgtacagggcttttcagctggtgagcaaagctcaacaaatccagcaaggcgaactgccagagacgcaatgttctgcctattggaaacaatggcaaaatgaatggaagcatgatccgaagctcaaagatatgctttttgaaaaagtccctgagcattttatatgggcaaaggacaaatggaacaaaaggaaatataacctaacaaagagaccaccaatcggtcgaattgttcctgtacccccatcggacccggaaaggttcgcgctctattcacttatgcgtcactttcctggagacccagaccatcttaagatggttaatgggttgctttgtacctcattcactgaggctgcaataatgcatggtcttcttgaagacgacaaaatttgggacaaaactctggcggaggcagctctatcgcgctggcctgatcaaatgaggtggctcttcatgagcatcctcgtttatggccggcccagtaatgccgtcgaattatggaacaagtacaaagaccaaatgtactttcctcaaggcattaccacaccggcacaacgccaagcagcagagcttgaagccctagctgacattgattggcggctgcacagctgctttaacttaagctgtgcattttag

SEQ ID NO: 59415 - DNA, 147 bp, Heterodera glycines
cgattggcccttttctcacgcaaacgttcgatgctttttgttggtcctggggaactttgtccgattcccggccccgcctcaacgaaaagcggacacatggccaaaggaaggaaagcgaagtcggcccagaaccaaccatcgaattga

SEQ ID NO: 59416 - DNA, 443 bp, Heterodera glycines
  unsure (1)..(443): unsure at all n locations
cagcatcaacggggggatggttcggaggggaagccgaccaaaatggacaatttgcttcatctggaccncacgcgaagtcatttctgacgcgactcgattctgcgcattcgccggtctaacattttgccaattttgagtgtaatgaaacacaaagttctttcttcccaaatcccttcagggctctccgaattcgcggaattctttcatgcaaatgatggtgttggaccgaagcagacagccttcggccgatgtgatcatattctcatcatgatcagctgatcatccccatcccaattaggtcattgagactgtgtgccttcagaacggtgtgtgcacttgtgccgaaacgacctgcactttgcgctgctcttcgtgtgcgcgactcactttccgagagatttgcctgaatatttattcacctcatggtcaaatgcaaaagtttg

SEQ ID NO: 59417 - DNA, 224 bp, Heterodera glycines
aaagagccaggttcgatgaagttttggtaagccaaaaaaaaatccaaacatttaaaaatctataaaaaatttaaaaatgagaattcatgcgagattttctggaaataagcttaatagggcctagttaagctgtaaaaaaaatttggggcgatttgaaagagaatagaaagaaccaggttcgatgaagttttggtaagccaaaaaaaatccaaacatttaaaaat

SEQ ID NO: 59418 - DNA, 225 bp, Heterodera glycines
ttttaaaatttcgaaaattttcaaaatttttcgagctaggcctaaaaaacggttttcgggtttttgaattttaagattttttaacgatttttcccgggaaaacggagaccacttccaaaacatcgtttttcgagctctatcgactggtattttttccggaaaaatttcgattttttccaggaaatagaaaaaatttttggcctgagcgggacatttgagtcccgg

SEQ ID NO: 59419 - DNA, 213 bp, Heterodera glycines
atggaagggaacgaacaatgggaggaggaggaagacgaaaaagaggaggaagaaaagggaatggaagaagaaatgggggaggatgaaaaaggggaggatgaatgcatcgggggcaaagcgtttgtttttgttggtgttgtgcagatttatgctgatgcgagagagggaatcactgctgccgaatttactgcgatgcttcgatggacaatttga

SEQ ID NO: 59420 - DNA, 166 bp, Heterodera glycines
atgacgcagttcagcgcgagctttttagccgggcaaaacgaacaaaaattaaaagaaaatgagaaaacgaacagcacaagaaaaagaaaacgagaggaaaaggagggagaggaagaaagggagggacagaaaggagacgaagagtttgagagagaagaggaggaag

SEQ ID NO: 59421 - DNA, 1849 bp, Heterodera glycines
atgcgttcagttgcaatttgtgccgactcgacgagaacacgcggaagacaaatgcgaaagtatgggggcacaattagtcgatgtaacggacggagaaggcgaattgaacgaggcgatggtggaggacctatcagaactgcttcaagtaatttagggaggggaatgagactgaaaatggctttttggaggaatcgctggaggcaggggtcaacgaactgatttgggtggtcggggcgggaaagtggcgatcggagtgggacgagtcgggggagagagtgcgcttcagccgcagagaggcgcaacagcagcggcaggagggggaggaggaggagggcatggagaatgtgttggcactacaaaggcgagtgaggggcggaggggacagcccaaaagggggccccgcagggagtcactttgaaatgtgagtcggaaggaattggcaatggcacaatgccgaacgcacttttcggtcagtgttctgctccatcctccctctgtgcaccctttcatttgccaactttggcccctttggcgccgtttgctgctctatgaacagtctctgctccccaaaggtttcgcttcccccccccccctcctccgtttcattcactttcttctcaatccgctgaaggtgcgcctctcctggaagagcagccgcgtccctcctatttcttcgaccccaattcctccgcctccaattcgtcctttctcagtttgccatgttccgcttcgggcgtgccctccccgacggtccgttggtttcgcaacggaggcgaagaggtcagctggcaattagcatttcgtacggttcggcaatttttgcctttctttcttcctcagattgacttccgcttctcctctttcattctctccgccggtgctttgctcgtccccgtttctcttctgtcccccgtttctccctcctccttccattgctccgtttccaattctttcggtattttcgacttttctttttctttcgacttttatttcttttcttttaggaacccttcgtggccattcgaccatcgttcggcccgcattcattgagccctttcaggagatgagattggatgcttatccgttgatggggcacggacgaagagcgggcggcacgcggttggaatgcaatgcaccggcacattacccaagtgggaaattgagagggggggagagggaagaaagagagggagagagagaaagaaagagaccgagagagcacgatgaaaacccaaaagagagagagagaatttaagaaaaaaagagaggggagggagagagaaagaaagatagctatagagcacgatgaaaacccaaaagagagagagagaatttaagaaaaaaaagagagagggggggggggagggagaggttatgaccaaaagttacaaaataacgaagaatggccgaaatttttgcctttttctattttaactagagttgtacgggaccgggaattttgagaaaaactgggatcgggacttctctggttgaaaaaccggtactttttggctggcaaaaccgggaaaaaccgggacttagatactcagttgtacgttttttcagtaccagtcccggtcccgtacaactctaatttttattttttgacgttgtatatttatcatccaacctttaaaacaaattatttgtgtaatgtcattcaatatttttgttcagtcatatttatttgtctgatttttgaatttgaaaatttttaagaaaataagtaaactttttacatcttttcctttctcgtcctttataaaaaaaatcttcaaaaaacggaaaaatttgaagggaatcgaaactcaaaaaccgagattctcgagcagtctattgctgaggaatg

SEQ ID NO: 59422 - DNA, 126 bp, Heterodera glycines
atgaaaaaatggatgcgggaggggaggaaggaggacgatgaaatggacagacggaagacgcatgaggaagaggaggaggaaatggaagaagaggcggagaaggaggaaagtggaagggagatggag

SEQ ID NO: 59423 - DNA, 174 bp, Heterodera glycines
atggcattttggggcaacggaacgtacgcacttttggtggattggaaggcggtggaactgacaatgagactgacggagggagaagcagaaggaggaggaggaggaggagaagtgaaagaggtggaagcaatgccatcaaaagaggaggaacggtcatgggacagagggtacaaa

SEQ ID NO: 59424 - DNA, 306 bp, Heterodera glycines
atgacgtcgacggaccgtccgaattgggcggggcactttcgcatggacggattggaggcgaacgaacgctatcaggtgaattttgccaaaacggactttgatttggtaatggaatggtcgctccagttccgattgcgacccttcggcgaaggatcgcgtgccgtcgccctttcgcaatgggtgcgcacggagcaatcggtgcccgtggaagcagtccggcacattcgcttccgaatgttggacgacacgcatgtgctgctcgagtgggagccggtggagaaggtcgtgctgctatccttggcataa

SEQ ID NO: 59425 - DNA, 671 bp, Heterodera glycines
atgcgccagctggtcatcaaccattttggcaggtaaaggcgccgaaatcggtacgacacttgcacaagcaccaccaccaccaccccacactcatgcacagttttttttttcttaggcccgagcagcgcgccaaccatggtggtgggggcggaggcgacattgcggaggcggccaccgagcagcggaccattgccgtgccctgtcaacgctttgtgcgcactcgacaggcggacatcttcacgcgtcgctccacccgcgtgtaccgccccgtctacaccaaggggcgtgtcctgcgaccaccaccaacagcgggaggcgaggcagccgcggcggaggaagaagctgaagcggtcacgccgacgcctctgtccatccgcacgcgaccgtttggctggtgttcggcagaggcgcagcaaatggagacagatgatgaggaggaggagggggaagaggaggcggacgcgaacagtgatgacgctggcggcgagagcgatgggctggagcagccggtgcgcaagcgggccagggccgagccggtgcaagaaatgcttgtggaggtggaggaggcagcggtgccgccggcggaccccgatctggaggaagagccagtggccggctgttcaacatggaaccagcagagaaggctcaacgagcacatttttcgaaattga

SEQ ID NO: 59426 - DNA, 498 bp, Heterodera glycines
caggccgaggccaacaatttggtcgtggccaagtctctttcccctcgtgttcagcaacaaccgctcgccactgtccagtcatttagcccaacaaatggtgccattggcaacgaacaattccgattttcatttttctcttcagtgtgccgtcctccgtggactcctcagacggaaaagcgtcggctgatcggtgtcaaagacttcgtcagtcaaaacactttcagcaaagaggcggcatcgaacacttgtcacgtggcagtgccctcagtgacaccaaatctgacgaaggtttcggcactttcttctgaggtggccaggcgttgttcaacttcggcactttgtgccaacggcagcaattttttgggaaaaaacgatggcattttggaagagtcgacgaaaagtgcgaaaacaccgcagaaattggagaagcaaagccatctgacgaaatatataccaccaaaaaggacagcggaggaacttttgttggacaaattggag

SEQ ID NO: 59427 - DNA, 618 bp, Heterodera glycines
atggcagaaaaattgtgggaaaaggccaaattggggacaaagaccgccaatgaatgtgtaggagaagaaatggggcaaaaaatgatggaaatgtgcgcgggtggaacatcaaaagcgaaggaaattgcacaaaattgggggaaatcggcgctaattgccaccggacaatgcgttttggcacaaatgcaaacggaggaggagcaaattcaagaggaacaaaatgccgagggcatggcgaaacttgcggaatttgacgcatcgttcaaagagtgtgcgaaggcattggcacccgaacaaaaggcaaaaagtggcattgacatggaggccaaggccaaccagcagctgaagcccagcgacctggtcaatgcggttcttaaaaacaaggggaaagccgacgatggcaaaagcgaaggaaatgatgacaaaaaatcaaagaaaactcagaaaaatggaaaattaataacattggagaaggggaaaggcaaaggcaacttagagttctatccctacatgggaatgatcgttgtcctcttttttcttggccaacaaagtctaattgcctctcttttgcttctgtgtgcgctcccgtggatattgcgcccgaaaaattcagactga

SEQ ID NO: 59428 - DNA, 661 bp, Heterodera glycines
aaacaaaaaaatcgatttttttcaagtgtccgtttggggtactcaaacaattatggggagcaaaaatccaacgcagaattaaagtacaggctatagggaagctattccggaaggattcggtctccccataaatctgggcgcatcggctcggggggactgccccgaaaacaaaaaaatcgattttttcaagtgtccgtttggggtactcaaacaattatggggagtaaaaatccaacgcagaattaaagtacaggctatagggaagctattcccgaaggattcggtctccccataaatctgggcgcatcggttcggggggactgccccgaaaacaaaaaaatcgattttttcaagtgtccgtttggggtactcaaacaattatggggagcaaaaatccaacgcagaattaaagtacaggctatagggaagctattcccgaaggattcggtctccccataaatctgggcgcatcggttcggggggactgccccgaaaacaaaaaaattgattttttcaagtgtccgtttggggtactcaaacaattatggggagcaaaaatccaacgcagaattaaagtacaggctatagggaagctattcccgaaggattcggtctccccataaatctgggcgcatcggttcggggggactgccccgaaaac

SEQ ID NO: 59429 - DNA, 250 bp, Heterodera glycines
atgcttattaaaccattgtttactttctcaattttgttggcgttttttggccaaatattttgcgacattttgggccgtgaacaaagtgccggtgccaaaggtttgctgacatgtgagggaaaaccggcaaaaaatgtgaaggtgaaactgtacgatgatgaccgaggtgaaattaataataaattcaatttttaatttataaaatttgcagggattgatgcggacgatttaatggtgtgaaaaaaacaaa

SEQ ID NO: 59430 - DNA, 755 bp, Heterodera glycines
atgttaagcattgagccgcaaaagcgaatgactgccaaaggaatcattgactatttggaggggaaatgtaagccaaaggaatatgagaaaaacgcagaaaaaatggcattgtttggcgatgtgtcggctgaaaaattgagggaattgatggaaaaggaaggatttaagcgaacaacaatgaaaaaagtcaagaataatttaaaaagtgccgaagaaaatacaaaaatatttatgcaacagttggaagaacgaagcgaattttgtgagaattaatcgccgtcctttgggtcaattgaaagagaaacggcacaacaaacggaccaattaatttaatattgcaaatttcagtttcaatttggcaaaattttccaattttgtcattttctaatttattgacttgggtggtcatcccattccctaatccctttcgtcttttttctgagagcaactcgctcaaattatcctttcgaatcgtaagtagagttgcacggtaatcggtaattgtaaaaaaaccggtaccagtactgaccggtaatgcaaaaaccggtaccggtaccggtaccaactttttccaccggtaccggtaaaaaccggtaattttccaacgtaaaaactgaagatcggagaacaccaaacattgctcaattccatttttgataggcatattggattcctttgatacacaaaaagctaaaaattatcattttccttccccattttgttaaaatattgttacttttaatatttttcatcaa

SEQ ID NO: 59431 - DNA, 374 bp, Heterodera glycines
atggcggcggattacattcagcaaaatcccgaggatttccttccctttttggctaacgaaaacggagaaatgttcaaagatgaacagtttgacgactactgctccaaagtggcgcgaatgtgcgcaagcggcggaacttggggcggggagccagaagtgagcttttcttctgccaattgactttgaattcctaccattttcagcttcgtgcattgagttgcgttttgcgctgtcctattgaagtgcttcacgcggacggagcaacaatcaaatttggcgaagtgttttctggccatcctctcattgtgacctaccacaaatttgcctacactctcggggaacattataatagcactaaaccgaccggagaatga

SEQ ID NO: 59432 - DNA, 717 bp, Heterodera glycines
atggagcatcttaccgatgcgcctccatgggcttccgcaatgttgggactggtgaaccaaatggttggaatgtgccgcgagctgatcttcatggtacgcgagcaggacggaggaagcaacccgaacagtgtttttgacgaagaacgacgactgcacagcgttgtcatcgcgcaattgcaggaaagcaacagccaaacgccaactcaacgtgcaaccgatgacttggcgaatgtcaaagaactgatggaccattgtgacatcgaatgcctgccgacccaagtgtacagaatgggcaaaaaacaagccgacggacgtccaaggttgctcaaagttgaactcccgaccaaattccataccaatttatttttgcgcaacaaaaacaaaatcaaaaattttaacaaattttccaaagttttgttgcgcccctccctatctaaaagtgatctcattgaccgtgcccgactcattacactgtgtaaatctcaacgtgaaaatgacccatcctgtgattacattgtctatgcggggcatgtgcttgcccgcgacgacattcccgcctttaaatctgacctcaattttaaatgtatttgtcataacaaatcttaatgtgttttgggtgaccactcacgaggcaataaccttaatttatctcttttacaaactaaatataggaaaattgaacaccccatagaaaattcgaaaactttactaaataaa

SEQ ID NO: 59433 - DNA, 291 bp, Heterodera glycines
atggcgcaacattcggccatgcgatttgtgatggctttggaacaatctgatgtcatttgtaattaatactatcatatgtaaagggtttttacagatcttggggcatcagaattttcggcaatcattttattttcaatgctttcccagcggtccaacaatcgacgacggagacacccgatgacgtgcccgcccatggttatgcctgcaccaccggcatccatgatttcggctatcacaccattgatgtgtaacagctccgtcacattgtcacgaccctttgatagattttag

SEQ ID NO: 59434 - DNA, 580 bp, Heterodera glycines
atgctggattttatgctgcaaaatttgacaaaagaccacttcaagataattattccacatctattcattatttgtgtcgttgtgagcttatttttgcaacgcttctcttcaaaatgaaatttctactatataaaataataatctacaattcccaaatattcattcatgcacctccaaattaaaacttcaaaatattaattactaaacacacaattattcttaataaagcaattaattagtcattaactaataaattttgatgacttcctgtatttgcaatttattagaaatcatttaatcgacactaaaatattttattaaaatacacataaatttattcccacaatttgttagtgaatttttgtttttgtttaattaatttaatttttataatttcagaaaactctaaatatcagctattcctccctttctatccccaaaaaaattcttcgccaagatgcgttatttgattgtccaaataactccaaagaagctcgtgatttgcggtcacaaactggatcttaagtgtgctgaagagtacgatctagaaattttgtcaaagcccattgaggttaataaa

SEQ ID NO: 59435 - DNA, 494 bp, Heterodera glycines
atgaccatatcaacatacgcttggaattcatgtcacaaaaaagtttttttccgtggaggtatctcactccagttcaatacaatgcgcattttgttcaagtattttggaataattttgataaatattggttttcaaaagggaaatttttttacggattttttttcaaattttataacaatgttttgtgaaatagtccatttgaaatcatttactggtcgatggaccataaaaagcggagtcgtcaccctcgtcaaacgaatcctaaatttatgttaactaattcattttaattggtaatttactctttggccacgcgaacgtttagaccaagatttgcattcgtattgaaattgaacttcgtcctaaatagtttattattttttacaggatttattgctattgcacctgctccttttggtcaattccaacgaacgcgctatcgtcgcactcatcgaatgaatcctatatttattttgttaataattattttttaa

SEQ ID NO: 59436 - DNA, 1277 bp, Heterodera glycines
atgaccgaaaaaaacattcgtgggatgcgattgtgtgcggatactttctaccatttgcgacagttggccccgtcaattctcaacgattgtccattgttacgcgttatcaatttccaagtcaccgatctcttcacagaatttcctgcagatgacagtgccatggcatcggatggacaagcggtggccaaatggcttttcactccacgttcggacaatgtgccaaaggtggttgatctgctcgtttgacacagatgttgggaatttggcagtgcgaattgaagccttcaaaacggtaattttcaatgatcatttggctcttttacattgtttgggttcgtacattgatttcgacctagtcgaaccccgaacctgggttcgaagaaaaaacggaaacactaatttcgcatttttggtcttaaaatcattactgttgtaaacttttgctttttcgtgccatcccgccaaccgaaaagtgtcattcattcattgatcatttcgtattttcttaatcaatttttccaaattttaggcatttgcctcggcttcttctcccgtcaatttcttgtcgtcatttgggttttcccgccgtctttggccgactccgttttgccatttgatcagacgaacgaattgactcgggaacatttggcattgaaaagaagcgttaatagagacgactgttttctgttggtccgttgtccaattacgcgaaatgaaagcaaatggacaaaatgggaagaagaaacgattggaggggacttttttgatcagtggaatcgaattgacattaatatttgggaggacgaaatcggagatgggtaagcaaacgctttttcaaaaattcaattttattatgtatttttgttttaagccttctcgacgcaactcccggcccaaatgatcagcagcagtagtgaatgaatgaattgttgagaagtgatcgatcaatatgaattattgaattggaaattgtcgtgctcattaaatattctttttttgtgatcaacatggatttgtaatgcgtatgtcttaaggataaatttaatgatttccttaaaccgaaatccatcggtaaaatcaaagtaaaattgaaaaagtgcactgaaattgtgcagttttgaacgcattggtcaccaccaattttcctaaacaaagcaagccaacaatttcacctatttgagggaatgggtcgtttcggcgccaagccaaaattaaaaaatcatgaatcagtgggaaatttttgagcgatttaaattttcaaaaaattaaaaatttta

SEQ ID NO: 59437 - DNA, 286 bp, Heterodera glycines
atgccaaattggggagacaaaggccgcgttaaacgaaaattcggcaatttgaataatatcagctttacgttttatggaaaatgcattgggtgagtggcaacagcttttgctgctttaataatgaaattaaaattgcgcttaatttaggccattgtctccaccggcagaagaagaaaaagcgggacaaagcgtcgaaaaaggggccccttctgacaaatgagtgacggacaaaagaacaacaacaaaaacaacagtgatcagcagaagaaatgaattaattccagaa

SEQ ID NO: 59438 - DNA, 1573 bp, Heterodera glycines
atgtttaacaaaaatgcaaataaaattcaaatcttagtaagaattcgagcccgggggttagggtgccggcagggcttttgccggcaactcaggcccggtaaatgttgaaaaaacacgggggcccgggccacgcagtaaaacgggctatttttggccggccgctcgggcccggtcattttgacagggctaaaatgggcttaaattcttcagttaaactgtcataaaaatacgaatcgtctgtataatcgtatttacttatatcgtcaataaatagggaccaattttattatattttttttgcaaatttggactaactaattgatccgaaaacgaatttctaacttggtttggtgcctctagcgtaaattttcttgcttaattttgctctaacgagatttttgtgcttaatacgaacatttaatttgtacgcttaattgaacatattattgtgcgtaatttggtgtttctgaaaatttcttaacaaaaattcagtaaaaatgaaaaatgaaccgcctaatgatctgcatatatttttcatgttttcaaaaatacactcatttactccccaagaatcagatttttaggcgaaatcgaaattatttattcattaataaaatttaagatttttttttgcattttcgaaaaaaaataattaaaactcttcgccttttttcttcaccaacactgtgataccaccacaaaaaaggagaggtagcgagggaaggaatggcaaacattatgtgtatgctatgtgtgccgaagattgagtcagtcgagacctcatttagcgccagccgcgggcaaaattctactgcggaacatccattcctccgtccgcctcagagaaacacaaaaaaagtgtgtggcacgaacgagtgagtgcagagaagcaaagaatatctcggggcttaacactcaccaatggttaaacaaacagcgaaaaaagtgaactttggctcctagagcaaaattgtgctccattgaaaaaagatacgtaatttgggaatcgctagcagcagctctgcctcggttcgctgctagctttttgtttctggcttttggccttccattcactttttatttcggcagaaatggggaagtgggagaataatagtttgtgttatttgaacaatttttaaattttttagttttcgatgggaagaaaacgagactattttttaatcataaaatactaattatcggcttaatttaaaaaattgtccgacccatttcagcaccggtttttggattgaccaaatgatctgaagggagagagagatgagagagagtgggtgagagagaggaacgagaaagatgatcagaaaaccaaataacagacagagagcatgcagagtcaatgagaattggcagtagtgagagatttggagacctaattaaaaatacaaaaaaaaaaaattaaaatatgccgggggaggcgggaggaaacacgcgttgtttgtgagagggtgcgggggagaataactcatcgctggcactttagttaaattcgagtatcacggtgatcatgcgggtttgaatgccatgggaaacaaaggttgttagccctaataaa

SEQ ID NO: 59439 - DNA, 817 bp, Heterodera glycines
atggcctcccttctgaacacctcctgttgtctggtaaaatagagaaaatgattttttaatttaattttatttttttgcagttattcatcaacatcattctcattggacgtgtattggcatcagcacaaagtgaaccgggcgaaaatgagtggttcagcaatgatgtaattgttttatgaaaaaaggcgtggggcggtgggggagggggcaagtttaactgatttgactaagtttaacctaaattaggacttattatttaggaataaaaataaattaaatttaaatatttctatcattgatactttgaaaatcgcccacattaatacacgtgtaacttcgtcacatagatatttttttaagttcggctcaccacgattttgaacgtgttgcttttcagctcgttttatagcgtagtcggttgaatcccggcatggttttggcacttctttccctgcactttttaagcctgaaaaggcaatttgagtttgataactatgatcattataagagattaaacggacgcaaacaatctttcttttaatttttctccaaaacaggttcaaggcttcttaagcatattatcacgtaaaaaaatttcttttacattttcgaattcttttcatcaatcgagaaaaaaaaattaatattccattgaacttgaagtccatgtccattagtgttatcttactccggttttatgcctttttcaaaataccattctatttccttcaattatataacattttagacaaacatgctggacaagagcgcatttactctacatgccgcagctacaggatcggtcgataatgatttg

SEQ ID NO: 59440 - DNA, 1465 bp, Heterodera glycines
atgtccaaaaatacaattaaatttaacattcttggcaaacccgaagtaaaatttttgctacataaaatgccataacgtgaaataaaaaccaattggatcaatttttagaataatagaattaatattttcaaaattaatcgccttatttataaaggaaagaaattaaaaatgatctgtaggcttttgagcaattttacaaaaaatatagagcacggtttatgaattgttgggtttataaatatccgaggtggcaaaatttacgaaacgaattagagttctaatatatggcacgctgttcatttttcacaggcatggttgagccgacgaagttgtgattttctagtcaatttcgcctggattaatgccaccatatcatacagaggagatgtttctgtcaggaatatttgtcagatgcagcccggatgcgaacgcaactcggcgtgccattttttgaaattgttaagcactcagcgaatgcatgaactgtgagccatagttatattaatgcagtacatttgagcgtctgggtcagggtcttgactcgagaaatttctgtgattcggatcccaatctcgactattgatcatttaacagactaaccgagtttttaaaattatttattttttaaattaattagagtaatttacatttattaattatagtataatttatctagcaattctattttaaacaattatttcgtttggtttttttttttgggggggggggggggagctgccaggaaatcaagaaattttggccctgttttttcatagggtttgcacaaaattttggctttttctggaagtttttttaaattagacaaaaatgcttacattctcagatttgaccccaaaaagatttcttaaaaaagcgacgacttttttctttttacattattttttccaattattgtgtctaattcaaaaattataaaaaaactaaaattttttgaagtattttataactgaaaatttttaaattttctcaaaatctcaaaaacaagcaaaaatcataaaaataataattctcacactggatcttcctggcgccgcttctctgccagtctctaagaatattaaaaatatttaattttatcgagaaactaaattaatgtgtaaaatgtatcagtctaataaagaagattaaaatttgaaaagctgtttaatcatgatccaaaaaagaatccgagacttttctttcgtcaagataatgtttacacaattaatagaatttatccgaatattttattatttattaatttaatgattaatattataattccagaaaagattattatctctttggaaacagtctgttcgataaggaaactctttatccgttaatagacaacccatgcatttgcaaggatggcttgcaaatgaacgtgcgcgttgtcggtgatttatatcggaggaatatggccatcattcagttggacggttcagtttttttcaataattga

SEQ ID NO: 59441 - DNA, 96 bp, Heterodera glycines
atgacgactgaaggaagagaggagaaggagaagaagacgaatgataataataataatagggacgggggaatggtgctgatggagtggaggaaaaag

SEQ ID NO: 59442 - DNA, 701 bp, Heterodera glycines
atggacaacaccgcaccaaaaaaattcttaacttcccttgaccagcttcaaattccccccgaaattgacaacgacagcgccattcccgactacgcaaaactgcttattaagcagttgcactcgctgctggccaccgcttcgtctctagttcaatctcaagtgacggcgaatgacgcgattgaggaagactgcagacagcgaaccgttgttatcaccaatgtgccggagttccaatcctggaaagcgtcggagcgtggggaggcggacagagcactggtcaatttgattttggacacagtggacctcgaccaaacgccagtggtgttccgtgtcggcatgcgaacgcccaacagagcgagaccgctcaaaatggaatttcccacgcgacatgcggctcggcatgtgctcagaatgaagggcaaagctttggcgttgaatgctctacatggtgcgcgcatcagggaaagcatgaccaaggagcaattggccgaacgccggaaattaattgagcagtgcgcaaagaaaagaaaagaagacgcaggagattggattatctacgcgaatcaggtcatcctgcgcagtgacattgacacaattcgtaaaaatttttaaattttcatgtcaaatcaccaaaaaatcatataaatttttacaaaaaaagtttttgctttttccggttggtagaaaatttttataaaaaa

SEQ ID NO: 59443 - DNA, 1568 bp, Heterodera glycines
atgcattctgcagctggaacatcgagttcaaacttcaattggtctaagtatttggaaggaatttttttatgtttaataatctttttggttgaatccgattgggttttggctggagacattgtgagtattctaatttaattttctctaaaaatttatccagatgtaacgttaaatattattaccatatacattgtatcacaagctttactgactcacattaaaccggacacgctaaagcatcttcacatttataacattttttttagatgaatgactcctaaggaatagaatttagcttaaatgggcagaagtttgagaaaaagcaaaattttttaaatttttcaccccgggaaccgttgtcggacccggaatttaataattccgttttggccggttttgaagaggccgaatgcggataatgtcagcccgatcaaacaaaaaaatttttcaagaagaaagaaataattttttggaatgaattttatggaaaaattttcagcataaaatcttaaaagcttcaaatcaagcgtaaagatcgttttactggtttatttcaacgtattaagtgtgcaaaaattcaggcatttgcctaaaattccatccctcaaaaatagaaatccactggctctattaataactagctttttcaataacgcctcattttgacaacaaacggggctagttgtgattggtctcttctgatccatttccagatcacttcctgtctcttcatataaaaaaattttattgaattggctaatatgcggcaaaaatcaagcaaggcggctatttgttctatcccagcttactgtttgcgtggaattggttgtcgacatattctaattggcgggggtggaggaagtgcaaaaactggagttcccaaccaaattcaggcaatttaaacaaattttcaaatcttttgcgatattagcaattgaaatgataccgaatttagctttttttgcttgggtatgatagcaatttcgaccttcaaaagggaatctatgaatcctctaatcaaatggttgcgcgactgagcgatgttgttgacacaggccaatccgccagcatgaacatggactgcattgcgttgtcggatgagccgtattatggccaattccttattgtagccggccaagatgaggtttttcggggtttttttttttttgctaaaagacacggagaatatggtgaaatttaacgaccgatcgagtccgcttggtcttatctatgactttttaagttctgcgcattgtatgaaacaaaacatttctcgttgtctgaaatggatggtgtggtgaatttcgaccgtcgttttgatgctccgtcgaatttgtcttttaatgtccaagaattggtaagagtacagactgacaagcacccgggcgacgattcttaccaggcaattttattttattagagtaaaaaatttttctatcaattcacaattttactaacaagcaaaacaatggttaggtaattacatgggtactttttaagtttacctaatagattttcttttttggttttaagaaattaatgaaaaataagttttaaggggatcacta

SEQ ID NO: 59444 - DNA, 74 bp, Heterodera glycines
tgccctaccgggaccgggaccgggacctgagcttttcaaaacccgggaccgggaaccgggacaaacacgcactg

SEQ ID NO: 59445 - DNA, 649 bp, Heterodera glycines
atgggagtttgtgccttggacctatttttattcacatgtaccatggagaatgttgaaccaaatgatgacattcagcagaacaatatgatgaacatgttcagtgttgaattcagcaacaaaaataacaacaacacatttgacatgaaaaggcaattgaatgtgcgcgatttgaatattaaaaaaattaccgtaattaaataatagaaaaattaattaatgatattcagctgagcccaatgcagcccagttataagccacgtgcgcttgttttatgtattagccggatttttctctttgaaaaatggcaattgctaattgcatgtctggaagcttatcgtatttttaaagtaattttattggattcatttgaacgcagcaaaaaataaaatgtttgaaaattaaaattcataatttttatttaaaattttgaaaattggaattacactttctgaattatttcaatcattttgcacaggttgacctggttgttgcctatgttcaaagtgccattttatcagttttcgagttgatgcgagcatatgaaaaggatggcatattgaaaattcggcctggcatccgtttcccgcaccatcgcggcatgaaatgggacccaaatgcggaaacggagttggaacaaactaaaaaataa

SEQ ID NO: 59446 - DNA, 1202 bp, Heterodera glycines
atggccgccgcgaccgcaatgcaatcgcaacaacaacagcagcagcaacagcagcaacttgctcaacaggcgaccaccgcggcggccgcgttgcggggcgaccgcgcgagtgcggcggcgattgctgccggcgcatacggtggagtggcggtgagcggcggctatggtggcgcgacgacaagcggcgcattcggcgccgggagcagtggtgccaatgtgaacggaccgccaatggcgacggcgaacgtagtcagtgagggaccatggcacaccttctcatgttcctccccttgtcgagattataattcaaattcattccattttgccaattttaggtcggccaaatggccatcggcaattccgcgctgtcccagctgaacttcttccagcggtccttccagcagcggtttggcaccgatgggctcggcaacggcatgcaaaacggcgtgagcggcactagcggaagggggtcagcaggaaaatgaatgcggaatttgaaacgagacagctgcacacgctaactcataaaacttttggggagatggacatggaaagactcggacttttaccactaattaacggggggtttaagattatatccccatttcaattttttcaaaaatgccgttagtgggattcccataaaacggtgttatattcccggcattgcttgtccccccccctaaatattcctacaattcaattaggtaatttagcagtttatttgtgtgtgttcgtgccacttgatcaattaatgagcactctgatgggtcgttctgttgcttttcagtttcaacatgatcactccgttggaatcaatcaaacacttcagccagaacagccagcagcaacagcagcagccgaacagttcgggcagtacaacagcctccggcaatttctgagtgtcgccggggggcaacactttgcctgaggcaaagtttaagagacgggaaacgaaaatgccaatggaaaatggcaaaaaaaaaaaaaaaagtaaacgacaaaaaaaatgagcagccaaattgtgggccgatctctccgccaatgttaaaaaaaaaaactaccgcactcttcgccatcagctgatgatggacaattgctactgtaatatgtacaaaataagtgaatttatttgcgagaaatttttgagttggaattattagtgaaattttatttaaaaaataattattttttataaatta

SEQ ID NO: 59447 - DNA, 1977 bp, Heterodera glycines
ctcagattttttgtcattttcatttaaacattttttttaattttattcatttccccatcatttatttgtcagctactcaatttgtctcttaattagggcttttaattcgttttaaccacttcttcgtcattttcctcaattcgcttcgcctcaccgcctaattcattgatgcgtttcttcacaccgtttttgccccgtccattgctcttcgtcctcgtcctcctccatttccgctgatgttttccctcatccttttcgtctccctctccctaccgtactttgtgtccaccaaataccgtagtatcagttcgctaccgttttccccgtttcttttctccgtcactgttctcctgccgttgatgcttctccaattcgccacactttcgttggcaaaattgcattattctggtcagtgttttgtttgtttcatttgcgtttgctccctaattgtgccggttctttgccagaacatttctcttctcggccccgtgccgaccatttgctgcaccccctccagcaacagggcggcggcgcctttcacggcgccggcgctgcccaaacgcaccggtgcttttcatgcatgtcgccaatgtacgcggaactgttcaaggacagcgacttgggcaagtcagtgccaacaattatcaacagctgcttaataatgatcaaaaccaaaggatttaattacatatttatggcaccgattgacaataaaatggagaacagatcatctgctttgctgaagatttcagtttttaggcatttctacgaaccgaaaaacttcagtgccaaatgcgacgatccaatggagcccacgggcattgggacggtgccatgccgtggcatttgcctgacactttcacaagaattcattataatgggtacggtagtgggagggataacaaacatgtaaatttatattggttgatttttgggtcgtaaaacgggtaaacgattgacaatgcgcggctgtgctagcactctttcgcggcatggctatcacaacagaaccatcgcattctttgccgagttcgacctgtgcagagaagtgggcatttaaaggggcaaaaacatttctaattttaattatctaaaaattattttaaaattacagcagctttaagctaattaaataatctcaaaaacatattttttgagaaaattaattagtgttaatcatttgcatttttgaaatgccaaatttgctttttggttaattttcactttgtttcccaggtcctcgcctccgaactgttccggctcaccagtgagtcgtccagtgaggagatttactacggcggcggcggatttatggccatgggcggcccaatgaatccgatggatggccaacccgtgcaggtgaattttgggcaaaaatgcaaccgggattggcacagaaaatatagtgccataaaaatgcaaatttccagagtaaaagttgattcaatccaaaagtaataattaattccccatctgtgtattggtcattccgcaacaaatgccacttaaaattatcctaacttttcttgaaaacaatcaaattaaacatctctctaatattcatctattaacgatagatttaaaatattaatgataaaacctcaaaaatgaaattttgttcccataaaaagtaggcacaaattaaaaattgtttttttatgatcatatttttcttgatgtatttcttaagttttatatatcaaactgaaacacttggacctgtcaaatgatccaagaagtttttaatatttcaagaaaagttatcacaattttatttttttgaaaaagttgagggttttacgaaaacaattcggcacgaccccttcaaacaaatctgtcctccaataaataccttctaaatttgcttaggtgtgcagctgtttgggcgacaaatgcaacaagcaaatgagcagcggaagtgccgtcgtcgtccgtcggcatttctttttcgtcggaatggcacccgtcctttacgcc

SEQ ID NO: 59448 - DNA, 1562 bp, Heterodera glycines
atgaatccatcccttcggcattctttcagcatcgaaaacattttaacaaaaagcgtaaattttgaggccttttctgagtaagtccgaaatgaaattgtttacaaaattttgtctgaattattaggcaagaatttgccaacaaatctctccaacaattttcgccatcttttctattctcgtgagatttgtttaaaattattatgaaaattggccaaaatattaaggccattgcttccgcaccatttcctcggccgctgttttgacaaagtgccaacatttgtcttagaaccgccgccaaaagcatttccaactgaatttagcagcgcattttttgagcggaataatggagaacgagaaggtgttagaagttagaacactcaaataccgtaacataaatgcaaaaatcccacggtaaacccgtaaaatacggtaaagcacagtaatcgtaaggaataagctgactgctggacgcttaaaatgctgaaagcgataagatccataaaaagaaagagcggatgtgcctcgatagctcaatggtagagctgcccatgagtgggtggacgagtgggttctattcccacccgatgcctaacattttgccattccttatttaatatatcacctaaagaaatgtaaaatattaatagaaaagtacatttaaattttaatcgattcgtctctctttttgattcgtaattttagtcgaatttgaaataaaaatatttaattttttactttttttaggcatttcgttgtgctcctttttttttggttttctttgtttttttagttgacaggctactttaaaattaattatttttcttgagaaaataatttttttattattatttttttaattatttttttaaatttttttttaaaaatataaaaggaaaagaaaaaagaaaaaaaagataaactaaaaattaaaaatcaagaaaaataattaattttaaagtaaaacactcctcggcaatttaatggaaaaactgaatgaattaattggtcatcttaacaatttccattccatcactgctctgaagtcacattttgcaacacattgataaacaacaaaactggttgaaatcactaatcagcaattgataagccaaaaaatatttgttgaaattcacaaagattggaaaaataagccaacccctgaaaaagtaagagactctcggattaatgggacagtactgtagaaaacagaatgatgggatacggtatctgccaaaaacgggtttgaagataaaataataataaaccgtagttggccacttcacaaaaagggcaaatttggtatcgtgaaaacttattccctggcttatcgtggtcgaagatctcgaacctaacatcattcttataccaaatcctaatcactataagccgaactcaaacaagaagtacaaattcaaatttttagaacttgaatttttgctcaaatttaggttatggatttggaattgtgaactcgatgatgggtttgtgatcattgatcccgaaaaactccaggatcaagatttcatgacttaattttccaaccaccctttgactttaataaa

SEQ ID NO: 59449 - DNA, 1020 bp, Heterodera glycines
atgatatacccgggtataacgaacttcttcaactctttaaacaagaatcccttttaaaacgcagaacaaaaatcgatttaaaacttttccatgatataattttgggaaagatccatattcagcataatgattctttttcaaaaatatattcaggactgaaaaacgattatattataaaaaccgcttattgttcaaccaatgttcggtttcattcgttttttattcgtacctctcgcctctataggagtttgcctaaagaggcgaggttacttaattctactgagtttgctaaacttcttgacacctatgatattgatgttttacttttgaaaccgccccatctcattcagtgaccaattttattttatttattttgttttaatgtcggtgtcacgcttttgcgtataaattgaattgaattgaatatattgcattacaaaaactacacttttccatttttcggtggaagctgacaccagcggaagggggggggaggacaatcgactggcacgagggaggagagaaggggggcgaagaccacccaaacaaacgtaaaaatagcagaaaaagaacgaggggggagacggttgggcagaacgccacgatatagaaaaaagacaagcgtttggattcaatccattggtgttgttgttggttgggtgcgtccgaccgagcaaaggccaaaatgcgatggggagacagaccattttgtggttatgtatttattatttaattttatttgtgctactactttaaattttttttaaattaaaaataaaatttatagctttttagtcgaaaatttggtaaatattattattaattcatagctcccaaactcaaagctcaaaaatggactgaatcaattccaacagttagagcagttttaagtttgggagctatgaatatgatgaatatttaccaaattggctcttgtccgttttctgtatccctgccataattaaagacggattttgagaaatatggcctttttctgcccactaatttccggatataaaa

SEQ ID NO: 59450 - DNA, 533 bp, Heterodera glycines
atttaccgcatttaatgattgaaccgatgaaagagatggcgggatttatcgtgatggtttttcccctcgcccaatttgtcgccatgtttaactggagcaacatggggaaattcatcgccgtggggctgaccgatatactggaaagttcagggcttagcggcatcccggcgtttgtcggtctggcgttgctttcctctttcttatgcatgtttattgccagcggttccgcaatctggtcgattctcgcccccattttcgtaccaatgtttatgctacttggctttcacccggcatttgcgcaaatcctctttcgtattgccgactcatccgtattgcctttagcgccggtatctccttttgttccactgtttcttggattcctgcaacgctacaaaccagacgcgaaactgggtacttactattcgttagtcttgccctatccacttatctttttggtggtatggctgctgatgttgctggcgtggtatcttgtcggtctgccgataggtccgggtatttacccacgtttgtct

SEQ ID NO: 59451 - DNA, 990 bp, Heterodera glycines
gagcacaaaaatcgccgcctgtgcttcgccactctgtccttttgtgagcaactacctgcactatttggggagacgacgcatttgatcatcgacgaggctggacaggcgccatacgtccaaatcctcaacttggtaagccaactcccctgcctaaccaaggtactgatcaccggcgatcgccgccaactgcgtgtccatttgccctccctgccgatcgcaatccgtgagggcttcggcatggacacggtcatccagaacctggatgttgcgcaagggacggacgtcacaacattgtcggtctgttttcgctcacattctgctctggtccgctgcacggaggccggcttttacaaaccgcacggcgagctgttgacaccaggacgtgacgactccgagcgggcactcatgaccgaccaagcggccttcaaattgccgaaaaagggagtccctctaattttggtccatcagagcacgcctgcgcaacgcgacgaagtgtccacttcttcggccaatcctggacaaacagacacggcgatgagagcactgtggcgtttggcgcgggccttcccaggcacactcgtccgctgcatttgcttctacgccgcgcaagccctggagatcgaacggttggtggcccaacaagaaatcccggacattttagtgacaacagcggacgcaacacaggggcacgagtcgtcacttgccgtcgtcgtcacaacatgctccgtcctcgacagtggagccgactcgcagcccttctgggcttatgccgcgcgggtagacgtcgccatctcccgcgccagccatggaatgatcatcatcggcgatttgctgctgctcaaccggacggtgccgtggcggcgctacctggaccaagcgacgactgagacgacagtggtcggcccggagtacttcgacttcgagcagttcaacaaccccgacaactatcacgacaaggacggacagctgatctcggccaacggcggtgcg

SEQ ID NO: 59452 - DNA, 685 bp, Heterodera glycines
cgcatcggttcggggggactgccccgaaaacaaaaaaatcgattttttcaagtgtccgtttggggtactcaaacaattatggggagcaaaaatccaacgcagaattaaagtacaggctatagggaagctattcccgaaggattcggtctccccataaatctgggcgcatcggttcggggggactgccccgaaaacaaaaataaatcgattttttcaagtgtccgtttggggtactcaaacaattatggggagcaaaaatccaacgcagaattaaagtacaggctatagtgaagctattccggaaggattcggtctccccataaatctgggcgcatcggttcagggggactgccccgaaaacccaaaaaaaaattttttggataaaaattatttaaatgaactgactagataatatttaaaataggttatttctcttcctttcagtatccctgcaaagtttggtgcgcttctgatcagtttctgaaaaaaaagttaagcctaaactttttggcctgtttaaaaaggaattaaaaatttttaaaaattttattcatctccctttttgatagaaaaagcatcagagtgcctaaactaacatgtaaataaaatttggtgcgtttcagaaccctttctgaaaaaatatttaagaattaattttgcaaaaaataaataaaaacgaaagact

SEQ ID NO: 59453 - DNA, 312 bp, Heterodera glycines
atgacttaccaactaagctatgtacatcaagatcatgtgattaacaccacccttaaattggtcctactcatctttttccagaaaaattttcataatcccttataaatttctttcgaaaattttcccgattttcagtgtattttggggtgtgcaggtcaccatgaaggagtagtctgatcaagttggtgtaaaatatgttcttttttgatcaatatcaaaatttagcttattgttagcaggataaaattcagcagcagaagcggggaagcaaattgaaactttatttgttttttaccggcataaataattaca

SEQ ID NO: 59454 - DNA, 231 bp, Heterodera glycines
atgcaaaaatccacgagttttgaggttggttgtttaaatcttcgacagttatatatttaaatcataaaaatttaggattggtgccacgagcgcagagtaatgaatgaaagtggcaaagcaaacgcaaatatcgcgaaagagaatgcattgtgcgcggagacgatgaaaaacaaagaagtatctggcaaactcggaggctccagcaaaaagtctgcagttgctgcagaaaag

SEQ ID NO: 59455 - DNA, 64 bp, Heterodera glycines
gtctgaggccgcgaagcggccgaaaaggcccaactaaatttaaaaacgggcgcaaagcgcccgt

SEQ ID NO: 59456 - DNA, 1107 bp, Heterodera glycines
atgaaaaatctcgctcgtcagtatgtctactggcccggaattgacgatcaaattgaagaaatagtccgttcctgccaaacatgtgcttcggaggcaaaagcaccagtaaagactatccttcattcatggccaaaatccgatggcccatggaagcgtgttcacatggactatgcgggaccattctttgggaagatgttcctcgtcattgtagacgcatattccaagtggcccgaaatattcgagatgaattccaccggttcagccgccacgattggtaaattgcgctatctttgcgcacggcatggactgcctgaaacgttggtcaccgataacggtacccaattttcatcgaaggaattcaaggaattcacccgactcaacggcataaaccatttgttttcggcaccttattgtccgatgtcaaacggacaagccgaacggttcgttgacacattcaaacggacgtgtcgcaaattaaagaaggaaggaatcaccgaaatgttgaacacatttttagccacataccatgtcacgccgaatgagtctttgcctgaatgcaaaagcccagcggaactgttcctgcagaggaaactccgatcgacattggaccttttgaaaccaaaaaaccgtatcgtcatccgcgatgaagcaatggagcgtaagttcaatcgacgccatggcgcgaggccgagatcgttcgacttagacgatatggtctacgcccggcatcgactgtcgcaggattggcgacccgggcacatcacccaaaaaaaaggtgtaatgtacgacgtcacttttcaggacggatcagttggacgattccatgcgaaccaacttttggttcgacattctgatgttgatgaggaagatcccctcgacattttgaatgatgcctttggacttccattggcacaggccaatcaacaacttggcgatgttgtggcacaaccagctggaggagtgattgagatagcgccaccatctccgcgtcccgatcagccacagcagctaaacgaggtcaatgaagaacgtgccgttcaacagaatgttcaaaacgaacgaccccagcgaaaccgtcgtccgcctgatcgttattcgcccggatga

SEQ ID NO: 59457 - DNA, 477 bp, Heterodera glycines
atgaaatttgcaaagaaaatgttaatgattcccgaggcggaatatttggctctacggagtgcgatgaatagtggtgattatctccaaaatgaaaaagcgagtttagacgcaaaaatttctcagaatttacaagaccccgacataagcgaggacctcaaggcgaagagacatgattggctctataaagaaagacgtacggtaaaggggatacttgaaaatagaccacagaaggtagtgattgagaatcatgtaccaggtccaaatgttgcaccatatctgggcctcaataaccaatccaaaccacaggagaccgaagaaccacggaaaataattattcctaggaaaagacttgaagagcaaactcctgatcctgaatcagataatgatacacttgaggagttaactccggagccccaaacaacatccacattaaaaacacccattacgatcaaaactattatacacccgaccctttaa

SEQ ID NO: 59458 - DNA, 549 bp, Heterodera glycines
gagtcctcaatgtggtctttggaagtcccagacatagacaattttgaaaccttgagaaacatcatggactcctcaaaacggcaagactatttgccaacaattcaatgggtgaaagcgaatcgaggcgaagacaacgaccgacacgacttgctgtttcgccttcaatgccagcatgtcatccgattgttggaaacaagtaggaaagggcaaggaatggtctaaaaaagtcaaattgtattaactgactatttttggatgggtttctccgaatgttttttgatttgtttagatggtaaaagacaagctttgggttatgtgaaggaaatgcaagacgaagagaaggaaaagtacaaagaagaattggtaaatcgaaaaagaaatgagaaaacttagaaaacgaaaagtcttccagaaacatttgatgttcgtcgtgatgacccacccgcagaagggcccccacgactatttgttcaacgagggccgtcgctttgaattggaatggaaattggccaatgcgataacggactatcgctcttcactgtccacgat

SEQ ID NO: 59459 - DNA, 1323 bp, Heterodera glycines
atgccgcagcgctcacttctcattcttttccatgacactgctggcataacggactttggcagcattgagttgagaaaaccgtaccttcaggttattatcgtaataaaaggatggggaaattcgaatttccttgccaaggactgagtcaccaaaagaattccgacccgtccggggtttagtcttcaatactccaataagaccgtgtaaacaatttagagaaaaataagattcaaaagaacagtccccccccccccacaatacactccctcgagctaagcaattgccattttgaggttgccgatgcctttctgctcgtttattccgttttggaccctttggctttaagtcaaatggaagcgttgaaaaaatatttggagagggaaaagaacggcacgagcaaagaacggaaggaagttgccctttctgtgccaatgccttcaaaaaaatatcccttcccttttcaggtaccaattgccgtggtcggaacaaattgcgaaatgtcgggcaaaaaagtgaacacggaaagtgcacttctctgggcgagtcgtgtgaaaaaggtgggaagatgaataccatttaaatttatgcaattgaattcgaaaaaacgctaaaagggtaaaaatggtttcaatgtgctgaagaattaggccgagaaattcgccaaaaagataaaaaacttattgctgcttcaattgtaggtaattgaaaacaaagcaagtaaaagcttagctaattaaagcttttacttatggtaagattggaaaagagaaacgtaacgttgtttagtcaaactgttcgaagtgtccgcgaatgaccgaaaatcagtcgccgaaattgcgcagcacctcagcgaaagactcatccattcattaagtgggccattaactttgccctttttctgtcggtctttttgcatctcattcacaaccagcgatcaaatttgcaggagagtttcaggcatataaattaacttttttttttttttacttttcatgtcattttctcagttttttcgaatgaaacggcatgaaatacaaaaattaaatgcttaaaaatgcaaaaattggttgcgataatctgttacttttaacagaagactcgaagttctcacttagccggaaactgaagccagagaagtcaaatgcacagattgtgatggacttttaatattaatacattgatttgaccaatgtattttattatttcattatattgagaaaaatggaaatcctgtaagcatttgctccaaataacaaattcggtcaccatattttgctaaatcattatttatttattcaaaattttaaaaaatgcattttcgaa

SEQ ID NO: 59460 - DNA, 1206 bp, Heterodera glycines
gctttttcacgcccgtgttgcccaagccattgagaaaagtcagcagcagcacaaccaaaacaagttcaaccagtccagtgccaaaaagccatgtcacaacattaccaagacgtacaaaagcatggacaacaaaacgaacaacaacaattgcaacaactgagacgacaacaccattaacaacaacagctccaactgttggtgggtgatttgattttaatgattagcccagttttgcagtgcatttcaaaaggacaaattgatgaagcaaaataattggggagtaattaaaggaatgatcagaaggccaagagaggcccgtagccagaaaaaaaaaccggagggggaagccgaacctttttattgttgttcgttttcaggccagaaatttcaaaaaaaaatttttctccagttttgttttcaaaattccaacgccgggaagaaaaagcaggaatttttagccgttttcaccaaaaaatgacaatttttgctatttgcgagtcaaattttcaagaaaaatggtaaaatgagggcccgtcggtgttgataggtgtaaaattttgtaaatttaaagcaatttgtaataagcatgtgcgaattgttttggcaaaaagccaaatggtcttgaaaaatttggacccgatcagagcaattttggaattggcatagaaatctggcgaaatgcactgccatttttagcttttccatcaattttttttttgttgctcgcttttttatcaaaatgttttgtccattttctgttcttttttcttctcttttttgttatgcttcaatttttacataaaatttgttcattttttttcaataattttaaattttttaaaaaactttcgtggtggcactcttttcacgcacagtcgtccactcacattttcattattatttccacataataattgtagctacggaagcgccgaaaatttcaaaatttatttttcgtgttattaatagagcccctggattttgaaaaagtcgggatcggaattcgggattggcatcagattggtgtaggattagcgggattgaaatccttgttttgctcccgattttgtcgggatccagatcccggctcttttttcaaaaaagggccgggatcgagagcctgggaaaaccccggcggtatcccgattcgtgtctgggctctaattactatacaaatattcaaaatcaaaaaactgtgaacacata

SEQ ID NO: 59461 - DNA, 915 bp, Heterodera glycines
atggacgacattaatggttcgaattctcaggccctttctgctgctgaccaacagtcaatcaatgatgatcactccgttaatcaagaacaggacgatggtaaaaaagatttattgcaatattgatttataacaattcttttaaattttgcatacagtattataccgtaccccctcttttcatgggaaaatccaattaaacatggaactaactcattgacaaattaagtttagtagtaaatttatttgcttttagtaatcattcaactctataaattcaggacattttcaatcttttaaattgcttatttttctgagaaattggacattttggagtacaatgaaaaaagaaaaccatgtggaaaatattcagaatttatttaaaataaattgaatatttttaaatggaattacattttcagacatcaacaatgtatacaagcacaaaggccaaattgaatttcggatgaccaatttcaaggcattttcggagggcaccgagccaaaggaagtgctcagtgagccggtggtgtacatgaacggattgccatggcgcattttggccaaacacaacgatgacgcatcatttggcctgttcttatgctgttttggcgacgagacgggttaaaattaatgaaattgacccgatgataattcatttaaaaagaatttgatagataaaatccaaaaatgcccattttgagtataatttgcaaacaagtcgcactaattatacattaattatgtttaatgttttcagacatggcttggaattgcttggccaccaagcagctaagcgttgtgtcatgcgcaaaaagtggacaaaaatgccaaaatgaaaagggaaataccaacgattatgacagatttgatgccaagaaactacgctggggctggggaaaaatttgcaaaatttga

SEQ ID NO: 59462 - DNA, 1563 bp, Heterodera glycines
atgaatgaacaaaaaggcttttacgatgccaacgatgatgcagtcacattcaaagcgcaagtggtcactcaaccgcccaatgggatgccgtaagtgacaaatacagtataccaacttacaatattcggtgtctttgccaaaatttattgcttaacgttagcatttttgatagtttttaaattaataagtaactttttaattgaaacaaaatacaaaattttgcttttagtgggcttcgaactgttgacactttgcgggtcaacggtcaattggtttacgtgaacaaatttgtgagattttatacttaatatttgttttttaatctattctttaattatatatatgctgggtttgctggtgcgggggctttagcctcaatttttcgattttgagaggctattgatgattcttgtcaaaattcggcttttagtggccggacccttttgtattgcgcccctaaaaccctgcttttattttcattattttggtatcatttattcgtttttcatctttttagatgttggctgcctattccaatttttttcgcgaattgttttttggtgacaaaacggcagacattcaaatcgactcaatgaatggcaatgccgtgccgctttttgaacgtttaattgccacaatggaaccgactaatgcagctttggacggtaaaatatgctcaaaagcactttaaattggtgctagtgcgtttcctaaaagcgccattttaataaaaaaattcaaataaataaatgtgcatagaatttatttatttaaaaaaatttgtcgaaattccaaaatttttcaccaattttaattgtttttctagggatgcatttatttttatttcactctttcaagagaagtatttttgtgatttttatctattgtcatttaaaaaaaaaatacgaaaatcttggcacatttaggaaacgcacatggatggcacttttggaaatgcaccagcacgctttaaatttaaaattattactaaaatttcttgaaattttcaaaaattaaattttatgaatgaccacaaaaatttaaatttatgtagaaacctaaatctatgcaattttcagatgattgtgttgaaggcgttctgatgttggccagccaatttctgttggattgtgttaaaaatcgctgtgccagatttttgttggcaaacagccgaaagtcggcaattagcaaattccgattggcccatcagtgcggcatcaccgccatgaaagtccataaaccaattaaatttagtgccaaattaaaaattgattttaaaaattgtacttttttttattatatatcacttagtatctttggaattagcttttattcacagttgcgattctgtcaactttaggcaaaaaaaattgttaatttttccgaaaaaaataaaaattttatatttagaagcaagtgctggatgcgatgaacaaatcagattttgaaattaccggtcgaaattatatggtcgctctttttgatcacaacaaaatggatcgctacgcgttgaaggaattggacgaacggcacaagcaattgtttgccacttcgcctcagtga

SEQ ID NO: 59463 - DNA, 412 bp, Heterodera glycines
atggccactttgattaggagagccatcgaattgggacgcgaacgtacagctgagttggaagaaacgcacgcaacgacttcaatcgctgattggctgaatgttggccaagcagcaacgcaaatcagacagagaagggaaagagtgattggcagagaaatgaaaagaaaagagtgtgtggtagagataaaatgaaaaagaccgagtgtttaaacagaggaaaattaaaggaatttattttatcgataaattttctattttttagaattaaaaacaataaatttgctagcaaattattgtcacaatttaaatgtttatttagagcaaagaaatgctgaagatggttaagctaatgagaattgaaaccaatttaagtaatttaaatggaaatgaaattgaaaatgtcaaaaagtga

SEQ ID NO: 59464 - DNA, 726 bp, Heterodera glycines
gcgcatttgttggaacatttaatccgagtggtccaattaataaagagaaaaatactgttaaaattaattttattaatgcaattgaacaatttatgtacgattatacagtgctaaaggaaaataaaaaggaaagaaaagatgtggaatatttgaaagtagtttttgcaaaatttgcgaagctgtgggatttggctcgtgattttggactaggcaagtattaagacaaaaattattaaggatgaaaatttttaggcaaaaaataaattagaaagttttatcagagggatccactacaaattttcagtaattttcaaactttctgaattttatatggcttaaatttttaaccatactaattaaatgattatgaaaaaatagaatttgaaaaaattcaaatccaaattcaaacagtctatttttttaaaattggctacccgtttttcgcagcaagtgattttatcgtcatgcaagttttttttttcagatttcgcccaaatatgtgctgaaggaaaagaatatgagcaaacgtatgtaaacggaacgccatttgttcgaaatgttcgatatatttttgctaaatgggcagacataaagaaaatggcagttgatacagcaaataatcaagtctctgaacaaagccttgaatttgcatttggcccattgttttggaattacaaaaacaaatttcatggcccaacggcgaaaaaacacagcgtgttgaaggag

SEQ ID NO: 59465 - DNA, 955 bp, Heterodera glycines
atgtcagaaatgggaaccccgaccccaaatgtcagaaatcggaccccgaccccaaatgtcagaaatcggaacccccgaccccaaatgtcagaaatcggaactccgaccccaaaatgtcagaaatcggaaccccgaccccaaatgtcagaaatcggaaccccgaccccaaatgtcagaaatcggaaccccgaccccaaatgtcagaaatcggaaccccgaccccaaatgtcagaaatcggaaccccgaccccaaatgtcagaaatcggaaccccgaccccaaatgtcagaaatcggaaccccgaccccaaatgtcagaaatcggaaccccgaccccaaatgtcagaaatcggaaccccgaccccaaatgtcagaaatcggaaccccgaccccaaatgtcagaaatcggaaccccgaccccaaatgtcagaaatcggaaccccgaccccaaatgtcagaaatcggaaccccgaccccaaatgtcagaaatcggaaccccgaccccaaatgtcagaaatcggaaccccgaccccaaatgtcagaaatcggaaccccgaccccaaatgtcagaaatcggaaccccgaccccaaatgtcagaaatcggaaccccgaccccaaatgtcagaaatcggaaccccgaccccaaatgtcagaaatcggaaccccgaccccaaatgtcagaaatcggaaccccgaccccaaatgtcagaaatcggaaccccgaccccaaatgtcagaaatcggaaccccgaccccaaatgtcagaaatcggaaccccgaccccaaatgtcagaaatcggaaccccgaccccaaatgtcagaaatcggaaccccgaccccaaatgtcagaaatcggaaccccgaccccaaatgtcataaatcggaaccccgaccacaaatgtcaaatatcggaaccccgaccccaattgtcagaaatcgggaccccgaccccaaat

SEQ ID NO: 59466 - DNA, 516 bp, Heterodera glycines
  unsure (1)..(516): unsure at all n locations
atgtttatggaattaaggcttatttcccctaatgttagagaaggtttcccctgtaaggtctacttgttctttttccataaggtaaatatttctttttttttttggagtttctagggggggtttagttttttctttctttaataatatgggtttattaatttgtataatataaataatcaaataaattaaatccaatttatttgttttaagtcgtgctgggtcgtttcgtaaaaagtgccaacttgggaatgtttcgtaaaagtgccaacttgggaatgtttcgtaaaggtgccactgtggtcgttttgtaaaagtgccaactattttattcgattttgataacatataaaatgaatatataaaatatataatttatcaatggcaatttttattttttatctgtgcaaatacgtgtcatccgagtttaatgatggacattttgaactgattaaaacgccaatgaagataaattaaattttttgctaaattattngtgtgataacctttctaaataaa

SEQ ID NO: 59467 - DNA, 594 bp, Heterodera glycines
atggatgttggtcgggtgcgccagctgagcagttacgcgtttaaactttttgtgattgcggtaattcaaatttatgaattttgaatttttcgttattttaaggatgtttttttggaacatgacactgtgttttgggtggacacatcaattgtttttcacaacaacaacactaagccaattttggcttcaattcaaacgggcaaaattggcccagtgcaaatgccgagcagtgagtgtgaacacatgcaaatattgtgctaaaatttttttaacttttagttacttggcatggtactaactttgcaactcatccgggtaaaattatattaatgaaactatgatcatacaacaaatatttattccatttaagaacttcgtataattcgttagttaaaaatcccactgaaaaaaatataatttatttaatatttattcttaaatccaattcaagatcaaatggttgctttaagaatttttcttatgttcggacaatccgtcagtgaaggacaatttgtcagtggacaattcctcatttgttttatcaatgatcaaaatttgcgaaaatcattgttaaatttataatgagaatttaca

SEQ ID NO: 59468 - DNA, 243 bp, Heterodera glycines
atgcatcagactggcgttgtggtggcattgccatttgccatctccatctttttgtccattgccgtgggccgactgttcgaccgtctcatcggcacaaaggcggcgttggttctgctcacatgcgtgttacaggcaagaatggttgatcaaagtttcgggaatgccgatcagtattcgactaatgccaagcccaggaaacgaattcgaacaaaaaaaatttctaaacttcaaactcccgattga

SEQ ID NO: 59469 - DNA, 2217 bp, Heterodera glycines; identical to SEQ ID NO: 5860

SEQ ID NO: 59470 - DNA, 64 bp, Heterodera glycines
aattggcataagtatcggcggtggcattgaccaaaaccatcgacagtccgtctacagtgattcc

SEQ ID NO: 59471 - DNA, 363 bp, Heterodera glycines
atgaaaaatacattctattattttaccatttttaccgtctttagcaatttgcatgtaaaagcattgccgtcaaaagataaagcaggtaatctgtaaatatttattgaactttctctaagttcgtgccggaatgttcaacaattcaattatcattcaaccagggccgtaaatggcgttccaaaagaatttcctgaaatacgaaatccgctggctataccccttatccaatttcataaaagattactaatatccttctcttcaataaatttctaattttaaggcaccagaaatggacaaattgcagattcgttggcagaccaaatggagaaagtgttgaataaaagagaatattcggatgtataa

SEQ ID NO: 59472 - DNA, 748 bp, Heterodera glycines
atggccaaagttcaccatcaaatgccattcttgccgaacatcaagaacaacggaccaccactgattcatcagtcggccagcactgatgctaaacaacacaaacagcaacagaatataatcgccgtcatcgaaaagcacttggagcagtacaccagtgacagcaccaaggaagtgagccaattcgggaatgggccatgtcataggtcatatacggaacaggttttccctggatgggaatgtttcccccgactaaaatgaaacccaaaaatctgatcgaccaaaacgagtgttctgctcgtataatcccccctacaaaaaacaggagcagcacgaggccgagttgtttggtcttggccacattggcgacgacacaccgttggagaagaagcgactgaagcaagcggcgactgacaatgaccgcaacgctggagatgatgcacaggcattggcgagcagtgctgggactaagaatgaacactgtgaagcgctgcacggatggctgagcacttttctcccgctgttatatgtcaacaaactgaacagtttgtgtgccaaacagccgcagtcggagtcgacgcgtttgctcatggcgatgaaggcacaggacgacccgaaggacggaaacgacgacggaactgttgctccgcatgagtcgttgtggaccaagaagcgagcgaccgtggaggaagagatgtgcgagttcggcatccggatggggtgcgcaccttcgatctatgaaatcatatga

SEQ ID NO: 59473 - DNA, 1467 bp, Heterodera glycines
atgaacaaaccgcagccgaactttcactgtcccctctgtggacgatatctttgcgcatcggtgttttccagtgacaatccgctggacccacgcgaacaacaccagccattagtaagtgtgttgattgacaaagttcgtaaccaaaccaagttggaaaggtataaaatttgcaatttaaataccgttggcatttttctttatattatagtacaatgaaacttggtttgtaaaaagtacattaatttgtcccccccccgtttaaaaattctagatttgaagaaattaaaatttttacggtggggggagcgggaacgtaatgaacccattaatttggcgaatgcaaattgagatcgctaatattttttgttctctatcgagttgcccggtggtggaggacgagtgtcgagcccattgtggcgcgaatgtcttcaaaatgtgcaccaactgaaggtcttctttcttctgtctgctaattgccctttaattcactgattattgtaatttatttttatttcgtttttcagaaaagggagtctctgattccgtcgatgcgcaacgtgaagagtatgctgaagcgactgtttggaggcggcggtgttgaaaacggtggcaaagcgagcgccacgaaattggtagtgacagcgcaaaacgacggaccgagcagaaaccatttgatggacattgtcggctcggaggaggaagaaacggtgaagaagaaaaagcggaagttgaacgaagacgaagggaataatgatcagcgggaggaggaagagagtgggaagaaagtgagagtggttgaagagagtgggaagaaagcgagagtggttgaagagagtgggaagggtatggagagagtggaagagagcggcgaaaaggaaggcagagatgtgggagagaatgggctgggcaacgagacgatgggagaatccttgggagaggagggaaaagaagtgaagaaaggagagactgtgggcgatgtgccagcgacgattgaaaacggaaatgggcacgatcagacggaagaggagcagcaaacgaaggctgactgatcgatccgaatagagcgagggaagaaaacagcgcacgcacttacaaataataattagtagtaattgtcctatggttcgttttttgctgtcaattttgggcttttggttacgatgatgattgatcatttttgcctttggttggattaccgtttgtctcttaaaatctcctcttattcgtcgttgattatcctcatttggaaaaacattccgttaattctttttgtttatctgccaacaatacaaatgaactcagttctctgctgtaccctcattctttatttctcatctgataaaataattgtgtgtgatttggtgttaaggaaattggaacacaaatttattgatgcttttcaattatgaaagcaagcacctaaatgccttttaaaaagtgacaaatgaattattggaggcgaataaa

SEQ ID NO: 59474 - DNA, 202 bp, Heterodera glycines
atgcatttctctcttcctctggcgctgctcttcgcccttattttgacgttgtgtaacaatttctgtgacggaatgcgaaggaataacaataaatcattattgaataatttgtcaaaaaatggcaatacggtgccgcgaacgcaaatatccggaataatgaatcgtcaagctggtcaagagcttacgcttggtcaaccagcag

SEQ ID NO: 59475 - DNA, 807 bp, Heterodera glycines
atgcagtcgatggatttgttgcgcgaactcagcgaatattcaggcggaacgcgaagaacaaagcgatgggaagaaaaagcgagagaaattgatcaaacggaggaaggaaaagcgaaaaacgcagcaaatgatcagcaaagtgatcagaacgaagggataccaatcgaagtgatcgtttacccgggaacagcttcacaagaagaagcggagaaaggatatgaaggagaacaaatggaagaggaggaggaagaagaggaggaggagccgaccccggagcaaatggcgcggtggcgtcgacggcgactgctgccgaacgaagtaagcgtgtcaatgaagtgccatctgagcagggctaatcagtgggtcggactcgacaaagtcgtcattctcacttaggtggtcagtgacatttgcgaatttatgagttttgccgagggaagccgactttacacgtcaagcggattatttgttgcgctgttggagccaaatcggaagttgtgcttggcaatggtaagagaagagaagcggaacaaagcggaaaaggaaaaacattttcagtttctgaaaagggtggaagaaactcggcagaaattggacaaaacaattgaggtgaagcgggccaaatggggggagggggacaaatggcacattggcattaaaaggaccttatgaaggggggggggacccaaagggcgaattggcatcagccgatcggcacattgccaaggatggcaccctcaggaaactttaaaggaagtgaatgaacgtcgtcgccatgtcgtacaactgacagaaaacattgggaca

SEQ ID NO: 59476 - DNA, 154 bp, Heterodera glycines
tgccttctccgatgccacttctctgctccaaaccatccaagccaacagcggtggtggtgccgtcggcgtcgtgccattgtcctccccagcggtggacagtgccggcgcaaaatcggcgattctgcagcaacaacaacaggcgcatgcggcgccc

SEQ ID NO: 59477 - DNA, 64 bp, Heterodera glycines; identical to SEQ ID NO: 51065

SEQ ID NO: 59478 - DNA, 456 bp, Heterodera glycines
atgctcatcctcggcctgggacgcacaatgccatggtaagacaaaaaatattttttaatgtttttaatttatttttaaagatttgtttcaaatttttaatgattattcattgaacgggttttattgcataaaagctcaaaaacagcattgttacctgttttctttttaaacagagcgaattttcagtggaggttttttggtacatattttgacgattttttcattttttgcaaaaaaaaaaaaaacttttttggcactcaaattcttggcaaaatgtcactcatgattttattttttaatctaaaaattaagtgaattttttttttaatttgaaactttaacagggcacttggcattccgttgattgatgacaatgtgaaacggcacaaaatgccaatgtattttgccgccatcaacttcttcaaaatcatggggccgtcctgcggatttttgtga

SEQ ID NO: 59479 - DNA, 169 bp, Heterodera glycines
gaggatgatcaacaccaggacagtgccagcaattcaaacacagcaacaaaatcgtcaaaagttgacacaatttcattggagaatattcagcaaaaagaattggacaaacaaatttaatttaaaatttcatatttttgcttttttaatacggtttatttgaaaaaaaata

SEQ ID NO: 59480 - DNA, 933 bp, Heterodera glycines
atggcactcactcttgggcctatccccctgtggcagattcttaggggggcttggccggctgttttgtgtacgcgaaatgtgtgtgtgtttgtgttgattgactcccccgggggcctaaaaggcacacacagacatacacacagagatgaagcaaagcaactcattaggaaggaaggagaagtagaggaaaagcagtgttattggcagagaaagagagagagagggagagataatgcgattggaagaaaggaagggaaggaaagaaaaaatgttgaagcaaagagagtgaaaagcggcgatttacacttgaaaggcaggcaaagaagcatggaagtaagagacagagaaagaatgaaaagaaaaagagagagagagaaaggaggaaaaggagagggaatgggaagaaagtgagtgtgggaagagaggagtagagttgaaaagataacactttaaaggcagacaagcataggaaaagcttaagatatagagaaagagagagagagaaagcggtactttaagcgagagggagtggggaggagagaaaaagagaaaggaaaagaaaaagacaaattagatggaaaattgtgagaaaaggttagagaaacaaaaaggagagaaaaaaggaaacagagaaaaacaatttagcataattaaaaagcatttggttcatctgtctatcaaaagaaaaagtaatttcttccattaagaaggcgatgggagcgtaatttttttcagaaattagaattttttctttttagtgttggtcaagtggattaggtgttgagcaccggagaaatttgctttcgcgggttcaaagccgctttatatttttctgaattaaatttataaagtaattgatcacaaattacacctgtttgactttgtccaaagtgccaacaaaagcaaaatttgagtgagtggccaaacaataaa

SEQ ID NO: 59481 - DNA, 54 bp, Heterodera glycines
atgagaaattcgaaaactctgaaatttcgacttttgttcgaattcgggtccaag

SEQ ID NO: 59482 - DNA, 564 bp, Heterodera glycines
atggacaatgggtcgtatttgttgggggcccagttagaaggttctgacatggatttgatttgttttgtaccaaatgatataaatgtgtacaatttttatggagaaaataaggacagtttgttgagcgcgtttaaaatggttatttaaataagtggaaaaaaattaatttaaattaatttcattttatatttgagaaatccgctttagaatttgcatagtgccaatgtgacattcatttcgggtcgcgtcaaattgatcaaatttgagacaaaattgacggatgttgatctgtcatttgtacctgcaccaaagagttttgttaatttgttaaatgccgattttaaatccgatgaaattgtcaaagaaattaaatttgaatcggcactatactcattagcaggtagcttgaacatatcggataactggattttaaaattacggcgattttctgaattacggaaatctgaaacccgcaattactggggcccaaaatgcataatttccataattcgtaaattttaaatttttattaaaaatttcataaaaaaatcggtgaaaaataaa

SEQ ID NO: 59483 - DNA, 1060 bp, Heterodera glycines
gtctgtgcgtcgtgagcgggtgtttgtgcagggcacatacaccactgactggagaatgtgtttcgttcccggtcttacgtgccgtaactagcggtgtgtttgtgcttgctgctacgtccgtggccgtgatgagacgacgtggtagggcccgtgcttggcctagcacgtggcttaagactcaatgagtgtcagctcgggcaccgccagctttttcttttttttcattatttttttttacacttctgttgaagaatgaattctagtcttatcggtggatcactcggctcgtggatcgatgaagaacgcagccaactgcgataattagtgcgaactgcagaaaccttgaacacaaaacattcgaatgcacattgcgccattggagttacatccattggcacgcctggttcagggtcgttaccataaaatgcactgcttgtgcgttgcttcgtgggatcatgtacttgtacgtgttcttacgttacttgcttagctcggctgtggggttttggtgtgctggcgcgaacttgtggttctaattcgcgttttacggaccgtaactcgggcgcaccaatgctttgcatgctgtggcggagtgcctggattactggcattcctgctttgatttttcgacctgaactcagacgtgaacacccgctgaacttaagcatatcagtaagcggaggaaaagaaactaacgaggattcccgtagtaacggcgagtgaactgggaagagtccagcgctgaatcgcagctcctctgggttgcgaggtgtagcgtatagaccgtgagcttgggttggcccgcttgttcaagtttcccttgaccggggctccagagaaggtgcaagacctgtccaactggcggtgcctatccatctttacgtgtcttggagtcgggttgtttgggatcgcagcccaaatcaggtggtaaacttcatctaagactaaatacggccacgagtccgatagcgaacagtaccgttgaggggaaagttgcaaagcactttgaagagagagtaaaagaggacgtgaaaccgatgaggatggaacggacagagct

SEQ ID NO: 59484 - DNA, 118 bp, Heterodera glycines
  unsure (1)..(118): unsure at all n locations
atgccncagcatctggcccgatgtgcgtgcttattgctcgcacatgccaaagccgtagcactcgtgtgccatgtggaacgtcggggcgcaaaatcacttgtatacgacttgactactg

SEQ ID NO: 59485 - DNA, 430 bp, Heterodera glycines
gattgaaataaatgaaaaaaaagcaaagtcaaagacaaaaccttaaagcactagccgatgaaaataaatggaaaaaaaagcaaagtcaaagacaaaataggaactttatacaaatttaaaaaagtaatatttgatatattgtatatgcatttaatcaaatttctactttctttataaatgttagctaattagtcagcgtctatttattttctgtaaaaatttgcctctttatttaaaattaaattaatataatttcatgaaataagacactaaatgtatagagaatgaattaacgtggtcgattggaataaatggaaaaaaaagcaaagtcaaaacacaaaaccttaaagcactagccgattgaaataaatggaaaaaaaagcaaagtcaaagacaaaaccttaaagcactagccgattgaaataaatgg

SEQ ID NO: 59486 - DNA, 657 bp, Heterodera glycines
atggatctcaccaagcttgaaccctgtctcaaagaatattacttgaactgttacccgtacgatctcattttcaaatggctttcatattcgaatagtgagtgaatttggcatttacttttatggtttcgatgtaatgctttttgtacgtaatacccccaaaagtgtctgcatttattttcctctttcgtattgagtaaattttcagagaaccgtgactatttgtcgaagagggaatttgctttcatcaagggtcaatcccatctccgttttttttcctttgtcgaacccaaagaatttatggttcaattacgcaaaactcctccacaaaaaattgaccttggcgctgtgtacaatcgtccggtaaaaatgcgtacaaaatccggcaaaaaacgcttatttttatatcccaaatcagccgcgtgaccgcgagaaaattggtgatttttttcccgtggaacgggaactcgtctttgacatcgatttgaatgactacgacacaatacgacaatgttgcaagtacgtatttttttttcatggtttacctttgcacatacaacctaaaatgcaatagagccaaatttcttacaaatatttgttttttttcaggggcacaagtgtgtgcaaaaagtgttggcgttggatcacaattgcggttga

SEQ ID NO: 59487 - DNA, 513 bp, Heterodera glycines
atgcgggccaaggcaaaacgagcgaatcgactgagtgccatcagcgaaagactcagtcgcaacgcggcgatgcgaaacgcaaaaagagacgaaaatggggggcaaacagaacagagcaacggaaaaagggacgaggacaagacgaacaccactgaagaggaacagcataaaacagcggagagggggacaaacacgacggcattggcacaattggcaacggagagggggacaaacacgacggcattggcacaattggcaacggagagggggacaaacacgacggcattggcacaattggcaacggagagggggacaaacacgacggcattggcacaattggcaacggagagggggacaaacacgacggcattggcacaattggcaacggagagggggacaaacacgacggcattggcacaattggacccagaatttttccgacgattggtcaccaatgtaatcaaccgaggaggaggaaatgaggagaaaggagcagaggagaaggtcaaaaag

SEQ ID NO: 59488 - DNA, 318 bp, Heterodera glycines
acgggcgcttcgcgcccgttagaggtacaacagcgattagaacacgtacaaaagtgattagaagaggtacaacagtgatcagaagaggtacaacagtgattagaagaggtgcaacagtgattagtagaggtacaaaagtgattagaagaggtacaactgtgattaaaagaggtacaaaagcgattagaagaggttcaacagtgatcagaagaggtacaacagtgattagaagaggtgcaacagtgatgagaagaggtacaacagtgatcagaagaggtacaacagtgatcagaagaggtacaacagtgattagtagag

SEQ ID NO: 59489 - DNA, 2035 bp, Heterodera glycines
atgcctaataaagcgaaaaatttgagaaagaagatgaaagaggaccgaagaccggcggagaaatctgtcagtccaggttgctcacccgtccctgacgggagtgcagatgggaatggggcggcatcgcccaggggcttcaataccccaaacataagtgctctacaattgagcacgccggcttcttccattggaagtaaaagaaggggtagacccccgaaagccagagcggagcctatcacggcttcgcaaaatagtgtgtcaacaattgacattccaattgaatcgtcctctcaaaaggccgatttttcgccggccagcaaaaaagtgaagatcactgatgttggccgagccttggcagttaacgaagcaattgcttcgacgcccactaccacgcaaagaaatcgtggaggacgaccagccaaaaaaagaggtggccatgcaggctcaggcaggagcaaagctaatgactccatgagcgagagctcgtcaatggaccagagctctgaagctacaacatcagtggccgttttgccaactgtgcctgaaaagataaatttcagcacagtgccaattaatttcgccacatcgcgaaatatggcctgcaaaattcggagatgggccgatgttggcctttacgagcgtgatggcgaaacatcacaaggcccacgctctggcccaagattcattgagacctgttggaatgatctgacacagtttctaaatgatgcctttgttgtcgagtatttggcatacttggcaagtatatcacaacgaaaagtggtcgttgttgatccagttgtatggcaaatgggcattgaccgtgtcattcaatataaaaatatgacatttgggtatgacgctaatgttccggcagaagtcatacttttgccagtacatttccctggacattggactctaattgtccatgatgttcaatgtggtactcattttgccgactctttgcctaccccatatggcagattggatgtgcaactgacggacaaaattataaagatcatttctgacattttgccgtccacaatgttgaccgggattgttgatgtccaaaatcttacggcccaacacgatggaaatagctgcgggtactttgtgtgcctgtatgctgaatcatggcttatgaacaaccgcacatttgttctgccagatttatccatcaattatgaaaaaaagcgcattttgtggcacatcaatgagctgtatggctctgataatgtgccatatcatccaagggaaggggtgccaactccttgcccaattgtctaccgacatgcggatgaagcgcagtcgacatccaaggccgttgagtcaatggaagttgatgacaatgatgacataatgatcatcgaaccacagacaagtggacaggctgctaatgccattctcacccaagcccaagtggctggtgaaaaccaagttgactcgcttgggttggtgtcggagtcttgcgcaccgcaagagcctattgcgcaggctgacgatgtaatatttgtcagacctaagacgcctacaaggcgatcagtgcgcataggtagacggcagtctgcttcgattagccgttctccttcacctgcaccgaagcgtcgcacatcggaaaatgtacctggacaagttacacggttcactaaacggtgtcatcttgtgcacaagggttggtgctgtgctgccgcagcagcaaaacattttccggaatactccgattctggtaaacttggcgaaaaaaaatgcgctcattgtggggcactgctctttccgcatgaggacagcagccattgttgtcgacagggaagggttgttttgccaaagcttaacccgcacccaaaagagcttgaagagctcatcgtctgcgacaaacaaccccgcgaagggaaggagtttgttcggaatatgtcgcgttacaacaatttgctccagtttgcgagtgtttcggctggaaataagccatgccctgcaggcggaccgatggcagtaattctcaacggagaattccatcgccgcataagcagtatgcaggctg

SEQ ID NO: 59490 - DNA, 2496 bp, Heterodera glycines
atgtcaaaatctgcgagttttgaggttatttaatcattcagtagatatatatttaaattataaaatataggaatggtgccatgagcgcagaacattgaatgatgggggcaagtcaaacgtaaagatcccgaatgagaatgcattaagcgaggagatgacaaaaacaaaaaaacattctggcaaattcggcgtttccagcaaaaagattgcagttactgcagaaaaggtgtacttatatgtacacttccttcaataaatttaaattaaggatcaagcaagcagacgaaacaagaatgccgagaaaaatgttgacgaaaatgttgttcttgaagtgttggatgcagcaaccatggagccgttgtcttcacagactgcagcagcgattgaagcagatgcgagaattatcatcacaaaggcgaagaaaggaaaaaagagagaacaaaagattgcaaatcggagtcaaaccaagaagcttagagcaacaacagaaaaaacacctaatgccgtgcctgaagaaaaccttggtacatccactgaattcgaaaagaaaaagactcgcagttatgaaagcggatggaaaaaatatccaaaaggtttgagtcgaaaatgttgtattttttaattaaaattattagaaaaagacgaaccagcgccaaggaaatcaggaacgcagccagcaaacttcaggatttggaaaaaataagactgcagttaacgtgaaaactgacggacaaaataaccaaaaggttagcattaactcaagaaaccgataaggcttcagaatctctgcgtataatgacgaatcccatcccactaagcactattatggggatgaatccatcctcctaagatttattggggggaatggataccatccccctaaacactcttatgggggatggggatccatccccctaaacactcttatggggatggatcccatccccctaaacgttggcattaaatttattaaatacttagaaatacaacaatcagcgtcgacgacgattcaataaggaacgccgacagcaaaaaattttgtcgcaagaaaatcgtggaaaaaggctgcagcaagaatctcacgatagccagattcagagccgagggcgtcagtggcagcgtggtggaagactgcagcctcacggcgttcctaatgagaacatgaatgctccatgttcggctaaatatgtgtttaatttgaatttgagctgattcggaaattttattttgaaattattttgatatacattaactttaaagcaaaacacatggaaaacttaaccgatgagcaaattattcgtgctacattgagccgaaccgttgcattggtcgtgttgcaggaaagaaacgagactgcaggctgtttaaaaaaggttcctcaatatgctaatggattccgttaccctaaacgctctcatgggatggttactatacctctaaacagttttaagaggaagattaccatccccctaaagaatcttaagggaaaaattctatccccataaacactctcatagggacggatcccatcaccctaaacgctctcatggagatggttactatcccgctaatcagttttaagaggatgatccctcccactataggaaatcaatgcagctaaatcaaagctcagtgatgaacaaattgtgcgcgcaactgttaatcgtttggtcgcgcacgtactttacgaggaaacaatgaagactgcagaagcgaagaaacgtaaaaaccaagaaactgctcaagattgcaatacgcaaaagatgcgaaaatcaaatatttaattgaaatttgttttgctatttatttgctgttaaaattttaatgatccagtatttatctagacacactcttatggggatggtcccatccccttaaacactcttatggggatggctcccatccccttaaacactcttatggggatggtccgatccccttaaacactcttatggggatggctccatccccttaaacactcttatggggatggtcccatccccttaaacactcatatggggatggtcccaggtattttaggacgctgatcacgaatctgtaatcagatttccgtttggatttcggtaaagcctcagaatccctgcgtatagtagtgatgaatcccatccccttaaacactcttatggggatggtcccatccccttaaacactcttatggggatggtcccatccccttaaacactcttatggggatagataccatccccttaaacactcttatggggatggtcccatccccttaaacactcttatggggatggctcgcatccaaaaataagactgcagttaacgtgaaagctgacggacaaaataccgaaaaggttagcattaatttaggacaccggtaagggctcagaatccctgcgtataatgacgattttggttgggtttactaagaaacattttagttatttagttttttcttataaaacgttcttaaaagtatcagtctttttaaatgtttttactaataaa

SEQ ID NO: 59491 - DNA, 300 bp, Heterodera glycines
ctcttcgggaaagcctcagaatccctgcgtatagtgatgaatcctatgatggacaccatccccataccgtttgctatggggatggctaccatccccataccgtttgctagagggatggccaccatcccataccgtttgctaggaggatggacaacatccccataccgtttgctagggggatggccaccatccccataccgtttgctatggggatggctaccatccgcataccgtttgctagagggatggccaccatccccataccgtttgctaggaggatggacaacatccccatactaa

SEQ ID NO: 59492 - DNA, 1041 bp, Heterodera glycines
atgcatctgaacacgggattggaggaagaccttctgaaattggccaccaaaaatttgccaataaaatttcatgatttgattttggcaaccaaaaacgacgctttattgaaaaacgtcgttcaattcgtccaaaaaggttggccaaacgacaaagatttgggtcaagaagaggaaatcgtccgattgtttcaccgaagaaaggatgatttgtcaatcctcaaagattgcttgatgtatggcgaaagagtggtgataccgaagatttttcagagcaaaattcttcacctctttcataaaggccatccaggaatgaagagaatgaagcaattggcacgtcaatatgtattttggccaaagatggaccaaaacattgaagaatttgtccaaaaatgtgagccttgccaagcagctgcgaaggcgcacgtcaaagtgaaccttcattcgtggccgaagtcatccgagccctggcaaagaattcatatcgactatgccgggccattttacggaaaaatgttcctaattgtggtggattcattttcaaaatacccagaagtatttgaaatgacaacatcttcggccacggcaacgctcgacaaattgcgttatttgtttacgcgccacggcatccctgaaacgattgtttcagacaatggaactcagttttcgagttcagaatttgccaaattcacagcagccaatggcatcacccatctcttttctgcgccctacaacccaatgtcaaatgggcaggcagaaagatttgtggacacatttaagcgggctttccgaaaattgaagggggaaggaatgccgaatcaagagatcattgaaacgtttctgatcacctacagaacaacgccgaatgattcggttccaaattcaaagtccccagctgaaatgctgctcggacgaaagcccaggaccacatttgatttgttgaagccgccgccattcagaccattgattcgggatttggcgatggaagagaaattcaacaaaagatttggcacaaaaccacggaaatttggaattgatgataag

SEQ ID NO: 59493 - DNA, 1193 bp, Heterodera glycines
atgaggggagggcaaatggtcacaaatacaatcaatagaatgtgtctgacagtgaaaggtcagacacaacaaataaatggaaatgaaacaaattaaataaataaatgtcttatcgggttccacccgaacaatttttaatatttattatattctttaaagaacattttcaagaattgttaccaaataaatttgggaaaattgtttggaaaactcgtaaatccttttttgacccccttttacaggagtggaaaatgcgattggtgactttcctttttattacacatttaaatatgaacgaaatagtggagaagatggaaatgaatgtaaatataaccatgtagacgcaaaagatgctgagttagaggaacatttgtcattttaccatgacaatggcaaagatgaaaagttggcgatacttttgaggtcgtattataatgagaagaaagagttggaggagcgcgaaaaaaattttgcgcaggtgaacagtttgaacgacttgagggcagtattgagggcgcatgataatcggcacaaaggattggctgagcaagaatattatgagcaggtgatcaatcaacaacatatgttcggtttcttgcaccccatttcggagggaaacttggagaggcaaaaagtgatttatgacgctgcgaaaaatgagttggacgcgtacatgacgaagatgaagggccaattagagggacagcacaaacaactcgaaaatgatgatgatgaatttagttcgaagattaagcaaattgagggacagccagagcagtccgaaaaggatgatgacgaattgaattcgaatatgaaacaaattgaggagaagcagcccgaacaatcagtgataatgaagtacatccgaaaaattgcgaagaaactgaagacttgtatgaaagggcatgtcaaaaatggaggagataacagtaatgagaaatgtgaggattagatgcaaaatatgagccatggagacaactattgtctcttgtctcgggggttcctgatcagtctcggcggcaatattgcatagagaggggaaatttcaaatttgcggtcccgctgcgggattagaactcctaaattttgcgggaagggatcccgcagttataaatcacgcaaaatcccgcatttaaaatttacgggaccccgagcgggattgcgggattttggaaatttgcaaaaatttaaaa

SEQ ID NO: 59494 - DNA, 102 bp, Heterodera glycines
ttgctctcctccgccgtcctccgacttatttatttgttattttaatttgtcatcaataaattatttatttgttcgtccattcgacatttcgaggaccgaaca

SEQ ID NO: 59495 - DNA, 174 bp, Heterodera glycines
atgcaacagaaaagcggagaagcaaacgatgggcacacacaacgccaatcggacggagcaaaagcaacgaaatcaaatgacggagtcaccgattgttgtcgcacgacaacaacaaacgcaacagagccaattcaacggggcacaattcgacacgcaatcattgcaaagtcgaag

SEQ ID NO: 59496 - DNA, 328 bp, Heterodera glycines
atggccagggccattcctcagttttgtcccgttattttctctcttttgctcggggattattttggtaagtctcgcggaaaacaaaaagcgaaagttaagcggacggaacggaacaaccaattgtttccggcccattcattcattcgcattcacgttcaattcattcattgttggtgatggtcgtgctgtgaaactttcagcgcaacaacaaaaagagagagagagggaagagaaaaagagcaatccgcttaatgtgcgagagagtgcatggggaagagaaggagagcaagaaaagaatgaggaagagagaaaaggagcagagaaatag

SEQ ID NO: 59497 - DNA, 56 bp, Heterodera glycines; identical to SEQ ID NO: 52733

SEQ ID NO: 59498 - DNA, 326 bp, Heterodera glycines
atggaccaagaaatgagtgcgggaattcaacaaagccgtccttctggaaagatcaatcatgaaatcttgatggaggagacgcgtcgaattccaattttaggcgaagtcgttggccaattacgaaatatttatggttcttcgttagccgagcagttcaaaaagtacagaaaaaatatgaataaattatgattaccaacctatttagcgaactcattatcgccagccaacttaatcgtggaccgatgaataatgggatcagcaacccgcacatggacatgcttcttggtgttgatgagaaaattagcgatcttttgcaccaattgtaa

SEQ ID NO: 59499 - DNA, 69 bp, Heterodera glycines
atggttttggacccgaaatcgaaagacaaggcgcgggaactcggttcctaccgcgatatgcggttcgag

SEQ ID NO: 59500 - DNA, 472 bp, Heterodera glycines
atggacaccgccaaattttgtgcgactgatcagtttgaaaagtttttggcaacgggacgtcaacgattgcaaagagaatgtgccgaattgaaaagccaaaagctggtcagtgcactttttgaacggaagcgcaagcgcgacaatgagatggcactgctcgctgacgaagtggatcagctcaagttcgaactggtcattaaggtagatgggaaaaaattaattaattgttatttgctatttaaaataattaaaacaaaattaatcatagaaaaagttgaccacaaaatgaatatagcacaagcaaattaggaaaattaaagcaagtgcctgaataattgaaaatttgggcatagttaattgtctcaggtgcaaatgacttgtacacggattagaataattgttttccgtaaatttttgtagataatgatttgaagtttaagaattttttttttaagtaaaatttgtaaataaa

SEQ ID NO: 59501 - DNA, 146 bp, Heterodera glycines; identical to SEQ ID NO: 56264

SEQ ID NO: 59502 - DNA, 146 bp, Heterodera glycines; identical to SEQ ID NO: 56264

SEQ ID NO: 59503 - DNA, 146 bp, Heterodera glycines; identical to SEQ ID NO: 56264

SEQ ID NO: 59504 - DNA, 146 bp, Heterodera glycines; identical to SEQ ID NO: 56264

SEQ ID NO: 59505 - DNA, 61 bp, Heterodera glycines
atggctatctctttttttgagaaattttctatgcaacaaacgctctcgaacatgaaacgaa

SEQ ID NO: 59506 - DNA, 146 bp, Heterodera glycines; identical to SEQ ID NO: 56264

SEQ ID NO: 59507 - DNA, 146 bp, Heterodera glycines; identical to SEQ ID NO: 56264

SEQ ID NO: 59508 - DNA, 146 bp, Heterodera glycines; identical to SEQ ID NO: 56264

SEQ ID NO: 59509 - DNA, 144 bp, Heterodera glycines
atggctatctctttttttgagaaatttctatgcaacaaacgctctcgaaacatgaacgaagtgcggtgcgccatggccattttatttttcaaataattttatatttaatagatattccagaaaaatggctatctctttttttga

SEQ ID NO: 59510 - DNA, 146 bp, Heterodera glycines; identical to SEQ ID NO: 56264

SEQ ID NO: 59511 - DNA, 146 bp, Heterodera glycines; identical to SEQ ID NO: 56264

SEQ ID NO: 59512 - DNA, 146 bp, Heterodera glycines; identical to SEQ ID NO: 56264

SEQ ID NO: 59513 - DNA, 272 bp, Heterodera glycines
atgaatatgctgcatccttttcatttacatggcacaaaattttatgtgttaaaagttggcacaatggaacccgaatatggattaaattcggatgtgcaatgtgccggtgtaaaataaattttattaattggcgccaatatttttttttaatatacaaatattaaggacgattgtttggagatgaaatggtcaaatataagctactccaacggaaacataccacatttgaagaaggtattactattcttataaaatttacgatgaataaataa

SEQ ID NO: 59514 - DNA, 549 bp, Heterodera glycines
atgaactcgacaaaaagaccacttgagaaaaataaaaaagattcaattaaaagcataacaaaggaaaggaagttggaactgagaaatatagctgagaatggacaaattgaaaatgaaaataaagaggaggaagaaagtgaccaattgagtgaagaaggagaagaatctgacgatggagaagtgatgccagaaattgaggacggaaatgaccaatctgaggaaatggccaagttggacttcgaattcgaggctttgcccccggcggaggacgacttggatgacattgaaaggcttctaattcaagtggacacgcaaaagactcatttccgacattgtttaaattttagatatttctacaagcggaggtcgacgaaagggaaatggcaaaagcggtggtcggccagtcgcccatgggctgtgtgttcagaccgaccgaagaaagtgaggacgacgaaagcgaagcgatcacttacggcgtcctttccattgtgccattgaacggaactcaggcaaatttgggaaggcaattcgaaaaaaaaatcaaattat

SEQ ID NO: 59515 - DNA, 728 bp, Heterodera glycines
atgttagcacagaataatgaggacaaaaagggaactgggtaaaaaatggataaaaaaattaaagtgattaaattaaattgttattttagtgtttttcctttccaaattattcaaatcgacggaaaagggaagcatttgtgggttgaattattaaaccaaatcaaatttcgaacaaaagaaatatattggttagtatataatttgaattgttttaataaatgaattaaatttattctattaattctttatatcttcagaaaattttaattttattctcaaattctccgaactcacattgacatatgaacaaatttacaaagtgcttgaaataattatgggcaaaagcaaagaaaaaacgaattcgcctccaatttacgaatttataaagaaagaattaaaatattttttaactaaatcggattcatcttcatcatcattaaggcatgtaattgcaagcatataaaaacaaaatatgagtttaatttgatgcttttcagccactaatttacgaaataaatctttgtctattaatttttaaaaattccagtacaaaattggactgcgcataaatcaattttggacgagagttgtcaaaacgtttaccatttaattttgaggaatataatgaatatgtcgagaaaaatagagaacattgcggcacagatgagcatgttgaaaattactattcaatagaaaatacaccggcaattgggtacggtaattataca

SEQ ID NO: 59516 - DNA, 833 bp, Heterodera glycines
atgggcaacaatgttttgatgatgaccacatttgcgaacagcagtgtgtgggacagagtgacgtgagttgtggcaatgaatgatttatcacacctttttaattggcacaattaattaattatattttcgtttaatttttcacttttttattgctcaaatttattggtgatttttcattacatattattttgctttttagagtaacagttgtggccaattcttcccaacatcgccaaattagcaatctctccaatttgttcggcgcttccctctctttggcaccaaatcctccgcaaatgtgcgcatttgatggaaaactcctctagtagcgtttttaaattaatttgtgaattgccatttagggtcgaagtgaacaaagtccaaccctggtactacggccttatgaacatccgacccggacttaccggcaaagacgggaatgagcttcaaagtgaatatattatgccttacaaaaatggagtgccggcaattaaagcggtgagaaaaatttaattgattagtttaattggaattttttacaattaattaaatgaaagttaaatgaaatgtcattccaaatttaggtctcatcacttcaccaacaaatccaacctctgctcaatggctttgtgatcagaacagtgaaaggggacgacctttggctgtccatgagcaacggagacggaccaatggtcgcccttcacttcagttgggcggagagcagaccaaccaaagtgaacgccgtacttgcccaaattgagagggtaagcgaacgaatcagccgacggacagaagagtttctgatcagacaagtggagaaaggggcacactga

SEQ ID NO: 59517 - DNA, 365 bp, Heterodera glycines
atgtcgaaggaaaataccctcaccggggaggaaattttatagtaagaaaaaaatagaaattttcttaaaaatttagaaattcatttaaagacaatccgtaatttccagcatcagaagtttgttcgtggttgacaatgaaaaacaatttataatttcaaattttatgctttcaaattcatgtgactttaaattttaaatctgtaaaatattcttttaataattttgttgtatcaatttctgccgcttaaaaatgctccgattcgaatatattttcatttataaaattgttcctgaatttgtgcgtaggatccaatttctcagccaattttctaaatttacgaattttataaattaattttaataaa

SEQ ID NO: 59518 - DNA, 1677 bp, Heterodera glycines
atggtcaggatttcgtgcctttttgtggttgcgacttattgtctcaatgggctgcttctcagcacgacaattatggcaaatagcgatgaggaaacggagacgaaaatgccagcaaaaagaccacgaaagcaaaaagaaaccccggattattatttaagtagttatttgccaactgattattcccgtagctcatcttcggcagagccagacaattcatcggacgaagattggaacgcaaaagaagaagcggacacgaaggacgaagaatcacccaatgtttcgttggccaattcatcgtcatcagctgctgatgagaagcaattgctgggccacaaagtgacggttcaaaatcgaccaaaaacgggacaatcggttcaaaataagccaaaaaagcaaaaatcggttgaaagttctccggaggacaatgaaaacattgaaagattaaaagcggaagtgcaagaattgatgagaaaatccaaagcaaaagcagcagcaggggtcggcagcagcaaaacaaaaacgaatcttcaaacgtcgaaaagtttcaaagaaagtggggacagaggcaaagggaaaggcaaaacaacagaagaaacaggcgaaccatcgaaaaaaatgaaaaaagcgacgaaaggcaaagtgccaaaaaaacaaacatcgtttgatgatcttaatatttcggaaattttggcaaatttggataactcatcatcggacgaagtggtctcgaagagtaattggcacaatgctaattaatcaataattaattaattggccatttcagaaagtaaagccccagcaaattcaagcaaaagtttgaaattgagttcgccgtctaaaaataaacagaaacagaagcaaaattcaagcgacgaaagtgtggaaataatcacacctgtgaaaaaggaacggatgcaaaagagtaaatgctcaattaaaaagtataattagtgattaattgtcattttaagaaggcaaaggagtgaaagtggagaagccaacagcgagtgaaaatgcaaaagcaatggaaacgttgaacattaacgccggtaggataagcggtgctatgacgttagtcaaaaaccatcataatgggcgttagtcaaaaaaccatcaaatgaaaatattttttgatataattttgctcaaaagcatctaaatttttaattcttgatatcattcgataggcctaagggttttctattagcctacaaaatttcaaaaaatttcgttaagtttcaagaaagttatgactaaaatcaaaaaaacttggttttttgagcttctcaggtcataacttttttaaacttaaagaatttttttttaaatttgcaggataatagaaaacacttaggattatcgaaaaatatcaatattataaaatttgatccattttagacgaaattatgaataattttctgtcaaaaattattcatttgatgtttttttgactaacgcccattttgatggtttttgactaacgtcccagcaccggataagcgccataataattcaaagacttctttcttgagagcgaatacgatgccaaatccgaattattatgattgctagcaaaggcacagccaaagccttggttttttttgggggggggggggctaattgcaagcccattaacaaaggataggtaacccaagtgactatgggactttcgaacta

SEQ ID NO: 59519 - DNA, 690 bp, Heterodera glycines
atgcatgacttgttcaactcgttcatcattggccaattgtctgctgccaatggcactgatggttccatgtcccaaccatcagacccaatgacgcataatcaaaatcgactggtggaaacgaactttgccaagttcagcagggagacaaatcaagcaaataatcaccgtggcggcacctcaaaacaacaaacaaaatccatgtcgtcaaaatctgaggaaaaaatgctgtggccctccactaatcagccgaacggtgtgccattggacatggacaaagtgcgactgttcagcaacgcaattgccttcattgccatggaatttgttgcttcttcttcggagagtcgggcggaactctacacgtgcaaatgcttatcggataatgagatggagaagaaaattttcggccccaacggcgccattctttcgcatttaaacgcgtcgtttttaaattcggcacaaaaaaagcgccaatttctgaaactgttgttttcgttcggctcaattttgagcactgaaacagcccaaattagaggtgcaaaacaaaaagtgaaggtcaacgcaattgtaaaggcatatgaatgtgcgggaataaataggtaaaaagcgaaacaattaaagtaaaatgaatttaataggggaaattggtacttttctgttttgagacccccccccctgaaattttcaaataaa

SEQ ID NO: 59520 - DNA, 77 bp, Heterodera glycines
atgcggagccctccggctattccgcgctcattttgttcagcggcaaaggccaaagtccgattccaatgtcccggcag

SEQ ID NO: 59521 - DNA, 182 bp, Heterodera glycines
  unsure (1)..(182): unsure at all n locations
gctaggttcgatgaaactttttaaaatataagcctaaactttttggcctgtttaaaaaggaattaaaaatttttanaatatttattcatctcccttttgatagaaaaagcatcagagagccttatttaacttttaattaacatttggtgcgtttcagagcactttctgaaaaaatacttatg

SEQ ID NO: 59522 - DNA, 801 bp, Heterodera glycines
atgaattttaaaaccgccgggggattgggaaataaaattaacgaagcattcagccatcattacaaaatcaaaaaacaacgtggaaagagagaagccaaggctgaagataccaaagactcaaaaattgatgtcgcaaagagggccgcagaacgcgccgggagagacgtagaaagacattttaatcagatcaacaatatctcgaattccatccaaacccaactaaacacactaagagaaacaaatcctcacattttagaagagcctgatataaaaatttggtttgacaaaatggttgagatgggaaccgaaattcaaacatctcgaaatgaacttaagtcttttcaagaagaagtagataaagccaaaaacacaacattggagcatgtggaaaagaatgacttgaaaaaagcaaagaaatcagccgacgtcgcaaagggaatcgccagacaggcaaagaccaaatatacatcaactctcgagggatataatgataaatcggaaaagggttttagcgggatagtgaataggcttaatgaggcgctcggtgagcatattaaacgtaaagatattgaaaatagacaagtatctgaagctgagaaaggaccacaaaaaagagagagactagccaatgaggatgttcaatttcaatatgacagcattgatcaaaaatttattgtctatctttccgctgctgtctcccacatagatttgtcaaaacacctcgcctatgtgcttggttttaagaacacaaggctatttcacgcggaagaggcgaattatatgccagatttgacgggaggt

SEQ ID NO: 59523 - DNA, 1131 bp, Heterodera glycines
gccttccccaccgcgtgcataacattagcatccatccgctttaccaaattgtgcacagcgcttacgacgccgcactgattaggtgatttggcattgaatctttttttcgttttaccgaaatgattttaggatttcgcccgtctcaaaattcggggacagtgtttggccaatttgcttgccaacttttcccgcatctgtgaaccgtacggaatgcaaatttaaaaaaatgcatttgatttgtattttttgcatttatttttttatttaaaatgattttttgcctttttatcggcacagaaattaaaatttgctgaaaataaaccctaatcactgctcaaattagggatgtgtgtggtcaccgggtggggtcgactggcggagggcggcaaaagaccccaaaatctgcgcgaaattcacgtgccaataatgcgatcgacgacatgcaacggagttagtcattatgcgggtactgtaacacagcaattgaactaatttgattacccctaattgatacggtaataggccgattgcactacccatcgatgctttgtgccggtttcaatgccggaaaggccgacgcgtgccaaggggacagcggcggtccgctgcaatgccaaaatgcaaaaaatatttgggaacttcaggcattttttgagaaaaaaattaattaattattcaaaatattatttttgcaaaaatgttaatttaattttaatatatttctaaagaatcacatgggttttatattattcaattaaaatttttaaaaataattttcatcatttaattttagtgataattatctgaaaagtgttcattccttccttctctttggcagggcatcgtcagttggggcatcggttgcgcaaatccgaaattccccggcgtttacacaaagtgaaccatttacaaataagtagagtgccacgggaccgggaattttgggcaaacccgggaccttttcgggttgaaaacccgggaatttttggctgggaaaaccgggaaaaaaccgggactaggtccggtccaaaccgggaccttggtactcagtaaacaattcacgagcatatttttcacagaacgtttgtcatttccccgtggattcgggcggaaatgctccgtctgaaaacg

SEQ ID NO: 59524 - DNA, 1388 bp, Heterodera glycines
atgcgtccattcgattccgttgacaccgaattcggtccccgggcgggcgacgacgacacttcgctggtcatttcccgctgggctttgcagtgcattcggatgattgcgggcgacgatgccaaaatgacgacgatgaaaacggtgaatgccgattcgccggagcaaatttcgccaacggatgctgcgaattccatctttctgaatccgtgtgagtcttttctttcgggtgggtgcgtaatttattttttgtttttgacttttcgacggtacttttcggttttgggatttcgctttcaattattgcaattatgcccccaaccttgtttatcttttaaaatttcgagaaataggcccaaaatcgaaaaaaaaaatttttgtttttttttcatttaattttattcgcctttcagcgattgctcttggcaatggcaatgccttcccactttttcaacaaatgcaaaaggccaaacgaattcggtatgcttttagttgtttcattgaatgcctttcctttcttctttagcactgcgttcagtccgtctcaactcgtcaaactcgagcaggcattcaatggaagtcaatatttggtgggaagtgagcggaaagtgttggccaaacaattggcactgtccgaaacgcaggtgaaaaaaagggataggcaaaacgaattaattgcaaactttggcatttattgtttcttaaatggcattgctttgtttccttacaaaagtgaaattcgaccccttgtttcatttcgtttcattttcaccgtttccttccaatgtcggcacaatttaattacccatttactatggtaatgatatttgctgtatgggcgtgccattcccagcggcactatcatttgggaaatggagtgacgaaaatgggctcaattagtgctctgccacgcggcacacaaacaaaatatgcacacactgcgccaaattggcccgcacagattcagtttcggtggctaagtaaaggaaacggacggcacggacattttggggactaataaatgcaaatgtttgtgttaccttaatggctcttatgagctcattcattgtcagtaattgaacccgctttcgttgtcaaaacattaaataaaatgccatcttttggctgcaaaaatacgacggaatgagcgaatttatgggaagaaaccaaaattgaatttcatttgttcaggtgaaggtttggttccagaacagacggaccaaaagcaaaagggtgagagacttggtttgagttgcacaaaaaagttgcattttggggcaatttgcagttggacaacggggagatgatgccatcgaaaagaggtgccgaagaagaaagcgaacgcggcacaaaacggaaggaaacggcgcaaaacacatcgaatgaaacga

SEQ ID NO: 59525 - DNA, 432 bp, Heterodera glycines
atgactttggttggcagcattgcgcttctgctcattctgttcatcgtcttcctggcagttttgcttcgaatgaatttgaacaaaaaagaaaatcgtggtcattgtaagttaatttgagacaaaaaataaatttaaacagttaaatttgattgttcttcaaaattcaggtgtgaagaacgaggaagtgagaatggcactttttattactttaattaattaattactcatctgttttagcacaataataccatcgaattgccaaacattgaacaacatcgccacccgttgcagagttatacgaacgtcccctttttcaattgagaagattattcttgcccttgatttttatttttgtcagaccaatattcgaaaatttttgaatttcaagataaatctgaatagacaatcaaatgtttataatttttaattaaa

SEQ ID NO: 59526 - DNA, 187 bp, Heterodera glycines
atgggaaaacggcacggtgtacacttatgcccgcttgacattcagacaggggtaaatgaacaaaaaaaattattttaaaaagtaagaaaattaatttcagagaaatcaaccgcaaaacagtgatttcctgcgaagtgcaacacccggaaacgaacacaaatttacgcaactcaatcactttgggtga

SEQ ID NO: 59527 - DNA, 3239 bp, Heterodera glycines
atgcaggcaattctaacacaaaagaaccgtacaaagcttcaacacaacgggcattcatacatttttcacaagctgagtgctgaaggtgaagttcgcttttggtcgtgtgaacaccatcacgcaaaagacatccgttgcaaagggcgccttcacactaacctcaacaacaacgttttgcgtgaagttggaaaccaccaatgtgaaccaagtgcagctcgaatggaagcgcaacgagtgatcactaaaatcaaacgccgggcggaacagacaatggaaccaccagcgacaattcgctctttgtcactgcagaatgtggccacgccagtacttccgcaactccctaccaagaatgcgatcaaaaaagttttttctcttttttttgttatgagatttttgtgcttaggtaatcaagcgtgtacgtcatgaaataaacgcaccaccgccaattccaaacacgctcacagacttaatcatcccagacgcatacaaaatgtatgggcgcaccgaagaacaaactgaacaatttttgttagccgattcgggagtttaccaagagaacgggagagaacagcggtaaaacacatgcgcactttttattatttaaatcgaaatttagaatactgatatttggacgtgagtcgaatggtcggtgggcgaatgaaatgaaagagtgtttcgccgacggcaccttcagcatcacaccgatgcctttccaacaagtgtacgcaattttggcacggtaagaaatttaaacaatttaacaattttgaacttattatttaagtcggaatcgctggtcatcccagtgtgctactgcatgctgtccaacaaaacgcacactacatacgagcgtatgtttcgtatgctcgttgctgtgtggccagacttcaacccggacagcgtgtcgatagacttcgagacagcggcaatcactgcgctgaatgtagtcttcccattcactgaagtgcgcggatgtctgttccacctcgtccaaaattttcacaaaaaaatttctgaatttgggctgaaacaggttgaattcatgacaaaaaaaaatcgaattttcgaaaattttagcgctatcaaaatgacccgacattcgcagaaatggcacgatgtgtcacgtcgctcgcgtttctcccaattggagatttgacccctggaatcattgctctggacatggctcttcccgacgaacttactcccgtccttgactggtaaattgacgatctcacaaattgtttactatttattgttctttaattatatattaggttcatcatgaactacacgggtcgtcttaagcatgatggaaaccgaacacgcccgcgatttgacccaaacatttggagtgtttacactcgaacattgcaaggcgatgaccggacgaataaccattcagaagccgcgaacagacgcctacaatgcgcatttgcctgttcacatccatcgatttggcatttcattgaccttctgcgaaaggatcaaaagttatcagatgatgacttcgcgaagtgttcaactggacaagaaccaccgcaaaaggcaaagaaatatcgtgaagcagaccgccgaattctcacgatggttcaaaattatttgccacttaacaacgcagacaccaacattttcccaattcatcaccctttcaatcatcattttattattacatttttgatcggaatttctcgaaattatgaaatgagaccgtgatttgaaaaataaattttttaaaattttcttggatttttaatttcactgtctttttaaacttttggtatggaaatggcccaaatgcattgggtagggaattggcggtagggaatcggccggtagggaattggctggtagggaattggcggtagggaattgggtcgatcccccaaaattcattttttgatttacgagatgaggtcagcccagcacggcagatttggaaaatccgatctctaagaaaaaccaaaaatatgcaaacatataagtgccaacttttgttggcaatcacaaaaaaatttcctcttattttttgagatatttatttgaattaaaattttactatttagtacaatgcatcgctcgtatttaatgcgaagaccgaatgacgaagatgacagttatgattatggagaacaggatctcgttcgagccaaacccatcgatgctcggttttcgagaaatttgggtccaacatatgcgggaggaaaggatttcgttcgtgcaagcgaacattcgcaaaaacaattttatggcagtcaaatggttgtgggaagtgagagccaacagcacaatgaggaatttggagaaggaacttcaaaagaggccgacgacaaaagcagccgaccgatgacacacgacgaacggaacaaaatcagcgccagcattttgaaggcggaacttcgaggagacattgtaacggaaaaaaaacattttttttgaatacttggcaacaaagcaaactttaggagcgcgtcaaaaagttgaaaagaaaactcgaggaaggcattgtggaaaatgaaaatggaggaaatgggaaggacgaagagggagaaggaagagaacggaggagagaagtactgttgcttagcatggacaaacggagcggtgtggtgatgccggccaaaggaccgcaaaaggtaagcgaagcaattggttgggagagtataatggcgacattcgtcgggataaaatgaataaacgtttaggagaaaaattgttttaggcattggtttcagtcgtttcgatattgtggcgaaaaaaattgagataatatactggaattgtaagaaataatcgaaagcttcattctatttaaagaatcgcaatgagccctcagagaaacgacggattgggaccgttgacgaggaattcggcaaacacatggaactcagccaaatggtcgcagaagagaagacaaccacggcggagcaacaaattgcaatgtttaaccgttctgcaaaggtaaattgccaaatgtataaaaaatattataaatattttaatatcagtaatttaaaatttaaaagattttcattgaaactcggcttatggcaaagcggagttcatgcaaatttcatttttttcctttctgttaatgttttcatgatctctaggtttgttccgatagtaaaactgatgacgattgggttgtggacgacaacatgatgagtcatcccaaaaagcggcgtcatgaagagaaggaaatagtcaggaagaagcgcaacatggtggaaggtgggtaa

SEQ ID NO: 59528 - DNA, 905 bp, Heterodera glycines
caattttacattctgcttaacgtgttagcttcaactggctttgttttctgtacaacagaatggttcggagacctcagagcccatatgaatcctccgaaatttcctccgttttatgacatcgtatacgacgaaccaggcattgttcatttaggatatcataaaaaggaaaaagaataatctattgcagattgtccatttgggcttgaaagtgtggccatccccgagtttgtgtactttggggaaatgattgcaactaaatttgttcaagagcattcacaatgtctgcagttttgcttggaaacctcaaagtgcaaagctgtgaatttctttgaatcgatcgaaggaaaagtcagttgttcctgtgttctatcaaaaacattttaacaattcagaatcccgaagtcggtttctgtgaactgttggtcgaaggccagtatgacaacccacgactgatgcgacctttcaaaaaagcaacttaccatgaaaaaattcactgccgagctgaaaacgaagaggaaaaacagccattcatttttgatgagaaggagggcaagcaattgctaattggaaacgaaagtaacgaacgcaaaaacacgtcgtcgacagcgaaacaaaccgaaaaagggacaaatgaaaacggacaaaagacaaccgcggaaaatcggcaaagtgaaggaagaatgaacgagcaacggagccaaaaaacaacggaaaaacagccgagaagagaagaacaaagtggaggtcgaaaaacggagacaaaggaagaaacggcacaaaaatcggaaacgcaggaaaaggcaacggaaccaccgacagcacaattaaattcactgattctcaaaagacttgcggaaagaattcaagaactcaaaaagcggttcagaaattgacaaatgaggaac

SEQ ID NO: 59529 - DNA, 1295 bp, Heterodera glycines
taattaaatccattccttcgggggaccgtgccgggtgccgcggggtaagcagtgctggttcgtttcatcacggcaccgaaccttttggctagtcagcaatcgttgcttaacttgccagatcggacgggtgcgcatgattccactgttccaagcaccccaccaaaagcaaaacgatataaccaaaatataaggaaaaattttttaaaacattttttctccatcttcctttttgatactaaagcatcagagtgctaaaattaagttgtaaataaaatttggtgcgctttagagcactttctgaaaaaaatatttatgaaacaaaaaaatcgattttttcaagtgtccgtttggggtactcaaacaattatggggagcaaaaatccaacgcagaattaaagtacaggctatagggaagctattcccgaaggattcggtctccccataaatctgggcgcatcggttcggggggactgccccgaaacaaaaaaatcgattttttcaagtgtccgtttggggtactcaaacaattatggggagcaaaaatccaacgcagaattaaagtacaggctatagggaagctattccggaaggattcggtctccccataaatctgggcgcatcggttcggggggactgccccgaaaacaaaaaaatcgattttttcaagtgtccgtttggggtactcaaacaattatggggagcaaaaatccaacgcagaattaaagtacaggctatagggaagctattccggaaggattcggtctccccataaatctgggcgcatcggttcggggggactgccccgaaaacaaaaaaatcgattttttcaagtgtccgtttggggtactcaaacaattatggggagcaaaaatccaacgcagaattaaagtacaggctatagggaagctattcccgaaggattcggtctccccataaatctgggcgcatcggttcggggggactgccccgaaaacaaaaataaatcgattttttcaagtgtccgtttggggtactcaaacaattatggggagcaaaaatccaacgcagaattaaagtacaggctatagggaagctattccggaaggattcggtctccccataaatctgggcgcatcggttcagggggactgccccgaaaacccaaaaaaaaattttttggataaaaattatttaaatgaactgactagataatatttaaaataggttatttctcttcctgtcagtatccctgcaaagtttggtgcgcttctgatcagggggagaaaaaaaagttaagcctaaactttttggcctgt

SEQ ID NO: 59530 - DNA, 156 bp, Heterodera glycines
accgtcgccgggtcaatgtccgagcggacgaagtgcaaattggccatccattcttcgtcctcctccaaagttttgcagtgactgctcatcaaaatgggctttgcttctgtctcgtcgccttccttttatttattaagcttggattttgactaaaag

SEQ ID NO: 59531 - DNA, 769 bp, Heterodera glycines
tgaagagtcgtctgcttcggctaatgaagaagtatcaacatccgatgacccagcatcaaccactgaagagtcgtcagcatcggctaatgaagaagcatcaacatccgatgacccagcatcaaccactgaagagtcgtctgcttcggctaatgaggatgacccagcatcaaccactgaagagtcgtcagcatcggctaatgaagaagtgtcaatatccgatgacccagcatcaaccactgaagagtcgtctgcttcggctaatgaagaagcatcaacatccgatgaagagtcgtctgcttcggctaatgaagaagcatcaacatccgatgaagagtcgtctgcttcggctaatgaagaagtatcaacatccgatgacccagcatcaaccactgaagagtcgtcagcatcggctaatgaagaagcatcaacatccgatgacccagcatcaaccactgaagagtcgtctgcttcggctaatgaggatgacccagcatcaaccactgaagagtcgtcagcatcggctaatgaagaagtgtcaatatccgatgacccagcatcaaccactgaagagtcgtcagcatcggctaatgaagaagcatcaacatccgatgacccagcatcaaccactgaagagtcgtctgcttcggctaatgaggatgacccagcatcaaccactgaagagtcgtcagcatcggctaatgaagaagtgtcaatatccgatgacccagcatcaaccactgaagagtcgtcagcatcggctaatgaagaa

SEQ ID NO: 59532 - DNA, 772 bp, Heterodera glycines
ctatgaaaattttgaaaaatttgccgtttcttctctttcaactgttattactgacttgtttaggatctcattagacattggttcacttccagacatctggaaagaatcaattgtttttccgctttttaaaaagggtgacaaaaataatcccgaaaactataggccaatttcattaacctgctcactctgcagggtaatggaaagaattttaagcaaaaatatttacaattttctattaaaaaacaaaaaaatttcggaatttcaatttggttttgttagaaataggtctacaacgagtcaactaataacagttgtggaagattggtacgaggcaataataaatggaaaaaatgttgtgtatttatattgattttcaaaaagcatttgactcagtgccccatgaattacttttatacaaattggaaaaaataggtataaggggcaaacttttgatgtggataaaggactttttgagtaataggacttttcgtgttaaaattgtggaggatttatcctccagtaaaaaagttggctctggcgtcccccagggctctgtccttggacctttattatttttgatttatattaacgatcttcctgatgctttgtcatcaggagtaagaattaaattatatgctgatgatgttaaattgtatatttgttataaagcaagaaccgaaacagaaattatgcataaagcattgcataatttatcagaataggcaaataaatggcagatcataatctcaattaaaaaaacttttgtacttca

SEQ ID NO: 59533 - DNA, 1937 bp, Heterodera glycines
atgactttggtcaagactacagtggaagcattgaaacaactccagacctcttttacctccgaccaaatgccaatttttaataccctaattaccactttgtcctctcaaattgacctgcttaatggatcgatttcccaactccgctccactgctctctccactgaaggcatgccaatttcagcggaggaattggaaagacagagaagtgtcgtcattattggcatgccagagcacaacgacagttcaccagcaaagcgggcagagatggaccggtcaaaaatcaattgcttattcgattcgctggggatcgaatgcggtaccattgcctatcgcatgggtcgttcctttaacccagcccaaaaaagtcctcgcccattgaaaattctcttgccttcccgtggcttccaaaaacaggctctcgctgcatggcaaaaaaaacaaaacaccattcgggctgctgattcgtctctgcaccatgtccgtctccgtgaatcgctgacaaaggcacaattggaggaacgccgtcgcctgcatttgcaatgcgttgaaaaacgacagaaagatgggcaagattggattgtgtatgctgggaacgttattttgagagatgaagtgcacatcttccggagtcagtcaattcgtgaatcaaatttttaaattttacaccaaatcacaaaaaaaaacaaaacacttttacaaaaagagtagattacactttccggtcggaagaagaaaattcttaccaaaatataaataattctaattcactaccactaaacaaaggggatattaattctttagaaggttttatctgttgcttaactaatattcgctctataatgaacaaaactgatgaaatttcactggctttaataaataaaaaaattagcatattattactcacagagacatggacaaaagacaatgagggaattcctcttagcccatggattaaggagaattataattatatttttgcatcaagaaaatccgaaaacagttcacgtggaggtggttgtggtattttaatcaaaaatgagatagccttttttgtaaaattttctggtacaaaatttaattgtgaaattttaattattcaattacaaaatctgaaatcaataagatttgcattgatttaccggcctcccaaaaccactttaaaacatacaaaagaactttttaaatttatacaaacattttagtgtgaaaattatataatcttaggagatctaaatttgtcaaatcgagaattggtatggaggcaaggccaaccacacgctataaatcatattggtgaaatattttgcgacttttttaataaatttacatttataaatgccacgaatgagcccactaggggtaaatcatggttggatttgatcttatcagcaaatgataaaattgtaaaacattgtactgttgaaggtggcatattttcatcagatcatttagcacagctttttgtgctgagtgttccagaaataagagcaaagcctaaagaaatttgcctaagacggtttactccgtctaatgtatcacatttaaatgctgtaatttctgctagattaagttctctttctctttcacattttagtataaatgaaaaatgccgtgccttcaatagcgccttgttgaatgccttgaacgagtgtattccaataaaaaaattactaaaaaaagatttagctccaaaatatccacaacatttattggcatccattaaagaagaggcaaaattatatagacagtgtaaaattgatccaacaaaaaaagcactttatgatagcattactttacatataaaaatccaaaccaaaaaaatacataatttaattgaacataaggctatttaaaagggaaaaaattcaatttttaaatacattcaaaaacacaatgtcaatccctttgaaataccaaatttagtttttgaaaataaa

SEQ ID NO: 59534 - DNA, 1004 bp, Heterodera glycines
atgccggattgtgcgcaaagttttgccgggcaaaatgaggcgctgaaaaagcattacaacgatcatggtcgctatgagcctgatcaacacaaattgttttcaatggcaccagtcattgttcatggggatttttggtaaattaaatttaattatttaactttttaatttatattttttcaaattatgcaatttgtaggtcaaataacatgtttttcaagacgtgcaatggacaaagtgttgctgatcaactgagtgctgtgttcgactggcaaatttgtcacactggtcaattaggaataaattagtgcttttaaattaaaatagaaaatacaataatctttctggctgtaataaaatacagtgatcctttctgactgtaggcaccggtgtcaacgatttgttgcgcatcatttacgtcagtgtcgatgcaccgctgagacgagttcattttgacgattggttggcattgtactgttccgaactgcactctgtcctggcacagcttggcaaagtggtgacataatttaaataagcggggttaacgaatttttttttgtgggttagatgataaaattttaaaaatttattttattttatttttgatttttgcaacaaatttattttttcttattttaatgaacaaaaatattcctttctccatttatgtaaaattactttaccaattaataaaattttcatttttacttctctgatcatttttaacagctatgataaaaattaaatctcactcaattttttaaattaattttattaccctgcaattaaccaattaaatttttgagttttctcttgcccagattcatcctgatcaacatcgatcactggaattgatcagacaaatggtggcccatcaaaatggctacgagctgtgctttcaattgtttttgatcaccaacattctcggcactgttcaacaacagaacgaacagaaaagggcgaaactgatcaaacggatgagagaattatatgatgatatctgttaa

SEQ ID NO: 59535 - DNA, 298 bp, Heterodera glycines
  unsure (1)..(298): unsure at all n locations
atgactagatcaggacagactcaaaaaccatttaagaccagagcattaattgcattagttagttcaaccacttttgctaattatagagactttctagttaaggatgtggaagaaaggttcgaataaaatattatggtttataaaattggcattcactttntcgtcanagtcaagttcggctntaagcgtgaacgagtccaccaattcncctgggcaagcacaggcataatgcgtggaaatgtgcaaggccacggatggcacttccgacctagaaaaaaaaatgctggcattttgtaaa

SEQ ID NO: 59536 - DNA, 1526 bp, Heterodera glycines
  unsure (1)..(1526): unsure at all n locations
atgcctttggacaatttggacagtgccattgatcagtcccatgccgattttaccgttggctatgtgttggataaattagccactgttggcaaactgggcccatccgccggcttggccaatgtcgaaaatgcacaatttgtccagctgagcaccggcggctttttgtccgacatttatcgcattcaaattcaattcaaacaagcggatgacaccgaagaagccacaacgccaacggcattttcatgcattttcaaagttggccaattgtcaaattatttaaacaaaaaattattttgaaaaaaaaatttttcaggtgcctacatcacgacgtttggatatgcatactggaagcgagaaggctaaggtgaagcgaatgttttttaatttttatatgatctacagggctgggctttaactccgttattacggttcgggttttaaaaaaaacaaaaaaattaattaacaaaattcttaaaatcatggcatgggaagaggaggagtcggtcacaattagggccaggagagatcgtttcgattttccagagatcctgatcccaatcccggcctttttgaaaaaaattgcatgattatgatcccgataagaaccaaatttgaatcctgatatcctatctcggcctgatccccaattccggtcttgatctcgacttttttttttaaaactttcccaattaatttgcatgcaaaaattactggataatcaatcagttatttttggccattaaataattaaaacaaatttgttggttgaaaatatttcatgaaaatgagactcagttgttaaaaaatcaaatttttcatgtcaaaatttgtaggaagacatgaagatgtggatgtacacggtgcacaattcggagtgccacttttacgccacggttgtgccgttgttgcgtgccatgcccgtgccgttgccctttcacattcccgagctgtacgcgtgccgaaacgcggcatcgccggactgtttggcgggcggctatttgttgatggaagacgttgccggggatggcatcatcgaaactgatctgagtgaaggtctaaccaaagaacaggtggtgacaaaactattttttgttgtttttacggtaacatgcccaagtaattaatttggataccgtatttactgaattaaagctccgggggctctgtttttaaccccctatttcagagggcagttcctatgtaattcattaaattcggtaatatatttattttttgtccattttcacatattttaggttaattttccagacaaaaaagtttaggttggttttccaggacaaaaaagattttggttgattttccaggacaaaaactaatcgatactattggatcaataaaatattcaagatttgaatctcatttacaaactggacaaaaaaacaatttaatttacaaaatgccagcatttttttttctaggtcggaagtgccatccgtggccttgcacatttccacgcattatgcctgtgcttgcccaggngaattggtggactcgttcacgcttan

SEQ ID NO: 59537 - DNA, 782 bp, Heterodera glycines
atggcaatgctaatggacaataatgaagaatgccgcagcatcattttttataaactgtatgtatgataatagaatttttaatcaattaagtaattaaggcaaaaattgggttttatttgccagaattttagtggcgggcgcgcgaggcgtacataaagggcgagaaaacattcattttgagcattgtgtaaatgctagagtaggtcggaaccgcgaatttcattttttttttggcaattttacaaaaaaaatttttcagaaatttgtgggaaaaaatccatttggcttttattgcagttgcgagctatatgtatacctaactgtatattctatataaatcaagcccagcagcaggaggatctatttttcaatccccctcgaaaggggaattttatttcgtgggaggggggggggctctaatttaggaggggggggggggggggaggttaggaaatacggcaattgttaaactaatttttataaatttgctatcagactttgaaagcgcctgacaagtgttttttagcctataaaattcgtaaaaaattttttttttctaaattctcgtaaaaaacctacaaattacgccttttcgaacttttttgcagacgcatgcatttttttttttgtcaagacttgatgactggatcgcttttggtttttgcatacatataaatgcgcatcacacacagatgcgtttgtgttaaaccctttttgcttccgcgtgggtggtggtggcggattatcgcaaaaagtgcggcgacagcggcgaagcaaataaa

SEQ ID NO: 59538 - DNA, 1216 bp, Heterodera glycines
atgagcgacggggagagacggaagctgcaccaggcgatgggcgagctgaagaggagcggagagtttgacagattcaacgaccagcacagacaggcaaacaatggaattgagtgactgaactgatccaaacattcactgagaaattgccatccataggccaaaagttgaccaatcgataattggccaaaagttgatcaatcgataactctaagcactaacaattaatcgttatataggctcctatctgaagcaaagtgtgtgcatttgctaattggtctgtcatttctcaggtcggcgtttcctccggcgctcattcgggccccggctttttgccgttccatcgcgagttcatcaaacggtttgaaattgcgcttcgtctggtcgacccgtcgttgtcactgccttattgggattctgtgctcgactcgtatttgcccaacccggccgattcggtcattttcactccacagtttatgggggaaactgatcagctgggaaacgttgtgagcggaccttttgcgggatggcgcactttggaggggcgggcgaatattttgcggttggaattggcaaaaattgaaaaaattgagcaatcatttgaagatggcccggggcggaaggacgtgtgatcgacggagaacgacgtgaacagcgtgttcgggacagacccaaatcgaacaagtgttggcttatacggcaccacaacaaagtgaaagcatcgggccggggggagggcaccgccggacgaatcgaacggcaaagaatggccgaccgatcagtggaaaaccgaaaaaaaccattgatccgttcgttccctttcaccattctcccgatcaccacccgcttctccctcaaccgattgatcacttcctcagattgtccctaccagcccaacttcggtgcgcttgaatattcacattcccaagtccatttgttcgtcggcggcgatatgaaaccgccaactttggcagcgaacgaccccattttctacgtccatcgtaatttaatattttatggacgaaaagccattgataaaaaacgactaaacccattgattaagactcattcattgacttggtctgggaacagtggcggcagctacgacagacgagatggacaagagaacaggtggaacagacagaaaacaatggaaaagcaatccaagctgatgaccaatccaatcactgatcccaataaatcaatgttaagagactga

SEQ ID NO: 59539 - DNA, 1588 bp, Heterodera glycines
aggtcaagaaaagcagagcgtgttcggacaatcaggcgttttataatttcagatttatactttctagatgccaaatttgcctatcttcaggaagtgacaatgccaaactttgtgcgttcgtttctttgctaattacccttaatgagttcctcccttacagatgctcgtaatttacccggatggccttgtatttaaaacgttaaggtgtttattaatccatttttgcttcttttattaccctaataattaaggatcgacgtgactctctcctgcaacatggacttgcaggttgggagcaaaaggcaagcaccaaaactgaacggcacattccgccgccattcagctgttcccattcgatcgtcaggagtgtccaatggtcatccaaccgttcgcttacatcgaaaatttggtgaacctcagttggcacgtggacccaccgtactacccggtacggtggctttgctttcagttttggatttcctacgtaacatttaatcataagaacagatcacgaccaatccggagctgaaacttaacgacatggtcatcacggggatgcgcttcgagcggtgcacgagtccgtacactcttttcaggggcattggtcagtcagtgcgcgtcgttcgtcggcatttcatccccccccctttccctcccctcaaggggtttggtcgtgcctgcgcggttacatcgtaatgaaacggctcgtcctcttccacctcatccaaacgtacatcccaagcggtacagtaccaccgtattcccatgctcgcattacggtgtccgtccccttttgttggttgtcctcttcatgttcagccatgttagtctccgtttcgtggatgactttttggttggacccccgggcatcgcccgcgcgcattacccttacaatcacaaggcattcattgttctatttttaatgatatttattacataataaagcatttttagtctgctgactttgaccacaatgtctaacggagtgccttttttttattttatttttaaatattttgtaaaataaattaattaattttttaaattaggccagacaagacttgccacaagtcagttacatcaaagcaatggacatttggcaaacgttctcccaagtgactgcctttgaagtgccaattctccccaatttgccctttttaggcactgattttccttgtactgctcgaatattcgttcgtctcttatttcttctcacgacggtcctttgactgtgctcaccgaattttacgcagcgaaagtgccgggaaaatgaaaaagcaaaaggaggaaaggattacagcagaagatgaggaaaagcagatggaagaaggggagaaagaggatcattattattatcataatcaacaaaatgatggaacaaaaacaatggaaatggtaagagaaatgatgggaacagaaagagagtgggagaggaagaaagagacagattgggaaaagagacgaacatttaaagagtaaattgatcagagagagagagagagagagtggggtagagagagaaagacaaagagagagagagaaattgagatgcaaattttagagagaattgatcagagagtgtgaagag

SEQ ID NO: 59540 - DNA, 563 bp, Heterodera glycines
atggaaattcatgctcattttaagtcatttaaaatcacagtctacgtagatcttgctgggtttgatcacgattttacaaaaatcttgatcattcaaataaaaaatgattttttttaaatcattttccattttttaccaaaaaaattcgttgtttttaaaaatatttttcataatttttttttatagacaattgaacgtgaaattgacggatggtgaaagcaactttgcctacaatgttttgttgatggaacggtaaatttgaatttttattttttgaaaataccaaaaagaaaatttaatttaatgattaactattttttcaaattatatttcatttatttgccaataatttttcataaaatttaatgtccattttccagtctttgtccaatggtcaataaaatgggagtagctgcaaacaaaagcaacctgatcatgcagccacttgagtaaatcttatttaaaatctaaatccttaaatattgcttagagaatactttagtgtgtgtggtttaaaacaatttttgatatatttttaattaaatttagtataagataataaa

SEQ ID NO: 59541 - DNA, 588 bp, Heterodera glycines
atgtcatttcctaccaaagaagctgcaattaatgaaattggccaactgtcgactgaccagcagaaaagttagaaaacaattaattaaataatttaaatgaaatggggggatttgacttttgccatttcggttctgctcatttgaaactgaattttttttttctttttttaaattattttgaaaattttatttttcgatgctattcaattatgtttcagcttctgcatcaaaacgtccccgaagccaaaacgacgccggggccgagacggcggtgccgaaacgtcctcggggccaaaacgatttggccgaaaactcagttgctacagaaacagaaacaaataatggagttgaccatttgctggcgactgatcagcaccaaagttggaaattaattcaaaatttgaggattaattttaaattatctgtgccaatttggcgttgaaaatggcattttaaacaaatcctaagtttcaaaaattgtaactacaaaagcccacaaaaagtctaattgttcaaatgttgtgaaaattactaaaaaaatcaattaagttttgcatgctaatagagagcaaccaaggctttcgaaca

SEQ ID NO: 59542 - DNA, 1057 bp, Heterodera glycines
atggaatcgaattttgttgcatttaacaacaatattactgatcagaacaacgaagataacgatgataaagctgacaatcatgcaaagcaatcaaaggaaatgctgaaagagagccaaagtgaagcagaaacatcgtcgaaagaagaagcgaaaaatgaattggaggaaacggagaaggaagaaagaaagcaaaagtcagttggaagtgaatgtgagcagcaaaaagcgatgagtgactcctccgaagagtccggccgtgaacactttcctctggtcgaacatttggactgttccccgctttaccgcgacccgaccttcgctgaactgtgttccttcttcaacatgttcactccgatgttcggctttaagcccctttccttttcaaaattagagaatatgttctgcactttggtagaaggcgatggtttgttgtaattgcatttttttatttgttaaaacattgcttcagcaactcgcgagctgattgatcttcacataacgctaatgcgaaaaatctatttgaagtcggctcgggcggataaatgggaacaatcgctgctgaaattttgtgcaattgccccgggattggacgcagaattccggcagctgcagcgaaacacttacggaaacattccgatgggctcaaaactcgctgtaatgaaagccctttgtgacagccaattcgattacaatctgaagttcaaagaaaatgtgcggccattcattcagttgttgctgcttttctacaacattttttcagattgccaattcttttcggcacaacgaacttcgtctggcgccgattggcactgacaaacgcggccaaatgtactattttcaggtcgattatgacctcgagttccgagtttactctgaggaaaccgatgacatggctggtgtcagttggtcattgagagcgcgtactgaagctgaactggccgaactcattgagaccctccgaaatccggattatgggctggtcacaaaggaacagcaggaagaagaggaggcggacatcgacgaggaacagcttttggaccagccgaatgaaggttaa

SEQ ID NO: 59543 - DNA, 794 bp, Heterodera glycines
atgccttatttgcttaccaattcaaatggtattttttgctggtctttaaactttatttcttatgtatgtgaatgaataataccttttggtcttcgccaattcgaggaacggcaaaaaatgtttttttccaaccaataaaccaattaattaattaattaattccagaaattaattaatcaatccccaccatttaatgcggcagccagaattaattgcgttttgtgttcacgcggaaacattgtgatggtgaccttcaaaaatgatggtgctgcaatttttcgctttaaaaacgcgcgtcacagtcactgatcaaattgggatgtgcgcggcgccgaatgatcacgcattgtgatcagtcagtcatttacggcaattgcatgcacgcccactgcgcgcttttttggggggcctttgatcaatgacaatcatttttggccctccgatcactgcctgctgttgtaagaaaatttttcatctaacatcattgctgtcggtttagcagcatgtagtgaatatctctcagaaatttttgtccggtcaccacgaccagcgattaggagatatttttttttttgtagagaatttaatctgatcattcaatgatcaattgaagagcaattttattgcgatccatcatttacaaatgctaaatttagtggttattttgaagaatttagatggattcaattcgcttctttataaataacaaataattagctccgaccaataagtccaaaacatcgtttcctgtgttccttgaagtaaccagtatttaatagccaatcaaagtctga

SEQ ID NO: 59544 - DNA, 53 bp, Heterodera glycines
atgattatagataaagtgaaagggtatacttataaaattctattctacgcata

SEQ ID NO: 59545 - DNA, 703 bp, Heterodera glycines
atgagtcttttgtttgccagaattggtgagccgaatcgagcgaaaacaatggaatcatcaatcgcaagcagctcaggtgtgtttggacaaggtggaaacggtagtaaaatatttaatttttgggatactgtatatatcaaaattaaatttaaacattcagaagtggatgatgatgggaccagcagcagcttttctgacggtaatagcagaaaatcagcaatcgctggtgagaaatttctttttttgcataattttccaatttctgaattacaacaaaatacacttttgaggaagactgatattgcttcataaattatagcttttaaaaagacaaaacgatctgataaagaaaggagaaatcttttgatttatgttaaatttagacttctttttattttcagacagaagaaaaataaataagttgttcattttgactgtagtgaacattacggtaacagtggcagtgatcattttctttacggtggtttaaatttaaaatattattataaattatttttttaaatttacggttattttcgattgtcagattgagaatgcgcggatcacttctgagttggaatttttgaagaaatttgttggaaaaatggaacaacaatattggaatggttggaattaatattaacttttgtaatttcggaaatcggaattccgtgccatccctgtctctgactataaatttgga

SEQ ID NO: 59546 - DNA, 330 bp, Heterodera glycines
ccgggactcaaatgtcccgctcaggccaaaatttttttctatttccgggaaaaaatcgaaatttttccgaaaaaaataccagtcgatagagctcgaaaaactatgttttggaagtggtctccgtttttctgggaaaattcgttaaaaaatcataaaattaaaaaacccgaaaaccgttttttaggcctaactcgaaaaattttgaaaattttcgaaattttaaaatctggaaaaatcgagcttattgaactctacaataagtctgctggccaccctgcgctcaggtcaaaccctaatgagttattcggctggtactgaagtgggaaaaaa

SEQ ID NO: 59547 - DNA, 631 bp, Heterodera glycines
atggtaaaaaaaataaatctatgataatacttaagtcaaaattaatgaaagaaacaaattattaaaattaaatgtataattcataaaaaaaattattaattttgatggttaattgactttattgacaaatgtgaacataaagaattgaagtcagaaagaaatagttttaataaattaaaaaatctggtaatacattgtttttaataattataagtaatttaaaattattggattgtccattcattgagttttaattttatttctttacgaaaaaatatttttaaaaacaatttaaattatataaatgtgataagacaacaaaatcacaaaaaaaacaaatcaaaactatcaaagaaattctaatgtttgtcattgcgagaacgaaaagttatttattactttaagattttttttttgaaattgtagaaatttttaataatatttaaaaatgataaataatttaaaaaatctgcaaaaatattatctaaataaaaaataataataattaattaaacagaaaaaacggataaataattaaagaatattattatttttttgccagcgcgttttaataactttccgaaaatatgcaccattttacaactggtagtaaaataatgcatttaataaa

SEQ ID NO: 59548 - DNA, 542 bp, Heterodera glycines
  unsure (1)..(542): unsure at all n locations
atggcagccaaaaatgaaaatggaatccaattgccacgtaagtctaacaataagcaaacacctcgagtttgaatacaatatgctttttcctttcagagaaactcaacaacgaccatggagttcgtggcatcgcgccggttgacgtgctcatcaatgcatttgaacttaatctgaagggcgcacctgacatggtgtaccagcacgaacttcgttttgtgggagaatatcaaatgaaaaagggcagagaaggccaactagaaacgcgtgaattggcacaaggaccacagaatgagtgagtgttttgaaaaaagagaaattcgaattttcaaactttgttcgaaaatggtttcatttcagcgagtgtaaagagacgcgtcgtgagttgcattggtcgctctggcgattttgctcgatcagaatgccgactnttntgngggcgagaagaacagttcagctacgactgcgctcttctcctttattctgtgcgtcgtcttatggtaaacggagagatgcgcgaatttngtgatcatgccgannagttg

SEQ ID NO: 59549 - DNA, 937 bp, Heterodera glycines
atgaaagccgaaatccaagcacgtaaactcggcatccaagtacgaatccgagccctgattaataactttttaaaaacttgctatttttttttgttccaacatatatattaacaaagcattgatgagtttttcgttaaaatggttacagttgtgttaaatttgtcacaatcataaaagctgtttcgactagaaacttcctgtcgcctcgaaaagacagcgccgtcctccgttttagcttaattttcaatttaattatttttaaaactaactcaaatttaatcacaatgtccattttttaaaaattgttattccgacatttttattcacaattcaaattgaataaattatttttttcagaaaaaaataagcaaaagaaaataatgccaaaaagtaattccaaacgtaaaaaattggacgggggagtacagaactttttgatgaagcaaaatgacggcacaaaggtgaaaaaaagaaaattaatgaaaacaaatgtctattttaatatttttttcaaatagctggacattcgcggcgaacgcgagaagcaaattccgagccaaaaattggaaaaatttttcacttttgatggaacaaaagcgaatatccaacagcaaaaggcgcatttggtaatttagtgaaataatttttataatttttatttaaattaattatttaatatttttccaaattttaggcaacggaaccgacaaatttaacacttccaaacactgtgacgccgaaccaattttcgatgggaaaccttttgaatggcacggcagctgcttctcttccattcgctcacaatttttggaatggtaaattgagttaaatttaaaatttaaaaaaattaaattttattttaatgattaaggttcttttccgctatgccctccccgagtagttttaggcactgatttagtatattgcatcaaataaa

SEQ ID NO: 59550 - DNA, 656 bp, Heterodera glycines
atgtccggtcctccaaattgcttacgccacaaaaaatcagaaatgtatgtggaaaaaagtgatctttgcgtgccaaatctcgttttgtgttgctgcttgaacttctgccacgtcgattcaattgtgtttgtatgctgcccagtgacaggatccttgaagtgctccgagaaaaagttttgaaaaaatttgacccaaaatgtggatacaaactagcggagtaccgagtggtttatgtgtccgatcatcagtcttttagctctaacttttttatcacttggtcgatgccttcattcttgttattgaccgaaagcttaaggtctcaagaatttgtaaatgcaagaaaagagcaaaatgtgaccttgcgaaaaacagaatttgattgttttaaaatagtttcaagtgccaaaatctctccattttttgagttttgaaccggttcaaaaaccgtttttttttgccatttccgtaaatggagatatattttttcgtacttagcccctcgagacgaatcgattgatatatcattaacccttttttttacagggcgttctacagttcaacaattccagcgacaaatgatttagctgcctgaaaatttttgatatcgtatttcctaaaatacagcacctccccccttgaaagggttgaaaaataaa

SEQ ID NO: 59551 - DNA, 426 bp, Heterodera glycines
tcaaagatccgtgctgtcctccgactgcgacgacttcgacttggtcaattcgaccgcctcccctctcttcgcttacccttgcgttcgcctgattcccattggccaaatcaaacaaattttgcatgacaaaatcacttcgctgaatgaggaagaatttcaatgcaaagttgagggcgatctttttcgctccgaggacgggttgctcaattctctgctcagttttgagcattttgctcgcaaattacgaattgtcgagaggggatggcccagcggattccgaatgtggtgggacaattgaacgaaattcttttcaaatgacgaactaacaaaggtttcgcgagaaaagcggatggatatacgaacggtgttcgctcgttgcaaggataaaggcggggtttgcgcaaaacgacgcacactttgacatgg

SEQ ID NO: 59552 - DNA, 571 bp, Heterodera glycines
atgtgccataatcgaagagtgagtgtgccagccagccatcagccaaataaatgcctcctaattagcgtcaccatcactcccatccgcacgctcggtccaacacgtgacgtgacgccatatggtgtcaaagtttcaacttttccgcaactgctgcaatcagtgcggcacctttgacgctgccctcgtcggcgggcaccaattcccactgtaaacggtgcaaattttcagaaaattggcaatttgttttaaaaaatgaaaatttttgtgcctcaatgttgagcggggccaacgagtgcagctgcgactccaacagctcgtggtatgtgggatggaattggatgagtgcaccgccgacgcccaccttcaccttccgtttgccgacatggcgcaggagggcggtgattgctggaaatggtaaacaaataggggacatgaagtgtgcactttccactcctcctccctcggcgttcctccccccccccccccgaaaaatttaaattatgaaaattttcaaaaaaaaaagaaaaattttcagcgatttttggataaatttttgaaaaaacgtacctag

SEQ ID NO: 59553 - DNA, 461 bp, Heterodera glycines
cgacaacagcggggtgttcaaaaattgtcgtcgcatttgtgacgagttggaggtgccaagccacgggagcaacgactacctgatcatgcgcgaggtgtgccacgtggtctcattacgttcagcagccattgttgccgcaggtatcagagagtcgaatttttccaaaaatttgatgaattactaggtacgttttttcaaaaatttatccaaaaatcgctgaaaatttttcttttttttttgaaaattttcataatttaaatttttcggggggggggggggaggaacgccgagggaggaggagtggaaagtgcacacttcatgtcccctatttgtttaccatttccagcaatcaccgccctcctgcgccatgtcggcaaacggaaggtgaaggtgggcgtcggcggtgcactcatccaattccatcccacataccacgagctgttggagtcgcagctgcactc

SEQ ID NO: 59554 - DNA, 244 bp, Heterodera glycines
tttttcttctccttttgtttctctgatcagaccgttgatctgcggcatcaaattgtacacgacgaaaatggtcatttgtttggtccatttttgcgagtggcctcctccacgttgtgttgttaactcctcctcattctccgcctcctcccaccatatatttaattataattatcacaatcgtttttttttatcacactcttaacatgttttttgtggttgaccagcaaataaatttttaatctgc

SEQ ID NO: 59555 - DNA, 599 bp, Heterodera glycines
atgtcgccaaacacactttgtagcattgtttgcctgcttttggtctgcaacttcatctgggctgatgatgaacacagaagcttcgcagaggaattagtgaggtatcaatttaccatccaatttaattttttttaatttttaaataattaaataaatttacctttttaatttataatgaaatttttaataattgattgcctttaattaatagacgcctgcgacgttcccatggttactcagttggttatggaggcaattgtgcttggtaaatttttgaaaatttcttttttttttttttgcatttttttaccacaaaaataatttggaaaaatttacgactaaatttaaaatttattattaattttaaatttttaaaatcaagttcttcctccgcctacccggcgaccgcttcacacacttcatacacggcacctaaacaaaccagttactcatcttactcttgctccggttccggctgtggtcatcaagtaagcaattttgaaattctaattttaaaattttaaaaaatttaggcctaccagccaccccaaaaaaacagctaccattggtgcactgggactgccctgcacaaagcgcag

SEQ ID NO: 59556 - DNA, 268 bp, Heterodera glycines
atgacagctccaacttcggcagttgtgcgtgagcaacatttggcccttcggggtctgtcaatgtatattacaaaatgttaccgaaatatttttgttttaagtgatgcgactgtccaatcccaaatttcatgagaccatttgcttgggccgcgatccggccgatcctttctcaatggctatttgtgattcgattggcaaattgagtggtcaaagttctgtcgatttgccgcttgattcctacttaattgcaccacatgcgatgagatga

SEQ ID NO: 59557 - DNA, 667 bp, Heterodera glycines
gcaaaggcacaaacaaaaggcaaaaagtactcttggcagcatttatttgcaacgagaatttgaccaattatcacagtcttcgcttagtgatcaaaatgatcacttttcatacgaaagcccaagaagctatcaaattgggacagaaattgtcgaagttgcaaatgatcatagcaacgaaggcaatgcaacggatcatttcaatcgccgccaattcaatgaaacaaacaatgaaattgttcctatcgagaaaagccaaaatgatggttctgtttctgcccatttttcacataacgaaaatggtcaaatgcattacggtagagcaattactgtggtttctgatcgaatcaatgatagccgtgcggacggactggacagatcacactcatcatcagccgactatactactcaaaaatgtggcataatgccaaaattgccaaatttgggcgaaaaattccgacattggcagttaaaaatgaagatggacatgcaattgcggatgcattgtgttaagaacacaaaattgcccaggaatttggttgatgaccacaaaaataacaatttttttctgcatgaacatcccggaaatggtgaagaaaatccctactcaaaattaggatgggatgaaaatccgttttatggcaaaacaccatcattcaagagcaattaa

SEQ ID NO: 59558 - DNA, 54 bp, Heterodera glycines; identical to SEQ ID NO: 53113

SEQ ID NO: 59559 - DNA, 394 bp, Heterodera glycines
atgtgctgccttctgcttgcattggcctcacgaagccgcagctacactgtcaacgggcgtcgttccatttcgcgcaggtcgcgccgccgcacgacattggctgcctttcaggcacactcttcggatggtgggttctttgaactttagctcttttttattttacaatttgcattttattccaatttcagccggtgctcgcacagctgctgagcctttggcggttcccaaccgtcctgtggaggagaaggagtctacttctcgtcgtgtgccgggtatttgaaaactctcccattaaaaaagttaaaaaatatttttgttttgtttaggctgatgcgtctgagctggagccaaaaagtggccaacgagggaaaaggatgaaagaatgaaggaagga

SEQ ID NO: 59560 - DNA, 439 bp, Heterodera glycines
atgtcctccccgatcaaattttctccgtcaaagagctccgacgccaaaaatgagaccaatattaaagccgctgtcctcacaccgaattccctaaaactccccaatcgtaagcaccaattgaacagtgcgggaaataatggggagcagccgccgacgaaagtgcgaaaagtcgaggaccgcgaactatggaaactcgccaagggaaagtacatgttgggcttctacctctgctcaggttataaaacttttattttttattttagaaattttaaaaaattcagatgattggaacagactttacaacaacaacgcaaaagtggtgcgcactgaggatggacgcttcgccgtcaactttgaactgtgtgcagagtgcacactgaaaaacgcccgagcgacagacttattggcgccgccaaagcaaaagaaaagcgccgaatga

SEQ ID NO: 59561 - DNA, 850 bp, Heterodera glycines
atggccatcaacatgaacgacaagaagggattgctcaagcagctcctcggcgagtccgacatcaccgtaacaacgtctggcctgacgatcagccggccgcgtctcaccaacccgcgttttctgccgtttgaggagagcggtcgctgccgctcctgcaaggcaaccgaagtggaggtcgatacgatggtcaccaaagagggcataaccctttggtgtacgcgaattgacaaagtgcagttcgtgccgtttgatgtggtctacgatttgccgggccactgctttttccgagtgaagaacaaggcgagagtcttcaacattccgtacggcgacctgccctcggacaacacctgtgatcaaattcaactcacgcttcacgctgatgaagaacggcgtctcaagcgaaaggcgaaagctgcgctcgacttggttgagcagggtcttatggcagatgcaatgcatgatggggccagctggaagaaagccaagactgccatcggggtgctgaacaaactccctgctcgtaggaacacatggcgacaacgaaaacaaagaaacggctgctttgacaacatcggaaaaccagcacaaagaacagcaaccgccgacggcacctccgtcggaagaaatcgtttccatcgtgccatctgatgttggatctcaagcactgcccagcggtgaagtgaagctggaagaggagaagcaggcagatctcggtgacattgataagacacttgacgaattttttgcaagtctcaaggcgtcaaccaccagcatgtaaagatatttaaatcccacaattttttaaagtttcctcacatggtaaaaatgttgaattcacaagcattttcaa

SEQ ID NO: 59562 - DNA, 1103 bp, Heterodera glycines
atggctaataaatttttgcttgttccacaagaaatttatcgagggttaacctcagcggcggatacgggagtcatcaatttggatgcagtaagacatgacttggaccgtgcaaggggtgaacggacgaatccgtcaacaaagaatgtccgatacaatcaacagcttaggcgctatctgcaaatgagaagggagctgacagatagaccaaccaaagtggagttgaccaagggattgagtgttttgttgaagcgagatgggggtgctgatgaggacgacgaagtcgtcaacactcagccacggcctcccgctccaccaccacctccaccaccacctcatcactcatctcaacaacaccaccgtcgccctcccagccttcccgatcagcaatcttcctcatctgacgatagtcatccgcctcgtccaccacgtcctcagagaacaaagaaaaaccatcaatcttctctgaaacatggtcgtttgaaccaatggcagcaaaggcgtcgtgacttacaacaacaacaaccggtagtacgtgatctcctcgctgaagcagcagctgctccgttacctgaaagtgacgatgacgatgaacaaatgctggaaggtgggtatctgctgccagcaccatcacaaaattatggagacataccagtattgcctgactatgcagatgaaattgaggaaatggacaccgcccaacaaagacttgcaagcagaagaaaattaaaagaggagcagagactagataaaaataaaaaatataaaatttactattcccctccaccatctcccacactaccacccgtgtacaaacgactagatcatcctcctccgcctcgttctatacccaaagttgaactgaaaagggatccacaaccaacaaagttgaaaaaatccgcctcgccaccgcctccaccattgcctccacatcgcgcaaagagagaaccaaaaatagagctcgcccctcctccacctcctcgcaatgtctccaaaagggaaccgaaaattgaactagctcctcctccccttcctcctcgtcacttcaccaaaaaggaaccaaaatttgaagttgacccacgaccatccacatcgaagcaagccgg

SEQ ID NO: 59563 - DNA, 642 bp, Heterodera glycines
ggaatgacgtcatcagctgcaaaaattggtggtggtggtggtgcatctgttgaagagttgaatcaactgttaagcaaagtgaagaaaatgcataaattaaaaaaataaatgaacaaacatgttcaggacgaagaatggctttccagtttccagggcattttggaaaaaagtgccacattgaccggctcagtttgctcactgatggacaattttcaggtaaacaaaatgacactcaaatcggggcaaaatgaaacttcgagaatttgcatttcagtttatggattctttgcatatgtgtacaatcccataccgtcccacttttttttagcgcgatgggacgtttataaaccgttgcaaaagccttttagtaattggccattttcatttcattacaacctgtgtttttactcgacctgaatttttttcaagaacattttttccaaatgccgtgcttaagtctcataactttcctcagaaggaatcaaaaaagtaaattagggatcattcaaagttctcgagtttggctctattttcctttaaaaaacagaaattcgaacctttcgcaggaaagaattgattcattgtccacgaatgtgcagacgttagtggccaaatcaagcgtcattcaaaaggaacaacaga

SEQ ID NO: 59564 - DNA, 170 bp, Heterodera glycines
acacgtcatggccagactacgcgacaagcacgtgtacaagccaaatgacggtggagtataggtggcccgctccagcgccatccattttcagggctagttgattcggcaggtgagttgttacacactccttagcggattccgacttccatggtcatcgtccttctgtctat

SEQ ID NO: 59565 - DNA, 237 bp, Heterodera glycines
atggacttctttgaaaccaatgcaacaactcaggtaattaagccaaatttaatgttttaattaaacaattttttcaaggcattcaataagtccattttcacaatttcatcaccaacaatggaggaagtcaaaaattcagtgtttctcaaaatgattttcataattaatttgttcatcaatctgattggtggcataatgcacttcaccgttgtgtacatcagcattaaaaatcggtga

SEQ ID NO: 59566 - DNA, 295 bp, Heterodera glycines
gtccatcgtgccgtttgtatgctttctaatacgacggcaattgccgaggcgtgggcacggctaaaccacaaattcgatttgatgtatgcaaaaagggcctttgtgcattggtacgtcggcgagggaatggaggagggcgaattttcggaggcgcgcgaggatttggcggcacttgaaaaagactatgaggaggtggggaaccaatgaaaagttaatcaaaagcaaattgatcggctgtaaataattgcaggttgctgaggataatgagccggatgctgacaacgaggaattttaa

SEQ ID NO: 59567 - DNA, 302 bp, Heterodera glycines
  unsure (1)..(302): unsure at all n locations
taaattcaatggattttataaaagaaaaaagaaacaaacaaaattatcttttatcatttcaaatgcaaatacttttttggaaatgcaacgaaaattgaatgaacaataattttattatggaattagcaggaacataaaaataaacacaaaaaatagaattaaattgaaaattaaagacattcccatgaaaagaagaattaattccaatgcgaaaagaggcagaaagtggtgggacgaactgcttgccgttctgctgtctgttgngtttgcatcagtaaaaagtgagatcggggaccgtacaa

SEQ ID NO: 59568 - DNA, 1570 bp, Heterodera glycines
atgccaaacccatcgccacagaatgttttggatttaaaggaacaattgcaaaatttgagcgcaaaagtttccgagctcgtcgcacttgtcaataccgagcccatccaatacccagcaaatttctacaccatttttaagaaaattaagcaacgaatggcaaatccgcttgaagcggcaattgcttactgtgagcaactgcaaaagggagccgacagttttggccaaatgacggaccgaacttatttggagggcattgtgccaaaagttgtgcacattgtggagcgattgtcgatcgaattcggcacattggccaccgaaattggcattgacccggtggaaaaatttgtggattcaaagtgcaaagatggggaagataaattgaaggaattaagcgaaacaatcgctaaaatcaggagagaaattaaggaaaacaattatttcaacgaggcgccatttgaaaatgcaatggcacaattaaatggaacgcagacggcggatgattggcaatcaatgagacgcaaatctgtcagacgccacagcactggggacgcgcatatttcaaattgggacaaaaatagtggagaaaatgggacaaatgttgaaaagaaaatgccaagacgacacagcgagaacaatttgataatgccgagaaaaatattgggggacctaaaaatgaatgatgggcagagagtgagaaggaaacgaaatgccacgatagggcgaaaagcgggcgagaaaatgtgccaaattctgacggaaatgattttggaagcgaaaacggacgcattggagagggaaacggcggcaaagatcaaagccatcgcggaaccgccgatcaaaggcgacgaactgatgcaattgatcgacacattcgactgggagtggcgccagatcagtgacagaattgacagatggacgaagacggacggagaaaaagtttggaaagagagcggggggaggggggtaataattaatggttttcaatgcttaacacttttaaggataactaccgcattaaattggttgaaacttcgatggctgcgtatgaaatatcgaaaccgctgaaattggcaatggtttcggcgttggatgggcttaatagcgcagcgaaaacggagatgaagcgatgggaagaggagctgcacaaactgttgcatgaacgcatcgaaatttgcacacgtgccaaagacactttggccaaactgtcaacggacctccaaacggcgattgggctgccacggcaaattgtcaacgcacaaattgggccggtcattgatttattgaggggcaatggggcggaacaaagcgcgttgagttattatgtgatcgaaaattcactctatgcggccaagcagaaagtccaatcggcttttcaggtgttaatcaatgaatcattttataagtatgtccgattagggataattataattaatttaagattccgtccaatgccttcaaatggtccatttttgttgatgaacaaaatgagcaagacgataagccagcggcagagattgaagaagcaaatcagccgcaaatagaaactgctgccgaagacaccgaaatatag

SEQ ID NO: 59569 - DNA, 819 bp, Heterodera glycines
aactatcgtatcgatttgcgtcaacgtcacccagtacggtgccaccaccgttttcctgctgctctgtgccaaaaacattcgcgacttcatccgtgcctttctcgacaaggagatcagcttctgctatttgatcgtggtcattgcgcttgtgcttttgcccgtcactttgctcaaatcgcccaacgatttttggccggtcattgtgggcggaatgcttagcacaatcgttgccagtaattacaaaattgggggcctttttaaaatttaaattttgaaaatcgcttcttctcagttgtgttcatttgcattggtgccatgatggattggcgcagctgtgccccctccaggcaattgccttcgtttgacctcaccaattatttgtccgctctcggcaccatgttgttcacctacggaggccacagcgcttttcccaccattcaacatgacatgaaaaagccatccgagttcaacaaatcggcaattctcggatttttcagtgagttaaattttaaaattaacgggggtataaatatgcgaataattattaaattatttaaaaaatattctacatatacttatatgcatttgttatcgtgttgttcagttatttctgtgttcaacttcaccaccgtaatcgtgtgcggcactgtgtacggtaacagcatccgcgagtcggtgatcaattccatccagacagtgtggatccagcaggcgatcaacctgatgatcacggcgcattgtctgctcactgttacgctgctgatcaacccactgaaccaggaaatggaggaagtgttctccgtcccccatggtcattaa

SEQ ID NO: 59570 - DNA, 629 bp, Heterodera glycines
atgcacgtcatacgcgtgagaacaagcgggaggagaaaagctcagacggccaaggcgatgaaagcccggtgggctaagaaaagtgagttttttcaccaaattttatttaaaaaaatatctttttaatttcagcctctccagagccgaatcccaatgccgaaatgccaccgcaagacgaagcagggccgtcgtcgacatctgctgtaccggccgaagaactgatggagccgccgccaccagctccagcaccagtgccaacgccggagatggacgaggaaattttggaatttggcttttcgttgccatcgacatctgtcacggcattgaaatttaggttgtccacggcaaaggacaacctgatccctgcccgtgacctgccactgaagatcagtggcgattgctgcttcaccactttgttccatttgcgcgccaacaccgatttttggggcttttggatgagcagggtgggaccatatcattttttgggttcaattttaaatgttgtgatttttcaggagatgaggcattgcattccgtgtggcggcgacttgagcaactttggaagacgatgccggacgctgaacaaatgcgccaacagctggagcatcatttcgtctcaaattggttga

SEQ ID NO: 59571 - DNA, 77 bp, Heterodera glycines
tagagaaaaaaagataatgtttttctctggcactctctatttattggtacacatctcgttttttcggacggtgtgtg

SEQ ID NO: 59572 - DNA, 1614 bp, Heterodera glycines
atgggcgagccgattttcccctattttgattgggttggcggcacttccaccggtgccatggtcacggccgggctcgcaatgggccaaacactgcaccaaattcagcgggtgaactttttgaatcaatatttatttatccaagcagagaagtatatccgttgattccatccatcataccgaaattttttttttttgcaatttttaaaaagtataacaacgcaaggaaaattattaaaaaaataaaaacttgccaaaattatgttaaaaatgactaaaactgaggtccctaaacagcgacaatacatttccagattttttctgcttgggtgggacggattaaccacaaacagaatttttcctgcggtaattttagaaattttttttgcatttaaaaaaaacaaattttgggaatttttaaaacaaatttttaaaaaatttcgattttattttactaatttttgtgtgcatgcttttgcagctgtacttgcgcttcaaagacatggtgttcgactaccgaaggccgcacaacacgcgggtgctcgagaagttcatttgccaggagatgggggccgagacaatgttcagcgacctcaagtggccaaggttgcttcggtgttcccaaaatgtgtcagggacataacatcgccgaaaaaaatctcggaaaaaaattcttgattttttttttgaaaaatgtgtcgttgaaagcaaaaaaattttttgtaaaatttcttgaaaatatctttcctttttttaatttcggggacgttgctgaaaaatatttatatgggaagataaaatttgaaaattgaaattatttcctcatttaaaaaaaaattccagacttatgttcaccaccacgcgggccgagttcttcccggttcagctggaactgatgcgcaattacaaactgccgacaaatgacgaggagaatgaggagctcggctaccggacgcccgacgatttgttgctttggaaagtgttgaggcgttcatcggcgggtaataaaaaaaatttttttttaaatttacaaaaaaaattttcagcccctacctattttgccagtgtggacaacaaatacattgatggaggtgggtgagcagtggtgctttggttgttgttgttgttgtattaatcggtgggcaatcaaaatgcatttggtggcaagaaaaatgcggtttttcgaaatttaaatgatgaatttctgttttttgatttttgcttgattttaatgaaattccatcccattataatatgtgttttttctgtccataaccttatttttgtcaggcattattgcgaacaacccgtcattggaactgctccaggaaatccaattttggaacagcttcaacaagtacaaggtaaaacaccaataacaacagcaaaatatttttttaaaaatttttttttcgttttttcagaattttcccaattccgtgaacgttggatgctttctcagcatttgcaccggtgtcattccgcccactccattggaggtttttttaaaaacaaagtgtcattaattcgaatgcaatttccagcccacttatatcgaagtttcgcaaaactggatcgcccaaccgaacacctcaataaacgccttttggaccatcg

SEQ ID NO: 59573 - DNA, 670 bp, Heterodera glycines
atgacactttgtttttaaaaaaacctccaatggagtgggcggaatgacaccggtgcaaatgctgagaaagcatccaacgttcacggaattgggaaaattctgaaaaaacgaaaaaaaaatttttaaaaaaatattttgctgttgttattggtgttttaccttgtacttgttgaagctgttccaaaattggatttcctggagcagttccaatgacgggttgttcgcaataatgcctgacaaaaataaggttatggacagaaaaaacacatattataatgggatggaatttcattaaaatcaagcaaaaatcaaaaaacagaaattcatcatttaaatttcgaaaaaccgcatttttcttgccaccaaatgcattttgattgcccaccgattaatacaacaacaacaacaaccaaagcaccactgctcacccacctccatcaatgtatttgttgtccacactggcaaaataggtaggggctgaaaattttttttgtaaatttaaaaaaaaattttttttattacccgccgatgaacgcctcaacactttccaaagcaacaaatcgtcgggcgtccggtagccgagctcctcattctcctcgtcatttgtcggcagtttgtaattgcgcatcagttccagctgaaccgggaagaactcggcccgcgtggtggt

SEQ ID NO: 59574 - DNA, 1035 bp, Heterodera glycines
  unsure (1)..(1035): unsure at all n locations
atggacggtcgtactgctgaggcgattggcagtgaaaaagtcatcacaacgagtggtcaaaattgcgaccaaattgctctcgggttggtaagcaagtcgatgaacagcttggtaacgagtgaaattataaaaataacaattgaaaaagggttggaccataagattgaatattacattgcaattttatgaaaatttgaatcttactttttgaacaaattatgctaaatttccgttatcacacattacaaataaaataataattttggaaatccaacatttgcattcgattccacccgaaataaactcactttcgcccaatggaaccgttcgaatgtgcagcttttgaatgtcgtcaattgttccgatgaccaaattttcgccgtccgacagcgcaaggcaatcacgatagaattccgagttcaatggacagatttgcgtcaccgatcgcaaattgacattggaaaaggacaatttgtggttggacgaataaatgacagtcggccgatcggaacaggcgaaaacattaagcgcattctttttgggcgattggaaaagacacagcgaagtgggctgagtgcccagtgtaaatttcttttgcgccgacaaagcgccggtgagcgaatcgacgcggaaatgaatcactgtgccatcgcccaaagcgacgaaaagaaagtgagagccctccatggtcacctgaatgaaaggggacaaatgagaaatggaagaaaagcaaggagggacgcgtgccataagcatggaacggggcacaaattcactggacaaacgctcctccgcgaccaatgctggcacagtgccaggtttaagtgcgtagacagcgaccgaatgctcagaccaaaagccaatggagaagaagtcggacagagtttggccatcttanacagccaaacacgatgaaaagggtgcaaacaccgctgaacagcacaccgagtggggaaatgtcgagacaggcgacctcatcagcacattccaggcggtggagcagcataatttggtccgaatcgacgcgcaaataaa

SEQ ID NO: 59575 - DNA, 85 bp, Heterodera glycines
atgcaactcatttcaactgacatcttcataatcctgtcgttagttgccgctttttctcattctgctccaataactcaagggaaac

SEQ ID NO: 59576 - DNA, 453 bp, Heterodera glycines
atgagtgtgctgctgcgcgaagcggtggttgaacggctggtcgagccggtcagtttttttaattccaaaaatagaattgcaaattgtttttatggcaaaggtctagtttactggtcccgtttttttttatttgaaaagcctggaaaaatttttctagggctattttatggtgctgagcacgaatccggcattataaacgggacctcgaaaaaagtctacgtccttaaatgaacagatattgcccaaaaatctgcattttagtctcaaattttgagtttgacctgcccggccttgacaaacctgaattttatcagggttttgtccagaaaatatatccaagtccatcaaatccgttttcttctaaatcattactcttcttttcaggcttgggctgccatgtccatgtcaccgaaagagttgctctcgcgccaattgatgcccaaaattggcaag

SEQ ID NO: 59577 - DNA, 1067 bp, Heterodera glycines
atgaaattgttgcttcacaatttcttttcatccaactttttgaagggtgtcaccaatggttacccacttttgcttcgtgcaaccaaaattgaggtaaaataatgaacaacagttaattctcccatatgataaactcatttggttgggtgttgacttttttataaatttttgaaattaatttgccttcaatttcctattttttttttgactccgaaaatcgaaaaacgaatgggctcactttttgctatataacaacaaatttttaactataagcaagacgacaattaacataaatttccgagttttctgcttttttgtgcaaaaaacgaaggacaccgcctcattttttagtctcctaacggcgcctctcttttttgtatatgcccaaataaattgacacaattttctgtaacatttttttacattttcagcgaatcgacggcacggaattcaatggcgattttgtgaagaaaatgatgccccggcttgactacccggcgctgatccaagcagcaaaagcggtggacgaaagggcggcggacgaattgcccaaggaattgggcaccgattgggaaaaggacgacgacttcctcaaaaaggttggccattcctgtttttgtcagccagcaatggcatattacaaattttacggaaatgtccaaaaattggggcccaaataaaagaaaaattccatttgggactcggttggcccggaaatttgccctaaattgcaaagggatggttaataatccttaaaaaacatccataagcgaaggatttgaaaaagtaggtccaattttttaaaaaatcccccccccccctcaaaatttagattttttctgacaaatgagtttcgtccatgaattatgcttggtttcaggtccactctctgctggtcagttacgaaattgtggagggcgaattggagtgtccggagagccatcgaattttcaacatcaaagaaggcatcccaaactttttggtcggtgccgacgaagtcgaatgaatgaatgatcatcagtttatttgtacaccatttctcgaatttcaaatatttgtttttttca

SEQ ID NO: 59578 - DNA, 1572 bp, Heterodera glycines
atgctgacgcggacccaattggatgccgccgccgcgaagcggctttttcgggacatgcgtgaggtgcagccgcaaacagctggagtttccaggtctgtttttataaatcaaatcccgaatataattttttggtttccatgtagagcaacaaagattgtcgttttttacttttaccttggttgtgactggattctctgttctttttcttcatttatatgcttttttttgtaaaatgtcgggtggttgggaccaacatccacaatccgggcatgtgaagggtaacaattttttcgaattaagactcgtggccacaacatcgccgacctggattacatctacgggttcaccgaacaggacatgacacgcgaattcttgttgcgacccactacattcatcgggggcgaagaacccgtcaggctgtcgttgcgtgaaatttacagacggcttaaggtgggcagcagcaggctggtcaactagttttagagggaaaatgtgacattttggttcacccttaaaaatttcgatccagtaagcattgaaatccgtaaacaatttgtgcctttaaatgattttcagcttcttcgaaagatgcgacggagtcgacaatgggtgaacaattttaaaaatccaaacactttttacatctttactttgtttttgttttcagtctcttcgacagttcccctaggccaagtgatcactgatcagcaacaaacagaagaaatgaattgattggttgactgattgattgatgcgattatgtgatcaaatattggattaggtattatgccatttgaatgtggttgtattgatttttgctcattcacaaatgaataaataggacttgtttaatttcttgctgcaggtgcatatgcattacacaggcttaattggtaattctgtagtttgccccccccacattttggaaaaaaaattcgacaatcctggagaatgggtgtcccttaactttttttttaaatttgggctcaaaatcagttttcgagggtgctgattacgaatctgaactcggatttgcgtaattccggacctgaattcgaacaaaaagttgaaattttttccaatgattcatttttctggggtaaaagcttctaattcatttaacaactatttatttggatggaaaacaatacgtctattattaattggattttttggttgtttatcttatgttttaagtttaattaagcaaatattgaatatatcaatttttaggaatttttgagggcttacacatatattttgtcagtttacagtccatatttggccattttgagctttttagtccatataatttacaaccctattcatgagatatagaaagacatttattttccatggtttgccattgcgatttatttgaatttactcattcttggcataaagtatttgtgacaagttttcagcgcactcacatctcttgaacaactgtacgcattagcttttgcagaaggggataagcaaggtcatgaagaacacaaagatgagcaaaagtcgctggatattagcttaatgaaaggttgtctaatcatcgggcctttaactcagtggtag

SEQ ID NO: 59579 - DNA, 1791 bp, Heterodera glycines
atgtcggaccatccagatgctgcgctggccgacctgtaagccgctcgaatttaaaatttcacaaaaaatcggattttaaatttttgcaattttcagcagctgcgtggcaaacgacgtttggctggacactctgttttggattgaccgcgctgaagttggcacgaagtttgcactgatcgacgcacgtttcggcaagctggtagccacgcatttcaacctgcgcaagtggaggctgggcgagctgggcgttcatcgtgcaccaagcggatgggacaggggcggcacggcggctgtcaccgttatggacgacaacgcgttgatcaatcgactgccgctcgccacgtgtcctgcaccgggcggcgtgattagcttcagtgccatctacatttggtcttagcgaacaaaatttttttgcaaattttcaaaaattccctaattttccaggtacgtcgacctggaagtgatcgcatttctgcagtgcctgcaacgtgtcatcaatcgcggcatcgctgtgcagttcaccatccattcgacggacctccgctgctgggcggtgatggcgcaacgcatttggccactcatttcgcacgccgtcctcgcactgaacgacatgaaagccgtcaacttcgcgctgttgcgtcgccatgtgtcgccgaatgtgctgttcgactgtgctaaccttcgtgccatcaccaacacgcacatgttccccatccgaccgccgcccagcgctgtgcacatcaatgccctgctcaacccgccggacgagttcgatgagaagccgaagcacaacctgttccgctggctgcacacaccgcgcaaggatggccgtccgaaaattgtgacaattcgcaagtggcgcaaaccgcaatgggcttcgttcatgccaagcttaatcacggtccgaaagattttacagcattttttgcttccatttttttcatttttctaatcgattttacgcgtcccatgccatccacagtttcttaggccataacttttttcttaattggtcaatgcttatattcttggtaccaatcaaaagcttgaactctcgggatcttataaatccaagaaaacagcaattacttgcattagaaaagaaattacaatgagaaaacatgaaattcaaggtttttcgagtattttcaagaataattttttgtctattgcttttagccgagaatttagttatacaaaagcttctgtagactttaagctttcgtttgataccaagaatataggcattgaccaagtatgaaaaaagatatgcccaaagaaactgaggatgatagtcattcatgggacgcgtaaaaccgtatatttgcattttttgattccaattttttttcaataatttcaatcattttacagtttttcatcgctccgagtgccgtccctgtcaacttcctcgtcatttgtcacattgcatgccataccaacttccagaagatggaacgggagaatgaagagacggacgagcggctgacgctgaattcgcgagtgcctgctgatgccgtgattgtacgatgccggaacggcactgatcagtgcacagtgaacgcgtgggagaaggaggcaaaccaaatgttggacaatttgctgtgcttcaccatcaaggacagcgacattgggtggagtttttgaggaatttttttttgaaattttaattttcaacaattttctaggcccaaactgctcgccgaactgatggccaacgaatgaggagggatgagaaggaagtgtgcgcaatccaagcggaagatgaaaatatattgtggatgaaataaa

SEQ ID NO: 59580 - DNA, 1144 bp, Heterodera glycines
atggccaacgcaatgtacgcggcacgggcgcgcgcggccaaggcggaaaagcgtcaagcgcagctgcgcaaggcggccagagcaagggcaggaaacgtaagtttagattaaaaaaatttaaaaccgaaaataattttccccaattgttttcccacagaccgccaaatcgcgacgagccgagcgctgttcaatttgctggggccgactgagccgaatcacgcgtaccacgatgggctgccaccatccgctgcaccgacgctgcctctacaattgggtgcgcgtcaacttgttttgtccgatgtgcggctacaactacacgcgcgggaggccccgtgatcgccatggacgacgcaccaggggactccatcgtatgacgccggatcaggtgcgacgtgaaatggaccgcatgcgtcatatcaggcgctgatggaggaggaggagaggtgggttttgttgaggtgtgggacgggggcagcagggaggacgagtgtaatttttggtctgtttcagtttggtgttttgtgggggagggagggtaatgccaccaccgatggtatcccaccccccttttcgaaaaaaaaattttcaaaattttttagagcggttttcaaggtcggggaatacgattctaacatccatttgggccgtgtgttgggggagggggcggaggacgtgcaatttttggtcctgtttcagtttggtgtgttgtgggggagggagaaattgaaaaattcagaattcattggactcaatttatttttaattatcatttttttgaattttcaggcccggaaacgagaagtcgtcgcaatcgcatggcaaacggcggaaggatggaaagaacggacgacggatcacacaatgaatgattggccgagtgtatttattgatgtatttgtgatggatattcactcatttgttgtctcatataaccatgtcagaacacacgcattgtttgtatcacttaccattatatttgtactgaattgaatgcataaaaattctgtttgctattgctgtttctccatttgcgccaaatttgaatttcaaaaatagaatttttcttttttcgactaaaagtctaaaagtgaaaattttgattttcgggtctaaacgcacagaaacggaatggaaaatcatcaaa

SEQ ID NO: 59581 - DNA, 104 bp, Heterodera glycines
atgaataaaggaacgaaaatgcggaagaaacaatggaagagaaaagaaaaagaagacaattatggtgaagagaagaggaaaaaaagagtgaatgataaacaagt

SEQ ID NO: 59582 - DNA, 91 bp, Heterodera glycines; identical to SEQ ID NO: 53030

SEQ ID NO: 59583 - DNA, 618 bp, Heterodera glycines
atgaatttgagaaagagcgattttgcgagttggataaatagagtgggctcaatgcggagggtgggcaaagaagtggagaaaagggcggccattttctgttttacaaaagcaaaggaaaaagaagagaaaaagacggtgagagaaacataggattagacaaaaggcagtgaaattgtttatccatgtactatttctccaaatcttgtttcttttccttgcatgagaaaaaattttccgacacgaattcaattgacctacgctattttgtcagtttctaagtatctgtccaagattaattgtgaggttagaaaggaagatagtagtgaaaaatatcgtaaaatattaaattgttatgcaaatccgaattctaacaaaattgatcggtatttttaattaaaaattctgttgctttttgtgccaaaaattttcgcttaaaatttttgctttagcgatggaaattgaaaaattcagggtcgttgtcccgtaaatcgttttttatttagcctttgcatttttaaatggtattcaatcgtatcaaccccattttccttgcggccggcacttcttcggcagtcgcatttttcatcggttctcaatgctcaaccaaagaatggttga

SEQ ID NO: 59584 - DNA, 49 bp, Heterodera glycines; identical to SEQ ID NO: 51181

SEQ ID NO: 59585 - DNA, 493 bp, Heterodera glycines
atgcatgaaaaagtgatgattactaccaaaataaaatcaaatcaaatcaaatttataaggtacaatatttaataccctacaatatttaatacccacaaaatgtgaaagcacaataggtatcaccacataataaaatatctatattaaaatcaattgaaaatagtattaggcctaaattacatatactaattatttcaatgtaatcaattacagtagttttattaaattaataatatctaaaaatataatgcgtgtgtttaacataccaataaaaataagcatgacaacacctcagcatagattgttcaaagaactttgcaaagggaaataattaaagcatttaaaattaaaatattaaaatcaattattattaacataatacttgaaaagtacaaaatgcagacaatacataaatttttgtaagatataatttttataaattggaacattctcagaagtgccatcatggtcatgcatggtctaatattttcca

SEQ ID NO: 59586 - DNA, 432 bp, Heterodera glycines
atggtccaagcgaacgaacgctttcaagaggagggcgaaccaacaaacaatgggacggacacaatgccaacggaagagcagctgcagagcgaagcggaggacgaggcggagacgcagcagctcagagagacgtgcaaccgaaggcccagcgaaaagatcgaagtgcccgaggggctgctggccgaggaaagtgtcaggtgacgacggcaaatcgtcgcttttggcagtggcaattaaaatttaattgttcagtgagttctccacgctgagtggctgggcacggcttggccttggcttggaaatcgcccttttgtgcggcatttgtctgaacacgaccgttctctccgtgctgctccaccacactcgccatcacttgtccaccgtcaccattctgttcattttcaacattctcttctcaaatgtcaaaatgtg

SEQ ID NO: 59587 - DNA, 2365 bp, Heterodera glycines
atgagaagtggcgcatggcagaataggacattgaaggcaaaagaaaaaaatgcaaggcaaaagaaggcatgggataagaagttggcaaggcaaaagacggcaggggatgaggctagggaaaagaaggcaggggatgagaaattggctagggaaaagaaggcaggggatgagaaattggctaggaaaagaaggaagtgagaaagaagccttggggaaaaagcctgcggttgcgagaatggcaaaggttgaagagtagagagtggcaaaggcagatgaaaaagtacaattaatgtgacacattttcatttatttgtttttccccaaacttaatgacgaaaaacggctcgaaaagggtttggacagtttctcaaatgtgggcgaaaaaactcagcgaaggttagaatgaagtaaaaaatcagcgagcagtccgtcatttttctgtctaacgatggttgtccccaaggcctcgttggtgttgacaaagtggtgtcggttcttctcgcgcagggccccaagctacgcgatggggtcaagaaagtggacgccctggaaaatttgaggaaaatataattaaatagcaagggtacgaataaatgaaatatagtcaaaccgtggggtttgttggacaacaaaccggaacagcttacccaattttacatgcattattattcactgttaggtgaaaaaaaaattttgtgtgggtgggaagattcagcctttttaggccggaagcaaaaacgcgcaacggaaagcaaaatttttttgtagtgcctgttaaggacgaaatttttaaaaaaaaggccggcccgggctgattattttagaagtaaaacaacatggtcgacgaatgagcgtgaaatgcgatccatgaccgcctcgggcattcggaacgtgtccacaaacagctcgggcaaccgcagcgaacatgcgtacgcaaacgcagccaaatggagggatacggcggcaacaacggaaggtgggatgtgggccagcgcgtagcagaccatgacaacttcgctgacgaattcgcaaatgcccacacactctttgacggcgaagtgtagaagcgatatcgatgccgaaactgcacagcgtacggcatgctgaggttgaacttgagcccggacaacacctttataatgcgcacacaaagttatgactaattttttgaattttcaagaaaaatcgtgaaaaacatttcaactttattttttgaaaaaattttataatataagtttaattatttaaaaaaattcgccggtgagatttggggtgtacacataaaaatccggtaattcaaaattatgtttcctattcacccgcggttccatgcgcatgatgtactcccccttgaacatgtttgctgctacatagacaaagtcgtcaacatttggcttcaccaactcctcgagttttttcgatgtcagctttaagcgaacttgtacctgaattaataccgtttcaccgagttttcaacatttttaaaatggacataaacaagccaagcgacaagaatttgtcgcattcgtccatctacggttttgtgcctggacaaaaagtcggagtccagcgggctgcgtctttcgagttgtcgcaagtagaggtcaacgtcgttggcgtattcagtggggaacaatgttgtgccaccaacgaatttcaaagagtacaccggcttctcaatgttttgctgttgaggttataagactgggaaatgactcattttaatttgctcttttatcattaatattctaaaaatcatatttttcaaattcttttacaaacatcggctttagggttcaacaccggaatttttgattcatttctgctgtgtactgtcaatgcttttcgaattcggttcatttgttttggtgggttaagtgttgatgatcatccgaaaatggcaaagaataaagaaccttattgatttgaaaaaaatagggaaatgaataaggttgttagatgagaacgacggaccgccaatgaaaacaaggaaaaatcgaataaacaatgagaaattttttcaaaatatatatatataataaaatcgtacaaaagtaatcatgtagataaataaaactgttataaaaaaaagattttatgagaaaaataaataatttatttgtaaatttaaaataaaaaatataattattatttcagaaataacaataatttgataaatctttttaattacttaatttaatttataaatattattttaattatttggtccaccatttcctttaactttaaagtttggaaaattccgttaattatttgtttattgggctcccttcccttttgataatttatttaaaatcaaaagttaaacaggaggcagtaaactaaattatgtattaaaaataaa

SEQ ID NO: 59588 - DNA, 736 bp, Heterodera glycines
atggatgagtcgaaacgggaaaatttttcccctcaaaatgatgatgacgtcatcacaattggagacaacaacaacactcaaacactgcttgacctgcaaccggggccctcaaaaaggggacgcaagcctcgtttggacaaaatccataaggaaattgcttccgcaatgaagaaagcaaaagccatgaagctgaaggtttggctttttctgcaaatttctttaaattagccaaattttagtggatgaatcgcccaaaaaacaaccgaccaatgtgtttgagtacccgaccatattttggaaattggcccgcccaaaggttttggctaatatttaatttgaaaaaaatagaaaaatttcttaagtacggagtgttcacgttcatgtgcaaagagtgtcgtgatgacaatttccggcaggggaacagccgattcaaactcatcaatcagaatggcgagcagcaacgccttgagttcacccaatcgttttgccaagactgtgcaaagctgaactttgattgcaccgatctgatcatgaagcacctaaagaaggatgaaccggcaacgacgacgacgacgatggcaaagagtttccgctggaccaaggatgaagaaaaatgaaccgacttggcacaccccatataaggacttttttttgaaaaattatatttgttggtcaaatgacaaactttttctttgtaattctgccgagcaatacgccaggctttgttggaaataaa

SEQ ID NO: 59589 - DNA, 369 bp, Heterodera glycines
atgtacaaccagcacctgcgccggtacctgaagatgcgcaaggaacataaggagcggcccgtcctggtacagctcagcaacggcgctcaactgctaaataaaacagtggagacgggtgtgcaggtacggcctggtccggacgaaccgaaggacaagtccgtgatggttaccgacgaagatgaagatgaagaaattgaagtgccaaagtttttaaccccaacaagccagacgcagggaagcaatcgatcacccaggaccaataagaaagcagcaaaacagcaaaaattgatcgagaagaaggaccacctgttggccatcattatgtctgatccgcagagattcggcgcaaatgaaaatgtgtcacattaa

SEQ ID NO: 59590 - DNA, 1054 bp, Heterodera glycines
atggattacccaagaataatcgaaagtgaactcgcttttctcatcccttcggggattattgtcagcgggccttcctcatcaggcaagacccagctggtccttcgcctgttacggcacgccaacgtattgtttgatccaccgccaaaggcaataggcgtgtgtaaaagggttttatgtgcagtgggctgttgctatttagtatgggcatacggtgagtactcgacgcagattcccgatctggagcggcagggagttgtcccccacgcaggtgccccgtctgacgagatgctgaaaaagctgccaaagccttgtctgattgtttacgacgatttgatgggtgacattgaggccaagaagttggccgatctgtacaccaaaaagtcccaccataacaatttttccgtgattttcctcacgcaaaacctgttcgataaatcaatgcgggtgccaaggtccaacgcccagtacatcttcctgatgcgggctcccaacgacatgcttagcattcgtaatttggccagccagatgttccctcgcgagcagggattcctgatggatgcctaccgacagacatgtgccctaccgtacggctacctgttggtgactctccacgcgaacaacattatacgcctaaggacaaacattttcccagacgacgaggagagaatcatttttgcccccaaaaatggttaagcgggaacagaagatcggtgagcgggttgtgcacaactacgactatttgaagaagttgggaaagacaacgtcggagaagaagcgccgtcatttgttgaacagtgccggttgtgaggaactgttaacgcttgtcgagatttgtctcaacgttttgaacgggagtttctgtctgagcaggaaacaaaagcagagacttgcgccatttgcaaaagacatcagacagttggcacgtgtgcgaagcgaaaggggtgcgcgaaaactagtgcagcagtcaggcggatcactttttgcccctttgttggcccccattctgattgaggctgcccgatacctgctttcgcgcagcaataatggccaataa

SEQ ID NO: 59591 - DNA, 259 bp, Heterodera glycines
atgaagcgtgcgagacaatcggaaaagttgggcgccttccctgagattgagttcgccgtcaacacaatgggcgtcacggtgtattgcccacggcacctgcaaacgcctcggtttgtaccatgggaccagcccgggcggtgcccgagctgcagaagcggaactgttgagctggactacatcatccagcccgagggggtgaccatcttttcgaatcggctaaagacggacggcgagaactttgtgccatttgacgcaattg

SEQ ID NO: 59592 - DNA, 818 bp, Heterodera glycines
atgcctggggaggggatcagcaaaagtgcgagaaaaaacggctggcagattgatcagtgacgaaaaacgcaaatgtggtgtcagaggctctcggtcggttaaaaaatgaccaatggtcgacatttcttacactaattgtataaattatggtgtaaaaagcgtgaaattgaaataatttaaattgttaataaccaaaaaattatttgggataaacaacaaaacttacaacaacaaaaaatgataattcgttcaaaaataagaaatttcacaactaattaagacggttagatagcctcggagcccaatgaaaaaaacgaaattgactcccccctggtccacttgaaaatatgaattgaccccccccccccccttttccatctcaatgatcaatgtcccgagatgagagaatttgggatttttcgggatttgaaaccattctcgagagagagctaaagaaaatcgcatctcaagcaaccaaaacataaactcttaggaaaacgagaaacatcgtcctcaacccaacaatttggagcccaaattcatgggtttacatggaaatttgttgggtggttctgttctgtgctgatcgatttgtgcgcgaaatgcaaaatgcgtaacttaaataaatattttttttggagacggtggacaacaaatccgaagacaatttgcgcagggaattggaggagaagcgagcggagagcgcaagaagaaaaagaagaagccattcattattcattgtgcaacatcagcagcagaaaatgggaaaaaattgcaggattaaaagcattttatgaacaatttttgtttgaaaaaca

SEQ ID NO: 59593 - DNA, 347 bp, Heterodera glycines
atgaatgtatttttggacgagttaaacgccagttttgaacaacaccaaaataatcctgaaatacggcaagtgatcagtgggcttatcgattatgcccaatcgctaatcgatgaacagcctggagcagaccaaattgggctagattttgactctgatcaggaggacgacttatacgacgacgaatcagaaaacaacactgatcaggaggaaaataatcatgacccaacccaatccaaatatccatttgaaacccaaatacaaatagtgaatatgctaaatgatggcaaaacttataaatccattcgtcaccaattcaaaaaattaaaaagcgacattgaaattattcg

SEQ ID NO: 59594 - DNA, 534 bp, Heterodera glycines
acacaattctttgtcctggccattctccgtcatgccatcaatcaagccaaatcacaaaaggcaattggctgtccatttaaccaaagggatgccattgccctcggcattttttcaaatgcgctgatcaaggcgagcacaaatgatgccatgttaagcaatatctgccgttatggagacaaagtttttggctttgttgacggactctgtgaaattcaaaatgctgaacaacagtctttattggacgacataaaatttaaagaacaattagagaaacaattagagattcgggtcacttttaaaacagatcaaataaaaatacaaaataaaattttacaggtaaatgaattaagagcattttgtcagcgatggaagttgtacccaaagaacaatgctcaaacatccgccgggcacgaaagcgaacaacatttgaaagctaaaatgaaaaattacatcgaaaagccccagattgatcaaacaaataaacagtcaacgtcagattctgaacacatctgtgttatttgcctgacagaggaa

SEQ ID NO: 59595 - DNA, 154 bp, Heterodera glycines
atgggtagtcttgtggcggcacatctgagttcgtccaatgagaaagcaatgccgtattcggcttactactatcgtcagaggaagatgaacgtaatcgaggcatattctagaattacgctgaaaaagcaattgtgggcgctatactttttcgtca

SEQ ID NO: 59596 - DNA, 635 bp, Heterodera glycines
atgggcaccaatttggaattgaatctgtgttcaagcgataatgatgatgatgaagagccgatttgggatgttttggcgcgtgaaatttggccaatttttgcaccaagcattcgccacttgggttttgccaattttgacgctttgtgccgtcgcatttcaccgacaattctcgccgatcttcatcaattgatttcaatcgatttcggacatctgtttcttcatggaattgatgacgacgatgaaccaaatgcaacttctcctggccaagtgttgtccgaatggttgcacactccgaaaaaagacgggcaaccgaagcgactgtttcataacttatgttaaatttgataattttatttaaaattttgcaagctaacagagaaaaagcttggctattttatggtactaagaatgtaaaatatgattgcctttaagcaaagttatgccatgttttgtcgaaaaaattgccaaaaattttgaattaacgggatttctggcgtaatgatgacaagttctgcttttgaaagtcaggtttctgcggtcagacgctaactgcatgaacctgtcaaaaatgacaggttttttccggtcggggtcgttttcgcgtgagggccattttcgcgcacccccccccccta

SEQ ID NO: 59597 - DNA, 304 bp, Heterodera glycines
atgaatcagcggcgtttaaagaaaatgtgaggcattttttaattgaagctttatcggtaatttaattaatgttttcacgtatttcagctggatttgccacgatgtttggatggatattttgccattttttcgtcgtcgtaaactcggcctcaatttggcactgatttccgatcgtttcgatgttttggtggacgcgcatttcgatggcaaatcagaattgacgatttggaaagctatcaggattcacaaagacgctttcacagaagtgccgaaattaagtgtgctaatcgataatgccaatcct

SEQ ID NO: 59598 - DNA, 282 bp, Heterodera glycines
  unsure (1)..(282): unsure at all n locations
atgtactcgtttcaaaaatattttgaggaggctctcgaaaaagaagattttttctggcagaaaaacagagcagaagtggaggcattgttaattgaggcttcaaattataaaattataacacacagggactacgaaagccgctattctgattatattgccacctatcaccgcaccccactcttctgtttctgcatgattgagagaaatttaagatttttttacgacacaggaaaccgngacgcctataggaaggggtacaactgtgctacatgttaccgttga

SEQ ID NO: 59599 - DNA, 345 bp, Heterodera glycines
atgactcgagagtatgctgacagcgaaattttggagtttgtgtccgcgggtccgaagcagtacgccttgaaacttagaagaaagaaggacggggtgatttggcacaaaaccaaaatcagagggatgacattggatagacgaaacgaatttaaatatgaattgttcaaagagatggtgctagaccacaaggaaggagtcaaaaaagtttttcactacccggagaagatcgggccgacaaacgacttccgggttctctcaaaagatgtacaaaaagaatatacgccggtgcagaaaaaaggaattatcgacgatcattttaatgttttgccctttggacattattaa

SEQ ID NO: 59600 - DNA, 1167 bp, Heterodera glycines
atgccgaatgggcaaaccgtcacacgaccaatcagccgtctttgccccttggagaccgaaaaccaggccctggaacccgaatcggacgccaccgaaccgaacccgactaatcaaagtcgcagagactccaaaaacgccgaacttgttggacaggacatgacgcctgtcccgtcacttcccgaagaaccgatgacccgtgggcacgacggcatggtaacgcgacgaaaatcgcggcttctcggaatcccccccaccacgacaatgatcatggccatcctcgtcactttcctgggcgtccaagcctccccagcacaaggaatttggccattcgcctcagaccatcccgagccacccccaacatcccattgcatcggaaaccacgtcaattgcaccagaagaggcgtccgagtctcctccactcccgccgtccagaaggtcacgatttgttgcgccaattcgtgccttgatcggttgggcgctgccaccattgaatatgagttgtccgctgaccttctcgtcaacaattacggctgttccgcaacgttcagcctctcatcgacccgtagttgcgccgccgaaaccgtctgctcagccatcgacgaatgcgagctgattgactgctccgtttgcattgaccaactcgccaattggcggtgcaacccccgcctctctgtcttccttttcctaattatcgggtcgctgatcagctgtctgatcgggtgggtagtctgtttctgctcatccgcccgagttgtgctcaatttcggctatcaaatcaccgcgttccttctctcctggcccctccgactagcattctccctcgccggtcgtccctggacacgggaagatcgagaacgtgttgcggaacgtctcgaagttggaattcaacgggtccgacggcagccacggcaccacgggcggcgagctcagcgagcagctactcgactgatcggcatcctattggccactcccgtcatcttcggcaacgccgagaccatctcggtgaccactcggaccgaatcttgcctcaagagtcactctggactcacctgccgcgtcaacaccgccaccactctgactctgcttccggcaggccaacagagctcattaattctgcgcgacgacaccggcaacacaatcggcacggttcaaatgcaccttcactaa

SEQ ID NO: 59601 - DNA, 443 bp, Heterodera glycines
agagcaactctaggcagttcacgctgctcagtttatgagggaccaggcttttgtcatcttgtccgcacgtatggcgcgtcggcctaccgcgcgtcggccccgtaagtggtgttaattatagcaattaaatttaattaattcaaattaatacactccccccattttcttgcagcccgttttggagcagttgtggcactgtgttgaacagcgcgaaatatttgggatgtccttgcggcacgtacaaaacatgggaacgctgcggttttctgtatatgggctaccgttacctgtgctatgcgtgctgatgaatttttttttaattgaatttggcatattttcagttatggcggaatgattcaattttcattatatgcttagataattttgtgggcttttttctatatattcatagtatatgcatatttcttatattctaaaataaa

SEQ ID NO: 59602 - DNA, 716 bp, Heterodera glycines
atggcactgacaattttggcaattttttgtttggcatttgttcaccttggcatttctggcaaatacgataagtcggatgagcacgatggcaaatatggtgccggtccacctggtggctactcacatgagaacaacaacaacaacaattatggtggcgattcttcgggcgaaaaatatgagacaatggaacatatgtggtcatgtgccaccaaatggcaatgggaaaagcccggcgtgtcaatgaaatgggaaattaccgacgtaaaaaaattaattggccaaattaaaataatcaaaatttaaattttcaaaattaatatttcagacactcaccgaagcggcggtggacacggattgcccatcacggaaaagtaaataaatgattaaatgtaattaattattcaatgcattatttaattgtttttaaaaattaagatcggatgaacaattgttgctacgtgcagactgagtaaggaattggattaaacacatataaatttttacaaaattatccccaaaaataattagcgacattttttaggtaaatttcaattaaattaatcgaaaacaaaatttcttcaattttggtatcaactttaaaatatagatgctacaacaagcaaataggacaaaagagctgtgacaaccaattctgtgaatgtatggaggtaaatttatttttaaaattaaattaaaaattcaaattttaaaataaa

SEQ ID NO: 59603 - DNA, 261 bp, Heterodera glycines
atgatattgcaaaatgaggaagaattgaattatggaattaaagaggagaaaagtggagaaaatccatcaaaaacagaaatacaaacaaacattgccaaacttcgaaaggaatttgaacgaaaaatgaaaaatttatgcgaaaatgccaatgaaaaggccaaggcagaaaaggcaaaattggaaaaaacaattgaaaatgcagaagattatcttatcaaaacaccttgggaactacccgcaagattcgggctcttctgctga

SEQ ID NO: 59604 - DNA, 629 bp, Heterodera glycines
atgaaatttacacttttggcaattcttttcttggcacttgttcacattggcatttctggcaaatacgataagtcggacgagcacgatggcaaatatggtgctcgtccgcctgcttctggtggctatcatcatgacaacaacaattatggtggtggcaaccattatggtggtggcggcaaccattatggtggcggcggttcttcatacgacaaatatagaccaacagagcaccaaaggtcaattaagggcaattaattttaattaattgccaattaatcctccccccatttgcagcacatattggagcagttgtggcagtttattagccaccgcaagatcgttgggatgtcgttgtggcacctacaaaacatcggagacctgcggttttctgtatttgggccgccgttatttgtgctattgttaatcagaaagattttcattaaaaattgccgtcaaaataattattgtattggtattttagttataaacatattatgatgttattattgctttcactttgaattcggaaaaatatgaagctaaaaatcataggcatattttaattaaatgttcaaaattaaaattttattaaacgaataatagatttaattttaatttattaaaataaa

SEQ ID NO: 59605 - DNA, 123 bp, Heterodera glycines
atgggtgacttcgtgccaaaatttgagcgtaatttggacaacaaacctttgggcccgcgaccattgcccacggcaggcgcaattccagtaaaagatgagaaaggcagaattgtgatgaaaaag

SEQ ID NO: 59606 - DNA, 543 bp, Heterodera glycines
atggattcaccaaaagcgcctgaagtggtgccattcgacgatgaacagttaagtgcagaggaaaaacgacttttgaatgaatttgaaatgatgaaaatgaaattggaagagacaaacaagcgaaaaattgaactggaaaagcgaaataaggaaaaagagaagttaaaacaagtggacgaagtcatattagaagatgatgaagaggaggaggaagaggagcaaatacccaaaatgagtaaaaaaccgggtttggacccggttgtggcaaaatatgtggtggaaaaagttataaacgaagagtgggacggaaatgatttggtggtaattgatccaagaggaaagcgatcaatggaagagcaaaatgatgaagaaagccggaggaaggaagatttggtgcgaattggccgaagaaatgatcacaatgagccatggcgagaatttctggccacaaccacttccttggacagagaaaaggaagagcgattaaaagtgatgggcaaaattggcctggggcaaagcagccgaagaatggcgaagaaaagt

SEQ ID NO: 59607 - DNA, 664 bp, Heterodera glycines
gtttcggggcagtccccccgagccgatgcgcccagatttatgggagaccgaatccttccggaatagcttccctatagcctgtactttaattctgcgttggatttttgctccccataattgtttgagtaccccaaacggacacttgaaaaaatcgatttttttgttttcggggcagtccccccgagccgatgcgcccagatttatggggagaccgaatccttccggaatagcttccctatagcctgtactttaattctgcgttggatttttgctccccataattgtttgagtaccccaaacggacacttgaaaaaatcgatttttttgttttcggggcagtccccccgaaccgatgcgcccagatttatggggagaccgaatccttccggaatagcttccctatagcctgtactttaattctgcgttggatttttgctccccataattgtttgagtaccccaaacggacacttgaaaaaatcgatttttttgttttcggggcagtccccccgaaccgatgcgcccagatttatggggagaccgaatccttcgggaatagcttccctatagcctgtactttaattctgcgttggatttttgctccccataaatgtttgagtaccctcaaacggacacttgaaaaaatcgatttttttgtttcataa

SEQ ID NO: 59608 - DNA, 473 bp, Heterodera glycines
atgcgagtgtgggcgtacattttaccaagtcagtctgacaatgaacatgggatttatttttcagtatttaatttgaaaaaataataaggaattttattaaaaaaaactattttaaatttattaaattacacttccaaataaatttgtattatgtgaacatataaattataaaggaaaacccatgaaattttatgggcatttagaaaataaaaaaaatttttgaaattctatttttattattaaaatttatctgaaaaatcctagagaaaataacaataggtgctaaaatcaaacaattcttataaatgtaaggacagatgacagaaatcattgataatttaaatgattttccatttgtacttcgccaaaagcggattttgttgaaatcagcttaagtctttatcccaatattttaaattaattttattaataacaaaaaatgctttttagtacacagatttgctctaccataa

SEQ ID NO: 59609 - DNA, 195 bp, Heterodera glycines
tacgcctaaatttacggaaaaataaataatacgcttaaattaaaatataaaattaagtttaaaatacctgcgttatgtcatgcactcgctcatgtgcctttaatgtcgtctaaattttaacaccaaaaaaattaattaattaatgcaattatttggctaatttttttattaattattaaatatacacctaaaaaa

SEQ ID NO: 59610 - DNA, 1581 bp, Heterodera glycines
gcctttaaagaagttgacgaaaatggcagtgcaattctcccttttttgaatgcaaattgtgccgcccatttactaaatttggttgtgaaagaagggctaagtgccgaccttgatattgaaaagctgtttgtgaaatgccgtaaaatcgttggccattttaaaaagagcaacaaagcactcggaaaattgcacgaaattcaagagtttcttgaaattcccgagcattgcttgttacaggtatgtataatgttattagatattggtaattcttaaagagtatttttaaggaagtttcgacccgttggaattctggcctgatgatgattgaacgactttacgagcaaaaaaaggcaatcaatgaatatgcctaccaaaattgtgactttggtctcactttaacaagcgaagaatggtccattttggaggaacttattgcgagtattgttttaaagcaaatgttgtaaaaaacaatcatcttagttttgaaacctgccgaagtgatgaccaaaggattatcaaagtcgcctatttcggtggtgattccatacgcaggagttatgcatgacgagctttacgaaatgaaacttttttcaaaaaaagtggaccaagttcgaacaattatgtacaattcgttaaaaagacgttttttcggacttcaaaatcaaaagtgatagtcaatttttttttgaaaattaattttgttttaagagtgtacgcagtttcgacattccttgatccacgttttaaggaccgcgttcttttggcagaaatgacaagcaatgtgtttagagcgaacgtaattgcttggatcaaagcgatgtctgagccgctacaaccagaaatttttgatttcgatgatcaacattttaccatgccacccgatcagtctctctctcccccaccaaaacggaatgactctttttttgatcgattaaaaaacatcgtcaaaagcaacattgacaggaggtaatacaacttcaattcttacagtttccctaataatttccaaggacgcctactgaacaacacgagaatattgaactggaattccaagaatatttggagtgcggcctcgaagaaacaaactcaaccccgattgattgtcggcggaaattgtcaaatcaattcccaaaacttgctaaactggccaacaaatttctttcgactcccgccacaagtgtaccaagcgaacggactttcaaaacggcacgtgatgtttttgattaccggcgatcattattgaaaccgaaaactgcggaaatgctcatcttccttaataaatctctcccacaaatcaattataaatattagcttttgttatttgaagtgatcatttttcgaatcgaataaattatttccaaatttcataaactgatttaaatggacatttcattattattaattagatatttttagatgtttctaagcacaaataattgattttttcatttgtttgcttttcaaaacaaatttcaaaaaatccaggtccaggcctggatccaggtctcgaggagcctggatttttcctggacctggatttttgtccaggaaatccaggtccaggtccaacatggaatccag

SEQ ID NO: 59611 - DNA, 3644 bp, Heterodera glycines
ttcactggtcattccaagaaaatgaatttgttcacttcgttggacccttctgttaagaaattgttgggctggaaaatgggcgacgaagaagagaaatgggcactgaaagcggtcgaatctttggtgaaaaagatgcaaaaacgaaagcaccatggatacggtaagaggctctaccgtataaaaatgggaggaaccggtgtttttaggtactgtggaggatttggtgcgttactgcaaaatgacattttgttaatcaattgataataatttaattgaaaaaaaaatatttttacggttaaaattaccataaaaaatttaaaaagaaggcaaaaagtaaaaaaacatttattttcgttaaaaatattaaagaaatttttcaatatattttttgatttttaaaatattttacattatgaattttacttaggaatacgcactttcccaccccggctcaagcagcaagtaatcttataaatgtcaattaattaaataattaattgattcatcaatctctcccccctttcattgctttttcctttcttttttcagttgcgtgacaattccccgctctttggacggacgccttcaggtcaaatgaatggctaattacaaaattagcgccggaaaaagccaaaaaatgctaatgggatttttgtaactcctcgtttaatcccttttctgctgaatgagttttgcttatgctattacaaaatccgcttgtccctttgaggtgtcccatcggaagggtcttccccatgtgatttattgccgcgtttggcgttggccgaatttgcagtcccatcagatacgcattttgtcctttgtttacttaacatggatacttcctttacgagttaaggtccaccaccgattgtatgttcccatacgacgggcgaagtgaacaggtggcaaaatcaccaaactaattagggcttaattgattaatttttgttacattatttattatactaaatgataatgttaacattggtcagatatgcatcaatccttatcattaccatcgaattgaaatgctcggacagtcggtatgttcttctttccagcaatattggtcagcaatgtgatttgatcagttgattttccgatttttgcctacaaatgttttcgacattcattaaaatacattttgattttattcaactttttgtctcttttgagaagcctgtgcctcctcctccctcttcttcctccgttgtgccgtcctcctccttttccccctcttccgcttccattggcactttttccactccttccccctctgccgccgcctcttttccgtccgcctccccttccgcttcatccgtctcttccgcttctccctcagtgccatcgttccgccacgtgcacagttatcctcagaccacaaaacaacagttcatgtccaccaatgtcatctccgatcagtccgctctctcctccgcctctcccaccgccgctttgttcacccaatcgccgtcggcactaagcgacgacgacgattttatggcacaacagcagcaacggcacaatgccgcactccaacaacaattgtgccaccatagtcagccatgttgctggtgttcagtttgctattacgaactcaactcgcgggttggcgagccgttcaaggcacgcattttttgttgattgatttgtcattttgagctcaacccataaaaagttagcactgattgataaatgctatgctaagctgatttgatctgattaaatctattagtgtccgatcattaattgtgaaatgttctctctgactgatttgtctgattaactcagatcaattaaatacagtccaattgggagaatattgaattgccaatcaatcgtccgtttttccctttttaggtgctcgaaagtattgtcgtcattgatggtatggcacaaataacaatttgttttgccaatgtaaatgttcccccccccttttttgaaaggttttacgaatccgtccggcgcggggagtgcgtttttaattttccatttaattgcattttaatattttaaggaatttgtcttggcctcctctccaacgtcaacagaaacgtgagaaagcataaaagcgaaaatatcaaagaatttactttttttaaggtgacaattgaaaacactcgcagacacatcggaatgggtgaataatttgtaaaaatattcataattaaagtgcctggtcatggctatcatttttttgcctggttttgaatataaaatgccattaattccctaaaattggtgaccaacaagagtctcgacccaaactcgaataattatttgccattctcaattaaatattttgccctttcccttttcaggcatccgattgatgtgcactgataacaatgttttgcttgtaccgttctttttccatttttggcattatttttggtgctgtccgagagtctcgaaaaaagttcactttttgggttgctaccggcacatatatttttttactctcgagcggcacgtttttattggttttcccgttatgtttattttccatgttccgcagttgaaccaatccgaggctgctgtgttcgttcagtcgagaaatgccaacttcaaatacagccttcagccaacggcggtcaaaaaatgaataattaatgtgccgacaaaatgatcaattaggtagcacaatcttgttgtaaaaaatctgtctgatccattttaaaaaaaaatgtttttatttaatggtttttagaggttcagacattttattgaaagcaattttggggtggtcattttcgcgcgcatattaattgcctaattggctaacattgtcataatgctttcaattttaggtttgtcgtgtccctccgggcgcaacaatggtcagttctttcgttgatctgtttttaatttaatcttcagcagttaatctcggcgtttattaagctaatcttcgatttccatctcttcgccggggtttgtccgtttgtcccccattttgtcatttgtccattttcgttcatttgtccttttttctgcgccagatgcttgaaaaggcgaaggagaatggttaccaacatgtctatgaaattgtgtgagttaatcgcacaaacattggcattttttatacaaatttctcaatccaaattaaacaatttttaaaatgcagcaaaatgtgctttgttcgtctgtcctttgtcaagggatggggagcggactacccgaggtcagtaagtgccaaacagtgcaataatccccggcagggttaagtcgagaccctccgcggcacaaaatcgggaataataatcgacgcatataaaatgccataattcccacgtttattcgcgccatgggttctcaggggaacccattttagttcgaaaattggcgtaatgtttaggtaagttcatttaaggcaggtcagtcactcttccgtttgtttgtgtcgtgctgtttggacgtgcgatgcttcccatcgcttttttaggacgtcacttcgacgccgtgttggctcgaaattcagcttcaccagccaatggcggtacttcccaaagaattgccaatttaattaccccaatattaattgattgattgggttttgctttaatcattttaagtggaccgatgcggcactttcccaattggacccgcccgatcacaacggagttacttcagtgtca

SEQ ID NO: 59612 - DNA, 445 bp, Heterodera glycines
atggccgctgatatcactgtgttcgtccggctgatcgaagcggtgccccggggggcaaaatttgacaaaatttggaaagaaaaaaaggaaaaccaaatcatcgatttgtacgacagctttttcgagatggactatagcaacgaatatcgaacacaaatgcattttacgtggaaattgtttgacgctgtccgatcagagctggccgatcttagttttttgatcaacgagaaaaagctgagacagaaatgggacggcatggaaaagcgggcacagcgcgacgccgcggaccaaacagcgagcgacgatggtacagtgccaaccgcgccaattttggtggccaaattacatgcgcaaacgctgcaaaagttggcatttgaaaatgccgaaacggcgaaacggaagacggcagaaatggccaaacatttcagggaaaagctgaagacag

SEQ ID NO: 59613 - DNA, 72 bp, Heterodera glycines
gcttatgacgacgcgacttccgatgcgcagacaacgggcgagagtatttgcgcggagtccgtcacgatcatg

SEQ ID NO: 59614 - DNA, 2199 bp, Heterodera glycines
atgatggatgtgccaaactcttccaacacttcaccaggatttttcgagaacttggcccagtcgttacttgacctcaaaattcaggacaatcgcaattacaaaaatgaggaaccaagatctggggcaatgaatgcgctcacacacatcaaacccaaaacaacagcaatggattgtcaggtcgaaaatgaattagcaaaagaatcctctagtgaatccccagcctgtgggccggaaacaaagacaaacattcccaaaacgtcaaattgggaacggccaagcgtacgatcgaaagtcgcttctttaatgttcattacactaatgcttattggaatgactttgccctttactactgctaatatgccccatctgccaatgcatccccttgtctgtcaaacccaaaacggaggaaaaatttggcaattgccggcagttactggctgttcaaagctgtcaattgatcattcaaaagcacctgttgttcgaactttcgatgtcttttcgccaaatttatttgagcactcggctgatgcttgggcttgccgaaaagtgagaaaatccgtgcgcaagtacacttcaatcactaatgttccgatccaagagactcttgagccacttatgttgcaaattactccgagtgaatgtaagcaaatggccgaaaatggaaagtgcagtttaggcttgctaattaatgactcgggactctcgcatactgacaagaaattggatttgtcaccccgaatgtggctaattggctcatttagctggtcgactgtctcaactgaaaattgttatctttttaagactaaaattatgtcacaacacggtagcacagttatgcaaagtcccctcgggtcagtgaacaattgccaattcaaggcaggccaatgtgagatggaagacaagacattgctcatgtgggacaccaacactacccgtgcctgtgaattttcgaaaattggcacatggaaaggactacaacttgacaatatttggatttcggatgaggtcagttttcgtttgacatttttgaacaacacaaagaaagtcaactcatgtggtctgaatctgataaaatcggaggaaggatttgctgtacaagacttgccttccgacgatagcaacgaatcctcaaagagaagcagaaagacgagatcacttgaaagttgggtcaccgaatcggaaatgaactccaaattgggctatttggatgaacaagtaagagaaatgctgactctttccttttctcagacaattaaatcgatttgtgattatatgttggagacgagaagatgggcagcgacggcacttctctcagatccaacaacttttgccagaaaattattccaatctggtaaactggtggcaaaggtggccgggcccgaattgattaaagtgtggccatgcatcgaattgcaagcacatgactacgaatttgccaaaattgggaactcagcggactccgaattcgaatgctttgacaaaattccaattaaattccgagtgaaggacaacaaaagaatggcatttattgacccaaggacaatgattttgagctccgacgcgagactggcaccatgctctgaataccgcaagcagctcatttttgtgcgtggttctctttatgaagttgatcaaatcgatgctcaggtcaaacaggtgaatgccaatcgcattgacggtttcagccttaatctgtcattggcaccgacttatgctcgccattcctttctccaccttgcccttgtgaatgtgtctgactttattggccaattttacgacgccaatttggcaagagaaagcgaactcacattccaaatcaaaagtgaggacgctatagtcacaaagactttgtctgaacaatgggagcaggtgagtgagtccattcgcaacaaaatgtttgggaattgggaacaaattggaaaaattgtcatgtccatgatgataattattgtttttacagactttttgatccggtttagattaatgattagagacgaatacgttggcagaggaacaacacgacgcatgacttttggtggaaataaaacgcagaaaattgtgaaatctccagcacacctcaacatgatggatctgaatgcatctgtagaatttggtaacgaaattgagctcagtcccgttaagctcattgaacccgcccaaacccaggcacacaaaatcgcaggaaaacgaaagagaccg

SEQ ID NO: 59615 - DNA, 655 bp, Heterodera glycines
agcatttctcttacttgttcatccaaatagcccaatttggagttcatttccgattcggtgacccaactttcaagtgatctcgtctttctgcttctctttgaggattcgttgctatcgtcggaaggcaagtcttgtacagcaaatccttcctccgattttatcagattcagaccacatgagttgactttctttgtgttgttcaaaaatgtcaaacgaaaactgacctcatccgaaatccaaatattgtcaagttgtagtcctttccatgtgccaattttcgaaaattcacaggcacgggtagtgttggtgtcccacatgagcaatgtcttgtcttccatctcacattggcctgccttgaattggcaattgttcactgacccgaggggactttgcataactgtgctaccgtgttgtgacataattttagtcttaaaaagataacaattttcagttgagacagtcgaccagctaaatgagccaattagccacattcggggtgacaaatccaatttcttgtcagtatgcgagagtcccgagtcattaattagcaagcctaaactgcactttccattttcggccatttgcttacattcactcggagtaatttgcaacataagtggctcaagagtctcttggatcggaacattagtgattg

SEQ ID NO: 59616 - DNA, 2310 bp, Heterodera glycines
atgcctgtgcctttaaatgttaaggaagtaaaaagagtgctaggacaggcaggcttttacagacggcacattgagaactttgcaatggtcgtagagccattgctgaagcttacgaggcaaggcaataaattcgaatggggcagggaacagcaaaagtctttcgacaagataaaagaactacttactcaagccccgagtctaatttttccagattacgacaaagcatttcacattttcactgacgcctcatcgactggacaaggaggagttttaatgcaaaaggatgacgtgacgggcacattttctgccatttcctattgcagcagaaccctctctgctgctgaaaggaaatggccggcagttcaaattgaaatgagtgccattatttatgctttaagggaattcagaccattcatcttcatgtcggacattgaacttcacacagatcacaaacccctcgcgtttttgctaaaaaaatccgaaaccaatcagcaattggcacgatggcttattgaactacaaaattatcaggtcaaaattgtccacgtggcaggaaaaagcaacactttggctgatgcactttctcgtgccgctgaggacaagcccttgtcggaaatatacaatgtggatgaactcgaggacattatcgaatttccggtctgtctcgctttggcagcacattccagggtggtcgcggacccatttttgcatactttgaccatccgacacgaggatggaaacacttacgaaattaatttgttggaagagcaggcaggagatcctgaagccgcagcctacattgcgtttgtcagggatggggaatttccagctgatttggatgaaaaagaaaaagagttattcgctataggcactgccaattacaaattgatttcgggaattctttattttgaggacaagggactccctccgaggatatatgtcccaatttcgttacgtggactcatttttgaatcatttcactcgtctcttttgggtggtggtcatttgaattacaggaaaacaattgccaagtgcaaaaaatatttttggcccaaaatgtactctgacgttttaacttgggtcaaattgtgtgtcacctgccaattgagacacaatccaacacccgcgtaccgggaagagatgctcatggtgccagccaacacactttttgccaaagttgggctggacttggccggcccctttccagtcactcaaaaagggaataaacacattttaaatatcgtttgttggttcaccaaatacgtgatttctgtcccggtccccgacacaaaagcacaaacaattgcccacgcttttcttaccaattgttacttaaaatacggtggttgcgttgaattaatcaccgataatgcctctgcctttacttccgaatttttcagggaattttgctccatgctttacattgacaaaaagtatgcctgtccacattggagtcaaggcaatgcgtcaactgaacgcacctttcggacatttcacaacatcttggccaaatacatttcgaagactcagcccgacttcgatgaatttttggatgctgccaatttttgctacaacacgtcagtgcatgcttcaacgggtgagactccattttttcttatgtttgggcgtgacccaattttctgtgttgatcagatcattgatccgaaagttcgtgatccgatagccatttcggaccgtaatgaatttaaacagaagctggtcgttgccataagacacgcgtggcacgctgcagctgatgaatatgcaaaagcccagcgaaaaatgaaggaacaatatgacagaaaggcaaggccacagcaaatcacaattggtgaccgagtgctgatcagaaactacgacggacgggtaggaacatccaaaaagtttcaattaccatggcgcggaatttttcgggttatcaaaattgagggcatttatgttactgtgatcagttgcacttcgccaaattcgaacccaaaaagacttcacttaaaccagattaaaaagtgtttcgaaattttgggccctccctgcactatgccaactcaaccagttgaagaggaaaagtgccttgaaaatactgataatgccgataaagcaatttcgaaagggtatgaaattcgaaatgaaatggaccccgaatcccgggaaggcgaaaatttggagcaaatccacgcccgagggccggaaacaagaccagaaattgaagccgatgaggagaaaaatgtcaataaaaaaacggatacggaaccaagaaagtatgaccttaggaagaggacgagaacttggaaagatcttgtgaattattag

SEQ ID NO: 59617 - DNA, 1381 bp, Heterodera glycines
atgccaacacaaccagttgaagagaaaaagtgccttgaaaagacacaaaatgtggaagaagtcagttcggaaaggtccggaatccgaaatgaaatggacctcgaatcccgggaaggcgaaaatttagaggaaatccacgcccgagggccggaaacaagaccagaaattgaagccgatgaggagaaaaatgtcaatgaaaaaacggatacggaaccaagaaagtatgaccttaggaagaggacgagaacttggaaagatcttgtgaattattagcacagtaaccattaacatcaaaaatttatttaacaaaatcaatgaaattattcgagatcgatctcgtctaaattgatgaccgaagaggtgcccttctttttcgggatgggcactcgcccctccgccttctgtttctccctctgagcacggcgctgggctgccaacacttcgttgtccgcccgcacgcgctttccgctttgctcatatttcaggcgataatccttggccctggcctcgctttccatggctctttaaaaatttgacttagttgtgaatgagacaattcatctcacttaattccaccaagatactcctcggtttgcttttcggtgaatttataggcttcccgccctttgcagtcacaacgagtgtgttcccccacttctaaatcattaaaattgttgaaaagtcattgtcggagcccattttttactcttaaattgttttgctgccctcgggctacacaactccttcacaaggcaaaccgaagctccgacattgatcccgcaatgcaggccaacggtgagcacgacatcaccgggccgctggatgtggaattcaaagggaattcccgcctgacgcagttgcgcaggggagaaaaagaaactattgtgtccaagcggattcgaacaattgggccaacgatcggtgaacagcacctggcccaattgggaaacctgctgttcgaattccccgccaatgaagagccacaactgaatttttcatggattttcaaaatttttttttatttaactaaaagaaaaaaaaacctttaaacccggtcccaagttgtaattcatatggtggacatgctcgtcctcacggtggagggcgaacaggctggtctcgggcggtgcgcagatcccacgaatgagcgtggcatccttgtcgagtccctaattttttttttctactcaaaataccaaaattttcagcccaaaccatttttccatatgccccattacaggaatagagagctcagttatcagccgatagctttcggtggttttagcgtctggcacaaaccagcgtgtgccatatcgccactcctgcggcaaggggccattcacaatttcgttaaaaaaccttatttttggaccatcttaca

SEQ ID NO: 59618 - DNA, 659 bp, Heterodera glycines
atctattccgactttctcaaggacaaatgtgccaaaacttgtggccattgcttatccgaagaagacaaagttcggcttgagaatgattacggcagtgacagcagcaatagcgaagattatgaccaaccctttgaatctgttcgacgcattcgaaatcgtccttcagctgctccccccgccggcgggcagaaaaattcagcggacaatggcactaccgttgcccaaagggccaagggtacggtatttcaataataaaaaaaaagtcaaaatcatttgcaattaattgtgattttttggttcaatttatcatttttcagaaggctcttcaaagcgaagcaaatcaagtggaaaattttccgagcgaattatcatagaaattgggggcggtgatcaaaaagaacacatcgaattgcgggggaaactcggcgaagcattacggtactaaaaacaaaaagatttaaaatcgaaaaacaaaattttaaaaaataaattaaattatatcaaattaacaaaaaaaaaatttaattaattgagcaaaattttaaagaatttcgcgagagattttgttggagaatgacgaagaaaatgatgatgaacaagcggagaagaagaagagaaagcggcagaagaaaaagcaaaggaatttgagtccgcttttg

SEQ ID NO: 59619 - DNA, 988 bp, Heterodera glycines
atgcaaagaaaaacatttaaagatattcatttacaattttttttgaattttttcacgaattacgccaataatgagttcgggttggcaatgattttgcgcaaaaaccgggcgcaatttcacgccttcgccatttgttaggcgcagaaatagacaatttttggtggaaaaatgaatacatttttcgtcaacaattgataaattggaactgtaatttttattaaaaaaattatttaaattttaatttattaattagacatttatatatccataataatattaaaattaattaataatttcccttattttatttttccacgacaaaacacgtctattggaacattaccacagtactctgatatcaaatgaccttcctggtgatcagatacggttgaagcatcgtttatcagcagatcttacggtattttgctttttcctaagtcagagtggtccattttcaaataaaaaaaagaatttaattaaaatttgaaataaaaattttttatttgcaattaaaaagtttgaaatttttgttacaaatgtcgaaaaaaaactcttcctcaagtattttggtgaaatttttgaacaatttaacaaaaattaatcagacggtccatttttgaaaaattgaggaaaacttgaaaattcaaaaaaattttttgtattatttgcaatggaaaaaatttgaaatttttagataaaatgcctaaaataacatcatgcattttagtcatattttgggatataattttgattgatccacccaaatttcaggtgtggatgtgccgttttgaacatctgttgagcctccaattgcccgcagttaggcaggaaatagagaaaatttggctgttcttccggtgttactatgacatcatcagcgattttgagccgccgattagcacggaaattgattggcctttagcggctgccacaaaggaattaattttgagtaattaattagtgaatttattactttataaattaatca

SEQ ID NO: 59620 - DNA, 774 bp, Heterodera glycines; identical to SEQ ID NO: 29056

SEQ ID NO: 59621 - DNA, 99 bp, Heterodera glycines
gaacaactacaaaaccaagaagagctgcagaatgatgagaatgtggacccgcaactgcatcagcaacgtgcagcacagcaggcgcaatatgaacgtctc

SEQ ID NO: 59622 - DNA, 343 bp, Heterodera glycines
aaaaaatttttgtgccattttttgttgttgttcgccatctgcttcctccgcacttttcctcctttttctactcttcgttcaatccttctcgcactttgaacgcttcaaacaatgcatttgcctgaatttttaaatatttttggtcaggcttatcaaaacacagaaacgaggaaatgtgtgagagagagagagagagagaaatgagatgcaaaaaacaatagggggaccaacacggaggaaggcctgcctaccgcttttcacagctccgaaataagcattgaagggggggaccaacacgagggaaaggctacccatcaacacccagactttatgaaatgtgaga

SEQ ID NO: 59623 - DNA, 418 bp, Heterodera glycines
atgagctcagcaatgccactgatcaaagcaattaaaagggacctgttcaattatggcactggaaagcacttgaaaataaatgtaaaatttaattttgtaaactaaaaaaataaattcttaaggttgaattagaaaatcaaaagcattgggaaatggttgtctttttggttgaaaatctgaagaatgaacaattaaatgaattaattaatgaattgaaaattccaacaacaaaaaatgttgaaaaatttgatgctttaatggcaacaaatttttcgttaaatgatttaaatgacagagaacgttttgaccaaaaaacattgtctaataaaaaatgaaagagtttgcttatgaattttttttattctaaattattcttctaactttgctttttcaggaaaatattgtttagtcaaataaa

SEQ ID NO: 59624 - DNA, 2549 bp, Heterodera glycines
atgaaaagcattcattttagaaaatacgcgatgataattttatattatttttttatctcatatactggtaaattcattcattattatcatattctattaatattgttaaaagtaaaaaataaacaattataattcttttttatttagtgttgctttgtatgggattatcaacaaaggaattgaaagatttgaacacacaaattgataaaattaagcataaaataactgaaacaattgggagggtaattttgaaaaaatattttttttaatttaaaaaataatttttaggaaaatgaaggaaaagaaacgatggatgacaaagtgatcaaaaagttggaagacattgccaatgccaaaattttcattgaaacgctgagtacctttgccataaatatgacagcacaagattatgcaaatttaatgttttttgagaaaaaatttacaattcccgaaatccaagaggagtataatgccagaaaagaattgcaaattttgaaaaagaaattggatgacaaaattgaagaagccaaaaaattctggaagaaaaatggaaaaggatgcaaaaatcaaagccaaacagaaattattgaaatgaaagtgaaacttgagttgatggatgtgatgaaggaaagcaatttgctaatgacccgacaatacgaaaacttagcgaaagaatgcgcaaaatttggagaaatggaaaaaaatgagtggggcaaaaaattggtggaaatgtttctcaaaagtttaaaagaaaagatggacaaattgaaagaaaaattaaacgaaaatgattggatgagaatcgacaaactcgaaaaaagtttgagcaaaatcataaagggggaaaagccacccgaagaagcggcgaaaagcaattcggaagaattgagcaaagagctaagaagcacttctgaagaagcgagcaaagccatggaaaagcatttgaagttggattggaaaaagattggcatttacacccaagaagagatgtccaattggcgtctcgcaatgcacggctattgggcactgattagttttcataaaattggcattgtgtcaaatgccaagaaaatcgttgagcttcttaccccaaaacggaagaagaacggggatcagcaggagcagcaccaagaaagcaacaatgacaaggaaaaatatcaaaaatggcttgaagaaaatgcaaaattatacaagacagtctacgcacgattgtttcctcaaaatgatgacggtaatttacagggctaggattttaggtgctaaaaccgaaaaataggttgtaaccctaatagatgctaaattcgattgcaaaattgtattcaaacaaatttcaagattttcaggagtaaaaagttttcgattgtccgcaaaatcatgaccaggatttttgatttttgaaaaatcgattcttacaaaacctaagcatagtcctagttatttgttttaaaatgactaaggcgagggacttacacccactgtgatagtgcataaaaataaattttaattagcagttttggtggtaattagtagaggaaattcattcatttttcttttaatggcatatgctgtattcttaaaacattgcttaaattttttgctttttaacccatcagatgcaaaaaagggacggcgtcggcgtaagcgcggattcggaggaggatcagaaacttccggctgttccagaagccgtgtgaattggagcgcatggctccaatgcatcagcctgattctgttgatcatcattctcatttggctgatcattgccgcactaatcgccatttgctcgtgcattttggctacagctgacaacggcgggcgacggggtggaggagacattttcattttcaactccggaggaagcagtagcagaaatagcagcagtagtgactgttgttgctgcttcggcaccagcagcagcagcagccgcgggtacagctacggacgccctgaactgacatattttgactcgtgcgcagttgtgtggtgggatttgtggaattagagacagaggaaagaaacggatgcacatttatggataagaaggaaacaaccgataagggcattttgaacgcaatttttatgggaattgtaagcgctcgttccgatgtggtgtcttttgaaaatttttaaaaaacaaagcgagaacaatttgaatttgcaaccgaaaagcaatttgagcagcggtgagcaaaaaaaaaaggaaattttagccgcctttcgccaaaaaataggactaatttttgccatttttgggtttaaatttcaaaaagaaaagtggtgccgataggcgcggccgaaaatttattttttgattttaatatattttctaagaaaaattgattagaaattttttacggatattatattttattttttcagaagcatcactttggaaccaccgcggaatttttatgttccccttatttttttttgggttttcggtgttacaagtcggaatttttcatcttcatttttcattttatcacttgaacataaaaggacctatctttttcccaatttgagtgttggaggaagtaaattagaataaa

SEQ ID NO: 59625 - DNA, 1346 bp, Heterodera glycines
atggccaacggaaaaaattcaaattcgacatcacctccgtattccatcgataaaacgactacggtagcgaaggatgataatgtaaataatgccgaagcagatgatgtcaatgaactacaaaattcaatgagcaaaaccacttcggtagagatggataaagacgatgatggaaatagtgcggcatcggacactgacaatgtagtacagcaaatttcaaactcgtcaccatcgtattccatggaaaaaacgaatactgtagagacggatgctgttgagaatgatgatgacgaaagtaatgcggcagcggaaactgacgatgtagtaccgtattccatggacaaaacgacgacggtagcgacggatgataatgagagttacgccgaagcgaatgatgctaatgaaccaccatactcaatgaacaaaaccattacggtagagatggataaagacgatgatggaaatagtacggcatcggacactgacaatgtagtacagcaaatttcaaactcgtcaccaccgtattccatggaaaaaacgaatactgtagagacggatgatgatgaaaatgggcagcaagagaatggtggaaatgcaaatggtggtagaaaacagaacacatcatccataagcatcagcagcagcagaagaattacaacacacaatgaatttgatgatgaattacagaacatccaaaagtcgaatggttgcgataccaatgagaatggagataataatgatggaatacggtatgaaaaaaagagttggatgacaactgagaaaaaatcttccaatattggtggaacaaatgataatgatgatgacggaaatgatggacggaagaggaagagcaaatggacaaaaaaggcatggaaatggaggaatgaagatgatgatgaagaggaggaagatgatgacgaaaatgaacaggaggaagaagaagaaattgttcagcgcaaaacaggtattagaaaaaagtgaaaatttaaattttcgaaatttagtaagccaagaaaaatgaaaaaatgggataaccgggattagaaattttttaaatcttcaaatgtgtataggattagaaaaattagaaaattgggaaaaagtgaaaaactttatactgaaagttagaattttaattgtgaattagcagggaatagatgttgaaatttataaaaaaaatttttttttgtcagaaatttccgaaaaaaatgatggaagaaaatggaagaaatcatggcaaatgtcttgggaagaagaaaatgatgaagatgaagaggaggaggaggaggaggaaaattataatgggaagaaggaggaagatgatgaagaagaaatgtttgaagagaacg

SEQ ID NO: 59626 - DNA, 541 bp, Heterodera glycines
atggcctccgacttccatttcctcctctttctgttcaccaaccatcacgtggaattcagcgtggccgagttgaagtcgctggtggcgtcggtgcgcaaaagcgacgcccaaggggcgaaagaatgggcagagcgaagtgaaaattggggcacgttgcttttgctgagtcaaagcggaggtaagtgaccgacagaggccgacgcggttaatagtgccgatggtacccccccccctttttgaaaaaagaaatttttttcgagaaaagattgtatcaggggttttaagggctgcagaatccaaatctgacattattttcgacctattcgaaccccgaacccgggttcgggcaaaaagtcgaaaattcaaattttcgatttcgcattttttgtctaaaaatggtttaaatgatctttaaccctgaaactatctttaagggatcggcggacattcgccgaccgcaccagtcagcgaaagtgacgccggcagttggaactgtcaacactgcacaatgctaaacccacggcagagaaacgattgttcg

SEQ ID NO: 59627 - DNA, 1398 bp, Heterodera glycines
tcttcaccgttcatttccgcattgtcactacagcctatgcattgcactccaagtgatatattttaattacaaaagaattttaaattcattttttttttaataaaaaaagagtttaattacaaaattcaactttcaacttgtttttcatttttagttcaatcattaaaaagaatttttaattgtattttgtccaaaaatctcaaaatttttgttgctttttccaagtttttgaagaattttttaagaggtcggacataatcggtgcattttttaattgaattttggtaattaattcttcaaaaatgccggaataagggcgaaatgcccagaatttgaacataggtatgtgcacatatttatttgcctcttctgaagcattaaaaataattggtattaattaaaatgtcagagaatttaatttcgctcaaaacaataaaatcgcagtcttatgcgaaacaaaatgaaatgtttttctgatagacgtggatggctcttgtcctggaaatttcttctgttggttttccactacaacgtcatcagtgaacgcgttttattgttgccgttcgccggaaagcagcatcgacacgggatgtatggaaaaatgtggtgctaggtcgtttgataaatccgccaatttagtttttcgacgaaaaatgacataacttttgcttaaaggtaatcaaattttacattcttggtatcattcgatagccaagttttttctctattagcctgcataattcaaaaaaaaattggtcaactttggaaaagttgcatgaaaaaaagtactatttctgccataactatgttaaatttggtaattttatttgaacttaagcaagctaatagagaaaaagatgggctatcgaaaggtaccaagaatgtaaaatttgattgcctttaatcaaagttatgccatgttttgtaagcatagacaaaaacagtaaataggtgacatataggaaaatgattatatcaatgttaattaagtgaatgaattttagaataattatcaatttcaaataccctaattcattttcctaatatattaaatagagatttttttaaatagaaatcgttataacgttctttttaatatcataaattgaaaaaaacatttatagtgccatacattcattttcattatgaaattatttcattttcagtaaatattaggaaaaaattaacttagattgtcctccacaacttgtgccggtgcctggcgaaggcgctataccctacagatattgctctccgtcggcaccaattaacgatggcattcaggtccgagacatattatatttataatagtatttttttaatgttaaattgtataaggaatagtataatcacatataataatacatatgaattagaagatgcggtataaacacacat

SEQ ID NO: 59628 - DNA, 963 bp, Heterodera glycines
atggcacggacgatgctattggcacggcatcgacggcgaagcaaaaggaatagggacgaagttgcgagagaggagccgaaggaggaggaaaaagccgaaggggaggacgaaatgaccgagtttggccagaatctgctactgacggacaatgaagaagaagaagggcacacgacgacggcgaaaacgaagcaaaaaaagacggcccaaaggacggaggaacagccgccgcaggggggacggacggtgctgcgaagttggcacaattgggtgggccgataccgaaacagactgaccggcatttcacagtcgggcaagtttttgttgagggggcggggggggcgagtcggaactaggggtaagtaacccgcaagcgaaaaaattgaggaaatgcagaatgatgtcccatttatgatcaagaccaatgcaaaaacagatttaaaatacgacagattaagtcaaaaaatggatttaccaattcagaagtgttttcgacgagaaatcaacgcttcgctgcttcgtatttaaagcccggccagcgctccacgctgaccggccgccttttgagcggggacagggccaccgtccgtttcaaagcttgggaagcgaccaggcaattaatcaattgtttgattggcatcattaaatgcctgaatgcttattaggtctctccaattgcgagtgtgctgtgatcggactgatcgagaagagaattgtgtgtttgccaccgaattgggcgtgaagcgttcgagccgaaaatggacggactatttggccacgtgtccccagggcacaaaaaaggtcaaatttcttttgcatttttctaaggcatcagctgggtgtttgccattattcattcatttgataattaatttcagatcattttcgagtgtagcaaccagggacccttcccaggggcgtgcggagtggacaacattcagctggtcaatgcttactggccatccg

SEQ ID NO: 59629 - DNA, 1705 bp, Heterodera glycines
ttgtccttgcccgcatccgattgaaagcaacaattttgctacctcatgtgtcgtttctgagcgaggtagccttgtaaagattttttttttgagaatttcttatcccctatcgcacgctttaggcattctgcaacactgcgcgtgccgtgagggctacgcgggcgaacgctgcgagctgtgcgcgcctggattttttggcgacccattggtgccaaacggcgagtgtaaacgctgtgattgtaacaacaacaacgacctgagcaatcctggtaaaatttttattttttaaaagaattttttaaattttttcaaccctcaggcgcttgcaatccgcggactggcgactgcgcgctgtgcgaaggcaacacggacgggcgccactgcgagtactgtaaagcatggtaagtacggtggataaagtacggtcgatgtgaaaatttattaaaatttttaaaatcaagactaagttttcataaaaaataatttatgctcaagagctttcgaattttcctagaaatttttctgcaaaacttttagtcattaattttaaaatcgtaaatttctccataaaaaacgaaaaaaatttcaggaattttcaaattaaaaaatatttcaatttctttttagctaacttcaaaatttcttacccttaataaaaaatctaaaaaaatttaatgtaattttttcaataggtattggggagacgcggtgcatgcaaagaattgttcgttgtgcgcgtgcaaccaatgcggcgccgcgtactgcgatgggcaaaacgcgcactgcgagtgccagccccgtgtgaccggtccattgtgcgatcgctgtgaagaaaatgcatggggctttgactcgtgcaagggctgcacgccgtgccagtgcgggttggccgcgtccaactcgcagtgcgacctgaagaacggccaatgcgcgtgcatgcctggtgcaggtgcagccaacaaaaaaaaaactatttttggaaattttttttttatacgaaaattttcaaaagctggccaattttgtgatcaatgtgcgcatggcttttggaaatatggggcccatgggtgccaaaaatgtgactgtgaagcggacttgtccatgggcacggtgtgcgatgtgcagacgggccaatgccattgccaggagggggcaaccggtgggcgaatgttgttgaaaaaattgaaaataaatatttaaaaataattaattttattttttatttttttctgtttttgggcaaacattttctataattaaatattttttattggattttatattcaaattattttattaaatatttttgtcatattattttattaatttaaatgttaataaaatattgttttataagttactataactatatatttttttaaaatgcaaaacttttttaaatggttgggcaagtattattttaaataatttttaaacaaataattatttttaaattaattctacactaaaatatttttgcgttaataatttttaatttttgaaaatatatttatttatttatttttttttaatgttgaataaaactaaaaaaaacattttctattcttttaaaagaaaaaatatgtagtaaaataatttattttttggtgttaaggtcctcgctgtgacaaatgtctaccagggtatttgcgtgtgccaaactttgggtgccgtttctgcgacgaatgcgtttatgctttggtaa

SEQ ID NO: 59630 - DNA, 184 bp, Heterodera glycines
atgcttaataattttattttctgcgcttttttcctctgctttttgcatcgttttccacttggttctgctgctaatgatgaaattgatgaagcaatgcccgggtttggtgaagaaaatgctgaagaaccaaaggcaagcggagcaattccgacggacaaaaaagccgaaaaagaaacatttgcaa

SEQ ID NO: 59631 - DNA, 110 bp, Heterodera glycines
attttctaagaaaaaataggagttttgggggcgcggcggtgccgataggcgccgccggggaaaaaattggaaattttgatcatttataaacaggttttcactgaaaatta

SEQ ID NO: 59632 - DNA, 381 bp, Heterodera glycines
atgcctttggaagaggctcgagagtttcgttctcgacttgagacaattttagttttttcattacttttttatttaatttttttttgctcacaatttttcggaatggcaaatgcgccacgaaacgtttttgatcaagcagtaaaactatttgtatggaaacgaagccattatcgttgggctgcacaaagaaatgggcgagtaaaaattcatcggggcctttttgatagtttcgaggaccaagtggcaatttgtaaagaggcatactcttgttgaacttgcaataacgaccttcgaggttctaggaaaagttgaacacatttaactattaattttaaaaataacaaataattaagcatttaattttgaaaaaaaaattataaa

SEQ ID NO: 59633 - DNA, 1406 bp, Heterodera glycines
atggctatgcatttgggcgaaaccgtgccaaaagcccggttctcaacagagacacgggtaattccctttttctttttcttgcttttgtttacaattatattcgatttgttcattcagtgaccgttttgaactatcccttcgagccggtcactattccgccgggcatcgattcggacgaatttcgacgagcattcagcgcagcgcaattgtatttggttggaacggcacatttcaggtttcttgccatatcttttcgccgaaattactttttttttgattatacaaaccctcattagatggtcaggatgaattatgggttgacgggcatttctaaaacatttcttggtatcgtccgacaatcttaacaaaataagtcccgactatccatggagtttcgggattgaatcgtagtggccaatagccatcacgcgcttttcgatgccattttcaaccactttttcagcaaggaaagctgccgtgatgtgatgcaaacggtgctggagacccagcccgactttgtgatggtcgaactgtgctcttcgcgcattcaaattctgtccatggacgagcaaacactgctgagagaggcgcaggcactcacacgccagaaaatactgacaatcatcagagaggtggaagaagtttcagaaactaacaatcacagttaaagtcgaatttagcattttttttagtttaatcgacgaattaacagtaaatactaatgacaattggcatgcatattcacgacttttgttagacaagcttcgcattgaattcagttttaacaaccaaattttagtcaaaaaatagtctggccgtacaaaaatattttagttgtgcacattggacgtgacttactacccattcgtactgcacagctaactaattgctttccccgtccgctttcagaatggactggcccagggtctgctgcaagtgcttctgttgtccctgtccgcccacatcacccaacagttgggcatggcgcctggcggcgaattccgcgccgcgcacgccgcctccaaattggtgcccggttgcggtgtcattctcggcgaccgaccgctcaatgtgacgctgcaacgcgcgctcagcgctttgaacatcttccaacgcatgaaatttttcttccacttgaccgtctcgctgggcatggaaattgagtgagtgaacggtggggaaatgatggaacaaattaactgatagaatgcaatattgtggagttttggaattcattgaatcaaaaatagctttaattatttaaaaaaggcctcccaattccctttcattgacagtgaggccgaagttgaacgctgcaagaacatggacatgctggaagagatgctccaacagatggccggcgaatttccgcaagtgtcgcgcattttggtggacgaaagagacca

SEQ ID NO: 59634 - DNA, 2232 bp, Heterodera glycines
atgccgtctttcactttgccgatgcctcgccatcttgacgccaacagtttccagcaaatgttgctccacaacatcgacacgttcatctttgacgctgatggtaattttttgggtatttgtatttgagcaacaagtcaaaatctaattttgaatttgttatcttggttgctggattggccaccaatttctgtggaatagataaaaaaaaattattttgtttccccacgaatcttaaatttcaggtgttctctggctcggcgagcagtctatccccggttcatcggatttcgtcaactttttggccaaaaacgggaagcgcatcatcgtgttgaccaacaacgcgaccaaatctcgcgcggtgtacgctcgaaagcttggccaactcggcttcggacgctgtgtgaacgaggtatttaccgaagagcaaaatggagggaaaataaaatgaattcaatttaatcaaatacctttcccaaatttaaaatcattgcgattgatggcatttcccctccaaaattcagcataacatcgtcaacccggccgccgttgttgccgatttgctgcaccgtgctggcctgggccaaggctcggacaagaaagtgtacctgatcggtggccaaggcgtcaaggatgagatggaccaattgggcattgactacttcggcgacgggtttgacccggtggacgagcagccggcctccaaagggtctgccttcctttacgacttggaattggaggagaaattggagcgggtcggtgcggtggtggtcggttacgagaagtacttcaactacctaaagctgatgaaggcctccaactacttgcgggtgcgtttgtcagtgttaaagtaaggggatgggtagcgaaaaccttacgattagttttttttaactttcattgccaactattatggagttttttgggctctattgctctttatgggtccaatcaattgacaatacctgttttttatataataactttgtccataaagcccaaagtctgaataatgtaataatacgagaaaacaagagaattttagcatttaaagaaagttacaaacgaaaataatcaaatagggtttgttcgaacatgaacaaagtattgtacgtgtcaattgattagacttataacaactacctttggactcataaaagtgcaatatagccgttttttgaacgggagggatgacttacgcagtttaccaagaataccgaattttatatgtattaaaaacagtccatttcaagaatgaggactgtatgttcgtggccaccaacgaggacgagacgtgccccggcccgatcccgaacatggtgatcccggacgcgggaccgctggtggcagccgtcaaaacggcatcaggcatgtttcccacccatttgttgtacgtacgtgtatgccttcgtttcaggacgcgacccgcaagtggttggcaagccgaacacgcccgccttcgactacatctgccgccgatggaccatcgacccgcgccgtactttgatggtgggcgaccgtctgaacaccgatgtcaaatttggcaacgatcacggactgcgctccatgctcgtcctgtccggctgtcacggggtgaaactgctcgaaaatttttagcgattttgcatgaatcaaaatggtggaaaaggctcagaccccgaaaatcccccctctcgaaatggcatttgtttggattcttttgtcctcggcatttaaaattttggaaatttgttttaaggtggacgacatcatggaaagtcaaatgcaaggccgtgacgacctgatgcccgacttctacgcgaacagcttgggcgctttgatgctcaagagccacggctgtgccaccaaaaaggaggctgcggccgccaagagcgcttgcacgcctcgggccaccgcttttgtgtgaggcaaagggtgagagaagaacactcagggaaatgaccagtggaggaggagagagacagtctttccgatgagagaaacagagacaaattaatttaaatattacttttttgttgtatctttattctctgggatttcatctgtccgcaacataatttctccttttaccataatttggaggtatcctccattcataaataattttgctcttcattttctcctttgtaacatccatcaaaatttatctctcgttctctcatttataatctcatttcttttgtaactataaaaattttgttttgagtaatacaaagaaaatgttttttaaataaa

SEQ ID NO: 59635 - DNA, 776 bp, Heterodera glycines
atgtttcttgcgactgatccaattttgatggatctgcaaaaagcaaacaaaaaaagtgaaaagcgaaaattaaatgacgaagaacaagacaacacacgacaaatgaagaaattaaaaaaaagcggaacaaagaagaccgattgtgaccagaacgcaatgtcaggcaaaaagatggaacattctgttttgaccgggcacaaaagtgacaattcaaacgcacaaagaccgaatggaaacacttcaaattgcaacaaaagtgacaagaaaagtgacgctacatcaaattctgtgcaccctcaagtaattaattgaacaaaatgaaatttcaattttaaacttatgtcaggttgcatcggacacaaaatttcccattccatttactataccaaaagtatcggcgtctttttcggatgcttccaaatctccacttccatcagcactcacaaaggaagctaaaaatgagctgtccaattttgaagccgaaaccaacagccaacggactctgcggtacaattgttttccctttattcagcttctgttatttattaatctgtaaattctataaattatttcataacattgcaaaagaaataatgaaaatttcaaaaattcttttgccttcatatttttatatttatagagataacgaagaattcccactgaacgacacaaacattccaatttgcaatgaagcgaagcactcagaaacagaatgttcaaaaaaccaaggcagaagaaagcgggaaacaaacaaattgccaaaaatttccgaaagg

SEQ ID NO: 59636 - DNA, 131 bp, Heterodera glycines
tacacattgaaacgcactcaaacggaggcgcgagtgttttgcgctgcgattggcgtcgcttgaaacacgacctgagctctcaagaactcaagaagtttgctgaggaatttattgatttgggcctttctgaa

SEQ ID NO: 59637 - DNA, 620 bp, Heterodera glycines
atgaatttgcgaatattacttttctttgctgtatttattccttcagcgaggtctttctatttgccaggtttagcgcctgtgaacttttgtgagggaaaggataaaaagcccacttgcctggtaagttttacccatccattgacaatctgcctccatcttttacagaataaagtgactttgttcgtaaacaaacttgacagtgatcaatccgtcatcccatatgaataccacaggcaaattaattccaatggatattctttatagcgatttggttacagcttcgacttttgtattggtagtgagcaagagtcgcctgtcgaaaacttgggtcaggttttgttcggtgaacggattaggccaagtccctatgaggttttctgttttaaaaaacaatttaaccattgccattatttcagataaatttcaaagaaaacaaacagtgttcgtacctttgtgagaaggattacaaaagttcggacaaatcacaccaagaaaaattgcggttgcttcagcgtggaatgaagctcaactaccaacaccattggttatttcgtcgggttttctttctaaattggaattcaggatcattgacaacaaacctgtcactttctgcttcataa

SEQ ID NO: 59638 - DNA, 191 bp, Heterodera glycines
atgacggattgtccggacactaatttgaatgagaatgggaatcaattagtaactccatctactaatgccgacgaatgcaagcgcaaatctactaagcagacagaagcatccaaatgtttaaaaggagaggaggatgacactggtggattgggatgggatataaaattgaatcgattcccgcgggggatttg

SEQ ID NO: 59639 - DNA, 393 bp, Heterodera glycines
atgttcagtgatcagaaccgcatcatcttcaacttgcgatcgcagttgatagatcaaatggctgtgtgttacagaatcgcgcacatcgaacattggaatgcttcacatcgaatgtaatttttattctaaacctctgagcagtttaaatttttatatgaaaaatacttattttgttaagaaccatgctggacgcggaaatttccacctccgctatattccgatggcagctgctactctactcgggcaacgtttcgaggagagagctcgtcgccatcgaatggctataggcgcaacagcatcaacttccgcttcgaatggagccaatggagtcaagggttcagttgagggaggagcagcaatcaatgagaacggttagttgttaaccaaaataaa

SEQ ID NO: 59640 - DNA, 705 bp, Heterodera glycines
atgttgttcactgccattgaccgactaattgtcatattttttgatgaaatgtaaaaaatagacaaaaaatcaccatttatattaaattttacaggcaaaataaacgcaaaatccgactgtatttgactacgataacattgatttgctctattttctgtatagatttatgtttcactttttatcagaatattgaattgtatggtgatcagatggtcactggacattacatcgattttttcatggtttttttaaaaaacaatcttttattataaaatgaaagcagcaatattcctttaagcatcctaatcatcaaatcgcaatttacttttgcttcactttaatgactatgattatttatttgtttgttggaatagtgataaaaattaaatcagcaggtggccagcaaattaataaaaaattaattaattaaggaatattttaggtttaccctcagttgatcagattaattatcgtacttttcgtgcactttcatgcattatcatcgttaacattggtggatattttatttcggcactttatgccatgttaattaggccctcaatctcttctccgatcactgcttggttcggacaagcgatcactggaattcctttgctcattggtgcggcatcaaatgggggaattttatactttacgaggtgttataaatatttgaaaaaaggattatttttaaataaattttag

SEQ ID NO: 59641 - DNA, 773 bp, Heterodera glycines
gcccttgctgcccaattgtcttcatcgtcttcgtcgtcagcgcttgcggcggcggcggtgccgttggaggagccgtgtcccccgcggcgtcagtcggacatgttcgacgaggacgacgacgaggcggacgtgttcggcagtgaacgacggcggaacgatgaggacgacgaggaggaggaggagttggacctgttgctggagaaaggggccaaattttcggtaaattttcagcaatttttgttgggaatgatgaaaaattttcatttgaaatttcccaacatgtcctcctcaatttttgggcaaattttgtaccatttaatgggaaattttttacttacctttgacaacgactgcaattagcataatgatgatgctttcgttgacattttggctcaaataacgacttttatgccacataaacaattgtgcgcgctaccattggcgcctttttttttcttttttaaaatttggaggggtgtggccgcataaccgaaaagtacccaaaaaaatttcagatttttttttgtgttcttgaaattttgcaaatttttttttcagtaacaccatttaggttttggattatgaaattattaaagaaatttttttatttttttttgtggcgacattttgttccgctccctttgccaccaatccgaataaaacaataaaatacatttttctcaatttaaattgtttttcaaggactccgccatgctcgacgtcggcggcagcagtaggggcggcggttcaacaccgggccccggctacaccta

SEQ ID NO: 59642 - DNA, 843 bp, Heterodera glycines
atgtacaaaattgttagaagaggtacaaaagtgattagaagaggtacaacagtgatcagaagaggtacaacagtgcttaggagaggtacaacagtgattaaaagaggtaaacagtgattagaagaggtacaactgtgattgattagaagaggtacaactgtgattagaagaggtacaacagtgattagaagaggtacaatagtgattaaaagaggaagaacagtgattagaagaggtacaaaagtgatgagaagaggtacaacagtgatgagaagaggtacaaaagtgattaaaagaggtacaatagtgattaagtctgctggtaactccccgcccagatcaaaccctaatgagttattcaaccgggactgaactggacaaagttggtactgaataagtccacgaacctacagcctttcctattgcagatagaggcttggaattttttttgttttttagaaaacacttcaacttagccccctcacagcagacattttttgatttgggttttagaaaaaaagttacgggcccccaaatgcacgaaaaaatgagaaatccgtccctgggactcagtcgtccgcgctaaatttttttctatagttttcccggattctcctcaaaaagttgtaagacccttccactactttcagggcgctcccggccttcggccgggagaaaatggttttagcaacgaaactccttgtcaatataacatatatagtaactagcgggtgcgtgaaccgtcggctatttagctgggaaaaagcgcttcgcgctttgggagcttcgctacctagatcagttatgggttgtggagtaattgttggtccagaagatatttga

SEQ ID NO: 59643 - DNA, 802 bp, Heterodera glycines
atgacaatgaatgtcctggattactgtaggctcctttgtgtcccattattccccatttcaatacagtatgcaacagtaacgcctttattacgggaaaggaaatgatacattattaggctctttacccgcttagggctcgggaacagagactgcccagggagagaggctcgttatgaataaagtggtcaagagcaagaccccgggatcgtaataaatcactgctgattttattgctttgattgaattattatttattcgaatattataatatgttttcgtcaaggttttttgtattttatattttacatatattttttgccaggtcaactgatcgccagccatttaaacgcctgtcagagttcagaattttcagttttgtacaaaacccattgcatggttttggcaatcccaaacgtttgttgcttgggtggttaatttccaaaaatcagattacgtgattggtctctttttattacttgaatatttattgcctattagatagtaaaatttcaaaaagttaatgaatttgaggattatagggtgcatttaaatttagggttatagaaatataaacaattgaaaaaaatatttaatccgtgataaaactgttttgttaatatatataatattaataataattagagatcgacattttgaaaatgcctggacctggacctggattccatgttggacctggaccttgatttcctggacaaaaatccagaaaaatccatgtccaggaaaaatccaggctcctcgagacctggatccagacctagatccaggaaaaatccaggcctag

SEQ ID NO: 59644 - DNA, 251 bp, Heterodera glycines
atgcacaagacattttttcgagaaaatcgcgatgaaaaaagcaattctcggctgaaaaataagaaattgaataaatttgtggtgaaacgatttttgctcttaaagggtgggaaaagtgataaaaaggtgtttttggcaatttcgacatggttggacaaaatgtcgacagaaaacaagacaaagtgtgtcgatccaatggacaaagtaattactgctctcgaatgttaccaataatttataatttttagtga

SEQ ID NO: 59645 - DNA, 471 bp, Heterodera glycines
atgtatgtcgaagcttgtgtaacttttcccatttcacaattgcccaatatttttgaggctgttcaattgactcgacttctcgacttggaagtgagacaggatttttcactattaaatgtaaaaattaaatttttataatattttaagaatttgccaatcgttgtttggattatattgatacaaaggtggaaactctgctcagaacaaatgattttttgcaaattgatcaacaattcttgtgcgaaatctttgggcaggaaaaactgcaaattaatggcgaaatttcactttggaatgccgtaaatttttctgggatttttctttttttatttcactaaaattaccatttttggtgccaaaactgttaaaaatgaaaaaaaaatcacataaatttttaaatttaggtatgaaatagtaatttattttaaatatttctttttgtttttaatttttatatgtttttctaataaa

SEQ ID NO: 59646 - DNA, 1132 bp, Heterodera glycines
aaaacgatataaccaaaatataaggaaaaattttttaatcatctttttctccatcttcctttttgatactaaagcatcagagtgctaaaattaagttgtaaataaaatttggtgcgctttagagcactttctgaaaaaaatatttatgaaacaaaaaaatcgattttttcaagtgtccgtttggggtactcaaacatttatggggagcaaaaatccaacgcagaattaaagtacaggctatagggaagctattcccgaaggattcggtctccccataaatctgggcgcatcggttcggggggactgccccgaaaacaaaaaaatcgattttttcaagtgtccgtttggggtactcaaacaattatggggagcaaaaatccaacgcagaattaaagtacaggctatagggaagctattccggaaggattcggtctccccataaatctgggcgcatcggttcggggggactgccccgaaaacaaaaaaatcgattttttcaagtgtccgtttggggtactcaaacaattatggggagcaaaaatccaacgcagaattaaagtacaggctatagggaagctattccggaaggattcggtctccccataaatctgggcgcatcggctcggggggactgccccgaaaacaaaaaaatcgattttttcaagtgtccgtttggggtactcaaacaattatggggagcaaaaatccaacgcagaattaaagtacagactatagggaagctattcccgaaggattcggtctccccataaatctgggcgcatcggttcagggggactgccccgaaaacccaaaaaaaaattttttggataaaaattatttaaatgaactgactagataatatttaaaataggttatttctcttcctttcagtatccctgcaaagtttggtgcgcttctgatcagtttctgaaaaaaaagttaagcctaaactttttggcctgtttaaaaaggaattaaaaatttttaaaaattttattcatctccctttttgatagaaaaagcatcagagtgcctaaactaacatgtaaataaaatttggtgcgtttcagaaccctttctgaaaaaatatttaagaattaattttgcaaaaaataaataaaaacgaaagact

SEQ ID NO: 59647 - DNA, 1442 bp, Heterodera glycines
atgaaagaagacgtaaaacttttgattgatgcatgtgatgggtgtcagagaaggaaagtccaaccaggtcaatcaaatttctcaccaagtgttccgataaaagcagcggaatacccatttcaaagggttcactgtgacttaatgggtccaccacttaagaaaactgaccgaggaaatttctacatttttctgacaatcgatagtttttctaaatggataacagcaaaagcaatttctgaccaaaaagcggagactgtttccgaagcttttgtagagacagtaattcataaatgttccaccccagaaatagtcgttacggaccaaggcagacaatttacttcagaaatatttagtaatttatcaaaaatttacggtgttgagcatacaatgtcaacggcttatcatcaacagtcaaatggccaagcagaaggctcaatgagaattgtagctaatattatgtcacaaataataaatgaaaagggaaacaattgggataaattactgactcatgcattatttgcttataatacagctatacatacagttattaaacacacaccattttatatagtatatttacgacattctaaattaccagtagaccgattgctaaagttgcctaactccgaaaatttagagtcagatatatccatttatacaaaaatacactcagaaaaggcatcgaaagcttggaaaatagtgcgtgaagaaatagaaaaaggacaagaaaaatttaaaaaggtaaatgattcagtcgaaaagcgacagaaaagaatttaaaattggtgttggatagtgaataatttgaatttatggcgatctgacttattgactttatttgttatttctatgtccatccgcctcctccctcgtccataaaagtggacacctcctcccactttttgttctttcctttcatcattcatttatattttatttcccaatttgccctccgaccgaatcaataaaattatttatttatttctttttctttgtgtgttctaagtggaagaacacaacaattggtgatttagttttgttaaaaaaagaggtattaaaacataaatttgaccaacgttggtcaggaccatttcaatgtgtaggagtggaaaaagaaaaaaataatataattttacaatcgctaaataaaaaaggaaaattgcgaaaagtccaccaagaaaagaaaaatgtataatggaccggtcgatcttccattgagggaagcggatgaacccttaaattgggaaaaatttgtcaatgacccgaatttagaattggaggaaaaaactgacgaagaaagttttgatgaggaagaaaaaaatactgaaattgaaaatttaaataaagaaaaaagggacaaaaagggagtagaatttaaaaaatcattgaccgaatttggatttgaaagcagtgaggaagagcaggaatcacaaatcgctttt

SEQ ID NO: 59648 - DNA, 145 bp, Heterodera glycines
gggtcccaggttcggttcccagtgcatgctattgatgtatttcgatgattttaatgaataaataaaaggaaaagtgaccaaaataattttaaaattgtttcaaatttttaaaaactttatttgtcacttgtaatgaaaaaaaaaa

SEQ ID NO: 59649 - DNA, 953 bp, Heterodera glycines
atggaacacgacgagcaacaaatgtcgatgctgccgtacgaccatggaatggtgagagggaggggggggggcggagcgggggacccacgcgtttcggcgctcccgtttcggcgccagctcgtttttccacttaagcttttttctttggcatccaaatccaacaatcttggtatcattcgaaagctcttaacatgctctattagccttatcaaaaacgaaaagtttttcaagcctgtaaaaattttattaagaaaaaatttcgacttttcacaattttcatgcataactgttttgataattgtctaatcgcaaagcaatagcttagaaaaagcttctaaatagattaagctttcgaacgacaccaacaatactggatttagtttacaaagaaaaaagttatagccaaaaacatgctggcgccgaaacgcagtggaccccggagcggtgccgttcaattgcatgttaaaatattcatttcttccatgtttagctgttgtctgaggacgcggaggaatttctgctgtttgatggtgattttttggttcgcaaaactgaagaaatttccgacgatggacgaatttttgtgttgtctgtgaatgtcgctggccgagtgagtcacattgttttttgccgacacgaggccatggcggggatgtacaccattgagggcaatcctgagggtttcctaaccatcgaacaatttgtcaacaattatcttgggtccagaacttcgatcatcagcgtaagacaaagcttgaatttttttttgttgcgtgattttctattttttcaggggcaatctttattaagtaaaagcctatccggcggtgggaaaatttcacaaattttgaatgaaatttgcgatgaaaaatgagttaactttaattaaatttattatttaatttatttaaaattttttggcattctgtcttagaaaaattttcaaaaaatca

SEQ ID NO: 59650 - DNA, 925 bp, Heterodera glycines
atgcctaaaagaaaattattgagcaaaattaacgcaagaaattcaacgcaaatcgtgaacaaaaaagggaggagcggacgaaccaaaatggcaaaggcgacgaaagcccgtttggccaagaagagtgagttttttcaccaatttttaattcaaaaataatttttttaaatttcagccgctccaccgccgaatcccaatcccgaaacgccacagcaagacgcagggccgtcaacatctgctgcacctgccgaagaagcgatggagccgccgccaccaactccaggaccagtgctgacgcccgagatggacgaggaaatcttggaatttggcttttcgctgccgtcgacatctgtcacaccaatcggcgatttggtgccgttttcgacaacacaaactgcgccaatggacaccggagagacgaccccgccaccgctggctattgacgagcgatcagagcgcatcgaacagctggagaagaaagcgagacatgacggggaacagcatccggaaaatcctcgtccacgccgatcaaatggaggcccttttcgagatggaatggggcaaaataatttgccaaacaatggcacatctgggaaaagttcaaattttcataatttttcaggagatgaggcactgcattccctttggaagacgatgccggacgatgaaaaaatgcgccaacagctggagcatcatttcgtctcgaattggctgctggacaccggtagatttgacgaattgaagctggtgggctgacagaagggaattttaaaaattttaaccaactaattaagcgggaggaggaacaacgggagcaagcggaaggtgacaaaacgaatgaagaaagtgatcaagatgccgaagtcgatatcgttgactgatcgcggattgatggttttttttttcattacaagtgacaaataaa

SEQ ID NO: 59651 - DNA, 450 bp, Heterodera glycines
atgacagcgcttatccgtgcttttctaaaaatattcgtcaaaaacataatatccaaacgaaacagacccaacggggctacgaactcagtaggttcggagtatggggataagtgttcattttcaaaagtcatgatcatcttatcatgtatttcctagatatattgaaacatcctaatataatttttgaaatttcaagctaataagcaactcatgggctatcgtatgataccaaggaatacaaatactcatgagagggttggaagaagacgagaaaaagccttccggcaatactgcgcgacaaattctttttggtaaaacttacttcgacacgcttttattatattagtacagcgagtgttgaatgagaaaatgaagaaggtgaaaaacagatttttactttttaaagacgcttttcaaaagtaaaaaagaaaaatttaattgtttattaaa

SEQ ID NO: 59652 - DNA, 89 bp, Heterodera glycines
atgaatccgcaacagtactcgccgtctgctcaaccgcaaatattccatcaacagtacccacagtattcgccgtacggtgggatggaagg

SEQ ID NO: 59653 - DNA, 691 bp, Heterodera glycines
atgccaaacaaatcaaacagtcgccaaagcaatttgtttgcattttttcaaaagaagccaaaagatgagcctatcgaaaaggaggagaagcagcaaaaggtgagtatttttgacaagaaaaaacaatgccttattaatggtgagtttttagtgtgttgagaatgagtgcgagaattttcacacgccccagcgaaagcggacggaagcgacccgaaattctgtcaacaaaagtcagccgatgacaccgctgaatcagcaacgaaatcagtcattggtggcggaaccacggaaggacaccacagacaataacacgacaaacgcagcatttaccgactcggaggaggagggggaagacagttcgtgcggcgttgggtttatgagttgcgcttctttggccaccccttcttcggctgaatgtgcttcggcaccgaaacggcgacgagtgattttgtcatctgacgacgaagaagagaaaatgatgggaaatggacagagaaaagaccaaaagggggacgaaacggagaatgaaccccaaagacaggcgacgaagcgaaagcgaagggacgcggcgaaagaagcgaaggaaaggacgcctccttccgttgtccgtgtcccgcgggacgaaatacagacgacgccttcggcaaaatgtgcacattcattcatcaattcatttgtatgccatctataa

SEQ ID NO: 59654 - DNA, 1034 bp, Heterodera glycines
  unsure (1)..(1034): unsure at all n locations
atggtcacctggtcggcaaaagacggcttggaaccgatgagcgaatttgttaattgngtgaagggcttcagcagatttgaaacggtcgcttttgcacattacgggggacggttcgactcgcatttcgtcttggccgaactatcaaggaaggaaaacgaaactgagctaatgatggcggaccttaagatctatcaaatcaaagcaggaagggtgtgctttcgggatttctggatgcttagtcagaacaagttggcggatctccctaagaccttgggactgagcatcgcggccaagttgtactttcctcacaagtacaacaaaaatgagaactttggcaagagattgcccaatctgccgccacttggagactattgccccgacagtatgaaggaggaggaagcggtaaaattggaatcctggtataagggtaatttcgcaacagatttcgaattaggtaggcagaaaaaatattggcttcttaattaaattggttttaaggggaacagctcagggttttgcagtgaggtattttgaatggttggcgcaacgcaaaggggtgaaagttcgacatgcctgcaacggcggggaggttgaatttggaggtgaaagtggactgtgtgattggtaccgaaaagaaaatcattgaatttcaggttttaaaacatatatatgtatgttcaaatttctattactccagggatgtgcatttcacgggtgcccgaggtgttatctgccgtggacgattggaccaaatgggcgttgcatggaagagaattacagaaggacagagatgcggatggaaaattgagagaaaagtgtatgttaagggcagcgcccttcgggtttcgagtgtggtcaacataacgccacacgcaatgccttttgacccaatcgatattcccttcccctctgttcgtttgttatttaaattcaccctttccctcattcatgttcactcttccctattcagttcactttttgtgcaattgacattattgttcttccccaatttctcttcatttattttcttctaa

SEQ ID NO: 59655 - DNA, 3133 bp, Heterodera glycines
atggcacaaccgacggcacaagagcttttaaagctgattgccgaccagcagacggcgatgacacaacagcagcaacaaattgcacagcttttagctttgcaacaaacgcaaaaggctgatacagtgctcacactgccggatgtggccatcttcgagccgagtgatgacaaatcgcgaataagcgaatggctaaagcgcgcacaattcgcaatcgattgcgtgtctccaaacgcatcggacgctgtcaaggttaaggcgattatgaacaaactctccgaggcggcattcagcgagtacaccaaattctgtctgccagagcccgtgacaagtttcagcttagacacaacagtcaaaaagcttgagaagctgttcgccaagcctcaatcgatcttcatcgaccgatttgagtgcttgatcgcccgcaaaggggagggagaggacttccgatcttttgtcaaccgtctcaagcgtttgatcacggatttcaaattcagcgacttaaaagaacaacagttctatgtcctgatgttgctgacagcgctcaaatcgcacggcgatgcaatgctaaggcaaagaattctgtccaatttgaccgcggatggagacaacatcacgtatgatgcggtggtggaggactgcatgaattttatgactacaattgcggaggccaaagtcatcgagtcttcgtctagtggaagtcaacgaagtcatgccgtaaatgcagtccatccaaaacgagaaaagccgaagtatgagagaccaaaaagccaacaaagcacaaagacggagcaacaaaaatgctggaggtgcggtcaaacgaaccatcaccacgcagcttgcccgcagaaaggctacaaatgccgaaagtgctcacaaaacggacacatcgagtcgcgttgtgaagcagtgcaggaatggcgcaaaaagaacgccaaaagttggctcaagaaaaatgttggcaatgtccacatagtgacagtcaacattggcaccacagcaaaaccgacaacaaagtcaacattgctaagggtcaaggtctcctttcaaggcaaagtcatcgaatttgtcctcgacagcggtgcagaagttaatgtcataaacgaaatgacatacaaattgatcggcagccctaaaataagacctgcaaaagaaaaggcagtgctttacaatggaagcacaagaagcttcatcggaaaagggaccggcacattcgaattcaacggaatgaatgttgaacacgagttttatgtggccggcaaagattccctaaatttgctgtctattcaaacaatggacgcatttgggctgctcgacgaattgaaggaaaagatttcctcaaaaatggtgaacatgtgcaaaggcggtaataaggagaacgctccaagccgaccaaaaggcaccgaggtcaacgaatacctcaccaagctgaaagaaatttttcccaacgtgttcaaagaagaactcggattttgcacaaaggcaaaagcaaatttggtcctaaaaccggacgcacagccaattttcagaaaggctaggccggtaccttacaactcacgagaagttgtcgagaaagagctggaaaggttggagagcctaggaatcatcacgaaagttgagcacacggattgggcggcaccgattataatcgtgaaaaaggccgacggatcagcccgtatgtgcatcgactactcgacgggcctcaacaacgctctattggaccatcagcacccacttccgttgccaaatgacatttttgcgacgctgaatggtggactagtcttctctcaggtggacttaaaagatgcctacctgcaaattgagttgactgctgaagcaaaaaagctatgcacgatcgcaacccaccgtggctattaccaattcaaccgattgccattcggtgtgaagacggcaccaggaatttttcaatccatcatggataaactcctggccggactcgagtttgcgacggcgtaccttgatgacatcataattgtcagcaaaacaaaggacgagcattttcaaaatctggaaaaagtgttcgatcgaatccaaagctggggatttcgggtcaaaatggacaaatgtgcatttttcaaaaaacaaatcaagtatcttggccaaatcatcgacaaggatggaagacgacccgacccaagcaaaatcgcggcaataacaaatatgccagcaccaaaagacgtcccgtcacttcgcacgtttcttggaatggtaaaccattaccaacaatttgtaaaaaacatgcgattcgtccgacaaccattggatgatcttctgaagaaagacaaagactgggactggagcaaagaatgccaagaagcattcataaaaatcaaggaaattttatcctctgatttgctcctaatgcattacgacccaaaactggaaattatcgtggcagctgacgcctcagatcatggaattggcgcagtcatttaccaccgatttccaaacggagcaattaaggccatcgaacatgcctcatcatctttgacacccgctgaaagaaactattcccaaatcgaaaaagagggattggctttgattttcgcagtgcgaaaatttcacaaaatgatctacggaagacaattcattctccaaactgatcacaagccactcaatcgccatttttggcaacaaaaagggaatccgccagatgagcgcgaaccgtcttctacgatggtcactcatgcttttggcgtatgacttcgagattgagtatgtgaacaccaccgaatttggacaagcagatgcactctcgagacttattgcaaaaagcaccggtcccgatgaagatcgagtcatcgcgtccatggaatttgagaaggaagccgaaaatttcttcatcaacactttggaaacagtgtcactctcatcgaaagatataatttcagcaggaaacgaagacgaaaccatcaaaaaggttaagaagtttgtcaaagatggatggcccaatgacaaagcaattgcttcggaaacggaagaaattaaattgttctttcgtcggaaagatgacctctccatcacaaaagaatgtctgatgtacggagaaagagtcgtcatcccgccaaaatttcgagcgaaagtcctccgaatgctccacaaaggccatccagga

SEQ ID NO: 59656 - DNA, 65 bp, Heterodera glycines
taactttttatgagatgtacaaaaataatttcataattttaaatataattttatagaattaggtt

SEQ ID NO: 59657 - DNA, 724 bp, Heterodera glycines
ccgaagtgttcgattgtttgagcctcgccgcggttctacacccctgcattttctgtgttcacggcggtctttctccgtacattcgaaaccattgaccaaatcagaacaatcgacagaaagcaggaggtccctcacgaaggtgggcaaagggtcccttttcaaaacaccacaaaaatttctcaatccaaaggtgcaatgtgcgatatgctttggtctgatcccgaagtacggcatttttgtaccaagattttatgttattcttatttaattttttgaattattgtttttttctgtaaggagtgcgtcggcttcgctatcagtcctcgtggtgccggctatctgttcggttctgatgttgtgaaattgttttgtgaaaagaatggcgtagaaatgattgcccgtgcccaccaattggtcatggaaggatacaaatggcactttgacaacaccgtaagtaaaacgcaatgtttaacagagaaacagcgaaagatatttcccatctttcataggttctcaccatttggtcggcacccaattattgttaccgttgtggcaatgtggcggccattctcgagatggacgatgtactgaaaaaggaatttttgattttcgaggcggcaccgcaagtggtcggaacaatatttaaaaaagaatattttgaatgttttggtttttcaagggacgaaacacaccaatgaaggggcctatgcctgaatatttcctt

SEQ ID NO: 59658 - DNA, 1055 bp, Heterodera glycines; identical to SEQ ID NO: 29107

SEQ ID NO: 59659 - DNA, 283 bp, Heterodera glycines
tttcatttgtgtatctgcttcgatgtgttccttctgctggcacatgccaaagtcggcttggctttggcgttcgtctccgactgattcgactgtttggtggacacgcacttcaacagccgaaaatggtcacttggccggctgagaattgcccgtccgtggcgaggcgacgatcgcaacaccgcaaattgaaaaatggaacaacgacgtttgtgctccaatttccaatcccacaaacgccgctgccgaatggtgtcgttggatttgaatgcatcatgatcgtttg

SEQ ID NO: 59660 - DNA, 5486 bp, Heterodera glycines
attgccgcttctaccgttttttctcttccattcaaatcgccttccatcacagcggtgccgccgcgccccatttcgtctccgtcggattcgccgtgtgcctcccctcgggacattggccaagggactgacggagcatcgccggtggagccgttagagacaattacgacgctaacagcagaacaacaacaaccacagcctgaacctggtcagctgcggtgcgcttccgcgcaccgaaccgccgaagacaaaagcgcacacgcgggaacaggcggcggaagcggaaacccaacgcggaggacacccaatgttcctgagctgaagatcgactcgtacaacagcgcgtgcgtattgcacgcgaactccgctggaatacgcggcaatcggcagcagagaatgacgccgaacgttgccgccggcgcattgctttcaaacggacttttggcacacgctttggaaacgccgacgccgaagattccggaccttttacgcacgccgaccgcactgctcacatcgccaacaaacacttgcgcaggcggcggcagcggcccaaaatcgtcggtacgcgtcttgacgcgacggcacgcatcgtttcgcaatgcgacacgaatttaaaatggcaaaaacggcttaagagcccaaaaggacctttctctccccacccctcgtcaccccataaataaacgctgtcattgatcagtcaatccattaaaaataatatgaaaaagcgcatcgcaatcagttggttgattcattcgtgtcgcatgtgatcagagatcagctgaggggcgtgtctttctaagcaccgcccccccccccgtagcaattggttcacatcgacgaactgaacacgccgttgtgcctgaactcggcgacaccaaaaagtcaacattcacaggcatttttcggggaccacgagccattgctaacaggtggagaaatggaaaagaatgaataattaggaaaagggaagcccattattattcattcacatactctgaggaggacaaaactttttgatttttaaattaaaaatttaattaaatttaaatttatttattattttctttctctttttacgatttcaaacaatttacaaaagtgtcattttgatgggttttttaacttttctgtaaatgatcaatgccaatcgatggcatttgccattgccaatgcttttgctttgctggccatgccctccccctttttttgtctaattccccccccccatttagccaacatcgaaatcacctccaccgttgtgtcagcatcttctcaccaccactcaccgcctcagtccgaccatcaccagccaagtaaaattccaattttgattttattttgctaaataaatgaattaatttcctccataattgcccccccccctcaaaaggcgcttcttcttcttcttcttccgctgagtgtgcgcatcgttccgccgcttcgcttctccacgcgtccaccggaagttttggcacaacgccaacagcaaaaaataacgccggaggaactgatcagaagctcagtttccaaatcaaagggtccatctccacaaatttgccactgaatgcacaaaatttgaactcaccaggtgagaggaagtcggaagcgaagaaagaagggaattcccactgattattaatatttgaaatccgcttaattaattacccaaaatgccgatggcatttgccaatttcgacacttttcactattttcctctctctgcacctcccccccccccccctctgaagaacgaataggcattccattccgagattcaccaaaacagttgcgaattaacttttaccaatacaataatttgttcgccgaattgtccgataggaaaaaagggaaagggggggggggagaagaagacacccccgggggagaaacatgtgacaaattaattaacagagggggggggggggaaggcagagaagcgcaaattgtgaaagtgacgaacgaacggagatgattttgcagaaagaattcggacaaaaagcaaaaaacaaaaacaaacggaattttaaaatgtaatttaaatgattttccaaatccttaggactgagtacgcccttcttcaccttctcgcccctcgtggagcacttcctccagtcgtgctggcgtaatcagggccttcccgtcctttcggtggacaccaacagcaaaacgtccatctccgatgaggtaaaaactttgcccaaaaattgaatgcccaaaaatgccgcgcccttttgcccaccgcaggcaatgagagaaagcgatgacggcggtgcctttcccctcgcgtgcggcaaacagacgcccgaggcggtcccatcggccgcgagcagtgcgacgacgcccgggggcgaacaaaagcatttgctgcattcgttggagggcaacggcaacaacaacaataataacagcaacaacaacaacagttttgcaacagcgcaaagagtcatcggcggaacagagccaatggaaattgtgcaacagcagagccatcaacagcaccagcagccgcagcacaaccacagcatacaacagcaacacttccaacagtacggcagcagagggggcggaggaggagcaacgcatggacaagcggtgagagagtgatcagaccgaacccagggaaagattgatcgggtccaaataagtaataagtctgaactgcgatatgttgaccaagggaatgcctgactgatcttttcgattccttcagcagcagcaccaattcagcgcctatgggcttcagcagggacaagcgggtggtggatcagcggcacttcaccaacaccaccaaatgtgctcgccggccggacgatttcaggtggagtggtgggggtaatcagattgatctgatagaaaagcatttgatcagttggggttgaaatcggatatttctctgaagttgcagattcatcaaagcatcagctgcagcattatgccagccccttcgtgcagttgtgagctgagtcacaacacccacagcagcagccgcacagtctccgccgcgtcttcagccaacgacggaaacgccccgggcactgtcggcacgaccctttccggcggaacggtcgcattgacaccgcagcagcagcagtcgcggcctaactcctccacctcgacgacgagttcggccggtgctcattcactggaagcaatgcaccactctccgctccaacagcactttggcacttcgcaaatggcatttttcgggcttttccattgcctaaggcattgacctgtttaagaatttcaagctggagccgccgttgttcgatgaatggccaacttatcaaccggcgccgatgtttccgtccaatgccgcccatccgcaacattccgctaatggcatcgcgtccgtttcggccgttgagttcgttccgcaacggtcgcgcgaacggcgctccactttttcgggcgctgccacagccagcactgtgcctgacattgtggccaatgcaacgacgccagaggcctcaacttcgccattccaacgaaacgcgaggacgccggtgcatgaaagaccacaccaatgtccggtggacaattgcgacaagcgtttctcgcgctcggacgaactgacgcggcacattcgaattcacacggggcacaagccattccaagtgagcaaatcagcgaagcagaagcatttgaaagtgccaaatgcttttcctttttcaatttcagtgcaaattttgcatgcgcgccttctcccgctccgaccatttgacgacgcacatgcgcacgcacacgggcgaaaagcccttctgttgcgatgtgtgcggacgaaaattcgcacggtcggacgaacggaaacggcacacgaaagtgcacgcgaagcaaaagggcgggggacgacggatgtccgtctcttcgggcggaagccaagagggcattattggcagcggacgcactatgcatgccgaactttaagcggacaaacggccgacgcgcgtcgccccgggggatggccggcaaagggcgcttaggcactttttgttttattattgttgttttctccactattttatgttaaactctgctgctattgtttctctctctctctttccttcactctctgtctctcccgttctctctctctttctctctctctctctttccttcactctctgtctctcccgttctctctctctttctctctctctctctctttccttcactctctgtctctcccgttctctctctctttctctctctctctctctttccttcactctctgtctctcccgttctctctctctttctctctctctctctctttccttcactctctgtctctcccgttctctctctctttctctctctctctctctctctttccttcactctctgtctctcccgttctctctctctttctctctctctctctctttccttcactctctgtctctcccgttctctctctctttctctctctctctccccctctcccaatctctttcttcggtcccattctgtatgccattcctttccttttctaccgtatcttttacagtataccgtccttcagtaagtgctattggctatgttcttccttcaggtggtattaatttccatttatgcattttagactattttagtctatttttattgattgatctctgtcttttggcaatttgcattaattgctatccgctaattaaggttaattaattaataagcatttaattaataatatttcgagtattagcaaacattggccagtgactactgatcagagataaattagtgaaattaattgccaaagcaaaatattaatgagaggcgaattttcgtcacttattcattaattaccttcttctctttctttctctttccctctctctctctttctctctctctctcctctctctatcctcatctcttccccatttcctttctctctctcgccctccccctttcccatattctctttcaataccaaatgacagactaccgtatgtttgtctgtttgtttgttcctaccgtacatccatataataataatttctctgtcagagtgttcgtccattcaaaattccaataaattacggtgattctttctttttctttatttttttattcaaattttgcatttatttattgtgtctttgtttgacataaaatatttataaaattggacttcatcatttgctaacaacaacaaaaatacaaatttttaaataaatatttttccgggtaacttttcaatgccacggcattttttatatattttctgcgaaattcgaaaaaatacccaaaatcaaatttaagaagaaaagtcagtggaaggcaaaaacaacgaattaaagctaaaaatggtcagagagagaaagaaaagaaaaatgggaccaaaggcaaagggaaaagaaaagaaaaggccaaaaaagggaacaatcggagggaaagggagaaaaaaaagtgaaaattggaactaatgaggggggggggggtaattaaaggcaatcaatttccaaatgattgattgtttt

SEQ ID NO: 59661 - DNA, 361 bp, Heterodera glycines
atgatggacaaattggacaatgatgaagcattgaaaagcgggaatgatgtagaagaagcaaggaaaaagcagctttctgccattgaagagacaaaccgaacggttcgccaaattatggaaaatttaagccaattcaaaaagacgggcattccgtcgggcaaagggttgaaatgcatctcgcaacaattattcaatcggatggcacatcatttgggcattgaatggcaccaagtccagccttacagagacatgtccaattggcgactcgcaatgcgcggcttttcggcactgaatgcctttttgaaaatgggcattcatttcgattcgtttgctggcaaaaagaatcacaaaagggaagaaa

SEQ ID NO: 59662 - DNA, 117 bp, Heterodera glycines
cattcatactctcggcggtgacgacgataacaaatctcgacaaaggtccaactcaagtgacgatgaaaacagcgatgaggggaggcagggcttttttgttggcggaagtgatcacag

SEQ ID NO: 59663 - DNA, 513 bp, Heterodera glycines
gtgacccacacaagtaccgttttctctctctctctcgttccctctctctcttctctcactcgtcttctcaattggcaattgacacagcgaatgaatatccgaaaaaggaaactttagacggaataattcgagataaatttgaaaacattttgaaggatttgtttaaaaaggcagaagaaaaggcaaaaaaagataatccacggagagccaatgagataaatgatgacataaataaaatacttttgggttcaaaattcaatgactcatatacatgggtaagcaaaaattatattattatttttaattaaaattaaatttagttagatgaagccttactttcggtctttgtgaaaggaaatgtgaagtttaacaaattccttaagcgactaaaagagtaccaagcggcagcattttaccaagatgaaagtgatctttgtatgagaattggcaatgtgacaaaaaggggagaaatttgaaggatatgaacagacagaatgccaaaaatataataaa

SEQ ID NO: 59664 - DNA, 625 bp, Heterodera glycines
gttgggtcagatttactaaaaaattaccgaatcggatggcctttgtttttgaaggtcctccgtttggtcggtgctcctctgctgttccccggccttttgttcgtggactgtgcccactttcagtacaatcactgctccctcggcctctttctgtgggcgatctcttttctcgagaagggccgtctccgcgccggtgcttttttctttgtgttggcccttaaccacaagcaaatggaactttaccacgctttgcccattgccgtttttctgttcgcccgttcattcgttcacacaaatcgaattcgttcattgttttcggcaattggacaaaggcaggacattcgatgaaattcccctcattttctattcatatttgacttttttcagtgtctttaatttgtttcaattggctctggtggtgctgctcacttttgtcattctttggtctccattcctttggcctgagccttcattggccctccaattgcttcgacggattttccctttccatcgtggccttttcgaggttttaattgtcttagtttctaataattattaaattgtccaaggataaggtggccaatttctggtgttgtgcttctgtgctggtcaaattcaaacaaat

SEQ ID NO: 59665 - DNA, 507 bp, Heterodera glycines
atggagaaggcctgcaaaatttggagagattatatcgattttagtgcgctaggttcgatgaaactttttaaaatataagcctaaactttttggcctgtttaaaaaggaattaaaaatttttaaaatatttattcatctcccttttgatagaaaaagcatcagagagccttatttaacttttaattaacatttggtgcgtttcagagcactttctgaaaaaatacttatgaattaattttgcaaaaaataaataagtaatgaaaaagtcagaattttgaaaaattttaaaaacagaattactggattttttcatcatagcagtgcttttccttgtactgttttgagagctctctcaaaatctggttcgcttctgatcagtttataaaaaaaaagttaagcctaaaatttttcgcatatttaaaaagcaattaaaaatttttagatttttattcatctccctttttgatagtgaaagcatctgagtgcctaaaataacttgtaaataaa

SEQ ID NO: 59666 - DNA, 986 bp, Heterodera glycines; identical to SEQ ID NO: 29120

SEQ ID NO: 59667 - DNA, 247 bp, Heterodera glycines
attttataagaaaaaataggagttttgggggcgcggcggtgccgataggcgccgcctgggaaaaaattggaaattttgatcatttataaacaggttttcactgaaaattagccaatttataggtaaaattttgaaaaattttatgggaatttaatccaattcttaagggtgtaaaagtcgcgtttcgcgccaaaaagcgaaatgcgaaacgccaaaaaatgcgaaaggcgaaatgcgaaaagcgaaa

SEQ ID NO: 59668 - DNA, 603 bp, Heterodera glycines
atgcaccacggcatgatagcggaaatggaacgacacctgacccgaaaaaggtcaatacagtacccggatgagggggagattgttgacatggaagtcgttgaggaggaagagcctgaagaagcaccattaaatccgttgaaaaatcgcacaaaacttgatcaacttcgcttgaagcatgagcgagacaaaaaagagagggaggaggaggataaacggcgacagcagcgagaagagcagcagcagagaaagcagcaggaagagcagagaaagcagagagaagagcagcagagaaagcagagagaagagcagagaaagcagagagaagagcagcagagaaagcagagagaagagcagcagagaaagcagagagaagagcagcagagaaagcaacgagaagaacagcagcaaaagcagcgagaaaaagagcaagagaaggcaaagaaatctgaggctgaacgattagccaaagagaagaagacagaaaaggagcggttggcaacggaggaagaagaacgactcgccaaggagaaggcggaggaggaacgatttgaatttggccaagttgtgctgactcttcagtttaaaaaagtcgtaactttctga

SEQ ID NO: 59669 - DNA, 803 bp, Heterodera glycines
atggctcctcgtaagcagaatgagcagtttttggacgaaatccagagtaaattttaaaataaaacacaaaatataagcattttatagaagcgaaccacgtggaagaagcacaaaacaatcaaagaaaacataaaatgggtaaaatttttcacaaattttacaaaaattttggattttttctcatttttcagatattgatgatgacgtcatattggttgactcgcagtcatctcacgcagaggaacgtcctgcgctcaagaagaggggccgaaagtctcgctgggaaaaactgctggaggacgtgaacaacgcaaagaagtccaaccccgcagaggttgaagtcacagatgtcgacgaacgcaaagcagccaacgtcttcgactacccaacaattttctggaagctcgcacgcccaaaggtaatgtttgctctggtggcagccctacaatgttcttcttcttccgttgcagtatggggtgttcacctttatgtgcaacgaatgccgtaacgaaaacttcaagcgaggcgacaagcgcttcatcctcaacactggcagtggccaagagaaactggagttacccaaacgttttgccaagactgtgccaagttgaactttgactgcaccgacctgatcatgaaacaccaaaaaaaggatgatggaccacagaagaacggaggacggagcacctttttcaagacggaaaagtgatctttgaccattcattcattgatttttcgttaaaatgagtaactctttctttgtaattttgcccagcaatacgccgggatttgtcggcaataaa

SEQ ID NO: 59670 - DNA, 545 bp, Heterodera glycines
atgcccccactgacaacagccttatccaagctgctgaactgtaaagctgagaatttggcagagtacctgaataacccggaagctgtgaacaaggcgagtgcatacctgcgaggaaagaagctcaagacaacctactcgaacaagggcggcactacaaaggaggtcgagtttggcaacttctcgctaaagtctgcttcggagacgtacgccttcgagggattccttggcaagtgtcctttctgcaagcattccctcactttggaaagttcagaggtcaaagttcaccagtacttctacataaagcaccggatccgcctgttgtaccctcagctgaagtgcatcgttgagtaccacagcaaaggtcattgcaagtactatccgttgggtaagctttaggctgcgatgaaagcccataatctcgcacggtttcagagttgttggccatagaggaaagtgcagagataacaggcgaaaagccaacagacaccaactacttggactacctcggcttccgaagtgtttggcagccaacccccgtctattga

SEQ ID NO: 59671 - DNA, 1898 bp, Heterodera glycines
atgatgaaaaagttgccaaaaccctttcttattgtctacgatgacctcatgggcgacattgacgcgaagaagttggccgatctgtacaccaagaaatcacaccacaacaacttttcggtgatattcctcacccaaaacctgttcgacaaggcgatgagagtgccaaggtccaatgcgcagtacatctttctgatgcgtgcgcccagcgatatgttgagtattcgtaatttggccagccaaatgtttcctcgcgagcaagggtttctgatggacgcgtacaagcaggcgtgtgccgatccgtacgggtatctgttggtgacactacacgcaaacacagacaacctcttacgactgaggacaaacattttcccagacgacgaagaaaagattgtctttgtacccaaaaatggttaagaagcaaatggttggacagcgggtgttggacaactacgagtatctgaagtcccttgggaggacgacatctcacaagaagaggcgtcatttgttgagcagtgcaggttgtgaagagctgttgaccctggtggagatttgcttaaacctacttaacggatccttctgtttgacgcggaaacagaaacaaaaattgttgccttttgctgacaccattcgacggttggcacgcgtgagaagtgagcagagtgcgagaaagctgatcttacaacaacaacaaccacagcaggagggaggttcactgtttgcccctttgttggcacccatactgttagaggaagcacgttatctgctgcgcaaagatggccaataagctcattcttctgccttttgagcattaccgaggattagttgcagcgagagagggtgtcggcgttgcgaaaggagacgacgatgtggcagggcagacaaatttgggattcgtcaaacgacagctggagaccgcgaagaggaaacggacagcgaatgtcagcgaacgaaatgtattgtacaaccagcagctgaggagatatttgaagctgagaaaggaggtcaaggacaggcccctcaaggtccagctcagcaacggtgcgcaactgctgaataagacggtggaaacgggcgtacaggtacggcctggccccgacgagccgaaggacaactccgtattgattactggcgaagatgaagagattgaagtgcctacgccaataagtaagacgccgggaaacagccgatcgcccaggaccaacaagaaagcgatcaagcagaaagaaatgaacgaaaagaaggaccacctcttggccatcattatgtctgacccgcagagattcggcgctacggaccgtgggaaaatattaaatccaaagacggggcgggagttcatcaactcggacctggcctggtcaattgaacgcctagtggaccctcgcccggagaatgccccttcaccaagcggaaccaaagagttgatgaggaagctcgcacagaatccgctcgccagtagcctacttaatcgactattcgttgggtctggacaagtcaaacaaacgggaggatttgttccctctaaatggacgaaaaaataaacaaaatatacaccgacccggccaatcccggtgggtttgcgggtgcgagtgcactctatgcagcggtcaagaagaagcacccaaaactgaagaggaccgactttgatgactttttgcagcggaacaccacctacacgctgtttaagccaaagagggagaagttccgacgccttcgcacagtccccggagggttcatgaccggtgagtttgtccacgttattttcacgtgatcggctcagacgttcaggcggacttggcagacttccaagccctttcgcgaaagaacagcggctatcggtacctgctgttggcggtggatgtgttgtcgcggcgtatgttcggctcacccgtaaagagtaa

SEQ ID NO: 59672 - DNA, 738 bp, Heterodera glycines
atgcaccacggcatgatagcggaaatggaacgacacctgacccgaaaaaggtcaatacaatacccggatgagggggagattgttgacatggaagtcgttgaggaggaagagcctgaagaagagcgctacgacacgcgcattttatacatggtaagagtgtgacaataaaatattcataataaaatattcttttttcaggacaccgacagtatcttctatgacttcaagactgcactgggggacccgctgaagggaggcaaccaacttggggagctcgcggacgagtaccccagccataccatcgacgagttcatctgtggtaaggactttggccaaaataatttgaataaatttcatcgattttcagctggacccaaggcctacgctctttggcttcggaacaacgcaaccggcgaggacgagtacaagctgaagctgcgaggcatcaccttggactcgaacgcctgcacgcacatcaactttgagaagatgaaagaaatggtgctggagaagtggggcacgcccggcaaccatgtgcggttcgactaccctacgaagaacttccgcatcacgaagcagggcgacattctgacggtgcccatcaccaagcagttcaaccccaccgtgaataacggggtgctccgggaccgtggactgaaaattgtgccctttggttacagctcatatgagtattgcaaagcccataacccctatgattgtctctgtaagaaggaataa

SEQ ID NO: 59673 - DNA, 666 bp, Heterodera glycines
atgggtaaaatttttcacaaattttacaaaaattttggattttttctcatttttcagatattgattatgacgtcatattggttgactcgcagtcatctcacgcagaggaacgtcctgcgctcaagaagaggggccgaaagtctcgctgggaaaaactgctggaggacgtgaacaacgcaaagaagtccaaccccgcagaggttgaagtcacagatgtcgacgaacgcaaagcagccaacgtcttcgactacccaacaattttctggaagctcgcacgcccaaaggtaatgtttgctctggtggcagccctacaatgttcttcttccgttgcagtatggggtgttcacctttatgtgcaacgaatgccgtaacgaaaacttcaagcgaggcgacaagcgcttcatcctcaacactggcagtggccaagagaagctggagtttacccaaacattctgccaagactgtgccaagttgaactttgactgcaccgacctgatcatgaaacaccaaaaaaggatgatggaccacagaagaacggaggacggaacacctttttcaagacggaaaagtgatctttgaccattcattcattgatttttcgttaaaatgagtaactctttctttgtaattttgcccagcaatacgccgggatttgtcggcaataaa

SEQ ID NO: 59674 - DNA, 2279 bp, Heterodera glycines
atgctttgcaggcacaacttcctcaacaacttatgggcgtcttcaattggtgaatacgggcatttgattgtacacatccaactgtcttccgcttcatcaacacaattcgatgtgagcaaaagtctattgatgcagaaatctcacgatgcatcgctggtgaactccctcctcaaaaggcgcccaaatatcgtgccgccgatgcgagaattcttcgactcttgcagagctacaatgccatcaacaataaccaggctcaccaaaatgatcacaattaccatgcccttatcaatgttaacccctataacatcatcaattttctccttggtatttctcggaattatgagatgcgcccgtaatattttcaatgttttgttatttttttgttgttaacacattgataaatctattatggtgttaattttaaagaattttcgagaaacaaatcagaattggatcaatgtaggacaaaaacagcttgccagactaaaacggccagactaaaccgacccccaccgtgcaaaattgggaaattcggaaaatgcgatttgagtttttataaataatgggctggaattaaaattcggaaattcggatcccaacgttttattcaaaatttatacgaatccaggtgatcagggttcgagaaatttttgggacaatttcttgccttaattctcgagagcagacgatccaagaaaaaaaaatgatggacataacacacaatttgctaccaagaaatatttgtttgtggtggataattgcgaatcaattaggggaaggaaggaataattaatcaattaatgatcatgatgatgattaattaggatggttaattaggataatgattaatgaacaaaatgattttcattgttttttttgcagccatttgcgaaaactttgacaaacttttaaaaaatttaattatttgattttttgagaaaaaaaaatctacgttttattgaaaactcttaaaaaaaccttttttgtaaaaaactgcgttgtacgaactgccattgacccaaaaataggcactaaatctttgaaaactggtgccatcgagaaaaaaaaaattgtaaaatttggtgccaaaaaaataaaatttaaatttgattgaattgaagcccattcattttaaatatcattggctctcctttttagccatcaatttatgttgccatgctaattaccaacaaatgttgcggaaacattggcactgcacttttgtccaattttggcatcttttgtcatgttttgggttgatcacgaaaacattttgtgccaaaaagggtgaagtttgttaattgctcaatttactctctttttggcattcattgtaaatacataatcgtttgtttgttttgtttgttttgcgttgtgtcgtccgtcgtttgtcgtcccttttccgcttatttttggccttttgtccaaaagggcgcgcaaattgcaaatgcgtcaaaaaacaaatcgcagaaaattttgcactttaaaaggacaaaattttgtttttgaaagaaaattatggtgaaaatcaaccaatttttgatcatttaatattgaatgaacgattaattaaaaaagaaaatttaaaatatatatttaaaaaataattcatgttttaaaccaattcatcaaagttttaattatattgaaaaatggatgaattcattaaagtcaattcgaaaagcaattaaaaacaattaacgcatgtgacttatccgtgccggtactcaattagactacagcgaagaataaaaaaattttcggcatttttgttaatttcatcatcgtcatagcacagtatggcattccaattttcttgataacaaatgatgacataacacattcgtcgtcatctgtccttccgccgttcttcctttaattaaaccatcaatcaccgccgccggcgctaaaatccgatgttttcggcacggcacagacgcattgtcattttggcgagaaaaatcccgaatttgctctgatgcgtgcactttcagcggatataattcccatggattttgcaacactaatccggcgcaaatttgcgcgcctttttgcgccaaacattctaatttcattggctacaaacatatccaaaaatggcacactttctgtgtgcaaaatgcctgcgggcacagccattagccaaaattaacttttctttttttgtagctgttcaatgtgccgcctgtgatggcggcacaccaaaacaacaacaacaaaaacaacaaacggagcataatccgacaatggcattggcatcggaaatggtgctcatctga

SEQ ID NO: 59675 - DNA, 1595 bp, Heterodera glycines
atggcccgacgttgcgcactcgtgttggtgatcctctgcacccagctgagcaacaacgcgctggttgccggcctgacctgctacgagacagtgaatgtaagttgttgtgttgacgggtgcgttccgtggggttgcatgccgtgccaacattggcatagtgaccttgttgccgatggcattaaggcacagttaacatattttaatcctcgagagtttcaagaattttcggggactggtgctgactaattaaacattcttttggtatatgccatcactcccttcagcgacccccgggggaatttgcgaataatatgttcacattccccgccaaaatgtggtgacacagaaaattggatgatgagggaggggaacaaaaagccaagacacgacactctctgcctttttttaatttctcttttccaattttgttcccgttttggcatgacgtgagtcggcggtcgatcggccacggcacaaacgccgcggggggggggtcattatcggcggggtatttaattgcggaagtgtggccatttggccttcctgaaaatggggggaaatgccgaggaatttttggcacgtaaaagatttggttgcccattgtgttgtctccccccccccccccaccgggggattaatgtggcttatatgcatgtctaatataggtataatggcactttagcggcgggtaattaaatgcctcacatgacggggggaaatggcgatgccattttacgttaaatgctattattggtgccaaaaaaaatatattttttaaaattttttagggcaaaactacaattgtgcaaaacgaatcgtggacatactgtgccctggtgccggccaccattgtgggcaacgagctggtcaacggcagccagttcgggcttggccccgacaatgacatgatggcggcgtacaacaccgcgttcgccatgtcggtggacgagtaccggatcttgaccgtatgcatttacgaagtgagtgtgggttaaagatgtgatgggagggggaatcatgctgatcagagttttcgcgaagttcaattaagtctctcataaatagaaattgcctgaaatccctcaaattggcaaaaattcagcataatcgcgttccaaaagcggcacattctttatcaaattacgtgctgtgacctcacacaaaaaaaaacgtcatcccaccataacacagtcaataattggagtcgagaatttgtgccaaaaatgggcatcaattatatgtcaagattgtttttaatggtttttctgggtctcaatttgaggggttattttgaaacaatttgcattgactttgatttcttttcacgggttgctgccgttacccaccgtaccctgtaggggccaggggataccgtattacttatctcgcccatttgtactgtaaaattgaatattatataatcttttgctttttttttgtagcgctacgacttcagccgcttcatgacgataaagccggacctggcggtggagttcgcgttccggtgcgtgtgcaactacgacctgtgcaacagtgagccgacattctccgcctatttgtccgccatcaaatccgagagctttgcgagaagatga

SEQ ID NO: 59676 - DNA, 826 bp, Heterodera glycines
atgcaggtccagagtgctgaatccaggcctcgacgagcctgggtttttcctggactggacttttgtccaggtccaacatggaaacaaggttaatttccaggcttttttcgaaatttcggattgtaatgcttataaatgaataatttaaaaaattcacgataatttggggatgattatcagcaattggcaaacttttgttgaaattcataccgtacttgtaaattgtggactttgaaagttggagtgaaattttatgggctttgagtgggactcgggaatagcgttcatttggacagaaattggccaaattaggggcgaacatgacgagggtaaaaaatggagtcaaaaagagaatgaagagaaatttaggggagggggggggggaatggcaaatcggcggttagggaaagaaatggccacgaaaaaagggaaaagtgagacaaattacacataaacaaaatgggatgaagtgataggaaaatggatgaaattgagaagcaaaaattgtcaatcgctaattaatcactcgccagaggggcaaaaatggacaaataatttggctggaaaaccaatgaacttttggctaaaaagtacatatccgctttctcacccgtactcaacaaatacttcatccgctccttcaaattgctcgatttggacgaaggagaagacatttgacagataattacaccactacaaaaatttaaacggaatttaaaaaattaaaaagaaaatttttttttagaaaataaaaagctatctgctgatcgatttacccaattcgcgtcagattctaatgaaatatctaattttaattaaaaataaa

SEQ ID NO: 59677 - DNA, 121 bp, Heterodera glycines
atgaccatgccaatcgacattttggaggtgaaccaagtgatttccatccgactgttgactgataaaatgctggataacacaatcacgctgaaactttggcactcaattcaaggaaaggaag

SEQ ID NO: 59678 - DNA, 431 bp, Heterodera glycines
atgcgtgtcttcagtcagcttctcgtccagacttgcgtcgtcgatttgtttgtgctgatcctcgccgccctcgtccttccggtgggttgtccgcctaatgttgcgccttcctggcccaatcatttgtcctaatgatttggcccttgcctttggcaggtgttcttcgtggagaatggcatcggattcgacgtcatggcagggcctctccaatcattaccaaatcccgccaatcactttgtgtttatgctttggtttggccttttttacttttccatcgaaggaatcgccgtccaattcatctaccgctatttgaccatttgcaggtgaaaagcacataaacacacaaacataagtagcgaaattttaaaaaaatttaaaaaaaagtaattaatactaaatatttttagaaaatctttttggcttcggcctaa

SEQ ID NO: 59679 - DNA, 243 bp, Heterodera glycines
atgatctttgggctgtcttcttgtaccttttgtcaacttccgcatctgattcttgccatctcactgtacaataatttaattttaacaaataataaaatatatttcagatttttatttgtttttattaatattgcataaattaacaatatttactgaatcgctttatcatttatatatttaaatattgtttatgttttttatttttgttatttcaaaaaattaatttattaaaaattaattaaa

SEQ ID NO: 59680 - DNA, 629 bp, Heterodera glycines
atggcaccaaaatgcgttgccaaatgtaatgtttctgctgttcaatggtgaattggaaggagccgaccaatgacacaatggccggtgccaaacattggcaggcgaattcgcgcgcgtacatttcatgcacttcggtgatgggccactcgcgatggatctgtgtgaattttggagccaaaacatttgttattttcaaatagttttccatttttgtcaaaattttgccatggctaagtaattaattaattgattggctaagtaattaattaattaattagttgcaattgacatttcatttttgaacttgttgaccatgattttaagaatatgttcagcaaatgcgaattggcacatggcactgaacagacaaattgtgcagtccgtccagaaaagggcgcgttgcgagttgacattggcatggcccgtgccaatccaacggcgcgtcctcgcgcacatcagctgcaatttgttggtgccaaataggaattttaattgaaaggaatgattaaaaaatagtttaaattgtggatttattaatttcataatttatttacttttttcgaaaaaattttgaaaaaaagacctgataactttgaaaaattataatgaatttgagtttcaaaaataaa

SEQ ID NO: 59681 - DNA, 322 bp, Heterodera glycines
atgtgggaaaaggccgctaaattgagacccatcggcggaactgagaccgatacacaaagatgcggcaaatttcgcaaaactcaagaaccaattaacggacctcgagagtcgagactgggaacaagagcccggaattttgaaaaacctggaccaggatcggtgatcggaacacggattacgagatggaaccggacagcattcagaactatgaagtccttgttttaacaggtctccaggttctgtttctgttttttctaagcccgagactggcaatcgcggcacttgagaacaaaaaagtgccgaaaattccgagagcattaaa

SEQ ID NO: 59682 - DNA, 2102 bp, Heterodera glycines
atgtttggttccttggcagttttcttgaccctttttcttgttttgctattgttttcaagctttgtgaccggaggcgagtacgatttgactgccgaggttcctccaggtctgtttttcgtttggttaacgatttctacattttcaagataactagacaaatttttataaaaaggaaatacagtgtaaacagaaacctaacgaaagcctgccaggattttccgattttttaaattttcaattccaaaagctgatccaatttccacaaaaatttagtaatttttgcaaattttcaggaaaaatccaatgtttttttcaacccgtgttggagaagcacaaatccatggaagtttattaccaggtaactgaagggtttagcagttaattgtttcttttgtggacttttttaggttatcgacggcggcgacttgaacataaattttatgctcattttggacgcaaatgtgctgaagcaggaccagatgaggacggacggtgaccataagtgagtagttttgtaaaaatgattttataatttaaaattcccatttttaaaaatgaaaacccggtccgggatcgtttcccgaatccagctggatgtagaatttttcaaaatgtgaggtcggctcaaaataaggaaataggattcccgaaaaaaagttgtaaattatataatttttaataaactcctgaactttaaaaaattctggataaggccaggattccgagaaaatctcggcgggatcccgtcctgtttttgaaatggaatttggctgacaaatgaacaatgcgtatttgtgcattggcaaaaaaatttgttttttcttaaatttgacactggtaaattaaactttccattgggttcggtggtcaagtggttaatgaccttgttggtgatgttgaacaaactgagcaacttgagttggtatttccgtttgcgcacattttgtgtggttggaagtgccaaatttgttgctcaaaagcgaccgttcatttgtcgatcaggtcactcgaatgtttgcacacaaaatgttcgagtgtaaggttgacaatacatttttccattatttctaagacctaatgcctgccaattttaaaccaaaaattttgaaagattcgccaagtaaatctaattattattttgaattttagaattgacattcccgcccctgccgactaccagctctgttttgacaactcattctcataccaaacccgtaaagtggtgttcttcggttcgttttccattttttcgctatttttctttgatttcccaacggcgccgctcctcaaaaattgaaaaatttcttacgcttttcttagtgtttggcactgtcataccaaaaaatgcttggaattattctatcacctcatccccctataaaaaatgcattcaaaatattggcaatttatttatgcaaaaatgttgaaattgcaacgaaaacaaaaggtcctcttctcacatttcttttttgcaacacagaaatttatttgtacgacgccaacggcactttggaggaggaggacgtgaccaaatttgccatcaaaggctccgacgcggcaatgcaagagatgttgaagcaggtcggcatgaccgtgcaacagttccaggtcagtcgatatttttcaaaaaatttgccaccccccccccccctcctctatccaaaacaggagtctttcacgacgatcaaatcgcgtttggaccgtgtcgagtattaccaaggccaattccgggccagcgaagcacgtgaccgtgccgttgtcggtgccaacaatgaccgtgtccagttctggtcgttggtacgtttttctgtgcatttaattacctaactaatttgtgccattttaattgggcataaaattgggaggaaacaaaaaaaaatggtgaaaaaccgtttagggatgacaaaattaaaaaaaaaaaatttgtattaaatttcaacatttagaaaaaacaggtcccggattccatgtccacctgaaatcctgtgttttctggacaaagacccatgaaaaattttcagacatttgaaaaagacctgtccttggcccgggaatccagaaaaaatccaggcctttctggcccaggccaaccaaaaattaaa

SEQ ID NO: 59683 - DNA, 743 bp, Heterodera glycines
atggacttcaaagagttggtcaaccaagcggaacgaaatgcgaagcggcaagagcgcaaagtgcacgaggcggaacgcgagatgaaggcgcgtcagcagagccaaatggaacgcctcgcttatgaaaaggcacgcgaaaagttggtgttgaaacgacgcgctgtcgccacaatgcaacagcaaaaggaacagcaacaacagcagcaggtatttgggaaaaaaggacggaatttttcaaaacgaaaatgggtctctaaaacttggacttccagggtaaaaaacataattctgtccggtcaatccgggagaactatacattcattcgtcttatttttgtccgagttccttggttaccgcgtctgaaattgccgttttatcggccggcccaacctcggcgaagttgctgggccacagtcaacggcacggcataattattgactacaaagcaattttttgggaggcctctaaagcatgaattttcgaatccaaggttcagaattgacaaggaatttggttacagactttctgtccttgaggaaatatcgttttcagaatacacacaattttctatttagctacaacagtcacaaaagcagtcgacgacgcatgaacgaacggatgggacgacgaaagcgatgacaaagcgagaacggttgggcagcgacgcggtggccactgacaataaacatcgaaagggagccgggccgggagacgcagcacagctgtgcaacggcagcaacgag

SEQ ID NO: 59684 - DNA, 210 bp, Heterodera glycines
ggaccagttgaggggggggggggctgaaaaaatccattttttttgttttcggggcagtccccccgaaccgatgcgcccagatttatggggagaccgaatccttcgggaataggttccctatagcctgtactttaattctgcgttgcatttttgctccccataaatgtttgagtacccccatacggacacttgaaaaaatcgatttttttt

SEQ ID NO: 59685 - DNA, 204 bp, Heterodera glycines
atggaaatggaattgaaattggccaaattggaactcgaaattgtgaggagttttgccataaaaattcgactaaaattaagaaatttttaaaattatttttagaaggtacttgaacaaaagttaaagcatcaggaaatgatggtcgaacagaaggcattgaaggaaaaagtgatcaaaattgaacagaaaaatgaaaaaaaatga

SEQ ID NO: 59686 - DNA, 128 bp, Heterodera glycines
tgaaaaaagtaaaaaagcttacaacaccttcgattcccaggacgtctccgttccaagtactaagaaggcccaacgttgcttaacttgccagatcggacgggatggcgtgctttcaacgtggtatggtc

SEQ ID NO: 59687 - DNA, 577 bp, Heterodera glycines
atggagtctagctcgctggagtacgaagtgcagcagaattgtaatctgacacaaattggcggtgtgctcggctcaaagggttacggtattgcactgcaaaaaagtacggtgcaaaaattttcaaattttaatctttccttgctgtcttctctctactcacagattccgaatggactgatcgaatctctcgccaaattttgctttaccaaaaacgcggaattatcgcaatgaaaaaagtggagaataaatacgattttttaattaaaatttcagacaaaatggtggcgctcaaagtaatgcggcggcgaggagaatctcgcccaaaaattccaaaattttaggggtgcctcatgccatggcgttggttcgtcggttaagcagcagcgcatttcactgaatttgcacaacgtttccggcctgttcgtcattctctcaatgggcctacttttttcggtgaatttttaaaattaaattaatattttttaaatcttttattattaaggttttcattgtttgcgttgaattctatgcacgaaagcgtgagaatcagaacaacaaaaggaatggacaaaaatga

SEQ ID NO: 59688 - DNA, 633 bp, Heterodera glycines
aaatgtcttgaatttcatgtcccaaaaatcatttttgtccattccttttgttgttctgattctcacgctttcgtgcatagaattcaacgcaaacaatgaaaaccttaataataaaagatttaaaaaatattaatttaattttaaaaattcaccgaaaaaagtaggcccattgagagaatgacgaacaggccggaaacgttgtgcaaattcagtgaaatgcgctgctgcttaaccgacgaaccaacgccatggcatgaggcacccctaaaattttggaatttttgggcgagattctcctcgccgccgcattactttgagcgccaccattttgtctgaaattttaattaaaaaatcgtatttattctccacttttttcattgcgataattccgcgtttttggtaaagcaaaatttggcgagagattcgatcagtccattcggaatctgtgagtagagagaagacagcaaggaaagattaaaatttgaaaatttttgcaccgtacttttttgcagtgcaataccgtaaccctttgagccgagcacaccgccaatttgtgtcagattacaattctgctgcacttcgtactccagcgagctagactccatctgcaataccaaaaaaattaattgtgat

SEQ ID NO: 59689 - DNA, 2884 bp, Heterodera glycines
atggtgcgttgtatgcgcgcaagcagaggttcttcaaagggtaaaggcataaagcacatgagcagcaggacgcagcatgcgcagtctgcttcaaaaagacaaaagttgcacaacaacgaggacgactgtcaatgggagggatgttcaaacggcacggacagcagacggaagatggtcggaatcaacgaccttcctcatccggtgttggtcagtcgcaacgcaaaacaatcatgaattgtctttttgactaaaaattataggggcttatcctggcaaatcttaacccggccgaacgtctgcgagccgaatctgtgtgccatcgatggaaatttgttggaacacactttagttggaccaatcagcgagagttaactgtcaaggaaattgtgcacccttcaaccgcagtgcactcgctgttcagcatgtcaaagccgttgaccaacaaacatgtacatgctagttcataaaacaattccgttcttccaaaagttttcagcgaatattcatacaaaaagaattttcctaaatccgtcaatatccaattcaattccaaatcttaataacattaaatacagattgaaatacttttgaaacggtgtgggtcaagtcttcgtctgctgaacatcggctcactgagctccgtcaacagagacagcatcacttacgcggtctgttccttgttcgtacatgtgccaatgctgcacactttggatttgtccggcatccaactgacaaactccgctctttcatcgcttggctttcggttgccgaatttgaagagagtggcgtttagaaattcattcaaggttttgaacattcctcattattttttttaatatataaatttcaccatctggtttcattaattttgttttactgaaaaaatatacgatcattgttaaagaaagcccataatttgttaaaatcaaatttggcagaacacccgtatggagcgtggcctttcttcgtttctcgcgagttgcaggcggttgacgcatttggatttgagcgggaacgaaaacctcatcggctctgctttttccgaccttcctccgtcggtgagtggaaattttttttagcttatttcgttttttctcgggaccatttttctttctaaaaacaattacttttccattcatttacagctggaagagctcaacatttcctactgttatcacattggcatccacggcattagacaaattcgtgcaacttgcgccaatttgcgacgcctttacatggaccaaattggcgattcggtgtctattagggaattggacgaaatgctgcgagaactcaaaaggtattttccgttgctttattacattttttacagtagagttttgtttatccttctgacaaataattggtcttttcattcagcttggtctacctcaaattttgtgaatgctatggctcttccgacttcaacgacttgcaactgaatcatgaccaacatttgacgggcattggcgagctgacaaatctgacggaattgcacgccaacgaaaatagactgttctttttttaatttaattttttcttccatttttttttactgtttattgccatttcgcagtgttgatgacgaggtgctgagggcgatctcttttggttgcacttctcttcagtttttggacatttcgcaatcgcaacggggcatcactgacgcgggtattaattttgcttaattcattcaaacaatttgctgaataaattttgaacgtttctttgattaagggcttcgtcatctctcccaattgcctaatttgacgacactgaaaatgaacggacagcggatggtagggtttttacactgtttaacaaatccatatatccaggatacaaaaataatacaacaacataatttttaaaccatttagtgcgtttattgtgataagtggtcaactcggaattaattccaattttaggtctcggatgagtctttgattttaattgctcgtcgaggcattttaaaagtttgcatttagttttttctttaccctttatgctcaaagcaatgctttttttgccacttaaggagctaactattagtcgctgcacacaaattaccagcgaatcggtgctacaaacaatcaaacactgcaaggttgttttgttttgttttttgcttgcatacatcgttttgaaatgatgaacattttttctgaactcaatttttaatactctaaaacaatccttctcttattgttggttcaaatcaattcaattgaaatgacttaaaagtttagaattaaaaaccaacttttttggcgcacaaaactattatttgagaactattttgatggctcatacttgggttgatttaagggttttattagcaaatgcttgtccaaatcatcaataaacattttttaaatttacattttcttgtcagaatctcagttctttggatgtctcttattgtgtgggcgtcacacaaatcatttttgctgaactcaacaaggcaatggagcgtcgacatggcaaaaatgcgccgtcgcgtcagacacggcaagaagacaaatttcgccttactatttgccgttccggcatccaaggcatggcacaaataaataaataaatttattcgagtattctctcatcatctgatatcgcaataatttaaattttattggtctcttatccgttttttcttattaattcatttttaggaaatgtcccgtcccattcgccatggattcacttggtcgactacccgcccaactcggaaaactcgctgacatcgaacgctgttttcatcactgctcagtgagttcatcttccgtttggagtgctttactaatgaaaaatgagttcaaaagattttagtcttctgaacattccgatgatcgccatttaaatgatagggaaggaagagaag

SEQ ID NO: 59690 - DNA, 974 bp, Heterodera glycines
atgctcgactcaaaagttttggacaattacgtggaaattgagaagggccgcttcagcgaaggggggcaaatggtgcagacgcggtacaaggcgaagcacgacagacacacaactgcagtgcgccaacagcagatcattttccagagggaaaaggaacgaaagtgagtaaattcgcatttcttttcgttttgctcaaaacctccccaaattgggaatttaacaaaattagcaagcgaatattcttggagaattgttgggattcattttgttttgttaagagaggagcgaagacaacggcaaatggagcgtaattttgatgcacaaatgtggagaccgtcggaaaaatttggtcaaccatccgccagtggaaagaggttagtcccggaaaaataaacataaacgaagaattgcatttagaacattgaatgctttctgattacgaaatagtttactactttttagaaaaatgaaacgcataaaactaaactcatttaacttttttttagtttttccaattactacgagtcgcaacagcagcagaaccatcgattctatgctcagcaaagggagcattcgccagcgatggaaatgaacggcgcattggacagcaattggtacacaaatgaagacgacgacaacaacagaaacaacaacagcgacggcatcgacaacgtcgacgaccgcgaggaggtcagtgacagcgacggtgcaagtgccaaattggcggcggattacagcaacttcttcggggccagtaaatggccaagtaatttgtacaacaacacccattgtcaggcaaaacctacagcaaaggagcagcaaaaacagcacaaatcaccgccaaaaaaggttggcggggtgtcggagtggagttcgggttcgggagacgaacagcaacagccgagcgaggaggaagagaagccaaagccagcacaggagcagaaattgacaaagcaccaattcgtcgggatcag

SEQ ID NO: 59691 - DNA, 396 bp, Heterodera glycines
  unsure (1)..(396): unsure at all n locations
atggtttgntcggcaatttcgacttccaaaagcggctcaaattcgcaatcagagtcattccgtacgggtttggaagaagaggaggaggaaagggcaaacggaatggaagaagttgttaacgaaacgcctcacttggacatgatggagacgagtgggacagggacggaagttgagaacgcgtcgaattccaaagggaagatcgaacagaggaagtcggccatcgcaccaatctgctcaatcactttgcgtcaacgatcgtccgcaatgaaatttgcaccctccgaaatgaagcggactcacagtgggcactatcacataaaagctgggaaaaaacaagagatcgacctgggaaacctgggtttcatggataatattttgacttgttatttcgagtga

SEQ ID NO: 59692 - DNA, 467 bp, Heterodera glycines
atgccaattgaaccatttgaattggagaacaaagtgacaaatgaaaagctgacactgaaactgagcgaagaatccatcgaattagaatataattggctgttaaaacgatgcccaattggggagacggcgccagttaggtgggaaaattgcgaaaattcggatgccaatttgaactaaattacagatttgatccgcggtatggcaataatgcgtgtgccaatttgaacattgtccgatttgatttgggtggaaatcattggattgggtgagccaacaaaagcaattttcaattgtcgaaaaatgaaaataattttaggccattgtcgccgccagcagtggtagaagaagaattggattaaagcaatgaaaatcttatttgagaaataatcgacgctctcaccaattggaaactgatttgatggtctacaatttttctccgaaattcttttgttgattctttcgttcga

SEQ ID NO: 59693 - DNA, 208 bp, Heterodera glycines
aggttggcttgggaacacgaaatttacaacatcggacgtattcacgccgttaccatttcccacttcagcacacattccaaccctttcaggtaaagttggtttagtctgtcttctgttaaaacttcccattcccatctttcagaaattcgttgatggacattccgacttcgttagatttctccatggtagagaacaatgccaaattaat

SEQ ID NO: 59694 - DNA, 582 bp, Heterodera glycines
atgcctttctatctctggattaaatgccttttatcccctgttaacgattgcgttgattggcataatgccaagtgagtgtgattgaataagcttctgagcagatatcagcacccggcaccggcaaggcactagagaagctgcccaattaaatttgcttgctttccccaatgcttaagcattccttttcactagcatttacaaatttcgaaatcaaagtaaggcatttgtatttatcaagatgagaatggcattcatcccactggatcatgcatgggaagtgccaacgatgccaacatcaaaagtggagggcatcgtaaaaaaatatggggagggcatatgtatgtgtgccagcaggtcgtcaaatgattcattattaattagttttaatgaagaaggtgaaggaatttttaatactaaaataatcgcttctaaaaagcacaaaaactgaacatttgttttttacttttactttcaatcttaattgttttttatgcttttcagccaattagtgtcaattttttatttttttattaaaaagaagtcgataatttgaaatgtgtttttctgatctaaactaataaa

SEQ ID NO: 59695 - DNA, 388 bp, Heterodera glycines
atgccttcaacacttccgacattggttaagcctcctaacactgaggacatcgcaagacagcgcacacatgcttttacgcatttgtggccaagaccttcttctccagctgttgaaggtaagtcaagcatcagtaaattttattttgtcgcatattaattattttttaaaaaaattgaaaatttctaggcaatttagataaatatttcgaattggattagttttttatcacgtggctttcgatagcggaatttcgaagcttcaaaaaattttggaaactgagatcagctaacactccaaaatttctgaaattataattcctatgcccaaaaatgagggaatctggaacctaattttgaggcataaaatttataaatcaggatttattaaa

SEQ ID NO: 59696 - DNA, 714 bp, Heterodera glycines
atgagcgactcgtggggagggcgcagttattcagacgaaggtgagggaggagcagcagcaactgcacctctctgctgttggcattctgatttggctttcccctgtttaggcacaacaaactccacttcgtacactgagccctccgcggatgaggtggaagttggcttcacgttggtccaacagtgtgcgatgcgcgggtcggacgaggagttcaccagcagcagcagcacttcgtccggttcctacacttcgggcacttatacttcatcctcgtcaatcgacgaggacgaagaagaggaggaggaagatgaggaggtggaggaggaagaagtctcaggcgatgaacacggcagcagaccctcttctcgcgcagtttcgccctctcatcggagtcggtccgtttcatcgacttcttcgtccggagaaagtgccgaaagtatgtgtagcgaagaagagcagcagaagccggcggaagagacggagctgaaagccatcgtggaggatgaggaaaagcccgttgcgacggaagagacttctcccattgcaaagaaaagtccttctccaatgtttgtccaaatggcggaagagtcagaacaaatgttggaaggacacgcgacggtcgaagaattggacggagaagagatgaacatggaagaattggaacagatcgaagaggagcaaagcattgatgggagcaaagaggtggctaattag

SEQ ID NO: 59697 - DNA, 500 bp, Heterodera glycines
caaaatctgtgcgcggtttgctctgtcctgtcagcggacgtgtcgcttcttccgttcggccatccctgagttcttgcacccgaacataagtctcctctcggcaaatctgtaaacattcgtaaatgcattgttaattaccctctaatagtagctaattagccacctctttgctcccatcaatgctttgctcctcttcgatctgttccaattcttccatgttcatctcttctccgtccaattcttcgaccgtcgcgtgtccttccaacatttgttctgactcttccgccatttggacaaacattggagaaggacttttctttgcaatgggagaagtctcttccgtcgcaacgggcttttcctcatcctccacgatggctttcagctccgtctcttccgccggcttctgctgctcttcttcgctacacatactttcggcactttctccggacgaagaagtcgatgaaacggaccgactccgatgagagggcgaaactgcgcga

SEQ ID NO: 59698 - DNA, 2824 bp, Heterodera glycines
atgttgaaagaagcaaaggccaaagtaccaaatccaaacttgatcatttggacaggcgactcactgccacacgacaaatacgacgaaaagggtgctaattaattaatagcccagttattaaataattcgataaatacgacgaaaaaagtgctaattaattaatagcccaattattaaataattatttaatcatgttttcttaattcgtccattgtttagtgttatttgacatattgcaaaaggtgaccaatgcgataagtgcccaattccccgacgccgttcttctgcccgtgctgggcaaccacgactcggcacctggcaattcgttcactgaccatccggcaaaacagcaaatttacgagaaaatgttcataatatggaagcaatggattggccaagagggaaaggtgggaaaaatttgtagaacataaaaggtaactcgcccggtgggcctcgaacccacgaccccagcgatccgtgccgtgctctaaccaactgagctacgggcattccttttagaggttcttttaggtcttttatcccactttctctcacactccttttccttctgacatcatgaattttttctggagtaattcgaaaaccaaaccatttaggagagttttacgcgtggcggatattaccgcgtcgaaacatccgccggactgtttttggtgctgaacacaaacatttactacgaatcgaatccgctgaggaaggagcttgtggagccggaagacccaactggccaattcgactttctgcaatttgagctggaaaaggcccgccaaaagggggtgccggtgcacatccttggccacgtgccgccgggcggtgccgccaattaaaaacaaatttaaaaagcaaattttattttcattttagcatttgaagaatattcggtgaacaaactcgaaatggagcaaatcccgcaaaaatacaatcaaaaattggtcgatttgcttgttgaatacgcgccacaaattggatggatatttttcggccattaccataccgacacttttcgagtgattaaggtgaaaatggcaaaacaacaacaaataaaaaaaatccattgtaattaaggatggcatttttagattttagcctatttttcctgagctcccagtgacatgaaacacacgaaaaacaagtttttgggaggttgttaagctacttttcgagttatttgagcctattttctttcttgataagaatttttgattttaaaaattatttatataatgatttggattaattttttaaacttttttgaatagtttttgttattttacacaccataaatttgagggtttttagtgcctatttttggtgttttttagagcctaaagcctacttattttggctgtttttagagcctaagatatcattcatatttataagaaataattggtggaaaagctttatagcgaaaggtttttttctgtcggaaaagtaaaattttaaattcagagcaatagcgcttaaaagagaaaagaattaaactatttaaaaagattattaattaagaattccgacggaaaagcggtgcagcgatttttcacagcgccggcacttacgccggcatttcagaagaataacccggcatttcgtgtggccgactacaacactgacacatgggaattggaagacatgaagtgggaaatgaaagagggggggggggggtaattagtgaaattaatgagttgtaaatttaaaccatttaaatgcacttttaattgttcattatttatttgaagaacgtattacgtcgagttggacgaactgaacaaaaatggggcggacggaacgcgcgcgaaattggaatattcgatgcgcgacgcattcggcggattggacgcgcaaacattggacgcgcacattcaaaaggcgaaacggaacggcacagtgttcgacgcattgatacggcacaaccacgtgatgtacgaggcgaacaacaattggcgactgaacgccacgcaacggtaaaataatggaaaatatatatattaaagaaaagctggaaactatttactcatcgacaaccccacaggcacaataagcgaaaaagaaaccaataattgggagaaaagggagcaaattaggggggggggggggggagggggagcgctaataggggtaagtaatgttttatttgagggtatttataccattaataatattattaatttttgggggctttctgagccatttttttaattttcagatcagatatattctaatcgcttctttcaaaaattaccgtttcttgcaatgttttttcaaagaataagattttaaaaattatgggattacgcatattttgggcacccgaataccgtatttccataattgaaacaatctccgtaattatggatacttaaacgaattttcatgtaactgcttaaagccttcaaatctcaataattaaattttgagaaaatatttttcgattgaatgattattcagtgctgttcacctttgtgccttggaatttgttgactacaaaatgtttgagcagtgtttggccaacgacgccaacaccaatgaccaagtataatttcgactatttaatgcccatttgagggcttgtgaactttttattgctgtgaatttctttaaatttatgccaaaaatttcagattcccgcggcaattccgttggccatcggcggtttcgctgtcccatttttggtcacattgtcttcaattctaaccttacttttgccattttgacttggtttctgatcggctattcctttttaaatattattgtttaatgagattaatttcactaattgctcaaataagaaattaggacaaaa

SEQ ID NO: 59699 - DNA, 645 bp, Heterodera glycines
  unsure (1)..(645): unsure at all n locations
atgaacagacggtaaggaattttaattaccgcatttactcgattagaacccccctctcgaatagaacccccccctctcgaataaggctccctttatgaggggggttgaacaatagaggccccgggggctctaatcgagtaaatacgtaaatatatatatatatttttcattttcccaattttttcccccacaatttcagttggatttgcaacgacgtgtggatggacattctgccatcttttgaccgtgttcaacttggcctcaaaattgcattgctttcgccacgttttgatgcgctggtggacaaacattttgatggcaaaatgacggaattgacaatttggagagcaatcgaatttgcaaggacaatggacaaaaaccaatgttattagtcgactgggagtctgtggcatttcaactgccggaccgtccgctgcccaacaaaattcgcttttgtttccttcacattgcgtaattttaacacatttgggtacttccgtgttttgctacgccctcccctctcgaaacattttaaaatacatattttggtgggttttcaaagtcactgatcatgcatatggtgtgcctgtttcgacatttgatcacaacatcatattcgtgatcagtgactttngaaacataaaa

SEQ ID NO: 59700 - DNA, 1063 bp, Heterodera glycines
catttcaatcactgggactcaattctcttgcattccaatcactgggacctaacctcacctggtccttcggcattccaatcactgggactcaattctcctgcatttcaatcactgggactcaaccctccagcatttcaatcactgggactcaattctcttgcatttcaatcactgggactcaacacaccagcatttcaatcaccgggactcaattctccaggacttcaatcactgggactcagtttttatgcatttcaatcacagggactcaagacaccagcatttcaatcaccgggactcaattctccaggacttcaatcactgggactctattctcctgcgtttcaatcacccggactcagtttttatgcatttcaatcacagggactcaagacaccagcattccaatcaccgggactcattctcctgcatttcaatcactggtcaattctcttgcattccaatcactgggacctaacctcacctggtccttcggcatcgcaatcatcgagactcaattctgcgaaattccaatcaccggaactcaattctgcgacattccaatcactgggactcaattctccatcattccaattcccgggactcaatcccaccagcattccagtcactgggactctgttctcctgcattccaatcaccgggactcagctctccaacattccagtcactgggactcaattctccagcattccaatcaccgggactcaactcaccatcattccaatcgctgggaccgaacctcacctgattcttcggtatcgcaaccaccgagactcaattcccctgcattccaatcactgggactcaattctcttgcatttcaatcacagggactcaaatctccaggacttcaatcactgggactctattctcctgcgtttcaatcacccggactcagtttttatgcattccaatcaccgtgactcattctcctgcatttcaatcacagggactcaaatctccaggacttcaatcactgggactctattctcctgcgtttcaatcacccggactcagtttttatgcattccaatcaccgtga

SEQ ID NO: 59701 - DNA, 1368 bp, Heterodera glycines
atgctgagacacaaacttgcggccaaactgaggtgtaccgctggatctttgactatccagtcctgtgtatcggtaaagtctcaacaaaagtcattttttgaattgaaatatcttttatttgtttttgcatgtcagcagactgtacagacagacagcgataggaaagcgatacagtgaagacagacaccaacacaacgcctccgggaaagaaaatgactggccactgccaacaaattccataatggctgaaccgctactcccattatcaatttttggcacaacttgggcggattaatttgaattcataaaaatgccggacacaaaagttaccactgaggggaagacagaaacattctgactctccatatcatttaaataatccattacttttgtgttgggaacgcttttttttgcgtttccgatgtttgattagtctcatcagagtcctcttaaggggattaagaaggatgtgtgaattcgaacccaaccaattattccaatttattacccgaatgacctctttctcaaaacggactttaatggacacgccttgcgattatcatttttcaattattattttctatatttttggtctctgctctgactctatataaagagaaaggagcaatggaaatggacgacagtctctctacagtgaaagtggaaccaattaaattggaggaagcattatctctcggtcagaatatatatggcttttcggttctcttttttaattaaaattaacaataataaaaaatatgttttaagaagcccaaaacagtacttggggtgttttcgaggtgttgaccttgaatatgatatttctgcttctgtaattattaatgttaaaaagcttaaaaaatattgtgcaaaaaaaaaaacaaaatcaattatttgcagggtgggggaattgaacttgaagaaaaaatgaacggaaaggaaagaccactaggcccagagacgctcacatcggctttgcattctttgtaaatgatattctatagcaaaaaggaaacaaaaaagaattgaaaacttttttaatctagaggagttgcagttaaatacagatcttccgagattagaagatacaagtagagctatctctgagataacgatgaaagatataacttttaaatatacagatcagaaagattatcttttcgccaaaagaacagatgttttttcgtggaagtcccacggtcacttgggtacctcttctttgttagggaaaaatatagttaaatcaatttgatcagctcggtgccataatctacgcgtaatttcaaaataattaattgcgggcaactctaattgttggccaacttttattaaattagagaataagtgaaaagccattgacaaaataaa

SEQ ID NO: 59702 - DNA, 1223 bp, Heterodera glycines
atgctcatcgttatccatcatatttacgcattcgttatgccaaagcgatcaaacgccggaattgtcgcatggatcaaccggagttggaggtaaaggaagtgttatccaatttcaagaaaaaataaatgaaatttttgaaaaaattttcagcaatttttcgaattttatcggtaggggtcaactccgtctggccaactccgtctcagcaatgttcaaaaagctataacttttttctttgttggccaaacttcacaatcatggtatcattcgaaagacctagatgtttagaagatatttataagctatttctcagtgattaatcagctctcaaaaaagttgtcagttgaaaaccgcaaaaaaggcagaattttcaaagcttttatttctatctttttttatagttcgaaattttctgtaatttttagtaggccaatagagcctgtgaagagctttcgaatgatatcaagattgtttgattcggtcaataacttcaagagttatattgactcaaagttggctcagacggagttggccagacggagttggcccgttccgaattttatggagaatttgtatgtttttcaaaaattttccaaaaaaatcgctgcaaaacttaaagattccgataattttagtctttttcatatagagacaagaaattttttgggcttcgaaatatacttccgatatttaaggataccccgacatttgaatataacaccgtatttgagtacaattctgacatttgagtataactccacctttctttttttcggtgtaattttttttattattgattatttttgggttcaattcggctgcccatttatgtaattaattagttattacatataaataaataaaaattcgtaacaaaccactatttagattcattcaagtcgggagaggatttagtggacgcagcatcggacttggtcaatgaggcaaatgaaggggtaattagcgacgatttggccattgatgggatgaaaaaagcatcggttggcgttatgtgcaatgatgccatatttgaattaaaaatggaccattttggaaaattgcgcaatgatttgtgtaaacaattgaaaagtgatggccaaaattttgaagttttcttggcaaatattctgaatattttcacaaatgttctaccagctgttttgagcaatgctataaatgaaattgagaaaaaggcattgctcaatgaacaaaatgtgcaaaat

SEQ ID NO: 59703 - DNA, 938 bp, Heterodera glycines
ctgtaaaaggtggaatcagagtctcaggataccatcaggttttttatcaaggtcatttaattgaaaacattgtaacaagctttaagtttgtgagtcaagttgacctaatgaattccgaaaatttgcagaacaaattctttttatgaacccgaaatattttgtggtttaaattacaaaagaggaaaaggtttatcagcattagttttaggaccgggaaagtggtaattaccggtgccaaaaacggcggaaataaatgaaatgtttcatcatattctcctctatttgaaaatgtctaaaaagaagtacaatccgttccaaaattttgtgttcaatttttttttatcattaagaagttcacaaaaaaattggaaagtgtaaaataaaaaatttttttatgaatttttccccaaaattaccctaaatttgctgttccaaaattatgagttcaataattgaaggcatgtaactttttttatagagcaccaaaaatctgaaaaaattcatttcagtacaactttttatgctgatcataaaggtccattgcaccacagtgatcagatcactctcatgtctctatgagttctctacattgcgaaacataggtcgaaaagtaatccaagggaaagtggcgtaaaatttgtcattttttggatagtcgaattttaggcttacctccctcggtgaagacgaatcgtcgagccaggtattttcaaatcaaaatggttgtagaatgtctgttcatgatattcatgttaattggatgctgttttactattcaagaaaattgttagagaaggtcaaagtcccctgagggatagaaattctgatcactgtggtgcaatggacttttttatgagcataaaaagttatactgaaattaattttttcagattttttttgtgctcgataaaaaagttaaatgtcttcagtacaattaa

SEQ ID NO: 59704 - DNA, 3422 bp, Heterodera glycines
atgctgcccgacgagtgcctgcgacacgcgtggattcgcaagaatcgcgagcgagcactggcggcgagtcgcaccgcgagtccggcagtttgccacccgctggcggtggacaaattccgcaaatacgtgaagaacaaacggttccgtcgccttgtgttcggcgtactgttcatcaaccaggtgggtgttgtggtttggcatatactacggtaatgatggaaaaggaggggatacggtagtgggaaagtgtgtgcgtgtgatacagtaatgggaaatgtaagacagtagcgggggaaacttggcgatacggtagtgggaaaatgatacggtaaaggaaaaggatactataatgttaactgttgattaaaagaaatttttggagtttttttattttcaatttatttggtttatatcaattaaaaaaattttaggttttgtttttgtaaattatttcataattaaaacgtgaaaagaacataaaatgccacataaatatctaattaggcatagaaaaggttttttatctttttaaaaattgatattaggagcacatttcaataaaaattttttttttttttgaattttgataggaactttcatatttttcatatatcaaaaagtgcgaactataccgtaatatgtagaaaaatccattaaatatgtaaaaattgtgtaaataaaagtctcaactttgtgcacaattcaaaaatttttcttactatttaaaacatggagaatccaagaaaaaaatatgcatgaaatttttatccctactaataaaaaataaggatggaatgtatcgcgcaatccgtggctcagtgggataaatgttggtcaatgatgaataaaaactctgatttggttgatacacttatgagaaaaataaaagaatctgaggcccttttttaaatttaaatttttcatttaattaaattttctaaatttatttttgaacatttttcaaaaaaaaaattacaaagtatagataaattcaaattttagctgggctcaaaaactgattttatatcgacaaatttaatttttttttgttagaaattcctccaattaaaaaaaaaataaatttaaaaatcggtaataaaattataatttaaacaaaaaaattaaaataaattaagacgggaaaaatctaaccgagaaaattccgagtgttttctcgttttcgctgtattggaattttttaaatgcaaaaacaaaaaaatgccttaaatttttcaaaaattttaaatacattttggcattttgttttacaggtgatgcgcatgatgcggacaatgcagcggaacaaaagtgtgcacggcgcggagtatgtgcgggtacgcaaaatgtataggaacggtggtcaccaaagggcacgggcaccactcaccgcaatcaatcgctaggatacggtaacacctaagatacggtaacacacaccggtagtgatcagcagagagaccatgcctgggggccaatgaatgggtttgatcgatttctttctgattaaaaccccgaaaaatcaattttgatttcaccaaaaaacctgggaaaattgaaaatcagtgaggggaaaacgaaaatttcatttgatcgggtgggttgttcgattggaaattcggaaaagatagtgccgaacactgaccgttttgccggggttttaccaaaaaacccctgttaatcgactgaaaaaatggataaaaaattatacatttaaaaaaaatttaaaccaaaatttaaaagaaaaaaaagaaaaaacaaataaaactctgaacaaattatcacaaatgacaccgatgaagctgagagactgtgggggctaattaagtcttacaatttcactaattaatgtgattttggcattttgcttacagaatttgctggtggcggcggaacagcaccaaacgaatgccaacaacaacaacaacggcacaacaacaacaacaacaacaatcgaaaatggacatggaaatagcattgatgatagtgatagtgataggattggcacgacaattagcggcggcggtagtgccaacgaaactgctaaagggaaagtgccaaaacaacaacggcgacaagagggccaaaaaatggaggaaatggcgatggacaccagcaacaacgacaatgatcaccaccaccgccagcagaaaaaggtagtgatcgctgtcacgccgcctggcgacagcggtgacggcggcgatgccaaaaaagcgggggagactaccgcagcgagtgccaagaagaaagtggtggtggtgaagcgagtgccacggggcgagaagcggtccaagtcggaggcgcggcgagcagcggatcagcaacggacgcgctcctccacggagcaaactgcaaacaaaaagcaacgccaggagagcggtggcgctggtggtggcgagcagtgccagcagaatcagcgagcggcggtggacagcgattgcagcgtgaagtcgccgttgatggcacggcgactgggccagcgagagactgcagcagcgactggcggtggcaccagtgataacagcagcagcagcagcaagtcaccgctgatggcacggcgatcggtcaagtttgaggaggtgccgacgatggcgacaacgaccgcggcggcgccgaaagcggcgacgacgagcgcaacggggtcgccgattatgaagcgagtgagcggcggagacagcaaggtgctgaggatagctgcgcgactggccgaacaaaatgctggcggcggcgagtgctcgccaagtacttcggcgagcaccaatggcggcggtgccgacaagcgactgtcagcggaagcggcgacaatgacaaagaagaaatcgctgtcgtcgtcaagcaaagtgagcgcattgttgaagaagttggagcagaaaggtgccggtgcagcggcggcggcgagttcggcgacgacgacaccgacgagttcaaggtggtcagcggtttcggcgtcagcgtcgccgttgtcactggcagtgacagcgatcgcaccaaagacggcgacgcttaaaaaggcggaggagagggcgagtgatcatggggagaagcaacaacagcagcagaaagtgatcaaagtggtgaagaagaagaagcgagtgttgagggttcgaactgttgatgatcaacctcagcagcagacgacggagcagcgactgggcgaggcggtggcgacagtgacggcggcgagggcaccatcggcgagtgtggtgacggcgggcgaggaaaagccggggatgaagacgaagcagcagctgcgacggcaggataaagtggcacaaaaagcaataataaatgaggagaagccggtgaagaagcttaatgtgccagggcgatggagcactatggcattggcagcacaaaatgggcacagattagcagcggaggtgaatccaaaggagaagcaacagctgaatgggggagaattaacg

SEQ ID NO: 59705 - DNA, 105 bp, Heterodera glycines
atgtgcgtgtcgcaaacgtccaaccagatcaagctgatcgacttcgggttggcccagtggtacgacgggtccaaggatttgatgttcatggccggcactcctgag

SEQ ID NO: 59706 - DNA, 660 bp, Heterodera glycines
aaacaaaaaaatcgattttttcaagtgtccgtttggggtactcaaacaattatggggagcaaaaatccaacgcagaattaaagtacaggctatagggaagctattcccgaaggattcgttctccccataaatctgggcgcatcgtttcggggggactgccccgaaaacaaaaaaatcgattttttcaagtgtccgtttggggtactcaaacaattatggggagcaaaaatccaacgcagaattaaagtacaggctatagggaagctattcccgaaggattcggtctccccataaatctgggcgcatcggttcggggggactgccccgaaaacaaaaaaatcgattttttcaagtgtccgtttggggtactcaaacaattatggggagcaaaaatccaacgcagaattaaagtacaggctatagggaagctattcccgaaggattcggtctccccataaatctgggcgcatcggtttggggggactgccccgaaaacaaaaaaatcgattttttcaagtgtccgtttggggtactcaaacaattatggggagcaaaaatccaacgcagaattaaagtacaggctatagggaagctactcccgaaggattcggtctccccataaatctgggcgcatcggttcggggggactgccccgaaaac

SEQ ID NO: 59707 - DNA, 641 bp, Heterodera glycines
atgggctttggcgccacaggactgggccgattgcttgcgatggacgcttgtcggctgatctgtgtgctacggcgaggagccaacgacggtggaggcataagatgcgaatccgtcagcgcttgggattcattggcgggaacatccgaagccgcggccgtcgtcgtgtcaacagtcgatggaatggactctgttggcgacgcagccttggcattcttcagcgggcgtccaccaatgatgcctcttggcttcggaactgcacacaacggagcagcattttcgacaccacaaatttgactaaaatacaaatgcaaatactagtgaaagaaatgtatgagtcgtcgcttactcgtaatgcatgtcctgaaggccttgccacggctttgtgcactttgctgggcagctctgcttcggtgcgggcgaatacctaatttgccaaaaggaaaaggggtaaaaatccaaaatgattaaacactaccagcattcgaagtgagtgtaagagtcacagcaaggcaggaacaccttgctctgacgaagcccatttgcctgcagcttgaacagccgctgacacaacatgcaaaagccggggtgttgcgtgccgcaatctgggcatttgccaccgctttctttgagcctataataaa

SEQ ID NO: 59708 - DNA, 651 bp, Heterodera glycines
aaattaaaaattatttttctttttttaaataataattaattaattagaacattttttaaaatttaataaataaatattatttaattatacggccccccatttctttttcgctttaagtcaaaaattgggaaaattccgttaattgatttgtttattaggccttattgcagcactcttccccttcttcattgatttgtttattttgttcatcttaaggggtcctgtaattaatttggtttagttaaaataattatgcaaaaaaataaataaataaaatattgggctcataaattaaatttagataaaaaaacattcaaagccaaagagttagaaaaaataaatttgcatcaaagtataaaatttcattgaaattttaattgtttgaaatttaaaaaaatatttgttattattttaaataataattaactaattaattaattagaacattttttaaaatttataaataaatattatttaattatacggtcccccatttctttttcgctttaagtcaaaaattgggaaattccgttaattgatttgtttatttgaccccccttcccttcccgccacccgaactcgccatttcccgtatccctcgctgcaacccttcctcgccactctcgctgccgagcaatttctcgccatttt

SEQ ID NO: 59709 - DNA, 114 bp, Heterodera glycines
atggtcagagcaacaacggccaggacaagggcatcagcagcgcgagcacggaccatcaaaatcaatcgtcgaaatgccaagaaggcgcgtgccgcaattggacgagccggacat

SEQ ID NO: 59710 - DNA, 699 bp, Heterodera glycines
gaggatcaagaaagtagaagagaaagtggaagaggaaccgaaagtgtgagaggaacagaaagtggaagagaaagtggaagaggaacagaacgtggaagagaaacagaacgtggaagagaaactgtaagaggaaccgaaagtgtgagaggaacagaaagtggaagagaaagtggaagagaaacagaacgtggaagaggaacagaaagcggaagagaaagtggaagaggaacagaaagtggaagagaaagtggaagaggaacagaacgtggaagagaaacagaacgtggaagagaaagtgtaagaggaaccgaaagtgtgagaggaacagaaagtggaagagaaagtggaagaggaacagaaagtggaagagaaagtggaagaggaacagaacgtggaagaggaacagaaagcggaagagaaagtggaagaggaacagaacgtggaagaggaacagaaagcggaagagaaagtggaagaggaacagaaagcggaagagaaagtggaagaggaacagaaagtggaagagaaagtgtaagaggaacagaaagcggaagagaaagtggaagaggaacagaaagtggaagagaaagtggaagaggaacagaacgtggaagaggaacagaaagcggaagagaaagtggaagaggaacagaacgtggaagaggaacagaaagcggaagagaaagtggaagaggaaca

SEQ ID NO: 59711 - DNA, 547 bp, Heterodera glycines
atgataatattcaaattaatgcaatttggaatagacgcaagctcttacattttttttggagatgagcaaaaagttataaattggagccttgaaaacggcttgttaacaaatgtgcgttactgctatggaaaacggccgacacggcactacaaaaaggaaatgcgttttgacaaaaacagaggcagggccggctcattcatatgcagtacttgtagagcagaaaaagctctttttgttgattccggtttggtcaaaaattttaaggtctttttttgttgtttttaactatattttttatattttatgaataattattatttagtattatgtactcatttgcgcatcaagagaaatacaaaaaatgtatttcccttttgcgaagttcaaatttttttaagggatgattgagaatgacagtgaagactttcgtgtcgttgtgtgtccggacaatgtcagaagtcccgatgctctacttccgatcatccaaaacacgttgcagttggtactgaaatacacattgacatgtggagggcttattctcgattaa

SEQ ID NO: 59712 - DNA, 117 bp, Heterodera glycines
aaattagtcaaaatacatgtcagattcgtgattagcgacctttaaaaccccggataaaaaattatcatcgttttttatcttaaaaaaattttgcaaaacaaaagggtcccccctttt

SEQ ID NO: 59713 - DNA, 2736 bp, Heterodera glycines
atgaagatcctagtaggtggaaaagctaatgtggctctaggacaggggtgtgaccaaacaatttttaaaataaagaacatcaatgacaaaaaataaggtttagggtcaaaaaagacaatcttgcaaaattggttcgaatcagttaatatataattttttcgataaaaaatgtattaaaatgttatgtttttcacatcctattatggattttaacaatttttggggaagaaattagcaactgctgaaaaaaaaagattttcaaacgttttttttgcagtgtatttttttttacaagttgatgaatgggaagtgggtccggcggcgccgataggcgacgccgggaaaatttttgaaaatttgagtgctattttatagcagattttcaattaaaatcggtaaaaacatgattaaaaaatcggtaaaataaagtgcggtcatgcgggatcgaacattaatgcacagcacaaagcaaacctgctgttttcaccactaaactaaaatacttaaataataaaacttattatttctttccaaaaaagtcattcttaagggtgtaaatattttcgtctttttcgtaaaatattgctctgacgaaaacgaaacgaaaatcctaaattttaaaaaccgaaaacgaaacacgaaacgaaaaataaaattttgaaaaccgaaaacgaaacgaaaaaactttagcggacgaaaacgaaacacgaaaacgaaactcaaaaagtgccgaaactgtaggacgaaacgaaaacgacacgaaatttcgtccagccctgatccccgcccccgcgaaaaggccacccccgcccacggggtccgaaccctacttcaaacaaagtgtggaacactttttaaatcattttaaggtcatttaaagtcagcaacaaaaaaaaaattcatttggcttaaattcccatccctagatatgactgagtttttcctgaaaagtctgtaaaagttggcactttacgaaacgaccaagcaatgcttttatttgtccttgttttattttttttgcaccattttgttttaatttcagaaacaaccggtcctcaatagcaaagctgttgctgctgctgctgttccttttgtgccgccttcgaaccaaaaatcattgccaaatacaccaattgcatcatcaactcagaaatccacaccaatccccacacaagtgtacaaacaaacgaccgctatgcgcttacgaaactcggtgtttattatatattttttattttgtaacgttttaggtttattgttaacatttattccagggctttcgggatcgttgttgttcaattttttttctattcattccgatacgtttttaatagtttaaactagtgcagcgggaccgggacctaaacacggacaactgagtgcctaagtcccggttttgaccgggaccagtcccgtttttccagccaaaaattcccgggtttcaacccgaaaaggtcccccggctttgcccaaaaatttatgaatttgggaaataaaaattttctaacttttttgcatttgaaagcatgtttctgggtggtttttaaggcactgatcatgaatatgacaccagactggttacaaagaaaaaaaattgttttaaaaccggaaaatttttttccgaaagttctacatttcgaaaaatgtgctaaccaacttgaaaaatatattcttaatttaaaataagtcaaaaaatatttgaaaattcataagttccgcctcgattttcgagtttgaagttataaaaaggtgtcgcccaaactgttgagaacatttgtgatttggctcataaagctattgagaagacttgacttctagagatttcttgtacgaaatccaggttcgagtttaaaatttacacgaaaatgaatgtcttttcgtgaaattaaagaaaaatcgtcaaaaaatttttttttgttttttaagcttccaaaaaaatagtttaaaaatttttttcaaaatcttttctcgggacggagagctgatccaggaggaagggaactgatatgggggagaaaacgagatgttcccatggggaatttagcatagttattttttatcgctttatttcttgctcttccagcaggcacctctcaacatcaaagcaattccgttcgtgccgtcaaagaaatatttggtaaatacagcaatcgcgtcgtctacgcaaaagccatcacaacaaaactcgcagccaacaccaacaaacaaacagcagccatcaacaacgacccctcacaagaagaaatcggtgtgcttaattggtttttcaaaaagttgagaccggacgagaacgcgggattccaacgtgaaaagccgcgttttttttgttgccgggacgagatttttacgagaacaggaaaaaagcgggactttcttgtcccacttttttccgatttcccgtaaattttcctaaaacttttagactaagaaaatgaccataaaaaatttgtttaccggactctaccaaaaagcaaatctttggaataatcttcactaatttaactcgaatatcgaattttttttttttagagagagcaaccagcaacaaacaagaaagatgttaaaaaagataccacgaaaaatttggagcaagcgcagaaaacgaccaatgaaatgacaattaccccgaattacaaaaacgggaaggcggaggagaaggcggcggtttgcacaaatttggaggaagtgcaggaaaagacgaatgaattaagcctcaaggataaaagggaaaagaca

SEQ ID NO: 59714 - DNA, 1464 bp, Heterodera glycines
atgtccgttccttttattgacatgtccggcaaaatgatgaaggatattagagttgtcaggtgggcttttttagattctaatgcactttatgagcacaaacaaattttatgagtccaatcaattaaccataattagtttttatacaacaactttgttcatgttcgaacaacctaaaatatttttggtatattcgaaagcagaaaagactgaattaagtgtaataataataccgcgaaaacaagagaatagttaacatttaagaaagttacaaacgaaaataatcaacaattacttaattaagcatgcctaaacgcgctgacaaagggaggtggccaagtgtccgtgggatttccaaatgaaacttggttggatggatagagcacccatgggttcttaagaaaaatggttttattttctgccaaatgagcacgagtgccgagttatgacgtgccaaagtttttagttttttataattaaagaaaataattaattatttacatatcttcaatgtgttgtttggtgtagaggtaatgtgttagtcaaaatttttattggtcacaagttcgaatcccctttgtgtaaatccattttttaattttaatttttcctttttatgagcacttcaattagcaaattttatttctttatcaaaatctttattttaattttattccattaaaaattgcattaaacataaagatgtaataaaaaacctgtcgaattaaaaaatatatttttgtctaatatttttattgagtattttatgcactaaataatttcaaaaaaattaaaaataaagttttttttaataaaaaatattttgataattgacttggcataatagacaaaaatttaaaaaattaatttacatgtaggtgatccgaaccctaggttaactgatgctgactattgcactaccgctacaccactggacactgtgcggagacacaaataagtatttcttttatttcatcattaaaaagtttggcattttttatctcggcacaggggtccatttggcagaaattgaaaacatttttcttaagaacccaggtgtgctctatctacccaaaaaatctcattccgaaatcccacggacacttggccacctccctttgtaagtgatatcgcaacaataatattcctgattatctattaagatctgtgctaacgtggcctttcatcctcataactttgtgggcgattacttctaccaacaatcccgtaaagagtcggttgacgtgggtcagttggcggaacgcaccacatggattctgcgcatgttggagaccaaccgcgtggtgcacgcacgaccaaaatatatcattgtgttgcgcgacggactgtcagaggcgcaattttccatggtgagtgatgaaatattggtatattatatagttaattttgtcgttttaggccattgatgaggagatgagtgctcttaaaatgggctgcatggaatag

SEQ ID NO: 59715 - DNA, 348 bp, Heterodera glycines
atggctccggatgtacgtgccctttggcaattactaataaatcaccgcactaattaatacttttgtttttaggcgacaacgaaacggtgcggaacttcacattggacaattttaatttaaatatttccaaaaatcttttgatttcaggtcattatcattgatttcaaaaaggcgacgcggtcggccacgggcaccgattccgcgcagtcggcagaaccgtcgtgttaggatggctgatattttgctgatctaaaaattttcaaaaatgtttgtggagcacaagtctctggaatgcagattttttgcacttttcccttaaattggaatacacacaaaacactcattaaa

SEQ ID NO: 59716 - DNA, 98 bp, Heterodera glycines
ttaagcctaaactttttggcctgtttaaaaaggaattaaaaatttttaaaaattttattcatctccctttttgatagaaaaggcatcagagtgcctaa

SEQ ID NO: 59717 - DNA, 795 bp, Heterodera glycines
  unsure (1)..(795): unsure at all n locations
atgtcattgaaaattataaataaggtgcacncaagtaaaaaaaaaaaagaagtaaaatgcagcaatacaaagcgctatttgctagtccccgaagagatttatcagagtttggcatcaccgccaccgtctgacggaacaccaattgggctggtacgtaacagaattaaacaaatcaaaaacgatgatggcataaatgaggcggaacgggcaatcaaatatgagcaggaacttaagcgtctcaacaagctcacaagggacgaggatgagtgtcccgtcggtgttaaattagaaaatttgagtgacgtggttgacgccatgcccaaatcagtcaacgtcagaagaccaattgttgtcgctacgcgtcgccatctcaaggttgggcgtgcgcgaaaagaaaatgttgaacaactagaagatgatgatgatgctgatgatcatgctgatcatgaccatgaaactccaaagccatcgagttcaaataaacgacaacccacacaaacggaaatcttaaaattaatttataaaaacgcccaatctcttggagtgtctgaggaaggacaggtcttgagagcgggtgggcggccgtttataaccagcagtgtttatgacattgttagtcacctgctgaacaaggacaaacgtgctcaaaacaaagagccaactgcattcaaagaatttgttgaaagggcaagacagatcccgctcttgagtaggcatttatttcccgaaggccaatcgggcaaaggcatttataaaaacaccacactgaaatttaagccatcattatggatttga

SEQ ID NO: 59718 - DNA, 176 bp, Heterodera glycines
cattggcattggcattgaaagcggagagtggagaatggcattgtgttgtacttccgtgacattagtgtatttccgcactccatttgcggcacgaaaatgctcatattacggcgagggaattacacgaattgcatttttatgaattcattgggcaggaattgacacaaatcggaata

SEQ ID NO: 59719 - DNA, 276 bp, Heterodera glycines
atgcaagcggaggatgcgccggaagtcgacttggaagtgctcaacggcacttggatgcccgacctgacgcttcgctatccaccgaccttttcaaaacgcgacctcatttttggcattgacggaggccttttgtacaacggaaaacagccattggagtcaatggaacggccaaagtttgaggacatcgaagtcagggaccaggtcagaatcggagggaacagaaggggtgaaggagacgatgctgcacttgcagatgctcggcctgattctgagcga

SEQ ID NO: 59720 - DNA, 423 bp, Heterodera glycines
atgagaagaggtacaaaagtgattaaaagaggtacaatagtgattaaaagaggaagaacagtgattagaagaggtacaactgtaattaaaagaggtacaaaagtgatgagaagaggtacaacagtgatgagaagaggtacaacagtgtgagaagaggtataaaaaggattagaagaggtacaaatgtgatttaaagaggtacaaaagtgataaaagatacaagtgattagaagaggtacaaaagtgatttaaagaggtacaaaagtgataaaagatacaaaagtgattagaagaggtacaaaagtgattagaagaggtacaaaagtgattagaagaggtacaaaatggtttaaaattaaataaataatgaaaagtttttataaaaatcgattgcattttaatttaaaatttttttataataaa

SEQ ID NO: 59721 - DNA, 472 bp, Heterodera glycines
atggaccactcactggtggcacaacacttggccaagcatttcccggacgtggactgcacggcaccattgataaaggacacgtgcatttacacggtaatagttttttacacttaaatttcatgagcttttcgtttttattttggcgaaatgtccctgtctcttaagactttcactctcttaatgccaatatgatcaacaaactcggtttcagatgactgacgaccttcaattcatcgtcgatcgccacccccgacaccaaaatgtgttcatcgccggcggcttctcgggcaccggtttcaaatttgcgctgactattggcaatgttctggcgcaatgggtcaatggagaggacactccgccacacattgacgtaagctcatttcggttggatcgacgaattgccgacacggacagaccgaagctttgatcgacggaagaaaaacaaaaacggacattttaacaatcaattaaa

SEQ ID NO: 59722 - DNA, 388 bp, Heterodera glycines
atgccaaaacaaaacgaaatcgttataaaatattcctttctggacttgacttggtttcttgatatcgaagctgttttctacgctatttctaaaacggttataccaaaccccagatttttgaatccggttttcagaaaaaatgccttgtggtgaaaacaatatttcacatttcactccataactttgtgagttcggcacggatcgagaccgggataagaccattggaaagagcagctcgagctctacaagaaggtatggaaagaaaaaatagttatttctgggactttttcagaaatcagaattaattctccaatgtggcccaaattttaggcccccagccacagccccttgcttctcccagttttaagtcttggatttgtcaaataaa

SEQ ID NO: 59723 - DNA, 578 bp, Heterodera glycines
atgtccaatcgggccggacaaaaggaatttgaaaatgagaatgaatgtgaaaatgaaaatggagcgacgaaagatggagaaaatgcagatgtgaaatggtggacaaattggataatgagaaatgaaattgaaaatgatgatttaaataaaaaggagaaaaatgggaagaaaaggagaaaaggccagattggcggggatttcgtcatctctccgatcttctgctccgtccgaccgaccaacgggaatgttcccgatcatcaatggtaccacggcttcttcttcttcgggcccgagactcgtggaggtgcagtaaaccatgcgcctggggtggcccatcggttctcctcctcctcatcgattttacgggcattgtagtgcccgcccgagccccgggtaaaggacaattggcccgatccttcaccccaactctcgtcgcggtttcgcgacaattattgttatggcttttgcgaatggaaatgaaaaaagttctggaatattgcgattctgccttttttcccaatgtcaaaaaactcatattggttttagcaagcattctaataacttctggtaaaagtaaa

SEQ ID NO: 59724 - DNA, 1193 bp, Heterodera glycines
atggaagagaagcggagacaatttgtggcaattgaagaggaaaaaatgcggcaagaaatgccattgcgagcggaaattatgggtcaagcggagcaggtcggtgccgcactgctgtacacgctgatccacatgaaaatgcgacggatgttcatggataacaaccaaaccccaagcggaagcaacaggtggacttgtgaattttctggctctatttcctttggctttaacttttttctttacctaaattatttatatcaacaaaaaacttaaagcctatagaatatttcgtcgacctaaattctgaactaaatgtaacagacaaaaaaaaaaaattattcttgaatatactcgaaaaaaacgccttttgtgttttctcgttgtaattattttttttattgtcagtatttgctcttttcttacattcgtgagttccagggaatttaagctttcgtttaataccaagaaagtagttattgaccaagtaagaaaaaagttatggccaaagaaactaaactttggacgcctaaaatgcactagagcattttttccccggtccccaaattgatggtcatttttaagactaattaacatttttgtaaaagacgtcaaaatttttaaaataaacttaggaattctatttattaaagggaaatctgtgtatgaactcaaatggtaatagtttagttttcaatttcctatttattgcccaatttccgggaatttttggggccggtgatcaatgatcacgaataaaacactcattcagggctaattctgaaaccgaaattatacaaaacaaaaagcttaaatttctgatttaatctttagtcgttctaaataaaaattctcaattaagccaagctcgtgatgacgacaacaacaacaacaacgaaaagaacaaccagcagcagggcttagctgaccctgcatattttccattttggttgaaaagggtggaagaagcattccgatcacatttcgagaaaggaaaggaacaatttggcatattttgactgaattccctaccgagaatttggagacgtcaaagaatgtgttgccaaatgggaaaacatgatcaaagttgcagcagcagcagaaggaagtgacaatgaaagtgatcagcactcattttctatttgttgaaatgggtgctatgtcgaagcacgaaaagtgcaaagtgatcactgatcaaa

SEQ ID NO: 59725 - DNA, 3357 bp, Heterodera glycines
cagtttgaggtcggtttctctgcgctaaacagtgtttttttaaagggataaattctgatcaacagttgtccgcttttagggctgatcatcatggaggacctaagcgaccgcgcgtgctgcgtgccgatgctgccggggctaagcgacgcgcaggtgcgcgcggtgatcacggcacttgcgcgcatgcactccaccgcatggacacaccggacggaactgatgagcgaactgtggaaggacggcacagcaagcgaatgttgggcattggagccgctttttgtggactcaatggttgaggcgggcaacgatttggccaaagtaatcaaaatgccctgcggggctgcaaaggaatttttttatgaaatcgaagaaaaaaaaacgaatttcaaaaaaatgacgggaaaaattttacaatgcagggaaaattttcctaattttatcattttaaaaaaaataatacataattttgtggctttttggcacggaattgtgaaaaatccataagaattgcaattttcgataccaatcaaattttttatttctgaaaaattcaataatttctcttcaaaatcgaaagaaaatggtgaaattatcgaaattgaaagattccgactcacgcctgatccaacggccaaatttgatgctgaacagactaatgattgtacggcacaaacgcactaaaattacttttttataaataaatgccattgagaatgggtgccaattatgagatggaccaatcaatataataggtttgatcagcaaatgagcttaaattctgaagaaataagcagataatatattaaaactattctttaacaaaattaaacgaatttatgaatcttgttttcacattaacaaacaaattcaaaaaaatgaatgacaaagttattaattattctttttgtttactcatcgttttccttaattgttgacaaaaattaaatttattgtacaacttcaaattagtcaatgtttcattattcataattttcgatgtcccaatttacagattgaaccaaatgccatcggtcctttgctgtgtcgaattttgccaaagtttcgagtggaaaacctcgcagagagtttttatgatgaagacaaatatggtggctaaaaatcgtaaaatatttaatgaattttccttgttttgagtggcattccctaaatgttaattatttttttgttaatttattttggaaattcattttttcgtcggggggcgtccgtcataagacatcttttttattcaagtatttgaagatgaattcaccaacagaagaaataaaatataataaaaataaataaatttattgaaatttttctttttaaataaatttaatttagaaattataattcaagggtttcctgcttgcattgttcatgccgatttgtgggccccaaacatattgtggaccaaaaatgcggaaggacaagcaaggtggaaaatagtagaaacatttttgcaattcctaaatgttgaaaatattaaagcaaaagaatgattatttcagcgttttttcctatcgaaaaatgattattattaatttttatcaaattcattattaaatttagcgatcaattatgcgcaattatcgattggcaaacggtccattcgggcaacccttgcgaagacattggccgtctgctcgcgctgaacacgacaagtgcataccgtcgtgccaacatcaaccaattgttggcattttatgctaaaaaagtggccgaatttatgggcggaaatgccccatttacattggcacagctgaaaaaggcattcgtcggcgcaatgccatacgtaatgatgtgagattttctctaattgggcgatgtaatatgcaattttcgagactcaaacccgagacagaagagactctcgaacatatcattatttaatttagcatttttggttcttgtcaaattttgtactaattgccgcataattacttatttacctttgttatttctaaacaatttaaatttaaaataggtttttctgttttggaacgacaaattattgcaccatggaatcggtggtgggcaaagaaggcacggcaaagcgagaagaaaaccgtgccgaactgttcgatcgcgtccgttcattcatcgaagacacagaaaatgaattttacgatcaaattcaatgaaaactattaaaaattaattgaataaatagtcctgtgccataatttttatatttttatttttgcaattttatcaacaaatttgtgaaaaatctattattaaatcttaaataaaccaagttataatctatgttcccctatttgggctaatttttgtccggcaatgtctgtcgagcacctcaggatctttaaaattagatccctcagatcaaagtgtcatacatattaatcactcatttgtattgatcatccaaactcatttctgcagtcattacgattcctttttcctttttatcgattccgattaacatttccttcccatttcccttatctcgtgacctcattagtcctttagaaaataattaatgaatttttcaagaaaaaattctcttaatgacaacatcagcactcagtgggattcgaattttggatttctcacgagttgtggccgcaccgtttgcctcaatgattttgagcgacttgggcgccgaagtttggaaaatcgaacgacctggtgaaaaaatgactgacattaataagtctggcgtaattttttccaaatcttcctgtgagatttttccctcctaaatcgaagaaatgcaaaacaacataaattaatattgaaatcaatttatgtttgaaaaacaaaaaaatttgcttataaatctttattaaccaggccagattgatgtttatcctatggcactgaaaattctattattttagacaaaactaaatattcaatttataatttgaaatggattcaaattattcatccggattttcaacaattgctttggtcacattattcccaattctcaataaatactgacaatcaaaaaccttacaaaaaaaattaaaaaataaataatattttcttttatgttcaattattcgcaggtgttggcgatgattctcgcctctttacaccgcccgaaatcaatggccaaagttgttatacgcttggccttaaccggaacaaaaaaagcattgcgatgaatttggctcatccggaggcacaaaatttggtacaaaaatttttcataagacttcaactattaattttttattttaggcgcaaaaattggcaaccaaagcagatattgtgattgaaaatttcaagacgggttacatgaaaaatttttgccttgattaccctcaattagcgcagctgaaccccggcttaatatattgctcaattactggtattttt

SEQ ID NO: 59726 - DNA, 565 bp, Heterodera glycines
atggatttgccagaattgtgcaattcatctgactacaaaacaaatgccgaccgtgttcggaatcgtgaaaaacttattggaatattttcaaaaaagtaatgttttataaatttatttcgcattattttatttttcatttctttcaattttaatgctaaattttaatttaattcccccccaccccacagatttcttgaacatgaccttgagcactggaacgtgttgctaaaacattcaaaatttcctgccggcccagtgaacacaattcgtgaggcttttcgtcatgagcaaacgcaacacattggcattgtgaagccgatcactcaccaacagtacggcactgtgaaggtggtcggtaagcgaattgaattgttttatttttagtaaattaatttaaatgctcttgtaaatggttttacagaaaaaccattcccaagagtttattttaagattttggttcggtgatttgtcacggagaaaaattaaaaaatatattggtttaatatagaaaaattgtttaatattttcagaagagggacaattgaaatcatcagaaatttattaa

SEQ ID NO: 59727 - DNA, 104 bp, Heterodera glycines
gtcccggtcccgaaaaaaaaatcgaggtcccggtcccggcttctcaggtcccggcaagtcccggtcccggttttggcaaaaattcccggtcccgtggcactcta

SEQ ID NO: 59728 - DNA, 49 bp, Heterodera glycines; identical to SEQ ID NO: 51181

SEQ ID NO: 59729 - DNA, 621 bp, Heterodera glycines
atggtaaacaaaaagcagtgagcaaaaaagggaaaaagcagtaaataaacaccctcggggagaagaatggaagggaaaagaaatcgcgtcgaaaaattctttgttttgaacggtgggcggggttaactgccgattaatataatagattatttggttttttatttaataaattaaattaatgaaaattttcaaacaaattttcttcaattatttcaaacaattaatcatttttggactaaatcatcgaatattaatagaaattcagatttgattttcacatcactttttttcggagcgctttttcaaaaaacttttgggaaagaaggggtccggcggtgccgataggcgccgccgggggaaattttgaaaatttgattgtaatttgttaacagattttcaacaaaaaaggttggtttttgggattattaagctcaattggtaggattttcatttaaaaaaatgataaaaatgtatcaattttaaaaaaaactatgaggaatcatattttctttataggaaacccacgagtatacaaaacaaaaaattgaaaataatctaatttctgtagagggattgaaccaggggaaagaagaagggaaagtcaaggagactagccattag

SEQ ID NO: 59730 - DNA, 1239 bp, Heterodera glycines
atgcgcgacaataaaagtttgaaaaagatgattgattcgattcattggattaaaagtgataatagcactatttttatattatatattccatttaattattttttttataagtttgatgaaaaaactaaaataaaaagaattaaaaaattatatgtaaattgtggaaaaaaaatttcatgagcaaaattcgtttaaataattttttgctaaaattactaattctgcattttctaaatccatgttttgcaataaatagtaaataaggggtctcaactataaaatttttatattcatgtattacaatgatttttttctactaatttttatttgtttacaataaatttccgaaattttttgtccatattttggcattttttgctctcacattttagtgtttttgtccatattttgttcatattgtgattttttcgtccatataattccagtctctaatgataacatataaactgcgatttgcatagttattgtattaactttaacgttaatccattttaacaaagacattaatcccctcacattcacacacttttcgaaaaaaaaaagtttttttttagtgtttttaaagcgaagaacaaatattgtcattttcgcaaatcagtgagcacaaaatgaatcaatgaaaatactttttaattaatcttctttttttcaattttcaatttgttattttatttatttttatattattgtgtgtctttaaacaataaaaccatttaaatgtttaattgcattttgaaaaagcagtttttagtttcgttcgattttttctcatctttttttttgctaaaatgtcaacagacatcagaaattatcactattttaagtaattttttccgttataagcttaaaataaacaaaccttaaatttgtaatattcaaaaatttgtttgtttattcttttttgaaccaatcaaaaaatgctcaaactttaaaaatgacaaaaatttatttttaaatgatattttttagaatttcaaatttttctacgaaatggaaaatcgtcagcagcagagacgaaagagtgaaatgatcaggagaacattgtctgaagattatcccggccttgactatcttggctttcataatgtgctgaatgccaaatatttttggtaccgtgttctttggttttccgtggttaccgtatgcctgctgattggcctttttactatattcaggcattaaaacaaaaataataataataataatatttttaattca

SEQ ID NO: 59731 - DNA, 1162 bp, Heterodera glycines
ggcataagcgaggaccttaaggcgaagagacacgattggctctataaagaaaggcgtacggtaaaggggatacttgaaaatagaccacagaaggtcgtgattgagaatcatgtacccggtccaaatgttgcaccatatctgggcctcaataaccaatccaaaccacaggagactgaagaaccacggaaaataattattcctaggaaaagacttaaagagcgaactcctgagtgcgatttgtgcatatttgaccagttgaaaaagcataacgacggttacaaatatctgttgctatgcatatccacatgctgagtcgaatgatcttcagtgcaccggccaagtcaaagaagaatgaggacatgattgaggcttttgatcgggtattcgaaaagtcgaaaattatcccgatgaaaatatagcgacagcggactcgagttccaggctggaaaaatgaaaaaatattttgaggaaaaatttatcatcaaaaatgtgatgtatagtcctgaccttcacgccggagtcgttgaaagggcaaatcggacaataaaggagcgcttgtatagatattttacaaagatggacactctacgatgggtcgatgtaatagacagaataataataaacattaacaacagtgtgaataggaaattgggggccaagccagtatccgttacttttgaaaatgcacgggcgctctgggaaaaattatataaggcgaaggaatttaaaatttcgaaaaagaacaaatttaaaattggcgatatcgttcgaattaccaaggaaaaaggaaaatttgcaaaggggtatctcccaaactttaccgaagaattatttaaaatcgttattgttaattcaacgacacccgattcatacaggatcgaagatttggaaggaaatttaataaaaggcatattttataaccaggaattagtcagtagctctctcatcaattatttacccctactcattcaccgctctcggtataaatggtcaagagtttataaaagtatgggaaaatgacagcagtgtccccattcaagtttatttaccggacatgaattttaaaaccgccgggggattgggaaataaaattaacgaagcatttacacatcattacaaaatcaaaaaacaaagtgggaagtgagaagccaaggctgaagat

SEQ ID NO: 59732 - DNA, 660 bp, Heterodera glycines
aaacaaaaaaatcgattttttcaagtgtccgtttggggtactcaaacaattatggggagcaaaaatccaacgcagaattaaagtacaggctatagggaagctattcccgaaggattcggtctccccataaatctgggcgcatcggttcggggggactgccccgaaaacaaaaaaatcgattttttcaagtgtccgtttggggtactcaaacaattatggggagcaaaaatccaacgcagaattaaagtacaggctatagggaagctattcccgaaggattcggtctccccataaatctgggcgcatcggttcggggggactgccccgaaaacaaaaaaatcgattttttcaagtgtccgtttggggtactcaaacaattatggggagcaaaaatccaacgcagaattaaagtacaggctatagggaagctattcccgaaggattcggtctccccataaatctgggcgcatcggttcggggggactgccccgaaaacaaaaaaatcgattttttcaagtgtccgtttggggtactcaaacaattatggggagcaaaaatccaacgcagaattaaagtacaggctatagggaagctattcccgaaggattcggtctccccataaatctgggcgcatcggttcggggggactgccccgaaaac

SEQ ID NO: 59733 - DNA, 174 bp, Heterodera glycines
tctgcgttggatttttgctccccataattgtttgagtaccccaaacggacacttgaaaaaatttttttttttgttttcggggcagtccccccgaaccgatgcgcccagatttatggggagaccgaatccttcgggaatagcttccctatagcctgtactttaattctgcgttgg

SEQ ID NO: 59734 - DNA, 665 bp, Heterodera glycines
atgtcgacgcgtcaagacttggtccgtttatttgtttaaaataaaaataagaattcttataaatttcacaaatttttatgtattttgcctgaggcatatcttttttattcccttttatttttgccgctaatactctcctcccatgagattagataagagccgcatggaattttcttaaatagtacctaaatatttttccaacaattttcccttccaaaaatgtttttggcccccaaaaaactgcccactgaattggtctttgagctgagccgtttcatcaaatttgatttaaaatgggcgaggaaaaaccgagtgtcattttcatttgaccattttttgttggcaaaaaacagctattggctgaaactgatcaaaaaattggttttcctttctttttgcctgatcagcaaccatttatattatcaattttcagataagcgagtgcattttgtcattcgaaaagctgcgcgactatgtcgtgaacgaactgcaccatttgccggcactgcaaaagtcagctgctcgagccacttacggatgtaaatttgaagaatttatttaaatatcacaatttaaataacattcaaaaattcattctaacggtcacggtcacaattcacggggctattcacgggttttcttcgtaattgtcgcatttttataaa

SEQ ID NO: 59735 - DNA, 82 bp, Heterodera glycines
atgatcaaggctaatgaattggtgcgcacttgtgcttttcgtgaggaggcttccatggatatgcttggacactttgatactg

SEQ ID NO: 59736 - DNA, 704 bp, Heterodera glycines
gctaaagccggtcaaaatgtctgggcaaggctcgggctttaacaatttaacaagaccctgtccgcttggctcaaagaagcccgtttaaccggacgacctgaacccggtagtttcaaaatttagctggcgcgggctcgggtggcccatgaaagtctgtcgagcgccagacccggcccaattatattgtataatcgtaatataatttaatttttcatgaccttttccagcaactattgcctcccctcttttggatgttggccaagttttgcggaccaaaagcaccgaatctttgccctttttgctttgcttggcaaatttggcggttgtcgatttcccctccgtttttaagtgccttagtactccagttcttttccaggtctgtgtccaatggttgttgtacggagttttggtcgacgatttctacatgaaagttcgttgaattttaaaaagtaaaatgtttatcccttcttcctttttacggttcccaacggaatcgggacgttcatctcgaccatgcagttgtctctgttcatcgtttaccccagaacttacaaacaactcacagttggcaatgtttaagtgtgtccgaacgttgccaaagccatggaatgtttcgccgtgtttgaattggctaacaaacaataagcaaaacccagcagagctgtgtgtccgttgtcagtgcattcattacctccgtccatagt

SEQ ID NO: 59737 - DNA, 424 bp, Heterodera glycines
atgcaacgacgacgactcgcacaaccaaaaaatgccacgacgacgactcgtatgaccaaaaaatgccacgacgacgactcgtatgaccaaaaaatgcaacgacgacgactcgcacaaccaaaaaatgccacgacgacgactcgtatgaccaaaaaatgccacgacgacgactcgtatgaccaaaaaatgcaacgacgacgactcgcacaaccaaaaaatgccacgacgacgactcgtatgaccaaaaaatgccacgacgacgactcgtatgaccaaaaaatgcaacgacgacgactcgcacaaccaaaaaatgccacgacgacgactcgtatgaccaaaaaatgccacgacgacgactcgtatgaccaaaaaatgccacgacgacgactcgtatgaacaaaaaatgcaacgacgactcgtatga

SEQ ID NO: 59738 - DNA, 77 bp, Heterodera glycines
ttttttcctgagatccccgtggcctgaaacgcacgaaaaacatgtttttttgggctgttgttaagctacttttcgag

SEQ ID NO: 59739 - DNA, 1139 bp, Heterodera glycines
atggccgacgcgggccaactcgtggcactgacgggcgacggcggagtggacaaaacagcgcttttgaacacgttgctggaccacaacctgaagactttgagcgtggagggtcaagtgctgatcaacgcgcactccttgggccggttcatcacttacgtcatcggggtgagtcggaaaactgctaatcttctgttaaatgtcaaattttgaattctaaaacaaataaatggtaaacagaattacaaaaatgtacaatttttcctttgaaaacttgggtttcaagcgtactttaccaattaagttttgcaattctgcgcgccgttagttttaaattcaaaacttgaccgcataatgtaaagtgccggaatggcaaatccaaacatcgacgatatgtcggttgagaccgttaattgaaacgggattagtggttattaaactatagtgtgttttcccgttctcaatttcagtacgtgcagcaggacgacttgttcatgggcacgccaacggtgaaggagcatctgatggcgcaggcacagctttggatggtcggacacacccaacggacgatgcgtagacgcgtcaatgaggtgggattttggatgagtacaaaatggaaatcactaattttctaatggattaatttggctgctaaagtgtcgtcgtgcggtcattggaattagcaaacgagttttttaagaatgaatttctcattttcagttggaagaagccatttcggatggtgaggcgcgtcgtttgccgttcgccttcgaaccgcggcacaacccgcaaatcatttttgccctcaaaccgactaaggttccaatttttttttgaattatccaaaattcctgattaggacctcgactcgtcagtggtggacagtgtggtctcgcacattctgcgtaccctgaatttgttcggccggcgaatcgtcgtcacaattcaccgtccgtcagaaggaatgtgccagaaatttgagcgggtaaaatttgaccgattttccataaattcagttgggatgagtgccacccccaccctaaatcaccaaaatttacgcatttgtttttatttgtctgttgataaattatatttactattaaacgttactttttgaagttgccatctgaatgtacctttta

SEQ ID NO: 59740 - DNA, 1181 bp, Heterodera glycines
  unsure (1)..(1181): unsure at all n locations
atggaacggctgcagttggcctgcggcggcgaggcggtcaattcggtggacgacctgacgcccgatgtgctcggatgggcgggcagtgtttatgagcatgtgctggtcagttaagggggagcagtgccgttatttcttgggcggggacagttttccattggtgtactgtatgtaacacatggttaccgtccgcttcagggcgaggacaaatacacttttgtggaggagtgcaaaagtcccaagtcggtcactttgctgctcaaagggcccaacaggcacagcatcacgcagctgaaggacgccatttacgacggacagcgggcggttgccaatgcgttgaaagacggtgggttttgcgacgaggggatgggacaatttggatgaaaatgactaattacctaggcaattaatgccttggcactttgggttatttgattttgcacctcttttcccagttttgggctttacttatgactgtcatttggtcgtcacatatttaattttcatggtttctttaggtgccgttttgcccggcgccggtgcatttgaaattgcgggatattgtgcactgaaaaaggtagcaagcagagtccttccagacttcacgaatatatctattttagcttgccgacaatgtgaaagggcgtgccaaactcggtgttttggtgccgtaattctttctttctttcttaatccctttcaattattgtcatcattctcattcccaggcttttgctgaggctttgctagtcattccgaaaactntggcggtcaatgccggattcgacgcncaggaggtgagtgaaaagcagtcaaaaatgtatgtataactcttttcaattgccaggccattgtcaagctggtggagacgttcagtgctgctggtgagctggtcggattggacttggagagcggagagccgtgtgtttctcaggtgtgtccccagaaatggacggggacaaatgggtcgggccataaaaagtgaacactttcattgattcccttcccccgtttagagcgtttgggacaatgtgtgcgtgaagcaggcgagtctgaacgcctgtcagaacatcgcctccaatctgctggaggtggacgaggtgatgcgtgccggcatgcgcgacttgaaggggggacagtgaaaatgaacggaacggaaatgaaggagcaacaccaataaa

SEQ ID NO: 59741 - DNA, 877 bp, Heterodera glycines
ccaaggggaatggcacgggaacagaggagggttaaatgggggacaaccaatggggaatggcacgggaacagaggagggttaaatgggggacaaggggaatggcacgggagcagaggagggttaaatgggggacaaccaatggggaatggcacgggagcagaggagggttaaatgggggacaaccaatggggaatggcacgggaacagaggagggttaaatgggggacaaccaatggggaatggcacgggagcagaggagggttaaatgggggacaaggggaatggcacgggagcagaggagggttaaatgggggacaaccaatggggaatggcacgggaacagaggagggttaaatgggggacaaccaatggggaatggcacgggaacagaggagggttaaatgggggacaaggggaatggcacgggagcagaggagggttaaatgggggacaaggggaatggcacgggagcagaggagggttaaatgggggacaaccatggggaatggcacgggaacagaggagggttaaatgggggacaaccaatggggaatggcacgggaacagaggagggttaaatgggggacaaggggaatggcacgggagcagaggagggttaaatgggggacaaggggaatggcacgggaacagaggagggttaaatgggggacaaccaatggggaatggcacgggaacagaggagggttaaatgggggacaaccaatgaggaatggcacgggagcagaggagggttaaatgggggacaaccaatggggaatggcacgggaacagaggagggttaaatgggggacaaccaatgcggaatggcacgggaacagaggagggttaaatgggggacaccaatggggaatggcac

SEQ ID NO: 59742 - DNA, 98 bp, Heterodera glycines
cctacgggtaatttacccctcactttcctttccgtcactccacagatattttgttatttaattattataattgtccatttttaaacactgagtttccc

SEQ ID NO: 59743 - DNA, 1308 bp, Heterodera glycines
atggccaattacgattttgagatacggtacatcaacaccgcatcgtttggccaggctgatgttctctcacgcctcatcgcaaattatccccgaccagaggaggatattttgattgccaacatctgcaccgaaaccgagtgctacaacagcaccattctgcaaaccaaaacggaacaacttcccgtcactgcagacgaaatcgcagaggcgacaccaaaagatgagattttggcaaaaattttggcattcacccaatcgaattggccaaagaaatgcagcgacccggacatcgcaccgtattttccaaaaagggacattttggaaatcgagggctgtttgctctaccaaaatcgcgttgtcgtcccgcaatcgcttcgcaaccgaatgctgaagtccctgcacatggcacaccccggaattgtgcgcatgaaagcactcgcccgccaacacgtatattggcccggcatggattcggaaattgaacggattgtccgtcagtgtgaaaaatgccaaaaggcgcaaaaagcaccgatcaaggctcacggagtaaattcacggtcaaggtcacgaaaaccgtgaatttcacgggtttttagatagtggttacggtcacgattcacggagtcaattcagatcacgattcatggtcacgaaaaccgtgaatttcacaaattttagatagtcacgattcacggagttaattcacggtcacggtcacgaaaaccgtgaatttcacaaattttagatagtcacgattcacggagttaattcacggtcacggtcacgaaaaccgtgaatttcacgggtttttagatagtggttacggtcacgattcacggagtcaattcaagatcacggtcacgttcacgaaaaccgtgaatttcacaaattttagatagtcacgattcacggagttaattcacggtcacggtcacgaaaaccgtgaatttcacgggtttttagatagtggttacggtcacgattcacggaatcaattcaaggtcacgaaaaccgtgaatttttcaacttaaaattcaatttgaaattcaattctaaggaatttaatacaaaattcaatcgaaattcaattgtttcgttccgcgcaattgttcctcgctaaagcatttctcttccgcagctccaacctggccaaatattgggccaacgcttctccgtccttcgcattagctttgatcattgtcggatccatgccggccaaaaggcatttgtcgaggcgacagccgcggcatcggatgccatctgagaaaagaacaaaaaccatatttaaattcatcaatgtttaataaa

SEQ ID NO: 59744 - DNA, 2340 bp, Heterodera glycines
ctaatgggccaagcaccgcaaaacgccgcgtcagcgagtctgaaccatgcaaatttggcaagttccatcgacggccgaatttcaaaattcaattacgacgccgaaaccggaaacactttcgaacagtggttcaaacggtttggagttttgattgaggaagatggtaaggacctccccgagtcgacaaaagtcagactactcctcggcaaactcggcgacgaggagtacggcaaataccgcgacagcatcagtccgacccagcccgacaaagtcacttgggtggactcgatcaccaagctgaaaggattatatgccgaaacgcgttcactatttgtccggcgctacgaatgtttcaaaattcgtcagcaaccgagccaggacatatcatcgctggtcgctcatatcaatgcgtcctgcgaaaacgccaatttgagtccgaccaaagaacaagtgcataatcctggtcattgcactcaacgacgagcatcacgacctgaggcaaaagtgtctcaaaatgctggaggacgcaaaaaagaccggcacagacatcactctccaaaaggtgtaagaggaattgaaggcgattcaaatcgtcaaggaaagtgccctttctctgcttactcaaccagtctcaaccagcgccatccaattgcgacctcagcaatggcgagagaccagcaaaggcaaacacaaggcaaaaccggcacccaaatggccacaacatgaaccggcacccaaatcgccgcatcatgtgccttcgcctaagcaaaaatcagacaataaagcaaaccgaggccatccaccgcacccatgtgcatcctgtggaagcaccgatcactggcgatcggactgcaaatttgccaacgcattttgcaacaaatgcaaccggcaaggccacattgcgattgtctgccgtcagtgctcgtccaacacggcacacaaatctcagaaccgatcatttcacacggtcgtggtcaagtcacattgtatggtgattggcacaacccaaggccgatggtggaagatcccggtcataatcaatggtataaatttgaagatgaatggagacagtggagcccaagcaacagtcatcagcttcaaaacgtggatcaaattgggtcaacccaaactctctccaacggacatcgaaacccgcaactgcaatgacaccgcattttcacccgaaggaaaattccattgcaccgtcagttgcttcgatcggccatccaaaacactgatcgcttacgtaagcagtgacttaaagcatgatttgtttggccttccgtggattgaggaattcgagctcatcccaagagaaattttgttcccaaagagcaccaaaggaaagcccaacgcgtcaatcaacgccaatgtcgtcaaggcaccaaacccggcgattggcatcacggatgaatcctcgctcaccgctgtgttgcaaaaagattttgaggaagtttttaagaacggacttggccattgcgcaatcaaagcgcacctgattctaaaaccggaggcccgacccatcttctgtaaagcacgaccagtcccccatggtgcaatcgaagctgtcgacaccgaactggaccgcctcttgcagattggcgcaatcaaaccggtagaattcagccattgggccgccccgattttggccgtcaaaaagaaaaatggaaagacccgggtgtgcatcgacttttcgaccggattgaacgattcgatcgaactgaatcgccatcctcttccgagacccgacgtcatttatgcagctttaaatggagccgcatttttctcaaatctcgacctgagagacgcctacctccaaatggaattggacgaaaaatcgaaaccactatgcacaatcaacacttaccgcggcctatttcagtgccaacgtctcccatttggcgttaaatctgcaccgtccatttttcagcacctgatggaccaaatctgcgcaggaattccaggggtcttttcttatttggatgattgcctaatcgcctcaaagaccctggaagaccacgtcaatgcgcttcaaacgcttttcaaacgcattaatgactttggcctacgcattcagctcgaaaaatgcaaattcctccagaaagaattgctttttctcggccaagtcgtctcctccaacggcatacgccccgacccagcgcgctcagaggcaattcagaaatgtcagcgccgcacgacaaaacgaccctccgttcattcttgggagcgctcattacggacgttttgttaaaccaatgcgagaaatcagggcgccattggaccaacttcttcgaaaggatgaatcctgagttggggaggcgaacagcagtccgcgttcga

SEQ ID NO: 59745 - DNA, 782 bp, Heterodera glycines
atggggcatatttcactcacatttgcaatttatgtgaaaccaatggaaaatgagtaccaaccgtcggcggatgaaaataatgaaaatccaccggatgatgaagacattcgaacaatggtccgaagaatccttttcaggttgttcgagccaaacttggcaaaggtgtacaccgtcaatttaggcaaaattgacccacccgaattgtattttaatcgcacaattttggtggacaagaaaaatgatttggccaattaccatgccttattgtatgccaaaatgcatataaatcgacaaaatatctctggttataatcttttgggctatgctcaattaattaaaatcaacgacgaagaagcatcctccagcagctcagaaaataaggtaaaagcaaaaaacggtaataatatataaaaaattatttatattaatttttgattatttttatgtaatttttagtccaataaataccaattgaaaattccaattaatttatgtgcgcttttcaaacacttcattcatagctttggattgcaaatttattcttttgaaaaggtagatttattaatattacaaataaacaatacaaaaaacacttaaaaaataatgggcagtaattagattaattatagaataaaaatcacaaagaaaaaatggagaacagagaagaaaatccgcaaagaatgtgcaatttgtcttgaatcatttgaagatgacaaattaacaatgaaattgcatgaggattataaggttaattaattaattaatgatattaatttagttaa

SEQ ID NO: 59746 - DNA, 978 bp, Heterodera glycines
atgtgtttcacaaggaatgcatcactaaatggtaataaaaaaagattgaaatattcaaataaacaattgttttttagggttttatcccaagaacaaatacgatgcccaatttgcaatagaaacgcatttcaagtcacaacggtacaattttaatcgctgtaaaatatcttattagcttatcattaggctcgctggtcggggttaagggatttcgtaataaaatattttttaaataagcaaaaatttaacttatcattttattcattcgaaaattaaaattttctaaatattttgagtttttgacttatttagccagatcttcaaccatatttgatagacctgaccagccttcaacttcatttttttatttgaaccctttggcatttttattccaattagcgaatggaaaaacggaaaatgatgaatttaaaaagaaaacaaacaaaattagcaattaaaaagactgaagaatttgtaaaatcacgtgaagccgaactaaagcaaattgctttggaagcagaatttttgaatttgaatctttcagctgagcaaaaattgttcgaaattgggccggacggagtgaaaagtcatccaattgtcgaggaattgaagaatcaaatttcagacattctttcaaacggtcgtcaaaattcggaggaaatcatagcaaaagccgaacaaatgaattttttgatcaatcgaattacaatttgaattatggtgttcgtttggctttattcattgaaaatatgcaattgatcagtgaaaattgatttccaccctcccttcgtcccatccttttgtgtttatctgacaaatgagcttgtctttgactgattattgcctttctttgcaatctgttatccaattcagcatttgttgacatttttctttaaattttcctctcgaaatgaattataattcgttaacctgttctctattagcctgcaaaatttcattgaatttcgttagggttca

SEQ ID NO: 59747 - DNA, 667 bp, Heterodera glycines
ttgaaacacagcgccagtgacgcattgaccatggactacggcttgggacgcatacgccgaagacggtccaattatggagcgatgtcaccgaccaagagtgtccaggaagtgcaacccgtggcattgtcttggcacggtctcaccgctgtccatgccaaatcgggacggaaaattcttggtaaaacctgtcggggttgcactcattgtgtatataaatttcgaccttttacagacaatgtgtccggtatggccgacgcgggccaactcgtggcactgatgggcgccagcggggcgggtaaaacaacgctgctgaacacgttactcaaccgaaatctgaagagtctgagcgtggagggccaagtgctggtcaacggacattccctgggccggtccatcacttacgtcagcggggtaagttgttatgatatgaagttcgggggtttcggttcggttcctggactcggaaatttcccggattttttgggttctggtatttcgaacccttttttatcatccttatactatataaatttccacacaatttcagtacgtgcaacaggacgacttgttcatgggcacgctgacggtgaaggagcatctgatggcgcaggcacagcttcgcatggtcggacactccaaacggacgatgcgcagacgcgtcaatgag

SEQ ID NO: 59748 - DNA, 949 bp, Heterodera glycines
atgcgttcaaataatttggacgaaaataaaagaattgagcagagaaaaattgttggaataaaaattggtgatcatcgggaggaacaattgcagaagagatcagcagaaatatggacaaattatatggaagagactttggaaaagattaaagcgcacatggaaatggttaaattaaaatattatttgtcaaatggaatcactttttgggactaaaataatgatttcgcatggattttattatttttattcttgattttggttttttaagagaaatttcttaacaaaaaggtttgttttattaaaaaacaacaaagtgtttttaaaataattttttagtgaaataaaatttttttgatcatttaaaagtttgttaagctaaatttagtttgggcacattaaatcaaattttgaagatttttctcgggtttctctgatcagttttcgaaccgggccaaagatccgaaatttaaattggaaattcttcccacgaaaaaacggcataagccgacttgaacatttacaatttgggctttgtcttttgagggaggcttaaaaaagaaatgttttaatttattttaaacccaaaatgaatgaattcacatcataaattgaaagagaatttataaatttaatttttcaggatccaatttaccaacaattggcagagcaaaaatatgcaattgacaatttcccgggattggatgacattttcaggaagacgcgcttttttcttgtaaattcacaacccgaagtggactttgacaattacagaagtgtcaaaggcatggaaaaggtcaaattcatcggaggatttaatttaatgccgaaagcgcgggaattggacgaagttagcaaaaaaatagttaaataaataacagttaaatttattaaaagcaaaattaaattatcattaaaaaaaaatttgttaatatttgaccctaggcttata

SEQ ID NO: 59749 - DNA, 521 bp, Heterodera glycines
atgtacaatacaaaattagatatcgcttttttccgatcacaattggagatgagtgccgatcacttatccactgttgctttgttcaccatcaggtatgagcacaacgtgtccatcgttgtacgcgccctcaaacacggcgtttcccgaatgatacaattccgtaaattgacgaaagtgaaatttaacagagaatggggccaaaaacaaatatcgggatatgctttaaaatagggacaacagagaagcggaagattcgaaaaatggctaaaacatcattcggaatttcagtccgtgagacgggtgctaaattctgaataccaactccgtgtaaaggatttaaaggcaaaaacaggggtacacttatacagtttacagggtactttttacatacattttcagatgcctataaatgtgtttcagaaattaatgaaaataagtgttaaggggttctcgaggtcgctgattacgaatatagcatccatttttctaattccgaacccctgacccgaaatcgaacaata

SEQ ID NO: 59750 - DNA, 50 bp, Heterodera glycines
atggacacgttgtgctcatacctgatggtgaacaaagcaacagtggataa

SEQ ID NO: 59751 - DNA, 85 bp, Heterodera glycines
  unsure (1)..(85): unsure at all n locations
atagtgctctgaaacgcatcaaattnatgtacgagttaaataaggctctctgatgcttttactatcaaaaagggagatgaataaa

SEQ ID NO: 59752 - DNA, 163 bp, Heterodera glycines
tttttaattttttaaatttttttgaatttttaaaaattcccggttggtcccggttcccggtcccgaagaaaaatcgaggtcctggtcccggcttctcaggtcccggcaagtcccggtcccggttttgcccaaaattcccggtcccgctctactctacattaaa

SEQ ID NO: 59753 - DNA, 237 bp, Heterodera glycines
  unsure (1)..(237): unsure at all n locations
gcgcatcggtcggggggactgccccgaaaacaaaaaatcgattntttcaagtgtcgttgggggtactcaaacaattatggggagcaaaaatccacngcagaattaaagtacaggctatagggaagctattccggaaggattcggtctccccataaatctgggcgcatcggttcggggggactgccccgaaaacaaaaaaatcgattttttcaagtgtccgtttggggtactcataaa

SEQ ID NO: 59754 - DNA, 2871 bp, Heterodera glycines
atggtgcaccaagacttcccggatgatcagtttggcaattttacggcgactcaaggcccaggtcaacaaagacaggtcattgaccccgttgtcatctggtacaatgggacaaatcactttcaaaccgttgtattggtaagttactgaccgtttaattcaaaacacataaaaattctatgtccacgtttacagccgtccaggccgtctgcctctcgctttgcagtcgaaatagtcacttcgccgcagtttcctccttcgattcacctttttggtgaagaagttgaagctatggaaattgcagcgcctgccgctgccccttctgcgccaattccatcgacgtccagtgggattgaggagaagcgttcgaccaccgtcacagctccatcaatagtgactgaagaagaagatgtgttcctggaagaatcgttgccgaagatggagtcctgcaaatgctgtaatagcgctgttgtgccaccggcattagaagacgccaatgtccatctaaaacaacagtttgcctattacggctacattagcactccctgttgtggcgacttccatctgagatgcttcgaaaaatggtcgcatttgtttttcgaagtctgtgcaaattacttctatctttaggaaccaaagtccgccctcttatgcgctgaagcgccttcacaactacgatggtgttgatgacaactgtccaaattgtcacaggcgtattgtttcgacattgtctgatgacgtggccactgaacatgccaaagaggagcgcgcagattcatctgagcattctgatgtgaataattaaaacaaaaaaatagctaagggattactaattttaggaaccgactgagccagaaagccagcagctaactgaagcagttgatcttgctctgaacatcaacgaggagctttatacgccgatcaaagttgagtatgacaacaccagcattgcttacttcgcagtttacaatgcaatgatccgtgcgaagaacaactgctacagaaacaggccgacaccaccgcctgagatgctggctgaattgagggcgtgctccgaaaaggagaaaagcctttactgggacttcagtgcgtcaactaaacgccatcaatatgcaacggagcagatgcttaagatgcaggactacttgaaggctacagcgcagcccaaacatcggcaatgtgtgaaggagcaactttgcgactctttgaaggaggcaacaaacaacaaggccccaataatacgggagcagcattgtttgctcatccaagcgctcgaagaacagctttacgacatcatcaagcagtttctcatgctctggcactccatgcaacagatcagtcccagcactgcgtcgttggaatcaatgcaggaatggctcctttcttcggaggacaacggtatggaactggcgcgtttggccgacagttgggtcgaacatctggccctcatcaacgaaaacatcaaaagttgtgtgaagaagtgcaataaggcgaagaggaggacgagcttcatgtcggttggccaacttacaggcctcctccaagcaaagctaaagtagatattaatgtgtagcaaaaaaataacttaacaattaaggattgtgcgtaagaggtcaaaaaagaaggctgtaagggttgaacgccatccgctgctcgaccatgtttttgaagacctgcgtcaaaaacatttccagctggaagcagccatacgaaagcaggaagaagctcaaaacacaacagacggaggacaaagaccgcgggccaattccatcggcaaaaaacggcgaattgatgacaaatcggtgactcgtgaatcgcccgtaaagcgacgggaaaaggccgcagatgcagcagaacatcgtatgcagcgaccggttctgatgacagctgaacaagcaaagacattggaggcggagcgaatcgaggcccagaagcgcatggctgcagaccgccgagcgcaagagagattgcgccaggctgaccaattcctcaagcaacatcttgctcagcagaagcggcttaagcagcggaatctggtctggggcaggcaagccgcatacgagcgatacatcaatgagcggttggagaagctcaaggccgaggtcaacgctctacggaaatctgcacgcgagtcgatgaacttcacagaaattgacatatgtcagctgaaaataattattttatcaaatagcgtcaaatatttagttctgccaactcgccaagctgttgaagcatattgcgctgacatcattcgctatgccaatcatcatgctgaggaggatgttcaaaaggcaattaaggaacatcagcagattctcgagcgacgacagcgtgccttggatgaggagcggcagcgacaaaaattgcttagcacatggcggggttaacaaattaaatggaattgcttttaaaaaacaactttagacgaagatagacaatgggcatatcgagaagacccagtgcttgctgccgagctcgaaaagataagacagcagaaggagcaaattgatgttgagtatgcggaagagcaggccaggcttcgtaacatcagaagagccgaggaagatgcacggtcgcgagcccgcaatgagttgcttggcctctacgattcaccagaatctggtaaaagcaaaatttgtagtttcgttcgagaccaaaatttcagagggttggtcggacgaagacctgttctacaacgtccgtcaagccgacagaatgcccatcatgcaagaagtgggagtggcgcagatgccgcgggaggcaattcgcgcaagagaggtcatagatcggcgcttgaacttccaagaggccgactatgttggtgagatgacgccagctaacaaaggcgacgacaacagaggtagccgaaagtaa

SEQ ID NO: 59755 - DNA, 610 bp, Heterodera glycines
atgtcaatctcaaccaattcaacaaatggcgattttacaccaacagaaggaggtaatgagaaaaagagaaaccgtaggaagttaaattgagtactggaaatgttaagataaatattaatttatgtttgcgaattaaattttataagattttcagaagttaattgtgaatcaattagtttggacaacgatggacaatctgatggaaaagcgactgatccgcagcagcagaaagtgagcaattaatagcatttgtacgagaaagatttgaaatattttgacataatatttttaaaggaatttgttgaaaagtgtgccaagatggaaatggacttcaaaattagcacattagaacttgagaaagttggttttcatagataattaatttatattcttgtcctgacctatgcacaaaatcataaattagagaaatttcattttaaatgttagaaaatggaaaaactaatttactattttgtgtttgcaaaaaaaaattgggcgtttctttacatatttttacatttttcaagaatattctgcatataaatatgtataaaatatttattatacacttttggaactttttgtaaatattttgagggtttttgagaaa

SEQ ID NO: 59756 - DNA, 657 bp, Heterodera glycines
atgaatcgtggaagaaacaatcaaaactatttaattcatggtaaattctcgataagaaattgcacagcctactaatctattcaagattttgtctttttaaaattttcttaaggaattagcaaatactggcaagtcgtcggcgctctgggtctatgcgttgtcatggtatgcatcacttatcaattgtttctgcacgtggacgaaaagcacaaatcgttcaaactgatgatcgatggacacttcaaagatttcaagcaaatccacaacgatttcacggcgtggtcaaaaaatttcacatcgcatctcaatgagcgtttcgaacagcaacaggctcgatcaagagcgcgtttcaaacaacagttggcgaagtcaaaagagcgttttgatgaacaacacgctaattttgtcaaaatccgtttggactttgatcgacagtttcaaaaaactatgcaccgttttgccgaagttgagttggaaaccgtgctgaacaaaaggttggattgtttgttttttggaaaacagagaatattcgcttcacctccacatccctttgtttaaggttttcgtataatttttgtttcaatcaaaagcatcaactcctagaaattttcaacagacaaaacaaaattcaattttcgtacttttttcgagtaggga

SEQ ID NO: 59757 - DNA, 213 bp, Heterodera glycines
taatcatccgattttgctgtatcaaaaagtgttggaactgttcggcgacttgcaacacaaaggaaccaaaaaggcgaaggtcgaccatttcgcgtgtttccgttgcatttggtcactccagaatgttttagaaggaatttgtcaacttttccggcgtcatttgccacttccccactcgctacgaactttgccaatgtcgaattgaggactcag

SEQ ID NO: 59758 - DNA, 359 bp, Heterodera glycines
aaaagccgaagcgtgtccactttgtgtgcatggaccgcgcggagtcggaggcgcgccgtctgatgcgccaactgcggcgcggacaacgctcggtcaaagtcagcagcgcccagggcgagtccttctcggaaatgatggacgagccgcagcagtgctggcggcgccggaactgaacgcggacgaatgggacgcggagagtgcgcggagaagagtagaaattgatcattagtcagtcaacatacctaacactctccgataacttcccccccccccgtctaatcagtgatcagtgtgatcaatgaccgtaataaaagtgccaattttattttgtttaaatgcaccgataaaataattgtagt

SEQ ID NO: 59759 - DNA, 730 bp, Heterodera glycines
atggcttcatctttctgctcctcaatcatttccatcgtcgcaattgtctgtttgctgtgcaaatgctgcttttcggcaccccgtattaattaaaatttttttatttaaaatcatttttatttaaaaagatccatgctgtcctggcagccaacatgtcgtttcgatgatgaaagatcacaccggcacattctccgcttcgatgccaaagtcttcgctttgtctgagtgccgaaagagtcgccgctgcggtggaaaaccaactgaaaacaatttggtgccctggcaatggtggtcaaacactcatcaacgagatcaacgcagctcaatcatcatctggtaccaatggacaattaaatccctttaaaatcatctattattttttaatttaaattcaatttctattaatttggttcctaattagatgagtgtgctcgctctctcggcttcatccgtgccatgttcgaaattgccgcttccgccgcttcccatgccggtgccaacgccgaattggccaatttggctgtccagttccgagaacaagttggcacaattgacaccaactgtgctgcgctggacattcttctgttgggcaaatcagcttgggcactcccaaaggtaataaataattaattatttttaataaatttattttttcaggagaccatccgcaagtgcatgactctgagactgtgcttagtaaccctggcaacagcgggtttcacaagcgctta

SEQ ID NO: 59760 - DNA, 1637 bp, Heterodera glycines
atgcgttgtttccttccgattttgcgttgcgagagcattacgttaaaatccacaacaaaacatgttttactgtgagttcttcttttggggttgtgtttatgggtcaatgcagttcgtacaaatttattcaattaaaaccaaatttttcaaatagtggttttatacagagacgggtgcaggacccgggtcccgtgccaaattttacgagttcccattcatcccgcattttgggaattgagggttaattcttagaatcgatcaaagcttctgttttcatattcttttgctcttctcagataaaatatcgcgtctctcctgagttggaagagcgacgcgcattgctccgtcgtttggtcgatcagtcaatgcataaaacgggaagcggcacaattcagcagaacaaagcaccgaatttggagccgcccaattcatacacttctcagctgctgatggattgcacgtcactgctgcaaacgcaactgatggccagcaatcactttctgaacagtggcatcaaaaaggagaatgtttgggaggagagaaacgacggcgaaagggtcgaccatttggagggcgaaattgaaggaccaccaattgagggggttggtgaacgatagaagacaacaaaacaaatggaaaccgatagggttaaggtcaccttttgcgctcacaaacgaaacgctttgatgggtcagaaacgcaccttttctgatgaagacaattcaactttgtaaagccaattgcaatgggaaagtgtcactcatccaaatttaagcaatttaaacgatcgcctttcgccgatgccaatgaattcgctaaatgctgtaatggatacggaggagatgctaaacgaagccaatttggagattaaaggcaccatttcagcaaaagtttgattttattttttatttttttagtttctccaaccaaaaaacaaacaaaaaaccgacgaaagacacaccgagacacgggaaatgaccaaatgcacgcgaattcctcgcaagggtccaacgaagaaacgaagcagcaaaagggaggaggggtaattttatttgtactttttcattttttctccaagaatggacagatttgaatttgttccgaattaagccaatggttgagtgttcgggctgcaaacggatggttggccaatatcgcaattcgatgctcatccatgtcaggtcagcagcccatccaaatgattgaatggtccaatccggctttgactgttctgtcctctgtcagtacgcatcactgcgaccagccgattttcgaatgtattgcggacggatgcgggaagaaatggtactccatttcagcacggactaaagagcacattgaggctaagcacggaggcgacttcaactttcttcaggtgcccatcatcatttcagcattcatttgttgctattataatttttaatttcccattttatttgactctgaaattcaaacatttatttcccccccccccaggacaatcgcagttcgctgttgcctcttctccggtcgaccgccgtccgcctcttttctggtgcttattaagcgcacatttgtgattttttgtgtaaatttgtattttctgatcactttcactgtatcgggtaccatttaatgcaaattcaatcacatggaaa

SEQ ID NO: 59761 - DNA, 1116 bp, Heterodera glycines
  unsure (1)..(1116): unsure at all n locations
atggactcgcacattcgatggcccgaattcaagacgcctggcccacattngcgaagtcaagaaatgaaattgcctagcaacattggacagaagaaattgtccaacattggactggttgtgacaactcgaaaaattggtaagcgagaccaaatttaatggcctaatttaaattaaagaaaaaatcaaaaaggacgagtagaaaaaacagaaatctttgaaatttaatttctttaattttctgcgttttcagtctcaattggtcttgaatatccgcacgcttacgaagaaattgtgaagcagtacaacgactttcgttcccacattgttctcctgcaagatctgaagacggcactgcacaacactgagcttgaacttgaccaacttgccgcccaaatgccagccgataaattgagtgttggcaaaaaaaaaaaattgttttccccatttcttttttaatttttgaatcccaatttaggaatgtccaatcattgagccacgctttcgtgtgagcagcacattctacgaggaattggaacggagtccggtgagggtgctgaacacgccaatgactgagggaggcaaaggaaaagggaagggcaaacagcaactgaagccggcaccggtgaccggccgagcgatcaccaaaatgattgaagtgaacacagcgccaacaacagttgtatgttttttgctcatttttaggggatggggaatgaaaaaaagggtgcagctcgtttttctccaaaaatgtgcacaaatttataaagtgcataaagcattaaatctcggggatataatgagaacaacaattgttgataaaatctcttcgaatagattagctttggaatattgcgaaacttgtgaatttgcgcgccctttgttaatttttggaatgcgaccccaaaacaggaaaataccgaaaaaaatttaaattttctagcgattttttcgaaattttaatttctgaaaattcggacttgatgtgcccccccccccctattttctacgcaatttttttagactcgtaagagacggatgcactaccccgagggaacgccgccaacccggtctcaaacggccattcacctgcaacaacaacagctacaacaaaattag

SEQ ID NO: 59762 - DNA, 356 bp, Heterodera glycines
ggaatcgaaggtgttgtaagcttttttccttttttcacttgtaaatttatttaaattttcaatttttttagctttttttcgaaaaattttttgtctttttttcggcaggcactgcctctgacaatgttttttatttatttagaaaaataaattgattttttttctttttgatttattttaattatatttcatccttaaattttttaataaacattttcaaactttcaccttattaatttaaggcgaattttgccttttttaataaattctcttgtgaaaaggcaaaaaaataggctcttttaaatatgcctatttaaattactttaattgctgtcctttcgcttacgaccatacca

SEQ ID NO: 59763 - DNA, 157 bp, Heterodera glycines
tttttgggccccggggtcgtttgggccccaacccaaaaatagaaaaatgtacttttttaaaaattaagattctaaaaactaagcctgagggatccctcgccacttggcataagttaggtttaattaacattcgctcattttttacaattttacttat

SEQ ID NO: 59764 - DNA, 405 bp, Heterodera glycines
atggaagcaattctaacaaaaaggaaccgtaccaagcttcagcacaatggctattcatacacttttcacaagccgagtgctgacggtgaagctcgcttttgggcgtgtgaacatcatcacgcaaaagacatcagttgtaaaggacgccttcacactgacctcgacaaccgcattttacgtgaagttgggaaccaccagtgtgaaccaagtgcagctcgaatggaagcactttcgagtgatcactggaatcaaacgcagggcggaacaaaccatggaaccaccagcgacaattcgctctttggcactgcagaatgtggccacgccagtccttgcgcaactcccaaccaaacaggcgacaaaacaagtgatagttttttatgtttcctcaaatatttgtatatttag

SEQ ID NO: 59765 - DNA, 146 bp, Heterodera glycines
tgctcctaactttactatttgttattttgttagctgttggtggtaaaacggagataattaatgttgatttattagggtcgtacgacccaaatgcaactattggaggagctacggactgtaatagttaattttttttgttcgcaaca

SEQ ID NO: 59766 - DNA, 221 bp, Heterodera glycines
atgtttaaaacgtatttgcggccgaaattgagtggtaattaataaaattgtggctttttaaacaattattttagtgctcctaactttactatttgttattttgttagctgttggtggtaaaacggagataattaatgttgatttattagggtcgtacgacccaaatgcaactattggaggagctacggactggtaatagttaattttttttgttcgcaaca

SEQ ID NO: 59767 - DNA, 396 bp, Heterodera glycines
atgagaagaatgaattattgcccgaggaaggtatgatttttgggtgggatttctcgggagttccttaattgctaattagtgtaagggtgggcgccttttttgtttggttaatggaaaggcggtaagcggaaactgcccataactttcgtctaagtaaccaaattaaacattcttgatatcattcgatagccctaagggttctctctattacttcacctaattttcaaaaatttgatcatgtttggacaaagtttggccaacagtactcaggaaaccaggttatcagaatatattgatcataattttttgaaacttagccaaatttttgaaattttgcaggccagaagaaaacacttagagctatcaaatgatatcaagaaaataaaaatttaaaca

SEQ ID NO: 59768 - DNA, 520 bp, Heterodera glycines
atgaaccaacgtaatgtatactacagctggacggtgagttgtgttttgattttgcgcctattctttaattatacaaattaatttatgaattgaaaatggtaaatgatcgataccctttttttagattagcaacttttccttttgtcgcgaggaaatcggcgaagttttgaagagttcgactttcaggtttttcccttttaaacgttttttaaacatttggactgcatgttatttgaaaatttgattggcaaaaatgatttaaaattttcgattttttgggttcagtcgattcactcattgcccgtgggacttgaatttgggtttttgtcactccgctttagtgtcggccccaacgacatgttcaagtggcgcctgcgcatcaacccaaagggccgcgacgaggagtccaaggactatttgtccttgtatttgctgctggtgcaaagcaacaacacgcaggtgcacgccaaattcaaattcggcatactgaatgccaatggagatgaaggccgagtgctgg

SEQ ID NO: 59769 - DNA, 69 bp, Heterodera glycines
atgccaattgcgaagatatgcggcgacgttttcatgacattggcccaaagtcgcctatttgaggaatcg

SEQ ID NO: 59770 - DNA, 563 bp, Heterodera glycines
atggcggcggcggcggccagcgcattcccatcgcggcggcacagttgcacatcggcgggcgcggactgttccgaatggtgagagagcaattagcgggaattacagtaatggtttttttgacaattagtattagctacaagaataattacagtaatcgtgttgcatagttcgtcgagagttacggtcaagggtaattacagtaatcgttgcatagttcgtcgagagttacggtcaagggtaattacagtaatcgttgcatagttcgtcgagagttacggtcaagggtaattacagtaatcattggcatcgaggagttatggcaatggaagcaataaaaaacatttgtatttaggtggacgttttttgacaggaaaaattgcgttcaactaatcctttgaatttttggatcatcaggaaaactaaaataatttctcttaatttcagcattttcatcataatttagttaattattttgggaattttcacttagattttcttcaaaattttggaatttatgaaggtatttctaaattttaatttttttttaaatttatttttttaaa

SEQ ID NO: 59771 - DNA, 618 bp, Heterodera glycines
atgctcggagttggacagctcgggaatcattgccaagtgcgaaatttggacagcggcccagccaaattggaaaagcataatgggcggaatgaaccaaagaaggcgcagaaaaggcagccaatgacagagcaaacaaccggagaaaatcagcgggaaggaaagagtgacacagacggtgccgaaaacgcaaaggttgaaataggaaatggaaaaatgccaagccaacctatgatatgccacgactttcgtcgcccaaaacggcgtaaaatgccgggcagaagggacaaatcgctgagcattccaaccaacggagtggacacggcgtcagtcacctggcggaaaatggcgaaatgtttttgtccgtctacatttgcagtttttccatggaatattcattgattgtcagtccgtgtttgcctgtccaatgaacatgagcagaccagcttgccaacttagcagcaagacgaccttctccaagaaaatcagcagataggtgaaccacatcgatgcgcacaaatcgttgtaaaaatgacccgtggaataggccaaaatgcgccgttttggaaggtcatccgatgaaacttgggccgaaacaacctgaacagatatttagaataa

SEQ ID NO: 59772 - DNA, 1204 bp, Heterodera glycines
  unsure (1)..(1204): unsure at all n locations
ttctccgataagcggaagtcagcagcattgnctccttcacgcggatgcgagcgttcagagcgaaagcgttgacggcgtcgaaatcgaagggaatgaggacgaacaaaatgtgaggaaattntctggttgcagttaccatttttttaccaagcccgaaataagttttaattattctaaatatctgttcaggttgtttcggcccaagtttcatcggatgaccttccaaaacggcgcattttggcctattccacgggtcatttttacaacgatttgtgcgcatcgatgtggttcacctatctgctgattttcttggagaaggtcgtcttgctgctaagttggcaagctggtctgctcatgttcattggacaggcaaacacggactgacaatcaatgaatattccatggaaaaactgcaaatgtagacggacaaaaacatttcgccattttccgccaggtgactgacgccgtgtccactccgttggttggaatgctcagcgatttgtcccttctgcccggcattttacgccgttttgggcgacgaaagtcgtggcatatcataggttggcttggcatttttccatttcctatttcaacctttgcgttttcggcaccgtctgtgtcactctttccttcccgctgattttctccggttgtttgctctgtcattggctgccttttctgcgccttctttggttcattccgcccattatgcttttccaatttggctgggccgctgtccaaatttcgcacttggcaatgattcccgagctgtccaactccgagcatacgcgaatggtcagcgaaaaagcaattaatgagagcaatgtcattttggccatcccttttcagtcaatgacttcctatcggtacggtttcaccgtggcagccaatctgttcgtgtttgcctgtctctttctgtttttggcccaagacaaggacaccagcaaaatcaaaccatccgatttggccaattttcgggttcgacccacaagcaaaattgatttcttgtcggacttttcaacatccaaaatctccactcgttcagaatctcggtctggttgctgttgcgcttggtaccgccgtcacggcacttttttacgggggagttagtgagccgaacagcggacagcggcggatgagccgactgaactcggagagcggcgacgcgcaccgattgggacgcatgtcttggcaagaaaatatt

SEQ ID NO: 59773 - DNA, 312 bp, Heterodera glycines
atggatgaaaatgacggcaaacttttcaactccaactacatcgatttcgaagcccttacggtattatacttagaaaatattagagaaatattaacaaaaaataaattaaaaggaattgtttgagaggaatttttatcgataaaatgagaacttacaggttgcgccaccagatttacctgatttaatgggtgatagtgaattgagcaattataatgcgaaaaaagatgttaaattcatccaaaaagaaaaagtttgtttaatattgcgttaatagaaccatgcataaaaatcaaaataagatcccttatgaaa

SEQ ID NO: 59774 - DNA, 49 bp, Heterodera glycines; identical to SEQ ID NO: 51181

SEQ ID NO: 59775 - DNA, 56 bp, Heterodera glycines; identical to SEQ ID NO: 52733

SEQ ID NO: 59776 - DNA, 56 bp, Heterodera glycines
gctatagggaagctattcctgaaggattcggtctccccataaatctgggcgcatcg

SEQ ID NO: 59777 - DNA, 243 bp, Heterodera glycines
atggaacgttggatggaatggggagagataatcaatcgagttgggcgtccagtaaaataccgaagaaatatcacgggtaggttccggaaaaaggaggagttcatcagggagcataaagtttcaaatatggttttgtcatggtggcccactagcgcagcaaaggataaaactgtacgagtacaaggagcaggtctacagggaggaagggtctaagctgctgtattgcgatacaggtgggcagga

SEQ ID NO: 59778 - DNA, 345 bp, Heterodera glycines
atgactcgagagtatgctgacagcgaaattttggagtttgtgtccgcgggcccgaaacagtacgccttgaaacatagaagaaagaaggatggtgtgatttggcataaaaccaaaatcagagggatgacattggatagacgaaacgaatttaaatatgaattgttcaaagagatggtgctggactacaaagaaggggtaaagaaagtttttcactacccggagaagatcgggccaacaaacgacttccgggttctctcaaaaaatgtgcaaaaagaatatacgccggtgcagaaaaaaggaattattgacgatcattttaatgttttaccctttggatattattga

SEQ ID NO: 59779 - DNA, 1507 bp, Heterodera glycines
atgagccgagaagctgagccgggctggaaaattgagaaaatttcagtggacctttattgcagtgccctgtcagacccagtgatcatccctgcccgccccttccaacaatcgaacccagacattgttttcaacgagttcatgcacaggcagcaatcatttggggaagtgaatttgttagaccagagaatttcaataattatgccacttattctttccctgttaaataaaattttttcatttttccctttcattattttttgttcattccattattatttattcgagttttttttctttattaatttttcagttaaaatgtactcgtttcaaaaatattttgaggaggctctcgaaaaagaagattttttctggcagaaaaacagagcagaagtggaggcattgttaattgaggcttcaaattataaaattataatacacagggactacgaaagccgctattctgattatattgccacctatcgccgcaccccactcttctgtttctgcatgattgagagaaatttaagatttttttacgacacaggaaccgggacgcccataggaagggttacaaccgtgctacatgttaccgttgaggcgagctatacaggagagggcttcatttcgcctatgttttccttttggttttattgggagggcaggagtcaaacaacaaacgaatctttcacgagccgtctttatttgtacactgtttcgatgctaagagcaatgggcaaagcctggggcagagaactacttttgaaccctgttgaagttttaattgatatgttctaccaacgtatagataggttggaacatagaaaaaacaatttaaaaaaatattttagagatttggtcggatcgtggtcattgttctatagactcccaccctcactttttgacacttcacgccgggtggttgcggagaataaactggaagaatttttaaaattaccatcattttttcgcatgcttttttataataaatattaaatgttcatgttgtttttaaagtgaaggttttgacccaaatatttaatcaattttaatttattatttttggtagaattccagaaaatgcaaacaatcgctgaaattaaaaatttcgagattattgaaggcggaagagtttttattgtgagagcgagaattgagaacgtagtacatgcggagtacagggtttgtattaaaaatgaaaaaaatatatcagttttttaaggcttgcgttttatgccgtaagggggcgtgttcatgtggcgttgagaaggcactgacaccttatttgaaggtgtctgtggcagatgatactgggattttggaaaatgtggcaattttttggtgtatgtgggaagaaaaacggaatggtaatgttttaaagaaaaaataccattctaatttaaattcaggaggagttgagaggattgtctggggccgtgtgcactatgaaaatcggcgcgagggtgaaagaattcggagggaagaaggggatctattactctttgattga

SEQ ID NO: 59780 - DNA, 1752 bp, Heterodera glycines
atgtccgattcaatttgggaaatcttcacaatcctggacaaaatcaatttggagtcagaaaaagccgaatctacgtggcgtgatttcgagagatgcaaaacatttgaccaggcaacaaagctcgaggaacaatcgcaaaattcattaatggaagcccggagattacatttcgagtcccgaagggtgcagagccaaatgttaaattatgaaaataggctccaaacaattgtttgggaacatatgggtatataagaataaaaaaacgaaaagggaaacactcaaaatggaagaatgtacaattatcgagtctttatgtcatgttaatccaaaatttggctttaaaaaatataaaaataaattttattttaaaaatcctttcctaattaatacggaggaaaattttaaaaatatactcgcatcaataatcgaagaaatttataaaaaggaacaaggaaaattcagaagtattttgaagctttcttttggttttgagtcgttttattgccctcttagatgccctagcgaaaacacagctgaggctttgttccaacatatcttattaaaagaagaaaaatattcgcttttctatactttggatgatgtcataacgctagaagtaaccataatcccagatgtcaacaatagaccaaaaaattaattttataaaaaacaaaattacaggaaattggaaaattgccggaaagattgttaaacgttcacatttgttagcaatttttgcaaataaactttttaaacgggtgaaaattttctacatagcggcatttagcgcgccagacattgaaaatttatatttttcattcttagaaatgctcgataaaattcaaaaattaccaaattttattatgtatgaatatagaaaacagtctttagctatgcaaaaattagaaattggcatcaaagaacgaaatatatttaaatgtcaagaagcagagaatttattggacctttcttattcaaagataaatgaattccgagaacaagtgcaaaattattaatttgacatgaaaatgttatacaataaaatacgattgacagctattaaacatttatttaaacccgaaaagaaattttttagtccgtttcaaatagaaaaaaatagagaaattttttattcattatttcggcatatctaataaaatcgcaactttctttgcaaaaaaaatgaaatattttcgtaacataatataatcgaatgatttttagtgtaatatttgagccttacttgtgcaaaagaccaaaaagtttttgcaagtttgaaggccattcactaatttcgtttgttgaatctgaactaaattagggttacgtcatgtattacaaaccaaaaatttgagtatttaagaagaaaaatacacataactcatctgccgtttttcaacttttcaacgggtatgggttccccatggggggggacttggattaatatcccccgctaacttatatttaatattattttagatgtacgcccaacaaaacgacatgcaaatttcggcgcaaggagatgatgtgttgccactgacagcagcagattttgcggctatggatgaagcgcataggcaatgggagactgaacggcggcaacgagaagaacaacggcaaagagagcaaaaaagcgcccgaaatggaagtggtctgatgaatggatggtgcgccaaagagagtgggaaaaagaaaaagaagaagaagaaaaagaccccaaaaatggaaaatggaaaaggaccagcaatttga

SEQ ID NO: 59781 - DNA, 859 bp, Heterodera glycines
atggtggaacgaatgagtgactggccgaagttaataagtgggttaattagttaatcatgtgacactttcgaacaaattgttttttctttcaataatttacataattgatatcataaattcgtattttttagaagaagtcagtgctgtccctgaacttttgagaatgtacatcaatcatgcaaacaaattggaaaattattcattggacaaggatctggtcgcacaattagcaaagtttgaggaatcacagaagaaaacaaaagcgcaccaccaccatcatcatccaaattctcaacaacaacagaaaaacagcaaggaacttcttactgctaaaagtgacaaaaaagaagacgaaaacacaaacaatgaaatgagaacggacgaaggcttggaaagaaagcaggcagtttcatcaccatcgcatgacacatcacaacaacccgaaccaattcaacgggatgaaaattcaccacccaaaactcagccggaacaaatactacaacatcaaaatccagcaagccaaaaccaacagcaaactccaccccaagtccaacagaatccatcgactgatgatcaaaaagaaacggattcaattcaacaaaccccaagccaaagccaaccaaatcaacagcaaactccgccccaagtccaaccgaatcaacagcaaactccaccccaagtccaaccgaatcaacagcaaactccaccccaagtccaaccgaatcaacagcaaactccaccccaagtccaaccgaatcaacagcaaactccaccccaagtccaaccgaatccatcgactgataatcaaaaacaatcggattcaattcatcttcaaactgaaggtcttccaaagtcagaa

SEQ ID NO: 59782 - DNA, 958 bp, Heterodera glycines
atgttttccgagggcttcgagcgcatgttcaacagtgagggctttcgcgagcagcgcacccaggaagtggagctgaagaccgtgtcgccggacgtgttccgcgagtttttgtacatcatttacccgagtcacaagcgtccgcatggtatttttcttagaaaaatcatttatacagtttatccaagataattggaagagggtgcaccacccaacgaactttttttaagtcttcattcatttcaatttattttcggggttttagaggagggagacccaatcctgatttaaatatttttcaatttctaaagtagcttcagtatattgcaatttatttatttcccttttcttctagtgccaaatacgcgcggactgctcgaactcgcccgcatgtatttcattccgacagtgactgcgatgtgcgagcagtgtttgctgcaagcgaccgagactgacatggtggtgggcgagcggctcaaactggcggacgaatacggactgttgcgtttgaaggtacaacacgttcctacggaccttttattcaatacaaaactgccataatgtcaatagattttcaagtaagaaaaattattttggaatagaaagtccacctaatcttgttgttagttatcttcgcgtttttaaatttaaattttttgtctttatttcctcattgcccctttctcgtgacaggccaacatcatgcagaagacggatccgaacgcgttgcgcgacatccaaggactgcgggaggacacgctgagtatgttggtgcgcaagctgcagaaccgggacaaactgcagcgagagaaggagaagcgtatgcaacagacgcgaaaggacgacggcggagaggcgatggaagtggacggcaaacaggtgggggagagggagagcaaagtggaccccaatcttcagtggctaatgatgggatttttttcaaaaaatgagacatgaacca

SEQ ID NO: 59783 - DNA, 119 bp, Heterodera glycines
caattttccgtcatcttctaccaactgttaggcgtacagcaacggcggcacttgccttcgatgcagctgttcacgggctctctaaccctatttttattttttttctatctcttctctga

SEQ ID NO: 59784 - DNA, 1449 bp, Heterodera glycines
  unsure (1)..(1449): unsure at all n locations
atggtgcgctttatgtccacttgtgttcgttgtctccggacaccgaatatgcgttttacgtctctgctcatggggcaagtggccaagaattgcgccactctcgccgagtgtgtgtgcctacggatatcgcttaaatggctcgctcattggccgaaataacagcgggatttatttattgacataatacatacgcatttttgttctcacgatttcaaangcgggaatttttattcatttttaaccgatctcgccttaaagttgtttgttgacaccgtttcgaacactgaataaaagtggaaattacgtacganatgtttttgatttgtttatgaaaagaggaaatttcagtctaatttaaaatatatttttattggattgacaaaatagttcgggcttggggggtttgtcgttacgaaaattttattttgttatgcactttggatccccaaatttttcagcttttttcactttccaagcaaaaaacatacgaacatgtatgtttcgggctcgctgatcactaattcagcatccgttatgcccaatttcgaacccttgacccgaattcgaacaacaggtcgaaaattcacttcgccaaaaaagggtggtgggaagggaaccaaaaagggtggagtgggaagggaaccaaaaagggtggagggcggcgaggcgttgtgtgatgggccttcactctttttgaagtgctgttaaaatccctaatcaaacctgaaaaccgaaaatgaaagagcttcaaagataaatttgcatcaaaaattggcattggaaacgatgaatgatattttcgactttttgttccaattctggtcttaagttccagtctctccgatcaaacgcaaaaaaatcaaaatttctctgatcaattttcaattatctaattcgctctttcccgctatttgctatttccaaatatgcataattattacctaattatttcgatatttaaaatttgggttcaatggtggtttgacagtgccacggttcgcaccggaagaatggagtgtgcatcaacggacgttggatggaggagacagaaccaacaattacgcagaagcattccatagaaaacttcaacaggcatttgattgtacccatcctagtgtcttccacttcatcaacacaattcgatgtgagcaaaagtcaattgatgctgacatctcacgatgcgtcgctggtgaactccctcctctaaagaagcccaaatatcgtgccgccgatgcgagaattcttcgacttttgcagggatacaataccatcaacaataacccggctaaccaaaatgaccacaattaccatgccaatgtcaatgttaatcccgataacatcaaccatttgctcgttggtgtttctcgaaattatgaaatgcgcccgtaatttttcaatgctttgttattttttttttgttgttaacacattgataaatattttttgata

SEQ ID NO: 59785 - DNA, 483 bp, Heterodera glycines
atggacaagggcaatctgtgggtggtgcccggcttcacattgctcgtctttgccattctgtggacaacaaaactgtgagtgaattatccccactttttactcattaatcccccccccctttcccattttccccttatttttttgtaatttttccatttcgtccaactctcttttccatccgttgtcgtccaaacttataatttgttattgtacaaattcaattgttcatttttcagttccaaaattgccctggaggagtccacttgccgcggggcatccatttatgactttgctggcacacagctggacgaagatgcgaagaggcattgccagaccgcgaaaaggtattacgttgggccggacgaggcgttttcgttggaccacaattggcgcaaacagcgggaggtcaaaaacccggaggtgggcacaaaatgcaataatattaatattattatttatttatttttatgtaaatattaatta

SEQ ID NO: 59786 - DNA, 896 bp, Heterodera glycines
tgatatcaaattgacaattgtaattgctgatgcggttagaaatgtcaatggaaaatcagtttggacattggttggtagcgatggttacgattttatcaacatcacaatgtggggcagcaattacgaaaaaatggcacgagaattcggacaagaatttaaagttaaatttataatttaattaaaaattatatttattgttaagcaaaaaacatatgtatttaatacttggggagtacaaaaagttattccgaatttcaattatggtaatgttgattatgaattaattgcaaaggaaggatcgacaattacactgatcactgcggaacaatatcaaattttatcgataaaaacaaccaattatttcacatttttgcgtgagaaatttgcactcgataatgatggtttttttccaacgccaatcaaaaaaattcgcgcaggcgaacagtttgtgtaagttaataaatagggattttagctaaaacaaaaaaataaaatttaagtgaaattgaatgcgaattattcgaattaaagcccgtgagaactgtaatggcaaaaggaaacgaagcacgtgtcattgatgcaatgattaatgaaggaaataacaaaactcaattaactgcttggaatattcttgcggattttcttgaatatattttacaagacaaaaaggtgtattaaaatatatatttttttaaatattttttaaaattaagggatatgttttaaaacttcaaggcttacttacgaagaaaggctttccggttcagaatatttcttttgtttttatcaacacttctcgaattggatttgctgaaaaacagcgaccacagaaaattccattgaaattggcagaattaactgaaggactttgtgaatgtaattttaaaaagttttga

SEQ ID NO: 59787 - DNA, 49 bp, Heterodera glycines; identical to SEQ ID NO: 51181

SEQ ID NO: 59788 - DNA, 583 bp, Heterodera glycines
  unsure (1)..(583): unsure at all n locations
atgcagcaacccagagtataacgcacacctgattgtttatataccatcatggatttaaattaaatgcattcatttcttgcgatattggatatcttggatctccattctgttctctttcacaattttatgcatttttacatttttcgaatcanattttcaggttctctaccatccccagggtatgattgtcaacgggctgttcccttcatcaatttcgacaatcgaaagacgtttccaattttcaacttccactcttggccgtataatgcaagtgcgaaattgaatttttatgaatttttttgaaaaaaaaaattttttcttcagttttacgactttggttacgtgctgttctgcatcccggtctcatattttggtggtcgacattcaaagtcaacgggtctcggggcgggtttgcttctgatgtcggtcagtgctaaaaactcatgacaacaatttttgcattttctatagaatagaaaaatccaacaattttatttatacatgggacgggggcgtgaagactgaagggggggggggggggtagaaaaatttgcaatttttttttcttcaaatttttttaaca

SEQ ID NO: 59789 - DNA, 951 bp, Heterodera glycines
attcccttcacagcgacaacaacaacaacaacaaacaatcagcaacgacgacaattgcgcaacgcttcaacacagcacatccatcgcccgtgcacacgtcgaatccgatcacttctgctgctgctgctctccaacaacacaatgggcttcctcttgtacatgttcgtggctgcggttgcgttcggcggtggagcggtgggtttgagggtgggggaatttgttttgttgctgcattttttgagtcccaatcaaatttgtatccatttcaaaatttgttgttttaatcagctcgggattgagctttcaaaaaggatgaatacgagactcataaaagcacggaaaatgaatttggcttaccttcagcgtgttttttaattcatgtcagacggaatcaaattttagaaaccgaaaattgagtttagaagcctttcagagatgaatttggtttagttggcccgcttttgcctccgttcgtgttcgttttgtgtctaatttgtttcccatttccttttcagtactgtggcatgatttacaacgccaaaggggccaaggcatcggcgggcggcggctccaagaaggacaagaagcagaaagcgtgagccccagcggtgaacaatgatcgactcgaggatggcccccgtggatgaacgaacgaacgatggacttcgagcaacaaacgcttctccccttctaactgctgctgatccccacaatatgacgctgttcccctccccccaaattatatcatttgtaggtgctttatcaccctctgatctgttgtccgtgataagctatatgcgctgtccatatcagtgatcaaaccattgtaattgttgtaatgatatatgtatgtatgtcctatatattgtattgtatttgtatgtgctccaatgcaacaaccaatcattatgtgtacataaatatgttgtatgaatgtattcggacaataaa

SEQ ID NO: 59790 - DNA, 2072 bp, Heterodera glycines
atttattaaagttttccaattatgtcagaaattcataactaaaatattcttaactatgaatcttcatttagacattttataatcgattttcgttcaaatacgaaatcataagcaaagattgacttattttgacagcagcggcagaaatgcagcgataaaggcgaaaaaatgaaagagagagagacagaagagagggagggggatgagagagaggcgaaccatttgtccaattcacaagcagaaggaatgaaaaggaagaaaatagtatttcgtcggcaaagaaagaggagaagtgagagggaaagtgcactgtttgctccctcttctcttcctccattttcatcccatcattaatttctctctatttctttgttcgactaaaatgaaaattgttaaaaattgttaggctcagtgtttttggaaattttgtatttttaatcaacaaattttttttcttccttttctctttgtcccaaaaatatcattgtgagtaattctccgaaggtgtcaatttttggaaattgttaataaggaaaaacatttccaaaatctgctcgcattcaaactctaacaaatttgaaattttttggataattaattaaattaaagttgttcggttatgtgccacaaattatttaaatcccttagaaaatgcaaaatggccacaaattttatttctgatccgtaaaaacaacaatccatgccaattcagaaaatcgaaatcagcagcgcctgctggaggagcctcggcactgagcattcgcatcgctgaagtccgttggccaccggaggagaatgcgtcgtactacaacggaatcactatggcgccaggtaaaaaaaatggcgaaacacaagggatcgaagagctccagcagtgagaagagccaatgatgccgccgcagatgaggacggacgaacgatggaatggccgacaacagttcccctcccaaaccgatgctatccccaaaatatatgttgttacccccatcatttgtgttttatcactctgtaagcaaattttgcgctttccataccagcgatcatattgttctaattgtattgatgtgttatatatgtgtacacatgtatttatgtatggtccaatgtaactccgtttcatattgtatgtaaaatgtgaacaataaattgtagttttgatggtaattgtgacacttgtatgggtaatactatagatggtacccccccccccccccctttttgaagaaacatttttttttgttctgaaaagtcttggaaacatgtttatggggggttttcgaggtcgctgattacgaatatgcgatagtgagatccgaatcgaaaattttcaacgcagaaatgtatttttgagcttctttcttcgaaacaattgagcaaaaaaaattagttaaatcactaaaagtagcgaccctaataatttccattaaatttaattgttaaaacgaacatttgaaaggacgtggacgttgccgctgcaaatccaattactggctactcaaatttaatgtgaatttatatgatgtcatatattttgggatatcattttagctaatctgtttgacacaaacttccccaaaggtacactttccacttttacgccggcactcacacagtttctggcctcggggcaaaactcaagacggcctacacaaaaagtggttcttggggtcataatattttaaaaaacaatatttgcactaattgccaggtctgcccatttttctgagacggcacaattgcgaccagctccatgaacgaatggtggtcttttttggacggctacaaaatctcctactgtaactggtccgtctgtaacaagggcgagtcgtgttcggcattgaccaccagcgcatcggcgagcaatgtgaggaaaaatgaaatgtgaagccaaaaaacggaaaggaaatgatggccaccaatggccgagactgtattcgaccaattgcatttctcgaaatggaaacattccaaatttttgtaattttatttaggtcggttcctcttcctactggacaacctcaggaaaactgatccaagcttactacaaggagcaaagcaacggcaagtttttt

SEQ ID NO: 59791 - DNA, 343 bp, Heterodera glycines
tgtgggcgttccacaaaaaaagctcagtgtgggcgttccacaaaaagctcagtgtgggcgttccacaaaaagctcagtgtgggcgttccacaaaaaaagctcagtgtgggcgttccacaaaaagctcagtgtgggcgttccacaaaaagctcagtgtgggcgttccacaaaaagctcagtgtgggcgttccacaaaaagctcagtgtgggcgttccacaaaaagctcagtgtgggcgttccacaaaaagctcagtgtgggcgttccacaaaaaagctcagtgtgggcgttccacaaaaaaagctcagtgtgggcgttccacaaaaagctcagtgattgataaa

SEQ ID NO: 59792 - DNA, 721 bp, Heterodera glycines
atgcaactaaaaggtattgacttaagtttttgtaccttaagacgctacgtgtcaagactaactattgtttctgcgcatacaaataaaaatgatgcttcaaactcgaatgcttcaagccatgaaatgccaaaacatgaacttagatttgaaaagtgcttttcaaaaactttaagaaaaaatgtttttataattggaaatgaatctgcttggagaaaatatgttcaaacaaatgagaataatgaagacatatatatttcttgttcaaaatgtcgttattttcgcgaacaagaaaaaaatgttaatgtcaaatcgatcgtcgcatcagctgttctgcgacagggaatacaacttgttatgttgcagtcaaaccataatgctaactgtaagcccgaaaaattagagaaactggaaacagaacaggttgatagagaacaaagaagagaaaattataaatgtgagtcagaaggcaagattatttggcacaaaggtttgggaaaagcacgagaatccgacttaaataataaaattataaattctttacatgaaatgcaaagaaaattagcaccttatcaattgtcttcaattaatttgtgaatttttcctttttttagttttgtaataaaattataaattctttacatgaaatgcaaagaaaattagcaccttatcaattgtcttcaattaatttgtgaatttttcctttttttagttttgtaataaa

SEQ ID NO: 59793 - DNA, 1220 bp, Heterodera glycines
atggcggggtgggacccaagactcatttggggggggggcgggggccgagaattggccggaaatggcacaaaaaatgttagggattcattgatggcccagtaatagtcacaggattttggctgggtgccaaaaaattttcgcccgctctatttttgaaaaaaaattctgtaccaaattttaaatgaaaattcaaaaaaaatttttttgttttttcccattaaaaatgttgagtattttgtggttttgggagattgattaccttttgaagacgcggaaattatcatttttcacaatttcccttttattgcttaattgatatttactataattgttaaaatggattcaattaatgttttgttttttttttgactgaatttttctcctatttttccattgaatttttttccaaatttcaattgttttttctatttcaccaagttaacatttttaattattataattttaacaagggttgaattactgtcctttttttacattggattttctctcattttcccggttctgaattttttccaattttaaaattttccaatttttcaggcactctctcctcacttcggcggacggggggcggccaaccacgtccacggcatggcaatgggccgaagaaacattacgccaaagagatggacaagtaaaatataattttttatttaaaaaaattattttttccaagatatttcataaatttatgcaataaaaattcaaattttctcccctttggccgacttttttttggcccaaatgccaaaaatgcaaaattttggcccatcttaactctcttaaaaagcaccaaaaatgccctcgggagatcatttactccctcccccaatttcctgctgcacccggggccaccaaatatttatttgctggccgcttcaatttcaccgcaaattttgtgccgtcagtggcggcggcggcggtggcggcaattttttcattgccccaggggaaatgacaaatttgaaattgttttttctgttttatcagattttgtggggggaattttttaaatttcgtcattttatgaataattttagggttgaaaaaaaatacttttaattaaattattaaattatttattatattaaattttaatttaaataatttatttttaattaaattttaaagcaaaaaggaaaataatttatttttaaaatattattttctattatttttgaaaaatcattattttaaga

SEQ ID NO: 59794 - DNA, 102 bp, Heterodera glycines
ggcgctcccggccttcggccgggagattttgtttttgcagacgaaactccttgtcaatataacatatatagtaatattgacaggatattcggctaaaaacgg

SEQ ID NO: 59795 - DNA, 606 bp, Heterodera glycines
atgacggacagtgccggcgacagtcggtcaacggaacgggacaaaacgatggtcaatggctgtaaagttagggataatgagccgtggctaagacaagccgtgaggtgactgcgaaattcaccgtttttgattaccaaaagcatttatacggtcccaggatttcgggttggggagggtaccctccacccgggcgacgacttttttttttgttgctgtttttacgaaaaaattttttggtgaacagggggttgaattttgtccaaaaaatgacaaattttgcgatttttagtcatttttagcagattttcttcaaaaaattgtagattttttgaaaaatttagcgaaattttttggaaaatttgggtgaggctaggtcagggggatacaagcaaggaaaacctaaaattttcagcaaaaatatgtaattccttaaaaatttcgagtgcggaagggccttgggggtgggggggtcttgccacaaaaagtgtgtttccattgctcgccccagacgatggactaattcgccatgtcaacgacgtccaacgcgatggggaacacaaagcgtgttttacgggggtggaccagatatacacctgccgatgctga

SEQ ID NO: 59796 - DNA, 388 bp, Heterodera glycines
atgccaaaacaaaacgaaatcgttttaaaatattcctttctggacttgacttggtttcttgatatcgaagctgttttctacgctatttctaaaacggttataccaaaccccagatttttgaatccggttttcagaaaaaatgccttgtggtgaaaacaatatttcacatttcactccataactttgtgagttcggcacggatcgagaccgggataagaccattggaaagagcagctcgagctctacaagaacgtatggaaagaaaaaatagttatttctgggactttttcagaaatcagaattaattctccaatgtggcccaaattttaggcccccagccacagccccttgcttctcccagttttaagtcttggatttgtcaaataaa

SEQ ID NO: 59797 - DNA, 388 bp, Heterodera glycines; identical to SEQ ID NO: 59796

SEQ ID NO: 59798 - DNA, 620 bp, Heterodera glycines
atgcctggcggtagcaaaaccaactacaaaattcatgtgcaaaccatcccatggaaggtcggtaaaattcacaaaaaaaaaaattgaaatttgatccctaatcgtgaaaacatgtttatggggcggttttctgggtcactaaactgatcacgaatctgacattttcgggttcgtattcgaaattgatcaaaatgaatttcagatttgtgacagcgacaacccgaaaccacccataacatattttcatgactttttgaacaaaaattcttcaaaaaaggtggctcaccatctagaatttgatttggaacggttttacacccaaaaacgtcaatgttgttgccaatgggcgctggcaaaaatgaaaaagttgtaaattcaaaaaaaaagtgccgtgacaatgcttcaaatgatattgtaaaacaattaaggaatatgaagcggatgcactgaaatcggacggtgaattggagcgcgaagaagtgagttcaaacggcaaaagtttgacaaaaaatattaaatcaaattttgcccaaaaaatctatctaccaaattctgaacccctgacccggtttcttacaaaaagtcgaaaattcaaaattttcgcattttggtctaataaa

SEQ ID NO: 59799 - DNA, 794 bp, Heterodera glycines
tttccgcttttaagtacggtgacttgtgagacgcattcgccgttcactcccgacaattccgagcttgacggtctcgacacgaaattgccgaggcaataattccaagtgtggttttttgaccaattttcttttcaggggatggtaccgtattgggacagtaagcattcaattgattttcaatttaattttatgtgtttcctactgtagctgtcaatcagacacgacagggcgtggttcaacctgtacaggcaatttgaaattcattagaattaattgtgagttttgtcatcgctttaggcgacgggccactggactcggctattgggacttttacacacagtaacccacctccacatttacagtatgtaacaaaatactcaatttaggattccggagcggaattgcatcgggtgggtcggcttaactggtcctctgtacttttccgcatagtcaattcggtttgcacgcgggtgaaaacattgccggatctgtggcagtgaaagacaaacgatgttttggtaagggattcaaatgtattgcatctggcgatacgttttttgcctttggcactgcctaaacactgatcgctatttcagatcgcctcgtcgtgcaaattgagcgcaaatcgaccaccgaaaaggcaaccgaccgcagcagcaaaagggaccaaacaagaatgtttaccatttcagttcgatgttctccaatgccgaaagtgtgtgttcaactcgtgttggcttggctcgcgcactttgcacgaccaacgcacttatctgaccaacctccgatcgtat

SEQ ID NO: 59800 - DNA, 662 bp, Heterodera glycines
gactcaacccaccagcatttcaatcactggcactcaattctcctgcatttcaatcactgggactcaattctcctgcatttcaatcactgggactcaattctcctgcatttcaatcactgggactcaacccaccagcattccaatcactgggactcaacccaccagcatttcaatcactgggactaaacccgccagcatttcaatcactgggactcaattctcctgcatttcaatcactgggactcaacccaacagcatttcaatcactgggactcaacccaccagcatttcaatcactgggactcaacccaacagcatttcaatcactgggactcaattctcctgcatttcaatcactgggactcaacccaccagcatttcaatcactgggactcaattctcctgcatttcaatcactgggactcaacccaacagcatttcaatcactgggactcaacccaccagcatttcaatcactggcactcaattctcctgcatttcaatcactgggactcaattctcctgcatttcaatcactgggactcaattctcctgcatttcaatcactgggactcaacccaccagcatttcaatcactgggactcaacccaccagcatttcaatcactgggactcaattctcctgcatttcaatcactgtga

SEQ ID NO: 59801 - DNA, 295 bp, Heterodera glycines
atgtcctcaattaacaccagctcagacaatgcggtaaaacaacaaaaaataataatgaaaatattaaccaaatatttaagtgaataaaaaaatcccataaatttattataattaggtatttgaaaataaaaatttactttttcagctttatttggcctaccgttctgtgggtccatccgtcgatttgattgtgccggccgttgcgctgtatttggttgcgttggttggcattgtgttgaacggcacagttttggtggtcactgccaaatccaggcaaatgccatggcatttctga

SEQ ID NO: 59802 - DNA, 775 bp, Heterodera glycines
atgcttgagcaacaatatccagatcaatcttggaatccgggtggtccaggaatgaaaactgaatttattcttttcagtttctatggcgaaaaattgacctttttgattgaaaatctgtaaagagtgagtttaatttattttaatttttttgtctgcggcgcagattgaaagaattcaattatattgaaattgttcaagaataattggttaattattaaattatttactataattaaactaaaatgataattttttttcattccgttggccgcaattgtcctgaccgcaaatgtcttaacaattttttatgttattttcaaaattcgacaaattaaaaaaacgcccagaatcgttttccggttcgacaaaaatttaaattctcggatgtatttaaactccaaaattggttaaaaaaattcgtataaagtgttaaatttggcttttgttcactttagagcagaaattttttataaaaaatttcaaaaattaaatttttgaaaaatttttcagctttttgtaaattctttgctttttaaaaccaatttaaaaaatccaggtcaagcctggattcaggccttgaggagcctgggtttttctggacctggattttcggtccaggtctaacatggaacccagtccaggtccatgcttttttcaaaataccaatctctactaataattctttatctgctctttggtttattatacaactttttgttataatttctttcattccataacgcgtccaattggcgaaaataatattaatttaaaa

SEQ ID NO: 59803 - DNA, 2426 bp, Heterodera glycines
atgccaattcgtttcctctccatgctctgccctcttctcgtgctgctcaccaatgttccttcaacgctgccatggatgttggaacgggatggtgtccttttagcttacgacccaaacaattacaatgcggaaacatgggctgactggggcaagaaagttggcgcgagtgcggtcgcaggaggagtcgctggatccgctgttcctggcattggaacggtggccggcgccatccttggctttttcggaggagccgccgttgctgctggcgaattcgcaattaataaagtgtattgtcaggtaaaagaacgtacctttcgacctttcgcatgttaatttgttttatgctgaagtaatgaaatgaattcagtttttaaagttcaaaaatgtgaccaaactttaggaatttggcatttttaattttgtggcaattttttttttaatttcgactttttgttttttcgttgctttgaaaaatgtcaaaatggctttaacctcttttgtaaaatttaaaaagtatatacaaaaactttaaattatttaaaacaaattatgaatgttgtcaacttataatttaaaatgatttttcatagaaaaattctcgttggtcttcggtaacacttaattttagtgaacgtttaagggccatttccgtccttaacgaaaatttttaaaaattttcaatgcattttttagagatttaaatttttaacaaataacaaaaaatttccaaacttacaaaaacaagaaaatgcttgaaaatattccgctgagaatacaaacttattaataaattaactttttttattttgatgattaattttggattaaatttaaattttattctgtatgtaaggtagatccaagctcaatatcttttattatttataaattaaatttcttatttgtaactgatttgttttattggtttgtaaagactgcgtgtggctcgcagtacgttgtttgcacccaatcgaaaggggcaagcatggcatgctgcgacagcaactttgcacgcaaatgtgttaatgattttaatgaggttaatgaataagatttgtatacatttacaagaaaagctaaaaagctatttaaaatttggttaatttgcatgcgaatatttgaatcacttttatttttgacattttttaatattgataatggtaatttatatcctttattaataaaatttaaacataggtcgaggcaatgtttcccaccacaacgacgacaacaacgactccaacgccggctccaattcacccaacggtcgtagactaaagaaataacatatcattttaatagggtttagatttaggttatattttataacaataccttgctatgttttgtgcatgttttaacatgaaattttgaaaatcttgcgttaatcatgggacggttcagtttcaaattaagcctctgctgatgattagcatttttgccaaaaaaaacacgccgggaaggggggggggactcactcgataagaacgcatatgttatgacaaatcaacagataaatcacaaaatatattctaaattgaaaatgccgtgatgcaagggcaaatccgaatttatttattatttaaaaaatgaatctaatcattattatataaattgaagcaagtataaaaaatattaattaatttataatttattaaataaattataacttttaagcaaaaattaaaatatatttaaaatattctcttcacctgaaaattttaaaatctaatttttggcaaaatttaaaatatcctaaaaatttccaagaaaattttgcagcgacattcaaaaaaccatacacaaaaaatttatttaattttcagcaatttaaaaatctaactgattgtcatacatatatgagttagatttcctctaagaaacctttaaacatatttatttttagcatatggcaaattggcaagagacagcggtcaaggaagcagcaaatttcaccgtaaccctcaaaattaaaaataattttatttaccttaattccttcattttttaaagttaatatttttagaagttttcctcattaaagtgtaaacgaggacgcaaaacgacaaaagattataatattgggggaaatggttgcccctatgagtcattatactgctatttcatgttctgttatgacggtaatgaaaattattaatttaggaaagtgaatgatttaatattactcctcttcgaaatttagtgcgatttgagaagggacattttgctgaatggggctgccacccagcagatgaacgtgtagatcattccaaaaattatcctcaaggcgattgggcatgcgaacagtcctatcgactacacccggattatgataagcagaccctcggctacgacatgtccaacgaacaagatacttttgaggaagcatatgaagatttgcgcaagaagtacagcaagaaaactgg

SEQ ID NO: 59804 - DNA, 517 bp, Heterodera glycines
atgaaagtaaacacttatattagcaccaggtttttagtttaattgcataaaatacttcttaattggtgctaaaaaataaattaattggtcatattagttttattttgtaatattttggttaacaaaggaaatgaaaaatagttacaaaagaagttgcttctacttttttttagcgtaatgttgcgctcgttaacagcatacaacacactgccattgttcttcattctaattttactcaaacggcaatttttttaaatttaatttttattttaaacatttaaaaaaattttttcaggattataacaatatcaccagtgataaatataaacaaatttgggaattggttgatgatccaattgtgatttggcatgatggggatgagcatttcaacagcatttgtttggtaaaaagatcaaaatgccaaatgcaaccaaaaaacacttatttttgaatttatttaatctttttctttcttacttgaatatgataaatttttaattatgaaatatagccttaa

SEQ ID NO: 59805 - DNA, 507 bp, Heterodera glycines
atgaaatcgtggttccttgtcctggtgttgctgctcgccttttgcctggttgttcgcctcgtgatttgtttggtcaaatgcaataactgctgctgctgtaagtgacggacggcgacggaaaaagaaaggaacggacggacggaggagaaaaatgagcaaaacgaagttaaaatgccatacgattttgtgtgaattttgttgtgatttgtacataccatatatgttattaatgtatatttgtaaatactgaataacaaatattctctgtccaactatggcattattattttttttagaaatttatgcttttttaaaaaataaggattcgaatggagagccgttgaaaacttttttttctgataacggttacttttaatgatcgcttaaaactagagaccggacaagaaggtcggtttcggttaaaaaaccgaaaaaaccgaagaaaaatttacggtttttcggtttttttttttgattttatttatttttttccaaaaaagcaataaa

SEQ ID NO: 59806 - DNA, 333 bp, Heterodera glycines
atgccgtcctctccgatgcctttttcgctgttcgtcgtccttttcctattcgtcccatttttgcccggatgttcgtctttttatttggcgcctccttcttctccttgtgtctcctccgatgtcgccaaaatctgtgagattcccacacaaattcatctaccaaattctgcattttcttttgctttttcaggcggtgaaccatccgttgcgcattatttcgagtgctgtggcgacaatggcgcaggtcggcacacgaaattggcacatgacaaatgttttgtggcacttttcggcttctttgtgccgttgaacatgaatatggcatttatttag

SEQ ID NO: 59807 - DNA, 262 bp, Heterodera glycines
cctgaccaactctgtgcttgtgctcaaatgggcccctcaacttgaaatcctcgcccatcccaatgttcgtgcctttgtcacccacgggggcaacaaaaggtgccgaatttcttcgacagtaatttactcaaattattgtattaattgtcgtttaattagcgttcgcgagggaatctgtgccggcgttccgctcattgtgatgccggtctatgcggaacaagtcaaaaaagggtgccatttgcacaagcgaacacaaatttag

SEQ ID NO: 59808 - DNA, 558 bp, Heterodera glycines
  unsure (1)..(558): unsure at all n locations
tttcagcccttcactttnttgatgccaaacattgccaaattcggagtgccgaatttcagcttcaccgaattttattcgcgtagccaattgttcttgcacgacagcatcgacaggctcgggttgccggtgacaagtgaggaggaggaaaattgaaatgaatgataattattagaggataatcaattagcaaaattaatttaaatcataaaagaacaataatttgattaattttcaaagcattaattacgcttatgctttttgtacaaatacaaaattaaattgtattcgttggttcagctgctgctgacattttcggagtcggcgcccattgcaaaacgccaaaagattcttccgccctttccgccaaaatcaaacagtttttggaggacccgagctcaaaagatattaaaaataatatccaattaattcatttatgctttatttttaagcacaatttatatcgccttcggttctcacatcgattggaaatttgcgccacggaaatttttggacgattttgtcaccgtttttcgaaaactgccccaatatcgtttcatt

SEQ ID NO: 59809 - DNA, 739 bp, Heterodera glycines
atgtccatttcaattttagtgtctgcaagagcattgggtgagcaacaaaaccatagaaaatgaacctgacgggggggggggggggaggttattggggaaaatcataaaatgcagtgatcaagatgcgaattttttttttacgaaattgagaaaaaaaattttaccaacagattcgtcaattaagaaatttcattgcctttttaggcctctttctccaccggcggaagcagcaaaagaagcgagtcaaagcagcgaaaagggcgtctaattatgtggaaatgaatttttggcatttggaaaatgtgagaattgaccgatcatttttgagttaggtattatgctaaattgtgttgattatatatataattctgtattgcgttttttgcgtccgaatgttttttttgttaaaaaaattatttgcttatcaatttatagaaattgcttatgaaaaggggacggattcgtacttaaatggcaagcacgtatttggaaaagcggtcctaatgtgggaaaatgtgaaatccgtaccctcacacctgcttaccctaaaagcatgaaaaagtgagccgtaaaaaatgcacatgcagcgaaatgaggaaaatgatcagcggaaacaaaaaattagaaaaaaaatctattccagtgaaaaatacgggaacaggacaaaatttcgtcgttgaacatcttggcgtcactgttaatgaatttggtacttgtacagtttggaacacatttaata

SEQ ID NO: 59810 - DNA, 759 bp, Heterodera glycines
atgtctatctcttcttatgagaaattttatgtgttacaaaagcgctcgagcgtgagacggaggttagttggcattcgagcatttaagttctcagagaattttttaatgctatcttatatccgagaaaaatgaatatctcttatcatgagaaattttatacgttgccaaatcactggagagtgagagcaagggcggtgtgcaatccccatctaatttcacagagtatttttaaatttatgtaatatccaagatcaactactatctaccagtttgagtcatttcatgagttacttgaattctaaatcattatataaaatcatagatacttgtcaaatctatgattaaaagtcatcagatgttaaaataaatatcatattcgtgatcagcgaagttggaaaccccaaattacgaattttggaatttttttgagggggggcgacataacccgaagtaccaaatattcttctgttgcaatgattaaattaaattttgtttttagtgtaaatttcgcaatttcctgaaatcggattagctgtaagaattttggaaattattttttttattaaactctcaattgtcaagaatgtgtgcgtgacaaagtaatacaaatcaggttggtccgtaaaaaatctttaaaaaatgcttatgtgtgttttcagagtcgctggtcacaatcagacatttacagggacgtatccaggatttgggcttggggggggtaccgatccgaaaagtcaattattaggggtgtatttttga

SEQ ID NO: 59811 - DNA, 96 bp, Heterodera glycines
cactatgggtcaagcccagtgttagacaaaattactcataacgccaaatagcgtatttggcgtaaatttttgcgcgttaattcaaaatttacactg

SEQ ID NO: 59812 - DNA, 898 bp, Heterodera glycines
gaatacatttgttcggatgaaaccgaatacaactttgtcaaaaatgcttggattgaaattaatcaaaacgatccggcactgagccaattgttagaggcattatttgctacggtcatttcggcaaataaagctttggaatacggtaaaaaataattcgcaggccgaaatttcggaaattttcagacgatgctaacaaaatatctgcgcagcttaatgaactcaaacagagtttggcatatgccgtgtttttcatggcaaagcgtggccaaattccactggaaagcccacgagaggagaaggaaagggagccaaaagaaattttaattggcctaattgacatttataatgagtgtcaattggacgctgataaggtgctaaaaagttgtggagaatgtgggaaaaaaggaaaagaagaaaaatggcaaaaaggaaaagaaaaatatggcaaaaaagaacgacgctttcttgaatttgttgcgcattcattggaaatgaaatgggacgcaaatgcattttcagcaggtggtcagcagcagcaggacgacgatgatggtaattattagggagtccaattatatgcacatgcatatttttttcctggactgtgggaggcctgaaacgcacgaaaaacatgtttttagcttgatttgaagcttctaagatgactttccatatgcatattttgcatatttgtgcatatttcgcgatttatgtgcatatttccatatttgtccatattttggcatttaactccatattttatgtccatattttggcatttttccaaaaaacctctaatagaacggcccccaaaagacaaattggactttttgacctcaaaaaccggaaaattttccaaaaaaataattttttgcaaaattttcacgaaaaatattga

SEQ ID NO: 59813 - DNA, 877 bp, Heterodera glycines
atggcaaacttttcgccaacacttcgccaaaatgaattccatgccaatgccacccgcaaattcgcattacatttgtctgctccactcaatgcatgtttatctgtgccctcgagaagcagagcgagaaaagttaatggccaactttttgattcggacgagcaaaaatgggcggatggacggagaaaagcgaaggacagcggaacattggcactgacaaaggcaattcggcacaatttggagagggcaaatcccccgccggttggagcaacgcctcctttatctgcactatccgttttggcacattctccggtatcggcatcgcctcccaaggaatattcaccacagaaggaattttgcgcgaggcggccattgtttcccaagtcaaaatttttgagaaaagctcagaagctgaggaaagaatggaattgggtggcaaacggaagcggaagagaaacgacgccaacgcggacaaaggcaaaggaagaggaggaggaggagaaggaagaggggaaacggaagaacaggaaaaacaaagcaatgatggaagaggaagaggaggaggaagagaggaaacggaagaacaggaaaaacaaagcaatgatggaagaggaagaggagaaagaaagaaaaaatgataatacaaaggggggcagcagggaagagcagaagaggatcattcatctgctgatagtgaatggagcagcagcagaaaaagtaaaggaggaagagagggacgacgagagcgagcgggacgaagaagaggaagaagaagaggatgaggaggaagatgaggaagaagaagaggatgaggaggaagacgatgaggaagaggaagaagaggagcagggggaggggacggaagagagtgacggcacaa

SEQ ID NO: 59814 - DNA, 105 bp, Heterodera glycines
gatgccgccgaattgctgtacgatgtgctgtttgagtcgggcaatgccgtcccggttctgatcgcatgcaacaaacaggacattggacacgccaagtcgcactct

SEQ ID NO: 59815 - DNA, 760 bp, Heterodera glycines
atgcgaaaagcgaaatgcgaaacgccaaaaaatgcgaataatgcgaaaggcgaaatgcgaaaagcgaaacctcggcccatccctggtgtgggcggaggccggaggctatttgctgataaggaaatagtcagcaatgaagtgggaaaccgggaaaccatttgctccccatttcccgcaatatggctcttaactatgactccccgaaacaaggagcaaagcggcacgcatcggcagatgctggacagttacttctgcgaatttttatggcgtcattccgtcaaacgaagagatgtcgatgcattcgaataccatttgcaaaacatcgttgcttatatgccaccaaattaatatgatttcttgcgatgataataatttgtaggagaaaaaaagaaaaaaaaattgaattttgataattgttcgaatccgggttcggagttcgaaatgggtcgaaacggacatcatattcgggttctacgaccccgaaaacccatagaaacgacttttattaatttaaaatcaatttaacaaagaaaaaaattttgttgacacaaaacgcacaagtaccaaaattagcaatggacaaaaaattttgaaaattttattaaactatgaaattttgaagcttctttaaattcacgaaaaccaaaaatataatttttgacaattttcgagttttttctttccaaaatttgtgtttagaagtgtatttcttggaaatttaagaaacaaatccatttaactaagctctattatgaaaaaa

SEQ ID NO: 59816 - DNA, 799 bp, Heterodera glycines
tacaattcggtgcagggacagtacggtggccagggaacgaacggtggatcatcgacggcacaacactactcacaacaacaaccgcaacagtactacagctacaacagcaacacaaacaacggatacggtggcggaacggggtaaaaaagggggagggaaggcatttgtggcaaataaatgagatgagactgttttcagtggctatcagcagcagcaatcgccccaatacgcccaagggaattattattattccaacggaaactatccgcagtcacagtattccgggagctacccccaatcgtcacagtactcctcctcttctgcacagtcgtcgccttacgcgtacggtcagcaaacggtcgttgtgccttcgtcttcacagggagcgggcggtcagtacggcacgccccaacagcagccgattccgattgtgcaaagcggaggacaaacgcagcagcagcagcagctaactcagtttagtggaaatggcggacaacagcaacaattacaaggaacacaatatggtggaacagcaggaacatcccacgggacgcagcagtacaacggaggacaaggacagaacggacagggacaaggacagcaggggtactactcacagtcaacggcacaacgccaacaaggccaacacattgcatcggcagcgggacaaaatggccaagggcaaggaggacagcaacagtacacgacgagacaagtctcgggggacagtgtactttctgctactaatgtgaattctccttcctttgcaaggcgtacttcacaacgccgactccgctga

SEQ ID NO: 59817 - DNA, 1738 bp, Heterodera glycines
  unsure (1)..(1738): unsure at all n locations
atgggtgaagaagagtatgaaaaattaaaaaaatggtattatatgaattacaataatggatttattttaggtaagagaaaaaatatttaagttaactatttaatattttagaagaaaaattggatgaatattgttcaaatgatacggacattttaatgaaagcgcttataaaattgagaaagatttttattgatataacaatagataatgaaacaccgaatgggatcgatgtaatgagactatcgacaactattgcgtcatcatgcatgaagtagggaccaaaataaaaggaaaataactcaatttttagcatttttcgtgccaaatttttaaaaaatagtgaaacaatacccatcattcccgagagcggatttgagcctaaagatagtcagagcaacatagcgataaaatattttgaatggataatgcatagggatggagttaaagcgagacatgccgcaaacgggggagaaattatgctttttggagataaaaaattaaaaatcgattgcataattggggcgcaaagagaataattgaatttcaggtaataatggaaatgaaataaaatattaaaaagatttttagggatgcgcttttcatggatgtaaaaaatgttataagggatttatgattcaagcgaatggactaacagcggaacaaaattatgatagaactcaacaaaaaatggagagattaagaattgcggggaaaaagatgggatatactgtagaggaagtttgggtaaatgccaaaagtttattcaaaacataattgtgttttaggaatgtgatgtgagaaaaaagttaaatcgaaagagtgaaatttatgatgaaaacatggcaaaattttttaataatttaccggaaattggacctattatcccaagaaatggttttgcgggtggccgtactggtagatttattcgttttttctgaattaatgattaatttttaggcccattatgtctatttgctgaggcttctgaaaatatggaaatttcgatttatgatattgttagtctttacccttgggtgaactattccaccccctatcccgttggcaacccaaaaatagtcattcctaaacaatatatagtaaaatggtaatttcggtaaaaaatacaaaattcaatgcatttttaggacttcacctgatgacattccttatgagggtcttttgaaagtacgagtgatccctccaaaaaatcaattccttcctgttttaccttttcatactgtaggaaaagacagtttttttaattttatagattttttaggatgatttattattatttactaattgttcttcgtgtgccaagaagaccaaaacagattttgtttattcaaaaaataccaaaaagtgtagacatagtgctgaacagcgggcacttactggtgaattttgtactttagaattgaaaaaaggtgatagatgtattttaaaaaaataaaaaattatttcagctttggaattgggggctgttattgatagattttaccgcagttatcattacgaaaattttgatggaaatttatttaagaattatgtcagaaaatttttaaaattgaaagttgaagcttccgggtggcctcaggatgtccaaaatgaagaagaaaaattggaatttgtgaaaacttaccgagaaatatatcaaattgaattggaagcaacaaaaatgaattttaatcctggattaagacatattgccaaattagcatttaactcngtatggtaa

SEQ ID NO: 59818 - DNA, 1017 bp, Heterodera glycines
atgggacgacgcctcgagggcaaaacggcactaatcactggcggcgcgcggggcattggccgtgcctttgccgaaggtttcgtaaaggagggggcgaaggtggcattggccgacattatcgttgacgtggcaacaaaagcggccggagaaatcggcgccggcacaatcgccgtcgaattggacgttaccaatcagaaatccatcgacggatgcgtccacaaagtgttggcgcagttcgggcacatcgacattttggtgaactgtgccgcggttttcgacatggcgccagtcggcgagatcagcagagaaagttacgacagagtgttcgctgcaaatgtttcgggcactttgtttatgacccaggcaaaccaccaattagcatggctaattagcctaattaaacaggcagttgcacgtcatatgatcgagcggggaaagggcggcaaagtgattaatatggccagtcaggcgggacgtcagggcgacgcattggtcaccgtttattgcgcatccaaagcggcggtgatcagtctgacccaatcgaccgggctggcactaatcaaacacagtataaacgtaaacggaatagccccgggctatgtggacacggaaatgtggcgacaagtggacaaattgtttgccaaatacgaaaagatcgaagtgggcgaaaagacacgccaaacggcgaatttgctgcccatcggaagaatgggcgtggccgaagatttggtgggtgccgcggtgtttttggcatcggaagagtccgattatgttgtgggacagactttaatgtgacgggggcagccgactgaactgagaaggaaagtgccaaacggagagaaaaagccaatcaaacggaaaaaatgccaacaaacgaatgaatgaaatgatcgaccagcataatgtatcaatgattatgccataacaaatgaaaagccgacgaatgattaattatgaagatcaaattaattgtccgattattacgcactttgtccaaaaatcagcccaaaatatgaa

SEQ ID NO: 59819 - DNA, 303 bp, Heterodera glycines
atgaattcgaattacgaaaaggacggacaaaaaaaggaggaaaatcaaatgggaaaagtgccaaacgaacgaccgaaagaaaacggaggaaaagacgaagagaaggtgagaaaaggaaagtaattagaagaagtgaaaaggtaattaaagaaaaaggaagaagcggaagaggaggacgaaaagcaaaagggaggagagaatggaaaaaggcaactgaaagaaagcggcgaagaattccgacttttggtggacgaagaagaaaaggagaaggaggaagaaagcacaaattgcgcacacaagtaa

SEQ ID NO: 59820 - DNA, 611 bp, Heterodera glycines
ctgctccgcgcgctgttcaaacgcaacccagcaaatccgttgggcggcggtgcgcagggggccgccgcgctccgtgaccaccgcttcttcgcctccgtcaactggcagcggttggcccagcgccaggtgggtggtggcggcgttggatttttttaaaatttcaaataaaaaaagggatttttttgctatttacaaattgcaattaattggtaattccccattttttcaaggttacgcctccgtttcggcccgcttttggcacttctattggcgtcggttgtgatgccattggagcggacgcttcgtcttctgcggcattagcattggatgttgcccattattttgacaccgaattcactaagcgaacgccaaaggcgagcattggcttcttttttattctttctctatttctcttgctctctctatgtcaccctccatctttatctctcatctctctctccctctccctcctttatccccacattttatacctccattttaattcccttcctccaggactcgcccgccgtgccgccgtccgcagccgcccacgagctgttccgcggcttcagcttcgtgtcgcccagcattctggaggaggacgaggagga

SEQ ID NO: 59821 - DNA, 84 bp, Heterodera glycines
atgacatggacgattgagtacctgggaaatgacgcagcagagggcgcccccacaaagtgtccaagccacgaaatgtccaaaaga

SEQ ID NO: 59822 - DNA, 861 bp, Heterodera glycines
atggcaccaccgatggagacaccgaccaccagcaaaagtgagtgaaactaaaatcccctttttatattttcaaataattttctcttttttaattttagcaaccccaacaggacgaccaaagatgaatgtcgatcatttgcagcgcacctcacgtcgcaaattggccgatgaaatcgcggctgtaataaaacgggacagatcacgctcagccagccgggcgtccctcgaacggatcagtcgggaagttcggcacaaatttgctcattacacgccacagaagaagaaacaacaactgtcaagacaaaaaaagtcagttgatccagaggatgctcttctgatcctcgggcttgtcggtacacagaaggcttacagacgactaaaaagcactattcgcctgatcaatgccaaatttgatgtgttcccgccactcgaaaaagtaaaaacaaattttagcatttatatttatttaaaaattcaattgaatattgttaggtgcttgacatcaaacgccgcatctgtgggtcattgcaatacgcaccaattgagactagtgcaggtgttggatttgtgtgcactgatgttgaggcagctctggaggcgcgtctttcatctgccaaggacaatctgatcagatttggcgacgaaatctacataaagctgagcggcgaccatggccagagttgtacgaagattaccgtctcattcagccaggctgctcggtcaaattctccatcaaacaatttcgtctgtgccgttttccctaccaaggatagccgcgaaaacttggagcgctatggaagcacactttgggaacaaattgacggaataggcacattggcgggcaaccgagtcaagtggtaa

SEQ ID NO: 59823 - DNA, 1982 bp, Heterodera glycines
ttttttgcttaagagtggccagtctgatcggacagccccaaattgagaacgttttggcatttacgtcgagggtaattttgtttaaaaacaattttttttccaatatttgtgtttttcctcgacgtttttaggcacggagcggcgcctgtacgcaaccgacgccaaacccgctcagtgtgctcgagttcatccacaacggagtgcacgcctgggttggaggggacatggtgaatggactttttcaagaaaattatgggctattttgtgaaattcttacttttattttaacaaattcaaataaattttcaaaaataaaattccggcaccgtcgaaaatccccgtttagtaatctttttaaaaaaatccaaaatgacaaaaaaattcgtctttttcagtgaaaaacggccggctaaatgatttttttactttttccgccggtgccgaaattttcgaacaaaacactggagaaaaagaaaagttttagcagcaaaaaaaaatgtcttcggattccccgtttcgaaattttttggcggggcatgcgacataagggaacaggacaaaacgtcgccggacaaaacgaaaaaaccaagaaaaaattgtcaaaaaatttagttctagcctacctaatacgaagaaaattctagaaaaactcaaaaagaaatttttattaagaaaattcattttttccggaaaatcagctaaatttagttttattaacaattagattttcaaaaaatctaaaatacttttcaatttcttgaaattttgaaaatttattattattattttttgcggcgacgtttcggccgacgacgttttggcgtgtacccgcgacataaacccataaaaacgcaatttactttttcgaattccatcgggaatttttttatcaaattttctgggttgcgaaaacaataagctcaccccctgggttattggcattccatcacaaataatgtgcaaattgtaaaagtgtatttttgttttgtttcagttgccgttgaccacctcgccacaggaccccgttttcttccttcaccattccttcattgattacgtaaggaaacaaacaaacaaaatacagaaaaaaccttgttcattccatcttttagggggtggcattttctttgaaaataataaatagagcgtaattaatcccatggatttttaaaatgtccaaaaaaaaaactttttagggataccctgagaaaatggccaaaaaatgtccgtgaggtgtggggtttcaactcttggctttttcattcgtttttatgggcctttaatttattatattttattattttttgcgacagatttgggaacagtggcgactgctccaccaaaatcggcagcagcgcgagacgcaatttccgcccgactcgcaaattgtgccggtcagtcattgccaacaaaatgattaattaattgcattaattttgatcattttgtgtttgcagtgcgctggctcccagaattacctgctcagtgcgacaatgttcccttttcaagaccccgtcgtgctcaaccgaggcatgtccaataattgtattcaatttatcacaattttgtgtttaattctttttatgccttttatcggaagcagctcgcccccccccccccccaccgtcgtttcaaattttttcatagaaaattcgaagaaaaaaaaatttcaaaatttttccagcgattttttcaaaggggtgcaccgttttctaaatgttgttacaaacaagattattatttttttgcaaatatttctcattttgcccatttcgtcagtctgtcagtcacttaatttgcttttttgtcccctgttccagctgggttgagcaactcctacacggacagtctgtacacttacgcgccgaggcccacctgccgtgccgcaggcgactgtcgttcgcggtaggaaacattcattccggttgaactttacatttgcagcacccctcccctccaatattcaaaaatgtaatttttta

SEQ ID NO: 59824 - DNA, 324 bp, Heterodera glycines
atgccgcaggcgctgcattcgctcgacgaggtaagtgcagcctgagggaaggcaaaacgggggaaagcggtaaaatgcaaaagaaaaaacaattttgaattggaataataatgtgaaataagtaatcaatccattggaaggaagggatatacaaaaaaagggattaaaaccgggcatttattaaagcaatttttaagttgcttacagcagcgctttatctggtcaatggctgcctgtcgaatgcgaacctgaaagacggagttcgtgtttatggcatttgattttaggaaaaaacttatttttaaccacccattgttaaataaa

SEQ ID NO: 59825 - DNA, 160 bp, Heterodera glycines
atggccaattacaacgcaaaaggcgtcgacctttcgatggtggccagcggaagtgggacaaagcgacaaaaggagggggaggacgaactgttgatagacttgggaggagcagcggatggcatcgggacgaagggaattgcggacaaaatggcacaaatcg

SEQ ID NO: 59826 - DNA, 1012 bp, Heterodera glycines
atggcctttttgggcggcaaaatgttggtgcaaaagtgcgctagcgggtcacttcgggaggcgaaaatcaaagtgagacggacacaaaggcattggccaaagcgttgttcactattttcaggtggacttcgaccgaagtgcccatttgagcatccgcaaaatcactcagcgccgcctgcgacgcatttgcatcgaatacgaacgcgacaaaacggagcagcgagcgcaggcggaggagcggcgactggaggaaatgatcagcgaggagagggcgcgcagagagcacgaggaacgcgaaagagtgatgcgacgccttttgcgagcggagcgacggcagcgattggtgcggagagaaacgccaaacccacgactacaaaactaaattttaaattaaaaaaatgagtagtaaccccaaaggaacgaatgggccggaaaattgtttaaatcttgacgaattttgttaatttttgaaatttgtcaattcttttggtcctttcctttgaattttaattaacaaattgcagcgagaacagcgcaacttcgagcagattctgcgcagaaaactcaagcggaaattggaccatcggttggagtcgtcgtggagagagcgccgacggcaggcgaaggcactgctgcgatacattgccgaactgtacagggtgagcggactgaacagtggccgacagaccaacattttggttgacccttatgattggagaattcacagaagcctcctttgccttaattgttttgttggcatttttcttttatttaaaagttttaaggcgcagcaacaacacgcggtcgagtccaaacagtcaatccatgaattggcatcggaatacgcgcgcgaccgtggactgcccgaggaggaggagctgagacaacgcattttgcaaaagcgggagcagaaaatgcggacacgggttggatcgaacgaatatgattaattagcaataattgccttagtgaatgctttaaacgagagaggattttaaatggaagtattaaa

SEQ ID NO: 59827 - DNA, 851 bp, Heterodera glycines
atgaaaaaagtgagtgggacgaacagaaaacgggcacgaaggaaaagccgaaaaaacacaatttaatgaacaacaacgcgtagccagggggctgacattaggggcctctaatttaccatatttttgaaaatggcaaaacgtagctttttgggcggtgaaaacggtacaaatccctgcaaaatccatttaattcgggatatctgaaaaaataaaatacacccgacacccctaaaaatcgaatttttgaattcaccccccccccccgaagccaagagttttctgactacgcccttgtaaacatttggaaagtcagaattcgtctttaagttgtactctttcaatttcatgcataaaattggagcagtacaaaaatgggaagaccaatgccaaatagcaaaacaatttgctaaaaatagtttaagattgggacttaattggtcacaagtattaaaatagtgctgttaattatgcaccatggcttttttcgcctttgctcgttcattttgacccaatttccttccctttgcaggtcatttcgctgctgaatggcccttctttccgtgccattggtttcgccgaccctttgacagtcaaagcggacgaggccaaattggactttcccacccgcgtggattgggaccaattcttcacttcagccgccggcaaatgcccaatggacgaaagggagccgggagaaaggccggacaccgtctacgtggggggactgccgttcgactggttccaagtcggtgcgaatggcaaataaaagtttcaattcaaaaaacttttgtactttatttgggttcaaaaaacccaaaagaaacttataaattttatgggaatacaataaa

SEQ ID NO: 59828 - DNA, 93 bp, Heterodera glycines
gaggggagaaatgtcgcacaaccgaagaaaagttgacattataagtaatcggaggatcgagaaaacgcgtgctttcatattcctttttcttaa

SEQ ID NO: 59829 - DNA, 1626 bp, Heterodera glycines
atggaaaatgagatggcagcggcttcatcctcagcagcaaatgccaccaacactaatgatcagctgaaaagcaatgaaacaaaaggaaacgaaagccaaacaaagagaaatgtgatggcaccgttggcactgaccggcggcactccgagcggtggcggcggaaaatgcgcgtgcatttcgagactgttgcagcaaatttgtgcactgataaagcaccgaccgaatgcattgggtgccgttttaaaatgccatttccatttgattgtttttgtcttttacagatgatgatttgccctccgttagtgtcgtcggtccgtttgagcagcgttggtccacgctgttccgcgagttcgttctcgacccggccaattgttcatgggaaaaatgtgtggcgcacagcgacgacatgctttggtatgtgccgattgtgcgaatggccaacggcggtgcttgtgccgtcggctcggaggtgggcaaaagacagtttttatagactttttttagttttttcttgctgaataaatcgagaatgagcctttgtttaaataattcatgtttaacttactgaaaaaacagttaattgtcttcctgtaatgaacttaaagtaaatttttggggtttgggaggaggagtgttcggtgataccaataggcaggccggggaaaatttttgggatcatatgtattgagtatgaaaaagacttttcctcgtacttacttgttgagtatcttcgatccatttcattgtcagatcagtcatttgcaagtgttccgtcgacagagcaaaaacaaaccgatgcccggagaccaaaatgtgaattggcaggagaccgtttgtctaaatttgatccttcagcaggtgcttcttccccaaattcgtaattttcaatttttacatttatttagttggattattttgtcactgttgcggtgtgtacaaaaaattcgccgacaaatttgcaaatccatcgcaaaacttgtcaagtttgtcgcaactttgcacataagccgtttctcttttcaaatgctcccattttcagagggtttacccttcgccgagtcgtcgtcgaatggacgcaaaaggcgaatgtgaggaggtcacttacccgaagatttttttccccatcgacagttttgacgaggtattttgccgaataaaaaggccaagcaaacagccacaaaataaaaaatgggagaaaattggcgggtttaaaaaaaccgtatgattatatttacgtttttttcatttttgacagtaaagtaaaatttggtagcctacaaattcgacagatggcgtgcgattttaaaacttttttcgtttcggggtacacgccccctggctaataagatttttggagtgtgaccaacaaccgccgcttccaaggtgttcaccgacatggtcgtgtccgagggcgaatgcgtctgcgttgagttggtcgtccgggaccgttaccgaaacgcagaggccgtcattttccttggctccattcgtttcgatgtgctcaaaaagctctatgattcgcgggtattttttttatttgttagtgtaattttttcatttttttacagcaaacttcctcttccggcgcttggaattgggcccaacgctttatcggctcgtcaatga

SEQ ID NO: 59830 - DNA, 1346 bp, Heterodera glycines
atgaaaatcagtgccttttatttgcatggaatcgaactcgatggacaaaaaagctatggacagaatggcacagagcagaacaaagtggcggagaagaacagccaaccgacgctgaagcagtacagccgggtaaaggaaggacgacacttcggtgtcttcaatctctctcacttttcagctcgtctccgatttgctgttcaatgtgccgttgtttcggatggcccgactccgtcgccgctgtgccgtgcccacctttctgtactttaacgactatttcaataagtgccaattcgagccgtggactccgttccgaggcgcaactcatggtgatgccacccggcacacttcccttttcacaatgtcgcctctttgtcaggcaatgagtacccctacctcaacggtctcttccccgtgggcgaattccaattcaccgaggcggaccgacaacaccgtgccactttggtccaaatgttgtcctctttcattcgcaatgggtgcgtcaaaaggggaaacgtttttcatcaatggcaatctttgggggtttttatttaaccgaaactgctaagcatatcaaatcctttatatccattgccattcaacagaatgccgagcctatcactccctggcgactactttttgtggccatcaaacgaacgaagcgatgaaggaaaagagaaagcgctgcaatttgtgcggattggaaatggaacggcggaaattgcctttgcggatgccgtggaacaaagcggcacattttgggaggaattcagtcgcgaatttggtttcgatttaatactgggaattacgtacgaatgtgacgaggaaacaaaggaataacgaaatgaaaagatttccactttgatgcttaaattgtttaaaaagctttaaaattgtaggcaaaagaggtagtgatacaaattcgttctttcaataaaatttaaacatatgatttttatcaaaaattttagttgcgcaaaaagagtagggaatccataatgatgtctggatgcattgcataagacagaattaacgccacaaaatttatttcataataaatcatcatcaaacaatatgtcggattaaaagaagaaaagcgatcaattgaccaatcaaaaggaagcaattataatttatttctgataaaagcaggacaaatattcggaaaacaacgaacattaatagtttacggggaaatgtttgatgatgatcagagtcgacgatggtttgtatttgcagacgacaaactgaaaaagacgggcattcccaacccaaactcaccactcatgttcaaatccttggaaaaaccgaccaacaaaagggcagccagaacaaaccaaaaactgtga

SEQ ID NO: 59831 - DNA, 1649 bp, Heterodera glycines
  unsure (1)..(1649): unsure at all n locations
atggctgttgacgtaaattcggctctgaccaaggcttacgacgagttaaggagcattgacatgaacatatcaatgctttccggagtttcagaaaggtaaaaaacacttcgctagtttttttcatattatggcttttaagatttaaccggaaaagaagcgcaccaacaaatgattctttctctactccctttgatcggtaagaagggacatcaaaagacacttacctagtattgatattttcaggcgtgtgcaggagggtgggccgaaaaatattttatcggccggaagcaggtttaattanacagtanaaatttttggatgactagttaagcgaaaacaattacggtgtagcgaagtggcaattttcttaagaaatcatgcttttatgtgcataatatcgactttcagcgatcgcaatgcgaagcgtgggcgttacgccgcggacgagggtccgcctggtgattattccccgccctcttcagcgcgtactcaccgcactttgcaatctagtgtcgtgatgcccaccattgagaccaaatcgcgtacggcggtaatcaacgagatgaagaagaacgagaacaaagaagaccaagtgcggtgagttgctggaaatgtgccaaagattttttgacacaatgctttaaaagtgttcgcaaacgcccttattgtttagaaaccgacgtcttttcggtaatcttttggttgccacgttgcgtaaatttcaaaacgaggaaaagacggttgggagcaaaggacaagtgcaggtttaatgggaagagttgtatttgcatcaaaaagaaaataacgcacagattgacaagcaacgcgaagttgagcgtcgtttagaggagacggagaaggaaaacagaaaccgaatgatgcgggagagagaggcactgatggcgaagaagcgcgagaaggaaatggaaattcaatccctccggcgtcaaaaggccattgagcaatcggtgggttggaaagatcgtttttgagtgaggaattaaccaaattttgcctctctaaggccgaagagaaaacgaaacatttccgtcgccttcagtgcttcatccaaactcagactaagcccccgctgttcttcctcccctccaaacacacactccgaactttggaactcctcaaagagtcatcaaagaaaattgaaagtgagttttagggatttgaatatttattgtattggctgaacactttcttctgttattccattgtcttgtctctgtctctgtttagcactcattgagttacgacgtgatgaaatgactcgcgaattgcgtcggctcgacacgtacaccaccgccagctttggcgggacaattggtcaggctaagaataatgtggcggatgagtcggacgaccaagacgaggaggagacaaatgttcgcggcggactgaagtcggcgattgtggtgaaaatggaaggaatgactggcgaaacagttgctgaagcggaagaggagaaaagggacgaggaggagggcgaagaagaaacgggacagaaagacggagagggggaggatgaagcagagcccaaagatggagaggagggggaagaagagacggggcccaaagagggcgaggaacaggccgaacagcaacaaaatggccgagcagactcagaagggccggactaa

SEQ ID NO: 59832 - DNA, 1178 bp, Heterodera glycines
tgccttcggttggtctccgccacactttgcccatttgcctctgatcactttggacggcaaacgcaaattgtccaaacgctttgaagctggttacgcggttggtcctttaaagaaaatagttcaaacagtttcggtctcaggatttttacctgaaaaatgggcatttacccattgctgttttgaactttctcttgcgcaacggaagcggaatcagagaccatcagccacaaacagtttactcatgtgtgaagatagcattttaatttttggaattgaaattaatttattacagtggaagaattgatcgaacgattcgatgagcgattgatcactcgagggagtttcacggtttgagaattgtatttatttgtcgtaatttattcggtttttcagatggacacaaacgaactgaacaattacggaaagctgggcatgtttttatagtaaaagaaaccaaacgagagaaatggaaaatgttttcagcgtttaacagaccaatgacaaggaccttttgccggtgatcaagtcggtattcgacaatttgccaaatgtgtgtattcaacttgatttttgaccattatttttattattaaacatttaccaggaacttcgttgctccatcgaccattctttgctttccgagtcttatctttgtcgtgttctcacctttctcaagttgaaagaagaagcattttgtcatttgggcgaattatcaaccggcgattttcgtttcttcttttatcggcctcgaagtgctcaaaaactgctcgaagtcgtcgtgaaaggggaggcggatcgtgaacaatgcgtcagattggttcgtatttatattggaggagtatatgattttcactatttaccaaattagttttcattttgttttttgcgtgattatttagattacggcactttgccaatggttcctttcgtcggacactgcgcacacttttgacaatttcaaattgttggccacagatttggctatcccttatcagctgctggcaaaaatattccgtctgtcaatgattgacaatgtgcggggtcctccaatcaaagaactgattgaattcttcggcgttgcggaatgctacgctcggctgaacgcaatgggtcaaatgttcgaagacggagcgaaagatgaagaaacggcaccaaagacgacagttacttccctttga

SEQ ID NO: 59833 - DNA, 1011 bp, Heterodera glycines
gtctttgtagcgaaatcggaaggttcggagaaatttccttgttttaatttttgcttcatttaagggatgttttgctggagggcggaaattctgttgattcgatgatcggttggcattggcactcttccccccccttttccccattcccaatgtgccatttcagccagtttgctgtgcattggcgtcgtcaatccgcagtcgtcgggcctcggcggtggcttcataatgacattgtacaacaccagcacgcaggcaaagcgttcactcatttgattgccaattgcttttaagcctttcagaggtgcacgacaattgacgcgcgagagactgcgccgctgggcaccaattcgacgatgtacgttggcacgccacgcgactcggtcatcggatacaggtcgaaagggcacaaaaacatttgtgaaattatttaatttatttttcattttcatttaggtccatcgctgtgcccggggaattgcacggcttttggaccgctttcacaaagttcggcagcggccgcgtcacttggaaacggctgttcgaaccggcaattaaattggcccgcttcggatttcccgtccgctgcaatctctgccaatggcattcattttgttccgctttaggtctcctcaaatttggcaatggttcttcagcagaaagaggacgacatcgaagaggaccaaaatttgaagtgggaaacggacacactgagaatattatttggacttaattataaataataacaatacttaattgtccattttcaattggatttaggcgcatttttgtggacaaaaaaacggggagagtcttcgaagagggagacattatgacgagggaacggctggcggaactcgtaaaaaacgcttccgagaaagtttcttgagtttgcctattcatttcccccaaatcgcagttggacgaattggccgtcgcaccgaatcccatcgaattgttttataaaggcacaaaaataaatgaaagaattaattgtttatttgtcaaaattca

SEQ ID NO: 59834 - DNA, 690 bp, Heterodera glycines
tgattagaagaggtacaaaagtgattagaagtggtacaacagtgattagaagaggttcaacagtgattagaagtggtacaacagtgattagaagagtgattagaagaggttcaacagtgattagaagaggtacaaaagtgattagaagaggtgcaacagtgattgaagaggtgcaacagtgattagaagaggtacaaaagtgattagaagaggtgcaacagtgattgaagaggtgcaacagtgattagaagaggtacaaaagtgattagaagaggtccaacagtgattagaagaggtgcaacagtgattaaaagaggtacaaccgcgattagaagaggttcaacagtgattaaaagaggtacaaaagcgattagaagaggtacaaaagtgaattaaaaaaggtacaacagtgattagaagtggtacaaaaggattagaagaggttcaacagtgatcagaagaggtacaacagtgattagaagaggtacaacagtgattaaaagacgtcaaaagtgattaaaagaggtacaaaagtgaattaaaaaaggtacaacagtgatcagaagaggtacaacagtgattagaagaggtacaacagtgattaaaaaacgtcaaaagtgattaaaagaggtacaaaagtgaattaaaaaaggtacaacagtgatcagaagaggtacaacagcgattaaa

SEQ ID NO: 59835 - DNA, 1134 bp, Heterodera glycines
agtccgtatgaggaaatcgaccaggacaaggctggagtgtcgcctgaagaagtgaattgttgttgctcatctgtagcaattggataatgttttcttttccatttatattttttaagcttcgggctgcctttttccgttgcggtggagtcaacgcacactcatggcgtattttggttgtggcggcggagggcgacaacgagacgaccaaattcattggcaaactgttggatttcctcacggcagaagtactcgagatttgcattctttttaatcggattaacgaccacaaatttcagggaacttctgctcctccgacgaattgtccaccggctgctgcgccgcccaattctcagttggccaacccccctttgcaacatcaagccgggacttctcaggtttcttatgatggagcattagtttgctctcgtgcttgctcttttttagcgaaatcattttttgttacacttttaggcctcacaatttccattctccgccgccatccattctcagtcgggcctcacgtgtcgtcaggttgtttttgtgactaaaactttggtcgttgcaaaatttaagtagtcttttattcaggaggttgttggaggtatcgctggcccggaaactcccccggagcacatttacgacactatttcgtcatcctcgtccgccgatgattcccattcgcagcataagaaggtttaaatgggaatttttttcagcaaatgcatgcttatatttagttgagcattcccccgggtcacatttaccatactgtcatgtcgacctcgtccgatggttcgaagcgctcttctgtcttttacgacgttcctccgactcctccaccaccggtgctgcaacatacggttttgttcagggttaatttaggttcaaaatgtgcaatttactcgcttttctcgatttcttcaggggggggagaactttttggattcattttttgaaaaggtcgcacctttttaccctactaccccaaacagcaaaatatgtgatgagagacgtttttttgtggttttgacaatagacaatcaaattttatttgcagcacagaggcgaaaagaaccgaaagaagaacgaaacgccttccccggcctcgaaatgctcggacgcgaaaaaaaggtc

SEQ ID NO: 59836 - DNA, 170 bp, Heterodera glycines
atgtccgtccgtgtcccttttttgcttcttccgctgcttttcctttgtcccctccttctccccgtttctgtccgtgccgttcagtccgttttttcgtgtccgctcagtgccgccagcgtcgccggcgttcccggcactctcccggcctttgccggtgctttgggcgaagt

SEQ ID NO: 59837 - DNA, 375 bp, Heterodera glycines
atgtgcaaacggatgtacgaaatggaagtccgtgcccacatggattcggtggcggtgcgtgcctcccccgcggctgttactttgctgaccaaagtcaacgccaaactcgcggaacaacagcagggaaaggtcggtccgaacaaattcatacacttccaaattctaaaaatcaaacagaaccaaccaaatgaggaaaatgaccgtccggcattgcgcgaatacccaaactattgggaagagaaacggattgaccgttcagtctattggtggttcagaccgatgaagagcaccagcggaacggacgcgataaacatgacggaattgtcggacgatttgcgcgaagcggcggaattgaagcggaaattttcggaaaag

SEQ ID NO: 59838 - DNA, 2491 bp, Heterodera glycines; identical to SEQ ID NO: 5960

SEQ ID NO: 59839 - DNA, 249 bp, Heterodera glycines
atggagaaacaatttcattttgattattttcgatatcagatccggtgagtttattatatttttccttacagtactgttgagaaaacttttatgagattttatatgacagaggataataaccacggttacagttcaaagctctcgattaagattatattcgttttgggggtacttgagtgaaattttatttggttttgatggggattcatttttaaaaatgcacgaatatatggcattttcagaaataaa

SEQ ID NO: 59840 - DNA, 249 bp, Heterodera glycines
atggagaaacaatttcattttgattattttcgatatcagatccggtgagtttattatatttttccttacagtactgttgagaaaacttttatgagattttatatgacagaggataataaccacggttacagttcaaagctctcgattaagattaaattcgttttgggggtacttgagtgaaattttattgggttttgatggggattcatttttaaaaatgcacgaatatatggcattttcagaaataaa

SEQ ID NO: 59841 - DNA, 530 bp, Heterodera glycines
atgatttcgtcggataatggtgatgggttaatgtgcaaatggaaccgaatagttgcagccaaaagaaagggtgagcaagtaaggccaaaggacacacgagtaaatcggaacatttgaagattaattgaagagggaggtaattggatatttttgagccatagaaaacgggtacaatcacgatgattagggtgtactaaaacttgaagaaaagctttttctatgtcgcatgtaattacaaatttaggaattcgaaaacgcaataagaggcccacgaggtcgggaataagaatggggcctgggtacagacagtcattgagtgaaggctctttaccaacatgggccgaaccgtcatatacaattctgacttttccttttatttcattaattacaggatggtgggctagataatgaagaggaggtgaaaattttgaagaaatagggacgggttcaatgattcccaatgtcttttgttcttgaataatgtcattatattttttaagaagtgttggattttttgaaagggtattaaa

SEQ ID NO: 59842 - DNA, 775 bp, Heterodera glycines
atgtgtgtattcaatgtagtccaaaaccgttggccaaaaattggcgaatttgttcttgtataccaggaaaatgcgccccgttcaatttggctaacagccactattttaaacgtattttataatgaactcaatttccccaattccgccaaagtaaaaactattaatggccatacaacaattcgctccgttcatcatttgtatccacttgaaactcaagaagaattagcttcaaaaaccccaaaaatttcatgggccccttatcctcccaattaccaacctcccgttattgaaaggaattttcccagtaaggtacacattaagcagaaccgtagatggaattgggccgataaaccaccaacaaacacagccctttcccagctctaactacaagacaaatcccacataacattacagtaataattttttcccgtcgcgcccggaggtgctgcgctattcggttttcccatccccatcgtactctcccctcctgtgcattgcgctgtttcgttgtgctgcgctattcggttttcccatccccatcgtactctcccctcctgtgcattgcgctgtttcgttttcccatccccactagccatcgtagccttccttcctgtgcattgttttaaacggatatcagccaatttaatctaacatttatattaaagcgtctccgcaaaattcaatttttgctagagagccccgcccttacccaactgcttatatatccaggcatcattgtatttttcactcaattatctgctcatttacttaagaa

SEQ ID NO: 59843 - DNA, 1660 bp, Heterodera glycines
  unsure (1)..(1660): unsure at all n locations
ggatccgcttcatgtcattatattttctgattaatttgatccaaaatggcagttttttgaaaatntattttcgagggcttttccagatcaatttggaaattttaagcatcatatgaaagcgccttcaacgtactctctctctatttattgcttcatctctttttttaagatggtggctggcagggatggcacggaattccgatttccgacatttttggggtcggaattccgatttccgaaaaaattttagtcgtcggaattccgccttccgaaatttttgatgaaaagtcggaaattttcggaaattttttttaaattttttttcaaaaaattaataattttggtataatttctgttaataaattgaactgaaatttttaaaaatttctcggcgacgcctatcggcaccgccggacactaaaaatacttattttcttgaaaatttgctcaaaagagcaaaattttgtcattttggacaaattctgttaaaaaatcgtattaaaaattacaaaattttcccggcagcgcctgtcggcaccgccggaccctcctccatgttcccaaaaaatttttgaaaaaagcgcgccgtaaaaaacgtgtaaattagtcactccttttcccaaaaatgttctaaaataatgcaaaatgacataaaaaaagattttgataaaatcattgaataatttttcaagcaaaatattcaaataaccaaaaacctttttgaaacaccttttacttggtaataattaaaaaatttagcctattaaaatatttagaaaattttttattatattttttattttttgaaaaatttccgatttccgacgtttttggggtcgaaattccgatttccgaaaattttttgatccccggaattccgatttgcgaaaatttttggggcctcggaatgccatccctggtggctggggaagctccaatattttcataataattaaaaaaatttattttgctaattttcaggtggttatacacttggccaatggttataagactgccgatttcacctggttctttgatggactgaagaaagctggtggcagttttgatgttgttggcatctcacattatccgacctcgtcaaattggcaaaccttaaatggacaggcagaaacaacgctgaaaactatgatcagtcggtacggtagacgactgttttgtagtttaaaaaattctgagatttattggaggttcggttcaaatttttgtaatctaggatatttaaagtttgctctttaaaaatgggtaattcttaaaagagaaattcaaaactcccacagctttaaaaattttaacataaaattaggcaatttttcaaattttcataacaaattatcaaaaatttatgtaattttcagcggccctttttggtaggcctcaatatagccactttctaaaagccgaactttgccattttaacagatatggcaaaaaggtggtggtggccgagattggcttatcatggaacgagccaagtgccagcaaatccatgcttgacgacatgttcaagcgggtgaaagcattggggaacaacggcattggcattttctattgggagccgcaggcgtcgccaggctggaaccattaccagtggggcgcgttggacaattcgggcaaatttacggccgcaatggaatcattc

SEQ ID NO: 59844 - DNA, 775 bp, Heterodera glycines
actcaatccaccaacatttcaatcactggggactcaatccccttacattcaaatcactgggactcaatccaccaacattccgatcaacgggacttaatccaccagcatttcaatcagtgggactcaacccaccaacattccaatcaacgggactcaatccaccagcatttcaatcaacgggactcaatccaccagcattcaatcactgggactcaattcttctgcatttcaattactgggactcaattctcctgcgtttcaatcactgggactcaaccctcaagcatttcaatcgcagggactcaatccaccaacattccgatcaacgggactcaatccaccagcatttcaatcactgggactcaacccaccaacattccaatcaacgggactcaatccaccagcattcaatcactgggactcaatccaccagcatttcaatcactgggactcaatccaccaacattccaatcaacgggactcaatccaccagcattcaatcactgggactcaattctcctgcgtttcaatcactgggactcaacccaccaacattccaatcaacgggactcaatccaccagcatttcaatcactgggactcaatccaccaacattccaatcactgggactcaatccaccagcatttcaatcagtgggactcaacccaccaacattccaatcaacgggactcaatccaccagcatttcaatcactgggactcaacccaccaacattccaatcactgggactcaatccaccatcatttaatcactg

SEQ ID NO: 59845 - DNA, 812 bp, Heterodera glycines
cattcaaacactgggactcaacccaccaacatttcaatcactgggactcaacccaacagcatttcaaacactgggactcaacccaccagcattccaatcactgggactcaacccaacagcatttcaatcactgggactcaacccaccaacatttcaatcactgggactcaacccaccaacatttcaatcactgggactcaacccaacagcatttcaatcactgggactcaacccaccaacatttcaatcactgggactcaagccaccaacatttcaatcactgggactcaacccaacagcatttcaatcactgggactcaacccaacagcatttcaatcactgggactcaatagctttttacactaaactgaccaaacaaaaaagcaaaacaaacatttcattttaaaaatcattattcaacaatgtgctatctctaaaacatgaaagacacagtagtgtgcatctcaaaccaatacattttttaaaaaacttgacaaatttcagttctgtgtctcatggatgagaggcacaatagtgtacatctcaaacaatatattttaaaaacttggacaaaatttcacacttctgtgggtttacaaaacttttagtgtacatcgcaaaacaattcactatcaaagaattcttttgacaaaagttcacactctgtgggtttctaaaacttggtaggcacattagtgtggatctcaaaacaattctaataattacatataacaggtaatgtgattgactaacataagccacacaccacactaatgaattttctaaccaataataacaaataattcattta

SEQ ID NO: 59846 - DNA, 341 bp, Heterodera glycines
atgaattgtgctctcgcttcatcgttttcgccattcgggaaacatttcgctgcagtcgttgcggacaagaaaggaatgagggctgatttgtacgtcaatggcgaagaattggtagaacgtcttggttcatgcgttaagaacacacagatcgaacttcaaaatttttttgtgaaagttgaaggtaattgtaattgtgtcggcattacctttggttttaatttgagttttcaagtttttttattatcatagatgaatgccttcagctacattgcgagatttcatccgttaaaattgatgctgggcgcgttaatcttgaggcgattttgacgacaccaattaaa

SEQ ID NO: 59847 - DNA, 376 bp, Heterodera glycines
atggtaaaatggggtccggcggttccgttagggtcgccgggaaaattttttgagaaattttattcaatttgtcaaggaaattgctttgccgcagacatctctcacagcccccgagggggaattgccaggatttatatactggcacaatgggaatggactttggatatgatgaggggtaatgacggcataaacacaaaggaaataagagataaatggatgacatatgcaagaggtgaatgggataaagaagtcatgataacattggaaatgagagggatatgatttggttgggatgagacgaacggacagacatgtttatgacgggattgggtcgggataaagtagggcaacttacattatatgtacacaaaataaa

SEQ ID NO: 59848 - DNA, 1131 bp, Heterodera glycines
atggaaaattacttaattcctggaatcccttttcttcttgacggccaaatcgccataaaattcttcactttgcgatatttcactagcaatcatcatccagcaccgtttgagatggatttcgatgactggggagtgagacacatgcactcgtccgagcaagggtatttcgccttgcgtgcggttgagttcggcgaccaacaacagttcgaatatgttcttaatttggcttcggccagagatgtgaagaaccgaggaaaaagggtccgcggctataattatgggcattggcagacggtcaagagagaacacatgctgcgcgtggtcttggaaaaatttcggcagaatgaaccgctgtgtgaagccttgctccggacgggctttgtccgactcgtggaagccagcactgaccgttattgggccgccggattgctgataactgatgaagctatacgcagttcaaataattggatgggtctgaatgagcttggctgggtgttgatgcacgtcagagaccaacttcgaccattgccgcaacaagtccacctgatccacaagcactacatcgtatgccaggcggcagcgcctgactacgttgtggcactcgcagctgagccacatgttcagccgtatgctgttcggattaacaacgaaactgtcaatgctgcccgacaactgcaaattggcgatactttggtgatagaaagtgtggagtggagagaaggttttgagcagcttggggccgaaggaatgaacgacagaccgtgttgggtacaccaggccagactcaactggcaagctacggcttcggccgtgtacagtgtgtgtatgcaccagtgggttcctgccagagccaagatcttgcgttgcgtccgcggagggccaagacacaaccgagctgtctgttccatacgcatccaattagacggcattgaatttgtagtgacacagcgaaacgtcaatggcaacatcggcttggcacgacagggccaatggattgatgtttgggcgattgtggtggcagagcattggcacgcagattggggattcattttgcccccggacgctgtgtttagagggagacaccagattgtgtcggatgggcgtgtcagaatcccggtgtttgtggggtga

SEQ ID NO: 59849 - DNA, 854 bp, Heterodera glycines
agcaagaatattgctatcttgcctaggcgggattctgacttagaggcgttcagtcataatccctcagatggtagcttcgcaccattggtctatcgaccaagcacatgaaccaaatgtctgaacctgcggttcctctcgtactaagcaggattactatcatagcaacaggtctttagtagggtaaaactaacctgtctcacgacggtctaaacccagctcacgttccctattggtgggtgaacaatccaacgcttggcgaattctgcttcgcaatgataggaagagccgacatcgaaggatcaaaaagcgacgtcgctatggacgcttggccgccacaagccagttatccctgtggtaacttttctgacacctcttgctggaaactttacacattcaaaaggatcgataagccacgctttcgcggtccgtattcgtactgaaaatcaggatcaagtaagcatttgcctttttgctctacgagaggtttccgtcctctctgagctcgccttaggacacctgcgttacgctttgacagatgtaccgccccagtcaaactccccgcctgacactgtcatcggcgcgggtcgccgggccaccgggtggcccgacttaacaccaaaatggacaccctttcgggcgcactcccgttttaccgattaagtaaggaatcgatgaaagtagtggtatttcactggcgccttgcggctcccacttatgctacacctctcatgattcttcacaaagtcagactagagtcaagctcaacagggtcttctttccccgctaaatttgccaagcccgttcccttggctgtggtttcgctagatagtagatagggacagtgggaatctcgt

SEQ ID NO: 59850 - DNA, 219 bp, Heterodera glycines
atggctgagcaaaattcttttaattctcaaaagggcgaaaatgtggagggaccaattggttcggatttcgatccaattttgtttacccctgaggagaaccaaaatctgaacaatgtactgactcgaatgcgaacattcgaatccgctatttgccgtcaatttcgtaaattggagcgagaatttgcagagttgaaaattgtggctcacccaattagatga

SEQ ID NO: 59851 - DNA, 409 bp, Heterodera glycines
atggaatacttttatgaagcgatagaacagaagctgctggccaaagtttgggcttttcatagttcctataactttgcgcttaagggaatggaaacgttggcccttcgcgacgtaatttgtaatgtcagtgagacacttttccaaaattaatcgcttaatcgaactgcttcagctcctcgattccatttcacccgcaaatggtcattccgtcacgagaatggacttgaagaggttggcctttccttttgggtgttgatccgatcacatcgatcatttgggactttttgtttgtctgccattttaggtccgggctggcccatcgcttcttcaacacttttgtcaattggataaaatacgtggatcaagaatcgtcggacggggaaagagcgtctgtgaaggtgccaattag

SEQ ID NO: 59852 - DNA, 539 bp, Heterodera glycines
atgtttcctcctccaatgactttgccaaggcatggctccgtgtgtgaaatgtttgacggtccaatcgaatgccatcccagtgacacagcagcagcaaaaggaggaggaaaagccgatcagaagcagagcaattcgggcgaacaaatggcagacggaggaggaaaagcggtggcgaaagacggcgtcagtgagcagaatgagcaatttgtgagaaggggaaaagcaaatgatcgacaaaagtcaattaggcacaatttgcaagggaaaggcaacggcgaaatgcaattcaaaattatcgcttaattacccccacaatcaggcggaacgagtgcaatcgctgctttgaacatgtcgaccgtgccggtccgcctcgtttctcctcagttccgttgccgaacaccattcttaaatgtgagactaattgaacacggggcgaaaaatggacaaatttaaattgggccaattaattgtataattattattaattacttttattttagcgctttccgaaatggaagaacgaaattgcacttggatga

SEQ ID NO: 59853 - DNA, 582 bp, Heterodera glycines
atggaagaagaatatgtgccagggaaagtggtcggctacatagaagacccgcgagaggaaaaggaaggggaatgggacatggccaaagcgttgcagaaccgttcaaaagaagacgaagtgcgaataaaaaagagagagcaaagagaagaggggtggaaagagctaataagcggagaaagaaaagcgaagggaagagaaagaccgaaattggtggaaaaattcgtgaaaaatgtgttgggcccagctgaaaacgacgtcagccgaaatcccggccccccccccgaaggtagccgcagaggcccgacaccgattccttgttggaaccgctacaaaaaaaggcctcgcttcgtcagtccaattcgaaacatcagtccggtccgaacacgccaaagcacagttggaacgcagacgacaaacgcatggcccagctgcataggagacgtggtggaacaaatgcaactgatgaagacgaagctggacgaactgatcgccgctctcaagaaaaaggaggaagaaaaaaacaatggaaacaacgagcaaattggcgagaaggaagaacaacagaaagaaaatggaaaatag

SEQ ID NO: 59854 - DNA, 2085 bp, Heterodera glycines
atgagcgcggaccaaattaagcaactcctcgaggccatgcgtgtgcaatcggatgcaattcaacagctaatgggccaagcaccacaaaacgccacgagtcttaaccacgcaaatttggcgagttccatcgacggccgaatttcaaaattcaattatgacgccgaaaccgggaacactttcgaacagtggttcaaaaggtttggagttctgattgaagaggatggtaaggacctccccgagtcgaccaaagtcagactcctccttggcaaactcggcgacgaggagtacggcaaataccgcgacagcatcagtccgacccagcccgacaaagtcaattgggtggactcgatcaccaagctcaaaggattatatgccgaaacgcgatcattattcgtccggcgctacgaatgtttcaaaattcgtcagcagccaagccaggacatctcatcgctggtcgcacacatcaacgcgtcctgtgaaaacgccaatttgagcccgaccaaggaacagcttaagtgcataattttggtgattgcacttaacgacgagcatcacgacctgaggcaaaagtgtctcaaaatgctggaggacgcagaaaagaccggcacagacatcactctccaaaaggtggaagaggaattgaaggcgattcaaatcgtcaaggaaagtgccctttctctgcttactcaaccggtctcaaccagcgccatccaattgcgacctcagcaatggcgagagaccagcaaaggcaaacacaaggcaaaaccggcacccaaatggccacatcatgaaccggcacccaaatcgccacatcatgcgccttcgcctaagcaaaaatcggacgacaaagcaaaccgaggccatccatcgcatccatgcgcatcatgcggaagcaacgatcactggcgatcggactgcaaatttgccaacgcattttgcaacaaatgcaaccggcaaggccacattgcgattgtctgccgtcagcgctcgtcgaacacggcacacaaatctcagaaccgatcatttcacacggtcgtggtcaagtcacattgtatggtgattggcacaacccaaggccgatggtggaagatcccggtcatgatcaatggcataaatttgaagatgaatggagacagtggagcccaagcaacagtcatcagcttcaaaacgtggatcaaattgggccaacccgaactctctccaacggacatcgagacccgcaactgcaatgacaccgcattttcaaccgaaggaaaatttcattgcaccgtcagttgtttcgatcggccatccaagacactgatcgcttatgtcagcagtgacttaaagcatgatttgttcggccttccgtggattgaggaatttgagctcatctcaaaagaaattttgtatccacagagcaccaaaggaaagaccaacgcgtcaatcaacgccaatgtcgtaaaggcaccaaacccggcgattggcatcacggacgaatcctcgctcaccgctgtgttgcaaaacgattttgaggaagtttttaagagcggacttggccactgcgcaatcaaggcgcatctgattctgaaaccggacgcccgacccattttctgtaaagctcgaccagtcccccatggtgctatcgaagcagtcgacaccgaactggaccgcctcttgcagatcggcgccatcaaaccggtagaattcagccattgggccgccccgattttggccgtcaaaaagaaaaatggaaagacccgggtgtgcatcgacttttcgaccggattaaacgattcgatcgaattgaatcgccatcctcttccgaggcccgacgtcatttatgcagctttgaatggagcagaatttttctcgaatctcgacctgagagatgcgtacctccaaatggaattggacgaaaaatcgaaaccgctctgcacaatcaacacccaccgcggcctatttcagtgccaacgtctcccatttggcgttaaatcggcaccgtccatttttcagcacctgatggaccaaatctgcgcaggaattccaggggtcttctcttatttggatgattgcctaatcgcctcaaagaccctggaagaccac

SEQ ID NO: 59855 - DNA, 687 bp, Heterodera glycines
atgggagaacccataaaaacaggatcgggatcccgcgaattttctcgggatcctgcgggattaaacacgagaacacgacctcgggatcccacccgattttccaaagtcttcgggacttatgaggtattaatcgaaatttttataccggtggttgccgttttatgcttcttaaaatgatgcagttgaaatcaatgcgattttccaaatttttgttcagccgaaagaaagactgattcctaaggtcgatgagaatagttgtttaatgatgctaaaatagaatattaggtaaaacaatttttaaaaaattattaaaagtagattggcatttgtcgagatggaataatattagttaaaataattttttaaaaataataattattaaaaaatgatttactgccaagagtgtgtccatgtccttcctacccaaatgtttatatacaaatctcatcatattacacatcagcatggatatgagctatcatcatcattagctaatttttacactaataagtgtagggtggaagagaagctcgagagtttccgtctttccgtgtctgatgaaagaaatgtcactaaaatccatccgtacagaaatcacatttttttcattttttggcaaggccaaaacattaattaaacaaacaaaaattgattggagcgaggaattaaatcaatgaaaacattgaa

SEQ ID NO: 59856 - DNA, 892 bp, Heterodera glycines; identical to SEQ ID NO: 29346
  unsure (1)..(892): unsure at all n locations

SEQ ID NO: 59857 - DNA, 519 bp, Heterodera glycines
  unsure (1)..(519): unsure at all n locations
atgaaaaatagtttttatgagcagaaaaagaaagaatttatagaaaaaattgatgaatttaaaagtttatatggccaaggcaaacaaaaagaatttgtgaaggaattgggcatttttaaagagacattccgaagatggaaaancgaattgttgccaaaatataataaaagtaaaataaaaatttattttgatatttaaattatttttttaagaacaaagtaaatattccaatgaggacaaattacaaaagatgaagcaatatttcaaaattaaagaaagaaatccgaaaattaacgacagaaaaattgcaaagaaattgggaattggaaaaacaaccttgaaaaagtggaaaaagaaatttcctcaattttgaccattggatttgagggtgttaatcggctaaagatatttgggaaaccaaaagtttttttttttttaaatgaatttgtataatatttatttcacttttaaaattataaaaaagaatattttttgttcggaaataatgtatttaataaa

SEQ ID NO: 59858 - DNA, 751 bp, Heterodera glycines
atgaatttatggcatataatatttttaatattttgctttatttataaaattgagtcctgcaaaattcgaccaaattttgatgaaatattcggcaaagaatgggacaaaaatgaaaatgaagaaaacagagaagaaatgggaaccgaatcaattgataaaatgagtgaatattccaatcaaaatgttatcaaaagtgatcaaaatagcaaaatggaaccaaatgaccaacaaaaaagcgaaattatccaaaaatttgaagcaattaaagaaaaactgaagcaaaaaggaaaatatcaagggaaaaaaagtgtcaaaattgaggctaaaattggaaaattattaggcgcaaaccgcgacaaaatatataaatggaaaaaagaattaaatttaaatataaagcaaattaaaataatgaaaaatagtttttatgagcagaaaaagaaagaatttatagaaaaaattgatgaatttaaaagtttatatggccaaggcaaacagaaagaatttgtgaaggaattgggcatttctaaagagacattccgaagatggaaaaacgaattgttgccaaaatataataaaagtaaaataaaaatttattttgatatttaaattatttttttaagaacaaagtaaatattccaatgaggacaaattacaaaagatgaagcaatatttcaaaattaaagaaagaaatccgaaaattaacgacagaaaaattgcaaagaaattgggaattggaaaaacaacctga

SEQ ID NO: 59859 - DNA, 1416 bp, Heterodera glycines
ttaatctcggcattggcattccaaccctttgcccttcgtatatcagtgacaagtcaataaaagtgtgcatacacgcagaaaatgggatgcttggcgtggtaaaaaacacgaaaaaaaagatgaaaatcatttatttaaataaaaatgtaaaaatttaaatgcaattttcaaatttgtttcagggtcaatatccgattgcgggcgagcaggacccagattatgtgaatgctggaaaagagtccatcacgttcggatgatttatattaattttttatgtaaattaattaatagttcagatataatcctggtgcttctgtgtttagctcggatgaatcttttgccatgattagggggtcaaaaaaacaaaaatttccataaaaaacgtttgtaaatttagcggccatatcgatttgacaatgcttggtgggctgcaggtgtcaatgagaggggacctggcaaattggatgattccggtgggaaagacaaataaacacagaatgacaaaattatattgtaaatagttcggccttttgaaaattgttgaaaaagttacattttcgattttgatgaaaatttaataattaatcaaaaactaagcaattaaaaaataaattctaaaaaaaaaatttgtttcaagaaatttgtttcataaattttatttattttcatcaaagtcatcttcgaattttttttaaataaattaaaaataaaaagaatgtaaaatatataatttttaagggaaaaatgttgaaaggaatgggaggagcaatggatttagtgagtgcaccaggctcaagagttgtcgttttgatggaggtataaattttaaaaaatgccaacaatttatcaatttatcgcataagaaaattctttttagggggttagtaaacagagtaagaattattgaatggggcctaaatgtcaaggatttatagtctgggattggattaatataatccattattttagcacagcgccaaagatggtaaacacaaaattttggaaaattgcacattaccgttgaccgggaaagaagtggtgtcaagaataatcactgaaatggtatatcaattattaattaggtcgggtcattattaatcattttaaaatcataaaaaatatttaaataaatgaaatgcataaatttggcattaaaatgaataaaaattcagtgcctcataaatttttcttcaaactattatatttttttttggtcaaaaaatattaatgtaaaaactgtacagttaattatgaatgacccaacctaataaaagattaattaacttttaattagaattattttttaatttttaggcagttttcgatgtgtgccgaaaagaaggcttaacattaattgaaatacacgagaattacagcattgaagacattaagaaggcaactggttgcaattttaag

SEQ ID NO: 59860 - DNA, 581 bp, Heterodera glycines
atggaaaacaatcaaataataacgaaacgaaacaacaaaaaactcgaacatgaaggatgcctctatgtcttccatatgttcaatgctgaccgtgacgtaaaattttggcgctgtgaacatcagcgcgatgaattcaaatgccgaggacgaaggtggttggtgtgcattacaccctttacccatcgcggtccccccttaaaaaactgtccggagaggggtggggtgggaaacgaactgctcccagttgggtggatgataaaaatatggggttttgaggtcgctggtcttcaaaattgaaaaactaagttgttttgacttattgtttggttggggttagacagaattggccaaaatttcaattgtttaggtgtacaaggaacaagttgagggagcgcctacgcctatcaatttgaacgttcaatttggcaccaatgcgcgcgagctcatttttgacatggacgattcaatagccgtggtaaaagagaagatccatcgtgcgtggccagtgacgccagtgccggctcaaatgttgctttacttcgcacgtatggttgatttcataaattgcttttaacaataaa

SEQ ID NO: 59861 - DNA, 134 bp, Heterodera glycines
atgggtaaagggtgtaatgcacaccaaccaccttcgtcctcggcatttgaattcatcgcgctgatgttcacagcgccaaaattttacgtcacggtcagcattgaacatatggaagacatagaggcatccttcat

SEQ ID NO: 59862 - DNA, 394 bp, Heterodera glycines
atgaggaaggagaacaacaaaagcagtgccgcctcagcagattctgatgccaatgccaacagtggtggcgatgcttctctcaccgcccccactgaagaggagggcgaagaaatcagtgccaatgagcaacagaaggagcagcgcaagtcgctggacgcactgtacgctgcggcacgcgaggagttcgatttggacatgagccctttggacagtgcgatgaaaacgctgcgggagggccgcgagatacaaaagttgtccgtgctgcgcaacctgtggtcgagctggtggagggcgagccggacgaggcgttacaccgcctgttgcccatgatgcaggcaatgttttggacctgggccgggcggattggactttcagtttgtttccgtatatctaa

SEQ ID NO: 59863 - DNA, 676 bp, Heterodera glycines
acttttttttcaaacataagggaaatgcctattccctttcgagaaggtcctttcttctcggctcgtcgggtgaacatacccgagaatgcagattttcaacgatcgcttttttgagtttggcgacccagaaagagaagaggaggaggagagagttcctatccgacgtgaaccacgcgctcatcgccaaagtgagtcattgagttcatggattgagcggtcttatggaccgcactggtatgagacaacacgggatcgccgtgctgtcgatgaggacctttgcagagtgcttcgtgaaggagccactctaattggcgaacattttggcagagctgtcgatattcatttcgatggactcacctgttatggtccggagggtctctacctttctccgggtttaacagtctttgaccattttgtgcggttgggtctccaagtagacccattaataccgtgcacacaagaatatgtgggcttcagccctcacgagggagggatgttagtcgatctttacccgatcgagcttatcagcatcagacatcgagtcagagctgcttggagagcaccagaggaggatgaacttcatcctcctgcacgttaccgagcccaatcaccggatggacacctggagaaccgtcctcaacgtgtggtccaacgacgtccaatgaaccgatggtga

SEQ ID NO: 59864 - DNA, 161 bp, Heterodera glycines
  unsure (1)..(161): unsure at all n locations
atggtcatagtcaggtgtgttaagtaactaaatttttaattaaaattttaaaaaaaattttcaggattatgacagtgaaggctgcgtgtccccgtccgtgtctcgctgtaacaactgcagcacaacaaaaacaacggcatggcgtcgggatgccaccnggg

SEQ ID NO: 59865 - DNA, 1656 bp, Heterodera glycines
atgcgtcacgcggtcgcccaactgaacggcaaaatggacagattggcacagcaaatggctcgcgttgaagcagctgttgttgttggccggaaaacgaataatggtgccgggatggtggtggtgccaaccgctgaagaggcggaggagagaacggagcagcaacagcaggagacaaaaggcattccaacaaggacaaatggtcaattttccaaacggatgggcgtcaaggaaatgccaacaatgccgacaccgaggtggaagcgccaaaaggacaagcgcaaaaagaaaagtcccgacataatcgagagtctcgacctgagataaagtcttgggttccaatcttgagccgtgccaacttggtttctttagagactcggatggcacccgccgggagtcccacgacaaaacgagcatttttttagtcactagaacttccgaaaatttcgattgaactcaaacttagggcttgataaatgtgtaaataatttcagttacacatcatccgccacgtggaatggcgccgccatcacaacgaacggtgacggtggtgccaaatcgtcgccatcgccgcgagggattacggtaaaggaggaaattgtagtggcatccaacgatggtggcatcatcggtagtaacgaccattactatcaccaacagcagcggcacaacatcagcggtgacaatggcggcggcagcggtggtgccatcaataccgtggcggcgggaacttttgcgtcgtcgactggcaccggcggcaccacaatgccaacaacatcggcaacgacaaccgcggttggcagcaggaagcggaagccggcacggacggccaacaacagcaacaacagtttgccgtggacgacgacggcaacgagtacaacgacgcatggcggctaccgtgttgaagcatcgccgccggcgttatcgacgaccaccgtaaccacgacggatgagctgttgttggccaacctgtttggcattgtgccaactgccgtctcgtcgtcctctgttcatgccgctgctccgtcgacgtgcagcgctgcctcatccgcttcatcctccgccgcttcatcagttgctgctgcgacggcggcatcaacacagcaggcggccgctctctattccattctgttgcagcatcagctgaacaacaacaacgcggcggcgacaccgaccacggaaacgacgacggcaatggacattggtggcattggcacaattgctgctgacggcggcgtcaccggtgtcggtgccgaactgaacggcagcggtgcaacaaattgtgatggtgttagtagcaattcaacagatgccacaacctcgcccaacttgcttagtgctgctgctgctgaatcgcagcacataataactgcaacagcggtggcacaacaaccgttgctgttgaagaatggtagcaatgccaatgatggtggcggcattgttatgattggctgcggcggtgccaacgcgacgagtccacccgacgggggcggcggaatcttttttggcgacgacttccaactgttcaagcacaccaacaacaacaacaataacaacagtatcaagctggacgccagtgatcatcataatgccatggtgatggaggcaagcccgccgggctcacgtgagaatcaacaggtgggaacaaaaaaggaataa

SEQ ID NO: 59866 - DNA, 491 bp, Heterodera glycines
atgaatgggtctgagcacaccgtcggcggcgtcggctacgccggcgaattgcattttgtgcaccgcagcgtgaaatggccgaacattggggaagcgttgaagcagccggacggagtgttggccgtggcggtgtttttcaacgaaaacctcgaggacaacgcgacgctggcgccgctggacgacgctttggcccgcgtcactttccgcggcgccgagtgcccaatgcattcgcttcgcctctcccaactgatgcccgtggagaagagcaaagagttttggctgtacgacggctccgaaacggcggagcctttccgcgaaacggtaggcaaaagcggaaaagtgccaatgaaaatgccaacggatgacaggtcaaatgggtcgtgtgccgatcggcggtgcccatttcgacggcacaattggaaaggctgcgccaactgcgaaagagtcgggcggaggacgaagttgaggaaacaatgcagcccatccgtgcg

SEQ ID NO: 59867 - DNA, 871 bp, Heterodera glycines
atgagttcttcgtcttctgccgccccatcggacccgcagcaaaaaagcatttatgaattttcggccaaagacattgacggcaatgagaccagctttggcaaataccgtggcaaagtgctgttggtggtcaacgtagcgtcgaactgcggcttcaccgactccaactacagtcagctgaagcagttgctggacaaatacaagtcgaagggactcgaaatcgcggccttcccgtgcaaccaattcaacaaccaggttgtattctgactctactgcacttcaggcgtccgataaagctttttttacgagtaatttttgatgaaaataattttaaaaaatttagtttaaaaatttttgattcacagcattatatgaccgcatttcatcaagaatatgatagtatttttattgtgatagagacggaacatgtatttgatactgcaagagtttgaggttattagtatgaaggtgacgtaatccatttttcattgcacgttgccaaatggatgtgaattgaaaacccattcgatatttaactaatttgcactatattaattaatcactgaattaacaaacgattaaagaataagattaaaaaataaattaccaactaattcgattgggtgcctaaagtgcaatagagccgtattgttatatctgtttgaattttacattcttcgtttaggaatcgggctgcgccattgacatcaaagactttgtgaccaaaaagtacaacttcgagccggatctctacgacaaaattgacgtcaacgggcccaatgagcatccgatctacgcctatctcaagagcgtccaaggcggcatcctcggctttgatgcgatcaaatggaactttaccaaggcaacacaataa

SEQ ID NO: 59868 - DNA, 1365 bp, Heterodera glycines
atgccgccccttggacaggtagaacaacttgttcaacccatgttcatcaattcggcacatcagcaaatgccggtattttgatttgtttttaatcggaaacccattctgttttagtcaccattttgtgccgatggcactcacaccattcaatttttgaatgggagtgtctccattgtgggccgcccgctgccgtctgttattcattgcaacgtttcttcaattcaattgattttttcaggccgctttgtctcaccgttgtagcattggaccaccgtccgcaccaacaaacgccagctggctcactcccggtgaccaatgttgtgctgcgcaatggcgacggtcagcgtgtagaagcctcgggttggaagcaacaggccagtgttctggcgtctttgaacatcgggagcacctactggttcaccaactgcactgcgcgggcccgataccagcaactggactgttggtaccgattggcgtcgatggcaaaaatgccattgtcgtccctcacactgccgctccacaggtaagtttttttatacgtttcttataatagaattttgtgttaagccgacggctccgcaaagtggtggactccgccattcaattgcctccattttgggagaacaggtgattttcattgattcaaaaaaaaaaaattaaatatggaaatatttaaggcgccacatgttcagacgggtggaggccgcacggtcaatgatgcgcgtgcccctcccgcagccgacccaattgaggaggacgagaataacaatgtgagaaaatgatttttttttttgtattgtgtttttttttttttttttttgaataaaatttgctcagacaattgatcatcgttttgggatcccggtgcgtcatcagagacgggcagctcaagtggttggttattatgatttgctttttcttgaataatttaaccatgaataaataatttaaaggtgactcgaccaattgaggactgtttcgtcattgagaggacgacgccaatgcgcaacacactccgaaacacgaggggcgaactctgcgaaatccgctttctgcctctggaggatgccgagcgacctgatctccttctggagacgctcatccagcatctgctcgaccgtgtcctggaaggtcaccccccaccgatgctcgttggacttcagcttcacccgccaggcttcgaccgaccgtatgtcatccgactccgcccaccggagcaaaacaacgcagcagcattggcggcggccattgaacgactgaacgaacagtcggcagctggaatcgatcttctcgccggaactactgttgcgaaagtgcttgctgtgtggcccctggagccaattcgtgcggatgcgcagcgcggag

SEQ ID NO: 59869 - DNA, 1000 bp, Heterodera glycines
ctcctccaccgccaatgcgtctctgatcgattttgaacgcattcggatgatcggcacgggctcatttggccaagttttgctggtcaaacacaggcggacgggcaaatattatgccatgaaaatgttggagaagcaaaaagtgctcaaactgaaacaggtggccaaattgaaaatgggagcagaaattccacaataaaaagcattttaaacatttcaaccaaaataaaaatatttcaaaaatacctgtaaaaaatttttcgaaattaatttcattaattggcaaagttttttcttaggtggaacacaccatcagcgaaaagcgcattttacaggccaccgaatttccatttctcgtaaaaatgcactactcattcaaagtaaatgacataaaattttgaacaaataaattaaattgtatcatttaattaattatttcgggaaataaattgtcgctttttaggacaccgccaatttgtacatggttttggagtttgtcagtggtggcgaaatgttctcccacctccgtcgcattggccgcttctccgagtgccattcgcgtttttatgccacccaaattgtgctggccttcgaatatttgcactctttggacgtggtctaccgggacttgaagccggagaatctgctcattgacgtcaatggatatttgaaggtgcggagcattgggttgagaaattggggacaaagacttatgccagagagtgaattttttaatttgaaaatattttatattttcaattataaattaaactgattagcaatcttatatttttcaaataatcagtagctttcgagaaacaaattgctcggaaataagccattaaaatagaattgtgtagtagcaaatgccaagaagcccgcgaaatgactttttaatttcactttttatacaaaaatagaaaaaaacatctgcagtaaaaaaaaaatataaattacgctttattccatttccttgtcaattacttaattgattttacatttt

SEQ ID NO: 59870 - DNA, 891 bp, Heterodera glycines
atgaaggaaatggtgagagacaaaaggagagagaaaggagaaaaggtgagagcgacaaagagaggataagagcgagagagagcgagagaaatagaaagaaaggggaagagagagaaagagagaaaaggagagagataagacacaaggagagagagacagagaaagagagagattgagagagaaaaggagagagataggacacaagcagaagagagagagagagagaggggagaaagaggagaagatagagagagagatagagagagagagagaaagagagagagggggggggggttgtttttttctgtgtgtaactttttattctttagaaatttttattgcttatgtttagggcataaaaaatatggatataaaatggcaaaatatggccataaaatattgacataaactttttggttatttttgacataaaccaaaaagtttaaaaaaatttaaatgtaatcaatattttgacaaattttattaatttttttttggttttagacttggaataaaattttccataatgctgaatttgattcaatgattttttgtcgcctggtgattttgaaaatgggtaaatttgaaaatgttaatagatggattagacaatggaaaatcactaaacaatccaatgggaattaaaataagttgaaaatattttaaatttaaatgatggcatttttgctaccaaatatttttaaaaaatcatttggtggagttttattatgcttaattagaccatatttagcctttttctctctgtaaacatacaacgcatatattacatttaaatatttatgataaggttttttgtcgaccaaatgcttattttgaaaattttcagttggcaaacctgataattagggatgggaatttaagtcaaataaa

SEQ ID NO: 59871 - DNA, 607 bp, Heterodera glycines
atgaatggagaagccaggctaagcaggacaaacgattcgcgtcatcagccaacgaattggaggtggaattttataggctattttgaattaaaagttagtccaatttgtggtgtagtttcttccataatacttgaattaaaccaggcatttaataaccctaattgattatataaaaaaaaattcagaaattgctgaagcaagtgagcgaagaattggagaagcttaagaaattgaacctgcccgaatgaatcgcggccttgcgattgacatcttattgttagggcagaagcgaatatattctttcttttattgttttataataatcgcggaccttcttaccatttaatgggttttaccactgatctgaaattttggcaattgttttgttcttttgctgctataaatgaatgtctttaaattagagatcggtattttgtaaaaagcctgtacctgtacctgtacctgtattccaaaaatggcctgtacctgtattttctgtacaaaaatacaggaaaatacaggtacaggaaaaatacaggccactcgaggcctggatccaggctgtacctgtattttttaatttttttataaaaaacctttttaatta

SEQ ID NO: 59872 - DNA, 908 bp, Heterodera glycines
atggcaatttttattaccagtgctcgaatggcagaaaattcccgagactcgagaccaaaacgtgtggcctcgagactatcgaacagcactaacaatcacttccactgcagggaagctgttcaacgactgcacaatgagcgcaacaccgtgttggacgagttgcgagtgttggcgggcgagggaaagctcattgagcaagccgagaagacgaaaaaagagttggaggaagagcgacgcatgcatgccgaagcaattcagcaaatcaacaaggtcaatggacgaacattaattagtatttcatctaacatatacctaagacaaatctcgagagattttcctaatttccggcacgtgaaaaaatcaggcataattacgtggatggcatggcatggcttaaaaaatgagacaactctattagagaaaaattgaaaaatgcctaagatttgataagcaaacccaataaggggagacattttcaaatgttacggtatcacagtatatttttgcaaaaaaaaaaaaaaaaattatggcaaaatcttaatttcaggataaggatgaattggaacccgtgctggccgaagtgcgccaaaaaaggcgtcgaacggaaaccgagttgggccaacgatatgccaaagtgccatttctgtgggaccaactgagcaaacgagcgcgtgagctggaagtgccgtgcgcactgatgacaccggagggactgttgccaaaaactttgctgtccgagtgagcagtcgtgctttactttcgcttgatgaaatttcttagaaaattttattattcggggccggggcctggacatgtcggcaatatgggtcatgaaaagattcccaaaaatgggacaaagtaatcatcattaataattcttttaaatccatggattttgttagcgtgta

SEQ ID NO: 59873 - DNA, 831 bp, Heterodera glycines
atgaaaaaacaattggaaggaaagacgaaagagtgcgacagtttgaagggaagtgtcaacgagttacaaaaacaactgatgaccatgggcacaacgacaatgccaagggaattaaacgaactgaagaacgaaaggaaggacctcatgaagaagaacaaagaaaaggacgaaatgattgcgaagttgaagaagaaaatggatgaagactcacgaaaaatggccaatttgttgggacaggaaaagaaaaaggaagaggaacacagaaaaacagtgaacgccttaaaggatgagtaccagcgaaagatagaggaagtgaccaagaaaaaggaccaatcgatagagaaacagcgaacagagaacgatcgattgaaggcggagttgagtaagaatgagaagacgatccaggaacagaagcaacagttggtgaaagaccagcagcagaagacggacagagtgggcagagaggaggcactccgcgagcagaagagacaattgacggagcaacaccggacagagaccgaaaagctgaagactgagatgcgcaaaacggaggaggaggcaataactcagcaaaggaaccaaatgatggaagaacagcgtgaaaagaacgacaaactgaggacggaactgttcaggaagaaggaggaagcactgctcagacagaaggaacaatttgaggaggaaagtcagcagaaaatggacgagttggaggcgaaactgcgcaacgaatacaaactgaaacttgaacagagcgagaagcaattgaggagcgaattcgaagctgaaattggccaattgaagcggcactgcaaccaaggcggcagagactga

SEQ ID NO: 59874 - DNA, 1219 bp, Heterodera glycines
atgcttagtgatcttgaattggctggctgtacaaacttaacagatgcgggctttgttcaattgtcaaaaagttgtcatgagcttgaaagaattgatcttgaagaatgtcttctaatcaccggtcaatttttttttttataaatttaattaaatttaattatttttttatatttatttgtttttttcagattcaactctgacaaatttcaacgggtgcccaaatttgtacagtctttccctatcacactgtgagaatttgacggacaccggtttagccgaattgtgtggtaaatttaaacattttttaattattttaaataaattttcaaatatatataattttttttattaatttgtaagttaagaataaaatttttttttattttctcataaatttaaaggaaatgataaatttaatttgcagatttaactcgacgactcgagaaattttttaaaaaattgttttcagatgagaatttaaaaagcttgaaaatttctgcaaccgaatttcgtacacagctttatgtatttatagaaatagaattttagaaaacattttcaatagaaagttttgggaaaaaacctaaaaataattttcagcactttttttttagaattttttttttgaaaaacttaataatttatcgaaaaattttgaaaaaatagctagaaatttaaaaaaaaaaaaatttttctttacttttttttttaaatttcgggtggcgggggaggacagcggggaggaagaacaatgtgcatccttatttaaattgatttaaatttataataaaaataataatttaaatttaaatttcagtggcccatcgagaaagattgcaggtgctcgagttggacaactgcccaaacatcactgatcatacgttggaatccatgaagcatttgaaggtgttggagcgcgttgatctgtacgattgtcaattggtcaccaaagatggcatcaaaaaatttaaagtaattttttgtaggtaaaaataacatatttttacatactattaaaattatattctacaaaaaaaaatatataattatttattaatagagttcgacattttgtaaaaagcctggtcctggacctgaattccatgtttggatatggcctggatttctggaaaaaattccaggaaaattcaggcccaggaaaaatccaggcttgtttgcctggatccagccaggcctggacatggatttttttttataa

SEQ ID NO: 59875 - DNA, 548 bp, Heterodera glycines
atgcctttgaagcccatggtaaatgccaatgccatgattgaagacattggcattgccacgacaactattgacaggtgggaccgtgaaatattaatggagacattagatgagaaccactttgatgaaatgatttactaccatgagccaataccgcattggcaggtacagtatgacaggttgaggtgcttataatttaaaaaaaaaataccgaactgggctgtacagtgtgccagtgtagtgtttaggagtggaagggcatttcctaaattgcgccaaggggttcgaaacaaaaaaaatgtagcacataaaaattcatatcaaaaatgggtacccccctaagaatttgattttttttaattttatttaaattaatatttcttacagtttcgaaaaaatgcatttttggtatttatttaaagaaaaattcaactttctctgtgattcggacagtgaaatttaaaattttatcattatttttcgattttttgtgctaatatgcatatgcttatttcgtgtttaattgatgaattttttgacgcgtaattaaa

SEQ ID NO: 59876 - DNA, 210 bp, Heterodera glycines
atggcattggcaatgctttgtgccacaattttcttggtgcaattaattttacaacaacagcacccgaattgggctgccgctggtgatgatcgagaactcaagaccatgatcgaaacgtgcgaattcataacggaacgcttggcaccggaagggatactggaaaatttggctgtcattacacttggcacagcgattgaggcacagttttaa

SEQ ID NO: 59877 - DNA, 71 bp, Heterodera glycines
atgcgaataatgcgaaaggcgaaatgcgaaaagcgaaacctaggcacatccctggtttatatggttgccaa

SEQ ID NO: 59878 - DNA, 661 bp, Heterodera glycines
  unsure (1)..(661): unsure at all n locations
atgcaaatttcattatacctataccgttcgccgcgtggcacttgcttgggcactgctggacccaggtgcggcattgaaaagtgccacatcgccaccgctgggggccgtactcgtcgtggggtgcgcatccttttttanatttattattttattttttttaatttttaattttaatttacaaagtcatcgtagataaaaatttcgtctggcactgagtgggaggtaagttgatgatgcgccccctgaacgttttgaagttgatgatagactggctgctgctgctgtctttggagccaagcagttatttgttgttgttgttgatggagctgatgttgttggggttgtactgctgctgatgctgctgctggttgattttgttgctgtagaggatggggctgtactggcccaggttgttgatgcggttgtacggattgttgttgttgttgttgttgttgttgctgatgatggaccaaatcagatagaaatgcttgttgccatggcgaaaagtgtgacatttattattattgttgttgttgttgataatattgccatggcggaatgttttgtgtcccccatggcccgaattccgcatgttgttgatgttgtggttgctgctggttgtagttgtggtcgtgaaaaacagcggtttgattttctgtaa

SEQ ID NO: 59879 - DNA, 389 bp, Heterodera glycines
atgccgcagaaactgctgatcaaggaaaacagaaagaagaacatttggtgtgtccgcattgtaatggccacataaaacctggagaattgaaaatgcaattaaagggtaaacaatcgccagccgaacaacaaaaagtgaataattaattaaatattatttttaaaaaatataaataaatttaacaggaaaagccgaaagtggcacgagagcgccacccttggcacgtgatggacgatgtgcaaattggggaggaacatttgccgatgaataaaggggacgacgatgcccatttgagaatggaaaaaaagttgactcgcgaaacgatcggcgaacaaccaaagttttggacggaatcttctgattattgaaatttatgaaaaagcgatcaa

SEQ ID NO: 59880 - DNA, 650 bp, Heterodera glycines
atgggaaaggagaacgaaattaatggctcggaggggaatagcggcaccaacggaagtgaggggcaaaacggaatggaggaaggaaaggaaaaagtgaaggaggaagaggaggagacaaccagcgaaggttggatggcttttacgactactatttgcacattaacctaattgactacttattggcacattaaccgcttcccccccccccatcattaaggctcggattaccctgtttccgatcacgacaccgccgactcaaacgatttttgctctgacaaccccgaccctgctgaagagcagttgtggaatggtcgtgcctttttaaaaaactaattttaatgctttttgtatgatttagaaagttgtcaaaaagccgctcaaagtcagcagcagtcggcgaaaatttgaaaagagtgctaaaactttggcaacaatttacactgactgtttgtgcatggcaactcattcaaaactggcctattcattttagaatttatttatttatttttctttgttcgtgcgtttcttttaacattaataagggtccataattttgtgcttttaattgtttaccctttgatctccatgtgaattctcccgcgttaattgtccaactcaattgttatcgttaaaaagcaattatgaataaa

SEQ ID NO: 59881 - DNA, 337 bp, Heterodera glycines
ttttgcttattatgtttgctaagcatttgcgcaatttcccttttggctgttcttttgctgcgcgtcccttgaggcgatactcaggtggagcatttcgttcattaattgtttcttcatacgtattcctttcattaagcccatggactgcaggtgcacagggacaacgagcggaacaatccgaacacgcctttccaatttacggaagccaatttggccaaaattacggtgctgttgaacaatttcccggagggacataaaggagctgctctcattcccgtgttggacttggcccagcggaagcacgggtggctgcccatttccgcaatgcacgaagtgg

SEQ ID NO: 59882 - DNA, 365 bp, Heterodera glycines
atgaccattccgaacttctccgacaacgacgtgggctcctacaccttcccgcttgaacagtccaacttcagtgcaatgaatggacccaatggatgcgaactccagggaattggctgcacaacattgaaattattcaaaaagaactgattgtatggagaacaatgatgaatgatcagattggaaatgaaaataataattatccaaaaaaggatcctcattggctgcagtttttgcatttaccattattacttacatttgattactcaggaaaaatgaaaattgatcactttctcaaattatagtacattattcatctttaatcaacataaccgaaatctttatcaggagagtcaaatttaaataaa

SEQ ID NO: 59883 - DNA, 1238 bp, Heterodera glycines
atggaaaatgatgtgagattttaaaatcataaaaaatgtaaattaatttaaatgagatgaaaaattagggagaatgtccaaacaatgaccgcattcatttgatcgaacagcaattgcacaattgccaaaaccaaattgaacaaattcaatcactaattcaccctcctttgccaccacccgtgccgcaacaaatggaaacaaatcccgcggaacacatggaggcttatgttttaccgcaactgaacgcttttcctcctacgcaacaacaacaacaacaactcatttttcctcatgagcaagaatttcatgctcagcttcatcaagagtgttctgcagatgatatttatgaggtcaataatataagttttaattataaattaaaaaattaaaattaatatcctttcaaatttcaaataaaaatgtaattatatatttagtaattatgtgctttttcataattttttagctggaacgaataattgaccaccgaatcaatgcgtatggcaacgatgagtggcacgtttgctggagcggttataatcaaacaacttgggagccatgccaaaattttattggacaagatgctgttcaaatgttagccgattttgaacatgctagaaaaaaggtctaataaacataatgaaattaataattaaatgataaaatttaaataaataaaaattaaataaatttaaaattatatattggaataaattttaaaaaactaaattttttatccgttttagaccgtactccatctcaaattgggtacatttttcaaatatgaaactgtacctggaaaatttatggtcaaacgccaaactgcaaccagcaatgagccgcagtatttgtttgcaggccaaacagcatggaccacaaatggagtgatcaaattaattgtgtttgtgtggttgtgaagagagatagagagagagagagagagaatcagagagagagagagagagagagaaaatgtgtatagagaggtaaaagggaataaggagacaaagagagaaagagagagagagagaatcagagagagagagagagagagaaaaaatgtgtatagagaggtaaaagggaataaggagacaaagagagaaagagagagagagagaaagagagagagaaagagagagagagagaaagagaggcaaattctgagagagaaatattgagaaatgcaaatgaggtttagagagatgagatagataaaaacataatgaaaatataataaa

SEQ ID NO: 59884 - DNA, 1766 bp, Heterodera glycines
atggtgaagggacagaatggcattgcgattgcagatgatgagcttggcggtattatcgtattattcatatatttttcacttgtcccaattttcattcataaaatttggcacattttattttttcaaatttttattaattttacccatttttgtagcctgcggcgtgtccccagtgggccgtggcggaggatggcaattccttcacctggcaatgactaaccgacggtgcacggatgtaattttggcagcacttaaaatatttgcattcattttttgcctctgttctcccattttgtcaatgtttattttcaatttcactcccatcgggattgaaaagccgggatttaatttgaatttaatttgaaactgcttaaggtattcaatatgtccgtcgttgctggccatgaattgatgcacgcgcttggctttgtgcatgagcaaagccgaagtgatgcccggaattacgtcattttacggaaaaatgatggagtaattaacaaacatttcaatataatttttcatttgctcattataaagtattccaaaattgaccaatacacgcaaaactttggcttcgcttacgatttcgggtcggtgatgcattatgaatctgggggcaatcataaaaagtatgaacggttggattttaattacctaaaattggaattaaagaggcttatacgacctgatcactttgccacgcttttaccaacaaacgattggccaacgcgaacaaatctctttcaaagacgcggccataattaaccaaatttattgcaaaggcaaaccaattaaacataattaagtaaattttccatttgttcagactcatgcaaaggccatgaggacaagtgccaaaacgggggctatttgaatccgaatgattgcacaaaatgccattgcccggacggaaacggtggccaatactgtgccgcactcgaagagagtgagcaattaatcaattcaacaattaaagcaattataaataaatttgaagatttgaattgcgaggatttgagtggaattccgagagaattggtggccaatcagtcagcagtgttattgaaaacgaaggccaaatatgtggggaataagccgtgccgatgccattggcgaattaaggcaataaataatatttttgaaaattttaattattttgagtgttattaatgcaaattttaattgcttttagcctgaagcagggaaaaaggtgcgaattcagttcaaaagtttgagcaatttgtttgaatgcacacacaactgctcatcggcgtatgtcgaggtcaaataccgagccgacaaaagagcccaaggcaaaaagacaaacaattaactaattaatcattaattagcaaaatgatggctcattaaggtgccaaactttgttgtgccgcatcactcactgatctgaacgcaaatgaatacaaaaattggattgaggcggaaaacccggacatggacattgtcatttccgcgcacctttcaacaaaatggaccgtatcatctaccagggatcacacggaattacgacgatttccgatcgccattcttggggttggaattccgatttccgaattttttgataaaaattcagaaatttttggaatttttttttaattagcaatttttatacaatttctgtatataaaatgcactgaaattttgaaaaaattttcccggcggcgcctttcggccttgaaataaccttttatttggttaagaacgtattcaaactgacgtatgaatcaggcaaggaaaattgaaaa

SEQ ID NO: 59885 - DNA, 286 bp, Heterodera glycines
atgggaactctgaattatataataattttcccattgaccccattcgatttgagggaccttttgaatggcaaagttcttgcgcgtcactctctgaaggaattacttggggatcaaagttggttcgcttttgtcttcgttttccatttgttttctcaagacaaacatcttctcgcctccgcgttttctcttcgcaaaaatgagaaggaaaccaattcgacttcgatatttttggaattgctctttagcgattttaattcatttgcgttttcctcaaactcggcggatg

SEQ ID NO: 59886 - DNA, 677 bp, Heterodera glycines
  unsure (1)..(677): unsure at all n locations
tgaaaaaaatatttatgaaacaaaaaaatcgattttttcaagtgtccgtntggggtactcaaacatttatggggagcaaaaatccaacgcagaattaaagtacaggctatagggaagctattcccgaaggattcggtctccccataaatctgggcgcatcggttcggggggactgccccgaaaacaaaaaaatcgattttttcaagtgtccgtttggggtactcaaacaattatggggagcaaaaatccaacgcagaattaaagtacaggctatagggaagctattccggaaggattcggtctccccataaatctgggcgcatcggttcggggggactgccccgaaaacaaaaaaatcgattttttcaagtgtccgtttggggtactcaaacaattatggggagcaaaaatccaacgcagaattaaagtacaggctatagggaagctattccggaaggattcggtctccccataaatctgggcgcatcggctcggggggactgccccgaaaacaaaaaaatcgattttttcaagtgtccgtttggggtactcaaacaattatggggagcaaaaatccaacgcagaattaaagtacaggctatagggaagctattcccgaaggattcggtctccccataaatctgggcgcatcggttcggggggactgccccgaaaac

SEQ ID NO: 59887 - DNA, 586 bp, Heterodera glycines
gtctgcggtatctatgaacgcggaaaaaaatcagtgaaatttccgcctcgagaagaggatcgatgttcaaagaagcaactcgaagatcccgaagttcagaataaaattcaacaatatgttgatgaagcactcaaacgagttcaagatgactttcaaagggaagaggtcacaaatgttatcaaagcggtaaagcgcatcgcatttcatttgcaaaaaagtctattttagcttgtcagcaaaatcctcgaatctgacttattgactttgacaaaacctgaaatttacaggtaaaagaaatcattagagcctggattttaatgtacatgttttttactgtcttgctatggcctaatacgcatgaaaaacgcgtttttaacttggttgcgtttataacttggcttgaagatttctagcttgaaatttattgatacctaatccggcacgtaattttggtgccttttttaagtttcatgcatttttcgtgcatttttttctaaaaaacaattagtagtaaaaccagcgaaaagactacattaaacattcttggtatcattagatagcccttgaaatcctcatcttaatgaaa

SEQ ID NO: 59888 - DNA, 1181 bp, Heterodera glycines
atgccgcatccgttcagcggaatttatgtttcgtggttcttcaacccgcacatgggataccaggaagatttggacaaaattgtttgtcatactgttttttttcattattttaaatgttaattccattacagtactacaacaatgtgcacgactttcacaattacgttgtggttactgtaattatgggcacatacctggcgttcagcatcttactgtaattatcagcaaaaaaatttataaacaaaaataattaaaataattttagcatcatgaaaacgtacaagtttaaatcgtccacccagcaaagttattcccaaaaaatggtaaaaattccaaaattaaaaataaaaataaaaatgcattttaaaatttcagacattcatccaagttgtgctgatcagctcaatcaacgcatttgctgctggaatttatgtgtacatgcaatacttcaaaatcagcaaagcactgattgtgattggccaactttcatggtaaaaagcaaagaattacgaaaattgttcaaaaaaaattttttttcaagctaatttaggcaattagattagcaaagtataattgttgtcattttctttacttatataatgaagaaaaattttttggtaaattaattgccgagcaataaacaatagtagaggctgcagaaaaaacatttaaattgttgtcgatgaaaaatgatttctgctgatcacctgcgctagaatttatcatttcttccaaaaaaatcaatttcataaatatcaaaaaacataattcaccgattgggatcattttcaattagtgattgaattcatttaggccttagaaagtccaaaatcataaaatataagataaatcaaaacattattcttcctatcgaaaccatcgggaatgatgatcatttttaaaggctgttcgcccatggcattccgtcactgatctatctgtgcttgaacaaaacaattcgcaaggactgcttgaagatgaccaccggattgatcagtcaaatcactggcaaaagcatcatgcaaacgaacacaacccgaatgcttaacactatcaatgtgctcacaattggtggtggacgcataaacatggcgaccgcgtcacggcacggcggtatgagccgagttgtgccgacaaattcaaccatgaacacaacgccaacaaacaatggtgaacgccaa

SEQ ID NO: 59889 - DNA, 299 bp, Heterodera glycines
atgatgagcaaaacgagacgaaggccggagattgtgcgaaaaacaaattgtgaatttcaattggaaattttcgtttcagtgccctccaacccaattgtggtcattgacattgaggcgattacgttcaagaagatgttacgatttatttacacaaatgatttaagttccattgacggagacggaattgacattctttatgctggtaaaaaatattttaaaaatattaaaatttaaaaaaagaaatatttatttatatacagtttttaattttatttttatttacagccgaatatatttaa

SEQ ID NO: 59890 - DNA, 477 bp, Heterodera glycines
cgtttgggcccccgtttttgggccccggggtcgtttgggcccccgtttttgggccccggggtcgtttgggccccaacccaaaaatagaaaaatgtgcttttttaaaaattaagattctaaaaactaagcctgagggatccctcgccacttggcataagttaggtttaattaacattcgctcattttttacaattttacttattccaaatcctattattttttaatagttaaccaatttgatgtgcattctgatttggacatttttcagaaatggctaacccaattgcaaccaaaaaacaaaaagtaaaattgtcttacgaaggccgcctttacaccttcgctaaaatgagttctgatgggatgacaaaattttggagatgcgagttcaaaaaatcaatttcacattattttggagtttctccggggaatttctcgcaactatcgaatgaacccgtgaatttctgttaatttttacat

SEQ ID NO: 59891 - DNA, 2025 bp, Heterodera glycines
aaatttgtttaatttttcataaaaaccagaaaataaccaattttttccaaagttcacaaaattaagaattttttcaatgaaaatctgctaaaaatatggtcaaaattcttaattttttccccggcggcgcctatcggcaccgccggccccccttgttccccaaaagttttttggaataagcgtgttttgaataaagttgtaaaaatgaggctttttgactcaaaatgaggctttttttgcataccaaatgaggcttttgaaacttttaatctgggagccctgttttttttgcattttaattttgattcataatttttcagttgaataaatgcaattatttcaaacgtagtagtaatttttcataatttttaagaaataagaaaatttttaaaaaaagtaattcccctccaagtagttgtttttcttctaatttttcaaaattattcatttttcggtgggaattcaatcataattttaacaattaaattcgtaaaatattttcattttttggactaaatcagttaacaaattgcacttaaattttaatgaatttttgttttgtgcgtttttggaatgataaatattgtaccaactgaatcaaaatttaaaaaaaaaccaaaaattagttaagaatagagtcaaaaaatgtttttaacgatttttaagcgaataggaaaattttttgaaaaaagtctcgagtctcgggttttttgggtctcggggttttcggtctcggtctcggggtcgagtctcggtctcggggtcgagtctcggtctcgagtctcgggaaatttttggtctcgaacagcactagcagatacacctatccgtagctgcccttcgcacacattttccactatttatgtaattaaagagaattttgaaataaagagacatcaaagatgaataagatagaacatgttggccgttggctgttttccggaaaaataaaaaagtaattgttgatcaaaacaaccttaaattgtgatagctattcatcataatttttcgatccattaaatatattcccaaatggtgttttcttccgaaatgaatgcccgtttgcttgagcttatccaagctcgaaaagaccaacttttcccgggctcacgccatgctgacgcaggccgaatgcaaaaggaagcatggtcggcggttactcagattttaaactccgaattccctctcgatgtcccctccgggggcctaaaggttcagcaggtgcaaactcgttggaaaaatatccgccaaactggtaaagaggacgcacaaaaagacaaaaagtaattatgtccgtctatcatggaataattgaaccttaagacatcgccttgaattttccatttcaaattgttgttggcctaattgattgcactcacattcctattttaatgccatccgaggcccaacatggaagagattactataaccgaaaaggctgggccagcataaatgtgcaaggcacgcaaaataaataaaaaaaattaaataataatttaagcaattgttgaccaaaaaggccgcttcctaaacattaattgtaaatggcctgggtcgactcatgacagttttatattgcgtcattcatctgtatgggaagattttgaaaacaggcgaatacgaggtgttttattgggtgagtaaaattttaaggaaatatttccaggagacagcggttatccatgtcgtaaatggcttttaacgccatttgcaaaccccagtactaatgtgcagcaacattataacaatgctcatactaaaacacgagtccttatagaacagacatttgggcgatggaagaaaagattccatgctcttcaaactccaataagaattaaatttgaaaatattggcatgtttattgtggcagccgctgttcttcataatattgcaatcatgcggggtgttcctgaatttgatgaggaagatctggttgatgaacaaccagaaacagaaattatgttagaagaaaatgccggtgatggttttgcagcccgagctagtgttacacaaaactatttttca

SEQ ID NO: 59892 - DNA, 132 bp, Heterodera glycines
tcagtgctcccaacgatcaaacagaaatttgaagaagtgaaggaatgggtccatgagaaaacgacgacagtttctgttgagggaccgcaggagaaagagaagtacaaagtgatcgaattggacgaaaaatag

SEQ ID NO: 59893 - DNA, 193 bp, Heterodera glycines
taagttttgagcatttattccaaatggataataataatcgcgatttttcgattgttttcctatttttcgtccaattcgatcactttgtacttctctttctcctgcggtccctcaacagaaactgtcgtcgttttctcatggacccattccttcacttcttcaaatttctgtttgatcgttgggagcactgact

SEQ ID NO: 59894 - DNA, 1035 bp, Heterodera glycines
atggccgagatcgattggatcgacgaatatttggggaagaaagtaagcgggggggggggaagttagaggacgcgaatttgtggccaagagggaatgatttggcaagtctttcggaaccaaacaatttcaaaacaattgacctttgatgtgggccgccatatttgctgtgccatttaattggccgtccgttcagccgcgatggcccgccggtccatccttcgtccaattagaggcctaattgatcaatcgcttggctttcctccttcacaatgttttctgatcgcccatatttcaattaaaaaagtgataaatttattcgaagaatgttcaccattttatacgaacaaatctgctcaaaatgggctgtttctcggcaatttctaccatatgatttggattattttattatgataaaggggagaaaaacaaagacaaaattttgtcctaaggaatttcttatcattttgccctattcttcttttgtctgatcgccattgaagaatgaatatccgcgccaaaattggcaatttttctggccaataatctgatcaaaaaaacggattaaaaatgaaaacggaaaaaagaaatcacaaaatgataatgaaaatgatgataggagaaaagaaagcttcttagaagtgtttaatttattgtaattttcaaataaacataaaaatgcacagagaaatggcctaaaaatttcattgaaataaatttaaaatattttaatttcattttgttacattattttattaattgatctcacggcacatttactcgcattttcagctttctattcgaaatgccctctcttaatttgaattacacatcttaattattcacatcctaacaaaaatagaaacgacgaatttgtgtttgttggtcaaggacagctcaattgaattcaattttcagcttttcggatcacggcatgcagcagcagctacggcacgagacttaactaaatgtgcagcattggcattgttgtgtagcatccacaagcagtacaaaaagcaatccaacagcaacggctaa

SEQ ID NO: 59895 - DNA, 153 bp, Heterodera glycines
catttcaattgcgctaaatgtttcgtccctttgtcattttggcgttttgcctttttttcctttgcgctgtcgaccgttcaaatgccggcggaatgtttgaggatttgctggagggaataagcgacaaatttagtgaggggctcaagtcaatgc

SEQ ID NO: 59896 - DNA, 1565 bp, Heterodera glycines
atggttggaatgcgaccagaaggtcagttgaaaaacatttaaataaaattataaaaattaaaataaaataaaacaaaaaaagaacaaaaattaattgttttaagaagtgcaaacgaaaagaagccaaaaaagaaaggcatctgttaatacggcattatcagaagcggaaattcaaacaaatgcaaaaaagaagaagcagcagaaaattggaacgaaaattgaaaatgagaaacaaatggtaaaattaacgggaagaaatttaaacgatggaattaaaaattaggcaaaaaatgaaaggtggataaataaaaatcaaactatttaattaaaaataaaaatgttttgaataagaaaaagaatttggcattggcaaaggatgagccaattgcttcagtcttatcatctcaacaatcactgatcacacttgtaaaaagcgtgagaaaaaggatcgaatttttgcgcttaaaacgacaaaaggcatttaaatatttaaatttaaattaaaacaaaaaatatttaaaagggcgaccaatgtcttgtcaaaaagttggacatttgccaattgtgtgagatatttgagcaagaaaaggcactgtttgaggaatgccttttgaacgacgcgacggtggacggagaacgattgtttatggtgagcatcaaataaaatatttttgattaatttaaaaaagtggaaaataattaattaattaatttcaaataaattatttgtttcaatttgttttctctcttagcaatgccaaatttcgctggatgaccgacagcaaattgtgctgagctggcttattttggaaagtgccttttgcacattaaactgtggaggaattcagacaaatcgtgcgtatttgccagaaaagggatttgtggagctccacgtggacggattaacggaattttacaaatctaaattcgccctcgaagcaaaaagtttggccaggtgtttgcgaattcagcagaactgaaatagttttatttgcctttaaatggagtgcctttgtttcagctttgctcttcccattggcaaattctttttggaaagtctgtgccggtcgctccaaatgagccattttaaagggcgggtatattctatttatttaagccttgcatcgcaatttaattgggcaattaattaaggagtgtacatttttcaggaaaaagatgcaattttcgcacttttactgctcaatgcccaacccaattttgcgagcacttctgatccaaaagtcgtttcgtgccgagaacaattgaaacggcaaattttcaaagaagttttgctggacgaaacggtatcgcaaaacggcggcatttcgagtggacaaacggtgcaaaatgagcagaaaaagaaaatgaaaacggaaaaagaggcgaaaaaattaacggaaaaaacgcagaaacaaaatggggagggaaaaaggaggagagatggcacaggaggagaagaagaagcggaaattggcaaagggaagaaggagaaggaaaagcaaatggaagagcaaaaggaaaaggtgggggcaattagtaattgtgaaaagaaagaccatcactaa

SEQ ID NO: 59897 - DNA, 346 bp, Heterodera glycines
atggcttcttcactcaccattgaaaaacgctgcaaacttttcaacacaaaacaaatggaatgccaattcggtaataactagtaaacattttaggggctaaattaattatttatcagatttaaatttgattaaatttaacccaattatttgttaaattatattttgattaaattttacttttagatggaactgaagccggaaaatgtgctttttgtgtaaagcttccgtgtaaatttggagcagttaattgtgcagaggaagtgagcatctcttgtgtaaatccgcaagaattggaaaaatgctgcaagggtaatttacatgtttaatgtctaaattaaaaccaaaa

SEQ ID NO: 59898 - DNA, 105 bp, Heterodera glycines
tttttggtcgaccgaaatggcaatgttgtgcagcgttactcgcccaacacagagccaagggacatcgaagcggacattgagaagttggtggctgccgcagcctaa

SEQ ID NO: 59899 - DNA, 67 bp, Heterodera glycines
atgtcgacttcatcgtccctatttttggttgttgttgttttggcatctttgctgatctcggctaaca

SEQ ID NO: 59900 - DNA, 580 bp, Heterodera glycines
agcaagaatattgctatcttgcctaggcgggattctgacttagaggcgttcagtcataatccctcagatggtagcttcgcaccattggtctatcgaccaagcacatgaaccaaatgtctgaacctgcggttcctctcgtactaagcaggattactatcatagcaacaggtctttagtagggtaaaactaacctgtctcacgacggtctaaacccagctcacgttccctattggtgggtgaacaatccaacgcttggcgaattctgcttcgcaatgataggaagagccgacatcgaaggatcaaaaagcgacgtcgctatggacgcttggccgccacaagccagttatccctgtggtaacttttctgacacctcttgctggaaactttacacattcaaaaggatcgataagccacgctttcgcggtccgtattcgtactgaaaatcaggatcaagtaagcatttgcctttttgctctacgagaggtttccgtcctctctgagctcgccttaggacacctgcgttacgctttgacagatgaaccgcccccagtcaaactccccgcctgacactgtcatcggt

SEQ ID NO: 59901 - DNA, 215 bp, Heterodera glycines
  unsure (1)..(215): unsure at all n locations
atggagacgaacaacatgctttatttggtcactgaatacgcaccaaacggcgaaatttatggtcagagatttaaatttaaaaaagcatttgcattttcttttcagatttaatttcaaaacaaaaaaaactcagcgaggaaatggcaaagcaaaagttttggcaattatttcggncgtggatatctgcacaattgaacatgtgcacagggatttga

SEQ ID NO: 59902 - DNA, 358 bp, Heterodera glycines
aaacggcgagtcattcgttcggaagggcaccagcagagactggaagaattacatgagcaaggagcaaagtgatcggatgggccgcgcgttcagacaaaagttggccggcacagtggcagagaattggtggagaacggaaatgcgatggaacgaagcggaggaggaggaggaggaagagaaaaaggaggaaaaggaaaacgagcaggagcaaagagaagcaaagaagaaggaggaagacgactcgggcatggaaagcggcgacgatttgttggaacgaagcgccaaagtgtcggacgattcattgcgtttgaacggctcgcccgccccgcaaggaccgacgacgacggacagcaaatga

SEQ ID NO: 59903 - DNA, 713 bp, Heterodera glycines
atgcacaaaaatcgcaaaatatgcacaaaaaaacatgaaaattatggcagcctgatcattattattaatttgttacacatttcttggataaacaaattccataaattccatgtgaagtgttttgttaccgattcggcagttattattacgctgtgtaagactatttggtccaaatacaaattccttttaaaagttattcatgcaaggaccaactgaataatatccataaaaacatcaacaaaaacatttattattgttatgtggcgaagtgctgaagtgattgatggtggcaatttttgtaccattccaatgccgggggggcagaaaatcggacaaggcaaatgccgtaattgtagatgatgatgaagttgtcgaagaaacgcaaactactacagcatcaggagcagagtcaatcgttggtcaacccaaggccattgaacaaatggcaggcaacccattggctaagtaagtacaaaaggacaccgagtaaatatttgtaaataggagcagcgaaataaattagtaaatgaaatgctattacggccttactttagttaattaattgctaacctggatttgtaaatagacatctttaatttcaaatttcaattaaaatattggtattttcttttgtgtctgtttaaaaaatgctcttattattcagttaccactggtggatatcaacaagattagctatggataagttaaaataa

SEQ ID NO: 59904 - DNA, 850 bp, Heterodera glycines
atgattggggaacaaacattatgtgaattgatggagtggacaaaattggaaatgcacacaaatggaaaaaagaaaaagagacgtaaaaaggcgcattaagcaactttgtcaaaaaaacgaacaatttgtaaagcagatgttgtttggtttttgatgtaatattggagccgaccaaagatggtaaaaatttgtgagttcatgctatttttataactttgttctgaaattttgtaaaatacattaccgtctcgacccatgttttttttgaaaagttaatatcacaggaccaaaactaaaaactgcttaaagttttcaaaaaagcacttaaaacaaaggaaatgcaaatcccactgtaccggctgcacatcgcatgagctttttgtgaccgggtcccggcttttgtcatttcatgtttatgtttttgtttgttttttaaatgccctattaaaattttggcattgtacggctttccttattgaatttgacacttcagtagcaaattttttcatttaaatgaaaagcgccaccctaattagcattttaattttaaaaatatttgtattttcaaattcctttctatttatttgcagattttggaggattaattccgtgggggataggcatctcggatgatgggttgccaatgccttcgacttaagctgttagccattttcagtgttttcaaaaatatgccgtggtttattgacaacaaaacatgcccctttgagtggagtgatttttgaaagcaaaagcattctctgctttttgtatatcgcgagggatttggcaaggataaacgcaaaagggatgagcatatgagcaaatggcacaaaatatttatttacaaaaa

SEQ ID NO: 59905 - DNA, 151 bp, Heterodera glycines
agtcggcctcgtcaagaatccgcaccacattctgttcctttatgatgtaccgttgcggacgttttctgcttttctgaagatgttctgcgcgtccgatgtccagctgtttgtcgatgtcccttgtgaatgcagtaatgaagtcactcaatga

SEQ ID NO: 59906 - DNA, 757 bp, Heterodera glycines
atgagccagttgtgctgcttgaactgcagaaaacctacttcaacaaatatgacggtgtgtcatgacagacgaaacgggtcactgggccccgaccaacagggccacggatcagttttttgggtataattgctttcatagttatccgaattgaatgaattccatttcatttaatagccctacgttttctctattagcctgcaaaatttcaaaaaaatattcattgaattacaaaaaatttatagacataaatttttggaaatcgtttttttttttagcttttttatgataacctttttgtaaccccaaccgaattttttgaaattttgcaggctgatagagaatactttgggcttttgaatgatatcgaattcatttgatccagacaggtatgcaaggaattataccataaaaactgatccgggcctgtcccacctcccaaaaaaaacgcaaaatccaaaattttttttagaagactgtaaaactttttgtcccattgttcagagtatctgaacaaggccgagctgcgcaaattcttctccaaaggccacatcaagcaggtgttcgaaaatttcatgcccaaggacgtggaaatggccaccgatgtgaacgcgaccggcagtctgttcataaagatgaagcgcccgctgcgatgtacgtgtcggcagaccgggagttttcaaaacctcaacggggccatgaaatcccggaaaagtcagggattctcggcccctacgtccgaccggtcactggattttag

SEQ ID NO: 59907 - DNA, 49 bp, Heterodera glycines; identical to SEQ ID NO: 51181

SEQ ID NO: 59908 - DNA, 852 bp, Heterodera glycines
atgtcggaaaacgaaatttattatagaaaatgtcgaaacacggaaattacaacaccgaaaatgtcgaaaaccggaattccgactccaaaaaagtatgtttttgtacgcgttcgacatcaacagcagaactgggtgtgtgtgtttgttgttcgacgcggttgcccctcccgccgcccgactaccaaagaaaaggcaattaatcttaaattaattgcttgcactataattgttatttttggaacattttgggcaataaaaattaatggataaaatgaggaatgaataccccaagcattctcctctctctctctctcgccaattgattcggccactcctccgtccctatccgccgttgttttggttttcccatcccaatcggcaacaaaacaaacagacaaaaattgacaaataaaaactaattatcttatcttccatataattagtaaagattcattgaaatttagttgttttttccaccgtttaattccttcaaattgggtggctaaaaagggtcaacagaaaaacaacccatccatcagcagaagctgaagtgagggaaaagcgccctcaaaaacatcgcattttttgccattttttcaaataattcttttatagcaaacacctaaagtcaacaacagagcggtgcatcaatccctcatgccaaaggaatatatggatcaacaacaaaaattgatgaaatcagtcaaatgattgtatacagataaaaaaaatgggggggggggggaaaagacacaaaacaatttgatgataaaaaatttaaaaaaaatgatgacatggatttgcaggaatgggccgggatcgcaaatgataaatggacgaaatttaaataaa

SEQ ID NO: 59909 - DNA, 47 bp, Heterodera glycines
atgggacattcggtgactctgtggacgcaaatggaaatggcaatggt

SEQ ID NO: 59910 - DNA, 687 bp, Heterodera glycines
atgccgtcgaaggataacaagggcacaaaccgtggcttgttaagcacaggtggcggcacggcaacgcagacacagaaaggcgtcgggacctcttccaacaatcctgctggcccaacccgatctttctttggcatcaacatgttgagcaactcattatcgataaattcaaatttggagttattcggagaagaatcggtatacgctttcgatgattgggccgagcgattcaaggactacttatcggtgtccggaaaaaatctgaccgaaggagagaaagtcacgcgtctcaaattagcgctcaaggacacgccgaggaccctgttcaaggaactcgaggctgaccaaatcgtaactctcaccagcgccttggatgccctgagagccaagttggactcgcctcaacgacgggaattggcgaagcgaaccattgcactgtgccgacagcgtgaggatgaaacggttggccaatttttaaggcgtatgactccgctagttgagtcatcaaatccatcattgtctggtgatcagcgcaaagagaaagtttgtgaggaatttttggacagactcaagccaaacatgagcttcctcattcgtcttgttggccttacgcaagccaagaatttggaattggtcaaagcccaagcagaagagcttgaggctctatttcttgcctctaaaggagatgat

SEQ ID NO: 59911 - DNA, 154 bp, Heterodera glycines
cggagtgaatttgttgcccttgcgctgattcagagacatttcatttgattaatcgtgcaaaatgataagataattgataatccatcagtcaatcggtcgatttccattttttatgttcgcaatttattcatatataaataattaactgatttaa

SEQ ID NO: 59912 - DNA, 1705 bp, Heterodera glycines
cgaggcggcggaatgggcggagggatgggcagcggaatgggaatgggcagtggcatgggaatgagtggcatgccaggcggtggcatgggaggaatgagtggtggcagttacggaagcagtgggtacggtggaaacagtggttacggtggaagcagtggttacggtggaaccagtgggggaagttacggtggaaatagtggatatggtggaagcagtggaggaagttacggtggaaatagtggatatggtggaagcagtggaggaagttacggtggaaatagtggatatggtggaagcagtggaggaagttacggtggataaggtggctaacaaaaacaaatgcctattgatcaggggagatgatttctatttttgtggtttattattgtatttgcttagtgcgtaaaatgtagatataataaatttgaactgctattttgaatggattacctaatttaaatcgagaaaagtctatgcaatctatcgaataaaatccctattttattttaaaaaatgttttttggaaaggctaatttgttttgctttagctttagccggtacgatatttaaatagctattttttcgtgtttttccgcttattatgataaaacattcattccgttttatttattaactggtttttaaattacccccccccccacccctcccatttgtgaactaatttttgtttttgttctttttcttttaaatgatttgaatttggttatttgggttctgtctgatgaacctacgcatttttcaatgaattaattgcccaaataaacccattcttttcactaatagtttttctcatttttctccatttactcgtcacaattttcaatgtttttaaataaaccaaaagatcaaaaaaaaaatagacgcaataaaaaaataaaaatattaagccatggaaaaactgatgctaattttttacttcttatttgtttcacaattttttgtgccaatggacggagccgaagaaaaagcggacgaatttgggtaagcaatataaagccgaacatcaatcaactcgaccttttttttgaaattttacgaattcagctttttcaaaatcaacttattcattaaccccatttcacaataatcgctcaaacacattccttaagtaaatcaaaacgctctggcggatacggtggtggaagttacggtagcggaagctatggtagtggggtttatggtgcaacgaatttcggcagcggctttggtagtaatggcggagtgtacggcactagcgggagttacggtgggaaaagctacgggagtgggtcatacggtagcagcggttacggcggccgaaattatggaagtggcggttacggcagtagcagttacggtgggagaagctacgggagtgggtcatacggtagcagcggttacggcggccgaaattatggaagtggcggttacggcagtagcagttacggtgggagaagctacggtagtgggtcatacggtagcggcggttacggcggccgaaattatggaagtggcggttacggcagtagcagttacggtgggagaagctacgggagtgggtcatacggtagcagcggttacggtggtcgaagctatggctagcggaggctatggaggcaggaattttgggaacgttggtttcactgctggcagaggaaccatggccatggtagcggttacggtagtggcggatatggctaattct

SEQ ID NO: 59913 - DNA, 162 bp, Heterodera glycines
actcaattcatttttcttttggcacttctgccatttctgttggtcccaatttgttgtgaacaatgcagttgggacgacgtgaataacatttgcgtgggagattgttcatcactgtgtgtgctgaaagattttgacaattgcaactgcaaccgcttaccaaaa

SEQ ID NO: 59914 - DNA, 76 bp, Heterodera glycines
tttttcctgagatccccgtggcctgaaacgcacgaaaaacatgtttttttgggctgttgttaagctacttttcgag

SEQ ID NO: 59915 - DNA, 342 bp, Heterodera glycines
atgaccactttccgcagaggaagaaccgactcaaaaaaaggaaaagctacaacaaaaagcagctccaatcaatgctcgaaatgtacttgggtaaaaaattttggatttttattcatttatagtcaaattttgtttgaaattagtttttttgtacatttaaaaattaacaaataaaaagtggtgtattaaggcggtccaatgggtgaaggagttctcactggcccaattgacctggctgaacttataagcgacattgacatggcctacaacatcacatgcctattggtaaaaacataatttgtagccgtgcatttaacaattaaaattgattttgtcataaaa

SEQ ID NO: 59916 - DNA, 66 bp, Heterodera glycines
atggctatctctttttttgagaaattttctatgcaacaaacgctctcgaacatgaaacgaagtgcg

SEQ ID NO: 59917 - DNA, 146 bp, Heterodera glycines; identical to SEQ ID NO: 56264

SEQ ID NO: 59918 - DNA, 146 bp, Heterodera glycines; identical to SEQ ID NO: 56264

SEQ ID NO: 59919 - DNA, 146 bp, Heterodera glycines
atggctatttctttttttgagaaattttctatgcaacaaacgctctcgaacatgaaacgaagtgcggtgcgccatggccattttatttttcaaataatttttatatttaatagatattccagaaaaatggctatctctttttttga

SEQ ID NO: 59920 - DNA, 50 bp, Heterodera glycines
ctaacccatggaatgcaagaacacacagtgattgtctacacaaaagtgat

SEQ ID NO: 59921 - DNA, 438 bp, Heterodera glycines
gtttctgacattacactgctaaaatggtattatttttgttttgcataatcgcttcgtgaaatttgcacttttccttaattaagggcaaacacaaaaagccgttcattgaccgcaaaagtgcagtgaattattctttacacaacaaacatttggaggaggcgcagcggaccagtaatcgtaaaagtgttgcgaattttcgtccctttgataaacactttgaggtaattcaaaatgttgcgatgaataatttaataaatggatggagcaatgcttataggatttttatgagggatatgcgaatgaagcggaggaggacggagcggaggaaatgcatgacggagaagggcaaattgagaccgatcctgcgcttttctcttctctgctggcggatgggcaatcacagcgatgtggcgaagagcgttttcagcgggaggtgcc

SEQ ID NO: 59922 - DNA, 932 bp, Heterodera glycines
atggctgattttgtccgtccttttgggccatattttggccaaattgcttttgggtttactcacttcggactcagtgctgaacaattgaaagggcaccgaagcagaagcaattggaaaagccaaagtgatttaaattcatttgaacaaaaaaatggaaaagttttaattatttaataataaaatgcaattgaaaaattattaaattcatttttgagaaaccaaaaaattgacaaattttgcaagagaacaaaatcaaaaaatgagaaggaaaagaaaggtaacaaaaactatcattgataaactaggcaggtgctatgtcattacttaaaaaccatcataatgaaaatttttgcttataactttgctctaaaaagaccaaatttttaatccttgctatcattcgatagatctaaatgttctttatgagcctgtaaaatttcaaaaaattttattaagtttaaaaaaagttatggccaaaaatgttcgaaaatcaaggttttttgagttcctcgagctataacttttttgaaacttaacaaaattttttgaaattttgcagactgatagagaacacttagggctatcaaatgatatcaagaattaaaaatttggttgctttcgagcaaagttataaataatttttcgacaaaaattttcataatgatggttttttaagtaacgcccattatgatggtttttaagtaacgacccagcaccgtttaaacaaggatgatgagcaataacacgtcatatttattgtgggtcaccggcccataaagtatgccgttggtgttctcgcatactcctgatggatagtgacatttaaatcgaaaaatttgaaatgcgttttttgcgctcttttctccaaaacagttgagcaagcaaatagttaaatcacttaaaatagcgactttactaattaaaattgctga

SEQ ID NO: 59923 - DNA, 109 bp, Heterodera glycines
atggcccaaaaggacggacaaaatcagccatccgttcaacgtcatgacaatgatcatcaaaatgtagccgatcagaagctgaacagcgtacaacagcacatcaaaggca

SEQ ID NO: 59924 - DNA, 958 bp, Heterodera glycines
gtccgcttcatctgctacccgcggacttcctccggcgagtgtgaaccgttgcggcccgaaaactttgaaccaggcgccaaatttgaacattgccgagcatttgaatggattcagaggaacaacccaaattggcagcaacagcaaagcatatcgccaaatgacagtgacataatgccaagcaatgccccaaattcaaattttgaacaagcaacgcaacgattgtccaacaaattattctttattagcgggaataccacacgctaattttatttatgcaaattttattttaataaactgtgcattaatttcgcaaaaaatcaacaaattacaaaaactcaatgaaaattaaaaatatttatcatcttgaaaatattatcgaaacataaaaattaaatcaaaataagtaagcctttaatgtattttctaggttcataaaaaattttcatctttcactttttatttaattcacactacaacagtgatttctcggttatgtcagctgacgattccgtcactcacaagcggtggccgcggttcgtcaaatttttcaatttttgattttattaaatttattattttattttgtgccttcagctttttgccgaaaaaacactttgtcatttttcccgtgccgtgccctttttggttgtcattttgctgctgggcaacctgaacagttccatcttcgcctcgtcacggtcaatattttaaaattaccaaaaatgacataaatcgttcgtttttcagttatttgtttgccggtgccaaaaatggcattttgctctccgcgttgagtacggtccatgccaattcgatgagtccgcgggtggacattctttactaagtgcattttcatttgatcatatacaaagtaaatcaaaacaaataataattttaaagtgttcgctttgatcattctgtcattcatctgcgacttggagaatctgatcggatatat

SEQ ID NO: 59925 - DNA, 2410 bp, Heterodera glycines
atggaggattacgcaccaggatctatgaataaagagaaatacgctaaattcgaaaaatggtaagaaaagagggacaaagcataacaaaaaattttttttcaggtataacgaaaacaaggagacgcccttttatttgaacgatgaattgatgaattattgcagaaacgacacggagattttgctattgtctattattgagtttaggagaatattgatcaacgatattacgaaaggatttgaccccttgccgaggagttgtacgaatgcgggggtcgcgatgaatatttttaaggcaatgtttttattgaatgagcaattatcgattgtcccggataagggatatgagcggtgtgatcgggccagtgtggtggccattaagtatttagagtggcggagccagcgagatggagttgagatacggcacgcagggaatggacgagaggtcaaagttggaaaatataaattggatggatttattgtgaatgaaggaactatggacaagtgcattgaagtgatgggatgctacatacatgggtgtttgaattgttatgaccccgcggcggaactgattggaggaaggacagcccaggaattgaatgatgagacgcaggagagattggcggagctgtggaagactttggacgtcgaagaagtttgggtatgtttatttgacttttgcattttttatctccggttttttctaggggtgtcaaattgagaaggaattgaaaaaggatgaggaaatgagagacttcttcgcggacagaggaaatgagaagggaccgattgatccgcggatggcttatgcgggagggaggactgggccgatgaaattgtttgcgaaatcggatgagaagaaaaagattagtgtttacgatattgtgagtctgtatccgtcagtgaattacggtacagcttacccgattggtttgccggagattattataccgaagagtgatgagattaatgtaaattggacgagaccggaggatttgaagtataatgggttgtataaagtgagggtcaacccgccgcggggtttgcggattccggttctgcagttgaagtgtgatgagagattattattcccgttgtgttggagatgtgcgtcaacatttaagaaggaaactacgagatgtaattacaattgcccccatgatggggcacagcggagatacgtggcgacgtacaccagcgttgaattggtaagaagttatgtgggaaaattttaagaaaatttgacatttcaggcaaaggcgttggaatgcggttatactgtggacagattttatagagcgtggcactacgaagaggaggcgaatgatttattcaagggatacgtgcgattatttttgaagctgaaggaggaggcgagcggtttcccgaagggggttgagacgggggagcagaaggatatgtggagagaagagtataaggaaaaatatggaatcgacattgaattggctaaagtgaagaagaatccggggttgcggtacataagcaagttgatgctaaatagtttatgggtaagaaaattgaaaataaattacgataggtaattttcactttcagggaaagttttcgatgagaaattgtttgaacaagaatgcggtgatagatagggcgtcggagttttataaaatagcgtgtgaccataaaattgaattatgtgatattgttgagtattcggatgaggcgattagattgatctacagggacaaggaggactttgtgatggagcacaagtccagcaacatcgttatcagtttatggtgagttcaaaaattataaatttgtatataaactaattttcaggacgacgagtatggcgaggttaaaattattggaatttatgagagaagcggagggaaatggaggagaaatattgtacacggacacggacagtatatttgttaggcacgatcgggatgtggagccgatcacgacggggaaatatttgggagagatgagcgaggaatacggcggctatgagattgaagaatattgttgcggaggggcgaagcagtacgcactgaagatgagaaacaagcagacgggggatattgaatatgttatgaaaattagagggattacgttcgacgtggacaacaggaagactttgcactacgatacattcagggagatggttttgaattacgggaaaggggaagtcgacccggcgttcttcgtctacaagaatgattttgggtgagtttttcaaaaaaaaatatttgcatcactaataaatcaatatttaggccaacgcgggattcgaaagtggtgacgagggagaagcataaaatgtacaggccggtctgccagaaggggatcatcgatgaggagcttaatgtgatgccatttggattttgttaattttgtattttattgttgtttttttttgttaaataaa

SEQ ID NO: 59926 - DNA, 2194 bp, Heterodera glycines
  unsure (1)..(2194): unsure at all n locations
atggctgcaaaacgcaatggaacctctcaacaaagcggaccgtcgactaaaaaatgggattttagatcaatcgggtaagtaatttttaataatatatttaagagacaattttattcaataatttttcagaaacaattttattgaagaaatggaaacttttaaattgatggattatcgttcgacgatttgcgaaaaatttggatttacgaagaacattgcggaatttacgatcaacccggatgtgggacgccccgatgaagcgattaaggacgcggtcgacaacatgatcaaagtggcttttaagactacggaagaaaaaatgaatcggaaagtgaggatgtttggagtggtaattacgggcgccgggcttgctttcccggtgtgggtgccgtatcgggcgttcccccagaataatgcggatgtgattctggaggagattaataagttggggcagagcggggacggagatgaaaataagaaaatgctgttgctctcggagcaaattacgatgaaaataacgtgtgtgacaatgcccggtggagaggggccgaggaatgttcataaatttgattttggattcaaggagcatcagcggataaggtaagtattttcaaataatttaatgaagggaaaaaaaacgaatagaaaaaaaaatgaataaaaaaaaacaaaaaaaaaaatggaaaaaacagaaaaaataaaaataaatttaaaataattattttaaataaaatttattgaagcaaaaaaaataaaaataaataaataatgaaaatttgaaaaatatatatgaataaaaaaaacagaaaaaaaaataataaaaaagaaaataaaaataatatttgaatagaaaaacagaaaaaaaaataataataaatttaaataattatttaaaataagcaaaacaaaaaaaaaaaatattttttttaaatcaaaaaaaaaattaataattgaaataattaaaataattataataataatatttattaaggatttctaatggggataaattttgtttgttctacgcactggcttcgtcgatgaattatttggttatggataaatattcgtttattcgttttatgaagaatgttgtgcgacagaaagagacggcatatgaacttttacggaattgtgagattaatggaaatgaaatgaattatggagtggagcatttatcgagtgttcagaattattgggtgggtttttaaaaaaagattctcaaataatgagttttttaggatgagatttaccccagtaaataccgggttgttgcatttgagaaatctgcggatccgcggaaatcaatccgagttttgtggaagggccctatgggtcgtgaaaatgtagtgccgatatttttggagaatggtcattgggatggattaaagaattatgtttgctttttcaatcgtgggaggaagttctgtattgactgtgagtgcttttactcgcgtgatgtttaccacacattggagtgccgggccaggtgttattactgcaatagagttggaggaatgccatgtgaaaaggagagtggagtgaagattgagtgcccaaagtgtcgacgttacttttacaattgggagtgttataattatcatcatggacatcagacttgtaacttatggaggcgttgcgtgatgtgcgataagacttatttatttaatccgaagaaggggcatgaatgcggtgagacttattgccagctttgtagtgtgtgccacgaccccaaacggggttgttatatcatgccgatagaggaaaaagaggaaaaggatgtttaccgtattgtcgtttgggtaagtttaagcaaaaaaaaaaaatatatatatatatacaaaaaaaaaacgccttaatttcaggattcggaaacatcgcaggatacaatgtataagggggaccagaaggaacatattattaaatatatttcggtgagagtgacgtgtacggaatgctgtgacgacaaaaataggacaaattgtaaaatttgcggggatgagaggaccaaggattggagcgaggcggagggacacgagccgacaaaggattttgtggaatggattttaatggcctttacgaattacgatacgtacatttttgcgcatancgccgggcgttttgacggtaatttcaaaatttaatttttttaattttttttaacccctaaatttcaggacatttttgtatttaa

SEQ ID NO: 59927 - DNA, 3722 bp, Heterodera glycines
gacccttagggggtcctagggccatgcattttcccaaccaatcgactcttccaagaactttggaaggagggccactcttgggatgatgccctctcagaagaggactcaatccgctggaattctatccaaagccaatggaaagaagaggaaatcagaattcctcgccgcgcaatgctcaatgacacacagtcaattgagctccatgcatttgtggacgcatcggtccacacattcgcgaccgcgatatacgtacgctgcgccatgaacgaaaagattcaagcgtggctgattttctccaaaaatcgtttgaagccaaagagtgcctcaaaggcactcacgatacccaggatggagcttttggccatcctggtgggcaccagagcactcaaatttgctcaaaggcagttgcgccgtccaattgccagccttcatctttggagcgattcacaaatcgctctgtcatgggtcaaaacccatgaaactcaaccacaatttgttgagcgaaggctgaaagaaatccgagaatgtctcggatgtaccttccactttgtccgtactgcggacaacccagcggacctcgcaacacgcggagcaactccttcggagctccgcaaccatcatctctggtggaaagggccaacttggctcacacaggagagccatctttggcccaactaactctgtttccaagtaacagagtctgaccaacaaatctcggagaatgttggcccgagtggtgcgtttctcgcatacactcactcaaagcagccaaatgagcaggtcttaattgacccctcacgcttcagctcatggaagcgtctaatgcgaacgacaatgttcgtattaagattcctcgccttaatgtttaaaaggggcgaggaaacggttgcttcacttgcgaagcacagaaaggaaattcgccagatttccaagtctggggacttcaaggcggaagacttcgcactcgcagagcgagttctcatccgcctagaccagatggatgacgctgaagaattccagcactttaaaacagtgattggagacgacggaattctccgtctgaaaaccagactggagatgagtgagaagccatacagcttctctcatcccattcttctcgccaaacattccgctttggcaaagctgatcatcttggatcggcaccaaaaaaggcatcaccttggagtggacactactctgacagaattcctgagcgaattctggatgccaagtgcacgtttaaatgttaaacgagctcttcgggactgtcttttctgtcgccgaatgaatgcacaacaatttgcattaccaaccatgccacccttgccgggtgagcgagtgcgccgacacgcgccatttcagtccattggaattgactatctcgggccaacgacaatctcgttggccggagaaaaaataaaggcatggatcctcatcataacatgcctcgccacgcgcgctgtctaccttgaggcaacattggacctcacatcggaatcattcatcaatgttctccgtcgattcataagtcgacggggaaaacccgacatcatttggagcgacaacgctacgacattcaagctcgctcagaaaaccctggagcttctcagtgctccggggccggatcaggaagtacaaaacttcctgacccataatcgaatccagtggcgattcattgcccaaataagtccttaagcaggaggcttttacgagcgcctcgtgaagctagtcaaggactgcttcaagcgaactttgggccgaaggattctttccttcgaccaactcaacacattcgtggccgaagtggaggccaccctcaattacagaccgattactgcggtctcagacgcagtggatggaccaattccactgcgtcccattaatctcttacaaccagagattcagatcaattgggaaacaacaacagacccaattgattcagaggaacagttttcctccacgcacgaacgtttagcttcccgaatacaagcacttcgggaagccaacgacgttttctgggccaaatggcactctgagtatttgacattactcagagaaagagcccagtgggaccacaaaggcccacgactccaaaacttcggagaaccgaaggaagggatggtggtcctaatctctcaggacctcgtcccccgcaatcaatggccaatgggacgaattgttgaaacacacggacggcctggagccatccgaagtgttaaagttgaaatccctgtccgagggaccaacaacgggaaaccaaaggacatgccacgaaagacagtccttactcgtccagtgaaccgcatcttccccttggaagcgggtcctgaaatgaccaaccaagcaacagaggctgtttccgccgttgaacaaccaaatgaaaaccaacccaagctcgctcaagagccaggacatcaaatggtcaccagaagaaaggccaaactattggaaatacttccagtagtggctttgaccatcctcgcgcttgcatttccatttgcaagtggtttcccaatcgggaaatgtgatgagtgtggcctcacttgttacacgaaaggaatcgttgtgacagtgccacccgaaatccaaaagttcgaaatatgctgtgcagaaagctgcatagttcggcaaggcatcaaagccttgaacttcgaactaccaatcgaagtcctactcaacaatcatcactgtgaggccagattttggactgactcacagcacaccttcacatcaaacacgacctgccaggcagtcgatgaatgtgttctcatcgactgctacttttgtttcacacaaattgtgaatccaacatgccagcccgtcattgcggcaatgctggcaggaggcctgtccctaagcctcctgtgcttcatcttcaccatgtgttccatggtgggatacgccatggcaggactgagaatccttttttggattttctcagtcttgttcgcgcgcttattcaagccgcaaaaagagacatgggtgttgagtgaagaagaggaaaacctcctctatcctcaccgacgaatacgccggcacaggccagcaaacaagtaactgggccagtggccgagttagccaaatgacaatgcttgtcatggcatctcttccgtttgtacacgggggaattgagacagtggccataatggccaaatcagagagctgtctcaacaacggcacaacgaaaatgtgccaagtcaagggaagcgtaacccttgcgcttctcccggcaggacaaccgaatgtcctgtcaatgaagaccgatgatggtctcattttgggaacccttcaagtgatcttgaaggggctctctctcgaatgccaagcatacaccaaggcttggaaacgatcatacgagatcgcttccgtggccagcaaacgatgtccgtcggctggctcatgtgtcggtgacttttgcacaaaagtccgaccctccacagccatccgagagctgagggagaccgaaacgttccccgggaacagtttctgcatagacagcacggctttttggggaaaccaatgtctcctagcagccagttcatgtctcttctacaagtggtttgccaaaccacgctcatcagccatttacgaagtcatcggatgcaactcttgggagtttggcatccatattcaacttcgcctcgactctaccactggaagaagtgcgacagtcgaaactgtgcttcttccaggccgtgtgctcaaatggcacaacatcagca

SEQ ID NO: 59928 - DNA, 83 bp, Heterodera glycines
cagcagcagaaatgaatgaatggaaatgtggaagtgagcatataatgaaaagggtgccctttttataagccgaaaatgtgagg

SEQ ID NO: 59929 - DNA, 1561 bp, Heterodera glycines
atggcggaaaacaatggccgccaagcgcctctccaacgcggagagcgagccatggactatggccgccccaattcaccggacggcagctttgagaatcgcccacgaagggcggtccccaaccgtccaatgcgccgttggcagaacggccttttcattgtggccgtggctttgtgcctcggcaatttggcggagggaaaggaattcccttcgccaaggacttgccatcagccgcttgaagcggcggacatggcacgtgaaaatcaatggggattttcaccaatgcctttcccatggccattttcccacgatcagaaagcaaatctgatcaagggaccccgccctttaaatggcagtcagccctatataaaggcagggattttccatgtccccacatcattccacaccccaaccatgccaaaacccatcaaaatgccctcctcgtcgccctctgcctactcatcatcatcatcattagcatcatcgccggatcgccagtcgccgccaccgccccgcaaaaaggcggtggaattgttcaacatcgccgcagcgacaccggaaagggacgcaaaaagcggacggaacttttccgtccgcgatttcatcgacgcggaagcgaaggaggagtcgtcgtcaaaacgcatgccgacatgttcggcgtgccaactctctggccatcgccgcggggcaaaggcctgccccctttatgttcctcctcaaaaggagcgaacggcggcagcgagccgccccggcacatcaaacacacgccgcgactcccccgaggaaggggagatcaccgccgataaggcgggccgcgatcgcccaccggtaagggctccctccaaaggttggagggcagagccctcgatcagtcccccccgtaaaacgggggacaccaacaaacagcggggaaggtctcggaccctccgccatttcccaatggacaccattctgaaagccatggggccgatcgccccaatcaaaaaaattcccgcacaggacaatacgggaactgtggcgaacacgcagccaccaaaggccgccgcggacattgtggccattctcggagagctttccgctctccgcgcctctgtggcgtacttgacggctgagcaggcccgcctggctcagttcatccgccaccgcctgggcacaccgccaaacatgtcgggcggaaatgcgatgccttgtggccccgggcgtcggcgccaccatcagcgacagccaagctcggaggacgacgagcacccaacacaaaagcgggcaaagcaccaccaccatcgccgctcgccgtcgccggacacgcaacacaaaccaaagaaagagcgccgacaccaccgcgaagaatttcgatgatgccgcgggggggagtttgtcgctgacagcagcgacagatcttatcgatcgccagctgtttttgtttttcccacgctttttgctagtgatagtctaattaagttttttcctctgtgcccgccctcacattttcggcttataaaaagggcacccttttcattatatgctcacttccacatttccattcattcatttctgctgctgctta

SEQ ID NO: 59930 - DNA, 1500 bp, Heterodera glycines
atggccaaagactggggacagattgaagaagatgaaaaaatcggagatgaatacgaccaaagtgccgacgaagatggccaagtgtttttggcggattttttcgttgggcgaattaatgcaaagatttaattgattttcaacaaaaaatccaattgatttggtttaattgaaagaaatgggaaattaattcaataatttaaaaaattcaattgcccggggcaatggcaaaaaaaataataaaacaaacagtttcattataaatattttctatttcactttgaaaactcagcacaattcgtcctaaaagatagattctgtccacaaaatgaaccgaaattatgaaaatatttatttttgttatttagcttattttaccattttaaaattaataatttttgagatttgcgtggtttttaaagtgttgtgcctatttttaaaaatattgtcaattatttatgttacagatttttaatctttggcgataaatttctctaaaattgaattttaaaatattttaattaaaacccaaataatcttcgttcagtttttatatacgtttaatgggattgcgtgtgttcgggatcccgaccgggtttcgttcttgaataccgattttggaatcccgcttcggttctcggttttcaaaaagctttacctctctgaatcccgaattttcaatcttggcgggaccaggacagaaaataagcactggtaagagagtgttgctttcgttctaatgtctaaacctcgctggtttttactacacaattagttgaaattcgaataaaactttttcacacttttgatgcaacacttttttccggcactgaatgttaaatgatctaaaataatatattttgtaggtttttgatttaaaatcgaaaattcgaatggacaaaacgtggaaaaatttggtaatccttaaaaatgtgggcaattcgctttgcacactctaatcgttataattaggaccggcaattttagtgtcgagaatgtcatccataatcaaaaaagctggttgttttttaattttgctcttgctgtcagaatgcccgatttccatttttaagaattttttgcggcgtgttttttccaaaaaatctcgaggaatgggcgaggggagagagtccggcggtgccgataagcgcttccggaaaatttttgtaattctttctgatttattagcatattttcatcaaaaaaatgatcaatttttagctctacctctctgaatcccgaattttcaatcccggcgggaccgggacagaaaataagcactggtaagaatggtgactactccaattaattgatagtttattacaaaatgtttaaatgtatttttgtaaaattatgcggtggcagaaacagaaagaaatggttaagaaagaggcggagaagacaaaatatgttgtggaccataacgttttatgcaatgcgcaaaggcaatttacaaacttaattatcatgaaaatctataaaagttttagtttatttacaaaa

SEQ ID NO: 59931 - DNA, 4538 bp, Heterodera glycines
gcaacaaagcaaagtccagggaataccacgcaaaacaccaactgtttttggaggatttcaagcatctgttctacaacaaagaacacggcatttggtacgacttcaacttggaaagcggcacatcgaatgaggcgtactacggtagtgcggcgatgccattgttcacgcgctgttacgatgtcagcgatttgggcacggccgagcgaatgttcgcgcggatggagcgattggacacggcgacgaacaggaaattgatcagccacccgtttggtgtgccggcaaggtggtgaggggttttggaagtgttgaactccttccaactgatttttaaaggtttaaaaatttacacctctaaaatagaatttttgacgggacagggccatttgggcgcagccgtttgggcacgagagaagtttattaggatttttttaatttttcgtagttttcttaaatttttaaattaaaatttaaaaatatatttcaaacttggacaaaaagtcgaatgtccaaattaaagtattttccggttggtcacgccattttttggatttgtatttaataaatgaccaatttttcagcttaatcaatgactcgtcacaacaatgggacttcccaaacatttttccggtaaaaactttttgaggatttcacaggaaattttctcatttatccaaattatggatttaaaaaaaaaatttcgaaaccggagaaatctctcgagacgacctggggaaacatgaaaataaaaaaatattaaacattttttttatacaaagttggacagtattcatgccaaatgagtgttagtcatgaatttaaaaaatctcaaaattttcttcagcctttacaacacatgcttattgagggtctgcgccggtcaggcactaaaaagcaagttttttattgttttaaaaaatatttggaaatgaatttaatttaaaaaacaactacaaaaatttagaatgaaaggaaaagcatttgaattggctcaaaagtgggtgtccgccaattacaaactttaccagaacaacaaaaattgtgggaagaaaatgtgggaaaagatttcagcggatgcagccacgccgggcagaggcggagaatacaatgttcaagtgaggaggagggggtgaaaattactactgtagttcaatgtccggtaatactgtgctttatccccctttttttgaaaaaatttttccaaaagtcatgaaaacatgttttcaaggttttcggagttgctgatcatgaatccggcattcttttgggacaattccgaattctagacccgacttcgaaacatgttttcatgacttttggaaacataaaaaatttttcgaaaaaagaggagggacaaagcacagtattacccaatgtccaagtgagagggagaaagtgaaaattactactgtaattagacaatatccatgtgaagggagggtgtgctggcgcgtttcttaaatccgccaatgtgtccgaaaacaaaaaattatatatataaatgcataacttagctcacttcatccaaattaattcgactgattgcattttgaaaaaatatctgttaatttaataacccagttcaattttggctggacaattggcactgtgctggacctattagtcacctattcggacgaattggcgttgagcactgatactactactgtctactgcttggaacaaaaaattgaggaggagccaaatgaatttccaaataattttgtaaataattaaaaaaaaatttaaataacgaaattaattttcatgttttttaagtcggagtacagagcagagaggctaacagccgcacagaaggaagttgatatgatgaacacatcatgggtatgaaatttggcgtcataatggccgggatttggggcagcttcttcccccctcccccgaaaatttaaaataaaatttcaaacaaaaaaagcttacaaagaaaaattggaaaatttcaaccgttttttaattttgtgaagaaatattttttataaaaattccagaaaatttgaaaatttttttgcacccgtaatttttagggtctaaagcccgcaaaagaagcataatattgaaaaatatgtattgtatacatagtatgtattaaaatcacaaagaaaatttgttttgccaatttattttactttcagattaaacactcatttttcaggccgttgtcaatgaaagatttgcactgatgaaagatgaggatttcttgaatttttttggcactcctgtcgatgagactgttgaggaggacaaaaatgagaacaacaacatccatttgcgatctgagctgaaggcagccgatggagaggaagacaaaaatgatcttccaacagaatttgacgcacgcgaagcatggaaagattgtgccgaaatcatccaaagtggctatgcacaaggtggattggaggatgatttgtagtgctgttcgagactctcgagtctcgaagagtcgtgggaaattttcggtcccgaacagcattataaaacttaggctggtaccgaaactgcgagcaccgaaccgtcctgttccgaattttttcaactattgtgacgttttgccaaaatatgttaacaaaaatgcaataaaaacggaaaatacactcctaagaattgacctaaaattttcaaaaaatacgcccctaaaacttttaaaggaaccgttatttcttgaaagttttttcatttacaaaaaatttcaaggcgactgtggttcctgttgggctgtgacagctgcccgaacgctgaccgaccgaatttgcattgcccgtctgaaaaagggaaagaaaacgaacagcagtgacccgagggcatatgtttcggcacaattcaccatggaatgcaccccagacacaaaagggtaaattacaaataatgaattgttagggatttcaatgttttctaatccaaaaaaacacaattttctggattttaggctgaaatttaaggaattttaaaggaatttacagtgagacggcgccgggagaagtttttgaaatttttttcggttttaacaatttttccacaaaaataattattttcatgaaagaaaactttacaaagaaaatcagctttgacacctttaaaagtaggtaaatgctgataaatcagcacatctggcaacactggtatttcatattttggcattaaaaaactctattagaaccgccccctttattaaaacaacactttcgtttgactgaaaactttcaaaaaagctgagaaagcttaagatcatttttaaaattgtttttccaccattttaaatctctcgttgcctagtggcctttttaaaaatagtccaccgtatttctttcactttaaggtgcggtggaggaaatcctttttatgcgtggaaatattaccgtaatctgacagtatccggaaccaaccatacgatgaacacgggctgcaaaccgtataaaatgccttcaaagtcaaattgcgtgttttcgtgcaacaaagaatggctgcaacaacaatatccgaataaagcaaaaacaccaaaaacgcctggggggataccattgtttggaaccacctgggaagtattcctagctggtaagtgttttcatctcagtcagtttattagattgtaaaaaatcgaaataatatttcaatcagtctcttatgactgggctgggaatttaagtcacgaaaaatttccaaaaagttgaataaaaagtcaaaaaaatatgtcaaaaaagcacgaaaaaatgcaaaaaatcctaaaaaaattaattttggtccgtcctgttctttgtgcggaagagtaaaagatcaacccgcggtgggacttgaaccccatcaatccgtgccgtgctctaatccactctcttactctcaattccccttatctttggggcgaaattacttccttttgtctccactgccacataggcacaaggagagaaagtgccgcatttatcacatgtcttacttttcataaaataattaattgattatataaatgggtgtcaatgaataggccttaagcaagccgaaattctctaatttcctggtcaagaattacctcaaagaaaaatttttttcattttttaaaaattttagcaatattattatttaaaattacttcttataatttatgggtataatatttatatgaatttagcgaatcgcataattaaattaaattattttaacaataactgagcctaatttgggaaagaaatttttaggggctggcggaatgcataaaaagggggtgatgggttgaccaagatttttcgaatggctctgagggttaagaaagttcggggtgtcataacaaaaaaaaatttgcggatcccgctgcggtattggggtaatccgtactttcttgagccgggatttcatcggatttctgctgtttttcaatcaattttttttcatcactttaagaggctactaggatgccagtaatcaccggactcacacaacatcgaaacacgcagaattttgttcggcactccgaaagtgtgaattttctatacaccaaattaacatttatttcattcattgtccgttgctaa

SEQ ID NO: 59932 - DNA, 96 bp, Heterodera glycines
atggtcgcttggaaaaccctgttgaatgtgttcgagaaatgcgaggaaacgctgggcgaaagtctgtacgaagtcggaccaatggacggcacttcg

SEQ ID NO: 59933 - DNA, 911 bp, Heterodera glycines
atggaacacaacaaggcaaagaggacaatcgccaagctttgcaacaattcgctatggggacgcttctccctccgcaatggcctgtcaaagacgaaaattacggactccccggcaatgctacgctcccttctcgacgacccaaaaattgaagtttcaagtgtggatttgctgaacgaagaaactgttcttatcacatactcggctgtcactgagttcattgaggagcacggctgctccaatattggtaaaattattttaataattttaaaataatttgtgaatttatagttttgtcgctttggacgacctcagccgcccgtctccacctcctgagtcttatgcaacgcgtagtccgtgcccaaaattccttattaatctacaccgacacggacagcgtggttttggcgtataaggagaccggtaaaaaactaataaaaaataaaattataaggttttattaagacggatgtccattgacaactgggccgcacctgggcgacctctcagacgaatatcccgggcatgaacttttggaatttgtgagtggaggatgtaagcagtacgcgctgagaatgcggagcaaaagaacgggagaagaagacactgttttgaaagttagaaaaattacattgtgcgccgacgcgtgccgcttattacacttcagcgcattcaaacaaaccgttttgcggtatgacactgcagaagaagaagaagatgcttttgaagaaataataattgactatccaaaccagcttggccccaatattcgtgaaggagcagtgcaatctgtaagcattttgaagcgataccgtcccgttgtgaccaaaggaattgtatcagaaaattttactgtacgtgattttggatttaaattgtagtccaattttttcgtgatttattttatcaataaa

SEQ ID NO: 59934 - DNA, 885 bp, Heterodera glycines
atgctggtccggctccaatatgacggtgagtctgttcaacgtaagcaccaaagttgaggaggagcaatgcgcggtagaagtgacaaattgccaccgaaagtactgcaaatacggtaacttaccgtaatgaataccgtgccatggcgggtgttattttgtgcagggaatgggtcggcttattactctttgggctgcgggggaatggacgcgtgcgagtcggggcccgtggcgatgctttgccgggcgagcggccaattggcatgcaccaattgcacgggcgaactgtgcaacggagcgggggcaaaccaccgctttttgggcggcactttcgcagcgacacttttggccattttcatcggtcaattaatcaagcattaattaattgttggccaattagtgatttggaaattgtcagcgattgggcaaaaatagcctcataaaaattaaattaattataaaattaatttgttcctatagcactttttgttcttcaaagcaaatgaaaatgacagaagaaaagagggaaaagtgaggacaacagggacgattgattgacaaaacagatcaaccaacaattggctgataatttatcattttgtaatttgacaatttcagttaagaaaatatttgggaatacatttaaaattatgttaatgaactaattaaaattaaaatatatgagcagaattctgttgatgagaagtcatcatttcttaaattaaattcaccgtagtaatccaccaagctttggcacaaactttccttcgtgccgttccctcgcgccattcagctttttcttttgttttgcatataaatgcctattatcgttcgtaattctgctaattgccttatttttctcccagtaattgttttgtgcataataaa

SEQ ID NO: 59935 - DNA, 1992 bp, Heterodera glycines
gttccttttccttcccattttgccaccgtttcccctcacttttctcttttcttcggctctttgatcgcttttgtcacttttgtcggcgttttggccaatgcttttgttgtggtggccgtcgctggcgataagaaaatgcgtcgttctccgatgaatttgctgctgctaaatttggtcagttttgttccgttaccgtatctttttacggtattttctgttttggatcgtactgtacatcaaaatttaaaaatcgacaaaaatgctcataaattcactaatttcgcacccatcaacgggaggggcactcactaccaattttcctccctaccaaactgtcccataccgtaacgtgccatttcactttcgcttctttctttgccccgcccccttttttcgtcaaatgccttcccaccgcagtttctttaggctgttgccgatttgctttatctgctggcatttacgcccttttgggcttcgatgtccgtccacggggacggcggatggcatttccccgagagtttttgcccaattggacgctatctgagcaattgtctgctgattgtgtccatcttcacttatgtggccatttgtgtggaaaggtgaaaaatcttttatatgaaaatcaaatactaatttgcttatttggccaatattaattgtaaattgtgcctaattaagccaataattcttataattacgcatttgatttccaaagattcgtcgccattgtccacccaatgcatgcccaagtgtggtgcactcgtagtcgtgcactgctcgctgttctcggcctttggacctttgtgatggcctatcaattaccttatttggcactctttcagactcaaccggcgccatggaatggttttgaattattaataaaatatgtttatcaatcccatccctatttaattttaaagttgaaatgcgcatttgtcgcagtcgtttggctggtaagagttcgttgtggcgtgcctacaaatggtccgaatttgtgctcacttacgctcttccggtgctcctttcggcatcactttatgcgcgaatttgtcgggttttgtgggcaaaaagtgccattttgcaaaacaacggtaatttgggcatactgtattgggaaattgccaaaaattatatgtttgtaatttaccattctttcttttgttctcgctaacttaattggcattttgagtgcccaagcgcagtgccatcattggcactgcctcgatgacggcggtgccctccgcgacttatcggccgaatggcacaattcgccgcgttttggagacaaaattagtgaacggaataagcaaagtggcaccgattaagccaacgacggcggcagcacaaaagccacaaaaaggttcacaaaagtcatcatcatcatcagcaggtggccaaatggaattttgaattggcatttcgtttaattaatattttaaaagtatagcaaatgataaagcaaggcgcaacgtggtcaaaatgttgatggtttgtgtcacactgttctttctctgctacacgccgatggtcgtttactttttgtgggggtaagcaaacgcaaaattcacaaatacgccaattaagcatctgtatcggatatcgctactccacccctccctctctttttctcttactcattctatccttcctttcctcccttcactctctctctcttgccccctctctctctctctcatcatttgctattcatcccttctttcatccctttccctccctcccctctcccttttcagtgcgttgttcggccgtccccttccgttgcccttcgaatttgttttcctcaccagcactttcgtccaattccaaagcgcatttaacccttttctttacacactttttgcaacaaaattccgagaaaagttggcaaaattagtgaaaaggaagcaaaaacaacggaaggacaatttgagggacaaaaatgaacaaaaggcggagggaagagaagagaaaggggaaaagatggaacaaaat

SEQ ID NO: 59936 - DNA, 804 bp, Heterodera glycines
atgtgccgccaaatcgggcttggagagaccggagaacacttctggattcctccgcagttcctcgtaaagagcagggatgagttgatagactttgtctatcccgacttccagaaactccttggaaatgacaaggaactgctaaatcgtctgatcctcgcacctcacattgacacatgcgatgagatcaacgaaatcatgatggcgaatgtgcctggtcaagtgcgcgaatatttgtcctcggacaaaccgcttgacgagcggccactggatattgatgaaatcgagtccgaagtggcagcgttgaatcgacgcacagactctgggatgcctccccaccgtctgcgactcaaggtcggaagcgtcgttgttctccttatcaacaaaagtgataaggaaggactgatcaacggcacgcgcatcgttcttgaagaacttggcgacgatcgtctggtcggtcgcgtcattaacagcaacgctgttggtggccaagttaagttcttcatcgaacgaacacgcaatgtctacgaggacaaaacgcctggcggcataaaatatgagcgtttgcagtttcccatcaaacctgcctttgccatgaccattctcaaaggtcaaggccaaacaatcagcacggtcggaattgacctcgaaagggatgtgttttcccatggtcaattgtacactgccttttcaagggcaacagacgggaacaacgtccgagtgtacgctcccagaagggagaccgatggccaaggtcaaaccaaagtgttgaacattgtggccaaaaacatgctcaaattacaataa

SEQ ID NO: 59937 - DNA, 555 bp, Heterodera glycines
atggccattgcattggcacgggatgcaggaaccgatcagatgcgtgccaaccggggccggcaaccgatggtagccttgtgcgcactcttggcaggacgggccggtgtatggctctgcaaaatatgaacatgaatgattacggtagatttttgacgtgcatactgtagaaagtgaattacagaaactgaggaaaacacattgtaatttaccaggacattcacacagttccacagatgatgcagttggacgaagaaggccagactcatcctgggaaatgattttacaaatttaaaattaattttactggatttttctatctttagatcgaaaagataagaaattataaaataagttaatttaattttaaaaaattgaaaacattcaaaaaatatgttattggacttttttttgtttttttttgcataatgccattatctttgtctccttcttatcatcactttaaaattttgattcggttaatttttgaagagtaatggtggccaaattttgttaaatttactaaaaaaaaacattttaaaaggcagaaaattcaaa

SEQ ID NO: 59938 - DNA, 322 bp, Heterodera glycines
atggctatctcttttttctcatttttttaccgcaaaattggtaccaacagtatcggatttttggccataatcggaatcggcgatttaatcggaatcggattttgtctggctcggcacatccctggtacaaacagacactgatgaacgtaatgaaaagagtttggcctttgcccttgagtgttcccctcaaaaaggtgcaaaaataaaaagataatataaaattattgttttaccatttttagacccgaattggagctgcgaatgttctgcaacacctcgcattctttacacaaaagagtggaacggaggactttacgcataa

SEQ ID NO: 59939 - DNA, 464 bp, Heterodera glycines
gtttcaaatatcgtaagattgtttgatagggccagacaagagaaggcaactgttggtaccaagtttgcggtaaaaaaatgagaaaaaagagatagccattttttggtcaagaattttttttgtttgcgtttcaaatatcgtaagattgtttgatagggccagacaagagaaggcaactgttggtacaaattttgcggtaaaaaaatgagaaaaaagagataaccatttttggtcaagaattttttttgtttgcgtttcaaatatcgtaagattgtttgatagggccagacaagagaaggcaactgttggtaccaagtttgcggtaaaaaaatgagaaaaaagagatagccattttttggtcaagaattttttttgtttgcgtttcaaatatcgtaagattgtttgatagggccagacaaaagaaggcaactgttggtaccaattttgcggtaaaaaaatgagaa

SEQ ID NO: 59940 - DNA, 1171 bp, Heterodera glycines
  unsure (1)..(1171): unsure at all n locations
atgggttcgattcccagtagcgtttgctttgtttgtttttttctaaatccattcgcattccaacattcttaaacaaccccgtggcatcggttttatcgcagtcaaattcacttaatttttaggtgtcccctcaactgttaataaattggcgagtggtgcgctgctgctcatcgcttcaatcattcatcttggcaagtcgggcttgtgcaaacagccgatcactgaggacgacttggaccgtttgtcgaccactgttcgactgattgttgaccaatggccgaaagcggtggatgtgtttttgagagagtgccgtgcttcgttggaaagcatgctcaaggccaagggggacgtggaccggcacgaacgcgacacaaaagcgccgaagaagaaaattgtgcaggcaagcggaaggaggcaacgattaaataaaatcaaatttaaacaaattcagcccgacaagacaattatgttcacgcagctgtccacacgcgtgtcagaaaacgtgacggacacaaatttgtttgatctttcgctttcccaagcgcttggtactgcacccaaaacgaccaaatacacctttgccagctccaaactgggaaaagtgattcagttagccggcttttcggatcccgtctatgccgaggcgtacgtcaacgtcaaccaatatgacattgtattggacgtactcgtggtcaaccagactagcgacaccttgcaaaatttgtcattggaactctcgaccgttggcgaccttaaattgtgacagaatatcatcttgttcgctaaaattgagacaatttaagggtggacaaaccctcgccgattactcttgcacctaacgacttcactaacatcaaagtccatctttcataatccacacagtctttaaacataattaaggccaccgtaaaagtgtcatccaccgaaaatggagtcattttctccaccattgcttatgatgtgcgagggtcgacctcggatcgaaattgtgtgtaccttgaggacattcacattgacataatggtgagtggagcaaatgcataattccaatctagtactttgcttaccactcacttcctaccatttcccatttcaggattacattgtgccgggcacttgcacagacacagaatttcggaanatgtgggccgaatttgaatgggagaaacag

SEQ ID NO: 59941 - DNA, 2888 bp, Heterodera glycines
atgggccaaatgggagaaggaagcgattggatggaactttatggaccagtggaaccggatcgacatttgagatgggtcagtgaatgatgcttcttatgcagatatccaaacttattgcttttcgatttttaggcctcttgacgcagtgatcaatccaagtgatcagaagcagaaatgactggacgatttgttgagaaatgatccatttaattgatgtggattggataatgaatttgagcccatctgatgtatataaaattgttgttttgttgcagtgatcacaaattgtattatatgtatatatcaggggtgggacaactctcgccaactctcgccatttttggtactctcgcctctcgtctctcgttttgggacgagaggcgagagttgaaaatatacccctaaagattgaacttttgaccagtcagaaaaatattcaaatttacgcgaaaaacgccataataattctctttctctgcttcctctatgttttaaaattagagaacaattattttttgataaatggtcagtaatttaattaacttttacaggttgttagaaggagtatgtcgaaaatatggaattatttcaaaaaggaaatcggaatcgctttctgcaaaaattgtgactacaaaacgaattttccgcccaaaacaccaacgacgacattggccactcatttgaagcacaaacactcagaattatacaaggaatttacagaaaaaacgggggcagccaaagagcagcaacagacttttggcataaaacggtcacacggaacataatacaaaacaacattttttacttttagggctttttcgtcttctgcaggcgcattgacatcgacgagtcttgatttaactgtcgatgaggaaatcgaagagattacattggccaaaaagctcgatgaacagccgaagatcgatcgaatttggacaagaagtccatgggaaatgggcggggaaagagcaagcagtgtgcataaaagaaagacaagtcacacccctggtatatatgcctttaggataaattaagcgatttcctgaaattacaggctcattcttttaacctaatgataaagtcggtggtcacttttcctccaatcaatgggtttaaattaccatgcaagaaacgatgatgcaaaaaatttgataatcaatactagagatcggaattttgcgaaaatacggataagtatcagtattacgtacttggcaccgatacggattaagtacttacggactaaaaatacggaaaatccgtagtccgtaaaaatccgtatccagaaaaaatacggatccgtatacgtataagtattttttaaattttttgataaaaattggtttaataaatacaaatcttgaatattaaagctagaggattttttataacaaatttattatcaattctaagcaacaaaattcaagataacaaaaaattggcaacaaatggaagtgagggtaaaatattggtacttgttaattatctgcgttcagattaaaaaaaaaattttttttggaaacagggagggggggggggggggatccggcgcagggctgcacgaaatttcgtgtcgttttcgtgtcgtcccctttttcggcactttttgagtttcgttttcgtgtttcgttttcgtccgctaaagtttttcgtttcgttttcggttttcaaatttttgtttttcgtttcgtgtttcgttttcggtttttaaaattttggattttcgtttcgttttcgttttcgttcgagcaaaattttacgaaaaagacgaaaatatttacacccataagaatgacttttttagtaaaaaaaggcaatttcattgaactcttgtagtttagtggagcaaactgcagattttagttgtaggtttattatgtgttcgataattttgaaaaatttacaaaatggaaaaaaatgaaaaagaatttcgtaaaatttaaacgaaatgcaatttaataacgtaaaggttttgagtttttgcacaaaattttgcttttttccaatttagtaattttcccatatttccagtgctttttcgattttcatcgaaaattttacggaatagaccctcaaatttcaaaattttggcgaattgactgcacaaaatttaaaaaattactccatttcaccttaaaaacgccaaaaaaaaatagtccgtaatacgtatcataatttatacggatcagtatcagtattacgtacttgacatcgatacggattacgtacttacgtactaaaaatacggaaaatccttagtacgtaaaaatacgtatcggccaaaaaaaatacgtattacggactacggatccgtaaaagtacgtatacggatccggtccgtatccgatctctactaaatagggtttgtaattatatgcacataaaatcttaaaatatgcgcatgaaatatgcaccaaaaattgcaaaatatgcatataaaaagtgaaaaatatgcacataattttttcaaattaagggtaaaattttccaaaatttcttcaaatttgttaaacataaagtaaaatcttcaaaaatggctaaatgtggtattaaaaatcattttaggagaaaaaaacacgatacagcttaaaatttactcattttagcgaaaaatcaacctgaaaagcaaaattttgcttatttttgacataaattaaccattttttgagaaaatttatttattcaatatttttcgtgaaaattttgctaaaaaattattttttttagaaaattttccggtttttgaggtcaaaaaggccaatttgtctgttgggggccgatctattagaggtttttttggaaaaacgccaaaatatgcacataaaatatgcacgaaatgccaaaatatgcacaaatatgcaaaatatgcatatagaaatccattctag

SEQ ID NO: 59942 - DNA, 400 bp, Heterodera glycines
cagaaactcatcaatcagtggacaacgaaaaactttgggcctttgattgatggaagagaaaaatgtgctctaaatgctctttaaattatcatttttcattaataatttgagcgaaatgatccacgggagagtgattgtgtaaaaaaggattcaaaaaatctgtaaattttcttcgttgcgatatcataaaaatttttttggtttataatagaaatcaaaaaatctttttattcggaatttttgctgatttctcttcgattttcaacacttttcaattcttctcaaaatgattacgctattcacatgtaaaatcaatggccaaggtgactttatcctcgtctttgttgtacaagcctttgctcgggtccatcaattccttaatttgccatttaaaaataaa

SEQ ID NO: 59943 - DNA, 546 bp, Heterodera glycines
atggccaaactgatggagcatttcaaaaaaggaacaaagtgccaaaaggtaattaacagtgccacatgacctaattaaggtaattaaggttcacttataactcattaatactgcttattccaagaatttatctacacttattacgcactttgttaaaaaggttacaccaatgacagaagaattgaaaatgatgccaattaccgcaatgattccataaatcagtgcacaaccaattagtgaccagctgggatggacatctttgaagaccaaataaaactgaaatttagttataataaaataatttttaccaattaattaccgtatcattgccttaattttccaaattggccataattaaggatcgaaaacaatcgtttttataaatttttaattcaactttttttagtaccaaaagaatgttatgaaaaaaattgctgaacatggaatttctcatcaaaatttatatttccatgaatttttgtttaaatttatttaattaattttttgagataatacaacgaatgacaaagtgctgaatttggttga

SEQ ID NO: 59944 - DNA, 389 bp, Heterodera glycines
atggcgcagcccgtcgaaaaaaagaaaaaatattcttccgtcgaccggcacctcatttcttctgctattggtgaaagacaacaacaattttttaggaaaatgtgagccaaatttggcatttttcatgacattaagcaattgaatgtatttgttctgaatttcagttggatttgcaatgacgtgtggatggacattctcccatcttttgaccgtcctcaacttggactcaaattggcattgctttccgaccgtttcgatgttttggtggacaaacatttcgatgcaaaaagcgaattgacaatttggagagcaatcgaaattcgcaaggacaaaggaccaagtggagacgataatggaccaaaagcgaaactattggcgctatatggaaa

SEQ ID NO: 59945 - DNA, 488 bp, Heterodera glycines
atgctgggcaatatccgacgagtgatgagggaggagttggaacgagttggtggtgcacgtggcattgggtgagtcggagaaacttttacgaaagtgcagagggagggttcggtaggcaaaattttttttttcaaaaccgcttttgcggggcgctttttccaaaaaagtgggatggaaaacaggaggggggggggggggtggtgccttaattttcccaaaaaaaattttcaacagaagtttgtttaaaaaaatgtttatgaaattttttcgtaagaaaatgccaggaaaaaatttttttaaataaaaaattgagtgtggattgctaccagatactcatggaaaatgaacaattagcggaaaaataaaaaataaaatttgcttgcatttttagcgctgattacgtgcacaagtcagtgcacctggcaataatgaaggcattgttgcacaaaaacatgggtctggagcgaaaattacgtgaaatggactcg

SEQ ID NO: 59946 - DNA, 725 bp, Heterodera glycines
atgttttcaaataagcgcaaatgttctttcaatcccgattgggaaaagcaatataattttgtaaaaagaagccggaaagggaatggctttttttattgttccttttgtcaaaaggacttcaatgtcgaatcaatgggagtttcagccatcaagtcgcacactgaaaacagagtccataagcaaacggatgaagaaagacggaaaaacacaacaattgagagtttttctcgatcaaaattggcacttaactcaattgatcgtcaagttgcaacggctgagggtcatttttaatcttttttagtgtaaaaatttgtttttaggaacttttgctttgtatccgaagactcaaggatatgtataacagaaacgggacaaaatatcgccgcgacaaaatttcgccgccgaaatatcgccgagacaaaatatcgccgccgaaatatcgctgcgacaaaatatcgccgccgaaatatcgccaagacaaaatatcgccgccgaaatatcgctgcgacaaaatatcgccgccgaaatatcgctgcgacaaaatatcgccgccgaaataccgccgcgacaaaatttcgccgccgaaataccgccgcgacaaaatttcgccgcctaaatatcgccgcgacaaaatatcgccgccgaaattttttaaaaatttttttcaaacagaaatttttaaaaaaaaattcttagaaaaatttttttaagaaaagttcaataaa

SEQ ID NO: 59947 - DNA, 1603 bp, Heterodera glycines
atgatcaaagaggaaccggaagaggaggaggagggagagttcgggtacccggagcaggagaatctgccaggtaaataagcggggttcaaaatcttttaaggatttgggagcaccgtttttctgctttttaccacagggaaactacttttcgggccacattaaaacccttcatttttagatgaagcggcagaaaatgggttggtaccccaacatggcccggcggctttggctccgttcgtggcgcaaaattgggacgccatgccaccacaaccgcaacaacaaatggcaatggcgtttgcgcagccgttcctgccgccgatgggaatgccgccgccgatgggaatgccgccgccaatgggatttcccccgccggttccgttcgtccccctgttcgcaaatccgccgctaccaatgccgtacccaccaccaccgattccgcaggtacttaagtcattcgcaaaatgctaaaatttcagaattacagaaaaaaaggaatttttctggggggggcggaatatgcatttcttgtaaataaaaatattaaattttttcagcaatttagagacaaatggggttctttttgggcaaataatacttttttcaaatatttttaagccgattccaattcctccggctcgtccgctgtatggggctttcaacgcaccacaaatgagaccgccaccgttgatcaacatgccgtttgctccggtgagtttatatttttacgaacctaaattataaacgattacattattaaattaagcctggccaaagaggtcattttcttcaacaaattggccgccagccgcgttggcgtgaaccatgtccataaataaaaaatcaaaaaacgataataaaaacaataatatttaagtggaattacgtgaccccaatggtcaaaaacgtcgacgtgagctgttggaaattgtgcccgaagaatttggtacaaaaaataattcatttttttgaaataaattataatttagttgtccgtcttccaccaccaccggagccgccaaatttacgacgatggcattaccatcatgatgagccaccccaccgagtgttggtgcataatgccgatgttaaaagaccaactggacccataaccggaaatatggagagaatggaccttttttttacattttttctaaaatggtttttttcagtttgagaaaacacaatttatgtttttgatcataagaaattttagttttttctctaaatcttctcaaaaataattttcgttccattctctccccggttacaggtcagattcagcgatagatttgggtttttcttttttcatatgttaatttattcattttgcatttaattgttttaggtataaataaacattttaatttgatagtttaaaaaagggtttcattgtccaaaaatatttaaattcttaattttaatttgcaaatttagttttattatagattaaaaatggatgaaaaaagatttttaaaagtacctaaagaaaaaagacagttgagaaaaaaaaaaattatttttcgaaaacaaataatataccagacggaagttattacacagaaatttcaaatacgataaaagagaatagaaaatttggaataaa

SEQ ID NO: 59948 - DNA, 369 bp, Heterodera glycines
atgcacgcgttttgcgctcgagctatttatcatcgggcttgtcaatccaaagcgaaacaacaaagatgctgttttgaacgaataaagggcataggttattttgaagaagtgtcaaagaacatgcagcaataagcctgcaaaatctaataagtggaaaatacatgagtatagaatttattttcagaaagtgtccacagacttttggaaaaatatatttgcaatttatcaacaattttgagaagtgagttagaaatgataaacttcacgattcaaaccaattttcggtgctctaattaaccgggataaaaacatccgaatcaattaaatagcttctgagataataaggtttatataaaatttcaattaaaa

SEQ ID NO: 59949 - DNA, 753 bp, Heterodera glycines
atggcagatttaaacaatggcacagtaagccaaaagaaaaaataattattgtttttaatttattttcagttttatttggcatacaaaaatgccaagccaagttgggcactgatcagctgcgcatttatatttggaatcatcgcagcatttggaatcattttcaatgtttccgttatatttgtaacaattaggacaaagtttgaaaaaaaagctgaataattcctaaatttttaatttaaatttttagacaattccgtggcaccgttaattaccttttggcactttgttccttttttgaactgcttcaccaacaagggcattttctatttgtgtacaccacattttctggccaaaatttcattccgtatcgcttggcaacaaagattgaactgatttcaatgcttggaatttgtaagaaatcggaaaatataaatttttatttatccgaaattttctaaaactgaaatttaggtggcatttatccgacaatgcttttcacgggcattgaccgactgattggagtgatttttgatgaaaagttagatataaatattgttataaaacttttaatttccatttttaaggcaccgtaagaccaaaatccgactgtatttggctacgataacaattgtttgggttgctttttgtttcgacttgtgcaaatcgttgtaccaaagcattgaattgattggtgatcagatggtcactggctgtttaatcgatattattaaagtttcgaaatttttttattaa

SEQ ID NO: 59950 - DNA, 515 bp, Heterodera glycines
atggagcatcaaacatttatgaagtggtcaggacaaggtttaagctattactttcaaaaatgaaattaaaataagagtataatttaattgcaaaaattaacaaaagcttagaaactcattcagataaataaattttaaaacaattttaccaaaaacacaaatatatttagccagataaaaaataatacgtccaaatatgttttcataataaaacccaaataaaagccttagtaaaattaaaaaaattggaatacaagtgctaattttataataaaatacgtaaattaaatatttttacccaatttaattatttttttaaacgaaaagttcaaattagattatttatatatttttttaaattgcagaaaatgagaaacatcacactggttcaagaataactgcacaatgataagctgtaagaaaaattgagaatattaaattaatataaagtattgaattgatttatgttaatattgaaatctttgaaagcaattcattttagattgaaaaataaa

SEQ ID NO: 59951 - DNA, 2007 bp, Heterodera glycines
atggtaaagaaatatgaaaaatattctattccatggggaactgaacccaagcgaaaaataatgaaagtcagaaggttagccactagacaacatttgaattcgaataaatgctataaatgaaataaaataatttaattttttcctcaaaaatttccacttcttcaccatttcctactcttttctcacctagacacccattcataccagtgtaaatttttaccggcggtaccggtactagacaaaccggtaccggtaccaaaaaaaccggtaattaccggccagtaccggtaccggtaccaaaaaaccggtaattaccggccagtaccggtaccggtaccaaaaaaaccggtaattaccggccagtaccggtaccggtaccgtgcaactcagttttcaatgaaattcaaatgaccccactttttaagtagcgctaattattttatatttttccttgttctacaaaattttaaggcgctagttaaaaagaggacctttttgaaaattttttcacttttttttggtcaatttttttttcgtttattttgatgcagaattcgcttttttaccagatggtatgcttcattatttaataaatagaaaaaaaaatattaaagcaaatttggcgctagttaaaaagtgacagattttgaattttatcaaaaatcataagggcgacccttttgttttacaaaaattttttgtgatacaaaatcgtgaatatacttttattcgccataattgtgctgttaattagagacaggcgcaggacaggatcctgcgcaggattttgcaggatcccagtccgcaatcctgcatattttggaaaatacaggatttacaggatttgctggattaatcctgccggatcctgtcctgtaaaaaattttgaattccaatcctgcaacaggacccgcaaatttgatttttatgcaggattcagcaggatcctgcattgattttttgaaaatttttaaaaatagaatgccaaatattcagaaactttcttttttcaaaaatttttttcttaataaaaatttttcgtttaaaaacttatccttattcgaagccacccaatttggcaaatcggtctttttaaacgcattaaagaagattcagtcgattgcttggagtgtaagcaaaaaaacgttattaatttttcatcttcatcattttttggtttaaaaatatattgaatacttttttatactttgaaagacttttttattaatacagaattttttgaaatttcctaaaatccgcaatcctgcgcagggtcctgcagattttaaatgcaggatttgctggattaatcctgccggatcctgtcctgtaaaaaattttgaattccaatcctgcaacaggatccgcaaatttgaaatttccggtctctactgttaatgcttaatattcatcattatgtgtaaataaacaaaacaaaacaaaaattgaccaaaaaaagagaaaaaattttcaaaaaggtcctcttttttaactagcgcaatatcttctaaatattcattcggtatatataattttgaaatagcaatttttagagaattttggtgataaaatcacacaaaactttttcatctttagtttaaattcgtgaaatgacaaaaaattcaaataaccgccttttttacgccaatttttaaatggcgggaacatttttattcaaatattttttgtttttcaaattttcttcattttctttgctcattttccgcctacgcctaatgaaatgacttaattcaatttgaaaacttcatattttaacaaaaaatatttttaggcctatttttctacaataaaattgcaaaatgtccagcacttcgtccactgctggtggtgatggaggagaaggggaaagtgaacgcaccgcaagtccaactccgctcgtcccgctcaacgaatttgaacggaatacgcttcgaagcgcttcccagcaggagggcagcggtccgtccccctttttgggctttaagcatccaattaatcggcttttag

SEQ ID NO: 59952 - DNA, 966 bp, Heterodera glycines
atatcaaccaattggtcaccacccaaggcatggtcacgcgcatttcgccgctcatcccacaaatggtcgaaggctatttccaatgctcattctgcaactatccggtccaatttttttgagagttgctcgggctaggtgaactgttcactctcaacaccaaccgggattttctgagggggcaggttttggggcaaaaattagtcttcatgttttactgagattactggctattgctgctgttgtaggaggtgcgtaaggtggacatgggcgtggtggaggagccgatcaactgcatcaactgcaataaccaaggctgcttccaactcatccacaaccgatccactttcatggacaagcaggtgatcaagctgcaggagataccaggtgggcgagaaagggcagtgttttggtgtcaattaacaatcaacaaattcaatactcactctcataatccaccaataaagagttcgagcagtacatcgacccgaataccaaaaatgagccaaaattaaattttaaatgacccatttagccccgaaaaattaccatgagaattcaaccccaataaattggctcgcacttttcaattttttttttgagttcaaagtcaacgccgtttggccgttacaaaaaaagcttaattattgacaggcgacatgccggccgggcaaacccagcacacagtcacgctgttcgtgcacggtgcgctggtggagagtgttcacccgggcgatcggatcaccgtcaccggcatctaccgggccagtccggtccggctgaacccggtgcagcgcgcggtgcacgccatcttccggacgagcatggacgtgatacacttccgcaaaatgtgccaggaccgactccatgatgtcggagacggcactttcttgacggaggagcgggtggcaaaaatcaaggcactcgcccagtgcgaggacgtgattgaacgactgatgcaggcaattg

SEQ ID NO: 59953 - DNA, 511 bp, Heterodera glycines
atgtctataactcaaaataaagttcatattcgtgatcagcgacccaaattacgtaagaaaatatgttttttttaaattttagagcaaaaaaatgtgtccattaaatttccaaaatggtatccctttggattttggctccaaaagcagttttaattttataactctttttaaaaatgtgctaaaattatgaaataaattcctacttgtagagaaaaaaattgcggattttatcaatatttttttataccctactgcctttattggaatgagttatgaatttttatgtgaaaaatcgaatttttcatctttttcaggaataacatttttcatattaattgtagaaatgcacaataaaaaccataaaattctcccgatttttctgcattttttgatcatttaattttcacatttgacccatttcaaatggagttattaatttttgaaaatccccccaaatttcccctgggcgaaaaatgaaaaattcaaacacacccaaatttggtcaaataaa

SEQ ID NO: 59954 - DNA, 1157 bp, Heterodera glycines
atgtcaatttctgacgttgccaagaggccgtccccagtgcgcatggagggctctctcattgagccgggatgtttcactggtcgaacaatggctgtttttacaagtggcggtgattcgtgcggtgagtcccgcttccttcgctgcctttttttgaacggcactctttaaggaatgaacagtgcggtgcgttccgttgtccgtaccggactttactttggttgtcgcgtgtttttcatcaaagagggttaccaggtcagacggaccgagcgacttttgggcggcgaacatccgaatgtttagggaatggtggacggaggagaaaacattgtggaggcgcattggaattcagtttccgacataatccaaagcggcggtaccataattggttcggcgcgttgcaaagagttcagggaacacgatggccgtctcaaagtgagtacattcgctgctctttttattcggttgcttttcggcttgcaaaaatctcgtcgcaaattccattactcatttggtatgcattggcggggacgggtcgttgaccggcgccaccatttttcgtgacgaatggccagcactgcttaaagaattggtgtcgaatggccaaatcagtgaggagcaggccaagctttgcccttatgtccaggttatgtttgctttcggtcataacatcctccttaaaattaaagatcgtcggcctcgttggttcaattgacaacgatttttgtggcactgatatgacaattggcacggacagcgcattgcagcgaattgttgaggtgcttactattgaaatggaatgcaatctccgacatctctttcttccttcccttttcttttcaggccgtcgatgcggtcgtttcaaccgcgcaaagtcaccagcgcgcctttgtgattgaagtgatgggtcgccactgcggttatttggcgttggttgccgctttggcttgtgaggccgattattgtttcattccggaatggccacaacccaaaaaatgggaagaggtcggcccaccgattcatccgcccatcaattcattcgtttttaggttctttgtgcaaaattgaccaattctcgcgaactcaaccagcgactgaatattatcattgtggcggagggtgccatcgacgaggaaggcaaagtcatcaccagcgaaatg

SEQ ID NO: 59955 - DNA, 388 bp, Heterodera glycines
atgacattctatgcttctcttgttggatacacgggaagaaataatagttagtccttttgttgaatttttagaaattctatccgtcaaatcgacttttggaattttaatgagtaaatcaggaaccgtaaatgacattctctgcttctcttgtttttttagaaattctatccgtccaatcggcttttggaattttaatgagtaaatcaggaaccgtaaatgacattctatgcttctcttgtttgatacacgggaagaaataatagttagtccttttgttgaatttttagaaattttatccgtcaaatcggcttttggaattttaatgagtaaatcaggaaccgtaaatgacattctatgcttctcttgttggatacacgggaagaaataa

SEQ ID NO: 59956 - DNA, 276 bp, Heterodera glycines
atgacattctatgcttctcttgttggatacacgggaagaaataatagttagtccttttgttgaatttttagaaattttatccgtcaaatcggcttttggaattttaatgagtaaatcagtaaccgtaaatgacattctatgcttctcttgttggatacacgggaagaaataatagttagtccttttgttgaatttttagaaattctatccgtccaatcggcttttggaattttaaagagtaaatcaggaaccgtaaatgacattctatgcttctag

SEQ ID NO: 59957 - DNA, 545 bp, Heterodera glycines
  unsure (1)..(545): unsure at all n locations
atgctcagatttggtcaattcagtgatgaaaataaatttcacgcaattaaagaagaaattaagaaaaaagataaatattcggcaaaagtctcgtataaaactgagcaaaaaattgcgaaaaaattagaacaaatcgccaatatattttanatggaaaaaagaatttaatttaatgaaaagaaagaaaaaccgaatgaattattatgaaaagaaaaagagagaatttgttgaacgaattgacgagttaagaatatgtcctaaaaaggaaaacataaagaatttgccaaagaattgggcatagacaaaaaacattattcctatggaaaaaggaatttggcattgaaattggtaaaagtaattaattanaattttaaattaaaatttaattttaaatttttagttaaatatgcgtattcgaatgaagaaaaaaatgaacatttgatataaattaaagaggaaaactcggtctctaaaagtgaaagaaattgctgaccttttgaaaattggaattgtnantntatnaaaatggaaaaaagtaaaataaa

SEQ ID NO: 59958 - DNA, 206 bp, Heterodera glycines
atgccttttcttatttttgtttttgtgctctcattcataataattcaactaaaaaagctttatcagtaaatttatgtcaaaagaatagaaaactttggccaacttttgctgaaatttttagccaaaaatgggataaagaaaaaattgaatttgaaaatgaaattgatcaaaacgcaaattatcgtaaaagtgataaaatgaattaa

SEQ ID NO: 59959 - DNA, 1033 bp, Heterodera glycines
atgaatgggtgggaagagaaaggcacaaattgggcaaaaaaatggcaaattgagagaggtgagggaggagggagggggcgggcggggggtggaggtgagcgatggcaaatgacggatgatggcatcattccatctctaaagctgcattcaattaaatttaatatttttttttattttaaaaaataaaatgaataaaaatataattttacatgcttttttaagtgcctaattgtgtattaaactaaattagtaattaaacgtaaatttttacgcattttttgccgttctaaaatgcagatgtgcaaaattgttttttctatatttctttttattttaatttttcaccaaatttcaccaatcgaattcggcgagttgggagaagaaaaagaagcagttcaagcagaagatgaagcttttttgaatgaaaatgaaagtaaattacaacaaaatttaaacaatcttaaaaatttttttagattccgagtcaattcaagaaacaatatttatggaagagaatgacactgaccgttatgaagatgattacgacaatgatgatgatggtaatgacgatgaattagattatgagtatgaggatattgctgtcactgataagacggcatttttcggacattttgactcaattaaatcagacaatgaaacatttgaggagacagaggaagagcagcagaatgaaagcgttgaagagagagaagagcaatttgagggacaaagatggaagttacgggagaggaaggagaaagaagaggcgggaaaagatggagagaagcaggagaaagaggagggaaaatgcgagaaggggtggctcaattaccgtaatgagttgtgcttctacggacgccgcacagagaaggacttttacgcgggggttgaggaatgtgcccaaatgaaagtaaatggcggatggaaagcagcagcaggaatgccaatttgtgtaattttgctttttaggcaaatttcgcttccttccacagtgtggacgagttcaccttcatcactttccactgggacttga

SEQ ID NO: 59960 - DNA, 97 bp, Heterodera glycines
aaattagtcaaaatacatgtcagattcgtgattagcgacctttaaaaccccggataaaaaattatcatggttttttatcttaaaaaaattttgcaaa

SEQ ID NO: 59961 - DNA, 1734 bp, Heterodera glycines
cgttggaagcgcgaattggacaagcgaatggcgcaacggaaagcggcggagaagcgggcggcggaaacgctcgcggaacaagaaaagcggaaaaaggaggagaaaagagcggacgcggaaaaagtgcgcggaagcaattttgaatagcgcttctctcgagagtctgtcttggtcccgagctttgacccccataaaaattctgattttgggttttgaatttgactgattctcttgtcccagaaaatttctctaactcttacctcgggggtatacttagtgtcatatgcctcaatctcgagatatcctcaagaaaagcaattaaaagtttgttttttttattctgatttttaattttctctcagacttttgagcattggaaacgcacggaggcacaacgcgtgcgccgtcaacgcgagcgggcccaaagcgcggtgcagcaacgcgaagcggacgagcggcgacggaaggaggcgaatcggacgaaggcggacagcgcgtttggggaatggcgagttttttggaaaaaaatattttaaattcatacaaatggataatcgtgatacccgagacagaaaattttgccaaaactcgagaccccaaacaaatccgagacttttcccgaaacgtcgatgaattgcaagatgttttaattaaataaataatctagttttctctctaattttgaaatttattttttaatttaatatatatttaatttgggctttatttgggcatttttaaaaatttttagtctcacaaaatgtgcgccaaagagagagggagcgaatggagcacgagcacgcggaacagacggaacacgagcagaaggaggagacggaaaagcggaagaaagaagtggcgcaagaggcgtacgaattgtggacgcggatgaaggcaaaatttaggaggaaaatgaaaaaaattttaaattaaaatctaatttattatttaaattaaaaaaagatttaaattgtattctaatttattatttaaattaccaataaaaatgaattcaaattggaattcaataaattattaaattttaaataaaaaatgatttaaatgaaattaaatgaaattaaattaatcattaaaaaatgatttaaattgaaatttaattaattattattaattttcaataaaaaaatgaattaaattgaaattattattaaaattttcaataaaaaatgattttaaattgggattcaattaatatgaattttttaaaataaattaatttaataataaaaaagaaaataaatcatttagatacaaataaaataaattttatattgtttatttgaagaatcttttaaatattgtaaattgaaataaaaataaaaattgagaaaaatatttttcaattaaattctttttttcttaaacctttttatatttttcatttatgaaaaatataaaaatatgttttattggagaaaaatcacttttataaaaaaaaattttatattgttattttaaagaatatttttaaatattgaaaaggatttaaatttatagaaaaacatttataaataaaaattatttttttttgttttaaaatttaattatttatttttcacattttttcaggccgaggaacggcgatacacccaaagtttggcctaccgaattttggactttgaacgaaaagcgtcccagcggtggtgctccgccccgtggttgcccaccagtccatcgacgaccacaaaaatttgtcggcctcccccgggaaag

SEQ ID NO: 59962 - DNA, 1204 bp, Heterodera glycines
atgcaaacagtttcagaagagaagccgaaaacggtcacttttgcaatgcaaactgatcaaaccgatctggtcaattcggagatgcagacggagacagcagagaagccgaagattaccaacaagttaatcactacagaggcgcagactgaacctgaagagaagcccaaaacatttgcttttggattgcaaactgatcaaaccggtttgatcgattcggagatgcaaacactgtctgaagagaaaccgaagatgaccaacgacgaggttcttgaactcaatgtctcggttagtttattttaaaaatgtttatttggtcttcatatattttcttgttgtcattttattctttgagactaattttatttttcgatgttgcagaaattgcctatggatgctgattcgtcatttctcagtaatcaagggcggagttcccctttgttggacgaatcattgcgccgtaaatacaatgaaaagtgtgaagaaatggcagaattacgttatgtaatttatctttttcttaaaatcttttctaaacattttctacaggcatatgagtttcaacagtcaatcatttctaatcaactggacgaaattgcgcggctaaagcaacaacaacaactacgaaatggcgttcaaaaaaatgggtgagcgaagaaatagattcttacactgacaatgagtacgtttaaaagcgtgttacttttttgaattaaatgatgctttccgattacaatacaagtcattgttcagaagtccgtcctcgactcgtcacccaaccattactgctgcttcgccgtcgtccgttttccctagcggtgctctgcccaccatttcgggtcgaccacgcgctgcaaggcgaacttattgcgaacattgcgaaatgtttgacgcacacgactcgtcagagtgtccaaaagaagaggcaaaaagagcagaacgacgcgaccatgaggcactttcaccgcagaagtgggacgaacgggaacgcaccttctggcattaatattgacgatgcatttagacccaccctttttctctttatttttgtccattcgtttgtatgatcttttgactttaaacccgtgtgcctttttctcttttttttgtctcattgagtttaattattttcatcagctgcctttcatattcttggttcggtttcctctttgacttttctttttacattaaaaatcgtaaaaactaa

SEQ ID NO: 59963 - DNA, 133 bp, Heterodera glycines
  unsure (1)..(133): unsure at all n locations
gactgaatctcaaaaatgaacggttctctgacaaatggcaacaaagtcgaccgcggcgtcaccattcttttgggcgcgcaatggggcgacgaaggcaaaggcaaagtgttggattntctcatcggacatcaca

SEQ ID NO: 59964 - DNA, 1455 bp, Heterodera glycines
ttgttgagccgggcaaaaaggcatacaatcggctgagggctgagtttggcgacagttttttcgacgatgaaaacggcggagttttgcgacgagacaaattggccgagttggtgttcaccaatgttgaagtatagtttaatgaatttcaccaaagatttttttgaaattaaaggcttacaaactaaaaatttagaaattttgaaaaattcgcaaaattttaacccaaaattagtgccaattttgaaattaaatgtgcaaaaaatgtaatcccagaaaaggaaacggttgaacgcgatcacacacggcgaagtcatcaaagaaatgatcaaacgcattctgtgggaggcggtccatctgcggaaattcatctttttggacattccgttgctttacgagaccaaaatggaccgatttgtgcagaaaacaattgtcgtggcatggtaaacagaattttcacaagcttcagcaactttaagtgccccctttttttcgaaaaaacgattttcaaaatgtaatttttagtaattaaaaatcggaaattttaccacccatttccaatcgttacggcattgtaaaaacaaacagtttttttcccaaatttttgatttttgaaaattacaaaaaatatccaacttctaagatttgatgacccacaaaagatgagacttttctttaaaagatgggataatttcttacggttttcccaaagttttttgggattagagtggacatccgctgaagaaaatttgaatttttttaatcaaattttgttttaaaattggaaatttttcaggaattcctctcatacttttttcaatgcaaattttcacaaaaaatttgatttccaaatttgattttaattttaaaaaaactcggagattttaacattaatttttctcaaattcttgtgttatgacaatttttttccccattcccttcaaaaaaagggattgccaataaaaataaataagccaaaattaagcaatgacgacactcagttgtggcgcgtggcgttgcgcgacgaattggccaccgacgaagcggagaaacggatcagagcacaaatgccaatggaagaaaaggcacggaaagcctcatttgtcattgacaacaatggtaaattttgcggcttttttcttaaatccgatatttatccagatttcttggccacggtcaatagcactcataattttttttatttattttttatttaaaacaacaaattttaaagacgaatttttgctagaaagactttgaaaaatttgttaatttttcatttttttttcgtttaaatttcaaaaaagtgtgtacgaattgccaaataataatgacaccctttggcgccaaaactgtaaaattattgttttacgtaataattgaagcacatttttaaggcagtcttgaggaaacggagcaacaattggatgccgttgtcgaactgcttgagtccagctg

SEQ ID NO: 59965 - DNA, 420 bp, Heterodera glycines
atggaagtcgatgaggaagacgacgacaaaacgtttgactgggacgtcctgtgtgctgaggatcaggatgatcacgaattttgtgccgtgctccgcgtgtctgaactcgtcccggcgctagggaatgccgaacttggcacaatggccgtgaaaacccctctacacgctcttttggcggtgtttttgctgaaagcgggaacagtcaagtcaatgaccgcagcgcgaagtctggtcaaagcgataattgaaggcgagccaaaagaagaaattcgcttatttgtggccaaaaagggagattttgtggcgaccggacagtacccaacggagaaagatcaaaagaaggctttggaatgcttcttcgaaaagtgtttggtggccagacgcgccttggagaaagcaaatttgagaagattggcatga

SEQ ID NO: 59966 - DNA, 312 bp, Heterodera glycines
atgggcgttagaacaattgagggcaaaaatcgtgcacaagcctcaaaactgatggcacacccgcgtatcataatcggtgatcagtctgctcaccaattggcggaaatcctggaccaaacggcagtgattgggcccaaaaatggaacattggcggaaacagtgcgcactctgaagccagtggtactgtcgagcaaagtgaaggcagctctgattattgccggacgcgactctcttctgagagtagaaactgtcgaaatgatgatggaacagtacgaaatgatcgcgaatctgtgcgccgttttgcacatgtga

SEQ ID NO: 59967 - DNA, 436 bp, Heterodera glycines
atggtcaaaagtcaactgatcactacatccccatcacaacaaaaaaggcgtccctgccgttcgatcgaaaggtgtggtgattcgagcagaactataacgttttaattgcggtgattcgacgacgatccacggttcggccagaagacgcggttgtctccactgctgtacgggtggtggtgatctcggtgggctcttcctccgaacgtgtggcgtcgatggtcacccagaccaatcgagcccgaaccacggcgatgctgatcacgataaccgatcgaaccaatggtgtggcgccgatggtcccccagaccaatcgagcccgaactcgaagtgctcggctgtcggtggtcacccagaccaaccgaagcagcgacgtgaactgccgaccgaattgtccgaattttcaatttttgatcacccgggaagtctgactgagtga

SEQ ID NO: 59968 - DNA, 515 bp, Heterodera glycines
atgaaactccacctattattagttttaattatatttttaatcatcgaaattgatcaaattaaaacggaaaagaaaaaattgcaacagaaatcatttgatgaaatatttggagaaaaacgggaagaaaaagaagaagaaaggcgaaatgaactcaaaaaaagagaaataattgcaaaattttataaaataaaagagaaaatcaagcaaaaaggaagaaaatactcaacaaaagaatgggaaaaaattgaattaaaaatagcgaaaaaattggggacaaatcgaacgacaatttataaatggatcaaggaattggggcttaaaaaaaaattattttaaataccctaaattttgaaatttttcttagtgaaaataagtgaaaacagtcaattcaaggattgggagggaatcattaaaaactgaacaatgttggaactgggctcccagtatgcctaaattttcgattttagaggccttgtaaaactccttggggttttgctagggtgaaaaacaataaa

SEQ ID NO: 59969 - DNA, 1397 bp, Heterodera glycines
  unsure (1)..(1397): unsure at all n locations
atggggacatatcgcaaaaatatttatgaatggattaaagaattggggcttcaaaaacaaataaagaaaagctataaatcaaaaacggatgaagaaaagttagaaattgtacaaaaattcattgaaatggcaaatgagcttaaagagaaaagaaaatattcgaccaaagaatggaaacaaaattatgccgaaatttgtaagaaaattggagttagtcaaagaataattgagaaatggaagaaacaatttgctatacgcagtataaaattattcgttattttttcttcaattttattccattcttttcttgagtattttcttcctttttacttatttttttcttttattttataatatttttcaatggggaccattttaataaaatgtgaattaatggaaaaaaaacatttaaaaactaatcattattttacttattattgccaataatttgttcagtagaacaaaatttattaaaatctaaaaattttttatttacattaaattatttttttatatttgtaaaagcagaagatttagatttatattatttataaaaataaaaaattaccaaatttattttgagaatttaagaagaaaatgaaactccacctattattagttttaattatatttttaatcatcgaaattgatcaaattaaaacggaaaagaaaaaattacaacagaaatcatttgaagaaatatttggagaaaaatgggaagaaaaagaagaagaaaaacgaaatgaactcaaaaaaagagaaataattgcaaaattttataaaataaaagagaaaataaagcaaaaaggaagaaaatacccaagaaaagaatggaataaaattgaaagaaaaattgcgaaaaaaatggggacatatcgcaaaaatatttatgaatggattaaagaattggggcttcaaaaacaaataaagaaaagctataaatcaaaaacggatgaagaaaagttagaaattgtacaaaaattcattgaaatggcaaatgagcttaaagagaaaagaaaatattcgaccaaagaatggaaacaaaattatgccgaaatttgtaagaaaattggagttagtcaaagaataattgagaaatggaagaaacaatttgctatacgcagtataaaattaacggaaaaagaaaaaatggaaaaaatgaaaatttattgggaaataaaaagagaaaatccgaaaatgagtgacaaggaaattgcaaaaatgatgaaaattgatagaaagaacatttcaaaatggaagaaactgtttggataaaagaatcattgaaaattgaaaggatgattataagaaaaattggataaatttgccgaaaaaattatcagaaaaactatgtcaatttctagtttttttttcanattttttgtatttgtattaaa

SEQ ID NO: 59970 - DNA, 1064 bp, Heterodera glycines
ttcaatcggctagtgctttaaggttttgtgttttgactttgcttttttttccatttatttcaatcggctagtgctttaaggttttgtctttgactttgcttttttttccatttatttcaatcggctagtgctttaaggttttgtctttgactttgcttttttttccatttatttcaatcggctagtgctttaaggttttgtgttttgactttgcttttttttccatttattccaatcgaccacgttaattcattctctatacatttagtgtcttatttcatgaaattatattaatttaattttaaataaagaggcaaatttttacagaaaataaatagacgctgactaattagctaacatttataaagaaagtagaaatttgattaaatgcatatacaatatacaaaatattacttttttaaatttgtataaagttcctattttgtctttgactttgcttttttttccatttatttcaatcggctagtgctttaaggttttgtctttgactttgcttttttttccatttatttcaatcggctagtgctttaaggttttgtctttgactttgcttttttgtccatttatttcaatcggctagtgctttaaggttttgtgttttgactttgcttttttttccatttatttcaatcggctagtgctttaaggttttgtctttgactttgcttcggctagtgctttaaggttttgtctttgactttgcttttttttccatttatttcaatcggctagtgctttaaggttttgtctttgactttgcttcggctagtgctttaaggttttgtctttgactttgctttttttccatttatttcaatcggctagtgctttaaggttttgtctttgactttgcttttttgtccatttatttcaatcggctagtgctttaaggttttgtctttgactttgcttttttttccatttatttcaatcggctagtgctttaaggttttgtgttttgactttgctttttttttcattattccaatcgaccacgttaattcattctctatacatttagtgtcttatttcatgaaattata

SEQ ID NO: 59971 - DNA, 1330 bp, Heterodera glycines
atgtgttacacggtttcaactcagaattctttttcaataactgatttctccacaattaaggcagatactgaacatcccgctgctgctgctgttgtggacaactttgagacgctcactctccgcttcttcgacctgatcaacgatggcaacatccaacaattgcgtgtgctgatcgattcgctggatgccgacgagctgaacattttgctgtggtggacggttgatccagtggagcgcgacaacacccgatcacgatcagctctttggactgccttcttacgccaacacatccaaattgttgatctcttggtagtgaatgaacaattttatccgtcggcactaatttttgtatgtcattttcagttggagaagggcgccgatccggatgagccagtggctgaccaagtgaacaacataaacacgagtgagtgggtgtggtgttgatgatgatgaaatcgtttttacaatgcatctaatttggtccctggatttggctcggaattggtcgaaacggataccggaaaataattatatttttgctttccctgaaaataatggtgtttccccatttgtgcagatatgacgcctcttttccttgctgtccgccatgccaatttgccgctgtgccgtgtgctggtcgcgcgtggtgccaacattgacttgggcacggactttgccacaacgccgctgatgcacgcttgcaaaagatcgcaaacggaaattggtagagagacgaaattttgaaaaaatgcgtaatttttccccgtcttttttccccccacagtcacatttcttgtcgagaatggtgccaacatcaatctgcagaatggtgatggggcaacagcactgatgtacgcgtgttacacgggaaatgtagggaaaaatttccattggtgaaatgttttcctacatttttccatttgaattcaggtggacattgtgcgcttgttgctgacacatggtgcaaatgtcgagcaaatggatttcgaaggtgggggattactgttacagtacccaaaaataccatgccacaaattttgtctctaattttcaggatactttccgcttattgacgcagccgttggcggcagtttggaggtgtgccgtctgctggtggaagagtgggccgcagatgtcaaccaacaaaccatccaagagcgatacactccagtgatttgcgctgccagtaaaggacatttggccatcggtgggagagaattgtggcaaagtgccaaaaatgtaatctccctaattttcagtgaatttcctcgtcgaacatggcgccgaccttcaacatgttgacgtggacggacacaatgctttgatgtag

SEQ ID NO: 59972 - DNA, 55 bp, Heterodera glycines
atggacaaagacagtgaagtgagtgggattggcaagggacaaatggacaaagaca

SEQ ID NO: 59973 - DNA, 843 bp, Heterodera glycines
atgcaaacgatttttcttctctcaagctgctttgatggtcatcgtccgcagatgtgcaacttgattaaacgttgcgatgaatgtaacagaacttttcaagtggatagaaaaaatccccacaaatgttacagcaactattgtgcgcgatgcaaggtattttttctctatttatttattaataactcctccaaaaaacacaggtataccatgagaaggaaggcgcgtgcttcatcaaacccattgtggtgcctgacgaaaagccaaaataccgtatggtctgctgggacacagagacccgattggagcaactgcaacaggcgggacaacagcgacacaaggtcaactacctgtcagcacgaattacctgtacggagtgctgtgattctgaaaatggtatgcgactcaattgtaaaatttgtttgacaacctacggagcgatggaacgaacaaaggattggagcgaatcggaaggacatgagccaatttcggcatttgtcgagtggattttgaaggcttgggacaacaaataccaaacatttatttgggtgagtttgtgatcgtttttaacatctttgttatgcaaaaataattataggcacacaatgcctcgaggtttgatggccattttgtgctaaaatacctcggcgagacaaagcgacgacctgaggtcatcatgaatggcctcaaaatttttgagtttcgtcttcaacattctcggcgccactcaaaactcacatggcgagactcgtgcctactgatgccaattcgtctggaagaaatgccgaaaacattcaatctcaactgtgccgataaaccattcttcccctacgctttcaaccgaag

SEQ ID NO: 59974 - DNA, 703 bp, Heterodera glycines
aatttggtgcgctttagagcactttctgaaaaaaatatttatgaaacaaaaaaatcgattttttcaagtgtccgtttggggtactcaaacatttatggggagcaaaaatccaacgcagaattaaagtacaggctatagggaagctattcccgaaggattcggtctccccataaatctgggcgcatcggttcggggggactgccccgaaaacaaaaaaatcgattttttcaagtgtccgtttggggtactcaaacatttatggggagcaaaaatccaacgcagaattaaagtacaggctatagggaagctattcccgaaggattcggtctccccataaatctgggcgcatcggttcggggggactgccccgaaaacaaaaaaatcgattttttcaagtgtccgtttggggtactcaaacaattatggggagcaaaaatccaacgcagaattaaagtacaggctatagggaagctattccggaaggattcggtctccccataaatctgggcgcatcggttcggggggactgccccgaaaacaaaaaaatcgattttttcaagtgtccgtttggggtactcaaacaattatggggagcaaaaatccaacgcagaattaaagtacaggctatagggaagctattccggaaggattcggtctccccataaatctgggcgcatcggctcggggggactgccccgaaaac

SEQ ID NO: 59975 - DNA, 1935 bp, Heterodera glycines
atggaaccgaagttcgcctcaattctgtcggaattgcattctctgaacaaatccgtggaggaactgaaacggacggtggcgacggtgcacactccgccacaacggcgcggactcatttcagtcccggggatggtgggctcaaccggaagcagtggcagcagcacaaccaagcagacaatgctgaacggttgccaaaactacgcaaaggcgccagtttccaccggtggcagcgcaacgccaacaaaaattgcgttccgtccctacccaatgaacaacggctcacttcggtatcagcagcacaacaacgccaaggcgccggcagaaaataccgtcaatttggaaattggcagacaaacggcacaacagcagcagcaacatcaggtggggaagagcaaagacggacactggccaaattgtggccaattttgctgcttttacccgatgctttttctttagcgcgttcggctaattaacacgcgcaatgactttgccgggggcactgatcactttccgcctgcttcatcttctgctgctgacaatgtgatgaaattcccgcctctcaaaaacgacttcaaattgatgcctttgacttcttcttcttcttcgacaaattgcggcgaaaatgccctcctcaaaatgccattctcgtcctcctcaattccgtgggccaccacgaagccatcgacgcatgtgttggagccgccaaaattgaccaaaatgggcacggttgggctgaaaaacgggcggaggagcgttcggaagtcggtgcacgcgtacagacagcggaggaaggaattgtcatatcggcacatgaaagagatcggactgaccgtaagcgaagctgagggaacgaagcaccgaaacaaaaaacaatctcaccaaacagttggtcatcaacggagtgccaaagtccattttccattgccgcgtcactgacataacaaacgccgtgcagacgaagcgaagggaattggcccagcagggccaaagagtggtcagtgccatcaaaagcatccatcactttgccatgtcattttgcttttgcagttctaccggggccgggacgtgaccgacgcgctgtaccgcgtggagtgttcccgcgtgatggtcaacggccgtcgctgtggccaaatgatcgcggactctctgtggccgcggggcttcttccgccaacgcatgcttatgccaatccttcgcggggttagccatcgcacgaaaaggcgcaccgacggaacgatgagagaggcggtggccaacgaccaattcgaagtgttcaaaggtcgaaaatgccgagggaaaagaaatgagtggaaaatattattccgtttgagaggctttgcttcggttgggcggctttttgatggacgagccggacagatacaaatggatggaaacggcacgggagggggtgaaccaacgggggctggacgaattggcaaactcaaagagggcgcacttcgaatttgagggcggtccgctattcggggacgaaattgtgggcggggaggagcagcaacagattggcattgacaacgaaacggcacaggtgggtgaggagagagtgttagagagatggaaaaagagagagagagaaggaggaacgagagagagagaaacgagtggaaatagagagagagcaaaacgagtggaatgagtgagagaaaggggacggggtgaatgaaagagagcgagagaatgagagggagagagagagagagagaatcagattttttattgcagcttctcacgtccaaactgttcgcttcttcgtattcggaattaccggcaaatttattattggctgaaaatggccaatatgatgaggacgacgaagagatggaagaggaaaacggagaaaatggggagagagcggagggggaggacggacaaagcccagtggaagaagatgaagaggcggaggagctgaatttgtaa

SEQ ID NO: 59976 - DNA, 2953 bp, Heterodera glycines
aaaagcatttgaataagagcataataagaataataatattgagtaagcgaaaggtcagtgtttttgcttaaaacagaaacactcggcatttaattgcattcacttgcagtgctagcggacccatcctggtcccctcctccgggttccccccggcttccccccccattactccctgccccaggcttttcccattccctccccccggctttgccccctcctcctccctaccccaagcttttcccattccctacccccaagcttttcccttttctctctcttcctccctccctctctcaacttcctcttccctattagatcactttattcctcttttcgagtaccccttctccccctccccattctgtccatgcccaattttttttattgtcgatcgctcgaagcaatgaaagcttcttctccacaaatttgccgacgattcagccaaagtaacaggaaccagtaggaaaagcagcggaggaagaagacgtgcgcagcaatcgcacctttccaatccatcggacaatgctaatgggagaagaagcaggggaagacgaaggagaaaaggcaaaacattaataataattaataataagcacaaaaggggagacaacggaacagcaaaggacaaaaacagaagagcaaaagcagaagaagcagaacaacatcaatcagaggaagaagcagcagaagaaggggaagaagcatcattaacaccacccccccccccctcattaactaattgctgctaatgggcaaaggaggaggaagaggaggaaaagcgactgctgcaacgcgtggacgaaagtgaaagcgaaacagcagcagaagggaaaaagcccaaggaacggtgggaggagaagaagccgaagcgtggccgtactcccccgcccctttcccgtcaaagcgacgaaacgccaacccacccgaaccaaacaacgcagaaagtgacacgcgaacccttgaaatttcgcataaattatcaagaacagcgtcactttcctaactttgggacgaaacggtgtcaaatcgggtgaatgaaatgtgccaaaatgggaaaagaatgccaaaatcagtgccatcatcaaaaaaggcgaacacagcacacaacagcagatggatgctcccatttcttttaggcaagtgcgacaaaacgaaatggcatttttgggattggcattttgtttgactgggacaaatgtggggcaatgcttaagaaaactcatatttctttcatactgtatgaccgtaaggaatgtttttagtcatttttccgttgggaagtgccaatttcaacagtctttccatcagcagtttaaacgaaatggactttacaaatgcagaaaaactgtcaagaggtaaaagttttttgcggaaaaaatttaaaaaaaatacaaaagaatttgcctagaggaactgaacagagaactgagccaagcggaaaaggtaaagcgaaatggacaaatgagcagctgaaacgcacgcacttcagagatggatttaccagtcggacattcggtcgacgcgacggagcaaaagcggacaaagagacaaacggaacggagtgagcagagcggccaaactgtggccaaacgcacgcatcccttatgtgatcagcacacattacagcccacacgagagggcactgctggccaaggcagtcaaacaggcaggaaaatgggcaaagggaagaagcctaaaggggaaggagtagcttaatgggcaaatgggggagaaatggccaaataaggacaagcctaagggtgatggatagcttaatgggcaaatgggaagaagccgaagggggatggggaaataaatgggcaaatgtgggaggaatggccaaataggggaatgggctgaattgaagaagccttaggaggaggtgtggacgaatgggaaattctttttgcccctattacagtaccacgaccgtacctgcgttcgctttttgcctcgttccgcttcagataaggcttaattgcccatttgctttttcgtttacaaaaatgccatccgttttaaacagtgattatctcttcatcggcaaagttgacggctgcttctccgaagtcggtcgcaccagcggagtccaagtcctttcgctggacaatgggtaattaatcggcaattaaatgggcaattaaaccaaaaagagtaattaattccaaccatttcagttgcatggattactctacaataattcacgaggtaataaaaccattcaatgggaaaatgacttttgagtttgttatccctttccaatagataatgcatgtcgttggcttttaccacgaacacggtccatttttgttaattttcattaattaatcagctaataattaaatgatagtcatattcattaattagttggctaatatgaaatgatagtgtttaattatcataattattaattattcagagcgatgggaccgcgacttttacattgacataatatggcaaaacatcgacaaaagtaatttatacttaatgttgcgtttccaaaatgtcggagtttcgaagtgtcaacattaaaatttatgcgaatttttagaagcaataattttattaaattattaaaaattaaattgggaaaatcacttttatttactctggtcattttgttgaggtgcccttgaccaattcggcaaaattgacttgaccaaaacgagttattacggtcagccgtacgactacaaatccatcctccattacgttcgtttgacctttgatttgtgtcttgaatttggcaaataaatgaaaattaggacagtttggcattcagcaagaacggattcccgacgatgttgccaaaaaaaggaggtaaaaaacaagggcacccctccccattcattccgacccctccccccaatgttttgcggccacaatcggaaacgccaaggacttcagtgagatgtgagactttgtagcggaacttttgaggagtgaaccaaaa

SEQ ID NO: 59977 - DNA, 830 bp, Heterodera glycines
atgcattttccgccgaccattcataacgcccaaattcgccacggtccgctgaagccgccgaatatgagccgaagcccaacacagccggacacaagccttggcaaggtgtacttggagtgtgtggccagcttttcggagccgacaaaggccaaatggctattcggagagagcgaactgagcaaaacggacggacggtttgagttcagccaggaacagcaggacacgaacagggacaagttcatctgcgagatcaaagtcagtgggagggacgaagtgagcgacggattggccacggatttcagaatttggacaaatcgctgaccggagtctacaagttggtgttgatcagtgcggaaggccgtgagaacatcgccacgttcaatctgcccctggtgggcatcgaaaaatgcaattggactaatgtggccgcttctctgacaatggacccaatggtcgtgcgagaagtgccactccaacctctggtcccgatcagataaagcgcaagaatggcggaactcgaaccgatcgatcgacggaaaaaatcaatcaaatcgatcgatcgttccccggtgatttaaaaaataatcctctcaaatgtttccttttccaattttattctttaaaaatttcttcgttcatttcattacgtctcaatttctgcatagtttttttctctttttggagattctctttcctttaaattgcataattttttatggcaaagcgtaaatttaactttgttttaaatattttattttacctcatcccttccgcttctcttcttattttttctctaatttctggcgtaatgccacttcttcaagaataaa

SEQ ID NO: 59978 - DNA, 322 bp, Heterodera glycines
ctggcgaaaccctcggcagaatggaattggtccttttcacggcgaatttcttccacaaattccatgtgccactcattgaatttgaatggaaagaccacttttccttttaaggtttatccttgtgatcctttaaatccgccgaaatttgaaaagcgacaaacattcgctgtcaaattggcggattacaaatgcaaagtgacgaaaagaaagtgagaaaagagcaaatggaagtgccaatttggacattattaagcacatccatttaactttttgctgttgaaattgccaaacattcgcttaattaattaaacaaacattccgt

SEQ ID NO: 59979 - DNA, 772 bp, Heterodera glycines
  unsure (1)..(772): unsure at all n locations
atggcattggcagtttcttggcattttgccaagtccttttgttcgtggtgttgccgcgcaagccggaccaacgggcgcccatcctgcgactgatcagttttgtgcgcaactcgtgctgcagttgctgcgccgacaacacgttggacctggagtccgctgcaggtgcaagccttaaaaatttatccttgtattttcaatttcaaggacgtccttaaaaaactcaaaatattaacagcatttttgcgatctaaacgggtttgatttctccttgaaaaaggaagcataaaacctattaaatttagaattaaaaattcgtccttgaatattgaataatggaatttaatttttttcccaaaataatgccaaaaaacaacaaatttttcagtggtgacagcggacaagaagtgcagtgccattgacaccattggcattcatcggatgtccagcagaatgagcaacaaacaccgttggtccagccgcatgatcaccaatgttgtgggcgagatggaaaatgtcatccaaaaagtgcacggagaccagtatggaaataaataattttcaaatttgaattaatttaattaaaatttatttatgccaactgtcctgggtttaattaaacttattaaaattatctaaccttcaaaattcaaaaaaaaaaaaaaagaaaattcaggactcttaaaaatattggttaatttcattgngttcagcgtttaaattcaaatgctaaatttttacggcaacataaaatcctcattttgccacagtttca

SEQ ID NO: 59980 - DNA, 153 bp, Heterodera glycines
aaaatcgagcttccaaaactctacaataagtctgctgggcacttttctctcagatcaaacgccgacgcggtattagcctggtactgaagtgtactttttgagcacgcttcagttgccattttctgcaggccagggggtggctctattaataaa

SEQ ID NO: 59981 - DNA, 85 bp, Heterodera glycines
ttcgcccctatttcgcgaattttttgcccctatttaggtccctaaattggaatttttcgcccctaaaaatccacaccctactgat

SEQ ID NO: 59982 - DNA, 1005 bp, Heterodera glycines
atgattttgcttttgaacaaaagtaaatttgagtctaagaaaaaggcgaaggtgaaaatcgtggacgagtccgattggtctgccgaattccctttggacatggctggcagcagtgggcgagttatttgcaaaggcatcgccgaaggacagcgcgagtttgaatttgaggcacaatctgaaaacatttgtttgttttaatgcctttctccgttcagatgactgtcgatgtccaattgggtcagtccggcctcactaaagtggtgaccatgcagaaagagaaacgcaaaacgttggtggcacgttatgccaacacggaggaggaatcggtgcaattcacagaggcatacgaaggcttttgtcaaatccggaacaacgtaatgcttccgtcgttccgaaattttaattttttccatattttagttgatcggcctttacgttatcgtctctctgtccgacgaatcgtccgtcattcacatggagaattttgtgcccggaatggtgccggcgattctgatgaacgacaccaaatacccaattcgctaccgacagacgggccacggacagtggcaaattgtcaaggctaaccaaatggcaccatttgcgtggaccgactcgctgaatggtgctgtttctgtcctttaaatggctttttatttttcaaataatccttatggtaccacagccgaaatcagtggtcaaaaatggttgcttttttatttagaactaaaatgtccatttctttccgtgtccaatttttaaattgtgaacagagtcattttctttttaatttcccatttaaataatatttaactctatggaaattgggggcacaaatgttgcatttgttctttttttagagccaaagccattcctggagtgtgcatttgtgatgagtcaatcggaacatacgaacattgtccaaatcaaactgctggaggcgttggtgcaagaatttgcgattcgcattgaccgaacattgctcaacgaactttgtgtgaaaataaa

SEQ ID NO: 59983 - DNA, 62 bp, Heterodera glycines
ttttacgcgtcccatcacattttacgcgtcccaacaacagtttacgcgtcccatgacatttt

SEQ ID NO: 59984 - DNA, 2605 bp, Heterodera glycines
  unsure (1)..(2605): unsure at all n locations
atgcacggcatcttcgaggctgccgaaggaggcggacatgacgaagaaggaggagatgacgaagaaggaggaggagacggagcaggaggaggagacggagcaggagaaggaggaggagacggagcaggagacggaggaggagacggagcagtcgccaacgaccagtgcccgtcagtgggaacagttgccggacaaatgccgtgcctatttggagttcatacaaaatcaactgggcgtacccgtcgaatacatcggagttgggaagggacgggagcagctgattgtgcgcacgaataacggagggtgatagagaaagagagaagtcataattattgtttgtaaatttattttcgaagcatccaatctgccattctaataaaagtgtgcctcattcaattctataaatgatatatcatttgacgtctctcggtctgtaaatgccgaattcgaaagaattttttagacaaaagatgggtaaactccaaatgaggggaaccgttttagattttgttgaacattatatgttttacccactcgacggttcagtctcgaaggcatttagcctacccatttttgttccttgaaaaggatccctcgtttggttttcgaaccccactttgactttttcgacccttctctaaatagtgctctttttgtaatatacacagcggcccaattttgggctctcagtgcaaataggtttattatttatttagtaatcagaacgccaaaactttgcaaaacttaaaatttttttgggattttcccttgtaaaaatagaagagccgatctcgagttaaaaactagacagctaaaaaataaactgtgattcgatagtagagggggacaaaatatgggcctatacaaaatttcaaaaaaagttacccacaggaaaaaattttttccatggcaaacatttcaatactttaattcttttttagccaagtgctcaatttaaggccaaatcaaataaaactaacaatattctctagaattttcccttcaaaatgagcataaattggttttatttgatctagtattgacaaagttataggctaaaaaatttcataaaaattatcgatgctgtacgtaactaactcttatgaaaataattttttttgacacgaaaacttttttaataaaaaatatttctgccttcttctttaaaagaagaaattgaaattaacacacaacatagggaggacttgaacctgggaccccccttttggtgactaactcacagaccactccgacgaaaagtccaacttatttgcgcttggagcccaaaattgactcgccgtgtgcatatatcgccaaagaaagaattttgtcaatatataggtagaaaggaacagttcaaattaaatctttccgggccttgggtacacaccgtttcagtttttgcctcccagttccaaaaagatttgcatgtgtggcgaagtggtttttgtaagatagtaaagggacaaagggtggtggttcgagtccgttgtgcaacatgaatatttttatttatttttgtccaaaatattaaaaaatgacgaattttgggaattatttttgggccaaccaacttggacaatcatggtatcattcgaaagctcttgatgaggagaagctttttctaagcaaatgctaagcgatttggtgtaccagagaaaagttatgaggctttaaaattttgtttttcttataacttttgagtttgacctattttaatattaacttgacctatcattagatgcagaatatttttctctatcgatatgcaaaatttgaagcggatttaacaagcagaaaaaaagttaaacaggatgaagtaaattcagtttttctctaataacagagacaaaaaaatagtacgccaaaatgagagatgcatttttctctggcactctctatttattggtacacatctcgttttttgaaacggtgtgggtacttgtttagtttacgggatagatttcacaaacatttttaactgcctataaatgtacatattttattcttttcttctcatttcccctcctaaatacgtgcaccttttcttttgcttgtggtctttgttttccaacgacatggcacgttatgccaacacggaggaggaatcggtgcaattcacagaggcatacgaggtttcatgagaaagtgtaaagaaaatttgaatttttttctgtcgggacaccaattccgaaggattccggcattccgccgatggaaataattacaaaataaaagaaaatatccctggggaaagtatttgttcattgggctttcttttaatgcatttgctttgttgttttgtttgttaaaccctctcactttctcagattgacattgtcgcgcgatgccataacggatcaaaactcgtaaaccaaaaaacgaaattattgaacaccgatcaatttgcagaaaacgtggcaccattcaacccggcagcattggtccctatccgttcgtcacttcgtccaattccaccgtcggcgngtgcatcaccggccttggcattccgccgacagccgtccgtcgcgtcatcggcgtggtcaaagcctaccaaacgcgtgtccgctccgggtcatttccgactgaactgcttgacgccgat

SEQ ID NO: 59985 - DNA, 357 bp, Heterodera glycines
atggaacaacaacaaaagcagccaaaggaaatgccaagtcccagcggtgcctccgccgccgcccctccgttgcccaaactttcggttcattccggcaatggcaaattgcgtggcggtggagttcgcgcagtgcgcgaacagtcggtcagttcagtgccattggacgcaacacgtgccacaatatatctgttccccgccgaaggcgctgcagcgactattctcgcggttggagcgtcgcttgggcctggcgatggccctttgcatggccaccattttgtgcgcgttggccatcaacggactgttccacgacaagtccgcgccacaatggtgcaactcatcggcacaattgagcaggaa

SEQ ID NO: 59986 - DNA, 420 bp, Heterodera glycines
atggcgaatttttctcctccttctgacaacactgccccaaaaaaatttctgtccgaccttgaccaactacaaatccccaaagaaatcgactcagacaactccattcccgactacgccaagttgcttattaagcagcttcattcccttttaagcaccgcctccgtcctaattcattcacaggctgcggctgtcgacgcggtcgaggaggaacgacgactgagaactgtcgttgtgacaaatatgcccgaaagcaaatcggacaaagcggcggagagagcccgggaggaccgtgccgttgtggacgaaattttgaatgccacggacgtcgaccaagcaccaattgtcttccgcgtcggcaaacgaatggatggacgaccgcgcccgctcaaaatggaattcccgaccaaacacgcagcgtga

SEQ ID NO: 59987 - DNA, 503 bp, Heterodera glycines
caaaagttttttacaacaatatattgccaatctaatttcttgcagattgaaagccatccattgcctgccggttctcggcacagcaaagcactaatagggtgtttgactcacttcaaaaaataattccttacccaaaagttttttacaaccacttattgccaatctaatttcttgcagattaaagccatccattgcctgccggttctcggcacagcaaagcactaatacggtgtttgactcacttcaaaaaataattcattacccaaaagttttttacaaccacttattgccaatataatttcttgcagatttaaagctatccattgcctgccggttctcggcacagcaaagcactaatagggtgtttgactcacttcaaaaaataattccatacccaaaagttttttacaaccacttattgccaatctaatttcttgcagattgaaagctatccattgcctgccggttctcggcacagcaaagcactaatagggtgttgactc

SEQ ID NO: 59988 - DNA, 675 bp, Heterodera glycines
atgagcgctaaaattatcagagtgccgaaaatcgcatgtgatctaagcctagcaaaaaatggtgtaagtaaaaatcgtaattacgctcaaaaagctcctcaaacaattttagcgcttccaattccttctacaatcgcctttatacatcccattatgagcgctaaaattatcagagtgccgaaaatcgcatgtgatctaagcctagcaaaaaatggtgtaagtaaaaatcgtaattacgctcaaaaagctcctcaaacaattttagcgcttccaattccttctacaatcgcctttatacatcccattatgaacgctaaaattatcagagtgccgaaaatcgcatgtgatctaagcctagcaaaaaatggtgtaagtaaaaatcgtaattacgctcaaaaagcttctcaaacaattttagcgcatccaattcattctacaatcgcctttatacatcccattatgagcgctaaaattatcagagtgccgaaaatcgcatgtgatctaagcctagcaaaaaatggtgtaagtaaaaatcgtaattacgctcaaaaagctcctcaaacaattttagcgcttccaattccttctacaatcgcctttatacatcccattatgagcgctaaaattatcagagtgccgaaaatcgcatgtgatctaagcctagaaaaaaatggt

SEQ ID NO: 59989 - DNA, 1675 bp, Heterodera glycines
ctcaattacgcaccttcttccgctgctgcactcgttgccgctgcaactgctgcaacgcctgaaaccaactgcaacaactcaggcacgcaaaagcttcaccagcaaatggcattgtccgcgccgttatgtgcagcacagcaaaaccatgtcacaaccgcattggaggtgaccccaacggcaactgagctgctgagcaccaacggcactaccacgccaagtacaaatggtgttggccatggcagcagcaacggcaatggcaccactgctttggccccaaaagaattgtgcggcactgattttctcagatttgctgaacctcatcttcatcatcaacagcagcagcaggtgtttaacgtttcagctcaaagttaatatgggactgctcaggggcaatgatttttttttgttgaatttcggaattaaatatttaaataatttcgttttatacatttctattaaacggcgggcctcataaacacagtgaacaatcccccaaaaatgtaatgtgccaattttattgtatgaagcgggctcaaaaaatatcattgaaacttatagctacatctttttacatattaaattaaaataaatgactttatttttagttcgactctaatggtgccgtggcattgcaatgtttcgatgggtcaagcctctcccaaagttatcaagatttgtcggcgggtgttcaggcacagcccaactcaattttggtccttttaaataatattcatattacgccattttgttcccatttcagcgcataatcatcgattacatgctttacccgtaaatttttatttttttattaaaattattttaattttttaaaatttcttcattttaagtgtcacattggatgctttgttcctaattttttctcgctacggaaaagttctacgcattatcacattcaataaaaacagtaaaaaataaaataaatttttatttttatataaattattttaaattatctattctttttagatttattccaagcattaattcagctcagtgaagcaagctcagcacagaatgcaagtgcgttgcttaatttttaatctaaaaaatatactaattgttttccataaaatcaggaaactcattggacggtctcaatatatacaacgggtgttgtacggtaagcattatttctaattatttcaatttttcttacataaatgattttttcgtgaaaataaataattgttatatttttattaaaataaattaaatttataatcccgattaaactgaaatttttattaacatatatattgaaagcaaataaattatttaattattttttgactcggaaggaatcaaataattataataaattaaactctcttttttattttaaaaatatttatcatttttattacaaaatttttagttgcacattgaatattcaaagctgaacactttgaatgtcaagtaagtaacccattaattatgcccattttttcttaaaaagccatttttcatccttaacagatggaacaatgacaagagcagagattacacaaatcccaacttgccggctggcgatttgacttatgagcaaaaattgcagctgagtgagtcatctaccgggtgtcgatttttaaaatttaattacctaatgtattttctctggtttccattgacaaattctcctatggttggaatttaa

SEQ ID NO: 59990 - DNA, 804 bp, Heterodera glycines
atgcctgttctccgaacgccaccactaacccggacgagggcactcaaccagggaatcattgttgaccgcgatggaaacgcatttagggctgaaaattttggagtttcggggggcaggccgatctcgcccttagcgaacaacgaaaatcagcgactggacgacaatcatgaaaatgttttagcagagactgatattcgtcgtcgcctgctttacggaggaatggaacaaagcgcacctgaggaacaattggagtacgacgaaatggaaaacggcgacgaacaaaatgtcaacggtatggtccaacaaaatttggaaaatggagttgaagctggggatagagggagttttggaaacgatgcattggacgcgcatggattgcgagccttttcaacaccgcttaacgaacaaaacctaagcgccctgcagcgagacctaagaatgcaactcccggaaaatttgagcgtcatcgaaaaccaaattagggttatgaatttcatgcaaaatcaaatgccgaatcaagtcgggcaaaatttccctgcattaaatcatccacaagcggtcaatccaattgcttgtcctcgacccaatggccaattgtacgaaaacgcaccggttaattttgagcggcagagagaacagcagataaggctcacacagcaaccggttgttgaaggccaacaaccacacgttggcggattcctccgccacatgcctatgcacagagacacaacagttaccaggacgaaggatttgagtttcaccaaggacagcaacgcccaaatttcaaccaagacctgcctataa

SEQ ID NO: 59991 - DNA, 467 bp, Heterodera glycines
atgatgaagaagactttgccgattaatgatgaaatgatttcggaaagaatagaagcggaaagggaacgacttcagcaggacaaattgcgaaaacgctatgcatatgaagcaatttgtgctttgaccgacactgtgaacgaatcggaactgcaacgacatgtgagggaaacggaaagcatttataggggggggggggggggtaaaattaaatgttaatgtttaatctttaaaaactgtcgtttgcgtaaacgaacttatagctgtgtgattgtctgcagtaattgctctctttctttttcaagctgtccgttttggatccaacttcctggtgtgaagtggtcgaggaacgttttctgggccgtttgtgcggttttcccctttgtgccaaaacaatcactgtcgacttccgcaaaaagcatacaattgtgaggcggttgaatgaatccacaagaaaggaacacaaaatg

SEQ ID NO: 59992 - DNA, 2019 bp, Heterodera glycines
atggtggagagtagttggcagctttctctgatcactcttttactcattcccatacttgccgtgttcatcaaagtgtacagcgtttattacgatgtgagggaagaaaagcgacgccaattcagtgcaattacttttagaatatcgccgaacgttcccaaatgtccaaagcgaatgccaatcgaatcgcggaggaaacgatcagcagcatgcgaagtgtccgcgcgttcgcagccgagcggcgggagcggcaaagatttgaagccgaattggacgccactcttcgggtggacagagtgcgcttttgaaccatttattgtactatatatatgtaaatgctgaatgaccaactgtcctttcgtccttatttattactttatttttcaattttagaccaaatccttcgctttggtcggttcccattggttgaacgaattcgccaacaatctcattttggttgggttgattagttgcgtttcctttgcattttcccaattttcggtggctgtgcttttatttggcggttatttggtgctgaagaagaaaatgacaaacgaacaaatatttgcttttcttctctatcagctgaaacttggcgggaacttttaccaattgagcaggtcatttagagagagaatacgaatattcttttccttaggctttgtgaacttatcgcctaaaaatggccattttgtgatattttttgggtataaattatacagattctcaaaaaacaaaacaaaattttccattaaaaaagtttttctttttcgtttagtgttgcaaatcggctgatggaaagtatcggtgcttcccgtaaagtctttgattatttgtcgcggcaaccaatgaattcttttgaaattggcaaagtgcggcccacacccgtgacgggcactttggaatttcgttgtgtgactttcgtttatccgacacggccgaacattttcgttttgaaggtgcctcctaatgaatgtgtccatgttttgaacaacgaacttttcagaatgtttcgtttattgttcgccccggtgaaatggtcgctttggtgggcccaagcggtgcggggaaatcgacggttttttctctattggaacgtttttacgagccaacgcaaggccaaattttgctcgatggcattccaataacgcgatgggaacatatttattaccaccataaggtccttttcaaggagggtttaattttgcctttcaattttaggtttcactggtgccgcaagaaccgattttgtacagctgttcaatccgcgacaacattctttacggtttcgacaatccttcggcggaagatgaagatggcggtgatgcggcggttaatgccgcgaaaatggccaacattcaagaatatgtggcgcatgagacggagaagggcttcgccacgaaatgcggcgagaagggcatccagctaagcggtgatattggcattctgaatcaaatcctataattgtttcgtttttttggcgaaggggttggggtgcattcagtttgtattcacaatttttcgatttttaaagatgtatttttttaattcgccaaaaattcgatccttaggagtgtttttttattttgcatttttgtgaaaatttccaaaaaatgccgaaatttgctataaaatgtcaaaatatgcatttatatgcagtaaaagccttcaccaaatcaaaaaaattaacgtaaaaccaatttcaggattatggaaaaactcgggattagccaaaaatttaaaggaaatatttatttctgtttccctttaaggcggtcaaaagcagcgaattgccatcgctcgcgcattggtgagacaaccgaaagtccttttgctggacgaggcgacttccgcgttggatgcgcgcaacgaacagctgataagggagtcgttgtccgcttgtgcgaagggtcgcaccgttctgatgatcgctcatcgcctttccaccgtaagacgtgccgaccgtattttggtgatggaacatggccaaattgtgcaggtccgaaataggaaacggttgtt

SEQ ID NO: 59993 - DNA, 474 bp, Heterodera glycines
atgttcgttttcagttggtccgtgcttctctcggctgtgccctgttcgccagtttgggcagcaccgggcaggggtcggttttggcattggtcggcacaatcagtgagcgattcaatttgcagattactctcagtttttgtggtcgaaaacctaaacaaaggtgagcacattctccccatccaacattgttttttgttaatacattcgttttttttcttcaaaggacccattgaaaatatcattcaaaatttcaacatttccacgatgataacagtctgtcatttgcaacttcaagctcggataaccaaaagtcgaatggaattgcaagcgggtccaatcgaagcactttttgagaaaaattttggtatttgtataattttatcgctgacaatattttttccatcaattaggaaaagttacaacgattggaaacaaagtcgtccatacgctgaagtctttgcttcagccctttga

SEQ ID NO: 59994 - DNA, 938 bp, Heterodera glycines
atgtcaacaggaataataataataatatgccacaacgatgaagaccagccgaaagtttttgtgggaccaattcctcagggataaattccctaaaatccagaacattgccgtttattgtgactatccattgctgatttattcaagcggaattttcggaggaggtatgcaatatattttattgtataattttttaaaagttgttatggctttgcagttgccatgttcactaagccaattctgttcagtggtgtttatttgtcgtggtttttcaacccatacgttggctatacggacgattttggacaaattgtgcaaattttaattaattttagttaatttttaaaattatagtattacaacaccatggataatgtgaataattgcatcgtcatttttggcctatccacagtttatttgttgttttctgcatttctaagttggaaaatgtacaaaatgacagaaaatcagcaaacgtttcaaccatcgtggacacaaaaaatagcaaaaaaaaactattaataaaaaatactttgttttattttctccatttttcatcattaaaaccacaacactattttagaatataaaacaataatttgaaataattttaagcagtttttaattaatattcagacgtttctccaggtgattattataagggacgaaaaaaatggcaacaaaaacaaataatttagttataaatactttattaattctccatttttaatcagtaaaaacccttgccccctttttagaaaaataacattaattttgagtaattccaaatatttttaaaataaatattcagacgtttctccaagtgattatcataagtttgatacattcaattaccgccgtaatttacgccttaatgcaatatgtcagaatcggtgaaatttacatcatcgttggcacttatgcatggctttttacgaatg

SEQ ID NO: 59995 - DNA, 1147 bp, Heterodera glycines
atgtacgagatgaaagtgcggaagcagaaaaagcggaaccccaacgtcatcttccgtgattctttcaacctgatgccatgttcgctggcagcattggtcccttcctatggacttgatgtggaggacaagccgttcttccctcatctcgccaatagaccggagaactacggcatagaaatccacccgacacctgatgaatatttggctaatggaatgatgcccgggaagaggcgccaattcgacgagtggtacgccgagcaccgtcatgagccttttaggctcgatgaggcgcttgccaggtaatttcttttattattgatttttcagttattgcacaaacgatgttgaaatactgatggcagctcttgtcgcattccgccgtgaattcttcgagatttcgcgacgacaggagtacatcgatggaatcgacaacaaggaaaaccatgacggcatcgacgtgttgcgcgagtgcatgaccatcgcaggagcttgtatgcggcattttcgaactaatcatctgccctctgaacatctggccatcgtccctgagcgcggctatgacaacgcgcagaaccaaagcctattggcacttcgattcttccactggtattcggaggagcatggggtggaagtacagaatgcccattcggctggaggagagaagcggatcggtccttattccctggacgggtggattgaggccgaaggacgcgcaattgaagttaacggtattgattatatttctccttccgataaaaatcgataattttaaggttgcacttggcatggttgtaagaagtgctatccgaatgacaacatgttgctgcctaacggaaagacagcgggacaagtacgggagcgcgagccaagcggatggaataccttcgggcccgagtgaatcgtgtggacgtatatagggagtgcaaaattacgtcaatgctggagaggagcaaagccatgaggaagtgctttgcaaattacgtggacgacggacccctggtaatccgcgacgcgtttatgggaggacggaccggaccgatgaaacttctgcgcaaggcggggccgggggagaggatctcctactatgactttacgtcgctctacccatacataaagtttgttgtttttctttatattgccaaataaa

SEQ ID NO: 59996 - DNA, 592 bp, Heterodera glycines
  unsure (1)..(592): unsure at all n locations
atgtacttcttcgaaaatgcagactattatgaaaacaggcgtttgtcttgcgtttggtcagaaggatgggaagcgaatgagtgctgcgggaaaaattaccaacttgtgatcatggacaaaaaatacgtaaaaaatgtaaagattttgaaagttagaattaattaattttatttttattaaaattcatggcataattatacttaaatattaataaaaagttttatataatatttttaggatcttcggaacataaagccagaagtaagtaaacaataatgctttttgagcatataaataaaaaagtaacgaaatttgaaataatttttatttaaatggaatttccttgaaaaaacaaatttaacattaataaaaatttgatataaaatttttttaggagtcttggataccacattcagtaagtaaacaataatgcattttgttttaagaataaaaaaaataatgattctgaaatttggtttaatttattttatttttactanattcattagatttaaaagaataactttanacattaatgaatattttttatataatattttaggttcttcggacaccatattcagtaagataa

SEQ ID NO: 59997 - DNA, 443 bp, Heterodera glycines
gaaatgcgctttttccaaggagattttcatcggtggaacggacgcgcgttttctgagagaggcaattaactaattggaattaattgcaattgcaacttttcccttttcagaagggcatcccggcaattggcttctcaccgatgaataacacgcccattctgttgcacgaccacaacgaatttctcaacgaaggcgtttttctgcgcggagtgaaaatttacaccaaaatgatcccacggctcgccaatttgccgtcattttgagcgaagtgccggcagaacaaagaaaagaaggaatcaaaatgatttctcctctaggccaataaattaattatatttattttaattcacttaaggaattcctttgccaattttattgcctttgttttttaatttatttcattttgaccaaatttatattcaaattgaaaccgaatttatgat

SEQ ID NO: 59998 - DNA, 863 bp, Heterodera glycines
aatttggtgcgctttagagcactttctgaaaaaaatatttatgaaacaaaaaaatcgattttttcaagtgtccgtttggggtactcaaacatttatggggagcaaaatccaacgcagaattaagtacaggctatagggaagctactcccgaaggatcggtctccccattaatctgggcgcatcgttcggggggactgccccgaaaacaaaaaaaatcgattttttcaggtgtccgtttggggtactcaacaaattatggggagcaaaaatccaacgcagaataaagtacaggctatagggaagctactcccgaaggattcggtctccccataaatctgggcgcatcggttcggggggactgccccgaaaacaaaaaaatcgattttttcaagtgtccgtttggggtactcaaacaattatggggagcaaaaatccaacgcagaattaaagtacaggctatagggaagctactcccgaaggattcggtctccccataaatctgggcgcatcggttcggggggactgccccgaaaacaaaaaaatcgattttttcaagtgtccgtttggggtactcaaacaattatggggagcaaaaatccaacgcagaattaaagtacaggctatagggaagctattcccgaaggattcggtctccccataaatctgggcgcatcggttcggggggactgccccgaaaacaaaaaaatcgattttttcaagtgtccgtttggggtactcaaacaattatggggagcaaaaatccaacgcagaattaaagtacaggctatagggaagctattcccgaaggatttggtctccccataaatctgggcgcatcggttcggggggactgccccgaaaac

SEQ ID NO: 59999 - DNA, 1023 bp, Heterodera glycines
  unsure (1)..(1023): unsure at all n locations
atgacatcatcgagcagcagaaatggcatcaaaaaaattgcaattcgtaaatttcaacgtaatttttgcattctttttttatttctttcataatatttcaaccgttttcaggtcgcaatgatccgtctgtatctaattttgacacaaattggtcagttttggaggactccgttaagaaaattcaggagagagaaagtgttacggttacttgcgtcgaattgtacaatgtaagtgttgttaaattcaaatatttattatcataaattaaagaaaaattgcatatttcgggatttactaattgtttgtcataatagttagctccaaccccatttaaaatttaattttcactttacatgttgctatttggtttatattttagaatctttgtgcatttaatccaagccctatattaagtacccttaattttattagttttgtttttgccaattgctgatatttaactctttcattttcaaatttcgcagatggtcgagcatttgtgccaaatgaattatgccggtgagatttacgcccgacttcaattgctcattggaaaatttgccgaggctgagtcggctagccttttggacaacagtctgaatgtttccaacgaagccttcttggccgcactcaatcgcctttgggaggccttctgccagcagttggtccgtttttggacggagaaacttctgattgtattattttacccttctcagactctcaccagaagtgtgtttctgtatttggaccggacttatagggtccaatccacttcatccgtttcaatttggttggtttccgcttttgccaactttttacatccaaaaggttcagggatgcaggattggatgcatttcggaggcatattttggagaggtgtggcatttgttccaggacagtgagtggcattttgcaactcatcgagcaggacagacgcggaattcaagtcgagtttaaaaaaaaataaaattggttatttatttcactgttttcagacaaataaccaattgcttanatctctga

SEQ ID NO: 60000 - DNA, 433 bp, Heterodera glycines
atgctcgactgtttcgctcgttctgtgggtcgtgccctgtccaatgcttcttcctccaacgaattcttcaacgtttcgcccgatgattgcctgcgcttctgctctacggagcgggcctgcaacaccgttgtctaccacaagcacttctccacctgccaattgtattcgggcgcggaggagggcgacacggcacgcgaagtgagcgccaaagggcacgatttgtacgtgaagaaggaatgtgaggagaaccgccgggagcaggagagagatgaagcggagaatacggcaccgaagggcggcaaactgtgagcagaagccaagaaggaaggcacagcaccattcaaaaagccaatggcacaaatggcgattttggcactttttcaactattgataataatatattttatggaacatttgtttcttcttttcacca

SEQ ID NO: 60001 - DNA, 1020 bp, Heterodera glycines
atgtcgcggtacaataatttgctccaatttgcgagtgtttcggcaggaaataagccatgccctgctggtggaccaatggcagtaattctcaatggagaatttcatcgccgcattagcagcatgcaagcaggaacaacccagattcctggctttggtcagttgtacattctggatccagtcgaagccatggagcagcgacggaaaaatcccacctttactggtgaaaaaatcacaaacgatgaagagtttgtgcagggtcatcagcttaatgaggcgacccttgaaattttggaacaagttatccaagaaaatcacccagctgcgtctgcttacaagcaggctcgtgaacagctccaagagttgttaaaacaacaaaggactgaagaactccgattcttcagaatgactttgctggatgagcgctctgctccgggtggtatgaaagacccaaagttgcatccccaccagataatcaccccctcaacgggtgaagggatgttcgcgattcatgcggatcccactggtgccccggcaccaaaaggaatatgggttgaaaacaagcaagggcagttgaacgaaattgccccgttcagtccatggactgatagcttgacctatccattaattaagcctaagggcgacgatggatataaaattggaattccatatgctaaacccgcacaaaggaagcggaaaagcgataattctgatgatatgtttgacacagaagcaatgtccgatgatgacatgtgcgagaccaagtcaattgcattgtcagataccggatctgaaacatcgacgcagtcagtgaccagtcgctatgacaaatcaaaaagatttgtctccctgcgcgattattgcaaatatcatctcgcaataagggatgaaaatttggagtggcaataccatcacattctttcatgtggcggtggtcttggacagcgctgggtcttagaccaagcgtccaaaattgactggcaaattgccacttttttgcgccgtccagacatggacctgcgc

SEQ ID NO: 60002 - DNA, 88 bp, Heterodera glycines
  unsure (1)..(88): unsure at all n locations
aaaattccctcaaaaataanaggtcgattgcgcaccgccctcctatcatgctcgagagcatttgtatgtgtataaaatttatcaaaaa

SEQ ID NO: 60003 - DNA, 548 bp, Heterodera glycines
atgcgatacgaatggggaccggtaaattggacaccggaaaattggacaccagaaaaaaaattttgtttttttcggttgcgggattccgactcctgaaatgttgtgcaaagttttgaaaaattttgcggaagttattttcgaatttttatatccagtaaaaatttctttaagggcaccgaatacatattttccatatatttatacatttcagtccattttttatccaaatttcggcatttcatggaaatatttttttttggaaacaactcttaatttaaggaaagttttcgtccaatgtgtgattattcatctgatatccatcatttcaattccattttatcagtgtaagtttatgatatgcgtttcaagataatttttcgccaaatatttaagatgttttcttcaacacttcttatttgttcgttacttgtcttttttatttggcaattgtaattcgtctggcatggattaagggttaattaaggatttaatttcctaaaagattggcacatctcatttttgatagagaatttgcaaatttttgaaaa

SEQ ID NO: 60004 - DNA, 1210 bp, Heterodera glycines
  unsure (1)..(1210): unsure at all n locations
atgccgccactgatgcggcgacggcacaaaatcctttggacaaggaaagtgcgcgaatcactgtgctatgcattgctgtccaaatccatggcatatgttttgtgttacttggtaatctcaccattacgccatggtacacgatgttgacgatatgtacaaattacgacccaatcttgcaacaattgtattacccaatcaatgcgttcacatcgttgttttacatatcagacgaggcaatcaatttacaatttaattatttggaatcaaaaaaatttaaaaattaattaaatatcattagggtgcgatttttttgtttttaacggattttttttgcggttttattccgctgttagagaactgcttgaaaaacacaaataaataaatgaattaatgaaatgctgttagcatcatcggcattgaaaaaaggtttctttgcatgacatagaatttgttatttttggacaccaaatttgaatcgtctaattataaatttaattactttattgacactgagacaaattttcgaattagcccacactgacaatatattttttggttcaacctagcaccgttaaaacattaattaaaactaaattaattcgcccgtcaattgtccaaaattatttttgcagctctttttgttggccgtctgtatggacatgcgtgtgcaatttgcgcaaatgattcggaaaatgtttgtgccgtttcggaggcgtggaactcaaacaatgacagttcaaactgtacaggccaatttcaatagccgaatgcggcacaatgccaatgcgaattagtctcgacatacactctcgaatcattccaggacttgactgatttgctaacaaatgtcttggaaaattgttttatagcaatttaacatttcatcgagaaacaattacttatttcgagcatttaatattgttttttaaaaagagaacaatgaatgaaacaatgtaaaaatttgtatttaattggtcaatattattctacgcttttcaatattagctgacctaattaaaatttttcaagtttgtgttaatttgtggaaccataagctgtagttaatttctgacctttgtcggctacccatttattcgtcaaaaacatatttttanattttcttgaaaatgtttttgatttaatatttattcaccataaaatatatttacataaatttgaatgtttttttccaccttttattcatttttca

SEQ ID NO: 60005 - DNA, 1055 bp, Heterodera glycines
atgtaccgtatgcaacatcaaattgacgccaaaagaaacaggtcaacgctacaacatgatggccatctttacaaatttgctaagacaagtaccgacgggacgattaaattttggcgatgtgagttcaaagacagcggtgtggacaagtgcaaaggacggatttggacttcacttcgagatgaattcatccgcatggcgacaactcacacatgtgaacggaatacaagtcacgtcgttgcgcaaaaagtcacgactgccatcaaaaggcgttctgttgagaaagctccctctgtaattcgtgcggtttctactcaaagcattagttcgcctgcactttcagaagtgccgtcaaaaaaggcaacaaatttggtaaatcttttcaatcataaaatttgttaaaagatctttcgcttagatgataaaccgaacaagacatctagtagatgcgccaccagctgtgccattgaatcttgaacaacttcaaataccgcaaagttaccagttttacgaaaaaacgatgtacaagaacgttttttattctgctaagctaacttttgatgctgatcaaaaaagtcttttacagcaacttgatcagatcactcctttatagtgaccgggacaccacgaaacacattgaaaatctgggaaatttccgaaaagaatccctagagggttgtgaaaatttttctgtaaaatttcagtaggacagtcagaaagagcaaaaattctctaccaattgccttttaaatagtgagtctacgactagagaaaggcaaataataatagatcgaccaaatcaattaattatcagtgtttattttaatttgaatgcatttattgatcaaattcaattttatttttttatttttgcataaattggattacattactgtgtaagcttatcttttacatttaaaaaataattgacgaattttgtttttctccaaattacatataaaaataattaatgtaataatttgtttttgcttttgaaaaaataatttttgaatttaatttaaaaaacggaatttttcatcgaagaaatgaaaaataaa

SEQ ID NO: 60006 - DNA, 713 bp, Heterodera glycines
atggccgggcagacaaagggcggcgccggcatttcgcccgcggcattggaggacgaacgccgccgacggcacgcagcggaacaacagctgaggatggaacagttgcgggcggacgagacggagcagcaattgcgtgacatggaaggtaataaagcgggacataggggagggaatggaaatttaaatttaaattaaaattcaaacccaaagagtcgagaaagagaccgacaaattacccctaaggtcgagaccgaaaccccgaaaaactcagagacatttccgattcattttccttttttaattgctaatttgtaagaaagagcgcatggagaaaaacgcgcacttttggtggaaaacgcggaattgcagcgacgactggacgaactgacgccaaaattggcagaacaggaggccaaaatgatggcattggaagagcaaagggacgaagcgaatgtgcgactgaaagcgacgctcaaacaaatgaacgcactgcaggcaatcaattaattaatgaaccaattaacaactaattaggcaatacatatatcaatgagcaattaatcaaagcgattaggcaaggcactcaatcaacaaagactaaatcactttataattaaaaagtaggccaatcaggcaattaattcaatgactcattaatcaggcaattaaagtaataatgatctattaactaaggcaattaggcactcaataaa

SEQ ID NO: 60007 - DNA, 285 bp, Heterodera glycines
atgtattcaaaaaagtaaaaatattctgccaaatcgttaatgcgatacataattttcaaaatcacaaattcttgtcaagaaaaaaataaataaattttggagatgaatttttgaaaattttttcatttattaggggtgtattttttgataaaaattttaggtcgattcttaagggtgtatttttcgtttttattgcatttttgttaacaaattttggcaaaacgccaaaataggcaaaaataggctttttcaaaattttttaggattttaggcgctaaaaataaa

SEQ ID NO: 60008 - DNA, 588 bp, Heterodera glycines
  unsure (1)..(588): unsure at all n locations
tcactgtcgcccaaagttggcacttttgtttgcgggaagaaatgctcaaaaataaggtaatgaaatggatggcttcttcttctgctgatattactataccatcttcaggttggcccgttttcttctcaaatggtgtactgcttgaagttgttgctgctgcgcgctttctgagtcctgccggatgccaaactccgcgtcaaagtcgggaaatttagggaatatgggcttcgccgttgccattggccgatggttttctgccccgctgggccgacggagttgatcctgtactaaaaattggtatttaaaggtgaaattcggaatttcgagctgtttccgcttgcctccttgggccaattgcggtggggccaaatagcggaagcaaatgtgcgtgctgttgctgacgttgaactcgttgcagcactgcacttcgccatcggaaggagcctgccaaaaaatgtgcatcgaattactcaattcgctcgcaaatggcaccaaagattggcacacgaaacgccttttgattctaatgaatgcatttcatcatccccaaaaaaattctacaaatagaaattactcccanaaaaattc

SEQ ID NO: 60009 - DNA, 145 bp, Heterodera glycines; identical to SEQ ID NO: 53679

SEQ ID NO: 60010 - DNA, 897 bp, Heterodera glycines
atgatggtcgaagttagcacaaaaacaacggaccaaaggatcaacagtgaacagcttcatgtcggacaattcaccgctgcaaaaggacagactaacaacagaattgaaggtgatacttcattattgaggaaaagcacactgaaagaaaaagcaaaaggggagaaaaagcaatcgaatgatcaaaataatgaaagggaagtgatcgctgataagaaaatgggggcgataaagcagccgagcgatcggataagcgattggacgagaagcaatcggaacgaagaagcatcaagcggcaaaaaaatgccgaacggacgaatcctttggaccaaaattctaccagttcagacttccgcacgcaacaaatctctcccaaattctgctgataaggaaaacattctgccgacaacggatgggcgatcactcagaaatttgtcgggtgatcggccatcttcatccaaacaattgccgacggatgagcaaaagaaatcggacggacagaagaaggacggcccggggggacaacagcggacatctgacatgaggacaaaagcgggaaacagcgaactttcgcaacggattctccaattgctgaaaaatttgcgaattgccaaagaggcggtggcaaattatgggacggaacgaagacggagaagaaagcgatcagccgaaaagattgctgatcagaaacagggccggagaataacggaaaacggccaagaaatgatcagtgatcagaaaagtgatcagtcattggctgatcagggccaggcaccgttgccgggtcagcagaaagcggcaattacgggacaggattttcgggagcgccctggggaagagaagccaccggatgagaagaaagcggaagaaaaagggatagaagaggaagcaaaattcgtg

SEQ ID NO: 60011 - DNA, 59 bp, Heterodera glycines
tatatatgttatataggttttgagtttcgtttcaaaaaacaaaatctcccggccgaagg

SEQ ID NO: 60012 - DNA, 522 bp, Heterodera glycines
atgattgtacctcttctaatcacttttgttcaaattttaatcactgttgtacctcttctaatcactgttgtacctcttctaatcactgttgtacctcttctaatcacttgtacctcttctaatcactggtgtacctcttctaatcattgttgtacctcttctaatcactgctgtacctcttctaatcattgttgtacctcttctaatcactttgtacctcttctgatcactgttgtacctcttctaatcacttttgtaactcttttatcacttttgtacctcttcatcaaatttgtacctcttctaatcactgttgtaactcttctaatcactgttgcacctcttctaatcacttttgtacgttttttaatcacttttgtacgttttttaatcacttttgtacctcttttatcacttttgtacctcttcatcaaatttgtacctcttctaatcactgttgtaactcttctaatcactgttgcacctcttttaatcactgttgtacctcttttaatcactttt

SEQ ID NO: 60013 - DNA, 3702 bp, Heterodera glycines
  unsure (1)..(3702): unsure at all n locations
atggatcctttgaataaaaactttcaacatgacagatgtcagcttattaaaaatgtaatttccatggttgttggtgttgatattgatgttataaatatagctgataaaaatgtatcacaacagcctgattttaatagctgtggatactacatttgtttatttgccgaatcatggattttcaatgatcactcacttattcttgaacccattcatattatttcagagaaaaaaagaattttgtggcatgtgaatgcattatgcagttcagataatgtcgaattccgttcccgttataatcaagtgaataatgaaatattaatgtctgacctttctcgtggatcctctctttcaaaacctttaaattattcggactgctctgattctgattcttcaaaatgtagtggcaaccgaagaggtcgcccaaagaaaaggagtggcggaccaggtcgccttaaaaagccggatagcatcaatttgtctatgaacgttggaaatatgaactcaaatactgaaaatattaatcaagcccaagaaaatcaatctataatttctaatgaattattgaccttattgaattccggttctattgatatccctggctcgcaacctatagcccctggacgtgtatgtattcagtcaataaataaagatctcattaaagaggcgtggtctatacctaacgaaatgttcagtgatgatttagtctattgttttcaacgttatctttcatcaaaaatagttgacaaaatagttacagttgttaatccacaatacacagacttacaaaattttcatgttggccctcatgctttcccatataatgtgatggataactgctttaattattcagagaactatgacattttgttgatgactattttctttaatggtcattttgctttaataatttttgaccgatgtgaccgagataacttgatttgtctatttattgattctttgccgcattatgatagactttttgatcctcaataccctggctatgatgtgagaagaattgaaataattaaaaacggaatttgtgaattgacacctggtctttctcatgatgatgtggtaattaggacattaagtccatcagaatttacaccccaacatgacggaattaattgtggcgtatttgttctgctttattctgaggcctacttaaatcattgttcactgaaattcccaaatttaaacattaacttggagaggcggagaattttgtggcatttggcgcacctgataaataatgatgacgtagaatatattggaagaaatttgacaaatggacctcaaaatcctcaacgattgcctttgtataatgtggagtcgaatattgaacagacatgtccgagggatggagatggagcctttatttgcgtagaacctgatattgatagaacccctgatgttattttgaggccaccttctacaagtaatttgagtactgctacccgtcgatcgctccgtcttcaaaaaagtgttagtaatgaagtatcttccgatgataacatagatactattccaaaaatgcctcataatgatataaccaggcgttgccataccaaacaccagggaattccttgcgcagatgtacgtgccaggcacaccactgattattatgattcgggaaatctcggagataaaatttgtgcttattgtaatgctcttttactgaatagcgaggccgaaaaaaagaatggaaaattttcatcaagtcattgttgtaatcatggttctgttgttttgcctccttacgaagaatatcccccaacattaaaacgctacttgtcagggcaagacccagaggctaaggaatttttgtctaatgaaaatgtttataattcattgttagcatttgcgtccgtttcggttggataccgtgagtcatcacttgatggaaatgtttgctatttgttaaatggtgaattcactcgtcaaataggctcaactttacccggaaaattttctccatccttttcgcaattatacattcttgaccctgttacagccttcatgcaaaggactcagaacatagcgtatggtggtgatcgagtaaacgaaaccacaataaaaaagcttgattttattattcgaaaatataaccctcttgcccaagagttggtaaacttccataaacaatatcagaatactctaaaagagaaaggcccagaggctgtacttaatttccgtttaacgctcgtcgaggctcgagatgcaccggcaagtgttcgagacgtttctattcattcgagacaagccaatttacccgatgaggggaattcattgtttgccgtttgggctgaaagtgaacagccaccctttttgaaagggatatggattaccaatgacgaaggaaaacttaaaaaattccctccacatcatccactcacagattctctttgctaccctttgatgtttccacatggtgatgatggctttcaccttaaaattccatacaatccgttaaataagcccgaaaagaatgaggccatggagattgatgtcgaatctgatgagaacactggtgattcagatgctgatgcatcagatgatgacaatgagtccgttgccagttcggttgattctgttgacaaacgcggtccgcggcagtttttatctattaggtcgtatatccgctatcgtatggcgttaagaaaacacaaaaacattcacaacatttggagttccggtggcggactaagtcagaaatttacacttgattacgcggcgcgaattgatacgaatgttgcaaattatttacgtcgtcccgaattaaatttgcgtagtacacttccagaaaatgcccttcgctggctttcacgtaatgctggtcttagctccacagaagacttggggagtattgttatgttccgcagatcagagccaggcacacgagcgtatttccaacacaaattttatgatgctaccacaataatgtcacgctttaaaaaaccaggcaacgcttcattctttctcactttcacaaccaatccgcgttggcgtgaaatttcccgtaattttctccataaaggtcagaaaaccgtagatcggcccgatttaatatgtcgtatttatgaggataaacttagccatttacattatttgatagatcagaaaaatattttgggaaaaatgattggtcaagaatgccgtgagttccaaaagaaatacggcggtcctcatgcccatcgtgtttatcacacaagtttgcttgccatccctgagaatgttgataatataatatgggcgcatatacctgaagaaccagcaaaaaatgataaatcagattgggcaaatttcattcgtaaagtacgtgaattattaccgaaatttcaattccatgactgcggtccacattgtcttaataataaaggaaaatgcaagaagggattccccaagccgtttagtaagtttaccatccttcatgatgaccgtccagcgatctattttcgtccgagcccggaagatggcgggcaaaccttatccgtaaagcgaggcaaagcgcaagtcatttataataattctcgtatttcctcctataacccatatatcttggttcattttgagacccaccataacctggaatacgcatatgggcaaagcacaaatttaaaatatctctataaatatccattcaaaggcccaagtttttcgtacgttaagaccaatgaaagcaatggaaangataagtattga

SEQ ID NO: 60014 - DNA, 1770 bp, Heterodera glycines
atgccttcaaagcaatggaatgaaaagaacaagcggaagaagcggagcgtggaacgacctttgtcctcattatggacctcggaccatagtgaagcttcttcccctgtttcagactttgttttaagcacaccacaaaattcaaactctcgtaagagaggaagaccaccaaagaatatacacacaccattagccaattcctttgaaaaggttcatttgaatacacctcaaagttcttggaaaaaacaaaacatttgtcctgattctcccgttcctaaaaaagataaatcgtttggttgtccattgaatgaatcacttgaagagatagattttgctaatttaacaagccttgaatttattcagcgaattgatgagtccgcaaaaattgcccgctgggcaaatttgaatgttcctgatgttaattctggtcaaaatgtgattgaaaaggcattttataatttggattcttggttaaatcatgagctaacgtttgcatatctctgtcttattgcaataaaatccactcgccgaacagtggtcgtcgactccgtactgactgaccctgatattcatgttaaaaggaataaacgcacacttaaaagagcgtgttttaattttgacccaaatattccaacagaaataatcgtttttccgttattctttcaaaatcattgggcacttgccatctatgaccaagagattggcacttatttcattgattctctgaagcaagatccttcccgaatggatcctttgaataaaaactttcaacatgacagatgtcagcttattaaaaatgtaatttccatggttgttggtgttgatattgatgttataaatatagctgataaaaatgtatcacaacagcctgattttaatagctgtggatactacatttgtttatttgccgaatcatggattttcaatgatcactcacttattcttgaacccattcatattatttcagagaaaaaaagaattttgtggcatgtgaatgcattatgcagttcagataatgtcgaattccgttcccgttataatcaagtgaataatgaaatattaatgtctgacctttcgcgtggatcctctctttcaaaacctttaaattattcggactgctctgattctgttagtgattcttcaaaatgtagtggcaaccgaagaggtcgcccaaagaaaaggagtggcggaccaggtcgccttaaaaagccggatagcatcaatttgtctatgaacgttggaaatatgaactcaaatactgaaaatattaatcaagcccaagaaaatcaatctataatttctaatgaattattgaccttattgaattccggttctattgatatccctggctcgcaacctatagcccctggacgtgtatgtattcagtcagtaaataaagatctcattaaagagacgtggtcttgtcctactgatatgttcagtgatgatttagtctattgttttcaacgttatcttgcatcaaaaatagttgacaaaatagttacagttgttaatccacaatacacagacttacaaaattttcatgttggccctcatgctttcccatataatgtgatggataactgctttaattattcagagaactatgacattttgttgatgactattttctttaatggtcattttgctctcataatttttgaccgatgtgaccgagataacttgatttgtctatttattgattctttgccgcattatgatagactttttgatcctcaataccctggctatgatgtgagaagaattgaataa

SEQ ID NO: 60015 - DNA, 357 bp, Heterodera glycines
atgattcgaatgtcacgggacgattcggacgcggtggaacaactccgaaaggtacggtgcatgtttacgcaatcagaaaaaaaaaatcgaaggtggatcgggactccaaaattttgtaaagtatgagaaaatagtccatttattttgcatcttcttgggtcgaaattttaatcgccccactgagaaatgacataatttttctattttttgcaggaaacgcgcaaattggaagaccaagttgggcagtacaaggccaaagttcgggagctgaagagcaaaatgaaagtgcaggaggaggagttcaacagaagatacaacgaaaaggcattgtttggattgttggcattgtgccgttga

SEQ ID NO: 60016 - DNA, 1454 bp, Heterodera glycines
atgtccttctccacaattggatcatccacttcatcagcagcaattgcgccaatgattgatgaaaagggtgaactgttgaatcgccatgaagtgcaactgatctccaaaacgttgaattggtcggtggaaaatgatcagaaatttgaatttaatctgctcatcaaaattggattaagtagataatctaataaatttaaaatttttacaatggcatcattttctttttttctaaaatagtccagatattaataaaaattattattattattgccaaactcacaaaacaattcaaccaaatttattatgaatgcctttttattttaatagccgaaaaggtcacgaattttagcctgcctaatttattacagcgctttgaaagagcttgactttggcaacgaaattgttgttcggcttcttaatgacaagaggtaatggtaattaataattaatttcttttcttaattcaattttatttgtgtccattttatttttagatcgctgtttaaaagccttttggcacgatgtgccaaacaagctcatgacattgaggtctgttgaacaattacatttattttaaaaatttgaatctttttgttactaataatattgaattaagctagttttttttttaattttaaaattttatattatttatttatttttaaaatgaatgaaaaaaaattgatttttgatcagcaaccaaaaatagtttatagaagaaaaccaaaaataaatggattatcttttcacttcttaggccatattttatttgggtgaagtgaaatttaaattttccgatattataaattgaaaatcagataaaactctcgagagtcttgacgacaatttactcatgctcctaagatttaggtgtttgacccgaaaagtttggcacgtttttgtccaagagcagtgcgagttggtgacggcgtgacaagattttttgaaaatgtgagtaatgtcaccctaaaattatttacattattttttgccaatcccagttggccattgagctcgagaagggtcacgccattgctgatctcgagcagaaagtggctgaactgtgccgtgccaatggccaactccattaccgtatgaaagtgtggttccaagccgagaattggctgtgcgtcaaacgatcggtagtcgacacggtaattgttgcacacaccaaacagttcgacacattttgcggcggaggtgatctttacaatgaaaattctcattattttattattatgatgtacataaaaatggcaaaatcaaatgtgtcggaatgccaaaaagtggtggtgatcaattccaacacaaattgtccaccgaccagtcaaaatcattcactgattattcccattttttcctttacaataacagaaatgcaaataaataattggcaacttctgtgggaattgaacccaatcgaccacacaatccgtgggaagctctaccattaa

SEQ ID NO: 60017 - DNA, 71 bp, Heterodera glycines
gtttcaaatatcgtaagattgtttgatagggccagacaagagaaggcaacagttggtaccaattttgcggt

SEQ ID NO: 60018 - DNA, 465 bp, Heterodera glycines
gtttcaatatcgtaagattgtttgataggcccagacaagagaaaggcaactgttggtaccaattctgcggtaaaaaatgagaaaaaagagataaccatttttggtcaagaattttttttgtttgcgtttcaaatatcgtaagattgtttgatagggccagacaagagaaggcaacagttggtaccaattttgcggtaaaaaaatgagaaaaaagagatagccattttttggtcaagaattttttttttgtttgcgtttcaaatatcgtaagattgtttgataggagacaagagaaggcaactgttggtaccaagtttgcggtaaaaaaatgagaaaaaagagataaccatttttggtcaagaattttttttgtttgcgtttcaaatatcgtaagattgtttgatagggccagacaagagaaggcaactgttggtaccaattttgcggtaaaaaaatgagaaaaaa

SEQ ID NO: 60019 - DNA, 897 bp, Heterodera glycines
atgaatggccaacgacttggtgatgtgtggattttggatttggaatcgatgaattggtcaaatccgctaccgcaaggctttggaccattgccgcgttcactgcacaccgcaaatttgattgaaaatcggtgcgtttggacgcgtttattaataaattagaattttgtttttattttttgttgcttttttacgggtctcttcatttccccttttttgggattttccaaagttttcttatgtgggaaacagacttatttttttttacaaattttcagcatgttcatttttggcggttgggtaccaaatgattctgacgacaactcggagcgtccaaataaggggtggaaatgcaccaacacattggcggtgttgaatttgagcacactccgttgggaacattccctcggccctccaacgcccgtgacagcaacaacatattccactggtaagttgcttatctcggttcggagcagcaggtggtttccctgccgccatcattcttccccaatatcagccccacacgaaattttttttttaataagttcatgaaaaaatgagagaaattttttggcgattttttagaaaaaaattaaaaataaataaaatttaaaaataatcgcttgattagtggtttttcaaaattttatggtgagaataattaattataagtttttagcaaaaaagtttccaaaaaagttttcgtgcaaataattggaagtccaaattgatttggcatgtgtggacaaacgtgttagcatttgttttacctttttttcaaaattttaattttagacttctggccaactgcccgtgctgggcattgttcggcggtgatcaacaagcgcatttacatttggtcgggtcgtgatggttacaaaaaactgcagaacagtcaag

SEQ ID NO: 60020 - DNA, 567 bp, Heterodera glycines
atgagcatggaactgaacaatctttcggcactttactcggccaaatgtcttgaaaattccaaattggacgaagaaatgcagaaaatgctcagagagcgtgagcagaaaagtaccaatacaaagtgggctttttatttattttttaatattttattttgaattttgctttcagcaatttggatgccatcaacaaacgccttcagagggaattgcgtcagaaggagcaaagcatcgatgacctcagacagcaaattgcatggcttgaaaagaagctgaaaatgagcggaattgaagtctcggagcagggtaagccgcacaacaaaagcacttcgccacaatttatttaccaatatttttaaattcaaatggtgacgggctgtccgcggtcaccagccatttttattatataatttatttgtgcacgctgagcaattttgtttccgcttttcacttcattcccttttctattcgatttcagagctatgcgacttcttcaaacggttagtggcgataacacattacaactcgtcaaacactttccatgcttttgcttttattattatttaa

SEQ ID NO: 60021 - DNA, 722 bp, Heterodera glycines
atgcaggacaatggcgtcattgtccctatcgaacatcgctatttgctcaaaagtgcccctccgcgtgctctcgcgttactctccaaagggtttgtttctcgatgctttgtttattaattgcgagcttttgctaagaaatgacccggagaatggtccgtgggaagtgacaagcaaaaaacacgacgctcttttcgctgccttaaattattgcagtgcgcgggagattcggcaagggttgtggcagagttacgtcacaagatccgtgagaacaattaacaaatgaacgcatcgatggggaaacgtgagacttttgcaggcattcagttcgcaaatgttgaacaactcacaaaacatcgaggaattgcggcataacacgttgattctttgttttgttactttatcaatcggggtccattaagtgagggctttgccaaagcgcttggcttttcgtcgactgcgcaccaccgaatttcttccaaaatggccgggagtccccaaactgtccgcgtctttgtcgacgagtatcttttacccctctccattttttctaaatttctttcccttttagactttccaggcgctttcgtcccgtgtttttctcccgactcgaaggcgcttggaaaacgtatgccgaagaacaggaagaaagggtgatttccgatttggaagcctttgatctcttttacatttgtcgtaaagaggcagaacataaccaaaagtga

SEQ ID NO: 60022 - DNA, 756 bp, Heterodera glycines
atgggtgatgcaaaaccgaaagccgcacaatcaaacgggatattttattacgtgagtgtgataataatgaccaatccatcactgcttgtctcactgtttactttagtcttccaaatgttccggatgaaaatgcagaaaataacgctcttttggaaagtattgaacataattcaaaatggcccccactgcaaagtgccacacgtacgtttgcttttttattttcctatttaaatattttaattttagcagatgagttttatgaaggaaccgtgaaactaatcctggaatatggcgccagtgtttgggaacatttggacttacttgacgaaggtaatgattaaatttcgacatataacaaaacaaaatgcttgaaatacctactccataaaagatgcgaagaaaacggcaaaaggagacccaaacgtacaaaggcgtacattcgacaacacagtcagttcactaatagacgaggaatacgacgttcagtatgctgtaagcctcagcttattttttagtaaagttttacaaaaagtaacttattcagctgaacacactcctcgtgaaaatgttcactgattggcccgaatgccatccttccctgttcagggaagacctttatgtaattcttagtccagcattttttctgatttttatattctaagcaagttcaaaacaccttccaaagggaattgagtgaacgatggactgagcccacttgggtcgaagctgtaaaggtgaattggttttgaaaataaa

SEQ ID NO: 60023 - DNA, 1183 bp, Heterodera glycines
aagcaaacttacaaaaatacattttgaaatgccatttataaatctttggaccaaccttcccgaactcaaattggacaacgaattcagacgaacattcctcgcgacagtggccaattcaatgcaaaagccagtggaatcgacagcactaattgtccagtcgggaccaaactgttgccaaatcggaagtgaccctgccgaaccagcgatgattctgcaagtaaaaagaaaataaaaaaaggggtgaaaagtcactcagcgattttaattgattgtttgttgtttattataagatcaaatcaattggctgtgtcagcgcagatgaaaatgtaattcactgtaagaacatcagcgaattcgtccaaagtcgccttgggattccgcccgaccgcgtgatgattcactttcagtctttggagaagcacgaagtcgggaaaggaggaacgacggtggaaaagatgtgccagtaaattaaagaaggaaatggatggcatgttcaatcaccgacttggcaatgttaagaaatggaattaaaagcaaaacctttataattggaaattgaaacaagcaacaatgaattttgtttggatgctttccgtcagtaaattctcaagaaaagggaaagattaattcaagagaacatccaaaaagagaacacggcaacaaaggaaatgaatcaagaaaatgatggatcattcgttaaacttcttccgcttggaaagtcctccggccgcgggtgtgccttcgaatggtctcttgaacccaccaccaccgccccgttggccacggaaattacccccttggccccctgaagcgcctctgaagcctcctcctccacgtcctccgcctctaaatcctcctccacctataaattttgaaattttatattatagcctatcaatgtgtgtggttggaaataggcctgcatctaataggtcatgtatcataaaaagttcaaaaaattagcaatgattgagaaagaatttaatctccaccaattacaataatatcaacatgtgtaacttacgtagcccacccccttaccgaaaccaaaaaattttcaattattggcaaatttattaaaagcggttacaaaaagcgacaccattccattggaattggccaattctatttgtatgttaatatggtacctctccctccgctgcctgcgcctgaagcgttaaag

SEQ ID NO: 60024 - DNA, 54 bp, Heterodera glycines; identical to SEQ ID NO: 55479

SEQ ID NO: 60025 - DNA, 300 bp, Heterodera glycines
atgacattctatgcttctcttgttggatacacgggaagaaataatagttagtccttttgttgaatttttagaaattctatccgtcaaatcggcttttggaattttaatgagtaaatcagtaaccgtaaatgacattctatgcttctcttgttggatacacgggaagaaataatagttagtccttttgttgaatttttagaaattctatccgtcatatcggcttttggaattttaatgagtaaatcagtaaccgtaaatgaaattctctgcttctcttgttggatacacgggaagaaataa

SEQ ID NO: 60026 - DNA, 186 bp, Heterodera glycines
ggcacccccacaaagtgtccaagccacgaaatgtccaaaagagtaaaaacccacgaaatgtccaaaatttttcaaaatttataaaaacaaaatgagtctaatttaggtttttagggttttcggggtcgctgaatacgaatataccctttatattaccccttgcctaacgttaggcccatctgaata

SEQ ID NO: 60027 - DNA, 406 bp, Heterodera glycines
tttcatcgattgatcagctggatgagaagcacattctcatcacatacctgcataagaaggactgggtgcatgagcacgcgtgctcaaacattggtgacaaattctcttcaaaattttttcagttaataaattacagtaatttctttgtggacaacttcagctgcgcggcttgtcctgcttaaggcaatgcaaaaggtggtcaggactgaccgatgtgagctactgtacacaggtacttgaacaaaaaaaatgtaagataatttcttaaatttaagacaccgacagtctcatccttgtgcatccggaagagcgttgcccactcaaaactggtccacacttgggtcagtttacggatgaataccccgaccatgacatcgtggagtactgtagtggaggatcaaaacag

SEQ ID NO: 60028 - DNA, 671 bp, Heterodera glycines
atgccaagcgtggcggcaaattctcttcaaatgttgcagcaacaggccgctgccgcgcaacaatattccgccgccaccggcacgccctcattcattagcagtgtcagcggtggcaaatgcggcgccgaataccagacggtttccgtttccgcgtccggtacgcagccgcaagcgagcggcaacaatgcgtccggagacccggcaaccgctagtggagccggctatccgtcgggcgcgtcggttggcattgttggcggcagtggcgccaacggcaccagcggcgttacgccgtacgcgcagttgctggccatgggtggtggcggtactggtgccatggttgacccggctacggctgcaaccgctacgcttatggcacaacagcaggcggccgctgccgcggcaattatggcacaacagcaacaacaccagcaacaacaacagaaccagcagatcaactgtatgttgttggatttgtgctggaattttgggctagaaagttttgttcggttctgatcgggcctctgtgagatggtgccaccaatcaatccttgatcgaatcagaccttttgaagatatttcatgctctgatcaattttttagcaatcattgttctgatcgggaactttaagcaattccatgatttgctcgggctttttcagaacttgatctga

SEQ ID NO: 60029 - DNA, 390 bp, Heterodera glycines
atgccaagtattttcgataacttcgctaaagcaaacggaggaagaggcccattaatgatgggtgaggcttcttcgaattgggtgagcactccattgatcgatgagaatgggctgcccgtggccaatgacacggcaagtaacagcacaagcggcactttttgggaagagatggagcaggaactgagaagccaaccgacggggcgagccgaacctatggcatttgaaatggcaccgtccgacggaatgagcggaggagcacaacaaatgacaatgagcaaggaggagaagtgccaaaggctgaagaccatccaggaggagttgctgttcaccttggcatcgcgcttcaatggatacgctaatttggatgatatcaaaagggatttcaagtaa

SEQ ID NO: 60030 - DNA, 770 bp, Heterodera glycines
tttgtatatcatcagctttggattcgccgtcaaacagcagataaaattggatggattaattcaaaatgaaaagggcatttactcatatgaaagtgatggcaaaatttggaccaacggaaaagaaaaaggaacaattgccaaatattcctacggtgttggtgataccgtaggaattggtgttcatttaagcactcgacagctctttttcaccaaaaatggatttcgtttgggttggcaaataaaaaataattaaacaaaattttaaattgcctatattttaattgatttttatgtttaaatcgttgataaaattcattacttttcaaagataccgctgctggttttttcgacgatccatcttttgctgatgattcttttcatccattcgtttctttgcgtgaaactgatgaccaaattgaggcaaattttgggcccaattttaagttcaatttggcaactctttgaagaagaaatattcagcagataaaattgttcttttaatcctgttgtgcttttcatcttcaattaaattttttttattaatcggaaattttcatttctcgggggtaattaattatatgaactaacacttaaaagatgaaaatttacaagaaaaacagttttttccaattatttgctaaaatacatgatgtagaaaaaatacaaatattaatttagcaataagagtattgtattaatacagtgtaagaatgaaatgctcaacagatatcaaattgatcatctggttgaactataacttttaaaataaa

SEQ ID NO: 60031 - DNA, 439 bp, Heterodera glycines
atggctattgaggacactgaaaatgatgccctttttgatcaactttggggaaatttaaaaacaaatcaacaaaaatcgggcggatttgaacaaataaaaatcaaagaggagcaagaaagagatggtgatcagcagcagaaaagggtgaagaataatgaacagatcggaaataaccaatcggaaaatgaaaattatgagggaaaatttgggaaaatatttataaaaattgagggagaaaaaagcgaagaaatgaaaaaagaaatttgtgaaaatccaattaaaaatgaacagcaaaatgaagaagaattgcagcaaagtgatgaacaaacaattggaaattcaaatcatttaataaacaaaggttaattttgccttccaaatttaatttgataatttttaacaaagtttcttttcagttatttacgaaaaagtcaactaa

SEQ ID NO: 60032 - DNA, 1092 bp, Heterodera glycines
agtgctatgtcagtattcgagaaatccattcgtaaagtatttgtcgatacttataaggggtatcgatgatggtttccttgttgaagcaagacgacagtaagaaataatgtatttcacgctttctaaaatttaattaggaaaccaacgctgaaagatggtacaacggcgacaaccatttttttattggataaaacgctttactgtgctaatattggcgactcgaaggttaatgtttttagcgctaataaaaatgatgtattttaaaaattactgatcataaatcgcatgcattttcgactaaaaggaaacttaatccgtgtagctattcggaattgttctaaaaggatgtcaaattcgtgatcagcgattacgaagcctttgggaatacaccacaaactaagagaaaaacttgcaaaccaaaagcctttttataaaattgaaattgggtatctttttatattttttttaattggcatgattattttaaaacaattatttgtataataccattgtttaggctattgtttgtcgacacaaatctgaaaagagcacaaatattccgctgcaaatcactgtggaccacaaccctcttgtttttgacgaacgaatgcgtattcaaaagtccggcggaacagtcaagtcagtctcatccaaggaatgttcatcaaatttttgattattcccttagggatggccgagtttttggcattttagaggtgtctcgttcgattggtgacggtcaaatgaaggcacatggcgtaatttgcaccccggacatcaagaagttatcgttaaccccagacgatctgtaactcttccggtgtttatttgtattaatagttttctttattcgcattaagtttcatcattttggcttgtgatggcctttggaaggctttttcgcccgacgcagcgattgattttgtgatcggacagtacaaaatgcttgctaaaactgcggagttcaacgaggagaaggattctgttggactgtggacaaaaattgccgacgaaatgagtgcggcggctgtgcgaaagggatgtggtgataatgttactgtgctggtggtaattgtggctaatattgcgaaa

SEQ ID NO: 60033 - DNA, 192 bp, Heterodera glycines
atgagtcagcagccaaacgcaccccctccctacggttggcgatttcttcgcctttaaaaactaaaaaaatatgttttagacgacgctcagaaatacccggcctatcccaacccaaatgttccaactgatcaaggcaaggaattggatcaatcctctcaatggcaatttatgcttatgcccgactctgtttga

SEQ ID NO: 60034 - DNA, 1235 bp, Heterodera glycines
atgaaaatcaatccgaaaaccggggtcaactttgaagttttttacgtaagtttatttcaaacaattcgtataaaaaaacaaccaaaaatcctcatgtattttggacaaaaaccacctatattttcaaaaaaataaataaataaataaaaataaatccattatccaagtaaatctcataaacgattttttttagtatggaaaacgtcaagattcggactacaaagcttatgcgttcaaagcaaaccaaccatatgaaatccatattgccgtttttgaaacggaataccaagtgaagctgaacgggcaaagcttcgaaaattttccaaacaaaatgccaatttggacaataaattttatgcgggtaaaattttttttgaaaaaaaaattgatgaaaatttttttcaatgttttccaggtgcaaggaaatgtttcattgttggccgagcctgaaataaatgtgccaaaagtaatttttgaaattgctgatggtctgggacgtcacaaatcccgcccgacgttagaccccgaaattttggatttccgacccaaatcccgatcccggtcattttctcgtcccgatcactgagtccgacaccaaaaattttgactgtgctaatcccgactttttttgtcgccccgacccgaaaaatttgacattgcgagcccaattcttgatcccgacatttttacagtcctgaatcttgatccgaaggcatttgccttagattttttgcttttaaatatgccttgaagcaattaattagggtgctgggtgattaattaattgtttattcgaaatgaacaaaatgaaaatttaaataatttttcatttaaattttcaggtcagccaaaaaggccaattttcatttgcattgtcaagtctttttaactacgatgaacagatcactttttttttcactgtgaacaatgctgccaatagtttccaaattaattttatgcacgaatcatcagagatccatccaatgagtcagttcgtttaaattaattaattactagggcttcgatttttaggtgctaaaaactgccaaaataagtaggttttaggttctaaaaaacccccaaaataggtgctaaaaatgggaaaataggtgccaaaaagttccgaatttaggggtgtaaaatcgaaaattttcatcaaaaagcaaaaatattttgccaagtcattaaggatatacataattttcaaaatcaaaaattatcgtcaagaaaataaa

SEQ ID NO: 60035 - DNA, 526 bp, Heterodera glycines
atgcaaatgttgagcacaattagcaaaacgagcggaccaacggccatgaacacctgcataaatgggtggcatggtcaagcaaagaagcccatttttgcgatggcatcgcttaccgtgtacatgtacgtgtagtaaatggagtaatacacgtgactcatgctttaaatggatgaattggtcattttcacattttagcgtccattttcagctcttttaccgaaattccgttggacaaatttggagactgtttatgttcagtccgtcccttgtctcgaagcagtcgattgagcgaagttcgaagaagtgcggaatgttgtaaaggacagccagacaagttgtgaccacaacgaacttttgcgcaattcttagggtcggagagaattaaatttagaaatttcaacggaatccgcacaaaagggcggacagtaggtactaccgtacctcactgtacagtacgactcgctgattggccctttcagtgcgacactgacgaagacatcaatggcagcaccgacgcagaaataaa

SEQ ID NO: 60036 - DNA, 1333 bp, Heterodera glycines
ttgctggtcctcctcgtctacagccatctccaacaacgcttccactccatcagtgtttatctgatggcgttggctgtttcggattttctgatgatttgcactgcgatgtttttgtttgtgttggaggcgtggaggcatcacgggccaatgggtaagccaagggaaaggcggcgaccattggcatttttttcgtatttttcgttgctttttaggtttggcctatgcttacggaatcggcgcccccttcttcttcccgttggcctccattttccaaaccacttctgtttatttctgcgtcggtgctgccattgatgtcttcgtcagtgtcgcactgaaagggccaatcagcgagtcgtactgtacagtgaggtacggtagtacctactgtccgcccttttgtgcggattccgttgaaatttctaaatttaattctctccgaccctaagaattgcgcaaaagttcgttgtggtcacaacttgtctggctgtcctttacaacattccgcacttcttcgaacttcgctcaatcgactgcttcgagacaagggacggactgaacataaacagtctccaaatttgtccaacggaatttcggtaaaagagctgaaaatggacgctaaaatgtgaaaatgaccaattcatccatttaaagcatgagtcacgtgtattactccatttactacacgtacatgtacacggtaagcgatgccatcgcaaaaatgggcttctttgcttgaccatgccacccatttatgcaggtgttcatggccgttggtccgctcgttttgctaattgtgctcaacatttgcattgtggtcaatgtgctcagacgtccgcgcgacccaggtcaaaacagaacaatggcacttaaacatgcaaatggcactgccattaatttgatgcgatggaacatggacgaaggaagacattccgttcagattcggacatcgtttcgctgatcctcgtcgtttgtatgttcattttctgcaattttaccgcacttctcgtcaattttttggagctaacttttgctgaacagcttaaacatgtgcgttctcttatccatctttctgtacattttccgctttttccaggtgatcgtttatttggttgatctgagtaaccttctcgtggtgataaattgctccgccaatttctttgtctatctgatctttggccacagtttccagctgtacccatcacgggaaattttctttggaaaaatcgccgtccggcgcattggaggggaaatggccaacggcggagcacgtgccaatttgttggtaatggtggaaagtgaagaaaagagcaatggcagaagcaacaacaacgcc

SEQ ID NO: 60037 - DNA, 579 bp, Heterodera glycines
ggctgctctcctccagccgaaatatttcatattagagccgggaatcggcatttcggtaattagtcggaactttcgctctaattaaaaaattcttagcggaaaattctgaaaattttctcaaaaatatcccttagctattaggagttctaaggtattcgattattttaaacaaagataacggaaatcccgccgtttttaaataatctcaaaaaatcccggttggctggttcttgcatagttggtgtttcttttctaaccggttttttggcattctgtcgcgcgccggcgttttccttcaaaataaattataaggccaggagcaggaaaatttgcggattttctgagagtttttttaccaaacaaaaaaatatatgaaatttaaatgtttccaaaaaaaaattttcagaggctcgcgcaattgcgtcggcttggcttgctttgatgttggtttatttgctgttcagcggttggatttattccgtcatttaccgcgcttatgccacccaaaaggaggaggaagagcaagggattaaagctgacgaaattcatggacaccaaaattatgccggaggcgtttaa

SEQ ID NO: 60038 - DNA, 5590 bp, Heterodera glycines
atgatttgcatagaaattcgagtagaaaattttgcgccaagccaaccagctagccctcgaaattttctccaacccccacatacctcaactccgtctgtaaatattgaaaatcgacagcgattcggaccttttccgataatagttggtcaagctgagcgaatgcgacaaattgcaatgcagcaacctgttgctaacacagttttccgccctatcccactgagacccccgcagataaaccaaatagcagcaaatgctcagcgtagcattaacatggaatttttctccagtggtggtcatcgtattgatccaccaaacgcaccaattcaggcgggtagtcgtttcattcgaaaaattcctgcagaagcagaactctggcaaggagcagaggagaacattaattttgtatacccacaaaatcagcaaccaagacagccaaatgctttcccgttccaaggaaatgagcaaatttttcaaaaaccgattatgaatccctgcgaaaaacaatttgttatgcatacacaacccaattcaacggttctaagcaaccttgaatttaatctgatcttggaacgaatcccagatttaaatggaaatgagggcattgagatcgtaaggcgttttttcaaaaaatttgatgcctacacggacgaatggccaaattcaaaaagaattttggcgttggaaagcaaagtgtttaacaaagccgagagagcgcttgaagcagcaaaggcaactcagccataccgttatgaactcatccgtcgcgaaatgctgcagcagttagaagaaactgactcaaaaaatctcaacgcttttgacgaattaatgatgggcgtccgcagaaaattaaatgaaccgattgatgatttggccggaaggatttctgccttagttaaacgggcctaccctggccttacaaacaatctaagtgatgagtattcaattaagttcttaatccgggcgatgggtaatcccgatctcgctctaaatttggagctaattcgcactgtgggcatgacactcgatcacttcgtttcgttggctgctcgggctgaatcagcacaacgcgcagcaaaacgtttcgtcacaccgacgaatgacacatttcagcatcgggtacaaacgcagaaatggcgacaaaattctgttgtcaactcaaatttcggaacaggaacaagcgaaagattttcgcagacttacaataccaatcatcagtccaaagaaggtcaacatttccaatggaaatgttacaattgcggggaacccggccatttgtcacgcaattgcacgcgtccaaaagatttttcgcaaaatcaggacaccaataatcaacaaaatagaaattttgttgtgacgggagcaaatcggactcaaattcagaccccaaataataacaaaaacacattcaaaccaaattcatccaattttttaaagcacaattgtttggtggttcagcgggaagaagtcttcaacaaaacgcgggtaatcactaatcggcggcgactttttgcataagttggtcaaagaaaagcaagtgaaattggagtcgttggaaatttttaagtcaaaaactcaaatttttgatgttaacggaaaatttgttaagtgccttggaactgttaaattgccagttcatcgtcatgggttttcagacccggtgtccatttttcttcatatcacaaacgctccaattggattcggacttttgattggcaccaacgcattacaagatttaggattcaaactttatgatgaacgcaataaagctatggtcgaattcgaaaaaacagagtcgggaaaaagggattttctcacggtcatttacagaacgaccattgagccgaattcagttaaaaatttggagttaagcattgatagtcaattcgaaggagctgaaattgtcgcaacgccggacgaaaattccgtcgccgcaattcgtgttgaaccaacagtagggcttgcccaaaaaggaaaaattattgttccagtgacaaatttttcaatgtcagccattacacttttcgaaaactcaaaagttggaaaagtcgaactcgcaaaatcagtcgaagaagcagaaaatttcttaaacagccaaattatttgttccaaaaaaaacgatccaattgcggcctttcgactagacgcaatgaaatttttggaaattttacaaaccagaactggggacctccctgaagaacatatggaaaaactacaaaaatttggcaaaaaatttcctgaaatttttgcgctcagtgatgaagacctgaagcagactaatttggtcgaacatgaaattgaaaccgaaggaaaagcgccaataaagacaaaaacgcgacctgtcccatatgcttaccgcgaaaaaattgccgaaatgattcaaaattacttaggccgaggtctcattagaccttcaatgtcaccttgggccagcccaattgtgatagtcccaaaaagggatggaactctgcgattctgtgtcgattatagggggttgaactcaataacccgaaaagattgctttccgcttccaaacattgacaatacacttttaatgcttggcggacgtaaatttttcagtaccttagactttatgtcaggttactggcagatcaaaatggaagaaaattccatcgaaaaaactgccttcacaacagaatatggcctttatgaattcatggttatgccttttggcttaactaacgcagtggctaccttccaaaggttcatgtctcgtctttttgacggaatgattaaccaatttttgttcgtgtatatcgatgacattctaattgcctcagaatcattcgaagagcatttgatacacatcgaattagtcttttctcggattaaaactgccggtttaaaattaaaattggaaaaatgccatttttgtgcgaccgaactaccatttttgggtcacatccttacgagagaaggaataaaaatggacgcagataaactgaaaccagtgatcgaattgccaacgcccacaacaaaaaaagagcttcattctttgctaggatttttgacatactataggaaatttatacattcctttggtacaattgccgccccactttttaagctactgagcgaaaaagttgaattcaaaatgggagaaaaggaaaaggaagcactagaggaacttaaatcgaaaataattcgagatgttgtactttattttccggatttcaaagcagcagaaaatgacccgagcaggcagtttataattatgactgatgctagtaaaataggtattgcagcggttttatgccaaccggatcccgaaaagagaattagaccaatttactttgcctcacggcaatgcaaccatcacgaatctcgttacagtgctaccgaattagaggccttggctgttaaatttggtgtaaaaaaatttgcccaattcatcatcatgatcccaacaagagtgattacggatcataaagcacttatttggatgtttcagagtaaaaacgaaaccggaaattcccgagtcgaccgatggcttctcgaattaagctcccgcttcattctaaaagttgaattccaaccggggaagaaaaatgttatagccgatattctttctcgttctaaagcagctgaccaaattttggagccaaaagacaatcaagaaattgcattaattgggaaggtacgaacaaatgaagttccagattctatacaagatttcactgatcacaaagaaaaatgggaggaagagactaaaagcagtgaaatgcagccgatctatgaatttttggccaaaaaagtggttccaaatgaccctcaaattcgacaaagtgttatggataagtcccacagatatacaattttcgaaaaacttttgtatctctgtgaagatgatggaagaatgcgcctctttgttccaaaatccttccgtgaaaatttggtaaaggaacgacacgaaggaaaatgttcagggcatatgagcggcaaaaaattgtataaacagctttcggaattatatttttggcctaatatgctatcagattgtattcgctttcatctcgcctgtagaatatgcgcacatacccgaaatgcccgctcaaatgaaccaccactaaaagtagttcattcttctgaaccacttgaattagtttgtatggacattttagacatcggaccaagccaatcaaattttaaatacatttgcgtaatcatcgatcatttcactaaatatttggtcgccgaacctattccgaataagtcagcagactcagtcgcaaaaatatttgtggaaaaatttttagtgatttttggaacccccaaaaagatacattcagatagaggaaaggaatttgtaaatgcaacactaaaagggataagcaaaattcttggaactgaaatgtcatttacagcgggttacgacccacaaggaaacggactggtcgaaagagtgaatgggattataattgggatgttaaaaaggtcaacggctagcaattggacgtgggacgaacggttgccgtttactgttttcgcctacaatataacgccgactgaatctacaggcttttcccctttcttgttgatgtttggacgaccagcaataattgcatcggacaaaattacgcaaataaattttaatccgatatatacaattgatcacgaaaactattttcaattgttcttggaaaatctcttaaatattcaagacaaagccaaacaaaatttggaggaatacaggaaaaagagtaaagagtggtatgacgcaaagccccgagtgaaggcaaacaaatttgaaatatcggaaagggttatggtagcttttccgggaatgcaccgtaattcccgacacaaaaaattactatggacacatttcggcccttactttatcgtaaaaataaccgattcctcagcagaagtagtgccagtcgacaaaaagacggctaatcccatcactgtaccattggaaaggcttataaaagtccctaaatcgattccaaacatttcaacattgccacgagggaaaaatccctataaaaatatattaaatgcaatgattcttagcgtgtcggttcaaatggaatgccaaagaagggaagaatcgctagccgaaaataagcaatttgggacaattgctattaaaggcgacgaagagggaaaagaagagaaaaatgggggaaaagatagcgggattaataaatctttctcgatcaaagggacggaattccctttgaaaatttcaggtcaaatgaattcggacgccgggatcagttggaactcaatttgcaaccccaaagaagaggggcatgaattttgcagtgttttgaaattgggggagctggacccggtgcttggccagaccgggatcggagcaaccatcgtccaaacaccgctacaagcactcttggccattttcttgttgcgctccgggaccgtctcttcaaacaccgccgcccgaattttcgtggaattgattattaaaaacggaccaaaaaacgaaatggccgctttctccgagaaaaggggggattatgtggaaacaggcaaatttccacaggaggaggaccaatcgaaggcgctcgaaaaatggttggaatcatgttgtgcggcacgtgaagct

SEQ ID NO: 60039 - DNA, 1141 bp, Heterodera glycines
atggaaaaagcagaagtgtcacaatgtttttcaaaatttgacaataagtttctcttcataattggtcacggtgatgaatatcgaaagtttaagcagactaatgaaagaaacggcgcaatttatatttattgcctgaaatgtgaaagttataggaagcaaaattctgatgggttgttagctttacatattttaatgattataaattatattaagtatcatcgcaagtgcaataataagagaaggtcaattagaccgaactcacaaaataattcataaccagcattgtaacggtgttccgcttgaacagcttactgctgaacaaattgatagaagccaaagaagagatttagcgcaatgttctacggatcctaaatctatatggcgagaagtattgtaaaattttaataaatcccaaatagaacattttagggatcagaccggtccagagaacatgatattgctgaggatattgggattgaagatacgactggaatatcatttaattacccgaattggcagacagtacggagtgcatataaccgtagaagaaaaaataatttaggggattcgttagacccctttaatgttcccgaaaggtttcaattgagtaaacgtggagcaatcaagttacttcttagaaaaaatatttctgaagaagacatgtaagtatgaatttcatggaatattaggtaagttgaaatattctaaggtggatgcgattcagagatagagaattaggcgtgatggtttttatatcggatacacaaaaaagagctgctagccattgcaaagttttagtatcagacggaacttttgaattggcacctttacagttccagcaaatttggacaattcatggattggtcagacttagattagatttatgtttaatagagaagtatttaagcttgagacagcaaatggtgctgaatggactccattacttctctctataatgaaaagacggtagtatatatttatttattcttttaataaatgaaattacagaactcaagcttcatatgaagcagtcctttcgcagttaaatgaaatatggggtgaagaaatttttgaaggaattgatagaattcatacagattaaaaacagctgaaatcaatgctttgacaaagcaatttggta

SEQ ID NO: 60040 - DNA, 504 bp, Heterodera glycines
atgacattccaatcactgaaaatcaggccaccagcattccaatactgggactcaacccaccaactttcattgggattccaatctctgggactcaacccaccagcatttcaagctctgagactcaattctcaggctttccaatcgctgggactcaacccaccaacatttcaatctctgggactcaaatctccggcattccaaacactgggactcaacccaccaactttcattggcattccaatctctggaaatcaagccaccagcattccaatctctggactcaacccaccagcatttcaatctctgggactcaattctccggcattccaaacaatgaaatctccggcattccagacactgggactcaacccaccagcatttcaatctctgggactcaattctcaggctttccaatcactggaactcaaatctctggcattccaaacactgggactcaaatctccggcattccaaacactgggactcaaatctgcggcattctaa

SEQ ID NO: 60041 - DNA, 802 bp, Heterodera glycines
acgaatacgtggtaaggccccctccccccgttggacgagagtgaaactcatggccaccctttgccattttgaagtcccgtagcggaaagcgcgtccacatttacaacaccgacgccgaaggtcggatggcaatggccgacccattggccgaggccaaagaaaaagtgaatttgccacgaaattccgaaagccaaagaaagagcaaacattggcaactttcactaggccatgaaagcgaagaacccacatttgttcaccatcgctacgctcactggccatttgatactcacttatggccattgctccgccgcgatggacaacggaccggcgagggcggcaaattacgcggaacaattgaggaaaacgggcgacgaattcggacaaccggtggaagtgtcgcgactgttcagtgaggcaagtgcagaaaaccaaatggtgggcactcgaaacgaatggagaaagagtctcaacaaacggtgccatggaaaatttagagcgaattgtttctttttatataatttggcacttattttgccaggacttcgactttcactctgcgaaatgcgaagcggccgatttgatgcaatcgaacgctttgccaagcgtgagaacgccacgagggcacatgggcccagcggcatttctgatgcgcgtctcgcgcatcgacgaggctgggcttgactcggcacagccgttgaaatacacccatttggacattggcgtatccatgggggagtacccaaacacttcgttcccttctcctctgctcgcacttattgcacagtaaattgacaactcgcaa

SEQ ID NO: 60042 - DNA, 773 bp, Heterodera glycines
atggaaaatttggcattaatgggacaaatggtaaattattgggacaaatggtcgacaaaaaattaaaaccaatctgggtcattccatatatgttgtatccaatgtaaacaaaacaaattctaaatgtgtcgtcaaaaggtgtgtgccaaaatttgacccttcggagcgcgggacaaagccactcattacgcccgtgggggggggggaggggactaataagccgaggctaaacagcctcataaagcaccaccgcccattgaacaaagcgtgccggaaggagccggggggagggaggtgaagggcgaaaatggcctcgcaaatatttatcgcgcagattatgtgagggagggggcgacggtgtcggcagattcttttgatccctccccccgggggaggggcggcaatatttgccttcaatttgcaatgttactagccatccctgcccccccccccattttcacaccaatttcttcgcggggacaaatgccgaattttcgaacatttccggcagtggacagaaaaaatggataattattgttagacccagcaatgttaaatggcattaattaagtgttggcaaaatggcaatgccaagtttttaaagtgtagttttgccagtgaaaaagagtattgaattttaaaataaaattttttcagcgtcggcaaattagctctttctgttccaagttcaaactttaaaaaccaatattttatttattgcaaaaacatctaaaatttttgcattttataaaaaaatattgtttgaaaataaa

SEQ ID NO: 60043 - DNA, 440 bp, Heterodera glycines
aaaatctataaaaaatttaaaaatgagaattcatgcgagattttctggaaataagcttaattgggcctagttaagctgtaaaaaaaatttggggcgatttgaaagagaatagaaagaaccaggttcgatgaagttttgttaagccaaaaaaaaatccaaacatttaaaaatctataaaaaatttaaaaatgagaattcatgcgagattttctggaaataagcttaattgggcctagttaagctgtaaaaaaaatttggggcgatttgaatgagaatagaaagagccaggttcgatgaagttttggtaagccaaaaaaatatccaaatatttaaaaatctataaaaaatttaaaaatgacaattcatgcgagattttctggaaataagcttaattgggcctagttaagctgtaaaaaaaatttggggcgatttgaatgaga

SEQ ID NO: 60044 - DNA, 1097 bp, Heterodera glycines
atggttcccaaggtgttcaactgtaccattcgccgttcacttatgtgccgttggaccgggacgatgtggcggtgcaacggcagtcgctgagtcggctcgaatttgtggacattttgtacgccggatatgacagtaccacaaaaaatgtcaccccagcactgtatgtggagggcgtgccgccgttgatgaacggtatccgagtggagcgcagtgcatacgatggcatttacttttgggagccggaagtgagcataaaatatttacaactattatataagatatgttattcatacataatatttaaattttatcagtttaatatacaaatttataattatttaaaacctgggcctacagatatatatatatatatatatatatatatattatatttaccaaatacataacaaacgacaccgaagcaaatgagatttttaccataaaaattcagattttttttttgtctaaaaatgaataacgctacgcggggaaaattgagaatttttgccatttttaatagatttgcacaataaaagctaatttgatggattgttttgaaaaattttggaaaattttttgtgaaatttgcgtaagggagatattgggtagaataccaataagcaaaaacgaaaattttatccgccggtgatagattaagaaattttggcagatttagtaatatgttccaccaaaaaatgcctgcctatatgaatttaatcttttcattaatgatgaaataggaattcgtgcatcagctgtgcagatagatgaagctagaaaatttttgaatttttataatatttgctttaaaaatggcatttttctaaaaaaaatttctttgtcgagcgctcaaaattgaggaacaaaaaaaaaaaaactatatgaaaaggttgattcaacgaaattaaaaataaaaattctattttttttaaatgcctaaagaaacaatttaatgttttcaaaaaaaaaattttccccattttcagggtcccgttcttattgcgaactcaacaatttcacataatcgtggccatggaattgttattgagagcacattggatggacgagcattaggaaccaaagtcgaattgaggtag

SEQ ID NO: 60045 - DNA, 84 bp, Heterodera glycines
tacaaatcagttccattttccccatttattttggtcaacttgccacaatcatttcgatcagtgccatccccgcccatttattga

SEQ ID NO: 60046 - DNA, 270 bp, Heterodera glycines
atgataaaacaacacaaaaaagttatttttaccacttgtgcagttcgtgatactgcagattaaatcaccttcctggcaatcttttgcagtgaaattttggtaaatttgagtgttcgaaatcgatccttcataacatttaagaccttaaaataatgttatttatcaattaatattttctttcagaaaaaccttcggagttgtccatcatcatacaaaacagaaaaagaaacatagcaatcggaatagaatacattgagttctttagaaata

SEQ ID NO: 60047 - DNA, 462 bp, Heterodera glycines
atgcgcacccgtccgatctggcaagttatgcaacgattgctgactagccaaaaggttcggtgccgtgatgaaacgaaccagcactgcttaccccgcggcacccggcacggtcccccgaaggaatggatttaattaaattctctccttcggggatttttttccattaggtcgtccgttagcgttcgattgctctagtcaatttttcaaaatttttgttgaaatatttgtagtgctctgaagggcgtggggggggggggcgggggcccaccacgaggccgcgaagcggccgagtgagtaccttcggtgcaggaaaattattaaggaagagagttcattatttattttttttttgcataattaattcataaatatttttttcagaaaatgctctgaaacgcaccaaattttatttacatgttagtttaggcactctgatgctttttctatcaaaaagggagatga

SEQ ID NO: 60048 - DNA, 523 bp, Heterodera glycines
aatcgaacgctaacggacgacctaatggaaaaaaatccccgaaggagagaatttaattaaatccattccttcgggggaccgtgccgggtgccgcggggtaagcagtgctggttcgtttcatcacggcaccgaaccttttggctagtcagcaatcgttgcataacttgccagatcggacgggtgcgcatgattccactgttccaagcaccccaccaaaagcaaaacgatataaccaaaatataaggaaaaatttttaaaaaattttttctccatcttcctttttgatactaaagcatcagagtgctaaaattgacttgtaaataaaatttggtgcgctttagagcactttctgaaaaaatatttatgaaataaaaaaatcgatttattcaagtgtccgtttggggtactcacgcaattatggggagcaaaatccaacgcagaattaaagtacagactatagggaagctaatcccgaaagattcggtctccccataaatctgggcgcatcggttcggggggactg

SEQ ID NO: 60049 - DNA, 273 bp, Heterodera glycines
atttataagcatttgtagggttctcagcagtttccctgcaaaatttggtgagctttcgatcagtctagaacgttggggatcaaatgcaaaaaataattaaaaaaaaataatactggtgtggtaagtgtgaagaactgtgttcttccaggcaaaaaattctaagaaaatttataagcatttgaagggttctcagcagtttcccctgcaaatttggtgagctttcgatcagtctagaacgttgggtgatcaaatgcaaaaaataatttaaaaaaa

SEQ ID NO: 60050 - DNA, 1030 bp, Heterodera glycines
atggtccaaatgaccgcttaccgcgtgcaaaattgtgatgggctgatcaacaaaagcggatgctacgatctggttcaatttggcttaagtgcccctcccccctaatctatttactaattaagaaattggccgatgtaatgaccggcttttggccttccgaaaacggttctttgccaccggatgagccaatttgcggcttcaggggtcaggtaatgaattgtaataatgacttttaagcattcatttcctgcttatcccctcaattcagcgttgctcttataccatcgaaattgccatcgctgtcacgattttggctttgattttgctaattcttttggcttggatgttacgccgttattggtcacttttgggaattggtcacggttgacttaactattttttggccatgtttagccaaactcgcgcgttgaacaaaatgtcgtggcgcttgttctgtgacgattttcgactaatcgacgaagaaacggccaaatcattggtaaattgatcaatcaattttaccgatcacagataattaatccacaatcaatcaccaattgctttactaaaaatcaattgctcaatcatccattgatcactaaatcaatcaattgataatcaccggttgattggagattctgattgatcagtgatcgatgattgccctttaaatcgataataattcactgaattttcttccgatttcgtcccttttttgtttcagttgtccctcgccagtggcaataccaaattgagcaatatgagcacaggtggaaaccgaaagcacgccattttgggagtgaatacccacgcgacgtatcgccgcttcgttcaaaagcaaccgctgaaattcctacgcgaagatttagtgctgttgaccgctgtcaaagatgcggtccacgacaatatcaatccgtttttgggtgagttggcgtttgccaatcttatagggctgttcgggagagagtcgagaagaatcgaagtcgagactctcgggcatctgaacattacaatttcgactgatgtttaa

SEQ ID NO: 60051 - DNA, 1225 bp, Heterodera glycines
atgcttcttcctctcctctccgcccttttgctgctgcttctgcctcctttccatcgcttccctttggcccaattcgcttccaaaccgcgtgagtaagccctttgcccgtttctgtcacccccgttcatctgaacaaaccatttcagcacctctctccccaaatcccaagcctaagtctcctcttgccgctgggcctttgttgctgaaagcatgctgtggcgacaattgtgaggagttccaacggcccgaggaggtacaaaaagatgacaataggcaattaccgtatccctttgcaattcagatgtacggtatcacttggtgggttctgttcacactgactttttttactcgggcaagaaaaattgccgttttaaagttgcggcaacgaaccaagcaaccaattcgaggaaatctgttgcgacaatgtgccgagaaggtaagtgccgacgagttcgactttggaagccgtgtcattgttaatccgtgccattatttccatttcctcaggcgtcgccagccctccagcttcatcgaccgctgctgcggcgaccaaacccttgcctatgaccagacttgctgccaaggcgtggtactcatataattatggcaaagcattgtttaaaagttgctgctaattgctcttagtccaggtgcacaacattccctcgggcgaatgctgcggacggatggcctacccgcggaacagcttcaacactttgtgctgcgaggagacgctgatcaccaacgtggacccgtcgctgatttgttgcggtaattacgctaattatactagtaaaagccaaaagaaagtgtcatcaattttaattatatttttaattggacattagcggatttttttgtgtgtccctttggcaggtaaaaatgcgtacgatggcggaaagagggaaatgtgctgtgggggtgccgtttatctgaaggaactgttcgacgggtgctgctccatatacgtgagacgagtctcagtagataatttagattttaaaagttttagggtaaaaatccgccggagtatcagcagttcagcagccgaacccaccaatgttgtgacaaacccatcgaacggttcggcacaatcaaatgctgctacctgaaggactcccagggccgcttcttcccgaagagttacgactcgtcaaaacagtgctgtgcctatccgtacaacaaaataacggcaaaaaatgcaaagggaaaatgcacggactga

SEQ ID NO: 60052 - DNA, 772 bp, Heterodera glycines
aaagaccgtccctgggtcgttaaaattaaaatatttttccaaatctgaatgagtcctcagactcttttttcaatttgttttacgatgagaaatttgttttgattttaagccaaaactaaaaatccaattttaacgcaaataacataattagcgatatgatcgcgatcagcagtaatgtgtcgctggtgtacataattccgctcgcaaatggcctgttcttaggtgttaccgtctcccccctttagccttacctcctcttacagtatccaatcggtcgccgcctgcggcgattcgtacgaaggggtcgctgttgcggccgcaatgtaccacaaagaggttcgaatgccattcgcagaacattccttacactttttcagaaagttagagcctttttgggtccgtattgtgccagtggtgagttggcaaatgatcagagacagattgggttgggtttgattggttgaacagagtttgaagcggtggccaaaatgtgctctttctggaacatccccgccatttcgtacatgccaacgacgacggcggtgtccgaccggaacatttacaaaacgttggcccgcacctcctcgaaaaacagcaattcgatcgcaagagcactgattagactggtggagcattacaattggaaaaaggcgagaaagcgaagaatgggggacggtagggggataagcaatcgattggattaaagccaattttaaacgatttttaatggttttttttattttagctggccattgtgacaaacacaggtaaa

SEQ ID NO: 60053 - DNA, 531 bp, Heterodera glycines
atgacgatacctgatgaaacaatcattgcaccattcgatgtgttcaacaaaaaaactggaagacgtctattgctggatgattcccacgatcaaaatctgctgctaatttcatgcccaattaaacgggacaaaaaggcatggattaaatggagggaagaggctcttcaaggaagtgagaattacacgtggaatttaattgatctcaccgcgggggacgctgacattggcgaatggtgaaaaatcattttgtcaatgcataaatttttatttttaggaattgggcacaattccccgatttaatggcgaatatgcaaaagtgaaaggatggataaaaataattggagatttttatgatctattttttacatttcatttatcatttgatttttaaaaaatatattctgaaattgaattccttttctgaagttaaggcaattaagataaaatggttacgaacatttaaatatttcctatttaatacaaaattaggtcgataattcaaattcccggtttattaacaatcttaattaa

SEQ ID NO: 60054 - DNA, 657 bp, Heterodera glycines
ggttcgatgaaactttttaaaatataagcctaaactttttggcctgtttaaaaaggaattaaaaatttttaaaatatttattcatctcccttttgatagaaaaagcatcagagagccttatttaacttttaattaacatttggtgcgtttcagagcactttctgaaaaaatacttatgaattaattttgcaaaaaataaataagtaatgaaaaagtcagaatttcgaaaaattttaaaaacaacaagcgttggcattttttcaggttaagttagtcctttacaatggagaaggcctgcaaaatttggagagattatatcgattttagtgcgctaggttcgatgaaactttttaaaatataagcctaaactttttggcctgtttaaaaaggaattaaaaatttttaaaatatttattcatctcccttttgatagaaaaagcatcagagagccttatttaacttttaattaacatttggtgcgtttcagagcactttctgaaaaaatacttatgaattaattttgcaaaaaaataaaatagtgaagctttaaaattaataaaaattttaattcagattactggagtagcatctacagtgctttccttgcttttgatgctctcgcaaatctggtcgttctgaccagttataaaaaaaagt

SEQ ID NO: 60055 - DNA, 122 bp, Heterodera glycines
  unsure (1)..(122): unsure at all n locations
taaaaatttttaaaatatttatnntcatctcccttttgctataaaaagcatcagagagccttatttaacttttaattaacatttggtgcgtttcagagcacgttctaaaaaatatttatgaa

SEQ ID NO: 60056 - DNA, 158 bp, Heterodera glycines
atgcaaaaaccgataatcgtaaatataattgctctcgctaatctcggtaccggaattaaactaaactctctgacgatcaccgaatgcgaatttaagtataaccctagaaaattcaatgccgcggttatcaaatgtacaactccaatcaaagccaccgc

SEQ ID NO: 60057 - DNA, 279 bp, Heterodera glycines
atgcgccacacggtttataaattgataattttttgaatttaaattaaatttatttgcagattctgacagcgaatctgatcactcagtacaaatttcaacaaatgttcctcatggttttttaattatttaatgtttaattaatttttttaattgcaatttaattgttccattttagaaagtgataacgattcggatcattccgtggatatttcttcaacaaatttggaaggattaataatttcaagtaaaaagcaatacaaatttaaatacatattaata

SEQ ID NO: 60058 - DNA, 904 bp, Heterodera glycines
atgtcgaccatcttttacagtctggctgtgtgctatttcgggcttttgtttctcggcgctggccacgctttgatgctgggtgtcaaagaccaccgaatgtattgcattttgctccaggcaaacatcaccggaatcgtacagtacactgacgaggtactgtagaactaactatgtactgtatacattggggaaatgatctcttccttttcactaaaaaccccgaatttttacaacaaaaattcgagattggatgctttcgagttaaaaaatttctttctcgggtttttgaaagattccgaatttgaaaagaaaaaattttggttttctttgaacaatttttaataatgcaaacaaacaggggaaaacatctccgagacagtgactaggaaattgcatataaatgatataccattggatagagcaggatcgacttctagtgtgaatttttaattttagcggtgcattttgcctgcttcaaaagttacagggcctcaaaaatcgaaattttgtgcttgagggctcattttcaactttcgtgtatattttttgcagccctgtttattaatgtaaaattcgaatctattgaccaaaaatattgtcaataagtaaaataatgaaaatttttcaattctatacattaaaaaagttaaactaagttaattcaatatttgtaattaattaattaactaattaacagctcgattatatgggctatgaagactattgaaaaaatgacaaaagtttatgatacacaatttagaaaaaagaagactacacgaaatttaaatggggatttgttatataaatattttaatggcattttacctgaaaaattctggccctgattcaatatttggaattattgtagattccaatcaaggcattttgccttaatgctaataaa

SEQ ID NO: 60059 - DNA, 851 bp, Heterodera glycines
tgtcatgtatttgctgttgcgtgccgatttgctcgacgtgttgcgctggccccttggcgcggtgttcacgcaaattgcacacgcggcaaccgcatgcatttggacgttccgcgaggacccggaggttgccgcttatatgaccgacatggacaacatgcacaaagtgacgctcaaggtgggaaaaatactcaaaatttaatgaattattttaaaatattataaatatttataatttttaattattttaagtggcttttcaaaaaaacttttttgccaaatatttgcaaaattaaataaacaaaagggtctaccttttaaattatttttttgttgaaaattttatatatcaagggtcaaaagtaatttttatttctgagaaattttaagccttcgaatttttatttctgaatttttaaaatccccgaaattgtgattttcgagaaaggttcacaattgcatcacttgtatctatttcatgattcataaaaaaaataaaagaataattaatttctaatgaattaagcagttttgtactaatttaaaaaaatgccatattttgcaattttgtgtcgggattttggtccattttttatgtctatctatcatttcgagatttaatattcaaataattcaaattctttacttgaaaaataagacattgttggtcaattagtttttcgatcatctctaaggtgccagatgagaaaacgcttttggaacatgccaaacggttggctgacgaaggcattgggcacagagtttggcacgaggatggcatggctgtttgtattgcggtgaagccgatgccgaaacaaaagctgaagccattccttggcaatttgcctttgtac

SEQ ID NO: 60060 - DNA, 1278 bp, Heterodera glycines
atgaggagaaaaagattgaattcattgaacgaattggtgaaaagacagaaagaatttgtgaaggaattggtcatttccaaagacacatttataaaatggaaaaaagaattggtgccaaaatattgtaaaagtaagagaactttcactaaatattttatctaaattaatttaagtgagacttttagcaattccttaaattgtgtcgagttaatgatttttatgctagggatgggatattatgagtaagaagataaaattttcatatccgtagctgtagctagtttcataaatatttccgaattgcaaaaatgaatttgtggcatttaatatttataatattttttcatatttttaatagtgaaaccggcaaaatccaaccaaatttcgatgaaatattactgcgaacgatgggacaaaaatgaaagagaagcagaaatgagaaaaattgaacaaaatgaaaactcaggggccttatgctcgtctcgcggtttagagctaaaccacggttaacggcgttaaccgtggttaaaaatccttaaccggtatgctcgtccttccctttttaaccgtggttaaggctaaaacacggttgagttaaccatggtttactccatccttaaccacggttacgcaaattaaccgttgtttatttccaatcgatatgctcatctaaccgtggtttcgtaaattatttagtaatttaattgtaaaataaataaataagttttttctaggataatttacatgcagaatagaatctgacatttttgtataatatacaaattattacggaattaaaattaacgaaataaatgaaattgaaatggaataatatatccaaaaatcaatgaacattgatattttaaagatccccaatattgtatcccaagtgatggcgcatttctcgatccttttccagcttcaaaagctctatttcaagcttatgcttctcaattgccaaatccagtttggcactttctttcaaacactttaatctgtaaatcgcgtgcagttttgttgatgattatgttggaaatatttccacaattttctttttttggcagacatgtaatcagcagcagcagaagcagtagaaaagtttcgtattttgctactgatcacgccgcccgagtgatgacgaatcggtgtcaagtctgtaaatgatggcggaacagcagaagaagttgttgcagtagcagaataagtctccgatctagagcaaaagcttgagtcgagaattgcagtagatgatttggggcgttcccctatggccaatta

SEQ ID NO: 60061 - DNA, 582 bp, Heterodera glycines
gaaacaaaaaaaatcgattttttcaagtgtccgttggggtactcaaacaattatggggagcaaaattccaacgcagaattaaagtacaggctatagggaagctattccggaaggattcggtctccccataaatctgggcgcatcggttcggggggactgccccgaaaacaaaaaaaatcgattttttcaagtgtccgtttggggtactcaaacaattatggggagcaaaaatccaacgcagaattaaagtacaggctatagggaagctattcccgaaggattcggtctccccataaatctgggcgcatcggttcggggggactgccccgaaaacaaaaaaatcgattttttcaagtgtccgtttggggtactcaaacaattatggggagcaaaaatccaacgcagaattaaagtacaggctatagggaagctattcccgaaggattcggtctccccataaatctgggcgcatcggttcggggggactgccccgaaaacaaaaaaatcgattttttcaagtgtccgtttggggtactcaaacaattatggggagcaaaaatccaacgcagaattaaagtacag

SEQ ID NO: 60062 - DNA, 996 bp, Heterodera glycines
atgaaaaatttgacagaagcgcgaaagctaatcgaagctgcaaaaaatgcgtttgaagttatactaaactattcactggaaataaaacagttgaataataaaatgcatgaattaaatgacaaattcactgttgcagtcaaagagaaggaagaagaagccaaagaaggtgcggcgattaatatacaacaagaaaagaagctagaaaaggaaattcctcaagtcttaaaggaactggagcgggaaaaaagtcagcatgatattaacaccactgctgagaacacggaaaccgaatttccctcctccgaatatgaaattgacgacagctctgagaagcagccggaacgaacggaacaacaggcagaggtatcatatgtattgaagaaaaaggaaggaaaattggaagaagaaaaaattgaaaccaaggatgataccaccattaatgaatttccaactacagaatatggaatagaagagagtgaaacggaggagacagagaaatggtcgccggatcaagctaaacaaaaaatattgaaaggaaacgaggagccgtttgagcagcccgatgaccaaaaagatgaagagacaattttggttatcggtaccgataaaaaaggagaagaatttccatctaaccaatatgagattgaagataattatccatcgtcatcatcatcatcatcatttattgcccaaaacgaagcatcggtaacgaccaaagatgaagaaggattgttaacggtccaaattaaaaaactaccaatgacaggggataatgagcaaaaaacaatacaaatggtaccatcagattttccttcatataatgacgatgatagcagagatactactgtcaatgaattgtcagaagaacagcttgcttatactgttcccgaagaagatatgccgaaatcggagccttatgatgtagatgagttcccagatctgcctgatcctcaaacgagtctgccaaggggagaggaggtgataaaaaaggagtaa

SEQ ID NO: 60063 - DNA, 117 bp, Heterodera glycines
cacgagggcaagcggatgaagcccgaactgcggtgccatgccgtgctctgtcgccgggcggacgagccccaacaaatgcaccaaacattgcgcagacatctccaatcggcactccaa

SEQ ID NO: 60064 - DNA, 546 bp, Heterodera glycines
atgtcaatcaacgaaaatgcaatgaatgcggaaatgccaattgcaatggatgcacggttacgaaatggcgtgaatacatgggtaaaacatgttcaatatttaacctttcggggaaatttgttcagcagaaaataaaatttttattaaacatttgttaagcctgctccttatctggaaaatgctattccaaacgacgggctgaacaagcggattatgtttggcaactttttcaatctgaccattgggcccgcgttggaaacgagtgaccttttttaccacttccgcgtgttttgtgatgaagataaaatgaaaaatacgatactggaaattgacgaggagggcaaaacagtggagaaatggacagtttctgaagactacagtgactacaaattcaaaacgttcaccaaagggacgaggccgaccaaagttgtgttcaacagcgagcagatacagtgcgaccgctaccatatcaaagtgtgggcgacgcacgcggaatggatggacatggatcagacggcgatgacggtgggatcggtgtacaagtag

SEQ ID NO: 60065 - DNA, 789 bp, Heterodera glycines
atgcttgctggtaggaaactaagttgaagtgttttctaattttcaaaaaaaattccaggcctctacctatacttggaagggctgcagaaattggcaacttttcagtaccaactttgcccagttcagtccccgttgaataactcattaggctttgacctgagcgcagggtggccagcagacttattgtagagctcggtgagctcgatttttccaaattttaaaatttcgaaaattttcaaaatttttcgagctaggcctaaaaaacggttttcgggtttttgaattttaggattttttaacgaattttcccagaaaaacgaagaccacttccaaaacatagtttttcgagctctatcgactggtatttttttcggaaaaatttcggttttttcccggaaatagaaaaattttttggcctcagcgggacatttgagtcccgggcccataacttgtcagggcttggatttagccaaaaatcgtcttagaacatttttgtagagaattttaagctctatcgaacggtgtgctatatgcccggaaaatttcaaaaattttcgagctaggccccctagaaattttcagaatttttttttgggttgaaaatgggggtgaaattttttttctgggttattttggggtgctgagtacgattatgatgtctattttaagtttcataatttttggaattttttaaaattcgaaaattttttaaatttttttggtccttggaaatttggattaaaatttgaaaattcataactcggtgatggtttcatcgatttaactata

SEQ ID NO: 60066 - DNA, 77 bp, Heterodera glycines
gagaagcgtcctaatttccctacaaagtttgaaaacggtcgcgaagcgcccgtcctgaggccgcgaagaggccgaat

SEQ ID NO: 60067 - DNA, 960 bp, Heterodera glycines
atgagcggagcgacggtcactttggtgagcaatttgagcggattggacgacgagcgggaggtgatggacggagtgggtgacatcgcggccggcttcaaagcgttggactgcgatttgctaattgtgtgagtgaaagagtggggggggggggggtaggggggcggggacggcacattttataatggaaccgcaatttggcacaaatgccatgtccttcagtggccccgacctctcattggatgagtcccaactcacaaaggcgcagcgactcggccattccttcgccatgaaattgctggccaaaacgggcggaactgcgtacaattttcagtacgttctccacatagggccggcccccaattgacgaattcgtaattttttgcttcagcgaaggtctctcccatctgaagctgttcatcccaaagtccgtccacccccggggcacgcccttcgcttttgagttgggcaaggacttcgcagtcaaagtgcaaatgtacgtgaagaatgacgacaaaccggcacttccgctcaaattcaaccaggtggcatggcagaaaagtgccgagtctgaccaggcccaggaggtgaattgggcacaattggattaaaacagatatttccgctgatcagctgcaaaaagtgcgccgttatgagaccatttcggacgcctccgccgccgccaagaccatcagattcgaccaaatcgaccaggcgacggacgccgccatcgctgcttttaatcaagcggcgcccgccgcacttccgtccggtcgcttcgttgaaaaggaacaaatcacgcgggcgttccgttacggcaccacactggtgccgtttggcgaagaagtggccaaactggtggactacgaaagggagggcaagcagctgcaactgttgcaatttgtgcgcaaggaaaacgtcagttttggagaaaaaccgggaaatggcaaaacagtgaattaa

SEQ ID NO: 60068 - DNA, 5167 bp, Heterodera glycines
atgaatgtttttgaattctccccgatggaaacacatgcaaattcggcacatataatctatcgagtcacacttctgcctcaatcatccacacttgtcgaattgtcaatggccaatggacaagaagacaaagaagtcactgtaataggaagaaatgatttggatgagcaactaagaattgagcctactttaacatcttgcaaaaacggacaaatcgctgtgccgatcacaaacttttcgtcaattccaattacactggaagcgaatgaaagtgtcgcattggtcgagcatgtcgatgaatggcacgaattggaacattcgtttttccctccgttcttcgtcagcagcgtcacacatgaaaatgaaaacatacgcactgaacaaatcaaagaaatcttacgaactcgtattggccgtattggcatgtctcagcaacacgaagcggacaaattggaacgtttaataattggtttcgaacaaatttttgcactcgatgacagcgaactgacacaaactgaaataactcagcatttcattaacaccggcgatgcctcaccaattcgaggccggatgcgtccactgccatttgcacatcgtaaaaaagtttcgtcaatgctccaggactatttaagcagaggattaattcgaccatcaaaatcgccatgggcaagtcccattgtccttgtgccgaaacgtgatggaagcttaagattttgtgttgattatcgagggattaattcggtcacagtgaaagacgcatacccgttgccgaacattgattacatccttctcgcactaggaggaaagaaatacttctcgactctcgacttcctttcgggctactggcaaatcagaatggacgaaaagtccgttgaaaagactgcgtttgttactgaattcgggttgcacgagtttaccgttcttccattcgggctttgtaatgccgttgcgacttaccaacggttcatgtctcggctttttgaggatctgattaatgactttgttttcgtctacattgatgatattttggttgcatcagagtcgtttgaacagcatttggaacatttagaaattgtgttcgagcggataaaagattccgagctgaaattgaaaattgaaaaatgtcgtttttctgcctccgaattgccatttctgggacatgtgttaactcgccgtggtttgaaaatgaatgccgataaagtaaggcctgtcattgaactgcctttaccgtcgaccaaaaagcaattgcattcatttctcgggttcatgacgtattatcggaaattcatctatggctttggagagattgctgcacctctgtttcacctcctaaaaaagaacacaccatttgttttgggagagaaggaaatattggtagtcgagaaattgaaagaaaaacttcttgaagatgcggttctctatttcccggacttcaaaagcgcaatgaatgatgctgaacgatgtttcatcatcctcaccgacgcgagtaaaattgggatttccgcagttttgtgccaagctgacgagaacagacgagtccgtccaatttacttcgcatcacgtcaatgcagtagacacgaaagtaattattgcccaacggagctggaagctcttgcggttcgatttggtgcctggaaattcgcacaatttattaccggaattccgaccaaaataatcaccgatcataaagcgcttccgccaatgtttcggagtaagaaacaaacaggaaactctcgagttgaccgctggttaatggaattgaacgcacgattcactctaactgtcgagtacagtcctgggaaatccaacattgttgctgatgttttatcacggtccggtgctttaataagtgaagtcactgagaattttgacatggattcagcttttgtctgtaaattaaaagagaatgaaggcgaaaaaaatctggaagtggatgagatcggagaaaaagagagaatcgattgggtcgaagcgacaaaggtcagcgaattcagcgaaatatacaacttcttgcaaaaacgaattttgccagacgaaatccggaagaaacaaaaaattttggatacttttcataaattttccataatggatggattgctgtattttataccatcgaaacctgaaggaccaaaacttttcgtccccagcaaattcaggcaaacttttattgatcagcgtcattcgggaatttgttcgggccatttcagtggaaaaaaactttttcgtcaattgtcggaaaagtacttttggccaaatatgttcggcgactgcgttaaaacctgtctgagttgtagaatttgtgcacacagcagaaaaccccgatcaaatgaaccgccactccggataatccagacgtccgaaccgttggaacttgtctgtgtcgatattttatcgatcggaatgtccgaaaacggtaatcggtatgtgcttgtctcaatcgatcacttcacaaaatacatcgtcgcaaccccaatcccggacaaaagcaaagacacagtctcaaaagcatttgtaaaagattttgtgttgctgttcggggcaccaaaaagattccatagtgaccaaggaaaggaattcgtcaacgaaactctaaaagaaattttcgccattctaggcgtcgaaaagaccacaactgctgggtacgacccacaagcaaatggagctgcggaacgggcaaatcaaactttgcttaatatgcttaaaaagtctacgtcctcgcactggagttgggatgaacgacttcctttcgttgtgttctcgtacaacactacaccgtctgaagtcactggattttcgccatttcaactgatgttcggaaaaattgcaaattttccaggggaaatagactttaaaaagtatggaaacccgttctacaccgtggacgaggaaacatatttacaagcatttaaagaacatttgcagttaattctcgaatatgcgcgtaaaaatgccgaaatttcacggacggaaacaaaaaaccggtacgattctcgcccaaatgtgaccgcaaacaaatttgcgattggcgacaaatgcatggtcatttatcccggatcgaaatcccgaatacagcacaaaaaactgcattggaatcagttcgggccgtacaaaattgttaaaatgttcgaatcatccgcagacgttgtcccagttgataaaagttcagctgaaccgattaccgtcccaatagaacgtctcgtccgtgtaccagtcggagttcccgacatatcaacgctcccacacggaaaaaacccataccggaacattttggctactattttgcttgcaaatttagaaataatatacccaaaaagagaacaagtaaacgaaactccggtgtcgagtgaggaatgccaaaaaaggggaatcacagaaaactcagcagaaaatttcgatcaaaatcagttagggacaactgacattttaggtgggcggaagatgcagcaggacgaaagcgccgagcttatttggaccatgaaatgcgaaggcgaaagccacgaattctgtggaaaacttctgtgcgcggagttggacccggttttggacgcaaaaacggagcccggaaacgtggaaattggcactcctctgcaggccattttgtgccttttcatcctccgttccggtgccacagtctcttccgcggcggcaaaaagccttgttcatcttatacttggctctgaacccgggatggagttggtcgtttatgaaggagtccgaaaagacaacattcgtgccggtgcccttccacgagaagaagacgtagagaaaatttggtcaatgtggtgtgaaaagtgcgcggtgaccaaaaagcttctccaatcgtcaggatttgagaagattcgagtgcaaaattccgacggagagcccaaagaaaagcccgaaactattcaggtcgaaatgccggaagcggtgcccaaattgcccgaatcagagcgtgacggttggagcacattgttcgaacagaccgggtggattctggaaaaagtccgttccatggccattcatcgttgccgcacattggttgagactccacgagttctgatcggtgactcgacggctttccaactcctctccgaaatgcgggcacaaacgcaattcattggcaccgaacgagggctgttaactgaagtaatccgtccactcagcgagtgcgtcttctcaagcaaagtgcgcgccgcaatgatcatcctcggtcgtgattcgctggtcaaagacgagaccgttgatcagatcatggaacagtgccaacggatccaacaactgtgttcccgttttccgtctgtttcgttcatttggttgcctccaccgtacgttcgtcagtacgatttggcctatcacgaaatgatcggccgtctttctgaactgctcggcgattggtttgttttcgtgactccgtttggtaggagtttgattgaaatctggcgttatggcgattcctttgatcggagtcgtgtcaatgcagatggatggatgactgaaaatggcattaaagcattgtcggcgtggatcagcacacaaattccgaaatggccaaacaacagacaacttgggattcgaacggtccgctccagcgtttcggtcactaggagagtctatgggttgggtctatgcgaccgcccggagactgcggcttcttcttcggctcgtggggggttgggtctatgcgaccgccgcccgaattctcgttctcgatcgccgtttagacgccgcgacaaccgccaatcgcaaccattcgttcgaggaggacaccgccgagatgatgtgacgcgcgaccgccggcactagcttgctcagaccaccaccgatcggatgccgaatcaacttatcggcagggacgccttttctttggggggttgtgatgtgttaaatgggaaataatttggcttttctataatatttttcttctctaattatgtgccgtttcccttgcctctgactgccttttattcttttaattcaattctctaattatatgttattttccttttgtttttctctctaatttattcctatttttctcaatcgatattcctttgcttttcttctcccttgtgctttcctttattcattctatttggtgttcacaaatttggacctcagacttttctcctctaaatattttgtgtgtggactcttaattttcgtcgtcttcgcattgaatttaaattaa

SEQ ID NO: 60069 - DNA, 682 bp, Heterodera glycines
atgaactcagcaggaattgaggacccactgtcaatggttttttgtaatgcggatctccacgagagacattgttcatttttaaattgtactaaccgtaagtatttaataaaactaataatacccaaaatttttcgaaagaaaacaatgaaaattttattgctgtttttaacgaattttaattttgtttgtaacttattctaaaatagctccgttctattcctacccatatcctttttaattttcagcttttcatcgtgagtggggctgtataactcaagcaacaaaaatgtattgcgaccaaatcaacaaaagatttgccactaagtgcgagtgccatttcgggagagccgatgaaaatatccctttcattttcccaaaactttcaaagtaagtctgaaaaaaattcactattattttaaaagatgaattttatgtctagttcaaaaaccggtctctgttccggctttttgacgttggcataacaaccccgatttcccttaaagttctcggaccttatttgctttttctaggacccatctcctaatattcagactaaattaaaaagtgcgtgtcgattttgattctaaattaattataaatcaatttaaataatttattttttgataactactaccaattatttagaatgccagaagacaaactcttttacaaagggacgtaa

SEQ ID NO: 60070 - DNA, 179 bp, Heterodera glycines
atggccgcctcgttttgcagcattttgtaccagaagccccggatgatccactgtgctgcttcctctgctgctgttgatgatgatgtcgttcttggcggtgttgatcggttggcaatggcgccgtcgtcaaccgatgatggcaattgcctgtctgatcggaaagggaacaaaggattacg

SEQ ID NO: 60071 - DNA, 243 bp, Heterodera glycines
atgacattctatgcttctcttgttggatacacgggaagaaataatagttagtccttttgttgaatttttagaaattctatccgtcaaatcggcttttggaattttaatgagtaaatcagtaaccgtaaatgacattctatgcttctcttgttggatacacgggaagaaataatagttagtccttttgttgaatttttagaaattctatccgtcaaatcggcttttggaatttttaatgagtaa

SEQ ID NO: 60072 - DNA, 300 bp, Heterodera glycines
atgacattctatgcttctcttgttggatacacgggaagaaataatagttagtccttttgttgaatttttagaaattctatccgtcaaatcggcttttggaattttaatgagtaaatcaggaaccgtaaatgacattctatgcttctcttgttggatacacgggaagaaataatagttagtccttttgttgaatttttagaaattctatccgtcatatcggcttttggaattttaatgagtaaatcaggaaccgtaaatgacattctctgcttctcttgttggatacacgggaagaaataa

SEQ ID NO: 60073 - DNA, 91 bp, Heterodera glycines
atgcgtatattttttgctattttatttttaatgtgttttaaaggcaatgccgaaaagataaaggtgacaaaggccgaaaaataccatcaag

SEQ ID NO: 60074 - DNA, 412 bp, Heterodera glycines
atgtcagaccgcagaaaagaagctgaggaaaaaatgggaaaagcaatgtaaaattaaaaatgccaattttcaatttcacttttaaatttaattttaaatccaattttaaattttgttttccttttttttcagttttatctccgccgattgttggctcaaagtgttcgatttgctgccaccttcacaacttggcctcggaattgcgctgatcagccgacgatttgacttttacatggacgaacacttcaaaactcgccgctgggcattgaaatcaattcaaattcaaagaaaaattggaaagaatggcaccaaggaaatggaaattgccaattacgacggaaaaccaatgccaactccgcaaattcaattgccacgcaaagtcagcggattcgaacggatcaacatcacgtaa

SEQ ID NO: 60075 - DNA, 2457 bp, Heterodera glycines
  unsure (1)..(2457): unsure at all n locations
atggacaaaatgccaaaaggggagagacgagtaaaaacggcatacgaaaccaggaaatacttaaatagagaagggaagaagaagcaggcggagaaaaacatgcagacaaaacacaatggacaaaatgacgaattggacaagtgatatccaaatttatttaatcagccagtaattgtaccattttttaaattctaattaacgccttttccatatttttgcattttatcggcggctaatgggaaatgacaagcagctgagataaatcggatgaaccactgcacagcggccgcagnttgtgtttgtttaaatttgngggaggaggaaaaattgtacgaaaagtgggcggaggggggggggggtggaaattaaaaagaaagataattgaaaactattacccaatcgcatctattctttacttgtgcttgatggtgatgtaaacgatggcactgtttagggcaatgccaaaaagtgacaaaatttgttgaatgattgtcacccaaacggtgtacacgtaaatttggtcggactctccaaactcattaacagaagatggtgatgaattactgttgttatccattagtcgatttattatttcattaaaaaattagatggtaatttaatgggacttaaaaatattatacgcatgaaaatctaattcaatctgggatcaggatatcctcaggaaatttcattattgaattttatttaaatataaaaagaaaatgaaacttgcccctcgaaataattcgcctgttatgcctcctaactttttgttgttcacattagactttaataaaccaaaatcaaaaaaaaaaaaattgaattacattcgttacagtcgtgctctaatgttagcaatttgatgttaattaaagtacttaaaaagcctaataaaatatttaattgggtcaaatttctgatgtgcatcgcttcctaatgatgcaattcattcgattcatggggttttaaagtgtatggttctctgagtacaaattttttaattgcttgataattaacttttgttatgtacgattaaaaaattctcacgcaattaaatagaattgtgaaagcaatattatatgaaaccatatatggcagagaaatagagaaattgtctgacttcaaaaatgattcaagcacaaaaaagtggatgaatataaaaaagtagcggattttcttgtcgacaagacaaaaggcaacttttaaaattgcgtgattatttttgtgcaaataataagtgttttattttttaggaaaaagataaaaaataataaaggttttattttttaggaaaaagaaatttttcaaaaaaaaacttctggtgtgagtcacatttctatccgtgttgggccgttgcttaaatccgccaaatttcgactcccgtaattggttgtggatttccgtaattgaaaagcctaattatggactcggcccagtcccttccccgggccttttgggccttggaaatatttaaagaaaaagtgccaaatatctaagtttgagtattactatcattaatacttttttaggttcgacctagcaccatatctacaattcagtgatgttgccaaaataaaaacaaaatacgagacatgaaaacacaagaattgtattggaatttttatacagaatactttatacagaaaataaagttataaaccaaaattgactttgtgttgccgcttaaaaaaagttgtgaccacttatccgaatcaatttcctttccctcgccggattccgacccaaatacccgaaaaatcgtattatgtctagagagattcaaaataatttactttaagggagttgaattttgattgcttgagcgaataaaaagtagctggccaaagcgtctaactttttttagaacataattttttagttgttgaacaaattaacatggctaatggacagaaaaattcttgttttttagagcatttgaccctgacttttatacatgagcgaaatttttttataatattttagtgactaattcaatttttgagttagaattggtcgttcggcggagctctttttcaatgtaaaatggtgcaattgacacttttatagagagtaaaaattgtgcattcattaagccaacagtaaaacatattcaaaaaagaattatttttacattttcagttgttttgcatttgattgttcgaagaatggagaatttgtgacccgtcagatacaacaacgactggtggattatgattaggtaggttaatcgctcaggcaattgtgaccaattgtgccactaatcgtatgatcaaaaattgcagtgactgatcattagtgaatattcgcggcacaacaaagttgttggttagagcggataaaaaccaaagacagaagatcactggcatgatcacagccaaagatttgaaaatgcgacgagtaatttcaatttgggactgggaagaattcctgctgttgttctgatcactgagcaataaa

SEQ ID NO: 60076 - DNA, 2061 bp, Heterodera glycines
atgcccttcccttttcggcattgcttttcctccctcctcctccatctaccgttgtttctgctactgttccatactattgctcttcatcgatgttcttcgatgactccgtttcccttctccgctccgtccgtcgccgtctgtcccatcactttccatgcccaggcaatttccactcgccaactctcttccgtcgaatttttcctcacaaagtcagtgggtggtgctttcatttattgggcgctacccgaaataaagccggctgctaatcactgatatgaaactcggctacccgacttttggggatttgcaacttggggacccgacatttggggacccgacttttggggatccgacacttagggatcccgacatttggggatcccgacattaggggacccgacttttggggatccgacatttggggatcccgacatttggggacccgacatttgggcaccgaacgacatttgagcaaaagacacttaagaaaaccacggacatttggcaacccgacatttagggacccgacatttggggatttcaataaaacaaaaaaaatttaaaaatttaattctaagccacaaaattagacaaaattacgtctgcttttagccagagttaattccattgcaaaaaaattaattaatattttaaaaattaactctgtttccggactcaccgcgaggaggcgcagaattttgagcccatactaaccacaacacaatagacaaaccacaatacattttttaactacagtagacctttttccaatttttatttaaagtgcctttcccaagggccaacgggaacagaaatccgtcaaggacattcaaaaagttccagccgactttgctgtctaattgcgtacagcaacaaaatgccgaggtcatcttttcggtttcttatatttcgagtgactttgttcggtgctttaaatgaattttttaacgaattaattttttgtggctgacctgcaaaacaaatctcttccactggtcgccctatttcggtatttatttttccaaaaatatatccagggttgtagtcatcaacattcacactgaattcataagaattcagagtgagcacaaatgggaaaaagtcctttaagatctgtttctcttcgcaagctaaaataattatatcttttcaaaaaataaagatttttaaccttttatttctactattaatttttaacgtatatttattaaacatttagccgccaaaaatgcatatacaactatttttggagaaaacctacaaattcgtttttgcttgttccacttaggacaggcaattaatcgtagattgaagaccgggaaacttagccactattacacaacaaataatgaatacaaaatcttggttcggagtttggctgcgctctcttttctggaggaaattcgagttgtgccagctttttacttgcttcgacacgagcgaatgagctcggcatacaagttgttccaaatgcaggacaaccagtcgcaatattcaattactttggacggtattgttaaaataaattggattgtttattcattatatccaagaaactatgtgcgtggtcacgatggaagacctccactgtttcctgttcatacctggaatcaccatgatagtgttcttcaggacttggggcgcacaaataacgcccaagaagggttccatttggctttaagaatgcaatttaacagtgtgcatccgccattatcgaagtgaaaatcgcgtttaatcagcttaatattttaattatcagagttatcactgttctgaaagaagagcgaatcgcagccgataagctgcggcagtatgagttggacccaactcaagggataagaattcgagaacggaagaaaacataccgtgaaaatgatttggctatcagaaatttggttgaaggctttgatgccattgagaacccaaacgaagatgagattcttgctcatctcagatcgttgcaatacagacttatgcgcaatgattttgagaattgggacgaccaaaatggtgattaattctgttttcacatcccgttggcccttgggaaaggcactttaa

SEQ ID NO: 60077 - DNA, 581 bp, Heterodera glycines
atgccaagccaattaaacaccttttgccaaataaaggaaaaagtgccgacattgagcgggaaaacaaggcaattggctgatcagcaacaatttccattgccagagtttctctcgctgcacgatggacggcaccttctcgataaagcacaacggcaggtaaaattgatcagagacaactttcattgatgttaataccaatgctgaatatgatgaagattagcaaaggttagccccaaacggattttggtcccattgtgtttgatcctttcctaaacccattttcggcattttaaagttccgccacttcaatctcggtttagtttttgccggacggaggaggaggaaaattgtcggaggcgaataaaagtgctggcgatcagaaggacggctttttgggtgccgtccgacaattgcatcaaatgcagcaaaagctggaaatgcttctgatgaatgcggtgaacagagaggagaaagtgatgccacaacgaactgtccaatggaaggccaatggcatcggagttcaagccgaaaatggggacggaaaggtggagaagcttaaaatgttaggtggggccgattaa

SEQ ID NO: 60078 - DNA, 479 bp, Heterodera glycines
  unsure (1)..(479): unsure at all n locations
ttcagcgttcnccggctgtgtcaaacacgcgacaattgtccacgaattgctgcacaaagtcggcctttggcatgagcacatgcgcttcgaccgcgacgatcacatcaaagtgcactttgagaacattccgccaggtcaaagcagcaaaaataaataaaaccagcacattttctttcagatttccacgctcagtttcgcaaaattggccaatatgagagtacaacgtacaacgtaccgtacgactacctcagcgtaatgcattacggtaaggagtccggtgcgcggaggaacggtttgacaacaatggagactatggacaaaagataccaggcaactgtttactcatgaatgcctgataactattttcaaaattgaaacccacagaatttgattggtactgtcaaagacgcttcgccaagtgattaccgtaagatctgcgcaatttataagtgcacaaaatgcatggggagaggatttaa

SEQ ID NO: 60079 - DNA, 503 bp, Heterodera glycines
atggagaaggcctgcaaaatttggagagattatatcgatgttagtgcgctaggttcgatgaaactttttaaaatataagcctaaactttttggcctgtttaaaaaggaattaaaaatttttaaaaattttattcatctcccttttgatagaaaaagcatcagagagccttatttaactttaaattaacatttggtgcgtttcagagcagtttctgaaaaaatatttatgaattaattttgctaaaaaaataaaatagtgaagctttaaaaattaataaaaaattttaaattcagaattactggagttagcatcatagcagtgcttttccttgtctttttgatgctctcgcaaaatctggttcgcttctgatcagtttataaaaaaaaagttaagcctaaaatttttcgcatatttaaaaagcaattaaaaatttttagatttttattcatctccctttttgatagtgaaagcatctgagtgcctaaaataacttgtaaataaa

SEQ ID NO: 60080 - DNA, 812 bp, Heterodera glycines
aaacaaaaaaatcgattttttcaagtgtccgtttggggtactcaaacaattatggggagcaaaaatccaacgcagaattaaagtacaggctatagggaagctattcccgaaggattcggtctccccataaatctgggcgcatcggttcggggggactgccccgaaaacaaaaaaatcgattttttcaagtgtccgtttggggtactcaaacaattatggggagcaaaaatccaacgcagaattaaagtacaggctatagggaagctattcccgaaggattcggtctccccataaatctgggcgcatcggttcggggggactgccccgaaaacaaaaataaatcgattttttcaagtgtccgtttggggtactcaaacaattatggggagcaaaaatccaacgcagaattaaagtacaggctatagtgaagctattccggaaggattcggtctccccataaatctgggcgcatcggttcagggggactgccccgaaaacccaaaaaaaaattttttggataaaaattatttaaatgaactgactagataatatttaaaataggttatttctcttcctttcagtatccctgcaaagtttggtgcgcttctgatcagtttctgaaaaaaaagttaagcctaaactttttggcctgttaaaaaggaattaaaaattttattcatctccctttttgatagaaaaagcatcagagtgcctaaactaacctgtaaataaagttttgtgtgtttcagagcactttctgaaaaaatacttatgaattaattttgcaaaaaataaataattaatgaaaaagt

SEQ ID NO: 60081 - DNA, 296 bp, Heterodera glycines
atgttcttcactggcaccgaccgactgtttgtcataatttttgatgaaatgtaagaaaaaattttatttataattgctcatttaaatttttaattagcgcttttttaggaaagacaaacgcaaaatcctactgtatttgactacgataacaattgtttgttttgcttgctcattggatttgtgttttgtgttctaccaaaatatgttttgtttggtgatcagatgatcaccggttcaattggcgattttttcaaggcatttttcatgaatttttcacgagccaaaattttcaaaaa

SEQ ID NO: 60082 - DNA, 733 bp, Heterodera glycines
atgcattggtcagttcaatttccactcgattgcaatgctgttgaatccgatgactttatttggcagcggtattttcggtattggcagcgatttttgattggaattgacaatttccatttctttcacgccattttttccaattttgcttcgaattttcatttgtcccaatgcccatttgcgggttttgaagtgttcgttcacacggcactcaaatcggggactgataagtgcaatttcgagtccgttttgcgccggcgtaagcaattcgaacacggccaaccaagtgtctgctgggatgaaactggaacgaaacccaaaatgaaaactccgctttttcagatcacattggggccgttctcttgaacatgccgctgaagcagtaccaaaatgcgtgtacaacaccaggcacccagaggaaaaagctgtgcaaatggggacaaaatttgcataataccaaaattgaattaccgtatttcctaaaataagagcccccgggggctttatttttcaacccccatcgaataggtgctttattttaggggggtggggttctaatttaaaggggagggagctaatgttgcccaaaaatctaattcataccaccaaactaagacttaatgaacgatcgatcagctttacgacaatttacaaaataattataaaattaaaaaataattaaatttaactaaataatataaaccaaaatatttggtttaattttaattataataaa

SEQ ID NO: 60083 - DNA, 678 bp, Heterodera glycines
atggatggcagcatttcattgtggtttttgcgcacccattggccaatgcttcaagataacattggcggcctgtcttttgccaactttggcattggccgcttccgccttatgcatgaacacattttcgttgatttgcctattgacgaacgcccatccttcgccaattgtccatcgcttcgcgttgtccaagtcccctttgggcaccacttcttccccgactttccgcccgataacagttcctccgcaaatgatggacaatcactggcgcactggcttttgtcgcctcggccggacaattcgccaaaattgtcgtctgtgctgatctatctgaatatggaagacaaaaaatagaaatgcttaaaacggtgttaataattttatgcaatatagtcagttttttgtaataatttatgttatttggttttagcatttcgaaaatgccacttctgctgtcaattatgttattgtatttactttggcccttggcgtcactgtggccccttttgaattgtttaacaaacgtaccggggaaaaaatgttcctttcaagagtcaaaaaatcgcgcatgaagcacggttctgctcgtcaaatgttgttggtccgctgcccgattaaccgcgatttgaatgaatgggtgtgatgtgaaaaggaggcgattgactggcaaatttgtgacca

SEQ ID NO: 60084 - DNA, 329 bp, Heterodera glycines
  unsure (1)..(329): unsure at all n locations
attttgaaagtcagcaaaacatgtcgggaacaagaggaaaaacaggaagatacagcgggtcgggacgagccacatcctcaagagtgagtctcggaataacactaaaattggatttgaagaatactgtancataccagggacaacctcgtttgggcgccagcccagtttttggactataactttttttctttgtcaatcatagtccctaaggcatttggtcaccactcccggggtcatacctcttgcacaaaaagctttcagtcaaaatcaaaaaattctttcggaatggtggcttttcaactgccaggccagggtttggaatgacaaaa

SEQ ID NO: 60085 - DNA, 108 bp, Heterodera glycines
gtataaaatttctcaaaaaaagagatagccatttttctgggatagagtataaatttaaaaattccctcaaaaataaaaggtaaattgcgcaccgccctccctatcatg

SEQ ID NO: 60086 - DNA, 499 bp, Heterodera glycines
atgagattatgcccatttgttggacaaatatcgcccgttggtggactttgtccgtccccacctgaacatttcaaaggaaaagccaataaaaatggttcaactggtggcacttcgtcacataaagcccgaagtaaaagcgaactcttggcaaaatgccaaaatgcaaatgccattccgtcgcctgagaaattaatggacaaattattgaccaacaaaaacaaaaaataaaatagaaaacaatttaatggaaatattttaatcaattaaaattttaaaacgattaattctttaagataattcacaatttgcctcagcccaaatgggtgcacaaaaagtgggaagaatttggcaacaaaacgaccatcgaattaattatggaaatacgacaaaaaagttgccttccctatttcaatggaaatgaagaaattattcgtttaaatggcggtaaaataatacaaaaagctcaaaaaatgtgaaaaaattattaattgaaaataaa

SEQ ID NO: 60087 - DNA, 473 bp, Heterodera glycines
atgtactatttggcaaagttttacattttggttcttgcctggttttgtttgccgtggccaacatttgacaaggccaagcagacagctacaatgaacaaaaaggtcattctcacaacaaatcgaagacagatggtatataaaaaagcaatgattaaaaactaatttattttaccaaaaatttatctaacaataaattaaataaataaatttattcaattaaaacaggaaaaattcgtgagttttttgtataatccaaaagcaatgaaataattttttaaggtcacgttagtaaattaggcggctttttaagaacacaaaatttaaattggccccgcaggaaatggagtaaaaaaaaacttttttttagaaatgttaaattagccatagaccaaaaaagtataattattttattttacattggcaacaaaatgcacagccggagcattattagaataatcactcgccacacatta

SEQ ID NO: 60088 - DNA, 884 bp, Heterodera glycines
atggtggctaaaagccgtggcagggcaagttggaagttccgccgctacgtgcacagccaacacggtcaacagggctgtcttcaaagggatgctttgcaacttatgcaacaaattggcgcacggcctggacttaatgcgtatgatgctgaaattgttgtgccccgagtggtggatcattggaacaacagccagcaacgacatcgtttttctgtgtttatttttggatcaactggtcagtacaagccgctgtacaaatacatcaacaactattacgacacacgaatctcactctacctaaacaacgcccattttgatggtgtgcagaaggagtatggcttatttggacaacactactgcctagaatgtgagaagccataccagcgaccatcaagacatccaaattcttgtaaagcttgagatccaatttttgtgcagagtcaaaacaatgcaaagagtgcggagttatttggaatgttcgtgacaacaaccgtaatggaagaaaagtaaaataatttaaaaattttttaaaaaaataattcttttagggtcaccaatgccacgagacgtattgccaattgtgcaacacttaccacaatcccgagcggggctgtttcatccaaccaattgagccgaaggaacaagacccttacagcattgtggcctttgacttggagactatgcaacaccaagcgttggacccccaacaacctgaaaagaaggaacatcagccaaacttcattgctgccccgggttgcatgccccgactgcattcaaaacggcaaatggaagagggcaactgcaggatgtcaaatatgtgggccacgtcgggaccgttgtgttctgtcaacaccgattcatggacacacaagtggacaagcaagtga

SEQ ID NO: 60089 - DNA, 80 bp, Heterodera glycines; identical to SEQ ID NO: 51817

SEQ ID NO: 60090 - DNA, 80 bp, Heterodera glycines; identical to SEQ ID NO: 51817

SEQ ID NO: 60091 - DNA, 920 bp, Heterodera glycines
atgccaaacaaaaacgaaatcgttttaaaatattcctttctggacttgacttggtttcttgatatcgaagctgttttctacgctatttctaaaacggttataccaaaccccagatttttgaatccggttttcagaaaaaatgccttgtggtgaaaacaatatttcacatttcactccataactttgtgagttcggcacggatcgagaccgggataagaccattggaaagagcagctcgagctctacaagaaggtatggaaagaaaaaatagttatttctgggactttttcagaaatcagaattaattctccaatgtggcccaaattttaggcccccagccacagccccttgcttctcccagttttaagtcttggatttgtcaaataaattcaagacttcaaaataataatcaaaaattctcttaaaatttttttgaacccaattcaaaaaaggaaaaaaatttgcagtcaaaaaattattcgaatttctccaattttgtttccataatttccgaaagttattcggtatcataatgccaaaacaaaacgaaatcgttttaaaatattcctttctggacttgacttggtttcttgatatcgaagctgttttctacgctatttctaaaacggttataccaaaccccagatttttgaatccggttttcagaaaaaatgccttgtggtgaaaacaatatttcacatttcactccataactttgtgagttcggcacggatcgagaccgggataagaccattggaaagagcagctcgagctctacaagaatgtatggaaagaaaaaatagttatttctgggactttttcagaaatcagaattaattctccaatgtggcccaaattttaggcccccagccacagccccttgcttctcccagttttaagtcttggatttgtcaaataaa

SEQ ID NO: 60092 - DNA, 1491 bp, Heterodera glycines
atgagcgggccaatccgctcaaaaatcgggccttgtgccgcccgtaccaaggcctacattgaggcggccacggtcaatctcggaaaggacacgacagacgagagcattcaagcagacctcacagcggagcgccgtggactccgccgagcgattcggcttttggaggattgcaatgacaaatggcaatccctcctgctcaaattcaatggagccgaccgccaacaagaggagcaacgctacgatgactttaagccatcgggaaagcacttcatggaatgggcggacaaagcccgaggtgcagtggacacgatcgatggagtgatcggtccagaggatgacgacgaaataactgggagcattatctctcagcccgccaatcctccacaaattcaacatgttcagcctcacccacctcgccatgaggtgaatctccctcccatttctctccccaaatttgcgggagagccaagggagtggccgatgttttggaggctcttccgttcctcagtggacaaccttccaatcgacgacttcaagaagcacatctatttgttggggtgccttccccacaactcgccagctaggcgggcagtcgacttgtacccaccctcggacgaaaattatccaagggttgtcgacatcttgaagaagcgatttggtgatagtaaaactatcactgagtccttgcaggcagagctactgcacctccccaagccgggagagtcagtgctctcgctccgcaactttgcagagtccgtggaacgaatctgtttccaactaatggacttcggcgaatctgaggacaacatgttcatggcttcgacgatcaagtcgaagcttcctttctccatcctcacccatgtggtggagaaagagctttcctcaggaaagacattttcgtgccttgacatcagaaaggcacttcaaacaatagtggaagtaaaggaggaagtgcagagatgtgcacatgtcctccgaggcgatgaacgaccacgttcatccgccttcaattccccacctcaacagaggggtgcctgggatcaaaggggtgaccaccgtcactccaacaaccgacggagccaaccaccaaggccatttaatcgcggaggaacgcctcagccagaatatagggcgttctccgctattaacaaaaatccggaaagggccaaaaccccagcaagaaaatggggtcggtcctgctcgctctgctcgggaactgatcatctcccgagcgagtgcccggcattcccaacaccgggagctcgtcgaaaacggctgaaagaacagcagcgctgcctcaactgccttgtgcaaggtcacaacactgaggagtgcacctcaccataccgttgccgaaactgtggcaacaaacaccacttcctcatatgcttcaagagggaggagtcccattcacggtcaaatgggaatcgttccgcttcctcccccaagtcgggaagagagccaggagggcgaaagttccatcagcggcag

SEQ ID NO: 60093 - DNA, 4588 bp, Heterodera glycines
atgagcgggccaatccgttccaaaatcgggccttgtgccgcccgtaccaaggcctacattgaggcggccacggtcaatctcggaaaggacacgacagacgtgagcattcagcagacctcacagcggagcgccgtggactccgccgagcgattcggcttttggaggattgcaatgacaaatggcaatccctcctgctcaaattcaatggagccgaccgccaacaagaggagcaacgctacgatgactttaagccatcgggaaagcacttcatggaatgggcggacaaagcccgaggtgaagtggacacgatcgatggagtgatcggtccagaggatgacgacgaaataactgggagcattatctctcagcccgccaatcctccacaaattcaacatgttcagcctcccccacctcgccatgaggtgtacctacctcccatctctctcccagaattcacgggagagccaagggagtggccaatgttttggaggctcttccgttcctcagtggacaaccttccaatcgacgagttcaagaagcacatctatttgttggggtgccttccccacaactcgccagctaggcgcgcagtcgacttgtacccaccctcggacgaaaattatccgagggttgtcgacatcttgaagaagcgatttggtgatagtaaaactatcactgagtctttgcaggcagagctactgcacctccccaagccgggagagtcagtgctctcgctccgcaacttcgcggagtccgtggaacgaatctgtttccaactaaaatggacttcggcgaatctgaggaaaacatgttcatggcttcgacgatcaagtcgaagcttccgttctccatcctcacacacgtggtggagaaagagctttcctcgggaaggacattttcttgccttgacatcagaaaggcactccaagcaattgtgaggtaaaggaggaagtgcaaagatgtgcacatgtcctccgaggcgatgaacgaccccgttcatccgccttcaattccccacctcaacagagaggtgcatgggatcaaaggggtgacaatcgtcactccaacaatcgtcagagccaaccatcaaggccgtttaatcgtggaggaacgcctcagccagaatatagagcgttctccgcgatcaacaaaaacccggacagggccaaaaccccagcacgaaaatggggtcggtcctgctcgctctgctcgggaactgatcatcttccgagcgagtgcccggatttcccatcaccgggagcccgccgaaaacggctgacagagcagcagcgctgccacaattgccttatgcaaggccaccgaactgatgagtgcacctcaccacaacgttgccgaaattgtggcaacaaacaccacttcctcatatgcttcaagagggaggaatcccattcacggtcaaatgggaatcgttctggcccttcccccaagtcgggaagaaggccaggagggcaaaggttccctcaacggcaggtggaaagccaaaaccacctgatcacggctggatttcaaccaaacgatcagtcaacccctccgacaacagaggggcagatcgttcaatccatagggatgtccaccgtggataccagcaaagggagagccaacaaggctcccaagtgcaaaaaaccgcacgcgtatctgatgacgcgacggttgttggccaagtcaaatcgtgacagccgaaatataatcaaagtagcagttctctttgacccgggaagccaaacaacgtacggagcggatccgcttatcgagaagctccgcccgcacaaactcacctccgaagaaatggaggttcacgggtttggaggaaaacgggagccgttacgcttccattcacccatttactcggtccttctccaaagggaggacggaaaatgggaggaaattctcctcaatcggacggagaaaatctccactcacttcagcatggtcgaatggaccgctgatgaatccgtcacgaatcatcacgaggtctgtgaagcaatgtgcttcaccaatgaggagccaatgatactcctcagcgcaagacacttctggcaattcttccaagggaagagagaagtgtctcccgggctgtttgtgatcaacacatcgtttggcccgctgataaatggcgagtccaacattggaccgccgaactcaaatcaaaaagctctgtcaatgacggccatccaccgcacaaatgtggaacaaatgccaaccatcaacgaggttgagcatttcttcaacctcgaatccctggggatccaggatgatcctgcccaggatgacgaccaaacagctctgaagctgtttaacgaatccatccgtcaggaagctgacggaagatactccgtcaaatggccgtggaaggagtccaatccggacctctcttccaatttcaaaatcgcccacagcaggctgtcatcggtgctaaccaagctccgacattctccagaaattctggagaagtacgatgccaccatccgcgatcaactgcaacagggcatcatcgagaaggcccaaagggctcctggacagcttgagcacttcctcccgcaccatggagtgctcaccaaaaagctacgcgtcgtttatgacgcgagtgctcacacacgcggaacaccaagcctcaacagctgcctcttccgaggcccagtgcttctgccagatttggcaggcatgcttcttcggttccgttgcccgacctttccgcttctcgcggacattcaagccgcatttctccaaatttcattggagccggaagaccgggaggtcacgaagttcctctggctaaaggacacttcaaagggactgactcccgacaacttggcaatatttcgattttgccgagttgcgttcggggtcgtcagctcgccattcattttggcggcgacactccgccatcacttgcaacagttcgactccccactgtccagggagatttcggagtccatttatgtggacaatgtactcctcgagtgcgagacggtacaggaagccttggaaaaatacaaattttccaaggacatcctccaacaaggatgcttcaacctgagggaattcatctctaactcaaatgaggtgatgaaacaaatccctcaggaggatcagcttgataagccgaaggccaaagtccttggccttccttgggacaccgagaaagacgaaattgtcttcaaattcccaacaactgatccattgaggccagtcacacgaagactggtcctcagccatctagcatcgctcttcgaccctttgggggtccttgggccatgcattttgccagccaaacgactcttccaagaactttggaaggagggccactcttgggatgatgccctctcagaagaggactcaatccgctggaattctatacaaagccaatggaaagacgaggaaatcagaattcctcgccgcgcaatgctcaatgacacacagtcaattgagctccatgcatttgtggacgcatcggtccacacattcgcgaccgcgatatacgtacgctgcgccatgaacgaaaagattcaagcgtggctgattttctccaaaaatcgtttgaagccaaagagtgcctcaaaggcactcacgatacccaggatggagcttttggccatcctggtgggcaccagagcactcaaatttgctcaaaggcaattgcgtcgtccaattgccagccttcatctttggagcgattcacaaatcgctctgtcatgggtcaaaacccatgaaactcaaccacaatttgttgagcgaaggctgaaagaaatccgagaatgtctcggatgtacctttcatttcgtccgtactggggacaacccagcggacctcgcaacacgcggaggaactccttcggagctccgcaaccatcatctctggtggaaagggccaccttggctcgcacaagcgagtcaccattggcccagcgaactctgttttcaagtaacagagtcggatcaacagccatactcaacggagaatgttggtccgagtggtgcgtttctcgcacacactcactcgaaccagccaaatgagcaggtcttaattgacccctcacgcttcagctcatggaaacgccttatgcgaacaacaatgttcgtattaagattcctcgccttaatgtttaaaaggggcgaggaaacggttgctttactcgcgaagcacagaaaggaaattcgccagatttcaaagtctggggacttcaaggcggaagacttcgcactcgcggagcgagttctcatccgcctagaccagatggatgacgctgaagaattccagcactttaaaacagtgattggagacgacggaattctccgtctgaaaaccagactggagatgagtgagaagccatacagcttctctcatcccattcttctcgccaaacattccactttggcaaagctgatcattttggatcggcaccaaaaaaggcatcaccttggagtggacaccactctgacagaattcttgagtgaattctggatgccaagtgcccgtttaaatgttaaacggactcttcgggactgtctccattgtcgccgaatgaatgcacaacagtttgcattaccaaccatgccacccttgccgg

SEQ ID NO: 60094 - DNA, 4116 bp, Heterodera glycines
ggtgtcccaaggaaggccaaggactttggccttcggcttatcaagctgatcctcctgagggatttgtttcatcacctcatttgagttagagatgaattccctcaggttgaagcatccttgttggaggatgtccttggaaaatttgtatttttccaaggcttcctgtaccgtctcgcactcgaggagtacattgtccacataaatggactccgaaatctccctggacagtggggagtcgaactgttgcaagtgatggcggagtgtcgccgccaaaatgaatggcgagctgacgaccccgaacgcaactcggcaaaatcgaaatattgccaagttgtcgggagtcagtccctttgaagtgtcctttagccagaggaacttcgtgacctcccggtcttccggctccaatgaaatttggagaaatgcggcttgaatgtccgcgagaagcggaaaggtcgggcaacggaaccgaagaagcatgcctgccaaatctggcagaagcactgggcctcggaagaggcagctgttgaggcttggtgttccgcgtgtgtgagcactcgcgtcataaacgacgcgtagctttttggtgagcactccatggtgcgggaggaagtgctcaagctgtccaggagccctttgggccttctcgatgatgccctgttgcagttgatcgcggatggtggcatcgtacttctccagaatttctggagaatgtcggagcttggttagcaccgatgacagcctgctgtgggcgattttgaaattggaagagaggtccggattggactccttccacggccatttgacggagtatcttccgtcagcttcctgacggatggattcgttaaacagcttcagagctgtttggtcgtcatcctgggcaggatcatcctggatccccagggattcgaggttgaagaaatgctcaacctcgttgatggttggcatttgttccacatttgtgcggtggatggccgtcattgacagagctttttgatttgagttcggcggtccaatgttggactcgccatttatcagcgggccaaacgatgtgttgatcacaaacagcccgggagacacttctctcttcccttggaagaattgccagaagtgtcttgcgctgaggagtatcattggctcctcattggtgaagcacattgcttcacagacctcgtgatgattcgtgacggattcatcagcggtccattcgaccatgctgaagtgagtggagattttctccgtccgattgaggagaatttcctcccattttccgtcctccctttggagaaggaccgagtaaatgggtgaatggaagcgtaacggctcccgttttcctccaaacccgtgaacctccatttcttcggaggtgagtttgtgcgggcggagcttctcgataagcggatccgctccgtacgttgtttggcttcccgggtcaaagagaactgctactttgattatatttcggctgtcacgatttgacttggccaacaaccgtcgcgtcatcagatacgcgtgcggttttttgcacttgggagccttgttggctctccctttgctggtatccacggtggacatccctatggattgaacgatctgcccctctgttgtcggaggggttgactgatcgtttggttgaaatccagccgtgatcaggtggttttggctttccacctgccgttgagggaacctttgccctcctggccttcttcccgacttgggggaagggccagaacgattcccatttgaccgtgaatgggattcctccctcttgaagcatatgaggaagtggtgtttgttgccacaatttcggcaacgttgtggtgaggtgcactcatcagttcggtggccttgcataaggcaattgtggcagcgctgctgctctgtcagccgttttcggcgggctcccggtgatgggaaatccgggcactcgctcggaagatgatcagttcccgagcagagcgagcaggaccgaccccattttcgtgctggggttttggccctgtccgggtttttgttgatcgcggagaacgctctatattctggctgaggcgttcctccacgattaaacggccttgatggttggctctgacgattgttggagtgacgattgtcacccctttgatcccatgcacctctctgttgaggtggggaattgaaggcggatgaacggggtcgttcatcgcctcggaggacatgtgcacatctttgcacttcctcctttacctcacaattgcttggagtgcctttctgatgtcaaggcaagaaaatgtccttcccgaggaaagctctttctccaccacgtgtgtgaggatggagaacggaagcttcgacttgatcgtcgaagccatgaacatgttttcctcagattcgccgaagtccattttagttggaaacagattcgttccacggactccgcgaagttgcggagcgagagcactgactctcccggcttggggaggtgcagtagctctgcctgcaaagactcagtgatagttttactatcaccaaatcgcttcttcaagatgtcgacaaccctcggataattttcgtccgagggtgggtacaagtcgactgcgcgcctagctggcgagttgtggggaaggcaccccaacaaatagatgtgcttcttgaactcgtcgattggaaggttgtccactgaggaacggaagagcctccaaaacattggccactcccttggctctcccgtgaattctgggagagagatgggaggtaggtacacctcatggcgaggtgggggaggctgaacatgttgaatttgtggaggattggcgggctgagagataatgctcccagttatttcgtcgtcatcctctggaccgatcactccatcgatcgtgtccacttcacctcgggctttgtccgcccattccatgaagtgctttcccgatggcttaaagtcatcgtagcgttgctcctcttgttggcggtcggctccattgaatttgagcaggagggattgccatttgtcattgcaatcctccaaaagccgaatcgctcggcggagtccacggcgctccgctgtgaggtctgctgaatgctcacgtctgtcgtgtcctttccgagattgaccgtggccgcctcaatgtaggccttggtacgggcggcacaaggcccgattttggaacggattggcccgctcattttgattctcctgctttgggagttttcggctgctggtggccggagtcctttaacccttgttggtgaagactcgaagattcggctgctggtggccggttgtgtctccctttgttgggtgagacttgggtcggcggtgatggccgaatgtgtcttgcctcttgttgggcaagacgaagaagtcggcgactggaggccgaatgtgccaaccctttgatgggttcggctaaatgagtcggctgctgatggccgaatgagtcttgccactggttgggcaagacgaagaagtcggcgactggtggccgaatgtgcctaccctttgatgggttaggcgaatgagcggcggcgatggccgagtgtcttgccactggttgggcaagacgaagagtcggctgctgatggccgagtgccttgccactggttgggcaagacgaagagtcggctgctgatggccgagtgagccttcctccctttcggtagggagaaagtaaatcggcgactgtagccgatgttcttcaccccttggcgggcgaagactttttgatcggcggctacggccgattgatggaggtcaggtcctttcggcaaggaacaactgacccctacggggctccaattttgtcgcagccaaggaggcgacaaaaacttttgtggggagcgagggaggcgagagccgactttgccaagggcaaaatcagctgtttgcttccccctttccctttctcggccgtgccttcccaaatgtgggggaagggacggacgagccggtggaagcgaaggcccgcaggagtgagagactcctgcggggaagaccgacgctgggcggacgacgacgcagacgctgagcagcagaagggggcgggggaaaccgtcccgaccaaatcccccggactctcttcacaaatatatatttattaagcagaaggagaaaatgaatgaatggaaatgtggaagtgagca

SEQ ID NO: 60095 - DNA, 1968 bp, Heterodera glycines
atgccgattccgttccgagaacggccaccttttttctcggcaccaacaatcagccgacccacaaacgaagtggtcattaatgaccgcctcgtcatcgacatcatcggccaatacgaagccgagaacggacagagagcaaacaatgctcctcaacccggggctgacaatgctcctccgcccggggccgaagaccaaagaggcccctggtggttcgaccaggattgggggccccagctcccaatggtccctgaaaacaatggccaaaatcgccaaatggacgatcagcgagacgattggggagcccatgctcctccccgacgggaaccatcgccccgtgaacacacggagcgcctgaactcatgggttgagcgacaccacggccaacaatggtatgagacggctaccattcgccgtgaagcggaggaacacctccgccgagaactgcgcaccggtgccacgctttttgcggcacacctcggtccattcgctaatgtccgtttcgacgggttttcgcgctttggaccggctaacacgcaaatgtttccgggacggactgtccgggaacatttccgacggcgcgggttccaggtggacccgaatttgccatgcctccaagagtatggaggcttcagcaatagccaacaaggaatccatgtcgattactttccaatcgacatggtcaatgtccgattccaaatcggagcttatcaaagggaagctgagccccctcgtcttccccgaataagagcatatttggcattggaagaggctcccaatgaccaagaggggcccaacaggggacccccgtctcgacggttcttcgaggccattggcctccgaagaggcaatccgaatgttggcgaaatggcggaaaacaatggccgccaagcgcctctccaacgcggagagcgagccatggactatggccgccccaattaaccggacggcagctttgagaatcgcccacgaagggcggtccccaaccgtccaatgcgccgttggcagaacggccttttcattgtggccgtggctttgtgcctcggcaatttggcggagggaaaggaattcccttcgccaaggacttgccatcagccgcttgaagcggcggacatggcacgtgaaaatcaagggggattttcacgaatacttttcccatggccattttcccacgatcagaaagcaaatctgatccgatgactccgccccttcaatggcagcggaacctatataagggcagggataaggtatatcccaccatcacttgcccttcccaaaatgccgaaacccatcaaaatgccctcctcgtcatcgtccgcctattcatcatcatcatcatcatcatcatcatcatcgccggatcgccagtcgccgccaccgccccgcaaaaaggcggtggaactgttcaacagtctcgactcgagaaaaatctcgggtttttttggtctcggtctcgagtctcggtctcgggttttcaagtctcggtctcgattttcgagactcgagaccgagacttttttacacccctaatgattgttggcctttggtaaacttctattttataaattttaggttcttttttgttcaaatttgttaatatatgtgtggtccagcgggttgtgttcttggttttgttccttatttttgcgttggatcagttcccctccaagttttattttttcttctcatttttcaaaattaatgtttttttcgatgggagttcaaacacaattttaacaattaaaatcgtaaaaatgtcatttttggactaaatctattgtcgctgacagcagcgacagatcttatcgatcgccagctgtttttgtttttcccacgctttttgctagtgatattccaattaagttttttcctctgtgccccgcccctcacattttcggcctataaaaagggcacccttttcattaaatgctcacttccacatttccattcattcatttctgctgctgctta

SEQ ID NO: 60096 - DNA, 87 bp, Heterodera glycines
cagcagcagaaatgaatgaatggaaatgtggaagtgagcatttaatgaaaagggtgccctttttataggccgaaaatgtgaggggcg

SEQ ID NO: 60097 - DNA, 1149 bp, Heterodera glycines
atgttaagctttcgaatgttaccaacaatgttggattggttgacaaggaaaaaagttatagtcgaaaaaaggtgatttgcaacacaaaaatcactgccgcaatcgcttatgctttctttgtggcgtatgcctttttcttgcaaacaatttgctacagacatttcatttgccgtgtttgggaaaagagaaacaaaatttagggcatttgtatttaaggggaagaaaaatgcgaaaagaatcgatcccgtcctttcggtcgataatttatgcaaatggggaagggcgggaaaattcatgcaatatcgaatttacgaatgattgatcaccaaagaacataaatgactaattcatttaaaatgctaattatttaatcattcggcttatttggtaatttaagttgttggaatttgaattaatcaatttcaattctttttaaacatgtgtttttatgatcgataaacttcaacctatttaattgaaaaataaataaatattaaatcagccagcaggataaatgagaaattaatatccccagattttggggtttaagccatttaaaattatcgcttttagaggaggattataattaggatgcgatttataaaaaggtataaagcgtatccctaattataataaaggaaatcaatgacaaaacgaatctgcatcaaaaaccgggaataaatttgggttaacaacaatttcatctcagaacatttttgatgaatcaatgcaattattatattcatttggaaaaagattgccatagacaaagaaggggaggcaatttttggagaaaagggataatgacagcacaaaacacaaatggaagaagagggaaatgaatggctgggaaaaagaatattcggcaagagaacatttggggatggagcgaatgattaattagagcaaatgaatttgacgaaacggaagaaattagggaaaaatttaacattatgcataaaattatgaaaatttgaatgctgcggacggacacagcaaaaatgatgaaattaatgtgcaattatcaaattggtcaatttgggtccacaaacgctgtaagaaagcagggggacacaaaagaggtacaacaaaaagcagatgggcatgtaccaaaattgagcaaatttttaaaattttgcattttagtca

SEQ ID NO: 60098 - DNA, 1972 bp, Heterodera glycines
atggcacttctttcgccacgtttcaatgcgttggtggacaaacatttcgatggcaaaagcgaattgacaatttggagaacgatcgtaattcgtcgcaaggacaaaggaccagaaccgaaactgactgtatggttcgattacaaatttgtgccatttccattgcccgacgaccgtccgctgcccagcaaaatccgttttaaatgccttcggattaagtaattcaaaatcagatagctatgacaataaaagctttccttccattttcacagttacattgatcactccgtcatcgcttttcttcgttcaaatcaccaaatttttgagaaaagaggcaccaatttatatttgtcgattccatcatcacactctacgaatggccagcggatttgggatgtttttgttcgtgaaatttggccaattttttcgacaaacattcaccgtttgcgcattaccggtcgtgatcatttggacaatttgcttcgtcgcacttcgccaacaattctcaccgatctcaaccaattggcttcaatcgattcctatgatttgttgcccgctgcgattggtgatgattttgatgtgccaaattcaacaatttctgctggccaagcattgtccaaatggttgcacacgccgagaaaagatggacaacccaaacgattgcattgcaaagacattcaagaacaaacgaacttcgattggatcaacaatttcaaggaggtgtggtccggggggggggggggggagcttcaagttttttattttctgaaatcggaattccgaccccataaacgtcgtaagtcggaaatttttgaaaatttccgaattttatcaaaatttcggaaatccgaattctgtgccatccctgctggtttggctccacatttttggcaaatgactgattgttgttttccaatcaaattgtttagcattttctccgtgccaatgccatttcttccgtctgttaccaaattcatttttctgttcatgtgccgtcaatgcaagtgccatttgaattgcttaacgaatggacaaaggaaaagctgacattgaccaaagcaaatgaattggacaacagttggataatgaagcgttgtaaaattattggggagtccgcggcggttcagcagcagaagaaagatgataattgggacaacaattgtaacaatgtgttcttttggcttgttgctggcactaattgcattgggtgagcaattaaaaaaagcatttgatttttatccgaatttgaattgcgcttaatttttgccattgccgccaccggaagaagtggaagaagaagcgggacaaagcatcacaaaagggacgtcttctgctgacaatgagtgacggataaaagaacaaaatcaatgagcagacgcagaagaaatgaatattaattgaaaatgaccgagcataattcatcagtgatcaaatgtattttatgaagaaaatcctctcaatttcggtaaataaatcggacgcataaaaatggcaaaaaagtcactcttattgaattttcgttgcacttttttcaaaacattttttgatgagttaaggactggcggtgtcaaaacgccagttttaccaagaatgtttttaatttggtcgaccttaacaaaagttatgacatttttttgtcgaaaaacagtacgagttggagcagtacgagttggagcagtacgagttggagcagtacgagttggagcagtacgagttggagcagtacgagttggagcagtacgagttggagcagtacgagttggagcagtacgcgttggagcagtacgagttggagcagtacgagttggagcagtacgcgttggagcagtacgagttggagcagtacgcgttggagcagtacgcgttggagcagtacgagttggagcagtacgagttgggtgtcgtccgtttcaggcatcccactgtccaggaaaaaaaatatggatttccatataattcccagcccaagtcataa

SEQ ID NO: 60099 - DNA, 395 bp, Heterodera glycines
atgaaccgacggtaaggcatttttgaaaagtcacaaattcttcatttatttcactaaactgttttcccatttcagttggatttgcaatgacgtttggatggacattttcccatcctttgaccatgcccaactcggcctcaaattggcacttctttcgccacgtttcaatgcgttggtggacaaacattttgatggcaaaagcgaattgacaatttggagaccaatcgaaattcgtcgcaaggacaaaggaccagaaacgaaactatctgtgcggatggatgacaaatctaacaaatttgtggaatttccattgcccgaccgtccgctgcccagcaaaattcgctttaagagccttgagatttagtaattaaaaatcaaagctttatggcaataaa

SEQ ID NO: 60100 - DNA, 779 bp, Heterodera glycines
ttggatttgcaacgacgtttggatggacattttgccttgttttgaccgtcctcaactcggcctcaaattggcacttctttcgccacgtttcgatgcgttggtggacaaacatttcgatggcaaaagcgaattgacaatttggagaccaatcgaaattcgtcgcaaggacaaaggaccagaaacgaagctgtttgtatggttcgattacaaatttgtgccatttccattgcccgaccgtctgttgcccagcaaaatccgttttaagcgccttcggattgagtaattaaaaatcaaagctttatgacaataaaagcattcatcccattttcaggtacatcgatcactccgtcatcgcttttcttcgttcaaatcaccaaatttttgacaaaagaggcatcgatttacatttgtgtattccttattcaaacaccacggatggccaccggatttgggacatttttggtcgtgaaatttggccaattttttcgacaaacattcgctgtttgcgctttaccggtggtgatcatttggacaatttgcttcgtcgcacttcgccgacaattctcaccgatcttgatcagttgacttcaatccattccggtgctttgttgcccgctgcgattggtgattgttttaatgtgccaaatgaaacaatttctgctggccaagcattgtccaaatggttgcacacaccgagaaaagatggccaacccaagcgattgcattgcaaagacattaaagaacaaacgaacttcgattggatcaacaatttcaaggag

SEQ ID NO: 60101 - DNA, 304 bp, Heterodera glycines; identical to SEQ ID NO: 51570

SEQ ID NO: 60102 - DNA, 304 bp, Heterodera glycines; identical to SEQ ID NO: 56071

SEQ ID NO: 60103 - DNA, 676 bp, Heterodera glycines
atgtgcttctcatcagaatttgaagacacacgcactaagagcagatttatgttcgagcaaccttgtcattgccctaccaaccaactcgaggccatcaaattcagcaaggtgtggaaaatttcaaaattcttttaaatccacgcaatttgtaaaaccctttcaactctacatttgttaaggtgataggcgcggaagacaacagtctgtgctgtgtttgtgcaggtccagtaaatacaccatataagaaattgtttttacataccatttttgttacagaggaatacggtcacaggtcgttggaagtgctgtacaaatgttcgacgtgttacaaagaaacgcacagaacttatgagtgcttcagtacgtcaaatttttaccacatcccctcaattacataaattgtccgggtttcagttgacgtcgattattacagcagccgtcgttacgactgctcggaccgtgattacgatactcgcatccgctctcgctaccgtactcgaacgtacagtgcgtggggacagtacacggcaaatgtcgcaaaaatggcactgctggggcggatgaccatgaacaattttgaggcggtggagcgcaaattcgatgtgatgagcattgttcaggacaattattacaagacaaccgatgattggaccgacactttgataaggcgtcttga

SEQ ID NO: 60104 - DNA, 758 bp, Heterodera glycines
atgattggctttataaaagaaaggcgtacggtaaaggggatacttgaaaatagaccacagaaggtagtgattgagaatcatgtaccaggtccaaatgttgcaccatatctgggcctcaataaccaatccaaaccacaggagaccgaagaaccacggaaaataattattcctaggaaaagacttaaagagcaaactcctgatcctgaatcagataatgatacacttgaggagttaactccggagccccaaacaacatccacactcaaaacacccgttccgatcaaaactattatacacccgacccttttaaacggtctttttaggtacgtgaaggaaaacaaagatttatttaaaattacggcggccggaaaggtacagtcgaacatgaatttgccgattgaaaacagtaattatagagatgttttgttgtatctcgcagggaagaaagatgaaacgccgcgcggtgcaaaatttctcaaagatcggttactgaaggatccaacagtaaaagacatggttgataaatcaaaggtcatgtggggacgtggaaggaaaaaggcaataaaatctataaaaacacccggcatagtgcgagagaagaaacccttcaaaccactaatatgggcaagactgtagagaaaattttatcgaaaatttattttaatttaaaatctccggcaagttttgctggaattcaaaaaattttaaatgaggccaaaaagattgacccgaaaattacgaccgatgacgttaataaa

SEQ ID NO: 60105 - DNA, 1103 bp, Heterodera glycines
ggtcagttttgcatatttattactaatcttccatttttattccgtttcccctttttttggtcaaataggactgatgatgtcatcacttttttttcaaaaaaataaaatttttcctaaatgtgatttgtttcccccctttttcccctccctttttcaactttcttctgtccctttccgatggtccttcttcgcgtcgtccctatttgttttcgttgcttcaaaacccttctcccattccctgccctttgccttcgcaatttccgcccggccaaattcaccgtgaagaaaatatggccattcgctacagacttttcaaccgattggaccccggcggttcgcatttggtcagtgcccctgaaaatgccccctttaaatcgcattttgtgcctttccatcttttcagagaatgccttcccatgtgattcccgccatatttttctccattttgccctttgacgacttcaaagacgtggagggcaagcagagcagtttagtcacaatgtaaaaacaatggcacaattaaaatttaattgttttaccaatatttgtgcccctttttcagattttccatttggaacacaatgatgggcacaaggtaagcaattgcattcgcttgtcctccgccgtccgttttgtaatttccgtttcttcgcttttcgtctcctcaccattccctgggccattcaccagtccggctttctcctgggcctctttctgatgcttctgatggccgccctcgccttttacaccgcttttcgcgtggtcgaaagtccgaattcgttgggtgaccgccgcttttccttcctttcaccccaatttctctcttttttagccctcgacagaacgggcgccgacttttcggacgtttgccgtttcttttgggggagacgtggcgaatatttctccgtttttttctccattttggtcctcgtcggcggcgtcattctttacttcgtgttgatgtccaactttctgttttacaccggaaacattgtcaacggttgtcccatttcacttccaattcatttgactaattgaagaggcattgcagccgaactcgtcgatcattccgattatggtcaacggcactctcagctgcgacg

SEQ ID NO: 60106 - DNA, 49 bp, Heterodera glycines
attgaaagccatccattgcctgccggttctcggcacagcaaagcactaa

SEQ ID NO: 60107 - DNA, 997 bp, Heterodera glycines; identical to SEQ ID NO: 29629
  unsure (1)..(997): unsure at all n locations

SEQ ID NO: 60108 - DNA, 940 bp, Heterodera glycines
ttcttttatcctttttcttctattttcttttcttttctcttcacttctttatcccattttgtttctcaattctcatcgaacaaatttaattttattaaaatcaaataaaaaaatgatttttctttttttgtgttcagaagagcattagccaaatcgcccgtggtgaagcgagccgccgccattcaggagcaggagcagaagcgggtcagcaagcacaggacgagcagatattggctggatgaacaggtgggacggattttggatgtttaatttaaataatgcaatttgattaaaaagaaatataacaacttttttttaatcaaaaatacagttataatcaattaaataagcaaagtttttcgccaattttgttaattattccttaatcattaacaattgggaattattatgctccttcgcttttattctacattaattaacaaatatattttttgttaattgtttacacaataattaattgttttggccctttccctaattggccaattagcgccctgccatttcggcccagtttagttgagtccctctgagcacatttggctgccctcctccgcttcatccgcttcttcgtccgccgtggacaccgaatgttatttgggcgagaaggactgccagaagatgggagagaagcgccgctgcagcggctgtcacattgtggcacacacggcatgcttcccactgctggccaaggcaaacaatccgccaattaagcatttaaacgagcaaattaactaatgatcatttatcttatggattataaaacgatttttaatcttaataaaaatttaatattaaaaagcagtaaaaagttaataaaattaaaaattgatttgcaaaaattgcagatgaatttgagctgcaaaatgacttttcgcgactgagcacaaagtgccaatgccaaaagtccgtcgtcaatggc

SEQ ID NO: 60109 - DNA, 63 bp, Heterodera glycines
atgagaaaaaagatgtttgatagggccagacaagagaaggcaactgtttgtaccaagtttgcg

SEQ ID NO: 60110 - DNA, 2561 bp, Heterodera glycines
atggcaattgctttggcatcgtgccaaccgtcgccaattttgaatggtggtgccaatgtcattgttgtagttgctaacgaacagccaaaaatttgcaaaagcaataacaattgggcactttcctccacttcggcatccgcttcatcgtcggcacgtcgaaaaagctttaatccggtccgaatcaaagaggagcctatgcagacagaaaatgatggccaagaacatgtagctggagcagaaacaactgctgctgttgaacaacagcaacaaaaacaacattctcaaggtggggcagagaaataatcaaatttagattgattaatgaatttttaaaccattatcatttgtatgccgcttaatctgatcattcagccttaattagcgactgattagtcaatttatcttatctgctagatagttaatttatttccctaagctaatctgatccgtctaaatcgctgctgatcattgtagttttatgtgtttgttagtctttggcaatcagtattgtccgatcacttaactcagggataattcaattagcattttctctgattctgatcaatagcccgtaatcagatcaagagagacatcatattttgtcaattcagcgttcaacaagcgtcatgacgaaggcgaagaaggagcggatgatgaacaaatgggtccgatcaatcggcagcaaatgaacaacaaagtaagaaaatcatttttcaattttttaaactttttttttcattttaatatttttttaaggtgaatttgtttatggacaacaacaatatgacaatcctcagcagcacaacaccgctgaatgcgttcacacatttcccaccacagttgttcccgcttgaaggcatgaattaaatttaaagctctgagaagagtctcgagtattaattagtattaagcatatggaaaaattatgtctcgatttaatcttgagttagagtccagtttttggtcacaatgttggcgcataaaattgtatcaatctcgaaaaattcaccgtttaatttgacaacattcattagcaaatttagctgatgaggaggagtcatcagcagatggtcaacttcaaaaagatgatggtgatgaggatgatgcgtcagtgcgcgaaaaaaagctacagtacaataaccttggctattttgcgcgatttttgaaaactgagttggccggggcctgtgccggtgccgtggacaaagtgagcgtggcgacacaaataattttttttttttgttttttaatttcaatttatttttaatcgctcaggtggtcggtgacttttctacaacttcatcctcctcatccgcttccaacggttcgtcagtggacaataaccgtgaccatgttgacgaacagtacgcgcaacaatgccagcagcaacaacaccagaatgcggttcaacaacaacaatttcaagcagttcaggtaaagtcagttaataacaggaaaattgcaagcgccctaattagcgtaataaaatttttatgcccgggggaggaaaatagcggcctttaaaatcttccaaatttcgaattgtgaatttaaaaagagacgaaaataaaattaaattttaataattatctcatgggccaaagcgacccaaattgatccatttgatcaatttattttgaaatcatttttccttaaattcatgtgatgattcatcccgcccctcccttcccctgcgggtgctcctctataaaaggcgcaccgctcactcaattgggggtgaagaagaagcgacatctttttcctgattaatcaattttgcatttgtatgctttttcctgtccctttacatttaattgttaaaataaatttttaagtaaattgggttaatttcccgagaattaaggagagaatgaaatagcacccttcaaaatcttccatattccgaacagccaatttaaaattgaatacaaaaaattaaattttaataaatagacctcccctaaaatcacaaaattttttcaaaaaaaaaaattcaggtctaataaattgacaatcccccaaaaatagtatttttttctggccaattcaggcccgtttatggacagccgcgttggcattagccgccactagacagcaacaacagcagcagcagcagcaccaattactgcccgaccaacagcaaccgcaatttgtgccagccgcagctggcacatgccgaccacctgcatcacaaccacccttttcattggcatcgtcaatggtggtgccatcgtgcacaatgcgtgggggtggcggaatggcgcaattgccaaactcggttaataattaattaactttttgggattgtgatcggcttggttataaaaatagtttttgatcgccgataattagccgggaataactggattggccgggaatctcgagttggagtttcccccaaaacgggtccgaattttccaaaatttgccttatcaaaattttttctttagacttttccatggttttccgtgccaacaatgcaaacaatgaattcagcagctgttgcgacattattcgcgtaagaaaatattcaaaaaaaattttacacatattaaaataaa

SEQ ID NO: 60111 - DNA, 1363 bp, Heterodera glycines
taattaaatccattccttcgggggaccgtgccgggtgccgcggggtaagcagtgctggttcgtttcatcacggcaccgaaccttttggctagtcagcaatcgttgcttaacttgccagatcggacgggtgcgcatgattccactgttccaagcaccccaccaaaagcaaaacgatataaccaaaatataaggaaaaattttttaaaaaattttttctccatcttcctttttgatactaaagcatcagagtgctaaaattaagttgtaaataaaatttggtgcgctttagagcactttctgaaaaaaatatttatgaaacaaaaaaatcgattttttcaagtgtccgtttggggtactcaaacatttatggggagcaaaaatccaacgcagaattaaagtacaggctatagggaagctattcccgaaggattcggtctccccataaatctgggcgcatcggttcggggggactgccccgaaaacaaaaaaatcgattttttcaagtgtccgtttggggtactcaaacaattatggggagcaaaaatccaacgcagaattaaagtacaggctatagggaagctattccggaaggattcgttctccccataaatctgggcgcatcggttcggggggactgccccgaaaacaaaaaaatcgattttttcaagtgtccgtttggggtactcaaacaattatggggagcaaaaatccaacgcagaattaaagtacaggctatagggaagctattccggaaggattcggtctccccataaatctgggcgcatcggttcggggggactgccccgaaaacaaaaaaatcgattttttcaagtgtccgtttggggtactcaaacaattatggggagcaaaaatccaacgcagaattaaagtacaggctatagggaagctattcccgaaggattcggtctccccataaatctgggcgcatcggttcggggggactgccccgaaaacaaaaaaatcgattttttcaagtgtccgtttggggtactcaaacaattatggggagcaaaaatccaacgcagaattaaagtacagactatagggaagctattcccgaaggattcggtctccccataaatctgggcgcatcggttcagggggactgccccgaaaacccaaaaaaaaattttttggataaaaattatttaaatgaactgactagataatatttaaaataggttatttctcttcctttcagtatccctgcaaagtttggcgcgcttctgatcagtttctgaaaaaaaagttaagcctaaggtgttgtcctgtttaaaaaggaattaaaaatttctttaaatgatatcatctccctttttgatagaaaaagcatcagaggacc

SEQ ID NO: 60112 - DNA, 147 bp, Heterodera glycines
attatgagccacccaatttggcaaatcggtctttttaaacgcattaaagaagattcagtcgattgcttggagtgtaagcaaaaaaacgttattaattttcatcttcatcattttttggtttaaaaatatatttgaatacttttttat

SEQ ID NO: 60113 - DNA, 983 bp, Heterodera glycines
aaaaaatcgatttttttgttttcggggcagtccccccgaaccgatgcgcccagatttatggggagaccgaatccttcgggaatagcttccctatagcctgtactttaattctgcgttggatttttgctccccataattgtttgagtaccccaaacggacacttgaaaaaatcgatttttttgttttcggggcagtccccccgaaccgatgcgcccagatttatggggaggccgaatccttcgggaatagcttccctatagcctgtactttaattctgctttggatttttgctccccataattgtttgagtaccccaaacggacacttgaaaaaatcgatttttttgttttcggggcagtccccccgaaccgatgcgcccagatttatggggagaccgaatccttcgggaatagcttccctatagcctgtactttaattctgcgttggatttttgctccccataattgtttgagtaccccaaacggacacttgaaaaaatcgattttttgttttcggggcattccccccgaaccgatgcgcccagatttatggggagaccgaatccctcgggaatagcttccctatagcctgtactttaattctgcgttggatttttgctccccataaatgtttgagtacccaaacggacacttgaaaaatcgatttttttgtttcataaatattttttttcagaaagtgctctaaagtgcacccaaatttttatttacaacttaatttttagcactctgatgctttagtatcaaaaaaggaagatggagaaaaaaatttttccttatattttggttatatcgttttgcttttggtggggtgcttggaacagtggaatcatgcgcacccgtccgatctggcaagttaagcaacgattgctgactagccaaaaggttcggtgccgtgatgaaacgaaccagcactgcttaccccgcggcacccggcacggtcccccgaaggaatggatttaatta

SEQ ID NO: 60114 - DNA, 51 bp, Heterodera glycines
tgtccgtttgggtactccaacaatatggggagcaaaatccaaccagaataa

SEQ ID NO: 60115 - DNA, 1646 bp, Heterodera glycines
  unsure (1)..(1646): unsure at all n locations
aggtcggcacnttttgccaaaaccaataaaacatgccaaggtcaattactgtatggaccgttcgctgaatgactgtgatgtgatcgcattttgcgaggaattggccgacgggtacaattgcacatgtccgacttattccatcgatcaatcgccgatgccggaaaagccgggaagaaagtgcaaactgttgaagaacgaatgtttgaaccccgcggagaacaattgcagccgattcgcggattgtattgacaaggcggggaaggagaataatgaaaactataaacgagaataatgcttcagacggaaggctatgagtgtgtgtgccgtcctgggttccgcgatgagaacccggcaaatcctggcacttcatgcagacaatgtaaacagaaaccattttaattttctttttatctgtttaaactattgtcagtgatcaatgaatgcaaattctccgctatcaatgattgcagtccgcacgcgaattgcatcgatttgcccgatggatatgtaaaaaaaatattaaaagcctatctattttgggggggttttcagacctgcgtttgtaagcctccttatgtggacgaagggccaaaggaaaaaccaggccggatgtgctgtttcgacgaatgtgccaaccaaaaagacaacgactgcgacaaggaaaatgccatctgcgaggatttggaggagggattcacctgcaaatgtgtgccgcttttgcacacctttcaattgccataaaggtcagcgaagaaacacgccagtgctgtacagcagcaaccgtgctgagtcgaagcacgaaaaagtgcaaagtgatcactgatcaaattaaagcaagtaaaataattattaaaaaattaaaattaaaataattattttaaataataataatctacttacataattaattcgtttattttataatatttttaaatctcaataaaacggacattttttgttttctcatttttattaaaatattaaagttggcatgcacttttgttttctcattttttattaaaatatttaatgttggcaaatagataaatagtgcaacaaaaatatttttatagaaaattcatgggtagttataaacgtgaatgattctgagaagctcattttcgttatttattattttagaataatgaatattattattcatattttgattatcgcactatttgtctacgagttcccattaggctctaaatcagggtttgatgattttatacaaaaaaatggtgtgatggaacttgtgaaggaatacaaatcgaaaaaaactattaaaactattaatgatcttcactcaaaactgcaagaacaaggaacaaagataagtcttcggaccttaaaaacttatttatcaaaattaacaatagtgacaagaaacgaacatatagaagcatcgcctgatccaaatttaaaaacattaatgagccttcaagaaattttttgatgaatggaaaaaatcttgagttatttttgtgttaataagttgattcgtagaagctgttgattggccttcaacaaccaataaaataacataattatagctttctcaacttatgcatttgctttttgctccttatttatgcttcctattagaaatttatttattgctgtgagctttcttgtttggtgtgtct

SEQ ID NO: 60116 - DNA, 345 bp, Heterodera glycines
atggtttctgtttacattgtctgcatgaagtgccaggatttgccgggttctcatcgcggaacccaggacggcacacacactcatagccttccgtctgaagcattattctcgtttatagttttcattattctccttccccgccttgtcaatacaatccgcgaatcggctgcaattgttctccgcggggttcaaacattcgttcttcaacagtttgcactttcttcccggcttttccggcatcggcgattgatcgatggaataagtcggacatgtgcaattgtacccgtcggccaattcctcgcaaaatgcgatcacatcacagtcattcagcgaacggtccataca

SEQ ID NO: 60117 - DNA, 571 bp, Heterodera glycines
agccgacatcgaaggatcaaaaagcgacgtcgctatcgtcgcttggccgccacaagccagttatccctgtggtaacttttctgacacctcttgctggaaactttacacattcaaaaggatcgataagccacgctttcgcggtccgtattcgtactgaaaatcaggatcaagtaagcatttgcctttttgctctacgagaggtttccgtcctctctgagcttgccttaggacacctgcgttacgctttgacagatgtaccgccccagtcaaactccccgcctgacactgtcatcggcgcgggtcgccgggccaccgggtggcccgacttaacaccaaaatggacaccctttcgggcgcactcccgttttaccgattaagtaaggaatcgatgaaagtagtggtatttcactggcgccttgcggctcccacttatgctacacctctcatgattcttcacaaagtcagactagagtcaagctcaacagggtcttctttccccgctaaatttgccaagcccgttcccttggctgtggtttcgctagatagtagatagggacagtgggaatctcgt

SEQ ID NO: 60118 - DNA, 1226 bp, Heterodera glycines
  unsure (1)..(1226): unsure at all n locations
ggggaattgcccgagggcgtttatcggcaattgcgcgaagtcgancagcagacgagcacttgacggctacgaggggtccaaggcttctcggcccgagtgctgaacaggtggagaaacctgggcatagaaaggggtgtgatttgaccatttgaattcagggaggagtacaaaacgccaaagtacggttcgggcggtacgtgtgaaattcgcgttgtccaacttgtggagatcatcaaanagccaggccaatcacttgggctgtatttgcgtgagggcaatggtgcgttctgtccattgaaagtggcattgatttcttcttgtcccaaaggcattgatcagttcaccggcgttttcgtgtcgcgctttggcgaaaagtcggagttgcaaaagtgcggcgacattctgaggccgggcgaccaaattctggtggttaacaatgttttggtgcgcgagatggccatcgacgacgttgtgctgatgttatccatcccgagaagactgttgctgcgcacgaggcaagcgaagaatggcaaaacggagagaaaacggcatttgtcataattagcgcaattgaaacattggcaaatgaccagacgatttgttcagcttcatcaaagaccaacgcgaccaattggccatccgcggcccaaccgaacggagcgaacaaaggccggtggttgtgtttcagaaaatgcccgaaactgagcacagaagggactcggaggtaatttgagagccattggcacataaagtgaacaaaaatcgaaaaaaggcatcgaattcgggcattttggcaaagccggcgagcacagcagcgagttggctaggcaagaaggtacgacaacaacaacagctgaagaaacaacagaagcagcagcaggtggagagagggggagaaagagagaggaaaagtgtgatcagttaaagaaaagagaaagggatcagggagaagaaagggcgagagagtgatcaggggaaggggaaagagagtaaagagaaggaaggaggtaagcgatcagagaaaaaaacaacgaaggattcaacaggaaaccaaaatttgggacaatcttaaaaatggttaaaatttcaaaatttaattttattattgtgaaaaattattcatgctatggctttttccctaaagtctgaccaagcgcagcaacagcttcggcatcgtcagtatcctcatccacaacaacaacagccaatgatggtaattaccacgt

SEQ ID NO: 60119 - DNA, 56 bp, Heterodera glycines; identical to SEQ ID NO: 52733

SEQ ID NO: 60120 - DNA, 399 bp, Heterodera glycines
atggagcttttcctgttcaccttcctctacattttggccgtgtgcgcattccttgccctttttggtgcgtaaatttaaaaattaaattattaaaaatttaaatttaagaaacggtgttgccagttgtgtgggtggacgaccaacattttgtggaacagcagagacgagaagcaattttcaatgcgacgaaaaattgtgatccgttatcatcattagcgattaccatttaagaagtgccgagggggctgttaattgggtaaaaagacattgaaattatgccctggcgaattgcaatatttttttaatataaaaagattttttgaaccgagttctcgcatcaaaacctaattaaattgttgagatataatttttaatttaaattatttatccattaataaa

SEQ ID NO: 60121 - DNA, 567 bp, Heterodera glycines
  unsure (1)..(567): unsure at all n locations
atggtgagttgggccaaaaggaattttaattaaaatatacaaaaatttaaatgaaaatttttatgaaaaaaactcgggttttccctttntacgaaacgcattgcacagagctaaaaatttctacattttgtttcattaaaattgtttattaatttggttcagtcgaagaacaccaatcagtttcgagaccaagacgtttgccgctattgggtactgtatcgaaatgtcaaaaagatctatgaaaccttcgtcaagcttgaacaaatggacaaaactgttgtagctgttggaactgaacatttcggcatctttttggagctaaaaagatgtgatcagcttaaactcatccaaaaatcggtgattttttataagggcgacagaaaaaggcccaaaactcacggcaatggaaaattaataattttataattcaaacagaccgaacagaaaccgttgaaatttttaacataaatacctttatattaggagtattcttctgcaaaagtaaatttttttaaatataatttaaaaattgtgcaaaagttcaaagattactgtattaaaaataaa

SEQ ID NO: 60122 - DNA, 1100 bp, Heterodera glycines
taattaaatccattccttcgggggaccgtgccgggtgccgcggggtaagcagtgctggttcgtttcatcacggcaccgaaccttttggctagtcagcaatcgttgcttaacttgccagatcggacgggtgcgcatgattccactgttccaagcaccccaccaaaagcaaaacgatataaccaaaatataaggaaaaattttttctccatcttcctttttgatactaaagcatcagagtgctaaaattaagttgtaaataaaattttggtgcactttagagcactttctgaaaaaaatatttatgaaacaaaaaaatcgattttttcaagtgtccgtttggggtactcaaacatttatggggagcaaaaatccaacgcagaattaaagtacaggctatagggaagctattcccgagggattcggtctccccataaatctgggcgcatcggttcggggggaatgccccgaaaacaaaaaatcgattttttcaagtgtccgtttggggtactcaaacaattatggggagcaaaaatccaacgcagaattaaagtacaggctatagggaagctattcccgaaggattcggtctccccataaatctgggcgcatcggttcggggggactgccccgaaaacaaaaaaaatcgattttttcaagtgtccgtttggggtactcaaacaattatggggagcaaaaatccaacgcagaattaaagtacaggctatagtgaagctattccggaaggattcggtctccccataaatctgggcgcatcggttcagggggactgccccgaaaacccaaaaaaaaattttttggataaaaattatttaaatgaactgactagataatatttaaaataggttatttctcttcctttcagtatccctgcaaagtttggtgcgcttctgatcagtttctgaaaaaaaagttaagcctaaactttttggcctgtttaaaaaggaattaaaaatttttaaaaattttattcatctccctttttgatagaaaaagcatcagagtgcctaaactaacatgtaaataaaatttggtgcgtttcagaaccctttctgaaaaaatatttaagaattaatttgcaa

SEQ ID NO: 60123 - DNA, 739 bp, Heterodera glycines
ggctattcgccaagaattgtgccaattatcaacccattagaaaatacgacgcaaactcagttgcttgagttcatttttgcattcactggccacagttatggcataaaattaaatggcaaatttgtgcagagcaattatctcaaagagggcgaagaattttttcccattaattggacggagccaaaggaaatgaaaaagcaatttgaacgaatgacgtcatttcaggttttgttggctctcgagagtctcgacaatcgcgaaaatttatttggtaattataaattcggtttttttaagattagtgctgctgctctgttggtcaacgatcctccaccatggatgccatttgtcaccattgacactaattatgtatgttaaattaaattaaattaaaataattttaattttaaaggaatcaccgatgattccattgccatttttcatggccattcccagcgttgaaattgatacagaaataaacttcaaaatttcattgaccgacataaacaaatacaatttcactgtctcgttgcttcatgacaggccagagagccacttaaaaagtacggtacaaatcagacgaaagtacggtataattccgaccaagagtcttgaagttttcaacagttcaagcgtgctaatcagaattcatgcaaggaccaaaattctgatgagcaaaatcattagtttaatttgtcatacatatccaaaaaaggatcagaaattggtaaagacataa

SEQ ID NO: 60124 - DNA, 1363 bp, Heterodera glycines
atggttgtgcatccgtcgcgcggcaatcaggacgcggcccaactgtttgaggagttgttggccgactacaacaagctggtcaggccggtagacgagaacaacgcaacactggtggtcaagttcaagctgaagctcagccaactgctcgacgttgtaagaattttttattggaaaaaattttcaaataaatcccctacatttcaaaaaaccaccggaatgctaaatattttcaaaactgaacgaaaaaaccaattatacctccgtgacagacgaccagcagttcttcttcagagtgatcggaagtgttcaaaaaatattaacactccattttgaacaaaattagagcaatcttcgtgaaaaaatccgaaaattttttttcttttacactttccaattttttttttgtctatgatttttaatatttataagaaagtacgcttggtgaaaatttcagctcaatttttccatgagaatagttaagtgactaacaattttttttttacattataattttgaaatggagtttatcaaattttttcttgacaaatttcaaaaaatcggcctcgagaatcttggccaattctcttgtttttgaattgcattatctctcaaaaacttggaaactagggggacctactgggcaaggaattcaatttcaaatgttgaaatcgaaaaaaactaaaagcttagctgctttcccaattgatcgaaaaattcagtgccaatttctgcttcaatttggcatttttttaaatttcattattgcaacatcaaattccaacattttctttctgatcaaattccttagagccaaatgtttttgccacgggcaagaagccgccctttcccctctcataaattcctgcccccaggggtcggtcgactgattgattgactgatgagacagaaattccaagtcgaattggatttttgggcatttttcattgttatccctcatctgtctgtcagcccatcaaaatgtttttcgctgttgtcaaccaaaatattttgttttatgtgtgcgtgttggtacagcgtcatggcaaattgcttttatccccagggattttctgggatttgttttttttaattttccgcaaatttaccaaaagttttttcatcggttttacccaaaatcttcggaacacaaaatttcccctctttttcacctctccaaagttttttttatatgttagcctatttcccgacaaaattttcagtccctgcctactttgaaagtttttttgctttccccaaatatatatttttttaaaacaacctaaaaatttcaataattttttagcatgaaaaacagcagattatgaccacaaatgtatggcttcaacaaaaggaagaaatttaa

SEQ ID NO: 60125 - DNA, 139 bp, Heterodera glycines
agttatagcagatcaaaataaaaaatacaaaaaaggcatttttcagtgtaaattttgaaatagcgggcaaaaatttacgccaaatgcgctatttggcgttatgagcaattttgtctgacactggggcgtacccatagtg

SEQ ID NO: 60126 - DNA, 1874 bp, Heterodera glycines
atgatattaattgctttttttctccctcttccacctttatttggcgttgaaatttttgctgcttggcttctccgtggcgataatgccaacgttctcatcatctgccgctgctgctgttgtgccgaacagtccatctccgtcgtaggattatcagttatgattgtccatgaggtaattgatgggccattaacttgtgaaattatgaattaaattaaatttcgtacggatttttaattttctaagcctttcatctttgtttttctatttttttttgttaaaccttcagcagttatttctggttgatcagatgtgaaatcgtcctcagatgaactgctaccgatcgaaagtgacattcgatttatcaaaaatcgacgctatgaagaaattgaatttttgttaaagttcgggttggggattagaaatggtcaaaataaatatcaaattcgtgatcagggactccaaaatcctgggaaaaagtttttacgaattatttaacaaaaataatattaacaattttatttttttgcttatttgtggggagaaacattaaactttctgagtgatgacctcaaaatgggtggagaacagatggacaaaaaacttttcttcacataacttcctcattcgttttcttttattacaattattattattattttaggattaagcaaatcgttgacctaaaaaagtaaaatgggatggaaatgagaaacatgtcaaagaagaaaagtttagaatggaacaaaaaatcccttttaaaggacacacaaaaatttatttagaatattacttcattaatagataaaaaattccaaaatacaataagttgaaaagcaatcgtggcacttatcccttttgtgcccccctccctaaaaaaatttaatatttttttcttcggtaatttgaggcgctaaaaatgcatctgctgcttgtacgttaccttaaaataaacagcagatgcgtttttttcaatcctaaattatccgagaaaaaatctaaaaaaaatttctggagtaggtcactaaagggaaaagtaccgcaaacgtttcaatgccgcccttggacatgaatattcagaaccgttcaaagcgtcattcgtccaaggacgtccttgcatttttttattgtaaaaaacattcctgctgtgaaggattttcgttcaaatatttaatggcaaaatgatggatgacccaaatggcgaagcagagggcagaaaactcataaaatttgcatctccttcattttcttaattaggcaaaatgctgacccaaaaaaaaagtaaataaaatgatgggatgggaggaggagaaagatgagaaaaagtagatataaaatgtaaatttgacagcattattaaattaaataaaactataaacgatatttagagtcgattccacaattaaaattttgccagaatcgcgggtattagatagcactaagtgttttctattagcctaaaaaatttcaaaaagtttcgttaaatttcaagaaagttatgactaaaaattaaaaattaataacaaaaagattgtatttaatatatattatttcaaatattcgctatataattaaaatttatattaatctttaattatttaaatagcaaataacagcaaataattttgcacagtttaagctcattttaattccaaaaactgaaaaacaacgatttccaacataatctcgtattttcagtgttgcgaggagagcaaaaactaatttctgaaaaacaaagagaaaatccccaatcgagatccgcttttgtagccaaaataactaaatttaattaatacaatggaccaatttggttggcaaaaaccttcaaaaataattcccaaatatcgtcattttttaatattttggacaaaaataaa

SEQ ID NO: 60127 - DNA, 799 bp, Heterodera glycines
atgcccatgaggataccatccatacaattttcgaattttatgtttcctgtaccagggttaccctcatgggtaagatgccaatgaggatatcatccatacaaattttttatttttgttcgagttcgggtcaggggttcgaaattggcaaaaatgggtgttgtattcgtgatcagcgacctcaaaaaccccttaaaaattattttcattaatttctaaaacacatttataggaatctgaaaatgtatgttaaaagtagcctgtaaactaggaaagtaccaatttaattcacatcatcgaaagtttaagaatgaatcttttttaaattttataccaaatttcttctttttaacagaaaatgacaattggtgaagaaatgaagcagcaaaaagtgatggcacaacacattttattgttgcaggagaaagttgccaaaatggagcaggaaaaagagcaacagaagaagaagaaggaaaatgagaaatacggtaggatggattggattactgtaaaaaataattactgttcaatgaaccgttaatattttaattatttgaaagtgatttaaatttgtaaggtttcagtcgatcaattcatcaaaatgcaaaatgatcactttgctattttggaacgcatcagtgaattggaaaagcagcaactgaaagaacaaaaacagcaagacgagaatgggaaaggaaaatacggtaatgcatacggtaacagtgttaaaattaatataatttatttatttaatattaaaatcatttttagcttccgatcaattcacaaagttacaagatga

SEQ ID NO: 60128 - DNA, 793 bp, Heterodera glycines
atggcgttttgtggaaaaacggttccttcaccactggcactcacagtaaatgttcatacggtgctggcgatacggtcggatgtggcattgatttggccactcggaaaattttcttcaccaaaaatggcattcgtttgggtacgaacaaataaattacaatcacgttgttaagcacagggtcagacgatgtcggaatttcggaaatagagtaaaaaaaaaactaatttcaaaaattttttttattaacccaattaaaattaaaatctttattctttgaccaaattagccatcttgagaatttttgctttaaattttcaaacatttctatggaaaatgaagcccaattgaataactacataaattcagagtctcatttattaaatttatttacatgtttagttcacttaattaatcaattagtaaattttcagatagcgtcgatttgcgcctttatctttccattccgtctgatgttggccaactgttcccattcgtttcattgtgtgactctgatgacaaaattgagacgaactttagcaccaatttcatggccatcactccgacgacgattaacaaaatgtggtcgtccataattcatgaacttagtttccgcattccgacgacgagtccgctgatagatcttactggatttcttatcgttatctttttggcttttgcgcttggtctttttttaagtctttttttttgcaatttttactaaaaaaacatttcttctaaccattctcagttcaccgttttcatgtaatgttacgacattttttcttgttaaata

SEQ ID NO: 60129 - DNA, 1175 bp, Heterodera glycines
ggatgccgagactaaagtcaagaaagacgcagatgagaaggctaaaaaggaggccgaggttaaagccaagaaagacgcagaagagaaggctaaaacggatgccgaggttaaagccaagaaagacgcagaagagaaggctcagaaggatgccgaggctaaagccaagaaagacgcagaagagaaggctaaaacggatgccgagactaaagccaagaaagacgcagaagagaaggctaaaacggatgccgaggctaaagccaagaaagacgcagaagagaaggctaaaaaggaggccgaggctaaagccaagaaagatgcagaagagaaggctaaaaaggatgccgagactaaagccaagaaagacgcagaagagaaggctaaaacggatgccgaggctaaagccaagaaagacgcagaagagaaggctaaaacggatgccgaggttaaagccaagaaagacgcagaagagaaggctaaaacggatgccgaggttaaagccaagaaagacgcagaagcaaagaaaaaggaggaagaaatgaagaagcaaaaggctaagcccgaagaaaagcctgaggcacctgccgaaggcgtagccgtagtgccggaagcgaagaaggcggaagagacaaaggaaaggctgaagcaggaagagaaaccagtggaagtaccaccatctccagcagaaaagaagagaaaagaggctgaggagaagaaggctcagaaggatgccgaggctaaagccaagaaagacgcagaagagaaggctaaaacggatgccgagactaaagccaagaaagacgcagaagagaaggctcagaaggatgccgaggctaaagccaagaaagacgcagaagagaaggctaaaaaggaggccgaggttaaagccaagaaagacgcagaagagaaggctaaaaaggatgccgagactaaagccaagaaagacgcagaagagaaggctaaaacggatgccgagactaaagccaagaaagacgcagaagagaaggctaaaaaggatgccgagactaaagcccaaaaagacgcagaagagaaagctcagaaggataccgaggctaaagccaagaaagacgcagaaaagaaggctaaaacggatgccgagactaaacccaagaagatgcagaaaaaaaggctccaaaggatgccgaggctaaagccaa

SEQ ID NO: 60130 - DNA, 329 bp, Heterodera glycines
ccgggactcaaatgtcccgctcaggccaaaatttttttctatttccgggaaaaaatcgaaatttttccgaaaaaaataccagtcgatagagctcgaaaaactatgttttggaagtggtctccgtttttctgtgaaaattcgttaaaaaatcataaaattaaaaaacccgaaaaccgttttttaggcctaactcgaaaaattttgaaaattttcgaaattttaaaatctggaaaaatcgagctcattgagctctacaataagtctgctggccacctgcgctcaggtcaaaccctaatgagttattcgcctggtactgaagtgggaaaaaa

SEQ ID NO: 60131 - DNA, 117 bp, Heterodera glycines
atgctgctgcggctgcactgcttggttgtgccgatggccggtaacaacggcggcggcggtggcggtgccgtcggagtaacagttcagccaattgttgctgccgtgcaacgatgtttg

SEQ ID NO: 60132 - DNA, 522 bp, Heterodera glycines
atgccgacaatcattgcctttttgaacaaatgtttgccaaattcggtgaaaaaaattggcacaacgcaaatcaatttggatgaaaatggcataaaaattggttttgaagcaacggcaggagcggtcgcaaattcgctagaaacttcaacggcaacagcgattgacgaattttcaacggttgcaaatctgtcgcaaatgcttggcgaaacggacaatactgaatcggcgaacaaaaacaacagcaacaacgacattccgccaacgtctggcggccaagcggaagtggcatccatttcaaattcaaatttgacttcatccgctgatgatggacaaaatgccacgggaggagggccgctcaccaaattggaaaaacgagataagccagaaaatcggcgaattctggtggacaatgagcgtgatgagcccataaaagcggaggaagaagacgaaaaaaaggatcgagaagaaagtgccaaagcggagagggaccaacaaacattgaggaaaattgttcctgacagg

SEQ ID NO: 60133 - DNA, 4819 bp, Heterodera glycines
caccttttttgatcaaatatttgcccaccgaacaacttcaagtacaacgaattattaagcatttccatgccccgccgaatttgcccttttcaatgcaaaccaattcttagcattttttgaattcttgaaaaccaaacaaattattgtactctcaataattaatgaggcaattattaaattgaaattaaatttatttaatggataaaaacattttttgtgcttttcgctaattattttaaagttttccattaaattaaacaaattgctgggaaataacacaaattgctggtggtgttgttagcttatgatttattattttaacggcgcttttcatatcaatcttaaatgggaaagaaagcagaatcaattaataatcttttgacgggaggcgcaattcatcaacttttttcagtgttttccgatgaaaaatgtcgggaatgagagaccatcggtcagaaaccaacggcacgagccggatcggctgttagcagcaaaacggcagattaattagcgggcaggggcatcagcgcaactcaaccactaattgtttgtttgtttgcccaaaaatgccgccccgccacttttactccctccctctaaagtacaacataatttatgaaaaattaatctgtcaaatgtaattaaatgaagaaaaaatttagagatttgaattatttccttttgaaattaataagcgattattttaagattaaattattattttatttgtctgtcaatgttggcattcgcttttctctttttgcttacttcttcatcagcttcagtctccgctgtacagcaccattcttctcccaaagtcaccacaattcaaatgaccacagaggagggatatcgggtaaataaatttaatactttttttaattatttaaattgattaaattaatttttgtgtgtgtttagatttacgaacattggacaacccaagcatttgcctctgttctgtcagtatttttgcaagaaaagttcgtttctgttatttgtgctctttaaatggaatttaattattaaaactttaaaaatatattttaaaggcattccaacaaagaccaattagacgtagtgccggacaaattcaacgaatgttattttggcgcacagacagtgccacggatggccaaatgcatcgttcggctgttgaacaacgaattcgaagttgagctcaaaaatgccaaaattgttgctggcaccaaaaatttggtgaaaagcgaaaattgggtgggacaaattcgaatcgaaagcgaaagtgccgaagaaaacggacaaacggaacatcagaagaaaaaggcagaaaaaggacacgaaagcaattcagcagtagaaaaagaaactgtgaatggtaagtaaaatgccgaataatgggaatgaatttctttaaatgaaattttcgcaaatttaataatgtatcattgtataattaggggtatgggatttttgactcataattagcctaaaaagtgccaaaaattgagcgaattctgtgcccgttaattatcacttccaattgagagctttatctttttttaatttccggcattatttaggtacaagtaaaaccgattattacagcgcaaagccaaaatttgaagttgccgaaatgcggaaaagggaagcagtttttgccagagaccaacggcatttagacaaagactttttggcaagaaaacgcaaaaatgttgcaattttgaaaagtcattcatacaatttgctggaggcaaaacgaacacttggcctcagtctcattggaggattggcacgccttttgatgagcggcatattgggaaggaagaacaaaacacggacaataccgtaaaaggaatactataattcaaattaatatagtaaataataaaacaaattaaaattattattttaagttggcaagaaacaatttcacaaatacaaaaggcaaaaaaggcgcacaatcagttgaaaagagaagaaaaaaaatggaaggattatgcgcttaaagaaatggtaatttgttgttattaaaagaataataacttttgctttattcagcccataaaatcggcaattgcaacaaataaaaaatatgacaaaaaaacactgctgaaaatgaattcggccgatgaaacaacggcttacggtagcaaagtgggcaaattggaagcgcaaattgccaaattggtcaatgacggcatcaaagtcggcatgcgattggcggagttggaaagaaagtcaaagtcaatcgaatattcaaaatcggacgaatttaacggagagaaaagaaatgaaatggcaaattatgacgaagaaatggagggggaggagtacggtagggaacagagcgaggaatacggtaaaagcggcgaacggagggcaaagggcggagaagcggcgagagcaaaagcaatggaagcgggccgattggttgacgttttatcgccacggtttatgagcgttacggccagcaagtcgaggggaaaggtgcctaattttggcagataattgatcagccaacgcggatcagaaggggcgggacagggacgaaacgcgacaacacggtccccggccaactcagtcccaaacggtttaagacactgtactcagctagttcgggttgatgggactgagttgatcccctgctgcccagcaggaggccccctttcacccaaattcctgaaaaactattggaatgttatatataattcgaaaatagaaaatttttatttttatttttcttgttttaggctaattttctgtccccatcactgttcagcctgcacacaaaagggcatggccttgaaaggcaaatgagtttgccaaatttgatgaagaagggggtccatttagtggaccgagaccaaaacgaatggcttaatctgatcatggaagcatcgggggtcaacgagcaagtggacacagtgaaggtggatggaagaataatgcaaaaacaatttttcattttccaatgccccagaactatcatttattttgaattccccaactagctcatctcccctagcaaacctttagcttgttttgtaattctatttagctttttattaattacaatttttggatataaccagggctcccagatcaaaattttcaaaagcctcatttggcaggcaaaaaagcctcattttgggtcaaaaagcctcattttgaaaatttagcctcattgacctatcaaaaaaccacaaaatgaggctaaagcctcagatctgggagccctggatataacttaagtcgtccatttggctgaaacctcctccaattaaaagaaaataattttcaccagaattagcaatgattttcaattctcagcatttgttgtcctctgctgatgatgggtacggcactgatgatgagattgccaaaaaagtggagaaacgatacaaacgcgaatttgatggcctttatctgacgaaggaaaatgtgaggagcaaatgggcaaaatggacaattgttcactcgttgatttgaaaggtgcgcgaaatgtatggacagaacgaacaacgaaaatcggacacatgggaaaaattggtgcaaaatttgagcaaagagcaagtaaaatgaaaaacaaaataaattaattaattaaaagcatttatatttaatttccattccaagttggcagaaatgaacaggacgggcgttgtgtcgatgagtgccgaacagctccgtctgatttacgggccgagttcgcccttcaacgactcgcaaactctgcggcgattactgccaattgtgaagaacggcacttccgtcagcaaagtgggccaaacaaacaaattattgggcataaataaatggatagaattcatggaaataattaaattgataaaaaaatatttgctttttgcagatgatcgaagccgacattcgtcggctgtctgaaatggcctcatttgatctccgacaaaatgacgtggtctgtttaatattggggaacggggagctaaactatgaaatgattgattccgatatctgttgtttttgctggctaaaattagcaattgaatcgtccattcctttttttctattttcagctttccccgagtgtgtttaaaccgggtatcaaaaagccaaggtaggaaaaataataattaaaaaaaattaattagctaatgcttcatagaattggtaattcgcttgtgctctctccgcttgtcttctctccgaccattttgtctccgaccattatggggtactattttggcttaattgtctaattgcttttatttattattttcacatcttttgacctgcaattttgtcgcctcgctttttctctcctccggttcgcgttaattcattcaccttttaattatgtttaattgcctaatcattttggattttgtcgcctcgtataatgacgcccctggtgttgtctccgtttatcttctcatccattattctgactccaataattatgcagccattcattttgtcgccaggtcgattaaaaatgtaattaaaaaataattaaatttattttttaggatttttgaacagtatcgtaagtttctttttaatttgaaaacccatattttccatttttgcccagattttgagtccgttcatcttaaatccgcaaataatgtcctcccatttcttccaccccgccattctgtccccgctggtgctgaccccggcccttctgaacccgtcaatgatgtcgcccattgtgctctccccgttggtgctaaccccgcaaattttctctcccaaatttttgtccggccttttcctctccccttacgcattgtcccccgttttgatgtcgcccgttttcgcttatttggtcattttgtcgccgagttggctgagc

SEQ ID NO: 60134 - DNA, 927 bp, Heterodera glycines
atgtatgctgtatttgtatgtcgtatattatgtgtgaaagtgcgtgtgagcgtgcggtccatgcaatccaattcatccgttcattcattttatgacgaagaagcccccattaggtgagaaaagaagtggagaatttccgacaatttaaagtcccgccaaaaaagccaactgacgacgaccgactgatataaatgagagaggagagagagaaagggcacgcaaattaaaaaatgattggattaatggccaaaactttaacggccaatttagttggagttcgaatgataacgatctgataaaatttggtggtacaatgtatgcgttattaaattagatttcccatcaacgccctatctccgagactttctgagtgacgaatgaaaggtcatttcgtaaaaatttgagtttcagcgggtatgtgtaaatcgtagtgatttgcgatcttttgcatattgttgagtttttgtttaatcctttttttaataaataaaaatattccggatggcgaaatcaccatgagggaatgttctgatcgagttagtgtaaaacgaaatattagtcagataaaaaaggcagtaatgatttattcagtcgatatttatcgaaaaacggcgtataattttttcttaacatatttttcggttttcttgaaaatctcaatcgaatcacttatacaatctatatgcagggacaaattaattgtggcgccattcttgttcattttttgattttattatcggtggagtcacttatccatctacaatcagcgacaaaaattcgattttggcactgtcatttttgctacacttctttgttcccactgcaccaattatattttaccattttttagtttcggccaaaacaaatcgttcttcgtccaaacatatttgctatttatccaatcggttctatatgatacaaaataaa

SEQ ID NO: 60135 - DNA, 142 bp, Heterodera glycines
ggcgcacggaggaagaaaagtggcggaagtcacccccggaagcaatcgatggtttcgtttctcttcgccgccatttcctcttccgcgccgtctgttcagaatcggcgccggaaaccgacttcccccgccccgacaattgagt

SEQ ID NO: 60136 - DNA, 268 bp, Heterodera glycines
ttgttgttgctgtgtgttttgctgttgttgttagtgccatgcttctgcttttgttgctgctggtattgactaacaatggcggcggacgcggtcaaatggcgccaaattcggttgaaatttgttccactatttaatataaaaataaataaaatgaaataatgatttttaataattaaaaaaaaaaattttacaaactttacacatgctccataaaaataataaaatccaaaaaaattcgttaaaaaattgtttttttttatatccgccc

SEQ ID NO: 60137 - DNA, 638 bp, Heterodera glycines
  unsure (1)..(638): unsure at all n locations
tgtccgtttnggggtactcaaacaattattgggggagcaaaaatccaacgcagaattaaagtacaggctatagggaagctactcccgaaggattcggtctccccataaatctgggcgcatcggttcggggggactgccccgaaaacaaaaaaatcgattttttcaagtgtccgtttggggtactcaaacaattatggggagcaaaaatccaacgcagaattaaagtacaggctatagggaagctactcccgaaggattcggtctccccataaatctgggcgcatcggttcggggggactgccccgaaaacaaaaaaatcgattttttcaagtgtccgtttggggtactcaaacaattatggggagcaaaaatccaacgcagaattaaagtacaggctatagggaagctattcccgaaggattcggtctccccataaatctgggcgcatcggttcggggggactgccccgaaaacaaaaaaatcgattttttcaagtgtccgtttggggtactcaaacaattatggggagcaaaaatccaacgcagaattaaagtacaggctatagggaagctactcccgaaggattcggtctccccataaatctgggcgcgtcggttcggggggactgccccgaaaac

SEQ ID NO: 60138 - DNA, 173 bp, Heterodera glycines
atggcttttcaaatgcttgaacgacaatcgcttaatttgttcaggtaattgaatattttatgtacattctgatttatagagcccagaattttgaaaaagtcgggatctggattggcatcaggccgagataagtaacgggatttaaacccataaagcccggtcccagaaataaa

SEQ ID NO: 60139 - DNA, 2100 bp, Heterodera glycines
atgccttcaaattctttttatgttgttcttccgtcaaacaccaatattgaaggaaataggacaaattctttccgagtgcgtttaccgcgcaaattgcaatttaattcggaatgggaggtgggtcttgccgttattgtatacccccactcttggccttccataggcaccgtggagcaacaatttgttcagattgagtggcagacggggaatacggtacgtatcgaagttccaccatcaaatgtcacaaacccccatgagcttagcaaaaatttatataggctcctgggtgagggaagtgatccgttggcaaaaaaggtacgatcaacacagaattctttcatgcttttgataaacaaggctcggcgatgggccagagaagagtacattaagcgaaagactaaagaaaaacggagcgtccgtgacgaagagctgctcctacaggccctgttgacagatactggaacattggttgacctcaacagcgtggcccaaggctttctgacacgggaaaagcgtgcggaaaccagcaatatagcgttgagaatcccagctgacgataatgattcatatcaacaaaaattggatgaatacttttctaaattaagtgagaaaaatttgagcattcttgatgaattgggcatgacaaaattgaccgccgaaatcaaaaatttgagcgaagaggaacgtgcgatccttgaagccacaaaggaaatgggaacggaagcatggattcaggcgtaccgtgagatacgtcttgtttgccaatttaactatgacgtccatagaaatcgttttgtcctgaacaccgacccacggtacgttaaaaaggtcaaagtctcgcctcagctcgcttacattctcggtttcaacaacacggagtttattcaatctgaaaacgaggcaagattcatgccggacatgagcggtggagtgtcatccttccacgtttacacgccggatcttattgaaccaatgatgattggtgacgtcacggccccagtgttgctcatagtgaccatacgcggaaaccccgaccaagtagttgaagaacaattttttgccatacagtatcataaacttttattaaaggagttttctgaaattctgattgagatacgtaccaatagcggcatcttgatgccattccaatacggaacatgtacattaacattacactttagaaaaatgtcctatttttaaatgatgaacacgttggaaattaacaaaacattgacaagaaacaacgtgactcgccactactatattggctgttttgcagcagatcaaatacccgccggtgcaattgtcaaatttccccactgtatggtggttaatcttgaccccagcacatcacatggttctcattgggtgggcatatattgcgcttctcctttgcatttggagtattatgactcattggggttgtggccaccgcccagtgttcacattgtgaatcatttgtcacgctacaaacaaattcaatataattctcttccccttcagtctgccaactcaagtgcgtgtggtcgacatgtcattttctttttgtattgtcgatgtgttggaatgacctttgaaaaaattgtcagctttttgcactttggaaagatgcaaccggatacgctcgtaaacaattttgtaaaaagcataattttcaaagaatataaataatgtaaaaacgtcaaattaaaaaaaaaatgcatgttgattttgatcctctacaagtggattggtccacattctcgtccgagtatgtgcaatttggtggatacaacatttatcgggggttgccctatcagcgtggagcgggagttggcgcagtgttcagaagtcttatgagatatttgctgccgattggaaagcaaattggctccgcaattggacgtcagggaatggaaaccggaaatcgagtactcaccaatgtgctggagggaaaaaacctcaaagagtctctcgttagtgagagtaaggcaggactaaagaatcttctcgaaaaagcagccaacaacataaacactcagaagggtcaaggttttcattttaagcgatacaaaaaagactcggctcccaaaattggaaaaataaggcgaaaaaatataa

SEQ ID NO: 60140 - DNA, 329 bp, Heterodera glycines
atgtctccaaatgaattttctgaccgtccctttcaacaacccgacaatgttcaaactgttcaactgccgcatcaacaaccggatccagaagcagagttgcgggcacaaattgaagacgcggaggaggatttgctcttgaactggtggcgtgaagacccgacaatcgtaagcttgtttttcaatttatcatttttttaaatttcatcacattttttcagattcgttttctatttggacaccgtcgagcacctaccatcgaagccgcgcttcttcagcgcgccgaacgcgaggccgagattttgcgccaatatgccgagaaccatcaatga

SEQ ID NO: 60141 - DNA, 1126 bp, Heterodera glycines
atggataatataaagcaaaatttgcgaactaaaaacgcacgacaacaacgttgggacaaggccaagcgagaggagagaaaagcgcagacgcagagggcgacagaagcacggctggccaagaaaagtgagttttttcatcaattttaactcaaaaaaatcattttttgaatttcagccgctccactgccgaatcccaatgccgaagtgccacagcaggacgaagcagggccgtcaacatctgctgcaccgacagaagaagcgatggagccgcctccaccaactccaggaccagtgccaacgccagaaatggacgaggaaattttggaattcgacgacccgccgccgtcgacacctgccacaccaattggcgatttggtgccgtttccgtcaacaccaactgcgccaatggacaccggagagacgaccccgccaccgctggccattgacgagcgatcagagcgcatcgaacagctggaaaagcaactgaaggaccgggatgacaccattcaatttctgcgcgagcaggtgcgcaatcgagaagcgctgatcagtgatctgcgtcggcagctggacgagcacattgtaccaccgatggcaccaccaacgaccagcaaaagtgagtgaaaatctcacattttaattttaaaaaaccttcatttttcatttaaatttcaaaaaacccatttcattgaattttagcgcctccaaacagaggaagaccgagaaaaggggtggatgaactccagcgcagcgccaggcgcgacatcgtcgacgcaattgtgggcgtcatcgatcgtgatcgctcgcgttccgcgagccgcgcatcgctggatcggatccatcgggatatccggcacaaattcgcgcactacacgccaaagaagggccaggagcggaaggagtggatggaagctgaggatgggctcctgctgcttgcccagcttgggacacagatggcttacagacggatgcaggcgactctgagcctcatcagcaggcgctttgacaccttcagcctcattgataaaaggtacagattatcaggaattcagtcatcgcgacatacttttttctgggtgatcatcatcaaatatcccccccccccccctcccgcccccctctctaa

SEQ ID NO: 60142 - DNA, 981 bp, Heterodera glycines
atgacaaaaattcccggtctcggtcttggttctcgattctcggtaaaatcatttctcgcacatccctaataaattcaataattattttatcatagaaattgattaataaattcattaacattaaataccgcaacaaaacatttttcattcattctaaagaacgcgatcgcaaagcagcgccaaaaaagcgagagcgatccttttttgagcaagtccgtgccagactggcaggtaaataaaaatttatcttaattttagcaaattttctaaaataatccggattcctaatcctcactacaaaattaggctctgatcgaacccgtaagtactttttggaaaggcatttcgataccgtatctcccaaagcactgagcccttccttttaaattttctccccacccctcacaatcagtccggtataaaagaccactcctttccgtgaccagaaaatgggtcagtggaaaattcgcaagttgaacagtgaatcaggacttcttgaaaatgataaacggtagtattattacttgatacacagtattttatatgaaaatactgtattactgacgcatttagcattttccgggagcccctcctttcgatggggggtggaagggagagctgaaaataaaaccaccaaatatggaaacccaatttaatttaggcccagtccgattgctcccaggccgagatggaaaacgggcaaaaagttatgatgacaatgaaaatcgaccaatggaagaggttgctgcttcaatgcccacctcacgagaccagtcacaagcaagacaaatgcgacaacggaagggcagcaacaacaaccaatttgagccggtctataaccagcaaatatttgtgagcacaacaacaacaacagcagcagcaggtggaggacatacccatagcataattaatagggattttaattttcatgtaaagtaaatacatatattttttttctggcttctcaattttctaaataaa

SEQ ID NO: 60143 - DNA, 49 bp, Heterodera glycines; identical to SEQ ID NO: 51181

SEQ ID NO: 60144 - DNA, 723 bp, Heterodera glycines
atgcctcccatacccaacactaaagttccattaatgctcatgtgccggtgtacggtactgttcctcggctactgtgttctgtgttacggtgccgacggctcaaaatacccaaatgaaataattgacacgccaattgtaagctgtgagcaggaaaatattgtggtcaaggtgggaaaatgggaaggaaattaaaatcaaattaaatgtaaatttaattagcgaaaaataaattaaattaattgcaattattaaagatacgaacttcgagtgccaatccttcgcatatttacgcgcaagactttcacgaaacggccaaatgcatgtgagaggagggggggagagaaggaattggaattgggaagagtttagggtccgaaatcagaacagaatcgcattcccacacaacgactgcggaatgaccagggaaagactggtgagaaaagggaaactttgaatttaaaacggacaaaacgccaaggaaaacccggcaggaacaatgtatcgcatctgtctatctgtgcaggtaatgaggcgacccatcgaaactgaacttacaattaggaattaaattgtggatggatgggtttattaattactcataacagatccatccgttgttcgtcaccgattcggaccgttcgtactgtgcccaatgtgtttatatggacgccaatttggtggatgacctcgaaagggtggatgatactgtaataggacaatacg

SEQ ID NO: 60145 - DNA, 390 bp, Heterodera glycines
atggagcggcataagcaacaacaacaacaacaacaagtaagggttggacaactgataaaagaaaatgcgcattggctctgtgcactggccagaacgaaatccgccaaaaaatgtaaaaagctgattcgaatggcaagcaccgaacagctgctctcacttgttgaaatttgtttgaatctcgtcgcttcgcgcttccgacttacaacccgacagaaaaagcgattaatgccccatgtgaacactgtacgccgaatgagcagagcgagaagtgagcggggcgccaggcgcgtgcttgtccagaaaggcgcaggatttggcggattgttcgctgctcttttaacacccgttttggttgaattggcaaagaatgttgtgagcaaaaatgcataa

SEQ ID NO: 60146 - DNA, 527 bp, Heterodera glycines
atggactcggaagaagtgacaaaagaactgaatgaactgcacatgatgatcagtggcgaggaggaaaagttgaggaactacaaaattgaggtggacaggaaaacaaaacgagtgacaaagggtgactcactgaatgaaaaagagggagttgggataaatttcaaaacttatacaattttcgttaaaaaataaaatcaagacaactccgtttccattttctccagtggcaccttcagatcacaaatttacttagattctcctccccccccccacatatgattttgattgatcatttcccttttcatcaggttaatcggcgccggcacaattacatgccatttcttgtcaagctgttgaaatgcctggcccgtgaaggcaaacttgtgccacttgttaccgaagcagtgcaaaagaagaaaattgaggaatcgaagaagaaggattctgccgagtcggcataaacatctaattttttgatggtgcaattagttaatgtataatgtttggatgcttttatatgtaataaa

SEQ ID NO: 60147 - DNA, 130 bp, Heterodera glycines
agaacaaggagagtattttactgacgagtattatacatactgtacatacagagtacatataagaacatacattccattgtacaaatacatacgcataaccgaacaatgggatacaaatatgatcacaaca

SEQ ID NO: 60148 - DNA, 1407 bp, Heterodera glycines
aacttcttctcgactcggtttacgctttgcttctgatgagtcagttgaacttcaaaagtgattctttcgatgcgcaaatttacgagggacgaattatgggcccatttttaataaaggaattgcaaaattacattaaaatgctgaacgaagctccccttttggatacttcaacaaatgtcagaaataaactcataaaattgatcattgaaatatcaaatgatttttttgcgaacataaaaagggaaaacgatttttgttttatttctcaacggacggacgtttgtcggctcattagaacaattaattacgttgagcaattaattaagcgaatgaaagacaaaaagttggccagaaatttaaaaatgcgaacgattgatgaatggtggccaagcgaatgcgaaacggaaaacgaaattcaaaaggcatttgcgcagcagaaagtgcgcatgcgaccagtccattttgactatttgaagaggattttggcggaagaagtgtatgtgagctcatttaacgagctcaaaggggcgaaggcgcggattcggaaattgctaagcgacgaaagtgccaaagggacgacggcagaagagagggcaaacgccgaccaaatcatggcaatgttcagaactcaaagatactttgaaagaggtcattaacattaaaaaagccagtaaattgggaattaatctttgtccaatttaagcatttttctatgcgccggtggtcgaattttatgaggtcgctttgtttgatggaaatgccgaaaaacggtgtgccgaatggctaaagttagacatcattttttgggtcacaattgtggagacaattatattaaaggaggaaaaagagagagaggaagaagaaaaagtgcaaaatgagcagcaaaaagaggcgggaggggaaaatgaagtgccaattaaacaatattttgaagaaacatttagtgaattttgggaaacgcaaaaatatttattttttgaattgtatgaccaaatgttcgaaagcgatctgaacgaaacgccaatgaaactggaggaatttttaaaattgatgcagaaatttatgaagtttggaaggataaaaggaactttttcatttataaatttacgttttgaaacattaaaaacattaattatttcaaatgaagcgctgaaaattaaattaatgaaaggttaataaatataatggattaaaaaaatataattaattaattaattaaggattgggaactgagcaattgataaaaacatttggaaatgaaagaacggatgaaattttacgaatttgtaaaagagaaaacgaagcaaaagaagagcaatgggtggaagaagaaaaaggaaaagcaacaaaaaagaaaaacagaaagaaaaaaataaaacagaaaaaggaaaacgaagcgggaaaaga

SEQ ID NO: 60149 - DNA, 656 bp, Heterodera glycines
  unsure (1)..(656): unsure at all n locations
atggctcttgttcgatttgaagaagcgaaatccaaccgtggcaaaattctcctttctcgtcttgtgttcgaatatgcttatgagagcgactctcgaatcgagcaaggctgggaatactggaaatgcccaaaacgtcccccttactgtcctgggcgagcttgtgttcaaatggcgtggcacgtcgatgcaaatggaagtcgttacaagatgggtcgcatgtcagccgggggagtttgagaggaatgggagcagcccccgngcaggagtggcggaagggcgcataaacgcattttcataattcactggcaccaaattgagttttgtccaatttgtacaaaacaccaaatttgattttgacaggaagagcttggccgcttagaggccttttgagtatctttccgccgccgcttcggaaggattcattcgcttggcctttccgcggccgatcattggctgccctttcccctcacttttcactcctttaagcaattcttttgaggaattaaagccggccactttgcccgacttttcccaatacaatcactacgcttccgccgccaatttgcgaccgattctcgatgggcacaacgttttatcagctgctacgacggcggtcaattgtgggctgggacaagcgatcaatggacatacattgg

SEQ ID NO: 60150 - DNA, 326 bp, Heterodera glycines
atgggacggaaacggaaggggcggagaagtccaaacgcagcgattgcaattctcatcctttccgcactttcttttcccagtggaagtgaaaaggttggacagccaatggcatggctaatttggctaagcaaattgtcctccagacaaatggacgacacaaaacggggaagcctcggcccacgtccgttgaggttcggaagacggtgaacgaagcgaaaagtggagaaaggagaagcgaatgcgagaggaaagacgacgaacgggcaaatggcaacaaaagagccaatttggcacttgcaaatgaatgtcatttcgaatggtccact

SEQ ID NO: 60151 - DNA, 849 bp, Heterodera glycines
atgccgttgtccaatttggccaaagtgctcggcccgactgtggtgggcaccaactcgcggctgcagaccatgcaggacaaacagcagcaacaggggaccgcgtacatgacggaggccaccaatcagatccaaatcatgcaggcactgctcaacatggaccatgtgaggcttttttatggggagggggaatacattaataaatagttggaggtcaatcaaacctttgtcaaggtggtcgagccatttaaattgggggcgcattatttccccccctccccgtcgtttccctccacgagaaaattaaaaaacaattttttcagcttagaaattctccataaaatttttcgaacggcatttatgctatggggctgaaaagtggaatttcacaactgaaaaagttgaaattgtttttttttcttccaaggcctattggacagaaatgtacgatggtccggcccagctgggcagtggggaagtgccggtgccgaaacagcagtggcagacaacgccgacctccagccgagggggccgagaagggggacacctggtgcagtcaattgtcagatgaatggggcgacataagacagaagaggagggggggggggcagagacaggaaagtgggaggcgaccgtattgtaaaaacagagaatggaatggcctataacttaacccctcaatccgatccatgactgtgtaaattcctcaaaatttaaattcaatttcctcgtaattctttttcctatggctttacacacatttcatcactttttgcttgctcgattctgctgacatctctttatttatttctttgttctttttgtacatgcgcattttaactggcaaataaa

SEQ ID NO: 60152 - DNA, 300 bp, Heterodera glycines
ataaatatacacttatgggttggcatatgcataagagtgcaccttcataaatatatacataggagaggcacatgcgtaaaacgtgcatattcacaaaatctatacatatgaaatggcatatgctgcataaaaatgtatattcataaatatacacttatgggatggtatatgcataagagtgcatcttcataaatatatacagaggagaggcacatgcgtaaaacgtgcatattcacaaaatctatacatatgaaatggcatatgctgcataaaaatgcatattcataaatataaataata

SEQ ID NO: 60153 - DNA, 384 bp, Heterodera glycines
  unsure (1)..(384): unsure at all n locations
atgacttgcgcatacgctaaactccttggtccgtgtttcaagacgggtcgaacagatgaccggcttttacaccgagaacgcacaactgagagcccgagctggaccgaactggttgctggtacgtgtcgcacgcgaccgccaccgacccncagctcgagtcaacacggacccgaaaccattgcacaattcacccagagtaaacagcactcccccgatccgggtaccagaccccgaaaggctggcctcaagaccgagctcacgcagctactccgagcatctcagcgcactccgcctgcaaatgccccattcgccactgaacagaaagaaggacagcaaaccccagtctggaggctagcagcccaacgtacagcaacaaacgggtga

SEQ ID NO: 60154 - DNA, 826 bp, Heterodera glycines
cataaaatgcactgcttgtgcgttgcttcgtgggatcatgtacttgtacgtgttcttacgttacttgctcggctcggctgtggggttttggtgtgcaggcgcgaacttgtggttctaattcgcgttttacggaccgtaactcgggcgcaccaatgcttcgcatgctgtggcggagtgcctggattactggcattcctgctttgatttttcgacctgaactcagacgtgaacacccgctgaacttaagcatatcagtaagcggaggaaaagaaactaacgaggattcccgtactaacggcgagtgaactgggaagagtccagcgctgaatcgcagctcctctagggttgcgaggtgtagcgtatagaccgtgagcttgggttggcccgcttgttcaagtttcccttgaccggggctccagagaaggtgcaagacctgtccaactggcggtgcctacccatctttacgtgtcttggagtcgggttgtttgggatcgcagcccaaatcaggtggtaaacttcatctaagactaaatacggccaagagtccgatagcgaacaagtaccgtgtgggaaagttgcaaagcactttgaagagagagttaaagaggacgtgaaaccgatgaggtggaaacggacagagctggcgtatctggtctgcattcacccgtttgttgctgtacgttgggctgctagcctccagactggggtttgctgtccttctttctgttcagtggcgaatggggcatttgcaggcggagtgcgctgagatgctcggagtagctgcgtgagctcggtcttgaggccagcctttcggggtctggtaccc

SEQ ID NO: 60155 - DNA, 70 bp, Heterodera glycines
gtcagaatcccgctagggcaagatagcaatattcttgctccccggtgtcgggaggcactacttatgcgcc

SEQ ID NO: 60156 - DNA, 540 bp, Heterodera glycines
atgctgaagcaatacaaaaacttcattgctgaaacaaaaatgccaccaactggtggtgggagaccgactgagcggaagcctttttttgatctttttgatcaatttatggcggaggacacgcgaattgttggcatcattggcgaaaaccctattgaactaggttaaatctcaatcaattgacatttttctaatttataaattggcataggggaacgccccaaatcatctcctgcaattatcgactcaagcttttgctccggatcggagacttattctgctgctgctgttccgccatcatttacagatttgacaccgattcgtcatcaatcgggcggcgtgatcagtagcaaaaaacgaaaattttctactgcttctgctgctgctgattacatgtctgccgaaagaaaagaaattgtggaaatatttccagcagcatcatcaacagcaactgcacgcgatttacagattaaagtgcttgaaaaagaaagtgccaaactggatttggaaatggagaagcttaagcttgaaatccgtggttaa

SEQ ID NO: 60157 - DNA, 270 bp, Heterodera glycines
atgattattttatcaacaaaactgctcacgttgcccgtcctcctctcaattttactttgcattgccaaagggcaaagcgtggaagaattgtgtgaaaagcatgaaaatgagttcaatgagttattcgtcgagaagaaaggtggtgccgtaccagaagtcttatgggaggaaagccttgaaaagaaagaggacaaagaggaggagaaggaaagactggaggagcaaaagaagacggagaaggcgaaggaaaaggatgcgaatgccaaaaat

SEQ ID NO: 60158 - DNA, 1130 bp, Heterodera glycines
atggatgacgtgttggacaaatatgcggcttatgtgatcgacggagtgatcaacaatcagtcgtccgtgaagggcgagcagtccacggagattaacagaaacagtgtcaacaaatccatgatgaacaccatgttcatgtgcttcaaaatgaagctgtacgccaagctgagggaggactatggaaatgagaggataaaagtgaggagagtatcataaaatatttttaaatatataaaattctgctgtttgaatttatttgtttttgtttttttgattaattataaattattccattaaaatttcataattttttaacaatccaagtcaaagttcgaaaaatgtttagaagctattattagtacctaatttttttatcgcttaaacaatattttgaaaaaaatgtgagaataggaaaatttattaatttgaatgttattgcaatttaattgaatttaatttgtaaactttttcaattaaattttaatattaaatttattcgcactaaaattgaagaaatttctgacaatctaagtcaatttaaattgttatcagcatcaatttttcacttaaaaatatttaaatgcttttttaatgaaaatttcgaattaaaacgaatatttgaattttaataaaattttcatttttttcgtcgggattaagtctcccgattagttactcccgtttattaatctgatcaaaatcgaattttggtccaggtcccgagtcatctgctgtttcggcatttcccgggtttccctaaaaattcccgcttccgaccaactctatttcagcaatgtttctcctcatttaaggtaattcggctacacgagttacaatttgtggtgctgaacaacgtatttgaggggatcaatgaggacaatttgctgaagtttgacatcaaaggcgttttttcgctggcctatgccgtccagtacacccgcaaacagtgtagaggagagaagggttggcaaaagtgtatttatcgggaattcgactttttcggtttgtcccgtggtggagttgaggtcgccgcctttttcccggagggtattcaattgtctgctgaagcgtatggacaattggccgacagagtgaagcgagatgcgcgcgtatgcactagaaattcttaa

SEQ ID NO: 60159 - DNA, 714 bp, Heterodera glycines
  unsure (1)..(714): unsure at all n locations
atggcaaaggcgacgaaagcccggctggccaagaaaagtgagttttttcaccaatttttaattcaaaaataatttttttaaatttcagccgctccaccgccgaaccccaatgccgaaacgccacagcaagacgaagtagggccgtcaacatctgctgcaccggccgaagaagcgatggagccgccgccaccaactccaggaccagtgccaacgccagaaatggacgaggaaattttggaatttggcgattcgctgccgtcgacatcagcgacgccaatcggcgatttggtgccgttcccgtcgacacccactgcaccaatggacactggagagatgacaccgccaccagtggccatcgacgagcgatcaccgcgcatcgaacagctggaaaaacaactgaaggaccgggatgacaccattcaatttctgcgcgagcaggtccgaaaccgagaagcgctgatcagtgatctgcgtcgtcagctggagcaatgtgcggcaccaccaacggcgacaccaaccaccagcaaaagtgagtgaaatttcgatgccttctcttttcccaattaattttctcaaaaattgatcattcattttttgtcaattttagcaacgccaaacagaggaagaccaaggaaggccatcgacgaactccaacgcagctcgcgaaagcaaaattcaaaacttttcaaaagtgttttatccganttttattga

SEQ ID NO: 60160 - DNA, 72 bp, Heterodera glycines
tagagaaaaaaagataatgtttttctctggcactctctatttattggtacacatctcgttttttgaaacggt

SEQ ID NO: 60161 - DNA, 501 bp, Heterodera glycines
atgttcgccaccttcgccagccttctcaccgagtcattcatgcttttctttggcatcgccgaatggcttattttcgcccgactttggcgcttcaacgagcaaaggtacaaactgagcatcgcaaagagtgagcacaatctctcggaaaggtttcaggtaagaaaaaaagggggggggggaaattaaaaaatgaaaataattggggaaattggcattttatgcaaaaaataatttgcgaattcgttttaataatttaattttcagttgtccgaaaacattcggacgggcaaacagctgacgccaactttgtccttccatttttggatgctttttgccagtgttgtcactgctttttggagctatttcgactttccccgattcgaccaaatttacttggccataaatgttgcgaatggcgtcaccggactgatcatcgaaacactgatgatcacgtgggtctctcttaagtcatggtttggcccaccatttcattttgcttga

SEQ ID NO: 60162 - DNA, 2219 bp, Heterodera glycines
acttttccatttaattcctttttactttttgcaaatttacatattaaaattcgttcatttttcattgatacgatgttaatttgtcgtttttcagttttattttcaaattgatttctccgtccgaccgatctctgtgttttattgcgcacttttttttgatggacatatagtttatactttacatatattttagaaaaagttaatttttgatttaattgatcttttttcacctttagatcgtacaaaatgcttaatgcgatcgatgccattgttttatttgcaattagtgaaaaagtgccaaaagtgctttgataatttcctcttttctcgcttccttttttgtttgaattatttaattactaaataaataatattctttttttttaatttatttatttccttttgctttttttattgtgctgtttacggcctcctcctcttccatttgatcaaattctgatttttcatagtttaattttgttttatgggtaaaacgatcattcgcaaataataattaattaccaattcgttgccacgagttcattttgttaaagtttttatttccgtttatgggagttgagagagagaaagagcagtaaataccgcaatttcccgcccattcattcattaatttgttcgccctccaataacaaattaaatatttaaatttggcaattcttgtttaattaattattttgtttttaattggtggtgataaaccgtattaataaaaaaggaatactcttttaaatgagcaaaagtcccaaaaacaattctcgtgaaaattgttggcaattggcggcgacaattttcggcgctttgcttcaactttttcttgtcgcaattccaaaagtaatctcaattaaattttgttgccatttaaatgtttgtgaaggatttcatccgattggtccgttggtggaaaaaaaaggtgaaaggacaaacggtggtaatacaggcggagggtcgggaattgtaagaaaataaaaaaataaatgaaaaataatgaaaatggaagggccagcgaattgcggaacttttggccgacccgcggactttcggtgccaaagttgcgataattgacattaatttggtaagggaaaacaatcgaaattcattattaacacgaccatgaaaatatttaaaacataaaaaaatttaaaagagtaaaatgccttaaaatttaggaaagcgcaaaaaaagtaactgaaaaaatatgcgaaaacggcggcgtggcaaaagcgtaaatttaaaattgaagaataatttaaaacataatacctaaacattgaaagatggaaatgcgatatttcggacgcaaacgaaattcggcgctgtgccgcagaaatacaaaaaaattttggtaaaaaattgtgaaattttgtttaaattattatcattttttttactattttggatttgaaaagattaggctgaatgataatgataataataatcattagctaaaaggtcgcgtggacattgttctgtgcagcgcggcattgctttacgttgtgcccattttggagctgaacgacgcggacattcagcgatcgatggatgtaaatgcgatgggcaccattaatgtgagcactgatcaaccggttaatcagtgatgtattttgacttttaaattctcggggtagtcccggccccgctttaaattgtcctttttcccttttccaatttggcattttccattctcttcccaattgctaatggctttttgtcagacaattcgcgtctttttgcccgaaatggaagcccggggcaaagggcacattgtcgcgatgggctcaatcgcctcacattttggcgaagtgttccaaatggcgtacaggtggtcaatgggcaaagatgaaaagtatttttgtaattagagatatatttttttaatattttaaaaaataattttgtgtcagtccaacaaaatttgcggtgcgtggcgccatggaatgccttcgggtggagctgagggaacgcgggctggaggacattctctgcacgaccatttacccattttatgttcgcactccgatggtcacttcaaagggactccgtccggtggcacggtgacaaaaaaaaagcaaaaaaaaaatgccattgtcaatgtcaaatgccatacaattaatcagttggttgccctttctgacggttgaagagtgtgccaaaagtgtcgtggacgcaattttgaaggagaaagtgaacgcgtgcattcc

SEQ ID NO: 60163 - DNA, 45 bp, Heterodera glycines
atggcaatggcactgggagaatcgggcattgcccgtgacgggggc

SEQ ID NO: 60164 - DNA, 564 bp, Heterodera glycines
atggcattggccgacgaatgcaaagggaacggcgccgtcgacggacaatggcaatccgacggagcattggacaagaaggtgagcaaaattgggcagacgaagaccaaccttttgccaattggttactgtacgataaattactgtactttcatttacataataccatttccatttccttatttcatttttatccccttttcagtttgtccgtcctcctcaaaatcgccaaattcgtcccgtgccacgcctttggatagcgaaaagtcactttcactggaggaaatgcgcgaattgaacagattggtgagtgttttgtaaattttttacaaaggcactaactcaaatttgactaattacctaattaattaattaccttcccttaggccactcttttgcccccgtcgttgcgcgtcctcaacccccagtcaaatgcggcccaattggtgatgaatgcgtcccattacattgccctgttgaccgccacggtgttcgcccgtgtcagcaacggcacattgccccggggcatgccaaacgaatttattaattattacattagtgaataaa

SEQ ID NO: 60165 - DNA, 105 bp, Heterodera glycines
atgaaagcgattacgacaaaagcggcaagtacattaatgccagagtgctcaaagtcaacaacaaatcctgaacaactactgatgaagaaggacaccgtcgatagg

SEQ ID NO: 60166 - DNA, 733 bp, Heterodera glycines
atgtccattgagcatgcagaaaaagtggtcgcggaatgcaaaggggcagcggatgagaagcttcaggaggacaaactgaagggacttcgagtcagtccgaacggaaaacaattaaatgaaattatcgaactgattgactgtttaattaaactaattaaaattcaaggaatctctccgtctctaccaagaagagaaggaactcattgacaatgcaactgcggacgattccaatggaccaactgttataacggcggagaatgtgaagaagttcttcgatgagctgtgcgaattgcccttttttggtgccgacattcgacaaatgttcgagacaaagcaaaaggcgcggcatgaactttacacagaatactcagaaaagaaaactggtggaattacgtataaagcgaccagaaatggaaaaggtgaagccgaaacagcgaaaattgattggatattctgttttaaaaagggaacaacttttggatgagatacctcacaccttctaaatatccgcaattatgataatcctcttaatgaaacaacctacaaaatcataaatttcatcattctcaacttttacgcctgacaaggcataacaaacccggtgcacactccaaaacgtcgtcggccgaaacgtcgtcatgccaaaaagcgctgaaaaatcccgaaaaatttactaacttagaaagaaagttttttaaaagaattctatgaaaaaagtctcgagaaaattaaa

SEQ ID NO: 60167 - DNA, 692 bp, Heterodera glycines
atttgctgttgtgttcaggcggttgctgccgccagacaaaagtttccgcgttgggcgttcgaatatacggccaaagaacggggcgccattttgcgcaaatggtgcgaattgctcggcgaaagggaaaagcaattggccgaactactgaccagggaacaggttcagtgagaagacaaataaaacccaatccagtgttaaaagacgacaaaaaatatagttgctattttcaaccacaaatgtcagagttgtgggtctgggagtgatagaattttgaaaaatgatggaatttggactcttttggtgttgccaaaatgcgctggcattatttttataaattgagagccctcggcctttgttattttcatgttttgccgtactcatatcgcttcgcactgttcacagggtaagccgttggccgagtcgcgtggcgaaatccaatacgccgcctcctacttggattggtacgcggccgaggcgcggcgctgctatggccaagtggtgcccgcgtcgaaaccgttccgttctcacgtccatttgcgtgagccgtgcggcgtctgtcttctgatcactccgtggaattttccggcggcgatgattattcgcaaagcggcggccgcgctggcagtcggctgtacggtggtggtgaaaccggcggaggacactccgctgacggcactcgcacttgcgcaggt

SEQ ID NO: 60168 - DNA, 1739 bp, Heterodera glycines
atgagagtggagaatttggtgatgatgctccccatctatgagaagctttttgaacgactgcgcaactttttggtggcacagcgaaacgcagcgaatgcaaacgtgttgaaagacgggtggcaaaaggcgaagagaaaggcggaaagtgacgcggcgaaaagcttcgacacggagcggaaaatgatcagaataacggtgccagaatgggttagggacagacacgagcggaagttcaggcaaatgctgggcatggccgaaacaccgacggaagacgggggcaaaagcgaattggaaacgatgggaaagcagcagcagaccgatcagaaacagttcagagagacactgagaatgggtaagacaacggagaaaagaagcagacagtgcgaagcactgatcaatcgatcggatggatcaatgggaaaaacactcctaatttaggactgaaaaaatcaactgatgctcgactgcgtttatggtactttctgagaatggaaacggtaaaagaaatattcaaatcgatcgaaatggaatttaatgagaaggaatttcaatttaatgaaaaaaagcaaaaaagcgaagctgagggaatggaaaagaaagagaaaaggaaagagagaaacaggaagaaaaatagaggagagggaaaaggagggaaaagagccaaagacagcgaggaaaaggaagaaaagaaggaaaaagaagaggaaaaggaagaaaagaaggaaaaagaagaaaagaaaggaaatggagaggaaaagagaagagacgaagaggaaaaggaagaggaggaagaaaaaagagaaaaaggagaggaaaaggaagaaaaaataaataatattaaaatggacacagaaataggagagaattatgacacaggggagaacgagagaaaggaggaagaagaaaaggaaaagaaccaaaggaaggaaagggggaataatgaagtgaaaaaagagtcaaaagaaggaacaaaaagaaaggcaaaaagagaaaagggaggaaaagagcaaaagacaaaagggaaaggaaaaagtgaggagaaaaaggaagaaatgagagaaaaaagagagattggaataaaaggttagagaaggggcgattggagtttaatgagcatttataaatgtgtaatttaagagttgcaatcggacgaatttatttcacaaaaatatttggaattcgtttcaaaatctgtgggcgaatggccaaccaattccaaaatacttctcgagttaagtgtttacgctaatgaaatttggcaacgaattgaagcgttgaaagaaattgggaaggaatttcaatttgaatttgggaaaaaagtggaaaatttggcgaataaatgggaaaaagcggaggaagaaaaagtgggaattgaccaacagaaggaaaattggaagaaaataggcaaaatgagggcatttttaaagcaattaatggccaatttgggaaatggagaaaatgttgaagaaaaaatcaacgaaacgggcgaaaaagagcaattaatgcaattacaacgaaacaagttcgcaaaaagtatgacgaaaaatgggaaaacggccgaaatttggcacattttgagcaaagagcgccaaattaacacattaagcgcaattttttggatggaagaagctaacaaaaggtgcaaagaagggaagaggaaggaatttgcgaaatatttggcacaatgggaaacggcggtggcacaattggaaatgggtgagaaaggggtggcattttga

SEQ ID NO: 60169 - DNA, 531 bp, Heterodera glycines
  unsure (1)..(531): unsure at all n locations
agcgctccacaagcagctctcaccactagtccacgcaccatccccgaaagaacagcacgcagccacgggcaaaagccgcctgtttcacgcaacagcccggctgacccgaccttnagagccaattcttttcccgaagttacgaatctaatttgccgacttcccttacctacattattctatcgactagaggctgttcaccttggagacctgctgcggatatcggtacgatcaggcaggagattcaaatagcttccctcgcattttcaagggccgtgtggagcgcacgagacaccacaggaaccgcggtgctttacgggcgcaacatccctatctcaggctgagccacttccaggcacgcacaccctaaaccagaaaagagaactctggctcggactccacacgacgtctgcgagttcatttgcgttaccgcgcaaaacagctcttgcgaaccgtcatttccctagcctggcgtgggaatgttaacccacttccctttcggcaaccggatggaccaactgcgcaagcacagaa

SEQ ID NO: 60170 - DNA, 190 bp, Heterodera glycines
cccgcttgttcagtttcccttgaccggggctccagcgattgtgcaagacctgtccaactggcggtgcctacccatctttacgtgtcttggagtcgggttgtttgggatcgcagcccaaatcaggtggtaaacttcatctaagactaaatacggccacgagtccgatagcgaacaagtaccgtgagggaaa

SEQ ID NO: 60171 - DNA, 1401 bp, Heterodera glycines
aaaatcgagaacgcctttggaacccggtgttcgagcagtatcgccaagaccatcaacagccctcctcgtcatctgcggcggcttcattcttatcacgcagagcaaacggtgcaaatgtacgttttgcaatgttttggtagttggaaacgcataaaatctcgttttgattacataatcaaattcggccccaaatgactttcagaatcgcattgacctgggcgaacagttcgccgttcggccatcggcccgtgcgccgttggcgcccttatcagtggttccactcaaccaaaacgatgccgacgaaaatgacgggaggccaacccattcgcatcatcgcaaaacattgcagactctgtttcgacccccggtcgaactgatgttccaaggcgattgggaccaggcgagaaaatgggacaggacttagaatttgagttaaataccgcggaatttttaaggccctccaagcggcgcgtcagaagggcgtttggctgctcgtcaatgttcaggaagcgtctgaatttgcgtgtgcggtgctcaaccgggacatttggagtgtggagactgtgcgcgaggtggtccgctccaacttcctcttttggcaggttgcgaatgcttctgctttttgggttcctcttcaaccattgtcaccccttaggtgtaccatgactcggccgacggcgctcggattcgtaattattacgggtaataataattggataaataaatttggcaacaatccatggaatgactttttggtgtttctttctcttccagcctctcctccttccccgctattttcatcgtcgacccgcgcaccggtgaggaagtgagcggtcgtctgaaggcttccgactccgtctctttcctcgattcgcgtaaactctcgcgcttcacttcatacccccatatttgttctaatcattttcttcagtcacttcgttcctcgaccagaacccgacctttgaggcgcgcgatcgtttcatcagagaacaaacatcggtacaaaatgccaattccaattcaaagttttaactgttcaactcccaaaaagtccactcttcctcccgaatttgtgcgcaccacttcgcctccctccccaaaaaatcgaaccgaaacaccgacgaaaaagcgcaaaaagccagtggacgacgaagaaaaagacatcgaaacggaagaagaagggcagcaagaaaaagtgaagacgaaaagggagagtaaagaggagagaatgatgaacatacaagcgaagaagatcaaacgggtgatgacaattagtggtcagtagaaaaagggcaaaacaaacaccgaatggcaaaggctaattgacaatgcctttttcagaccacgaggacctttccactcggcgccctttcgcttcatcacaatttgctgcgtcgaacg

SEQ ID NO: 60172 - DNA, 500 bp, Heterodera glycines
  unsure (1)..(500): unsure at all n locations
atgaagagatccgctgctactctctcggctgctgctgctgctgccgatccaaatcagtatgagaataaaactgaacccattccaactcatttggaagctgagccagatcatgagaagaaggngtcaccgccaccanaaagcgcgcggtgtaggaccgagatttgtgggaattagcgaaaagaaaatatttgcttactacatatctgtgcccaggtacaatagcaatagacaaaatattattttaatttaatatcttaagacgattggaaccgattgtaccaccatcagcagaaggtgaagcgcctggacgacgaccgcttttctgtgaactttgagctatgtcaggaatgcgtgcgggccaattgccgagccactgacttcattgcacccatgaagaaaaagtgaacagtgaatgaagcaaattttgatttatgaggcttcattattattaatttttaaaatcacttttcactatttcattttattttctcttaaataaa

SEQ ID NO: 60173 - DNA, 342 bp, Heterodera glycines
atggatgtgtcgctggcctccgtcgcgaaggacctcggcttcgacggccacgacctgaccgacatgttggccaaactgccggtcgaggagggcttcgagggcgacatggacccggacgaggacaccctgctcagtaattgcccacaacattgggtggctttccagtccaaagtgtccccatgcttagcagacatcaacaaggaggactcggacgaggcgccccccggcacaacgctgggccacagttgggccgacgtggaacagtttctgctcgagcaggaggagggtctgcaccaaccaactagtcatatctattcaaatccgatcgatactcaaaaatga

SEQ ID NO: 60174 - DNA, 334 bp, Heterodera glycines
atggctattgataagagtgcgcatcaaaagaaatttgtcggcactatttcggtggaaccatcagttaatggtaaaagaatactatgatgataataagtcttctataaaatgaccaaatcatttttcagctcaacgactccgacgcgaacagcagcagcaccagttgttggacggacagaacaccggcgaactcattcaacaaatcttcgacgaattaaatgcccagcacagttcaacaggtcgcattttggagagaaatgggcgtgcgttgttcagaattgccgaccatccggggacggagacgccgtgccatgtcccaaaagggcagcagtaa

SEQ ID NO: 60175 - DNA, 671 bp, Heterodera glycines
atgtcttctccaattgatgccattctcggacctaaggagaatgccgatcccgaagcgggagcaaaagcctcgaaaacgaagggctcgaataagcctaaagtctcaccggccaatatggccgagatccaaatggagctgggcaacgcaaaggaggaaatcctttccgccgttgcaaaatacattggcgaggctatgagtactgttaaccggggaatggaaggctttaccgcggccatcaaccaaatggctaatgtgctggatgaaaaccgagcgcgggaagaaatggaacaaatgtcgctcgatgacccggagttggaagcggtgagcgttgaggccagagaaaccgggaaagaacccgagagcccgactgagggggagaatgggcagggagaaacccacccgggaccgaaaggcatctcactgccgcaggagcaatccgcccgtgagcgggggcgaggcaccggccaggggcgcgcattcatcagagggcgtgggggacatggccgtgggaccgctactggggcagccgcccatgcgcgccattatttcaacatgcgccaaggacatcgagcgcaccaccagcaccacaaccaccgtcatcctgccccaggacattgccgatgccatgattgtcagccgccgaaccaccactttggacgccgcttccgtcc

SEQ ID NO: 60176 - DNA, 873 bp, Heterodera glycines
atgtttacaaaaccaccatatttgcgtgcaaacaaatttaatcttgacatggagcgaaaagaagaagcagcatctgcttctgctgttggtgatcatttgaaaattcttcgtgccgaatttgacaaaaagttggaagaatttgcgcagaaagccattgaactggtcaatgacaaagcgatggcgatgaaggaaggatttttcgaggtacaatggcaaggacatccattttttaaacatgaaaaattgtccaaaaatggcagccagggcataattgccaatgccaacaacaacaacaacaacaaagaaatggcggaggaggagaagccgaatgaagagccttcaaaaaaaggaattgactaattcattcattccccccccccaaaaaaatggattgagtgatttctgctgatagtttttcgggctttttggcaatgttaacagaagaaaaaaggcattttatgaatttcaaaaattgttccaatgatcattttgcatttcactgggcagttctgtccttatttttaaggacattaacgttgcgctttttctctgttaacaaaacccttgggattttctttggattttcattatcttttatcatttgcttctgtcttcggctgtccttgggcttttcttttttctgtccttgaattgtccttttcccctttgtcctttctttttgctatcttttcagtttgtcctattggagttctttttattttacgattatgcattttattatgtgtctgtgcataaactttttttttatttctcttgcataatttgaaaaaaatgattttattaggcaattttttaacatatatttttattacaaaaatacaaaattatatttaattttaggtttctaataaa

SEQ ID NO: 60177 - DNA, 511 bp, Heterodera glycines
atgccatcgacaaattctgccgcagcacgatatgaacgggcgatacgtcgttcacagtgtgccaaccgacaagcggacatctgtttgtccaaagcgatcgcagtagaggcacgcatcaagcgccgatcggctacccagctgcgcaaaaaagccttggcccgtctcaaaatggatctcggattggcgagagcagcgataaactccggcaacttctttttgaagaggaagaaaggcatcagcctttggcttttgccaaatggacgggtaaaatttttaatatttaattttatttattttacatttattaaattcagggccctctgagagcagccattgtggttcatcatggcccgccgttgccgccgcctccgccgccacctccgccgccgccctgtgacctgatggcggcactacaaattgtagcaccattggcggcgccgggtggcaagaaagggcaattagcgctctgcttccgctgccatgtcgaattgttcgacaagcagccggagaa

SEQ ID NO: 60178 - DNA, 93 bp, Heterodera glycines
atggggagcaaaaatccaacgcacaattatagtacaggctatagggaagctattcccgaaggattcggtctccccataaatctgggcgcatcg

SEQ ID NO: 60179 - DNA, 497 bp, Heterodera glycines
atggatgatttgttaaatgacatcgatgaagatcagcagcaaagcgaaagtgggagcagttcgcttccaccgcagtctgttaacacgatggcttggctggaacaaaacaaacagaaccaagcgcgggcattctccgagaatttgttgaaagatttgagcgctgtttcagagacgggcaaatgtatgggggggggggagctttttttgtatttcaaaagaatgagttttttgtgattaaaaattgcattggagttttttgtccttttttcttcaagctctaaaacagcaaaaatattctttttttggcaagggtgaccttcgttattgactgacaatgaggcgcattttatttatttttccctattttagctgctgaatttaacgtcaaagatgaaatggaaggcgaagcaggagacgaagaggagaatcagttcattcagaattgtcagcggattcgttcttaccaagtggcttccgagaagaattgcaaccacgag

SEQ ID NO: 60180 - DNA, 510 bp, Heterodera glycines
atggtgattagaagaggtacaatggtgattagaagaggtacaacagtgatcagaagaggtacaacagtgatcagaagaggtacaactgtgattagaagaggtacaactgtgattagaagaggtacaacagtaattagaagaggtacaaaagtgattagaagaggtacaaaagtgattagaagaggtacaaaagtgattagaagaggtacaaaagtgatcagaagaggtacaacagtgattagaagaggtacaacagtgatcagaagaggtacaacagtgatcaaaagaggtacaacagtgatcaaaagaggtacaacagtgattagaagaggtgcaacagtgattagaagaggtacaaccactgtcgaaaatgtacaataattgttggagaggtacaaaaattgttggaattgtacaacaatggttaaaaagggtacaatcatggttttaaaattaaataattaaggaaatcgtttattaaaaagtaagattaaaaattgaatgtaatta

SEQ ID NO: 60181 - DNA, 61 bp, Heterodera glycines
ggacccacgcgtttcggcgctcccgtttcggcgctcccgtttcggcgccagctcgtttttc

SEQ ID NO: 60182 - DNA, 117 bp, Heterodera glycines
atggccgctgattcctgcagtcaatcccccgaggagctcattttgaagacgcgaaagcgaaagatcattttgattagcaaggcacagagcaacacaataacgattcgagaaggcaaa

SEQ ID NO: 60183 - DNA, 900 bp, Heterodera glycines; identical to SEQ ID NO: 6063

SEQ ID NO: 60184 - DNA, 691 bp, Heterodera glycines
atggaagaaaagtttcgtcccgtcaattctcttttcgcgcccaccgtcgaccaaagtgtgttttatgagcagagcacttcccaaaacactgcaaaacctctcccgccaaataatgcgaattcctccgaaaagccgtcgactttgcccaacgacggagtcggacggacgccttcgccccctcaaatgccttcggatagaaagtgcagtcaaaataaatattcaaaaaaagtcattcaatcatttaagttgcttttcttcttccaaaacaaaatttgaacttccgaacgatgtgaacgagtcgaattcggattggacgaagaacatttcgaaaacagcagcgaatgaacacagccaaagaacgccgcgcgtcaattgggacggacaatcgctggcgcattacgacggaacgggcggaggggagggaaaggaacagacgacgaatggaagcaaaaacaatggaaaaacgaaggagaacagcagcaaaaagaaagtgggaaagatggaaggggagggacgggaaaagaacggagagttcattcagtacacttcacggaacaccggcacttacacggactcggaggaggaagaggcggacaacgaggaggaggaggacgcacggtcggacgtgactttgatggaccaaaatgggaggagggagggacagaacggcacgggagggcttcagcagaag

SEQ ID NO: 60185 - DNA, 162 bp, Heterodera glycines
atggtcatttcgtttctctaccaaaacccgtcttcctatgacgccgctgaagagataacgaacatgacatgggcacagtttgaccaccactgtgtacgcaacggggacaaccaagtcaacgcgcagagagagtgttcacagttgaaaggtttcggaaatggg

SEQ ID NO: 60186 - DNA, 918 bp, Heterodera glycines
atgaattttaaaaccgccgggggcctgggaaataaaattaacgaggcattcagccatcattacaaaatcaaaaaacaacgtggaaggagagaagccaaggctgaagataccaaagattcaaaaattgatgtcgcaaagagggccgcagcacgcgccgggagagacgtagaaagacattttaatcagatcaacaatatctcaaattccatccaaacccaactaaacacactacgagaaacaaatcctcacattttagaagagcctgatataaaaatttggtttgacaaaatggttgagatgggaaccgaaattcaaacatcccgaaatgaacttaagtcttttcaagaagaagtagataaagccaaaaacataacattggagcatgtggaaaagaatgacttgaaaaaagcaaagaaatcagccgacgtcgcaaagggaatcgccagacaggcaaagaccaaatatacatcaactctcgagggatataatgataaatcggaaaagggttttagcgggatagtgaataggcttaatgaggcgctcggtgagcatattaaacgtaaagatattgaaaatagacaagtatctgaagctgagaaaggaccacaaaaaagagagagattagccaatgaggatgttcaatttcaatatgacagtattgatcaaaaatttattgtctatctttccgctgctgtctcccatatagatttgtcaaaacacctcgcatatgttctagggtttaagaatacaaggctatttcacgcggaagaggcgacttatatgccggatttgacgggaggtgtaaggcagctatacatttatgcaccaaatttaatcgaaaacacaattatcggcaaccagatggccccactcttaagaatagttaacgtcgtcgatgacccaggatcgattagtgaa

SEQ ID NO: 60187 - DNA, 554 bp, Heterodera glycines
atgcttccaataaaaattattcttctaattttcttgatttgcacaccaaattctgctgaaaacattactgaaaatgccaaatctcgaaatgaacgagacctgaaacaacaattagcttatgcatgtaacggtttaatgtacaaaaacttatcttaatatctttttgttgcatttgttcatgaagcttttttaatgttttaatttctttattttgatagcttttgacaagttatatagcttcgtgattttttataaattctccaaaaccggaattaatagcggtcgaatactcatagaaataagaaaaaataaaaatataaatcttattcatttttttaaattataataaattataatatgtattaaagatatataaaaaattcatcatattttacatttacagtggtagcctaaaatacgtgttgagggttattgatttcatacgtggattttggcaatccaataattaaatttattattttattttatcaatcattgagcttttttgtggaacgacctagcaccgttctcgtcgagttaattaagataataaa

SEQ ID NO: 60188 - DNA, 72 bp, Heterodera glycines
atgatcgctgatctgcgcccgtcattggaggaaaagatggcaccaccgatggagacaccgaccccagcaaaa

SEQ ID NO: 60189 - DNA, 445 bp, Heterodera glycines
atggcggcaggagcttgctcaaaaaggcggttcgacgccaaaaagtgacgaaaattaaacaaattaattttattttaaaacactgcatttttcagggctaaagcagacgtaaccgtgccaacagcagatggagaggggacatcgacccaagccgccgaaagtgggtcatcaacgtcaactttggaccttcgtaagtcaaaaaaaaacaatattttagaagcaaaacttaaattaaggcccgcgttcaagcccaagtccattgtcagcgactccggtcaggcaccatgtgcgtgtccgtccaaaaactaccgacaaagcaacaaacatggactttacaactaccgacaatgcaacacacatggatttgacaacgatggacaaggcaactgacgtggacttggcatatgaggacgccgcgacacaaaccgagcagttggacaaatag

SEQ ID NO: 60190 - DNA, 1002 bp, Heterodera glycines
atgaacggggaggacgaagtgactgtccaagaatggactgagctcaaaattggcatcatgaaagaagcacttaaagccaagttttcggtgcctgatcttaaagatgtgctgttgagcactggatcggccataatttgcgaattatcacccgaccagttttggggggtgggttgtagaccaggactcatttatgacaaatggccaacagcggacatacaacagtggaacggttcgaacacactgggacgattgttgatgcaactcagagatgatgtgaaggaggcaacaccaaaaggtacaacacgggctgttcagccaaattatggatggccaaaaaatagggaagaaaattttcaaaatattcctgttgaggaagaggtattcgacttaaaaagtttcgaaaatctcgaaataacaagcacagacgaagctaaagataaaccaaaaaattcgacaaaagccaactcaatcagtgaactattgatgagccacgcagacgaagtggccgagacggaggaaaagacaaatgagaaatttgcattgtcagaaaggatgaaccagtggctcaaatatgcgggaataaattgtcaagtcctagtttttggttcctcattatgtcaattggctcgacacggttcggacttggaccttttcatctacaagttcgaccaaacatcagttcgtcttgctgacgaattgggaaaggttcgacaaattttaaggcaaaaatatccgcgaacagagatggaattgagagcgagaggaaacaccccggtattaaaaattaagttggaattccacgttgatttgacaattggacgatcagagaaattgaatggtgtctacaattctgtgtggctggccacgttggtccgaattaatgacctgttcaggtccgtctgcttattgattaaagaatggggaacggatatcaaccaaccggaatttggttcattcaatagcctgtccttggttattatggtgagaaggttacttcgctga

SEQ ID NO: 60191 - DNA, 5861 bp, Heterodera glycines
atgaaacttcagttggaattggaacgagtttgccgacaactcgagcattataatcaggatttgagttcacctcaaatttatatgagtctggaacagaaattgtccaaaaaggtgttgaccagatatgtagacttaaaaaacgtcaagctgagtgcaatgcctcatggttcggattggtcaaccaacctatttagggaaacatttaaagcggctgttgagcagcttaaacaaatcaatgacatagttcaaagggctaatcccgaacagactcatcacacatccaaaagagagaagcataagagtgaagaaaaggaatcaaccttaaacttggctatcagatacaaagaccaagagaaaaaggataatcgacaatcatcgggtgctgttaagccaaagccatggcgtgggacttcaacttcatcggaaggatcaagcttacgctcatcctcacaatcgagccgatacggacgatctccgggaagaaaacccggttcaccatggcccaatcaaagtcgaagaagagaatcaaattcatcaagcccaagcccgagtcaaagcagaagtccgtcgcgatttccatgccagttttgtgctgaaaaacacttcgctttagattgtgacaaatttagttcagttgtgaacaggcgaaaacaaatagaagcgaaagcaatgtgctacatttgcttattcaataatcatatggcaagaaattgtccaagaaaacttagaaaatgttttctttgtcaacgtaccggacatcacccggcattatgcgaaagacggaaatcagtggccagaggacaagtcgcaaccaccacaactgagaagcaagaaaacacatcaaccaatgtgtttgccatacaaagctgcatgaaaaatccaaaagaaatttggtctcttctcaaatgtgtgtgggtaatcattcgtcacccgatgtttccaaaacggaagaaaagagtccttgccttcctcgacgacggaagtgaaaaaacttacatcgctaaaattcttgttgaagaattgaacttaatgaaaatcaacgaagttcacttccaagcaaagggcttacagggaacaaagttgggagactttgtcacttcggttgtggaactgaatttgttaggaaagaattttaatatgaacattcaagcgcgacagctggataaagtgatgcccaaattgccccacgttaagataaagggcgctaaaattgacaagttattgtccaacaaacttcaagtacttccaaaatttgaagagccattattattaattggtggtgacgtttataaccacttggctgttaagccagtacagcaattggctaatggtttttggattagtgaatcgaagttgggcaatattctttcgggtgaaggaaaagttaagttatcaactaaagaactagccaataccgcttctacaacttcagtcgagaaaattgttgaattttcacccaaatttgggaacaagcttcaacccgacgacgatgaactcacttttatggttgaacaacacaacaaattggaaacgatcggcctgggagacgccaatgatagagacgacaatgccaaatggatccaaaattttgagcaaaacctgaattttaatggtgaaagatatgaagttcggctgagctggaaggaggaagtgacgagtttgccggataactattatctcgcactcggacgactgaagtcgaattttaaaaaattaagggagaaaccatgcttattaaagcaataccatgaaatcattcatgatcaattggaaaagggaatgatcgaacgagttgacagctccattaactattggaagttaaaaggaaccaaagaaagggacgaactcaatggcgtcctctattatcttccacatcattttgtagaaaggcaagacaaacaattcaccaaaattcgcgttgtgtttgatgcaagttcaaaattgagaaaagaatttccaagtctaaacgaatgtcttaacaagggaccaaatttatacaacgatttggcaggtatacttttaagggccagacttaagccagttttggtcacttgtgatgtagaaaaggcatttttgcaaatttctattcatcccgatgacagagacgcactgaggttcctttggtacgaaaatcctgaagatgaaaatagtccaattgtagaatacagattttcacgcgtcacttttggcgtaatttgtagtcctgctcatttatcaattgtattgaaacatcatttcgctaaatatcggcaaccacagatacgtctgatggaaaaggacacttatgtggacaacattgtacttggtattgaccaagacaaaacaattggacaaacataccggttgctaaaagcagtattccgagatgccggaatgaatgtccgcgaattcgtcagtaatgactggtctgagattgaaaaattaccagaaactgaccaagggaagaaggaagagacgaagttactcggagttgggtgggacttagaatctgacaaattaactgttaagttagcccgatttcctaaagaaggaaaaataactaggaggacaattttgtcccaaattgccaaatcatttgacccgttgggtattgtcagcccagtcatactgaaaggcaaattactccgccaatcggtcgaacaaaatggaaaattgaaatgggacacaatagttgacaaaaatctggcttcggtatggataaaactgatgaatagttgggatgcaaaaaccctttcatttacgagaaaatatttcgacgcaacagaagttcgcaactacgagctacacggtttttcggatgcgtccgaaacgggattgggatgcgctatttacatcagagccaacactaatgaaggagcacaaactcagttagcattcgccaaaagcctggtcgtaccgacacagctcagcaaagccagcagaacaattccgtcgcttgaattacacgcagcaaaaatttgttgcaacaatcttctctttgttaaaagagaattggaaaaagcaatcacaatcgacagtgttcatttatggacagattctacggacgtaattgattttttaaactcttctaaattaaaggatcgattcattcgaaatcgaacaaaattcattcaagataagatgattccagtatctcatgttgatggtaaatttaatcctgctgactatgccagccgagggtgttcaccggaagaactgatggagaataaatgctggttttacggtccaaattggctatataaagacaaatcagaatggcccaaaagcatcaaggaatatgatccgacggcaccgaatgaaaataaacaccaagactcattcatagaaatgagtttggtcactaaaagcagtgtaatggaacaagttgaattattgctcaattatgagcaattttcacaatttcgaagatgtcgaaatactttggcttatgtactaagagccgttcaaaatttcaaaaactcagcgaataaaattatcatttcagctgttaagccaagtaatgaggtcaaatcattcagtaagcaaataaatcctctaacgattgatgaagtcgaacgtgccgaagtccatttgtggaaagaagctcaaaaagcctttccgccatctaatgagacgatcttaaatctgaatcttttccaagagaacggaatttggagagcaaaggggcgtatgcaaaatagtggcatggaccattatgctattcatcctatatatttgaataaaaattgtccaattgtggatttaattatcatggacattcatcgagaaaggaaacatacaggaatggaaaatatggttgcttcattgagaagcaaattttggattccttcagtccgaagcaaagtgaactcagttctgagaatcaatccgaatactcgttgttggatctgcgcgcgttttcacgccaaagcttacgcatatcctgaagctcctccgctgccgtcatacaggataagtggcaatttaatttgggaaacaattggtttagattatttcggcccaatgactgttaagtcatcagacggacaaggcaaacataaagtttggggtgcgatattcgtatgtgctctcacgaggatgattcatttggaattagtcacggatatgactgcgaaaagatttttgttggccttcacgagatttgtcagacgatggaagattcctcagagaattgtgtccgacaatggcactaacttcgtgttaggcaacaaagccttaaccgaaattgttcaacaaagcattaaagagaaggagcattggctcaaagttttaaaggacgagaaagtgcagaatttttcgaatcaacaaaaaattgaatgggtttttatttcgccttttgccccttggagaggagggcaatatgagcgtatgattgggactgttaagtaccacttaaaaaggtgaaataagaaataaactcctcagttttgaggaattatggactttgttttcagaggtggagagaatagtcaatgagagaccaatcacttacacttcccaatctgaagttattcagcccctaagacctattgatctaattttacccaacattggtaacaatagattggaaataaacactagatctgttgagaacacatacaatgattatattttggaaaattcaaacactgctaatgtagtgcaaagataccagaaggcaatgaatatggctgaaaaattttggcaaaattggaaagattcctatttattgggtctaagggaacgtcatcaagggaacaaacacacgccaggaaaagcaccaaaacttggggacgtggtgatcatttctgaaccacaaactccaagaaattgttggaaattgaggaaaatagaagaaattttgtcacaacgaactgcgagagtcagaatttcggaaaaatcaattattgaacgtgctattaagcacttatatcccttagaattagccgaaaatgccaataattctgactctggcattagaaagcaggaacacagttctgtgaaacaaattcattataattgggcaaaggaacctcctcaaaataaggcgcttgttaaggcaaattccccaaatcactataaatgggcaaaacaaccaccgagagtgataaatggtataactaatgtgacatgtatttcagaaatggccagagacttcgatgccgtgtctcttgattgtgaagagatggaaagagatctcgaggacgaacacaaggaggaagaatcgaaggatgagagaaagggcatttcacaaattcctgttgaggaaaggcgcccctgggatggcgttggagaaaaaagggttattattaacgctcccatcgcattcgtcggggatgacgaagtggaaccaattggacggacattccaagacaacgggctccgtgccctagttctggtgcactcactcagggacattgcctggtggcatcggttaccagaggtcgtcatcattaatgatgtttgtcagatggtcgtcgtgcggacgacggaatgggccgagcacatcagaccatttttgagccttttgggaagatgggccaaaccggcggtctggattggtagtccaatacatgttgaaggcgtcgcctggctggaaccggcacagacagtagaacttgacatcaacagacttgtgtttatgggtgctccgcgaatcactcaaaggggaggaagtgcgctgtataagaagcgatgccaacaatcattttctgatgatcatagttcgggcgcaacaaagtcgaaaaggttccgtcctgttgaggaccaaccatcgcacagcgaatggactcaggcaattcgaccaatccgtcctgttgaggacttacagcaacatcagtccagctcaaatccacgtttccacccgccacagcagtttccgg

SEQ ID NO: 60192 - DNA, 436 bp, Heterodera glycines
cataaacacaagtctgttgatgtcaagttctactgtctgtgccggttccagccaggcgacgccttcaacatgtattggactaccaatccagaccgccggtttggcccatcttcccaaaaggctcaaaaatggtctgatgtgctcggcccattccgtcgtccgcacgacgaccatctgacaaacatcattaatgatgacgacctctggtaaccgatgccaccaggcaatgtccctgagtgagtgcaccagaactagggcacggagcccgttgtcttggaatgtccgtccaattggttccacttcgtcatccccgacgaatgcgatgggagcgttaataataacccttttttctccaacgccatcccaggggcgcctttcctcaacaggaatttgtgaaatgccctttctctcatccttcgattcttcctccttgtgt

SEQ ID NO: 60193 - DNA, 794 bp, Heterodera glycines
atgcacgaaactggcgttgaaactccgtttttgcatcgccttgaagcgcagacagctcttgattgtacaatacccttgctgcttttatttcatccacttgcgtttggatttcgtccgcaatctctttccactccctttgatcacaaatcaaattgtgtctctgttgggaggtcaacacccctagaggaaggatgggcaagggcttgtcgaggtataattcaatggcatatttggcagtctctattcgttcgacataaatgtccgacattgagagtcccttttaaaattttatacagattttatttaatttgactgaatagtcacgatttaattcgtaaaatttatcaaattggtaattcgggagccccttggttaatagtatgaattaaacaattatatggttaaataacaaattgtatgtgtattaattgaatgttcaaaataaaatttaaaaatttaaattttactccattggctttggcgaagtcttatatgtatggtggagttactgtagaatgaatgaaatatttaattgattagtcagaactgaataatcaacactccccccaaaaaggacaaataaaataaataagttcaaattcaaataaagaaattaagtacaatttaaaaataaaaatgaaatcttaataaattaatttcagatcaaaactgatttgaaagaaataatagaaaggaacagattgattgtttgggttagtgtattgtttcccaattactgtaccctgattttgaaatcaaactgatttgtggggaagatagaaaacaaaacaata

SEQ ID NO: 60194 - DNA, 554 bp, Heterodera glycines
ctaaaccaattgtttcccaaattaaattgccacttatcctgtatgacggcagcggaggagcttcaggatatgcgtaagctttggcgtgaaaacgcgcgcagatccaacaacgagtattcggattgattctcagaactgagttcactttgcttcggactgaaggaatccaaaatttgcttctcaatgaagcaaccatattttccattcctgtatgtttcctttctcgatgaatgtccatgataattaaatccacaattggacaatttttattcaaatatataggatgaatagcataatggtccatgccactattttgcatacgcccctttgctctccaaattccgttctcttggaaaagattcagatttaagatcgtctcattagatggcggaaaggctttttgagcttctttccacaaatggacttcggcacgttcgacttcatcaatcgttagaggatttatttgcttactgaatgatttgacctcattacttggcttaacagctgaaatgataattttattcgctgagtttttgaaattttgaacggctctt

SEQ ID NO: 60195 - DNA, 1192 bp, Heterodera glycines
atgtcggacatttatgtcgaacgaatagagactgccaaatatgccattgaattataccttgacaagcccttgcccatccttcctctaggggtgttgacctcccaacagagacacaatttgatttgtgatcaaagggagtggaaagagattgcggacgaaatccaaacgcaagtggatgaaataaaagcagcaagggtattgtacaatcaagagctgtctgcgcttcaaggcgatgcaaaaacggagtttcaacgccagtttcgtgcatcggtcaatgcaaacgatctgcaaaattttttgcgaagggcaaatcataaattggccgatacccgcacgctgaaagggaacattgatcgtcttcttcaagatgggcccggaggaacggcacgccgaaacattgccttgccaaaattaagcctgaaggagttcgatggcagtaattgggatgacttttggccattattcgaatcgacaatacatgctgatgccgatttggattacgtacaaaaaatgagttatttggattccctgttgaggggtgaagccaaaaaagtcattcaaggacttttgcccttttccagggataattatgatctctcggtgtccttattaaaggacaagtatgggaaaaatgaaaatttaatcagagatttacataatcaattggcccggctttcaaattcgaagtctcttggcgacgacatgaaacttcaattggaattggaacgagtttgccgacaactcgagcattacaaccaggacttgagttctcctcaaatttatatgagtttggaacagaaattgtccaaaaaggtgttgaccagatatgtagacttgaaaaacgtcaagcttagtgcaatgcctcatggttcggattggtcaaccgacctatttagggatacatttaaagcggctattgagcagcttaaacaaatcaatgacatagttcaaagggctaatcccgaacaaactcaacatacatacaagagagagaaacataagagtgaagtaaaagaatcgaccttaaatctggccgtcagatacaaagatcaagggaaaacagacgatcgccaaccatcggttgctgttaagccaaagccatggcgtggaacttcaacttcatcggaaggatcaagctcacgctcatcctccaaatccagccgatacggaagagccccaggaagaaaagccg

SEQ ID NO: 60196 - DNA, 127 bp, Heterodera glycines
cggtgattcagaattggaactcgcccgagcctttcgcacttcgtgccctttgtgcctcatcacaatctcagttcctgcgagtttgtatgcagtgttcagaggagatgaggcaaaatcgaattcacgc

SEQ ID NO: 60197 - DNA, 1108 bp, Heterodera glycines
ttggatttgcaacgacgtttggatggacattttccccagttttgaccgtcctcaactcggcctcaaattggcacttctttccccacgttttgatgcgttggtggacaaacatttcaatggcaaaagcgaattgacaatttggagacaaatcaaaattcgcaaggacaaaggaccaggaccgaagctgtctgtacgaatcgatgacaaaattgtgccatttccattgccggaccgtccgttgcccagcaaaatccgttttaagcgccttcggatgtggtaattaaaaatcagagctatcgcaataaaagcattcatcccattttcacagttacatcgatcactccgtcatcgcttttcttcgttcaaatcaccaaatttttgacaaaagaggcaccaatttatatttgtcgattccatcatcatactctacgaatggccagcagctgatttgggacatttttgttcgtgaaatttggccaattttttcggcaaatattcgccatttgcgcattaccaatggtgatgatttggaccatttgcttcgtcgcacttcgccgacaattctcactgatctcaatcagttggtttcaatccattcatttgatctgttgcccgctgcgtttggtgatggttttgatgggccaaattcaacaatttctgctggccaagcattgtccaaatggttgcactctccgagaaaagatggccaacccaagcgattgcgttgcggtaattacaacgaacaaacggacttagattggatcaacaatttcaaggaggtgtggccataatctcgacaaatcactgttttttgttttcaaattgtttagcattttctccgtgccaatgccatttcttccgtcagttacgaaattcatttttatgttcatgtgccgtcaatacaaatggtgccatttgatttggtgaacgaatgcacaaaggaaaagctgacattggccaaagcaaatgaaaatgaattggacaattggataatgaaacgatgcaaaattattggggagacggcagcggttcattgggaagacggaaattgggacaacaattgtaacaatgtgttcttttggcttttcggtaccactaattgcattgg

SEQ ID NO: 60198 - DNA, 1548 bp, Heterodera glycines
atgactggtcaaatgcaatgggatcgtcgcgtcccgcacttatccgtgttcgcttccgtaatcgtgaggccgcaattgcattctgtcagctgttcagggtgggcagggcgtttttctcttttgtttcgtcttttcctttttccccctcttctctacttctcttttattttctctcctccgtttcctttcctcttatcgcttcctttcacccgccctcttcctgtcttatcattctcttcccctctctcttactctttcttcttttccctcccctccactctctctcactcattttccccaaattttaggaacggcaaatatttctgcgtcaaaagagacagcagcaaccaaaggggcaggacgatgagtgcattgtgagacagcacgggacgggcattgattgtggggaccgtgaaacggatgcagggaacgaagaagaaaaagaggagggggacggacagcagacggactcctactcggacttgtccgacttggacgtgttcagcagctgcgatgaggacaccaacggtggccatgagaagacaccgccagtgacgagggaggaaacggcgaccaaagaacacggaaagaaggagggcggagagacgaagacggaaacggaagaaagtgttggtgaagagggacagcagcaaaagacggagagcaaagcgaaggcgacggaggagggagacaccaacaacaacaccaaagccagcaacagcggcatgaagcggaagaagatgcagtcgtcggcttcgcagcgtcaccgtcatggccactgcagcgaacgccgccagaaacacaagcagcacctgttggactcgctcatctgcggtgcgtttgcccaccgggacctgacgccgccggagttggcacttggctacgcactccgtcagcactgccgggtcagtcactttgttcgccaaatcctacaaaaaatattccttttataaatcttatatgaattttttggcgctattgcattttcatgaccataaatacacgactataaaataatttgacaactttaatgcaccatattttaacttcaaaaaactggctttctaaatatttttgactacaagtttttgaatcttggatcaattttgtgcattacagttctcaaattattttatggtcgtgtctttatggttggctaaactgcaatagagccaatttcctaacgaacctcacgagaatgagtttccatgccacttattaattcgatgcttgctttttcaaggagcagaatcgtgtcccaaactctcgtgtttttctgtacccgcgtgccggacgcattttcgaacgcaccgccgccgcggaggcaaaataatgaattggtcgtgtaagagagattattggactgatgactcgaaaataattcatttatttatttcttataatgttattattattgtgtgtgtgtgtcccgttaaggtttgtttgggacggattattatggcacttttgcctctgttattttattattattatttgtgttttaaacgtatctcatttcgttcctcgactctcgccattgctgcataa

SEQ ID NO: 60199 - DNA, 364 bp, Heterodera glycines
atggcgtcttgccatgactatttcgagagcccacattgcgaggcttgtgtaagtaagttctcatcggagctaatatttttaaatgaattttattcagtaattattttcaaaatagttcgacaatcattttgaattggcagtaattacattgccgtcgtgatttgtgacggtcggctttggcggaaaaaggctattatgttagtttctttttttttgtttataatttattgtatattttatgactactgtattttgttagttacctttttagaaaatatatattagtgtttaatcatattttacgataaaattaaatgttaatgtttctttcaagatttccaatccaaattgaaagtagtataaa

SEQ ID NO: 60200 - DNA, 855 bp, Heterodera glycines
atgtgccatggaaattggcgaaaagatttaaattcgacaaaatgctcaatgggtcaacaatcagtggcaaatgcggcgaaaatgccaggaaaattcaattttcacttcgcaacgcaacaatcattttcggaaaacaaaattacatattcgagtcagtgaaattagaaaaattaaatactactttatttggttgtaattttagagcatactgtaaatattgggttatcccataaatactgtcaacactaaaaatgaatcaaaacacatttatgtgtttgtgtgctcggatttcagggtctacatacgactttcataactcttaaatttgctaaaaattcaaaaaacgcctaaagaacatatcaaaagtgccaaattattgagaaacgtatagctttaaaatatcccagatatatcaataaaaacttaagacaaacaaaagttatgatatttattaaaaagggtgacaatatttatggacaatccaataaatctccaaaaaaggaatataattttattaatttacaaagaatttattatgctatattaattcattattacattaataaacatttttcattttttagtaattcgtacaaagacatttcttctccgtttcttaatatcgaattcaaatttatgatttcaggcgaatttttgacaattaataaaggtggtcgcgaaatttactaattttcaataaatttactaattttagcttcaccggtcacaaataaatggcacaaagaatttttcacgaattcaatgcttggaccatttttggaagaatatgccgaactttggctgttggctgcggacattgtgccaaagttgagccaaaaacgaaaaaccaaataa

SEQ ID NO: 60201 - DNA, 333 bp, Heterodera glycines
atgtctaaaataaagtccttagggtaattacaatccaatttatcaaatattttccagcagctcttcaggatatttatttctttttttgagatctgatctcctaaaatttttgcaccattacctgatatgaattttttaaattaattccatagaacactttattaattagcatagttattaaggttttgtgatagctaatgtcgtacaaattcaagtaaaaaaattttcggatgctttattcagataaaatattatataaggatttatccagtattaaagttggtaaataattgctatattttgcttacaagggtcctcacaacaaataataaa

SEQ ID NO: 60202 - DNA, 1168 bp, Heterodera glycines
atgaaccaaaacagcaatgcttcttacaccgctgcacccggtacggtcccccggtggattggatttaattaaattctctccttcggcaattttttttcattaggtcgactcgtcaaattttaaggtcacatttcttaggcttaaatggaagtaaaaattaccagctttaaatgacatacaatcgagattgtggaaagcttatatgacgttcgtcaaaaaccatcatgacaatattttaacaacacaaaatgaacttaacgtgttttctctaattatatgcacgtggtatattatttttcaacctcttcagaaaggttggagataattggagacggggagattaatggagatgggcttataataagtaaaaattcggtatgcctatttttaggcttaaatttaaaaaattcatcgaatttaactctttctatagttaataaaatcgcgccaaattttataagcataatcccgggtacaggactaacttaatctaaactatttcaacgcttattggttttaaaaaaaatactgggttttctattatattattttttcagaaagtgctctgaaacgcaccaaattttgttgtcatattaataagcattctaatgcatatattttagagaaggcttatgaattcgattaaaaaaaaatttatgaattattaaatatgcctatttttaggtttaaatttttagtgaaaattaattacaaataattatccgaaaaatgataagaagttcaacaaaattttttaaaggcatcaataagacaaggaaaagcttctctatgataattttatattttttatgaaattttaaatgatgcctttcattttaggcttataattttagtgaaaattttgtccctcataatttttcggtaaatgatcagaagggcaccaaactttgcaagcatactaaaaggaagagaatcaacccattatcaatttatcatcctattgaaattttctgaccataattttattataattttgtaaaaaaaatttaaaaaaaaattaatttctgtagagctattaaatgataccattaaatattaatttggctgaatttgagccaagttatgagtttatgtgttttacattttttaaaaatttactaccctttggcggcatttaagaaacgacccagcatggtttttaggacga

SEQ ID NO: 60203 - DNA, 164 bp, Heterodera glycines
tgaagattcaatggctatgatacctttcaatttgtttctgctcagcgccgtaatttttgcattcatttggattttcaattattttcttccattttttagcttttcttcacagcgaatgcatatgacttaatattaaagaatatttccgtggtaaaatacatttt

SEQ ID NO: 60204 - DNA, 718 bp, Heterodera glycines
gatggcgtctggtactaccgaaacgcgttcattccgatcaatttggagtgcaagcagccaccgccggcggagattgtcaaagagtggatggacaagtacggttccgcagcgccaaaatcgacaaagcaggccaaacaaaaagtggccacaccattgaaaaagtcgtcacacaaaccgaagttgtccagtgccgacaaggacagcgaaatgctcaagaggaagaggaagcatgagcaggtttttcaaaaagggtggtgaaattggggtttcgggatcagaaaattgttggcttcgggatccaatttttgaccgggaacccgcccgaagaataggggtgagcatctcatacaaatctttttgaactcgtattgatctattgcaatttacccgtccataaaaatttgtggattgaataattccacttccttaaagtaacattgaaaactgctatataaatgagtggaaaggtggacacagagagatcggtcaatgtttttaactgcctttttagatgctttccaattcttcaacttcatcatcatccacatccaaaccgttgcctgtctctgcacaaaaagtggtgtcgtcctcggcactgccaacgccgggtgcgccgtcgccaaacattcccaagcaaaaacagccggcaagaccctcctccgctccaacaccaaaaacggcactgtcctcaaatgctatcaacgaaactccaacaaag

SEQ ID NO: 60205 - DNA, 199 bp, Heterodera glycines
atgactgacataaggggaattcatacaacggaggtgtggcaagcatctcacgggcttataggaaaggaatattgtacaacacaaacaattggagaaagagggccactctcaacatataattatgatggagacaaaaatacggttaatttctgctggaaaatcgcttctcatccgattcgtcatcatccatttatccatt

SEQ ID NO: 60206 - DNA, 72 bp, Heterodera glycines
  unsure (1)..(72): unsure at all n locations
atgggtcgnttcatcacggcaccgaaccttttggctactttcaatcgttgcttaacttgccagatcggacgg

SEQ ID NO: 60207 - DNA, 3306 bp, Heterodera glycines
tacggattaaaaaaataaagaaaataaaaaaataacattatgtgatttcactaaatacaaattatttttccgaaccgacggcaaatttttaccacatcattatagcaataaattgtttcagcagtggtgtgttgaccaagctgcacgaattgaatgggaccgattgaattttattaaattacaccaaaaagaaatatgcaaagagttagtgaaattgacaaatttttatatgctaaagcaaccgaagttggcgcacaagttaaaaaaaagattattttgccttcaagttttagtggtggaccaaggaacatgcatgaaagcttcatggatgcaatggcaatagttaatgaagttgggcgcccagatttatttttaacttttacatgtaatcctaaggatgaagatatattaaaaagtatgatttctggccaacaagcgtttgatagaccggatattgtagcgcgagtctttcatttaaaagtttctcaatttcttcgagaaattatagatggtaaaatatttggaaaagttgcgggtttttgttatacaatagaatttcaaaaaagaggtctccctcacttgcatatgttactgactttagattcagcgaataaatggaaaaatacaaacgacattgatcaatttatttcagcagaagtacctaatgaaaatatagataaagaattatatgacttagtcaccgcattaatggttcacggtccatgtgggccagattttcccaatgcaatgtgttggtgtcaaaaaaagaaaaaatgttcaaaaaaatttccaaaacaatttcgcgaaaaaactgaaattaatgaaaatggttatcctttatataaaagaccaaatgatggtaaaacctttttaaaaaaggattggaaaacagggaagagcaagtcgatgactaatcaagacattgtaccatacaatcgttatttacttaagaggtttaagtcacacataaatgtagaaaaagtggctgatattaaagcagtaaaatatatttataaatatatatttaaaggatacgatgctgcaactttgcgttgtgtgacaactgaaaacggaaatgtaaaagaattattttatgatgaaactgggaactatttagatgctaggtatcttagtcctgttgaagcatgttggaaaattttcaaatttcctttacaagcgaaatcacattcggttcaaagattgccagtgcacttagaaaacgaacaaataattttttttgatgaaaatgatgatgacgaaacaataatagaaaaaagagataagaaaagtaaattaatggcttattttgattttactaatgaaaaccccggtatgtcggatattttatatacagaaatgccaaaattttgtacttggaactcaaaacaaggaaaatggttgttacgaaaaaatcctgaaattagtaaaacaataggtagaatgtatcctgttaatccaacagagggtgaaaaatattatcttcgatatcttttgcttcatgtttctggaaaaggttttgaagaccttaaaacgtttaatggtattatatataatacttttgcccaagcatgtttggcgagaggtttaattaaaaatgatgacgagtggaaacattgtttaaacgaagcgagtcatttcaaaattccaacagcgttaagaaatttgtttgcaagcatattggtatttggtgagccaaaacacccagaaaatttatgggagcaatttaaaaataatttagctgaggactttttcgttaataatacaataaatgctgcttataaattggcattatcctatatcaataaacatttaattcgagaaggcaaatctttagcggattttaaaaaattaccccaagattactcgattaatgacgatgaagaaaatattgattacgaagaagaaaagaaaactgcatataatttatataatttaatgaattccgaacaaaaatgcatttttgactcagtaaaacaagtaatacttggccaaataaaacaaaaattaatttatattgatggccctggtggtacggggaaatcgtttgttttaaatgctatttttcatttagttcgcagtcataaaaaacaaattaacaatatggcattttctggaattgccgcaattttattaaaaaaaggccgaacaatacataatagatttaaattccctcttaacattaatgcaaatgttgtttccggtgttgttcagggtacaaaagcagcagaagaaataattaaaagtgatttttttattatcgatgaagcgccaatgacaccaaaatttgcacttgatgctattgaaaaaaaaactacgtgaattaaccaaatgtaatcatttattcggcggaaaaacgataatattagccggtgattttagacaaacactgcccataaaaaaatttgctatacgaagtgaaattattgatcttacaataagaaaatctattttttggagcaaatttgaacaaatgaaattaacagtgaataatcgggctaaggatgaaatatttgctgaacaaatgcttgatataggcaatggaactttgggtgatttaattcagttaccctcagaatgtattttgtctgacgattcaaatttaacaaaggaaatttatggagacatttttgcaaagcataatttcaatgaattaaaaaatcgtatgatactttcgccttataatgatttagttgatcaccataatgcgttagctttagaaaattttcccggagaatatgttacttatctaagtattgacgaagtcgaaacaactcacaattttcccgttacacctgaaataatgaattcgttcaatgctccgggatttcccctccataaattgaaattaaaacaaaactgtaaggtaatgcttcttaggaatattagtatcgaagacggactttgtaatggaacaattttgcaagttttagaattaaaagataatttattgagatgtataatacttggcgatgataaagatggttcggaagtttatatacaccgaatatcattgataaccgaaaatgaatttcctgtgccgctaaaaaggcaccaatttccagtaaaattagcttttgcagcaacttttataaaaggacaaggtgcaacatacgaaaaaataggaattgattggactcgaccaagtttttctcatggccaaacttatgtagccttatcacgcgttggttcgtggcaacaaattaaaatcaaattaccggctgataacaaagatggtaaaattaacaatatagtttggagagaaattttataaatcccaacaaattatttaaaaaactaaaagtttta

SEQ ID NO: 60208 - DNA, 1673 bp, Heterodera glycines
atggtgcgcaaaaaacaaaagctaataactgacgattgtgctccaagcacttcaaatgatcagcgcacgaatgacgggttcaaagctcccggtcaaaaaagcggtcaattgattgaaacggttcaaagctccgtacaaaagcggtctgaaacaatacataattcgattgaattacaaagcaaagaaaaaagtacagaaagacgttgtttgaaaaggaaacgattgcaaatggaagaagttatagatttggatgatttgcctgatgaatttttctctcctagcatatcaaatgaaaaaattaaggaatacgatagaaatcgcaaaatatcccgctttcaaatgaatgaagaacagagaaaattagagagagagttgaatttaacagttgtgcaagcacgtagagaattgattaaaaaccaaggcttatatttaaaagcaggtgtttttgatatatcgaatgtagttttttataaactcggggaatttaatgttaagtgtattcattgtcccgctattcattttcctgaagagcaaagcaaaacaaaaggtaacaatgaatttttagattgttgcaattatggaaaattgaatattttagaagatatgatacaagaatatccaatggaattgagagttttatttcaaccagaaatcgattctaacaattacaccaaaataatcgaattccacaataatttttttaaaaaaatacgaattttaaattcttcattttcatgtgcatcgttgggttgtatgagatttgagtttcctgataaaaaaatacctatttttaaaatacaaggaagtgtttaccattcatataacacaattgcgcaacctgataataacgaattgccaacaaatggacagttatattttatagatacagatcaagcaatagattaccgattaaatgtttttcgagatcctggtggagatccaaaagatcaaactgttgcattaattgcttatatagaaaattatttacgtgaaaattatatttattcaaaatcttatgaaatgatgaaggatgtctatgaagaggcattagaagagtcaaaaaaaactggcgatgaaattcctgatgttcaaatgttgtttgatataagagaaggaactgatttaaggcgatataatatacctagatcaaacgaggtttgcgctattatttggagagacgctaatgacgatattccagctgcaaatatagttgtacatgctaagggaagtaaaaagttgaaacgatttttccacttagtccaatggttgaacccatgtgttacccgatattttatcccggtagttatcttggttggcactacggattaaaaaataaagaaaataaaaaaataacattatgtgatttcactaaatacaaattatttttccgaaccgacggcaaatttttaccacatcattatagcaataaattgtttcagcagtggtgtgttgaccaagctgcacgaattgaatgggaccgattgaattttattaaattacaccaaaaagaaatatgcaaagagtcttatagtgaaattgataaatttttatatgctaaagcaaccgaagttggcgcacaagttaaaaaaaagattattttgccttcaagttttagtggtggaccaaggaacatgcatgaaagcttcatggatgcaatggcaatagttaatgaa

SEQ ID NO: 60209 - DNA, 489 bp, Heterodera glycines
atggacgaaaaagtgaaatatagaaaatatggattatatagaacatatggacaaaaaaaagttgtcctagaagtttcaaacatggcgaaatatggaaaaaatatggacgaaaaagtgaaatatggaaaatatggattatatagaaaatatggacaaaaaaaagttgtcctagaagtttcaaaccaagctaaaaagactatttatatgcttattagcacgaaaaaagcatccagaaaaatatggaaatccatacaattacggtctctaaaaatgagcaataaaacacatacaaaaaaggaaaatttttttgctattagatcttctaaaaatatcaaaataaaggcgaaacgacaaaaaatcacctaagtacgggtcacacaataaaaaaatggtttatttgggtaaatttttcagattttttccctaaaaatggcgaaatatgggaaaaatatgaacgaaaaagtgaaatatggaaaatatggattataa

SEQ ID NO: 60210 - DNA, 948 bp, Heterodera glycines
atgaatcgacggtaagcaatcattaaaaaaatgtagcaaattttcatttcactattttttcatgtttcagttgggtgtgcaacgacgtgtggatggacattttcccatcgtttgaccacgctcaacttggcctcaaaatggcattgctttcgccacgttttgatgcgctggtggacaaacattttgacggcaaaacgcaatttacgatttggaaagcaattaaaattcgcaaggacaaagatgaaatgccaaaactttttgttgaaggaaaatcggagggatttccattgccggaccgtccgctgcccaacaaaatcatctttaagaagcttcggattgagtaaatccattaattctatacagagaccaatatattttttggttaatgcatctcgtacaataaaaatttacaaaaataatgcctaagccattgtacaagttgtcatgacacctatgttttaatacaactgattatatattcttcaaatttctccccttttcaggtacattgatcacttcgtcatcgaatttctccgttccaatcagcagttttgggacaaaggcaccacattgtatatcactgtttgggaaaaaaacgaagataacaaaccgatttgggatgtttttgtcgctgaaatatggccactttttgcgacaaacatttgccaattgtgctttgccggtgccgaatttttggactatttgcgtcgactcatttcgccaacaattctatccgatctcaatcgattggattcaatcatttcttgtcatctgttccccgatgtgcttgctgatgatgatgattttgatggaccaaatacgacttctgccggccaagcgttggccaaatggttgcacaatccgagaaaagatggccaaccaaagtcattgcattgctgggaattgaaggcatccacaaactttgaatggctcaccaatttcaaggag

SEQ ID NO: 60211 - DNA, 439 bp, Heterodera glycines
atgacaattccttcattggaagcaccggccttttattttaccaaggctttgtctcatcgtcaaaaggttatgcgtctgtataaacgcgcgattcgtgaaactcaatcctggcatgcgcaagacttgtaagttttgaatttgaagaaattgtgagattttagaaatttataatacttccgagttttttcgtttaggcttgagtgtcggttccgaatgtgcttaatgagggcacgatttgatgcaaatcgcgacgtcaacgatgtgcattgcaatccataaataacaaaacaattcactttttaagatgcgattggcacaatatcttcttgctgacggatgtcgccaactttggatgtaccgaaatgtttcccaaacaatgcgatgtatgtgaataataagtgcaacttggatttacttacaattattacaggatggatga

SEQ ID NO: 60212 - DNA, 603 bp, Heterodera glycines
atgctgttcaacgaagagctgaagatcagccgcaacttccaagtgtcattcgccaaagatgttgtcaaggcaagtgatcagaacgatttggctgctgatcagattgaattcctcaaccaaacattagggattggacagctaacaaaattaattttagcattttatacaatgacagtgtacgcattgattgaattcgcattaaattgggcaaatgttatcccattaaatgccattttaatcggtttggccacttttaagggccttttctttcttcactcctcaaacttgcgctgccatggctttttgtgcctccaaaattgtttggtggactcaaattggaacgtcaaattgacaaattttgtgacggaggaaataattggggacaaattgcgacacaacgaaatgaaacatatcagtgcaagtgaactgatcaaagagaagaaagccaaagaagcagccaaaaagatgaaaagcggcggcggagggacggcgaagggaacggcggcggacgcggaaggggcggacgaggtcgactcggaagcggcgggcgcaaagcggcgcaagcgacaggcggcggcggagcgcaaacgggtggagaactcg

SEQ ID NO: 60213 - DNA, 475 bp, Heterodera glycines
atgaacatttcggcaaaagcatataaattcagaggtgttgttagctgcttatttgaattaagcttttctaataattttttgaaaaaataatttttaaatttaaaattatttcccttttaatttgtttttttttccaaaaggcaatgagacggaaatcgtttggcgagctgttgattttcacggtgaattgaaacagtgtgtgacaaagcttgtcttcgaaggtggtacctcttctgacgatgccagtaagtgatttattattaaatttatttttttaatttaaatatttttataaattttagctgcgggacactcgtctaatgacaaagacattgaatgcccagaatggcaaattcgcgaagtgaatgtgagtgccgaatttggaggtgacccgctgacagacgaaccgccgttaattcgagctgaatatccgccaattttagcaaaaaatcgcagattattgaggcaaaaataa

SEQ ID NO: 60214 - DNA, 1061 bp, Heterodera glycines
atgataacaaacgcagcgcaattggcccaggcaaaatattggaaaggtttgattggcttaggagttggcatacgctaaaaaaatattagatttttgcgaaataactcaagaaaattagaacaatttcttggtactttcctattttatgtcagccagtaatttcgaattcaaattttcattttgggtttcctaatgcacatacatatgtccttggaaccggaaacggttgggccccaccatgtttttggctataacttttttctttgtcatccaaatccaaaattcttggtatcattcgaaagcttaacatgtttagaagctatttctaaggtattgcttagcgattagacaattaccaaaaaatttatagcatgaaaatagcaaaaaaggcaaaaattaaaaaaaattttcttaaaaacttttgttatgttaaaaatctttgagtttttttgtaaggctaatagagagcatgtgaagagctttcgaatgataccaagaatgttgaaagtttgtataaaaatttaaatggagttaaaattgtttactccgtcagtgaaaagttgcgtaaatgtgtgaaaaatttcttaaatgaagtcccaggcctccccccccctccttttatccagccgtagagttattttctcattttgactcggttacgtcgagaatggaaagaaagtcttgggcagggaattcatagaaattaaaatttcttccttaaatgtacttcgttgcatttaaagccatcgcaagcgtagcatgtaggcttaaaagacggtggacaaaattttttcaatacgttcgtcgggcactttccattcggttcagcacaatctttgaacacaaacagagggtagccagttgctgtgaaagttttacaatgatgaataattaattaattatttcatatgtaaatatttaattttagattggaaaaatcgcaaaaaggtacttaattaatatggcaaagctccaaaatagtgattcctattgatgaatagtggcgttaaaacgaagaatttccgagctaaaaatgtgtttttcgtgcatttctcgtcgaa

SEQ ID NO: 60215 - DNA, 1192 bp, Heterodera glycines
atgtgttttaattttgcagtctgcaaacatgcattcactttcgacaatacgatttataaagtcaacggagagtttgcaaaggtgatcgaaaaatggggaataacaaaggataagccggatataaagtgccatggcaaggcgatggaggcgaaggtcggctgtcagacataccgatgcatggatggtaaatgaacactgatcaatcaatagagaccggattttagggttttacctattttttttttgcggagagtacttgatgagagacgcatgaaaagcacattttctccgaacaatttttatttagagcgactttttagcacaaaaattacctaaaacgggggttagcacctattttgtaatttacgaattttattacctgttttggccttttcccagaaatttcatagaaaaatgcaataaaaacgaaaaaatacactcactaagaatcgatcccaaagatttcagagaaaatatactccgaaaaaatgaccaaaatttcagaaaattaatatatattagttattttcttgactagttgctattttggtgggcgaaattgataaaaaaaattagtcactttttggaatttttgtgcataagaaactggggttttccactttttagaacctattttgggcgtttttagcaccaattttgcacttttggcacctattttagtacctatttcagtgtttttagcacctaaaaatccggtctctactgatcaacaaaaaaaaataataatccaaattattgcacatttaaacttccttttttgaagagtataacaacgacgtgtttgtgatcaacggctgcgccacagatcgagggaactgcagtcatacagaattggacgaattttgcaaattaaagtcgaaaaagttgcgtacaaaatgtgacttttgctatgatgaggacaccgtgtgcaacgcgaacaacactgaactgctcataaaaacgtacattgactgcaaattgtccatggactattcgtggttgtacacgccgagcgccgagcttaagaaatggctgaccaacagaaacatggagaagaacttgagaacgtgcgcgaagagaatatacaaatgccaagcgttcacttgcactgacaaaggtgaataattgggaatacggcttctggacaactcagccgaggataactcagctgatggacaactcatacaataaa

SEQ ID NO: 60216 - DNA, 1149 bp, Heterodera glycines
atgtccctcttccgccgtcttgcaattttcatcgtcctcctcgcattcttcccccttttttgtggaggtaatttttgtattttaaataaaataacattttgtatatgccttttcttaattttaagcattgaagtgcgtcgttgggtcgcacggacttcaaaaaggccatgataaggatttcgagcatacagaatgtgctaatcccaaccacaaacgttgtaccaaaatcaagtgctccgctggtaaaagaaaatacacttacaaattgggcacaataggacagaaaaagattattattcacagagattgcttggctaaatatgcccatttccgggtgggggtcgttttagtctgtgccaagttcaaagcatcataactttttttgtcggtttatctttgtgtgatttggaaagccaatagagcttgttgttaagatctttcgaatgatacctagtttattggatttggtcaacaaagaaaaaaatgactatggtaatttggcagcgccaaatggttaagcattaaataattgatccaccattatggagagttgaattttcttataatatgtttttttcaattattattataatcgtgtcccgacatttgcttttcttaattaatgctgttttggctgtcagggcttgaacaaaattcaactttgaatccgattttggacataggcgcaaatgccggagctccattattataattcataaatgtttttaaaataaaaaattggtgtcaaattttcggaattgaattttgccgtttcttcaaattgattgtctcccgtcagcagacctttgttagtttatacattttatttttgtttagctccaaacgaaagcttcttagaaatgaaatgctatccggacgacacaaattgcgacttttacaacaaagatgtgaatgaaaaagttggatatatggcttcttcaaaatggaactgcacttgcgaatttggcaatctgctcaatgacgacccattcacatcaggtcattttgttggatgggcagctgaatttaattagtttaaatgaacattctttgcttcaattacataattaatttgttgctttgtaacaaaatctgtcgcaaaaaatgttaattgttttgtggtttgagtcgacgttttaaaataataaa

SEQ ID NO: 60217 - DNA, 598 bp, Heterodera glycines
atgagcttcttggccgctccagaagtgcagtgcagcagaatggaggtgcgtattaaattctcgaaatttggaaagatttattaattatttaattaaaccactaatgtgttagcatatgaatttttaccaaatatttaacgtcaatgtaatattgtacaggagttccagcagcttgcgaaattctttgagattctcaacaatcgattgcttagatcgattcagaaaaatgctgctgacaatgagagcgctgcttgtggaacaacgggacagagtgagaagaatggaacagtcccagggggggggggggggggggtgcggagtacgataggggtcaacggtactgggatataatctaaaccaccaaatgaaatttttaaacaaaaagttacaatacaaggaaccagcatttttggccataacttttttgaaacttaacgagattatttcttaatgtcattcgatcacaataattaaaatagttggagaaaaggagagaatatattattcggtgagggatttgggaatggaagttcggggatgggttcgaggggaatatttccaaattcaacaccactttatgtttaaagtcaaatattaa

SEQ ID NO: 60218 - DNA, 243 bp, Heterodera glycines
atgaggcttttttgcttgccaaatgaggcttttgaaaattttcatctgccatccctgaatcccgctactgtactttatataacacttgagaaaacatcgttagaaaaggatttatttaatcctcagtacgagtggtgtgttccaaaaaatgccacactcgcgctgatcaacaaaaactacaaaaaacttgcgatggccacacacccggacaaaaacaatcaatgcagcggcaaattgtttacg

SEQ ID NO: 60219 - DNA, 67 bp, Heterodera glycines
atggcaacgacatcacaaatggcattggaaccacccattatggtcacccaagacacgggcatgaaag

SEQ ID NO: 60220 - DNA, 95 bp, Heterodera glycines
caaaatagtgatttctagtgacgaaaagtgacgtccaaatgaaaaaattttaacgcagaaatgcgttttttgagctcctttcttcaaaacaattg

SEQ ID NO: 60221 - DNA, 878 bp, Heterodera glycines
  unsure (1)..(878): unsure at all n locations
atgttcgaagcggtggccatgccacactcaattttcatttgttccgcaaggaggacaacgttgaatttccggttcatatttgtaaaaaaaatattttacttacataaatatcatgctggtcatcgtttcgtaaaacccaccattttagctatttttggaaaaaacacggcacaactctttgctttaaagcaacaatccaaattttcatttttggctatcgaaaaatggaagtaaatactatttatgccataacttataataatttgttaatttatttgcaattttgcagacaaataaagaaaaagctaggctatcgaaatcaaggatgccaaattttgatacctttaagcaaaattagaccatattttgtcgaaaaaattgcgaaaatgtcggattttacgaaacgattaacgtggtggattttcggaaatgggctagcacttctcaaaaatgatgcttctaaaaatgttttcaggttgtccaagtcaggcctggaccgtccaaggttgccgtaggtaggggattaattaatattaatctagaaatttttatttaattcaattgaaatcataatttaggcgatcagctcttgcttacgggagacagaaagcgtgacgaacaagttgcactgtttgtttgtttttttttaacattttaatcttttatcaaattaatcaaaatttaaaattaaataaattaattttaaatttaaaaagtaaacaaatctattttcagcttggccagtcatccaattaagtgccaaaacacaaccggcaaactcacatttactttttggctttacaacggcgctcgaattgaagtgctgattttagaagatcgtgaggatgaagtgaagaaaaatanattttanaattaaa

SEQ ID NO: 60222 - DNA, 912 bp, Heterodera glycines
atgaatgaaataaagtcaggaaactttgacgcatcatccggaattgaatggcttaacaaacattcttttgccgtgttttgtgatgggaaaattaaagaggaaattaatgatgaaaatttggaaaaattacgcaaatatttccgtgaaagtttgctaaatggaacattaacaactgatgatgaaaatgtacgcgatttggtcaaaaaagtccaaattgacgagaaaaaggcaattattggaaaaatggccaaagattcaattctcggcaaagaaaacaaagaaaattttaagaattttttggataaattaatcattggaattgaaaaaactgctgccataattaaaggtaatttgaatttacatttttatacttattttggcgattttatcttaaaaacagaagccatttgaagaattttttttaatcaaatcaccttttcttgatggatttatgtatggaaaaggcttttaaaagcttacttacttatcgaataaattttaataacgaataaatttaataaatttttttcagcaaaaaatcaccaattttcgcaccaaaaaaacaatcgccagctgaacataagagcaaagcgtggtgttaaagatgtattgtgtcgcatgtgtgccgctgttattgcattaattccctacataatgatatgtggctttttattctatttgtccgttatgcaattaaaagagaacaacactgatcacattttttattatcgtctttggaattatttacggtattttgatggtatcaccaattattatatgtaccttgttggccgctgcttgccaatatctcgattgatcatttgggcagtagtgatcttttggactgggatttttcttgttcgtgttgtgttttcttattcgaattcctttctctttttttgtttggtctaa

SEQ ID NO: 60223 - DNA, 504 bp, Heterodera glycines
atgcaacaccaccaccatttgtcatgcgctttttgggctgatcagttaagcatttgcaaaagtgatcgggacagaagaggcgcccggatttcaaatgataaggaaaagattgatcagcgagatgaccaatcacttcaatcaattgctgagaatgtgctttctgtttgcttggataaacaggtgaggcatatgggtgaccagcagttaaatccaccaccacttgctgataatgagtattgtatggcatatatatttaaaccaattccggatcacatttattttagaaaaccgagtttccgactttgaaaaattcggcattttctgtacataatttgagatttttaataaaattgcctaagaaatgaatttatttaaaaattttgattttcaaaatttagtttcacctgtacctgttcaatcgagtttatgaataaattaaaaaaaacaattttctttttgcagaatgtgccccgttggttgtttggtggccgaatttctgtttag

SEQ ID NO: 60224 - DNA, 1137 bp, Heterodera glycines
atgttggaccctgacaccggactgttctcgcacccggacgcacagaaacagatgacgctgaaggagctgatcgtcaaaggctacctcaacccgtacaacacgcgcattatggaccgcgcgagcggaacggacatgcacttgttggacgccatccgcgagcatattgtggacgacgtggcgggcactgtgcgcgacacgctgactggtcgcgtgcacgactttgcgaccgcaacacgacaaggttgtgggagcagttggcactaaatccttataattaatcgcttatttactgctgctcttccaggcttggtcaaggaagacagcggcgtgttcagcgtcgaccgtcgcaccagtcgcacgtcgttgggcgacgccggctcgcctcgcattgttgagcgcaagctgcagctgacgccctacgctcaggagccctttcaagcagcctcctctaccggcagcgtcggttcggtcggaggaggcaccacacatggacaacacgcatcgctattcgacgcagcagccgcaggtccggtggtgagcgcagcaaagtcacgcgacgtgtggagcagcagcaacgggcatggcaccgccattatccgtgagagagtgccaatgcctgaacacgcataaaattttagccccaattttagcggcgacggcaaccgcaatcaaacccaatgaacgaatggtggatattgggggcggcaaaacggtcaaagtgaacgtggtacgcgacgcggacgggctggagaagggcgagtacttcgacccggcgagcaacatgaaattcaccatccaactgcatggcgacccggtgaccacgcagacgagcacaaaggcaagcagaaagcaattaatttccaatttcacataattaatattttgaaggttaattaaattttaattattttgatttaattttttaatccatttaaaaaaatttaaaaaaaaattatataagtaaataacagcaattttatggtattactttttacctttaaatattttaatttttatgatcattaacattagcgaccgaaaagtttagtctgtttaaattttgaaaaaattcaaaatttcaacgttagttttttggtttaaaaactgaaaaccgaaatttttataaaactttgtaca

SEQ ID NO: 60225 - DNA, 1115 bp, Heterodera glycines
atggcacctccaaagaatggcacacccaaagagaatcgctttatgcgaaggctaagaaaaatgctcaaagcggcgaaaaaactgtacagagattggcacatcaatcacttggcaccgattgggttcatcggcatttatatgtttgtcggtgccgtctttttttggctggccgaaaaaaacgccgagcttaacgaaatagccaaaaggtgaaacacgatggattttaacctaagaacctttctcgaattagaaaagaaatttattggtccattcgatcggagggaatttcgaacatcgaatcggtggtcggagtgaattggatgagcaaagagaggcgcacgcggctgtcccaattggtcgactctttgttctcgcagttggacgaattggccggcgcgggtgaggcgcagccccaatggaattttatggcggcgatgtgagtgcaaagtgccgtcgatatagcatttgcaaatgagtctcgacaggtacttttctggcactttgttcaccacgatcggatacggggacatcgcctgcgagacggccatcggccgaatcggcacaataatttattcggtgatcggtcagactaatcaacgattaattgcccaattaataaatgccttttgcttattttgccaattttcaggcattccgctgacattgatcactttgaacgaattgggtaaatttctgtacaaatgcatcaacgaaataatggccgtcgtttctaatcggtggaatgtgtgcattaaaccccttttattttgccggtgttttcggcgccatgccaaaattccgctggatcttccgcctacgccaatgtctccgtctctgagacaggcactcaattaaaagaaaattaaatattttggcaaatttaaatttaggcacaaaaggaatacgaacggaagacaacacatttcttcaaggatcagagaattgcgcaaaaggatctcatctttgactacgatttgaagtcaatgtccgaggacaaaaagttttccgagtcgagcgccgggggggacaatttgacgatggacgcggagaaaggcgcctttctgacggccgaaggtcaattgagggaaaacgaagccaaaacggcaattggatga

SEQ ID NO: 60226 - DNA, 515 bp, Heterodera glycines
atgacagagtcgcagcaaaaacgagtgagaaaagggaaaatggggggggggattaaaaataaaattaataaattaacaggcaaaagacattgtggagtcattggattggataaagcctgccgaagagagtacaaatccaatcattgcgaagatggaatcaatgcaagtcaattaaaattgggggggtggcggagaaaggacacacgctaatcacggatcgactgctgatcagtttatgtatgcttcactgatcagctgatcgatgtgtgtttcgatgatcagctaaattggatgaactgctggtgccgatcgtacgcttttgtgctttagctgtcctcaagtgcatttgtgcgaaatgatttcgctgccccgtgccgatcaatgggccattgccgtaatcccccaaaggcaattgacaccgcttcctgtgccattggcagcaagcggaaagctgcacgtctctctcacgaacaatcgatgaaaaggactgtggaggaagaagccaaacgacaaaa

SEQ ID NO: 60227 - DNA, 1170 bp, Heterodera glycines
atggaagctgatgtgagccacgaagtccacggacagtccaatggccatcaaactaaaaaatgtggggagatgaaacagagaatattcataaatagacgttgtggtcatggaaatggggtccaagtcgatgctccaataaaagagcagtccgaacacgcccaaattgatggacaaaacgcaggcggtgccgggcaaaatggtgctgatggaaggagtgaacatcaccaaaacgaaagtcatgcagagaagggcgaacgcaactgcaaaaagatggataaacaaaaagacattcgttacaataaggccgactcgccggtttgtattgtcaccgacggaatactgagcaattgatcagcgtacatactgtaaacaagagacagaacatgcgaaacgaccattggtactgtacctgaagtcctcgtatacggtaaggttcagctgggaataatcagcggctaattggcgccaccgttgcagcaacaccaaacggtcgctccaagcaacggcattttggaagccggtcgagaagaagaatttgttaatgcaggatgggcgttcgtttaagcaatcccttcgggggactcggaattagtcattgaaaagtcggcatttcccttttactctttggggcctaagctgacaaaatggctccaccggtgatactcgggaatggaaaagaagtcgtaaaggtatttgtagcggaagtcaatcgatccgcggttctgacaaaaaatggcaaatgaccgaatgaacacattccttggctcacttgcagtccgatgaatggcaagtacgtgttcagccacatttgcgtgctcgacgggcccacgctgccgttgctctgctcaaatcgctccaaaatgcgcataattttcggaatggccgacggtttgcgcaagtctcccggactgttcacaaaaacggccatctgtcgatggcatttcgtttataattgccaaatttttgagcaccgacctgtccaccctccttgaaaatgacattgttctgcaaacggaccaattcgagtagtggcgagtcatccaggaacagtttttccgacgttagtccaactttaatttgggcaactaaatacaaaaagaaagaatcatttgatcatttaattgtcagaatatttttaaattaattaccgccataagcggaaaacgccca

SEQ ID NO: 60228 - DNA, 3208 bp, Heterodera glycines
caaagtgatcacgatcaatttccacgccattttcccaaattccacaatggaaacggtgatgaaaaagtgggagcattccgtgtacaacttcgcaatgaattcacgcggcgatccgttgctgaagctgcacgtcacctcggagggtttagtctccgaggaggtgcggaggacaggtcaaatggcaattagtacagatgaaaggcccttttaaggacagttattaggggaaacggggacagcgattgataatttaagaaatatttaaggacaaatcaaacaattaaagacaattaagcgtagattaataaaaaaaagacagtctgtctaatgttccttctcttatttgggtgttttgcttatttggcatccaatccctccgatcattgtttttctgatcgtttctccctcctcaggcattgaggtgctcccgttgatgccgatcagtctgtccgtgatcattctctttacggtcgcttctctcccttttgccatttgactttcgatctgatcaataggtgatcacttcactgaagcgtgaccaaatccggagcaaaccttgggaagcattggtcggcgttttctgtccgatcctttccgtcggcgcttctttcggcacccttttttgggtcatttttggcactttcccttccgtccttttgccatttttatcttctcccctctttcagctcggcttcgaatttctgcccattttggtggtggtcccttttctcattttggccatcggtgttcgatgacgttttcattttcctccactgctgggcacacaccgacccgagcaaagatttgcgcgaacgcgtggcggatctgctcggctcggctggcccatcggttacaatcacttcgttgaccaattggctcagcttcaccatcggaattgcgactccaacgcctgccattcgggcacgttttgaaattggcgacaattagccaatcaattagccaatcacttggcattgcttacccacaaatcatttctcggcaattcatttgccaatttaaccaatctttccctttttagactttttgtttgttcatttcggtggctgtgctttatgcttatttgtaccaattgttcttttacactgctgtgatggttattggggcccaacgcgaagcggacgagcgaaatgcgtatttgccatgcataaaagcgcgtgccgaaaaggtcgccaaaagtggcaacattgaaaaaagattagctttaaatgtttagcacacaatcagcaaaggcaaagcgaatgaaaacgtaggaaaattgagaacaaatttgtggcggttgggctcggatttggtcgaccgatacgtggattttgtgatgagttggaccgctcgcattctgttggccatttctctgatcatttattgggcgttttccgcttatggcggtaattaatttaaaaatattctgacaattaaatgatcaaatgattctttctttttgtatttagttgcccaaattaaagttggactaacgtcggaaaaactgttcctggatgactcgccactactcgaattggtccgtttgcagaacaatgtcattttcaaggagggtggacaggtcggtgctcaaaaatttggcaattataaacgaaatgccatcgacagatggccgtttttgtgaacagtccgggagacttgcgcaaaccgtcggccattccgaaaattatgcgcattttggagcgatttgagcagagcaacggcagcgtgggcccgtcgagcacgcaaatgtggctgaacacgtacttgccattcatcggactgcaagtgagccaaggaatgtgttcattcggtcatttgccattttttgtcagaaccgcggatcgattgacttccgctacaaatacctttacgacttcttttccattcccgagtatcaccggtggagccattttgtcagcttaggccccaaagagtaaaagggaaatgccgacttttcaatgactaattccgagtcccccgaagggattgcttaaacgaacgcccatcctgcattaacaaattcttcttctcgaccggcttccaaaatgccgttgcttggagcgaccgtttggtgttgctgcaacggtggcgccaattagccgctgattattcccagctgaaccttaccgtatacgaggacttcaggtacagtaccaatggtcgtttcgcatgttctgtctcttgtttacagtatgtacgctgatcaattgctcagtattccgtcggtgacaatacaaaccggcgagtcggccttattgtaacgaatgtctttttgtttatccatctttttgcagttgcgttcgcccttctctgcatgactttcgttttggtgatgttcactccttccatcagcaccattttgcccggcaccgcctgcgttttgtccatcaatttgggcgtgttcggactgctcttttattggagcatcgacttggaccccatttccatgaccacaacgtctatttatgaatattctctgtttcatctccccacattttttagtttgatggccattggactgtccgtggacttcgtggctcacatcagcttccattattacaaaggcgagattgaggacagccgagaacggcttcggcacgcgctcagttccatcgcttggcccatgctgcaggccgcgctttcgacggtgctttcgttgatgattttggtactgatccacgcttacatggttcaggtagggaggacatcccggttttcgtattgcttagcaatttcactgtttgttcaggtgttcgtcaaagttgtgctgctcgttgtggtgttaggcctggtccacggattggttgttctacccgttgtttacgctgccattcccttccaaaagtcgggtgccaccgccaacggcacttccgccgaaggttcctccactcaatcgacgacggacagcagtcacataacaaaaacgaaggcgggagatggaaaagaagcaacgggcggcaccaaagggaggacggcacggaaagtgtcgtttaaagacgcactgcgaatagggccaacgcaacagaaagtgcagccgatcaaaatagcggtgaacattttgccaaatgcaaatggtaatggtaattaatgatgccgaatttaggtgggattttctcccgaattacagcggaaggcaaaaacaaaggacgaaaacgaatcggagaaagaagaaaaggaaaaagaatggtttagagacagcagcagaacc

SEQ ID NO: 60229 - DNA, 1590 bp, Heterodera glycines
atggcgcaaaaattggctccgattataaacgggtggacaaaatgcctcgatgagttttctgtaatatcgcatcgcatttgagttttgtccacaattgacttttcatcgaaaaagccaacatttattaatgttgtacttcatcatttgcactatgatccccccccctaatttttattttgtggatcaatcaatcgttgtatattaatcattttgatcgacattaatttccatttatttgatcgattatttgttttccattctctttgattgattaactcattcagttcccaccaattggtcgatccctcattttcattcaatctgatcgccttcctcttttttcacattcattttaattggtcactcattttccgttctatttgatccattatccatttcttattctttttttcccattcaatttgatcggtcactcattttcacctctttaatcgatcccccattttccattcaatttgatcgactccgtaacggaccttctcttccgccttctttaatctatcacatttttagtgagtgatcagtcagtcattgatcacttccattgtgccaatgggtcgtcttctctgtttgccgattggcttttccgttgccgattgggcggaagaaaaaacgcaccgcggctttcgtcggctcggccttttcgtttcgcattggccgtggacaacaataatcatatcgtaagtaagcattaattaataaatggagaaaccttcaacctgacataaattattgaatgcagagtgattgtggcgattgttctctcaacgggcgttgtcaatttcaaagaagtgaacaatgtcagggaccatttcaggtgcccttcccctccgccacccccccccctttcgctttggcatttgcttcccccaacttttgcctgtttaatccctctatttgtattcatttatttttgtccgatttgagtgccgacaattcgccaagtcgtcacgaatttcttgtggcgcgcgagtttttcaaggagcttggagggttatttcacgtggtggtggcaattgaagcagccgacggcggaaatttgctgaggccgaggcacaaaattagcacggccagttcagtgtttgtcagttcagtaccatcaaattttaaacgcatttcgaagaaattgtagactgaaccggccatcaaaactgaccttactaccgcaacaattgacacaattgtaatgcttttccgttaagatatattgacaaggctttggaagtggaagattttctccagtacaaactaaaggtgcgatgttccgcttttcatcccatctctaaaaaggcttttcattcctctgatcactttcggacatttctcggcaaaaaggctactcaactgatcagaaattcaggtcgagcatgaaggcgttcagtacgcgtacagcgacttctgcggggcccaatgtgagacgagtgacgcggtgaacattttcctgacggtgttccgcgatgttcagcaccgcggcaagggcaacattaagttaacctttccgaccatcgacgtgttcggccatcgcatttacttggcccacaacatttttcaagtccaactgaacaatcg

SEQ ID NO: 60230 - DNA, 1121 bp, Heterodera glycines
  unsure (1)..(1121): unsure at all n locations
tccattcctctctttccatttgagtctccaccatttcccccatttgagccccccccnccattgagtnccctccccctttcccccatttcctcgctttccatttgagtcccccccatttcctctcttccatttgagtctccaccatttcccccatttgagcccccaccatttgagtccctccccctcccccatttcctctcttccatttgagtcccttacgcctttttcgtttttcagccagttcaattgatcaagtccgaatcgacaagtcctcctccgctgaattctccgactgcttcctcctcctcctcttcctgctctgtttccgattcgatgggccaactcattgtcagtccctcgggcattgctctcgcggcgctgacgtgcaaaaaatgccccggggggcgcacattcgcctcgcaagaaatgttgaacattcattacatcaaaacacaccgcgaccggtcagtccgttaagaggcgaatagtttttggccttttttctcaaatattttttctccgccatttattgccacattttcagtccccaatacgcttgtgtgaaatgcggccaatcgtttagcatcaaacgcgaactgtccacgcaccaccgcattcacagcggtgagcagccgcacaaatgccgtaatttggacaaaacaaacgcaaaatacatgggaaagagttaattttcagttcaatgcggcaaggaattcggcactcgtcaattgctgaagaagcacagcatgtggcacattgggtgagagagaggaggggaatgagtggccaaattggcatgccatcaaatgccaatttaaacaaatttcagaaaacgctctcacacgtgtccccattgtggcaagtccttttttcaggtgctttcgtgccgattagtgtttaaaatgagtttttcaatttgttttcagaagggccatttgacgcagcatttgatgattcacagcggcgaccgaccgcaccaatgcgaactgtgcgacaaaacattcattttcaaattcggtagggcaaaaggccaaagcattgcgacgatgttcaccttttagacttaaataggcacctgaaaatccatcaggaacgcaaattgcatcaaaaaatgcggaaaa

SEQ ID NO: 60231 - DNA, 901 bp, Heterodera glycines
atgggcgccgcaaatctcgcatcactttccccatggaatcaagccgcttcaaacaatgagagtgcgaatggaagcggtttcttgaggaatcatcataaatggaccaaatggtcaccaattgttgtgagctttgtgcagcggcttatgaagtaaaatacacttcgttattacaaaatccctgaattttcgaaaaatatcacttcggcttcctcaaaacacataattatgccaaatgatagcgaacatttaaaatcgaaaaacaaagcaaaaaataaacaaaagtcttgtgaaatgttaacgatttctttctcgtccctctaaatcttcacaataacttcttgaatgatttgtgttgcgtcattttgttgaccatcttttgcacatcgtcactttcaaaattgtatctcatgtaattggagtcgttcgttgccgcaacaattttgaaaatggcattcattttggcaaaatgcgcatcaattctttgctgtgcagttttgctcgctgttatcatttgtttttccaacaaaaatttgtacagcatttgtataaatgcgatgattttaccgtataaacacagtaatttttcatgcaaaaatattaaaattaaataaaaaattattattttatttatgaatgaatttttgtaacatgtttttcatttactattttaggactaaagcacagtttggcgatgtgcccgataaaataggagtcgtaaagatcgccataatacgaatggtaggccggtttccgggatcgggttatggggatggtatgtttgaatttggggtccgactaaaaagtcgagggtttcggggtgccacacttatccaatggttataaaattgcctctgtttctatattttccaactaccaaataagttttttttgctttgattta

SEQ ID NO: 60232 - DNA, 769 bp, Heterodera glycines
atgacatcgattccaccggcgctagcacaataccaaatttgtccaacgagtccattggaaggatcatccgtgactatgagtttcccagcagagaagaactgtactctcccgactgagacacaaccaatcatgaacaaatcaattctctacatacccatacgaattccgcgttcatttccagtattcaaatgctggaatgttacgacagtggcatgtaccgaatcattcttacgcgtggttactcttgatcatccgccgaagaaattcgaatcggaaacatcactggacgactgtcaaaattctttaaatcatcgtccaatgaacagaataagcgagaaacgctgggaaagttctaaaccaattaggaaggagtacggctggtacggagtgaactgttatgacaatgtccaaacagtcatcgaagaggggactggaggaattttagacggagaaatgctcgtcacatcatggggggattccctaaaaatcgaacaattcacaatcggaaaggatgactggatccgcctgccaggagcagttgaacttttgatgtggcgcattccctcgggagaatattgtgacacgcatttctctatgggaccagtaacaactgagacgtggcccggacaggccgtagtagtccacgaattgcagtacacatttccgataagtaaagaccaagacagaaaaaaccaagtgatcggagtgccaaaggaagcaataaaaacggaaaataatgtcttaattcactacattggagaggccgaaa

SEQ ID NO: 60233 - DNA, 754 bp, Heterodera glycines
atggtaccgacagcggaggaggaggaggcaaagacaaagacggagacggaacatttggaaatgatcgaaagcgaaacggaggaaggaaaagcggggaaagggaaaatgagagtagcggaaaaaggaggaaaagcatcacgattgccgaagatgatgcaacgcaaaggcaaagcgaaggaaagagtggcggaggacggcgataaatggaggaaaatgccgaaaagtccgctgatgtcagtggcacactcagtgaaggtgagagagaaagagagagagagaggggagaaagacagtggagaatcagagagaagagatagaggaatattgagaaagagaaagggagagagagagagggacaaggagaatgagagaggaaagtgatcgaaaaacgaacggactgaccagcagttgcctggctaactaatactgaatgtccttggaattttcatttttcataatttgccataattttgtttagactcggttcactcgtctgaccacgctcagacagtccaaagatgcgttgccgatgagtcgcagtttggaaattggtcgtcagcagagtcggattccgacggtttgcggcggcggcgacccaatgacaaagtcgtggagtttggagacgacagccatgcaaaataacaacaataacaagaacaatagcggctcggaaatgccccgacggggaccaatcaccacattaatgccatccccgcggggaatgccgcggagaatgccgacggagggaggttaa

SEQ ID NO: 60234 - DNA, 5093 bp, Heterodera glycines; identical to SEQ ID NO: 6078

SEQ ID NO: 60235 - DNA, 752 bp, Heterodera glycines
atggtcagagcaacaacggccaggacaagggcatcagcagcgcgagcacggagcatcaaaatcaatcgtcgaaatgccaagaaggcgcgtgccgcaattggacgagccggacatgtgagtgacgcgcgagggggagagggggcaattaatacactaattaattcaattcggcacccttttttaatttgccaatttttcagacacgcaatgcgatcgcacgggagaagtgcatgatgtgtctgggcaaagtgagctccatgacgcgtgtgaccatgggctgtgtgcacgaatttcatcgcaggtggaggcggggctaattctgatcaatttcgaacccatgggaccccgagttcgaacaagtctaaaagtcgagttttcctggccaaaataccggaagttttgcgtttgctggtcgccgaattcaaaatccgttccgatcaattttaatccatggttccacgatcaattctaaaagtcgagttttcttagcataaattgccttgaacccagtttttttgtcaaaaaaaaaattttttttttttttgggtgaagatttatggattttcaaggcctagaatcccaattttgacatcattatttcggattaatgcaacgcttatcattatctcccctcaaggtgcctgtaccgctggctcaaatacaacaccaactgtcccgtgtgccgcttcaatttcatgcgcgcaattccccctgaagaaccagcggaggaacagcagcaacagcaagaataa

SEQ ID NO: 60236 - DNA, 138 bp, Heterodera glycines
atgtctcccattttcttaggtttttacaaaggccttttgccaccgcttgtcatcgaaacgccaaaacgtgcccttaaattcatggcttttgaccgctattggcgtgttctccgttcggatgcgcttcccacttggctg

SEQ ID NO: 60237 - DNA, 588 bp, Heterodera glycines
atggtcgtcaaacatttgaagggagagaagaaggacactccgccaacttacgcagtcgaattcaaagcgagcaacaccaaactgttgagcagacagcaaatttacgatttggttgcgcaactgatgaacgaactgtcaccggaaagtgccgtcaacctcacccagcctgatctgctcgtcattgtgcatgtaaaaaacaaaagcattatttttaatgaatcagatctcattacccaaattcgatgaatattttatgacgtacctgcgttaactaatgaaacaaatattaaactggaaatttttgtggttttgcttttagactattcgcactgttacaatgctttcgattgtcgcaaattattaccaacgccgcaaattcgctttgaaattggcaacggagagcgaaccgaaagagaaaagcaacgaaaaacagaacacgacccatgaagagggagagacttgaaagaattagagatacggccacattccttattatttattttttgatttcattataccctctatcactttactctgtgagaaaaatttaattgtttgctaaatttttggcaagacttccttgaaaaa

SEQ ID NO: 60238 - DNA, 97 bp, Heterodera glycines
atggctgctccctccattcgtctcatcaccacgtccaaggcgcctcctgcgacgggtcacaggtcggaacaacggaggccatcaaaaccatcttcat

SEQ ID NO: 60239 - DNA, 979 bp, Heterodera glycines
atggcaccgttcgcttttcagtccgatccaaatgtgccgactacaacttatgtgatccgcaaaaagccgcagcaggcgcgggagcccgtttttgtgaacatcgacgacatcgaacagttctcttggatcgaaccattgcaaaaagtggtggaggagcgacttaatgagcccgactataagacaatttggtcggcacactttgttttggtcttttcattggacactcttaaggctgaccagcacgcgcgtgcgtaacaatggcactttgggaatgtctctgtgttttgtcgaggaaaatgccaaatacaaccgattccgcactttggcagacatctctctgaagcccgagaatcggacgggtcctgaaaaattggatttggagtcgaaggaaatccaggaaattttggagttggacttgcacgcaaacaattaccgggacggcgactggggctcaattcggcacattgtagtcaaagaaggtctgtcggttctgtcccttcggacattggccccctgccatttcagtctgattttgttttgattttcagaagatgcgcacagctacaaagaagtggaacatgcattcatcaacacattggtgcgtggcgacgtgtccagcctgacttgggtggagagtggcaaccaatactttgcccaaagccgcgaccaactcggcccgggcctcgagctgtgctcagtgtattacgcggcggtaaacttccgtgacgtaatgttggcatacggacgccttccgccggacgccattccgggccaattcgcggaccgcgagtgccttctcggcatggaatttgccggtcgacttcaaaacgggcgtcgcgtgatgggcattctaccagcacaggcactggccacttcggtggtgtgcaacagagactattgctgggaagtgccagacgggtggacactgaaagaggcggcaacggttccagtcatttacgcgaccgcatattacgcgctg

SEQ ID NO: 60240 - DNA, 536 bp, Heterodera glycines
  unsure (1)..(536): unsure at all n locations
ataattgtttgagtaccccaaacggacacttgaaaaaatcgatttttttgttttcggggcagtccccccgaaccgatgcgcccagatttatggggagaccgaatccttcgggaatagcttccctatagcctgtactttaattctgcgttggatttttgctccccataattgtttgagtaccccaaacggacacttgaaaaaatcgatttttttgttttcggggcagtccccccgaaccgatgcgcccagatttatggggaggccgaatccttcgggaatagcttccctatagcctgtactttaattctgctttggatttttgctccccataattgtttgagtaccccaaacggacacttgaaaaaatcgatttttttgttttcggtcagtccccccgaaccgatgcgcccagatttatggggagaccgaatccttcgggaatagcttccctatagcctgtactttaattctgctttggatttttgctccccataanttgttgagtacccccaacgacacttgaaaaatcgattttt

SEQ ID NO: 60241 - DNA, 420 bp, Heterodera glycines
gttcaggcctggatccaggtctcgaggagcctggatttttcctggacctggattttcctggatttttgtccaggaaatcaaggtccaggtccaacatggaatccaggtccaggtccaggcttttttcaaaatgtcgatctctagttaatactagataaacttacaaataatatttaactcaaaaaaatagatgtgactaagtatttttgcatcctttttcgaatttaattcgctttttgtaacctaagttttttttgctcctatttttgggtttcaagtcctaatattgtgagaaaaatttgggaatatatgtaggaattggcgagagattgggaacggacagttagagaccggcgagatattggttgccattagcgcccatggcatattacccaaaatctccaaaattatatttaaata

SEQ ID NO: 60242 - DNA, 832 bp, Heterodera glycines
atgtgcaattttagcaaaaaatcagctaataaacaagccaaattttacataattcccggctgtgtgttatcgctggatactaatagtcaaggttaggctttattttttatatgtttttatgtgaaaatgttttggcataataagcttttttcattcagagaatatataacgcgcaagatttagttgcacaatagtcggctaaccacaattatcattacaagcgcttggaattatatgtaataaaaattgcaaaattggatataaatatttttaaaaatgccgaaatatgctaaatatattcaaaaactcaaaaatatgtacctaatgtaaataatttttgattttttagaaaaaaatatattagaaaagcatgaaatagggcaagcgcaaaatgccacgaagttaccgaagatcttcgaataacattttgtgtgttttaaaaaatttgtttttataccactttttgaatgccattttatgggtacattttccaattttttgtatttttttaaggaatttctaaaaattcataaaacttcaaaatataaaaaataaaaatatttaataaaaattgcaaaattggggtatttttgatcatttaagaaaaatttccataaataatcttcaaaaatagccatattatttgaaataaatttggtttttaatttattatatattaaattaaatttttactttaacatttgcctatataaatgaaaaacaaaagaaaagtattatttataatattttcagttgaaaaaatacccttactaatcaaaaaagcattcaactaaatgaattgaaaatgggacatcaattataaaagctttaa

SEQ ID NO: 60243 - DNA, 921 bp, Heterodera glycines
atggacaagtgggctgcacttgtgtaagttaattgggtgggggaggggttaattgcccctagaatgaggcaatcaaagcaaaacccgaaaaatactgatcaccaaaacggtttaaatgcgtttaattgatctaaattaaaacaaaaaaaacacgaaaatgagggtttttaatcggtgttaaatgggaaaccgatctagtcctaaacgaatcgagaaacacaggccaaatatagactatctgtccactttcagtctgttgatcgccctgatcaacgcgctggacagcgctgttgttcgacaacagcgcgccgccaacgcggacgcatcgaaaccggaaccgaacaacgaaaagccaggtaaattaaaatgaatttaataaaaaaaatttaatttattaatttgatttaggaaatgtggactcggacaaaggaaattcggacaaaagccagggagcgggtacggaaggaaagaacccggatgagccaaaggaaagccaggaagaggatgaaccaaatccgaagaagccaaaggaaagccaggaagtggaagaggatggaccaaatctggaggagccaaagaagccgggaacgcgggaagcggaaggaacctggaggaaaaaaggccaaggcggaggcggaaagaaaacgggtggaaagggagggaagaacgcgaaaaaaaggggaaagagagcgcccgatgagccggcaccaaagtcgccgaaaatgccggataaatttgacctaaaactgccaagtatgcataaaacactgatcgtcctggggtcagatccaatcttctgacatggcatgttcaggagtggttacatttgttgtctgcatttttttgtagtttttaaatgaaaggtgcaaaaaatatttaattttgtataatataagcaaaaagcaattatttcctatttaa

SEQ ID NO: 60244 - DNA, 1813 bp, Heterodera glycines
gtgtcattctacagtagaggtggctaccaattcgctgccaaaaagtacggtatcgaaaaagaaaaaccaacggaaaacttcaaaaacatggaagaaatcgacgaatacggcttcatgcacggtaagttcttcgcatttaaaaaaggtgctaggtcgtttcgtaaaaaatgtcaatcgaatgataacaaggtttttaaatttgattgtgtttaagaaaggttatttacgagttttctcgaaaaaactgtaaaattgacacttttacgaaatgataggtgaaaatttttaaaggaattttgggatccactagtgcccaaaactgctacaggggaaaatttttattttgtttacaaatttacagaatcccctatgcttacgcccttgtgttggatcatttcacattttgtttggagcttttaattttcaaaaagatttacccattttcgagtctaacttattcgaaaataaaaatcaaaagaatcaattttatgataatgattttttgttttacaaaaaaagggatttacctaaccacatttgcattttttttcgttttcagacatggtgttgctgctgtttgacggttgtgtcatttgtaatggcaaagaagtgcctaatgttacgctgtcactcctccaacatatgccacaggtaaaaaaatatgtttgcccctctttactactatttttacagggaccgttggtcgattcgtgtcaagaatatgttaaacggcccaggtaaaaaacaaataaacagaaaataaatatttgttgaatttgtttttagtaaagcactgattgtgccgatgaagcgagttcaacaagaatcccaaggcaactttgcatacgctgttttgctgatggaacggtacggtaactataaataaatgaatatatactactgtcaataaagaagaaataaaagatcggtaacggcgcacatttacaaatgaccgtattctgaggcatatgcatttattctaacttacggcctaatacgcacaaaaatgattttttaacttcttttgaaacttttcttattttttgtgtctttttgatgtttcatcctttttttcgtgcctttttttaaattcatttgttttgttctatttctggaacgtcaaaaaatgacaaaatcatacttgttttgcatcatagcactaatattttcaaaatgtttgccggcggcctgatcagcatcgccggctcatacaaattagtccttccccagtggtgggaaaagcaaaaaagatcgtatgattaactaaaaacataaaaattcacaaaaaatttcggaaaagaatctttttgaattttaaatggtagacaattttaacaaagattattgtattacaaagactatttctatcagtacgggtttaccaattggaaagaccattttgtgcttttaaaaatgccttttaaggggcgcgcttttttcaaaaataatagattttatgattgggttcattttttaagaaaattaggagtttggggcccggcggtgccgttaggcgccgccgtggaaaattttgagtttttcttagttttttaacagatttttgttcaaaaatgactaaaattttcatcaatctttaaatttaaatgacattatgccataaaattccaaaaatatcataaaatttaagaaatcagaacaaatttggtcactacctcaaaaccagaacatttctgataaatcagaacatatccgagccctgggttaaagtgaaaaattttagcctctgtcctgagaagaaacccgcgaccgacatcgataaccctgccaacaaattctatatgcaaatgctcaa

SEQ ID NO: 60245 - DNA, 623 bp, Heterodera glycines
atggcacgatgtgtcacgtcgctcgcgtttctcccaattggagatttgacccctggaatcattgctctggacatggctcttcccgacgaacttactcccgtccttgactggtaaattgataatctcacaaattgtttactatttattgttctttaattatatataaggttcataatgaaaactacacgggtcgtcttaagcatgatggaaaccgaacacgcccgcgatttgacccaaacatttggagtgtttacactcgaacattgcaaggcgatgaccggacgaataaccattcagaagccgcgaacagacgcctgcaatgcgcatttgcctgttcacatccatcgatttggcatttcattgaccttctgcgaaaggatcgaaatttatccgatgatgacttcgcgaagtgttcaactggacaagaaccaccgcaaaaggcaaagaaatatcgcgaagcagaccgccgaattctcacgatggttcaaaattatttaccacttaataacgtagacactaacattttcccaattcatcaccctttcaatcatcattttattattacatttttgatcggaatttctcgaaattatgaaatgagaccgtgatttgaaacaaataaa

SEQ ID NO: 60246 - DNA, 1248 bp, Heterodera glycines
atggttggtggcaaacccctggccgcctgtggaagcttttcggcacagattgttctcaacaagtaagctcgcttaagcacattatattaatgatacatttattggctactgctgataaagttatctttaatattatgaataatttttaactttagtctggcacttccagaagggagccggagtccatgccgcgcactggcgggacgcgttcttggaatctaaagctaagaacgcatcaacgcgggcggttgctcaggcggctgcgcgtggtgaattcatccgaactccgcagaactcggactacgtccggctccgtgacctcctgccggagcagagggatgttagggaggcagcggccgaggaggtttggtttaatagcgtgtgatagagagataagaggcaatagagatattgaagcgggaatgggagaaagacataagagcaagaataaaaatagtccaaaatcgagttctggaatattaggctaaaatatatacctttatcggaatatgccaataaaggtaattgtcgtatacgtatatttaaatcatttcacgttttccctcaagggtgtaaatagacatttttttaaggacattctcgtcgctggggcgcaggacctgaatgccattaccggcaaaaaggcagcaaaagagtccgagcgccaggagctctgcaaccgactgattgagcgctcgatgcgcgtggcgcgccagatgaagcagttgcagaaacatgtagcttttttaacatgttaaatgataatataactatgttttttagtggcacgaatctactgattcgctgcgcaacgagcgttgggcggttgccagaagagaccgtgaaatcaaggcgctgaagagagagctccgaaaggagcaggtggaaaagcagaaggaaatcgagcatttggaggactgctgcaacgaatatgttcagagcatgcaacgggtatttttgatatctttatgggcagcagtcaatacgggtatcgtttatatacttttttacagatccttcaaatgtctgctacccagcaggggctgttgcgtctctttggcaaagctgcgatcatggcaaagattgaagacagcgaggagttcaacttcctgttggaggaccaggagttgctgaagatcgtcctaggcgaagcgaccgacgtggctgcgaaggctgctaagaagaggaagaagccgggcgccacgccgccgccgcagggggcggttgcgcaacagcagacggtcccag

SEQ ID NO: 60247 - DNA, 951 bp, Heterodera glycines
atgcttgaacagaaagcatatgtattaaattacatgcccaaaatttaccaagtccatcagaacgagcggaagaaaaagagatgctatttgaacgtaacgattaatgggaaggatgtggaggctctgttcgatactggtgcggacgtaacatacgtcagaaattcaacggcgaaccaatgcatgctcaatgttagacgcggcgatttcccacaagcgcgagctgcaaacaaaacatcgattcgtttcttcggctcagctctggcagaaataaaattgggggaatttgaagggaaattcccgctgctcgttagcgaggatgactgctgcccatgcgcggcaataattggaaccgatctaatggattacataaccgaacaaggcgaggaggaaattggccttaacttcaaaaagggctcggtacgaattggacacatacacctgccaatggtcgcagcagttaccatcgagaagaaaccaattgagattcgtttgctaacaacacagactctgccaccattctccgacacattcgtgtggggacaattgaatcaaagttttgatgctgaaaaaattttcatcacgacggaaagagaacatcagtacttcccactccgggtgggaaagtgtttggccagcccaggctcaacacggaacgcaccattacgcttactaaatttcggaaactgtccgattaaagttcacgccggttcacgattagcgattctggaggcaatcagtgatacaactcaaattaattcattgaaggaggaagacaaaaatgaagacccaaatatcatgaatgaggctgaatggtcaaaatttaaagccgaaatcgatcatatttcaccggaggcagactggacagaccaacctttggaattcccgaaggaagtggagaaaatcaaatccattcttgagagaacatcgcactacatagggtgcccactttaa

SEQ ID NO: 60248 - DNA, 557 bp, Heterodera glycines
atggatgcgacccaactgacaatgaatgaagtgagtcattagtagggtgaggattttagtggcaaaaatcccaataaaataggctaactagaaagcggcaaaaccatgccaacacaatggaaaatagatcattgatgaaagggtgctatttatcttgtataaaaaaaccatcaaaatgaaaattttaaacataaaattttactcacaaaatttgctcaaacccaactgcaattaattttttatatcattcgatggtccctaacagttctctatttttttaaacttaaccaaattttttgaaatttgcaggcgattcgaaaacatttagcaagatcacttaataaaatatttaaaatttttcaggctaatagagaattttgagggctatcaaaagattaaaaaaaaatttcgatattgcttttgagcaaactttcattcaatttttttaacgccctttttgatgaattttggcttttttataacggatcacaaatcagcatcaatgaaagtgttttttataaatagtaaaatttttagttttgctcaaaacaaataaa

SEQ ID NO: 60249 - DNA, 275 bp, Heterodera glycines
atggaaatttttgatgaatatattattgttgatgaaaaatcactttcaattaacattggctcaaagttcaatgaagtgactcaattcgctgcaatgtaatttattatatatttaagttttctcattatttttttgggaccaaccgagacgggtaattttggtggtgtcaaacgcataactttctaattaaccacttaaattaattaaataatgtgggattatatttcattaaaatttatgatttttttctcaggtgtttgcctatcgattcttaa

SEQ ID NO: 60250 - DNA, 705 bp, Heterodera glycines
atgaaaactcttcgcagtcaagcgggccgccaatcgatgccaatggtggtgaattttggccgggtgggtaaaaactttttattttactattttaaattttcaaagtatttcagactggggacgcgcaaaggactggacaagtcgggggccgccgatcgatgccaccctctgttgtgccggcgaatttgggtggcgtgccgccataccaggtacaaacacaacaaatcccttcgcttccctttcttataccatttttttttaaaaaaggagccgcaaacgcagcgcgaggtgatttacgatgtgcctgcggatggtatgctggaagacgacgacgatgacagtttttgaacgatgagccgatacaacaatgagctttaattcctcataaatttttataaaatttgggaattttcatttcacatttaacaaattttggctaataaatgtaattcaaaatgattaattggcaatttataggagaccactaaataggagaaatttcaaatgttttactgttgggtattcagaacgttaggcgagattaatgctctttacgcaaaattttgaattttaagcatttgatataatctttttgaatgattaatgtgtgatatagtggagaaaatctgtcggtacatcaaatgagcaatttgtttaaaaatgggtcacatccattatcgggaattcgggatgctttggtgcata

SEQ ID NO: 60251 - DNA, 1941 bp, Heterodera glycines
atgcttccgccgtcggtcggcggtggttggcccaccgcttacgcgacacagcagcaacagtcgatcaatgccgtcacttcgtcatcggcaaaactgctgccccagcagcctttttacgcggccggcaactattcgtccaaagccgccgccgcttcaatgtttggcgttatgccacgacctccgatgctttgcccgtggggcggcggctcagcggtgattggcccaccgttgcccgctgcttacgcggcacagcagcaacagccgatcgactccattccgtcatcgtcgtcatggaattttggccaacagcagcaataccaatttgcggcagatctatcacaacaacaccacaaagtaaaaaacttcggtttgagagaggaggtggtggatgggtagccccaatcaaagaatattttagatgtcgtccacttcatcaacggcagatttgcaccaaaagctgttcgttccgactgccgaagatctttctgacagcatgatatacccatttgatgtgacgcatttgttctgcagagaaaaaacttcggagattttggacccccaggttagcaaatacctaatcattaagagaggagggggtatatgggtagcaccactcaaggaatattaatattttagatggcgggccccacttcatcaacggcagctttgaacccaacgctgttcgttccgactgccaaagttttggaccccgaattggttagcaaataatcattaatttgaattagggaagttacttagacacacaggagggcattagttttgcatatccaaaatgaagcctcttaatttttgtgagtgaaattatggatgacttataaaactgtatcaaaattaaatggttgtggtactcatttggtggtgccgaagatgacccatattgatttgttcaacaaaataatggtcattttcgatttgcatctctttatatcatggaaatgttttctctaaattcgcttttttccttcccaatctccgctcttttcggttttagaatgtattaccctaaaatgattaggcttccgtctgaacttatttccgaattggcgagtgctcttccccttgacccccgctgggccgtcatccgtgtgtcttcggcctttgattttttcgtttatacaaaacagataatttataggaagataaatagccaggaatttaaatttgtcttacattattttaattgttcccacttttaggtggatgaagggcttaaaaaagcaaagcaacaagtttcgtcagttgccaatgctcagtccagtgacgaacaacgacgaaaactgctcacaggttggaaccatcgatgttattttgtatagcctaatagaggctttaccattttgtgttgttgactttatctggtaaaagtcggcatttgttttagaaatcgcggcgtttttcaaaaacaaaacttcagaggctgaagtgattttaagcaccgcagtgtcaacggatgtgaattcatttaaatgtgtgtgcacgcatctttacactcttttggggaaggaggaccaagcaaaagaagcattcacaaattgtaattttggttatggaaatttacatttagaataacaatttcagttcttcttgaattgtgtggagctttctctgtgccttcggtaaattgagtctttttgggcggcctaattttaatcggggcatggtcattcctgtttgtcttttccatttcaaatgaaatttgaaaaaatttatcattacctcatccgtattcaagatactgagcgctggcggtcatgagaacatttcaaaagctttacaaaaaagtttcgagcaagcggaaatctgttgctgcttttgcaaaaaaaatgtgcttttagccaacctctgttattgtagccttgcccaagaaaaatgtcatcaccaatttgagttaattggtttaaaagattaaatatcaaaaaa

SEQ ID NO: 60252 - DNA, 927 bp, Heterodera glycines
atggactcactttttgatgccggcaaaaacgagggacgaaaaaaggatgaggccaatggagggggagatgggaatatgctgagaaatggacagcggaagagaagccagagaaaagatgaggaacaccaagttgaagcgcaaaatgaaccaaacgccgacaaagccacggtaacggtaaattggggtcctaaaaaggagggaaatggggaaagaacccaaaatcctggagcaaaatgaaagattgataacgaattagggatgggacttccaaaacaaattgaaaatgtaaaaaattctaattttcagtcatttaatttaatttggccccattttaaagtgccaccaaaccatgcattttcggctgtcgctttctctttcagtgccaattcgtcagccgtccattccatgggttggacagactcttcaacgagccggacattcttcgaatcagacgacagtggcatgccactcagaaagtgtgttggtcggttgggagttttgccgaaaagggacggaaggcaaaatgaaattcgatggacggaacgaaaggcattggccaagggaatggccgagacatttggaatgaacagctgtctagcacaaaaatgcatctgaagaatctgataatgtgaaatggattcgtattgtaaaatgcatgacttttatgtattttaagggtagttctagagaatacaaaatgagtagtgaactgaacccttttaaaatttaaatataagaaactttttactgacaatgaattactttttttaattatataaacataaagccagagtaaaaatttaaatttatttagtaggagaaaaagaacggattaatggatttgtaacttctgtagtgataacgatggtctgaattttaatggttagcgttacaagttgtaacactaaaaaaaattccaaatatgca

SEQ ID NO: 60253 - DNA, 862 bp, Heterodera glycines
cagattcttcagatgcatttttgtgctagacagctgttcattccaaatgtctcggccattcccttggccaatgcctttcgttccgtccatcgaatttcattttgccttccgtcccttttcggcaaaactcccaaccgaccaacacactttctgagtggcatgccactgtcgtctgattcgaagaatgtccggctcgttgaagagtctgtccaacccatggaatggacggctgacgaattggcactgaaagagaaagcgacagccgaaaatgcatggtttggtggcactttaaaatggggccaaattaaattaaatgactgaaaattagaattttttacattttcaatttgttttggaagtcccatccctaattcgttatcaatctttcattttgctccaggattttgggttctttccccatttccctcctttttaggaccccaatttaccgttaccgtggctttgtcggcgtttggttcattttgcgcttcaacttggtgttcctcatcttttctctggcttctcttccgctgtccatttctcagcatattcccatctccccctccattggcctcatccttttttcgtccctcgtttttgccggcatcaaaaagtgagtccattttcgttttctctttaattttccatttttactcccccccgtttcgtcacagatatttcacgcgaattgtcgccgtcgtttccgtggacaccgcctccaggtccatctatcgcattggctacccctccgtttttgccacacggcgcagtcgcttcgcccgctttttggacgttcagccgttgtccaccaattcggacagtgtgcgaggcgttgcacgccttcgctttaccgatgggtttg

SEQ ID NO: 60254 - DNA, 1214 bp, Heterodera glycines
  unsure (1)..(1214): unsure at all n locations
atggaacagttcctcaagcaggagaatctcgactaccaagtacagtcgaccgacttcatgacccaggccaactcattggaggactttttcggcaaagtggtggtggacaacatcgtacaagagaagaaggtgcgtttggcatctgatcaccgatctgtcactgttgatctgactcattgggccttctgttcctgatcatttagggctttgaatttgcatgttttggtgtgatatttgtggtcattgatcacgattatggcatgcatttatgcgcatattccgaatgccggatccgaatcgaacaaaaagtcgagaattcatatttttactcaaaattaattcaagcaaaaattagttacaaaccattatagcatcaaaattagtcatcattctgtacatattttaacatacctacatatatattcaaaaattgggggtttcgactttttgttcgagttccggtccacgaattcggaatagccaaaaggcatgccatcttcatgatcaaaaatgaatgctcaattagctggatatggttaactgattggactcataggatgcattagagctgaattcgagccatgacagaccaatgatccctgaattctgcttgattcgttagtttagtgattctaactttcctctgttttcagaaggcttacgctaaacagccgaacgacatgaagggcatcgccgttaattgggacaaatggcccaacgtcgccagaaaggttgaggatgccaatgtagcgtccaaggtgggaaactgtgtccccatttaaacagtttaataacgcacaattcgattccacagattggcatcaaaccaatggtcgcaaaggcgggcggcgtcactttgttgggtcagtcgacgctggcggggtcggcccacggcaaaacgaaagtgcgttcattttgagggcattttattaaaaaaccaatataattgaatatgttttaagcgcgtttctcagaagaagcccggtaccatcagcaaacagttgggcagtggcacatcggtgacgcaaaaatcttcggcgacggaatcggcggccaaaagtacgacgcaaaaatcttcggctacgctgngccaaaagtcggaggcggaccgggagaagtcgaagaaggaggaggagacggaaaccgaaacggacgaggaggaggaaacgacggacaatgagggaagaggaggaagaaggcgaggaaagtgntga

SEQ ID NO: 60255 - DNA, 420 bp, Heterodera glycines
atgacaattgtaatggtgtgccggttccgtttcgttttggcacttgttgtcacggaaattcatcgccacattgacaagtggtaagggtttatttaaaaaaaatgcctgatctgagcaatttggacagatccctgactatttatgatgtatttttctaataattcaattttcttggttgaatttttgggacaatttgaactattttcatcaatttgataaaaaaaatccacttgaaatacgtaggtctatcatccgtcgactgacctaaaaattacattttttttctaaattgtcaaaaaacctagtttagaacaaaagtatgtaactacattgtaagaccacaaaatagaattggaagcattttatagaaaattaattaaattaattaaaaattttagtgttttccattctttacaatga

SEQ ID NO: 60256 - DNA, 435 bp, Heterodera glycines
atggcattttttccagagttgcaatgttggcacggcttttctgccgaagcggaacttaaagtgtaccttcccgaattgggccttcataacagtggcattcatatgcccttgaaaacatattccgtaacgaaatcgacaaaaaattgcccaaatcatctgctcaaatgctacaaatcccaatgcatcatttcaaaagatgccattatcgaacgcattgataagaaactgtttccggaaaatgccacttacgaagtggagggcacggaattggaaggtgaacgaactgctgagaattttgatcagattatctatccatcagagatcagcattatgctggcaaggaaaatgggatcaaaattttgcaaattaacacattactgggcaaaaaaaaaaagaaagtttaaaatattttgaaaaattgacctacatattaaa

SEQ ID NO: 60257 - DNA, 427 bp, Heterodera glycines
atggccgcagcggcttactcatttttggcaatgcatgacgcggatgacgggccagcgcttgccggcatcaacctgaactatcggcacatggtgttcatgtaccatgacaagcgacgagcgttgaacaagccgccaagcagcggtcgcaagggcggtgccggcggcggtggtggcagcgcggactcgccgccctcctccgcggttgctgcacagctggacgagtcgccatccagcagttgctacttctcgctacatgccatcaaattctacttccaggtcgtccatcgtcatgccgtgtcaaaatatcgcaaaaaaaaaaaaacaactaaaaattgctactttttcaatgtaaaatttgcaaaaaacaaccccagttcatgtgggtgcgccccaaaatttcgtcgccgaatttaaaaaaaaaattaaa

SEQ ID NO: 60258 - DNA, 117 bp, Heterodera glycines
atgacagagcaaatgtgccgaatcagcgcagaacgaaccgttgggcaacaaattgaggcggtgatgacgtatttggccaatgtacggggcgaagtgtacgaaaatgcgatgtgttgg

SEQ ID NO: 60259 - DNA, 652 bp, Heterodera glycines
tcacagtaatcattttcctatcaaaaaaagaaagaaaattattacaaagaaaatttatttattttttttaaattgcaaaaacaaaattctgcagctttttggggcctttcattttttggagtgttttttatttgtcccttggcactgagtgagcggaaatatgaaaatttttgttctgcaaaatggctttttgtgggcatcagcggacggaatgatggacaaatgttggattattcaatgaatgaatcggcggacggacggcagaaaaaatattgccattttttgtccgatgaatttaaattccattggaaaaaataagggggagaaatggacaaagaaagggaaacgaacggacgaacgaacgaatgggagaaaagaaaaagcgaacgatgggacggacaaatgatcaaaaaaaacaccgcaaaaacggaaaagcgaaggaagagaagaggagccattccattcattcaattgaattcaaattgagaaattgcaacaaattgtggtcggccgaaggaaagggaaatcgtcggacaattttaatgaaaaataaaatccaaaaatgaattaaataacgataagaagaagagaaggcaattaaatatccgaaaaatataattaaaaccgacccaaaattgtcccaattataaaa

SEQ ID NO: 60260 - DNA, 481 bp, Heterodera glycines
atggctagatgcaccgtcacacgtacagtcacttcgaaccgtttaaaccatacaatttttccctttttaagttcttaacgtataaaatggtttcattgtcaacatgttcttccaaataccgttgttttatttagaaattcctaaaaacaattgttatttcagatccaattaatcagtgttgcaaggaccatgacaagtatgtttgaagaaattatgaaaaaaaacgaaaattttgttgaataagatgaaaaataatttattaatgcactccaaaaccgaagcgcctcgttgtttaagtttttttagtcccataaagtataaacatatgaaaatgaagaaaaaattaaacatttaaatgctttttttcctgaaatttcaaaatgcttcgattaaaaaaaaagtttcaatttttcgattagacaaaattgagggaaaaaaaatttttacatgagtgataaaacgcatgacaaaacaacaaaaa

SEQ ID NO: 60261 - DNA, 318 bp, Heterodera glycines
atgaatcgaacagccgttcccgaagagaatggcaaaatggagcacacttttgaacgcatgggcaacattcagtggggcgttggagaattggagtgggaggcatggatgcgccagttggacggaaccgtaattaattattatgtaataattaaatttaattttttaaattttttccaattctaagggctaccaaactggacacaagtacagattgccaattctgctcgaaccaatgacgaaaaagaaatgaatgaacaattaatacaatagagagatatttaacctaatgcaaggatattaattctataatttaatata

SEQ ID NO: 60262 - DNA, 2751 bp, Heterodera glycines
atgttggatttggttggcaaagaaaaaagttatagccaaaaaatcggctggggccgaaccgtgcggggccgaactgaggtagaccggcagggaatggaaaaaatgcttagaattggatgggaaacgaacccatgcctgcaccccatttcgtagtggcaaattttattgaaaattccaataaatttcaaataccgtaattttaatttattgtgagtaattagctgatgaaattttcatctttcaacgttttgatgaaaaggcacgtcagcggattacacaattaaattgtcaatttgtccacctttttcagttggtcgttgacattttggccaccgccgggttcattttggacgcggaatcggcattgaaattgcgttggttttttgtacaataaaaaataattaattttaaaaaaatatattttctctctaaaataaataatttaaaaatgcaattcaatttttaaggcttttatattgtctcatttcttaattatgcttttccaaattcagaagaattgtccgccagtgcccttccgccctttgcttccgtcgatggttcgtcccaatttgtgccgcccgccaccaccaccaccaccgccgccccgttggcacttgagtcaagcacagttgagcagcagcaggcacagccaaacccattcaaagccgcaccaccgtactccgtgtacgacatcgccaacggcaactttacagtactcggctgcaccgcgcaacgaccgtacctttttctcacgctaatcgcacgccaatgggccgcactgttgatgctgttcatgggcctggaacgacttctgtttgtcctctacccgctgtggcttcgctccattcaaatgaagtgagaaaaaaatgatataaaaagcgatagcattttagggctcggatttatatatttatatatgtatattaaaaaaaattggaaatgttttatggaagcaaaagattttctaattttgattaaataaggaaaaaattttatataattaattcttttttttttacaaaattttttggcgaaaaatgttcattttgtcaacataaattaaggccctagcaatttggacaaaaaaccaaaatattcacaaaataagcaaggaaattttagggcttgacgctattttatatatgaaaatttcaaaaaagcaaaaactttttctgctttttatgattaggtcaagaaaaattgaaataatttaaaaattttacaaaatatttaacgaaaaattgtcaattttaacaacattaattcaggctctggtaatttaaacaaaaagataccattaattttgattttcattatttaactttatgataaggttattttataaattaaaacctaaaaatagtcacaacataaaaatgggaaattaaaattttcatttttgtgaattgactaattgcttcctgatcactttaagtagcttttagcttttggacatacatatatgtaatctttcaaatttatgatttatttttttattccaaatttaatttcattttaaattttataattttgcttacaaagtcaattaattaatttaatttgattaagtgtggccccacttaacgtgttcaccgttttctttgccctcttctccactggcattgcctacacaaatgccacttatgtggcggcctatgagcaaacgcacttttcgtgtgaagcgacttgggcattcggcgaagactatgggtaaaataaaggacaaaaaaaattggcgaaaaatgaaaaaaaccatttttgaattttattaaaattccaaatggggaaaggacacttttggtttgcaatttttttgtaaaaaataagtcgtgaaaaattctttctaggcttttcggggcctcaaattacgaatccgacatcacttttgaccagttcctaatctctaacttgactcgaaaaaagttgaaaatttccatttttaaaaattaaggtaggttagcgattcggaattggttgaattatatgtcagattcgtgatcagggattcggaaacattcggaatcacttttcttacagttagatatcatcttataaaatttgcaaaccaatccgattttactttttattttatttaattgggttttcattttctttttaattcattttaatttatttttctttttacttttaaatttattttagttgattttccttttttcctttttaaatgttttttaaatttatttggttgattttctttttaatttcttttaattatttcttttaatttattattttaatttggttttaattttgatttagttttatttatttttttcctttttatttttaaattatttactttttaatttttttaaaattcttattttagttggtttttctttggcattgtcatcgctccccaggccttcggctgtctgttctgcattattgcctatttcatggtccaccatgaacatgcactgagaaaatttgggggcaatcgcctgaaattagccagcgaaaagagaaaacttaggtttttttttgcaaataattatcaattttttacaaaaatttaatttcaggaaaatcaaatggcttctgatcacttcctcctcattcgtcgcttttccccaaatgcttttgctttttctccaattaattgctccacaagaaatgtttctgatcaaaatgctcatctcccaactgttcttggccaaatgtttcggcaacattttgatgtacaatcgagcgattgcttcaacacgatttgggttcattgaaatg

SEQ ID NO: 60263 - DNA, 83 bp, Heterodera glycines
aaaaataggcttagaatcacatttgaatattttacaaattaatttttgatatatcattttttgaaaaaatcgattttttaggg

SEQ ID NO: 60264 - DNA, 1009 bp, Heterodera glycines
agcactttctgaaaaaatatttatgaaacaaaaaaatcgattttttcaagtgtccgtttggggtactcaaacatttatggggagcaaaaatccaacgcagaattaaagtacaggctatagggaagctattcccgaaggattcggtctccccataaatctgggcgcatcggttcggggggactgccccgaaaacaaaaaaatcgattttttcaagtgtccgtttggggtactcaaacaattatggggagcaaaaatccaacgcagaattaaagtacaggctatagggaagctattcccgaaggattcggtctccccataaatctgggcgcatcggttcggggggactgccccgaaaacaaaaaaatcgattttttcaagtgtccgtttggggtactcaaacaattatggggagcaaaaatccaacgcagaattaaagtacaggctatagggaagctattcccgaaggattcggtctccccataaatctgggcgcatcggttcggggggactgccccgaaaacaaaaaaatcgattttttcaagtgtccgtttggggtactcaaacaattatggggagcaaaaatccaacgcagaattaaagtacaggctatagggaagctattcccgaaggattcggtctccccataaatctgggcgcatcggttcagggggactgccccgaaaacccaaaaaaaaattttttggataaaaattatttaaatgaactgactagataatatttaaaataggttatttctcttcctttcagtatccctgcaaagtttggtgcgcttctgatcagtttctgaaaaaaaagttaagcctaaactttttggcctgtttaaaaaggaattaaaaatttttaaaaattttattcatctccctttttgatagaaaaagcatcagagtgcctaaactaacatgtaaataaaatttggtgcgtttcagaaccctttctgaaaaaatatttaagaattaattttgcaaaaaataaataaaaacgaaagact

SEQ ID NO: 60265 - DNA, 601 bp, Heterodera glycines
atgggcgaaatggttgtcaatgagatcgaatgggcgcgtatcgaacgcccattggacgatacacaattggcatttgccgttcaaaatgacatgcacttaaaaaagcggacagacggcgccacaactttggatttggaagcgtttatgatgaacccattctttgtgcgaatgatccaagatgaaaaaatcaaacaaattttgtgcagaattctctttgatgaaagaggtgggcaatgaaaaataaaggagggggaaattgggatactaattaaattttttacgttaaaatttaattaaatgaaatagtctaaaaataaataaagattttgttaaaagagtagggtggcaatttttttgtcttggccattttttaaaaaatgattattttttgtacagacatatatatatatataacttattttactctggaaattactatttttttgtatcgttgagaattatttcaggcatgctaaaatacggatatccacagacaaaaatttccaatttgatgataagtcttagtttgaataaattaaaaatttctcaaaaaaccctgccagggttaactaccttttgaaatttttctttttaaaataaa

SEQ ID NO: 60266 - DNA, 49 bp, Heterodera glycines; identical to SEQ ID NO: 51181

SEQ ID NO: 60267 - DNA, 1307 bp, Heterodera glycines
atggtcgaacacttagcgttggtggcgccaatagtcaatgcaggtttggggcgtctcgaaaattttggaagaaatatgggagaaataaatggcggcgaaataaggaatttgccaccaattggccacctttttgaaagaaatggagattttgaggatagttgggttcgggaaagacctccactgaactcaccgctattcgagtcaattcgccacgcgtatttgaatgtgggtagagccgaaaacaggggtcatcatttaccgccgagttttccaaatcgtgccgtcgaagcgtatgccaccggtggtcagccaactgcacactacacgcgagcccacgttatccaacaactgcacacgttctatacgcagccgattgcagtaaaaccgaccgtagtgcaataccaagcccatttacagcaacaatttgctcccgcggcaccaaatcgcatccatagtcctgtctcagcaaatttcaaccgtgatgcgaacattggtcgaaaccaacaaccgcagacttttcaacataaagaaaggggccaacaggtccacaaacaaattgcttatgcgagtcatgaccatttgccattccaaaaaggcacaaactcccgggatggaaattttgggcaaataaaccccgtgaatgaacaaaatcgttactatcagagtaaccaagtcgaccccaacatgataatggcgcagaccattaaaagtcttgacaatttctcgtactcaatgacgctccaccatttgccagagctgagaggaaatgccggagcggacgaagtgaatgtcttttttcgccagttggacgcagttagcgaagattggcccaacgataagcgcttaagcgccgcgttaaagtcaaattctcgggtaggtcagaacgcgcaaccaattccgccgttgccaacaatcccttccggtatgaaaatatccgaagagcgatgaaacaacaactcgattcaacggatgcgaagtcaacctgtgcttttgatgagttgatggcaggtgtccgcagaaggaacggagaaagcattgacgatttggcggaccgagtctcatcgttagtgcgaagggcataccccgggctcggcgaacattcatatgatgattattcgatccgacacctcatccgctcactcaaaaatccggatttggcactcactttggaactggcacgcaaacacgatatgatcttcgacgaattcgtggccatggcagctcgcgcggagatcacacaaaaattcgcaaaagcagccgagcaaaaagacacaaattttcgccaaaattttgatcagcgtcagcaa

SEQ ID NO: 60268 - DNA, 1956 bp, Heterodera glycines
atggcgaaaattcttagcaaaattgatgacaatggagacattagctcagccgatcagacgtcggagtaccgaatttttcaatttgttttgcaatttttgacaaagtgcaatttgactgaacaaaacaaaataaatgttcaaaattgcttttgcattttgtcattttttgttgagcaattattggaaaatgcaattaacgcaaagcattttccattggttggcattgaatccatttcgatggcacgtgaacgctttgctgagaagcagcagcaattgtgcgcggacaaaaggtcagtggttttgtagttaccgtagtaaaagtagacaaaataattacagtaaacatttttttatatatatatttttttgtcttttttttggtttttttaattccttttttttattagttatttttgttcgtaggttttttccacgattgcatttagattttttaatgatattttttttattttttcttaccttcttttttttcttctttttgccttttttcttatttttttaaaaaaaaaagaaattttctatgataattttagagtctatagtattcattattctattagcaactgaaaattgagtaaagagaaacaggataaaaaccacaactgcatacaaaaaaaaaataaacaaaaaatacaccttttttatttcaaaaatccaaattcgtgtattttactgatccaaaaatccccaacatttgaaatattagcgttaatttatgaattgtctaattttcaaaaaaaaaaaaaaatcgattcgtctattatagcaatcgtatgttgataaaacggaaatttcatccaaacaacataattcgttaatttaatgtttaagcataagcaaagaaataagaaaatattttggcgaaagcattgtaaacttcgcaaaagcagttgaacttgactttgattttgacaatggtattataataaaattgaaattgaaaaaaagattatatattctttacaaaattagggataagcctggctttagaatggaattttgattttttaaatcttggataatgtgataagtaaagcggatttgtattgtttcatattttgcactaattcgaccaaaacatcaattaataaaaacttttgatttggtttgttatttttataaacatttttcagatttttgtccctatttaaggctcttatcacatgaaatttcgaaaaaaaaaacactaaaatgatcaaaaattaaaaaaataccgaaaattcaaaaaattcgaaaatttttaactttttcatgttcaaccttccaatttaaaacacattttctttaacacttatttttccaataaaaaaacttctttattgaatcaacaactgattcatcggacattgaattcttatatattttttttatttttcaagaattaaaatgattttttgcttctagtctcgaaatttaattggtaaagatatgataattcagtttttgagcttttttgttttgggtttgccttttgttgtcaattgggaaaaaattaattttgtctaatttcaattatatgatcaattcttacagatatacaacaaatcgttcccgtcttattaatgcaattcgaaaaattgaaagaaaacaaagtttggaataatgcaaacccgaaattttttaaaacggttgaatggaatttgctcgaatttgagctgaaagcaagtgataaaaaagaaaaatgggaacaaattgaaaaattgagaaacaattgggaggacacatttggaaagatggaacaggaaaatgcaaaatttgaagaaaaaatgcaaaatttaaaagaatatttaggaaaaatgaaacaagaaaaatctgtatcaaggaaaaagcaattgcaagtgaaatttattgaaaagtgagaaaagaaaaattcgaaagattgtgcgatgtcattttatttttaagagaaaaattagagattttctttccattaaa

SEQ ID NO: 60269 - DNA, 1119 bp, Heterodera glycines
atgcataatttcttgaaagatacggaaaagcaaaaaataaaattcagtcaaattttatttgaaactgtcaccaaatacaatgacaatgtgaattatgatgaacaccgacagctaatttcattcccactttcgatgggtgtacatttagttaagcgattcagtgcactaattacattaattagtcagaggtgagcattttgcatttaattgtattatttagagaacggggatgaagtgcgcttataggggctgtggtcgaaaatggcactttattagcagtttttcatcaaaaaacgaccaatttatgcatttttggacaattttaaaaattgcaaattgaaaaaaataatttgctattatttccctattttctaaacaaaatacttttgtcaagtgcgaatcgggattatttataataataattttatttttcaattattatattttgtttttcaattattgaacttctactccaattgaccgaatttgttggatggaaatggattttgagaaaacattgcaaaatatttcttcagaggaaccgcttcagctacataagccactaatgacattagataattatcaatgggtcaatttcaaattgtttcttacattggcaattcgattaagtactcaaattgagcaaatcggactttttttgagcacattaatctccgccaacaacaattgttatgcgtcatatgagtaagaaaaacaaaaacataattttattcacaaatggaaaaagatgaatttaaatttgttcttttttcctagtgtcatttaaatttttaaattatttaatttctctaaagttctaaatatgtgaataaacagaaaatatgttattaaaaattgatcaagattttctttactctttactagtttaggttttttgattacaaaattcaaattcgggacaacaatttgctggaaataaattctccgacttggcttctgccttattatgtgaattatgaaaatgaaaatgaaataaaacagaaagaagctaaaggtaaaagcataactaattaatttaatttttaaataaatttaaatattattaattttgtcaatattttctagaaatttattaatttttaaaaatggttcattaaa

SEQ ID NO: 60270 - DNA, 476 bp, Heterodera glycines
atgtatgctgccgcaaaagaacaaaaagttagtcaaaaaagaagtgcttcagtatttaatgaggaatcatcttcccaacaaccattaaaacaatatctactagttctatagtcagcggtcgtcaataaaaaggaaaaatgatacagaacaaataaacaccccgataaataataaataacaaaaattgaagaaaaacttttggttaacaaattacacttatcggaaaaagattgcaaattaactgaacctaattgttaacaatgtttcggtgtgaagttagtatagaattaatgtcaagtatttttgcgtgtctctgctcaaacaaagaattgatccacatttgaatcggcgaatcaagtgtcaatttcaaatccgatccgattattataccggccaattcaccggcaaggttcagcactgctcctccggaacttccaacgttgcttcccggagttcctactaaacagcaaaattta

SEQ ID NO: 60271 - DNA, 56 bp, Heterodera glycines; identical to SEQ ID NO: 52733

SEQ ID NO: 60272 - DNA, 558 bp, Heterodera glycines
atggaaagaatttcactttttgtcaatattgccggcattgtgttcatctttttctgtattggaaggtgatagccctataatttaatattaaaaaaaacagtaaaacttttttttaatagaattaaatatctaaaataattatttttatttgtttagtaattaatttttgttaattaataagttattttgattaaaaaatatctttaattaaaatattttttccattttagtgatgccgtttcaatttcggactgtgccgaacggcgctttcccggctccgaatcatttgtctgtgtgtgcaatcggacattctgcgacctgccaattgggccccatcggttgggcaaaaatgacaacaatgccattgtgtacatttcggacccggccaaattccgtctccatcaacagcaagtgccaattgaggtggaatacagtgaccaaaatcgtcggaaggataagccgcagcgcatttgctcatcggatgacgaaggtatggaaaaaccagcacattttggcagtaataattcagacctggcaaatgccatcaaaaaatgttaa

SEQ ID NO: 60273 - DNA, 336 bp, Heterodera glycines
  unsure (1)..(336): unsure at all n locations
atgaagggatcgaaaccgttaaaggattcttcaaaagagtatcaaacagntctgggctctggcggtgcgttcactgacgcggctggcgtcaatttgaacgcgttgagcaacaccacgcgtgcaacactgttgcgtgcctattttgacaaggacattggtgggtttggcacaatagaaaccttaaatttaaattggaatttttcataaaattagtgtaattagatttaaactatttttctggttattcttatcagcactcaaaaatatgagaattaatatttcagcgacattttttacgcttttatggaagacataataaaaaaaatagaaaataaa

SEQ ID NO: 60274 - DNA, 221 bp, Heterodera glycines
ccgggactcaaatgtcccgcttaggccaaaaattttttctatttccgggaaaaaatcgaaaattttccgaaaaaaataccagtcgatagagctcgaaaaactatgttttggaagtggccttcgtttttctgggaaaattcgttaaaaaatcctaaaattcaaaaacccgaaaaccgttttttaagcctagctcgaaaaattttgaaaattttcgaaatttt

SEQ ID NO: 60275 - DNA, 453 bp, Heterodera glycines
atgccattcgccgttcacttatgtgccgatggaccaaacaatgtggcggtgcaacggaagtcgctgagtcggctcgaatttgtggacatttttgtaaatgacagagaagcgatatatgtatgttttgctatatcgtatttcctaaaatggcttttaaatcaaatatagtttactttagaaattatggaattggtaccattttattggatttttgggtcctaaataatattatctcataaaatgattttatcatgcaacttcaaaattgattaattcaatgattgtccatgttctgaatacaggatttatttaatatttggccattttccatttttaacaaaacaaaatcaaactatcatattttgttaagaaaagatatttatgcctttaatcgccaattacctggctcgtatttttattttattttttcatttctttttgccagataaaaca

SEQ ID NO: 60276 - DNA, 704 bp, Heterodera glycines
atgacaaattttttgcgattttttgtcaatttgttaagaaaaaatgtgagttattttttggaagggcgatgggcggtgccattggcgctaaaattttaaacagattttcactgaaaattttcgatttttcggttaaatttagcaaaaattaatgattgttatgacaaaatgctaaaaatttgatttttttacataaaatgtacattttttacactcatacgcaaaaataccggtttccaattacatggaaatgaatacagttaaaattttctaagcacaaagccgaaatccgagtacgtacttggcatccaagtacgaatccgagccctgttataacagattaaaaaaaaagaatttttcacaaaaaatgaaaatcagaaaaaaatgaatgaaactggaataaattgaaggaaaaataggcaaaaaagttgggcacaaaacgtactcttattcatagatatattaaaaaattaaatttaataaattcaaagcaataaataatgaaaaactcagaatttcgaaaaaatttttaaaacaaataagtgttgaatattttcaggatatgtgataaaaatgtttaaaatagattctaattttatatgatgggttgaaaatgcatttatagaaaaaaatgaatgttttgtgtttcgaaagttgaaaaatttctagaattaaatttacataataattgctctgaaagatga

SEQ ID NO: 60277 - DNA, 520 bp, Heterodera glycines
atggaaagtatttatgctttcaatccttttggtatgttcattcaaaatttttgtttaattttccattcttttttagttaattcagtctcgacaagtcttggtctctgatcgtaaatttatttttagacgctttgaaacacattccaatttgtgcaccaattaaaaaattgttgatcagcataataatcatctgaatggcatgggttctccgcctgatccggcgatggaaatgccgccgccaaaagagatcaaagtgttggagagctcggcggatgacattcagcaccggcaaacagaagcaagtggttgagaacagtacacaccattaattcgggcgctaattggccttaattggtcacataatgcctgagagatttaattcggtttttaatggcttcaaattggaatatctgagggcataagtcatttggacaaattttatttatttattgttttgtttaaaatgatagaatttgtgactgtggtcggatttatttcttttccgaaaaaagtgaataaa

SEQ ID NO: 60278 - DNA, 695 bp, Heterodera glycines
atggcatacttcggacagcaaaaggagcagaaacaggagctgcatgatggggccatggaactgaacattatcggggaaggaacgtccaaaaatgaactcggcttcaaagaggagagcattcgtgccggatttgtgcacacgaatctgagcagtgccgaggatgacatgcccatagatgagcacggattcagcgaaccgatcacccgtgccgcttttgtccgcaaagtgttcctcgtcattggtgtaatggtcggtcccttcccttattgtttatttcgctatatgaacccaagttaagttcggggttgtctctctgatgtgcgccgttccgttcgtccatccgcccctaatggaatttgcgaaaaacaactactggctctgcttgatctcgttcggcacttatatggtcgtctactttgtgctgttatgcttcgacagtgtgcgccgcacatttccgaccaagttggttttatttgtttgtttaagtcatttgaaattaaatttttgtcctcccaaattaaagaccaaattaaataaattatttatccaaacagaaaaaattattgaatttgcaatgaatctgtgttttgcgttctctgacataaccgttgtttgatcaatttattcacttttttcggaaaagaagtaaatccgaccacagtcacaaattctatcattttaaacaaaacaataaa

SEQ ID NO: 60279 - DNA, 954 bp, Heterodera glycines
atggcatacttcggacagcaaaaggagcagaaacaggagctgcatgatggggccatggaactgaacattatcggggaaggaacgtccaaaaatgaactcggcttcaaagaggagagcattcgtgccggatttgtgcacacgaatctgagcagtgccgaggatgacatgcccatagatgagcacggattcagcgaaccgatcacccgtgccgcttttgtccgcaaagtgttcctcgtcattggtgtaatggtcggtcccttcccttattgtttatttcgctatatgaacccaagttaagttcggggttgtctctctgatgtgcgccgttccgttcgtccatccgcccctaatggaatttgcgaaaaacaactactggctctgcttgatctcgttcggcacttatatggtcgtctactttgtgctgttatgcttcgacagtgtgcgccgcacatttccgaccaagttggttttatttgtttgttttcgtcggttttccaccatttgcatctcagtttgattttcactgccatcctcacattgtccattggttttctcgccatggtaagtgcgatgatttttgttcacaaactaatttcatttggaataatttaggtcataaccgctttctgttcgtccgtgtccgttttggtggccatggggatcactaccgtttcatgtgttgggatcgcactgttaacaatggtcacgaaacgcgatattactagcaggtgttttattcattgcattttcctgccctttttggtgtttggctttttcatgtcatgaagttaaatgcgggattactggatttgtgggattaatcccgcgggataccgtcccgcaaaaaattttgagcttcaatccctatgcgagatccgcaaatttgaaatttctgggctctactgacaacaaagaaatgaacacagtaaacccaactttttaaagcttaataaa

SEQ ID NO: 60280 - DNA, 76 bp, Heterodera glycines; identical to SEQ ID NO: 51705

SEQ ID NO: 60281 - DNA, 1415 bp, Heterodera glycines
atgaacacaacggcaccaactgacattgaactgtttcttttgttcctcggcggtgccgttgaactgttgataaattttgttggcattccgttgtccattgccaatttgattttggtggcacgcacatcggtcatccacccgaacatgaaagccattctcatcttccagagtttctttattatcttggtaaatcaaattcaattaaaaacaaatttaaaaaaaaataataaaacattttctacttttaagcgtggttgctgtcgttttgttatttgtctgttcaaattcatcactgggaaccaatttggtgccaagcatatgcaatttttcccggtacttttgaaaatatatttcatcggcatttacgcccgtaattttgtgccgcatgttctgatcgttgaacgcatattggccactttatttgttcgaacatatgaaaagaatcgtggcaatctgttcaccattctgtggatgccttttgcggtgagagtaatcataaattattatccaattataactaattatagcgaaaacaacataattttggcatactcatacagaataaattttatgaatacattatcaattcatcctaaaaagtttattttattttgtaatacaccaaaaggaattcttgaaaattttgttaagcattaagaagatataagcgatcaaaaattctatttgcagttgatcatcccaatttatattgccaccacaacgccttcaccacatgatcataagcaaccaataacgaatctgatcataattgccgtccaattgctggtcggaagcattgagttaggcattttctaccaattaagccgatacaattccaaaatttatcaaaaaatgttccaaaacattggctcgaataatctatcaattcgttatcaggtaacataaataaaatatttaataaaaaaaatattttattttgaaagctatcggaaaacattcgcattggtaagcagctcattccgccgttgtcgctgaatttgggcaacattttcgtgggaacaattattttgttatgggaccttttaaattggccatataatgagctgattgctaatttctgcattaatctcaactcattcttcggcctccttatcgaacttttcattataacgtaagtaaatataaaatttaaaaatttgattaattaaaattttagatgccacccatttttgaagagagatttgtgccaatttttgaaccgtattggcaaaatgtttggcttcaatcatttggcctataatcaccgaattggtgttactccatctttgtctgctctcaatggcattgctcagcggaatttgatcagtggaaaagcatggattaatacccaatcaaaaccagaagatcactttgccatactgaaagaagcatgggagaaggggtcgaatccttaa

SEQ ID NO: 60282 - DNA, 1031 bp, Heterodera glycines
atggttatgaaatttgtgaatttgaattggatttcttccgcaatttcgacaggggtcggtgggaaaaaaattcagaatgtctaagaatttttttaagaaaaaggtattaaaaaaatttaaacatttttcattaaattatctcaacctttttttgattctcggaacagatatgtgtaacatttattttctgaattctttttttttttgaatttgtttctctttttttttgaatttgtttctctttttttctggcacgctcgttcttttatgttttttatttaattctgtttcattttttttaggtaaataaaaatattttttggtaaatatataaatatatttttttattttaataattacacatgcagctaattctaatttttggtctcgaatgccctctcgaagatcattcgatagccctaaagattttctattaacctgcaaaatttcaaagaatttcgttaagcttaaaaatttgtttgcttttgggcgatgttatgaattttctgtcaaaatttttattttgatgcttttttgagtaaccacccagcaccattgatttgtgacaaatgaagatcgaatgggcgcgaaattgtcaaattttctcttcattagtttttttttttactaaaaatattcttttttctgaattttcttcaagcgcataattccgacagaggcggaggcagcatatttctctccctattctcaagacctaaattcaaatatgcgtatcccactgcgggattgaattcaaattttttttttcgcgagacggaatcccacgggattaatccgcaaaatccgtacaaatttttaaatttattatgagttttttttattcatcatttttgaagaaatattagtcggggcaaaatggaaaaatcgatgagaaagatttaatcacttataaatcatcatattcatttacatattttagagaagaaaataacttttaaattattaagcttctacgatgaacaaattttttgtttttaaaatttttggccccttggtttaaaatttttgaa

SEQ ID NO: 60283 - DNA, 723 bp, Heterodera glycines
tcaaaatatttggaatatgacttcgaatccaacgagacaattccattgttccaaaaacttcgagatgaaaaaaccgctgactatagtcagaaaacggcagaaattgacacgtgagtttgccaattattaaaattggggaaaaaattaaattattatttttgggttatcaaaaaatcgtctgggagggtatcattgtcaacaatgccattgctgttcattttcattttgatcaaatttttaattttttggcgaatactaaaattttggaatgatgccatacggtgcataaaatttcttaaaaaattttatactacaaattttggttgtcaaattttagtgccaaatttctgatttttaatttgttaaaacttttgcagagaaatggtcttacttattacaaatccttatctggtggctgtggacaaaatcaaacaattactcgccatactgaaaacaataccggacaaacaatgcgatcaaattgccaacgcttggcgccaaattcgaattgagtacgcaaaaagtctcattgagaaggcgcaagcagcagcagcacagcaggaaaaggaggaacagtcaaaacgacgaatttcattaatttaataattgccagtttttatgcatttttaaattagcaaaattatttgcataaatttatgaagaggtgtttttctgagggtttttagaacccggaattttgaaaagtgcaaaaaataatattta

SEQ ID NO: 60284 - DNA, 396 bp, Heterodera glycines
tccggaataaattgctaattctcacataaaatgtccataaaagaattccattaatgtcgtctctatcaaatgaatgtgcaataatgtccgctaatgttcacatgaagtgtaattgatcgaatctccgataaatgaaaaagtcgccgcggcttccgttctcacggccgactgataaatggcgaattgcaatgaaaattatcggattgatctttgagctttgaaatgggcactaattagccgaacatggactcaccctaaaaaaataactcaaataggctcaaaaatcattaatttggccgaaatttaagcgatcagagtaaaaataatttctcattcgacttttgaattttctcttgcacaattggcagtcattttaacttagtccctagaaatttt

SEQ ID NO: 60285 - DNA, 1016 bp, Heterodera glycines
atggcaaatacaggaggcaaaattgcctttgagaattctacggtaattttcggcaatttttttgttttggtcgcacaccaaaattttaaaaacaaacaaaaattcgcgcacaaattcatataactcatctttttaatctgatccatttggcgggatttttgcattaatgtaccaaagataaagctgtacccgaatttgtgaatttgcgtgcatttttgttgattttattttttatttttgacctgccaccccaaaacaggaatgctcaattttgcaaattgcttttgccatttctaaaaaatctatcaattaaaacaggtggttttcaatggcggtaaaattgccgaaccaaatggcacaacaaattgggaaataacgctgaatcttttttttgtcaacattatttctttgaatgatcagcagcagaataatgatcaattctatgagatgaatgtgtattgccatgacaagaatacacaaccattttatcatgcatcctttaaatgctggaacggaggatgccaaagaataattaatgtggatgaacaaaaatgcccaaaaaatgcatatgacattcaattatggagttgggacaattggaaccaacaacaggtttttgatagagaaatggtcaaaatttgttttaaaagcatcaataaagcctaaaatactcaatttaccgtttattccgaaaaaaacactcttggcttagcttagtaaaaatcccaaaaaaattagaagaaagttggtattactgggtatgaaaaaaaggcaagacgttttaaaaatgcccaggaaatttttaaaattaaaaattattacaatctttaaattgtcaaaaagccagagcctgtagttaatatattggaaattgcagaaattttactaaaattgaccaaaaatttgggtaaaaaattattattttgaatacccaatttatataatgatttagtttttatgaaatgaattttgtttatctaaatatatatttttttatttacatcattttaaataaa

SEQ ID NO: 60286 - DNA, 359 bp, Heterodera glycines
atggcaaaaaaatatgggattttatttaaaatttttatatttctctatacttcaaaggatgcaaattgtggccaaaacaaattgattcttgacctatcgccaagttttcatgaaaatagtcaaattaggtaagttatgcataattaatttaattgttggacgaagatgtatatttgcccaaaaatgcacaagtcattacaagtctaaaaatttgcatttaaatttatgccattttttaagatatttttgtcttttacttaaaaaattgcatatgttttcaacattctttttttattaaattttaaatttacagaaaaaaatcgaatcatacggtaatatctaatgattttatggtttag

SEQ ID NO: 60287 - DNA, 185 bp, Heterodera glycines
tccggaataaattgctaattctcacataaaatgtccataaaagaattccattaatgtcgtctctatcaaatgaatgtgcaataatgtccgctaatgttcacatgaagtgtaattgatcgaatctccgataaatgaaaaaaatcgccgcggcttccgttctcacggccgactgataaatggcgaat

SEQ ID NO: 60288 - DNA, 5265 bp, Heterodera glycines
ggggatgatacaaatgagtccgaagaaagcagtctggaactgagtaagtttagcaaattttcgattttttaaagaagataattttaaaatatttaattaagagaataagttggcatttgcggtgccgacacaaaaaaaaattttgtttaatgcataactgaaataaaatgtttttttataaaaaatattacatttaatcaagcacaaccattcatccccaaattgttccaaattgtttgtatgcttttaagcagtaattagttaggttcaaatttagtcaaatgtatggtggaaaacacgaaaacggaggcggatatcgatgccgaagacaatgatggcaattctccatttatgctggctgtcatgaaccagcgcactcaaattgttcgttattttatctcgaaaggggtgcgaattgatcggaccaacaaaaatggtgaggaaaaatgttggatttcgaaacgaacgatattttagaggttttttttaatattttaacgaaaatatcaattgaataaaaatatttatttatttcggtattttaccgatggatccaatcacttgtacgatatctattaggttaaacacttaaatttattttttgctcagttggaattttgaaaaattttattacgaattccaaaatggaatttttgaaaaatatcattagaatttccaaatggaatttttgaaaaattttatgtcgaatttctaaatgtaatttattttgaaaaatacattagaatttccaaatggaattttgaaaaatattattaggaatttttccaaaaagatttttgtaaaaattttattacgaattccaaaatggaatatttgaaaaatttaattatgacattcaaacatttttttaaatttttcatttaatttgggtaattcaaagccattgcaggcatgtgcgcgctgcatttctgtgctggcgctgacgacagatttgagttgtgcaaattgttggtggacaacggggcaaatgccaacaaaaccgatggcattggtcatggcgttacgcccttgcatatcgcatgcggccaaggcgctttaaaaaatggttagaaaatgaaaattggcatgcgcatcctatggattggcattaattagggattactaggctcaatttgttaacggattttcttagaaagaattattaaatattttaataaccacttttgcattttgactaaaatttttacattaaaaattatattatgtataaaaaaaaatcaaatatatttaattcctgcggagggttgaaccaaggaaaacaagtagtaaatcagaaagattagccactaggccatttgcacagttgacagtctttttcttataaaatataacaaatccaacattgttagtatcattcgagagctgtaaatgttctctattaacctacaaaatttaaaaaatatggcccaaaaatttctgaaaacctgtttctgatgtacttttggccataaatttgttcaaaattgaaattttttggaattttgcaggctaatagagcatctgaagggctttcgaaagttcggtttttctaaatccgggtatgggagcggaacccgggaaatcccgttccgatttcggtcccactctatgtactctaaaaaatgaaactatttacttattcagttaaatttttggtggaacaatgcggaggcgacattgaacttgccgattctgatggtgcttcagcgattttttatgcagtggcgaaagagcaattcgatgttgttcaatatttggtctccaaaggagcgcgcattgatcaactcaaccacaaaggtgaggatggattggatatgactgatctggtaaatagtgaatattactagctagggttaagcctgaccccgtcccgaccccggaccccgagattttaggccatttattgcgagttgtaagtagggaccggacttttaggcacgaaaaattgcaaataggcacctaaaataggcacaaaaaatgtgaaaaaaagcacaaaaaattacaaaaagcgccaacaaaggcacaaaaaattggaaaaggcagcaaaaatcaacattttggacaactaaaaatataaattatactgggggtccggcggtgccgataggcgcagcagggaaaatttttttgtaaattgtaagaaatatgataagacaaattgaaaaaatttcaaaaaattttccatttttttcaaaaatactgaaaaaggcatgaaaaaaggcacgaaaatcacgtacccttgcataaggcactaaaattgcataaaggcaccaaaaagtccaagctagaagcttaaatcaagttaaaaactcgtttttcgtgcgtattaattaggccatagcaagttagcaaaaaaaaaaaaggcataagcctcaaaatccgaccctagttataagtagggcccggattcttagttttttaactattttttctgcggctttattttgatgagaaatgcacaaaaaacacatttttaattcggaaattcttcgttttaacgccactattcatcactaggaatcactattttggagcttcgccactaaaaaaaactattttggaagttggccactaaaatagttttttgccactattttggcgtttcgtcactatttttcccactattttggcattttttttggaaaatttcccaaaaattcaataaaaacgaaaaatataccccaagaatcgacctaaaaaaaaatcaaaaaatacacccctaagaatcgacctaaaatttttcaaaaatacacctctaagaattggaaaattttttcaaaatttcttccccaaattttttttcttgctcaatatttgctaagaaaatattggaaaggaaatgttcctcatttgtgactgcaaacagtgaataaaattgtttgccttaattttaaattattttcaaattaaaaaacagctatttaaaaaattacacccctaaatttggaactttttcgccactattttggcatttttttgtcactatttagttaattatttggggattttttatcactaaaaatccgggccctagttataagcaactaaaaaccaccgctggggatatacgatcttttttcctaaatttttcagtactttcctgttatgcgactacaagccaaaattttaaaaaaacaacaaaagggggcgcaaaaggcggtgaccaccaataaataaaatgggtgatacaatccaggggaagtcttgaagtcaatacacagggttttatatgcattacatgcgcgaattttggtttgtagtcgcataacaggaaactaccaatttttcaaaatttattatatgtacaattgatttattatatacgcacaggtcgttcgccattaattgttgcgtgtttggttggacatttgcaaattggtaatttaatgaaataattattggagcaggattttgtgctttttgaaaagggccgatatgaatttttattttaatttttaattaaaattcaattatttctttttttttaattctggtttttccaaaatttctcatttttaaatttataaacaaacaacaaaacaactttatgaatgccgtaaaatccccaaaactttaaccttacttaaaaatattaattgttttttaagccaaatttcttgtggaaaacggcgcggacatcgaagttgtcgcttctgatgggcttactgcggtgagggccgcaataataaaggacagtgttgaaattctcaaatatttgctcgtcaacggcgcgcgcattgaccgctgacgagtttttaagaacaagaactttattgatgagtttctaaactttgggataaaactgagaatttgtcattttacccatgctcataacttgaaaaattagctggaaacccgccgaaggttttttttacacttcgccttaaattttattccagtttattttatcgaattggtcggaataataggatgaaataattttttagcccatttattaattgatttttgccaaaaaatgactaccttttcttttatttatttatttattcaaaaattaaaaaagttaacaattgataaaaatttcaattacctagttttctttagttttcatttcatgaatgcggttgaattctttcattttctttgagttatgggcctgaattatctattattagaacaatttatttattttttaaatttatgctttcgttttattatcataaaataaattaatcatctcttttttagcccacttcttgtgtttttaagttttttaaaaatttttcacatttttttttcattgaacgtattcctaattaggtaaatcaaatattttttagggttttttgtatttattttaaaaattctacatgcataatttttgatctcaaatgctctcgcgatttattgatttagagaagagcgaagagcgcgaaattgtcaaaaatttcttgttcattagtttttaatcattttgttcttttctaaattttcttttggttaatcctttttcccaatttttttttgaagcattaatcccgactgcaggattgtaactcattttttgcgggacggaatcccgtgggattagtcccgcaaaatcccgcgccggtccctacccatatacttctgcatttggttcattctcaacagttttaggaattttctcgcattctcgacaaaaatggtcgaatatttatatttaaatataatatattttttaatcacacagtcaaagctcgctttgttaatatttatctgagctcccaaacccaaaaacacacaaaaccacttacctataggttttcttatgcgctgaaaacgatagaacaatccaaaaaatttaacgcgcttcaactttaaaccggtttttgaacgggtttaaaactcgaaaaattgaggataaaggtggggcctcctgaccttttaaaagggtcaaaccctgacaaatttttgtgaaattttattgttcgatcgttttcagcgcataagaaaatctataagtggttttgtgtgtttttgaggatgctaggtcgaaggactaaaagtgcaaaatttgctaaaattttgaataaatccactaataacttttctcagacgcaacctccttcgccagatttgcactttctgctcgttcacacccacccacgaccatcagacaagaagaatacaagtgattttgcgccccgacgttccaccatggcacacgagtgctacggctttggcaatgtgcgagcaattaagcacgcacatcgggccagatgctggggcatttgtgctgcaccgcaagcggcgcataagtag

SEQ ID NO: 60289 - DNA, 1440 bp, Heterodera glycines
atgatagtaatcctgcttagtacgagaggaaccgcaggttcagacatttggttcatgtgcttggtcgatagaccaatggtgcgaagctaccatctgagggattatgactgaacgcctctaagtcagaatcccgcctaggcaagatagcaatattcttgctccccggtgtcgggaggcactacttatgcgccgcttgcggtgcagcacaaatgccccagcatctggcccgatgtgcgtgcttaattgctcgcacattgccaaagccgtagcactcgtgtgccatggtggaacgtcggggcgcaaaatcacttgtattcttcttgtctgatggtcgtgggtgggtgtgaacgagcagaaagtgcaaatctggcgaaggaggttgcgtctgagaaaagttattagtggatttattcaaaattttagcaaattttgcacttttagtccttcgacctagcatcctcaaaaacacacaaaaccacttatagattttcttatgcgctgaaaacgatcgaacaataaaatttcacaaaaatttgtcagggtttgacccttttaaaaggtcaggaggccccacctttatcctcaatttttcgagttttaaacccgttcaaaaaccggtttaaagttgaagcgcgttaaattttttggattgttctatcgttttcagcgcataagaaaacctataggtaagtggttttgtgtgtttttgggtttgggagctcagataaatattaacaaagcgagctttgactgtgtgattaaaaaatatattatatttaaatataaatattcgaccatttttgtcgagaatgcgagaaaattcctaaaactgttgagaatgaaccaaatgcagaagtatatgggtagggaccggcgcgggattttgcgggactaatcccacgggattccgtcccgcaaaaaatgagttacaatcctgcagtcgggattaatgcttcaaaaaaaaattgggaaaaaggattaaccaaaagaaaatttagaaaagaacaaaatgattaaaaactaatgaacaagaaatttttgacaatttcgcgctcttcgctcttctctaaatcaataaatcgcgagagcatttgagatcaaaaattatgcatgtagaatttttaaaataaatacaaaaaaccctaaaaaatatttgatttacctaattaggaatacgttcaatgaaaaaaaaatgtgaaaaatttttaaaaaacttaaaaacacaagaagtgggctaaaaaagagatgattaatttattttatgataataaaacgaaagcataaatttaaaaaataaataaattgttctaataatagataattcaggcccataactcaaagaaaatgaaagaattcaaccgcattcatgaaatgaaaactaaagaaaactaggtaattgaaatttttatcaattgttaacttttttaatttttgaataaa

SEQ ID NO: 60290 - DNA, 726 bp, Heterodera glycines
atgggcgacgcaattcaacagctcacagcggcacttcagcaattgttggcgaatccgccacaaaatgctgcgcccgccttaaatgcgcatgctctgccttctcttccaaccatcgactgttccgagccatccgacgatagaagcatttcggattggttggagcgcttcaatttcgctctcgactgtgcggcaccgcaactcgcagatcaatcgaaagtcaaacttatcatgacgaaactgagcgaagcggctttcagccaatacagcaagtcgtgcctgccgaaaaaagtcatcgattttgacttcaaccaaacgtaggagcgactcaaatttgctttcagccggccacaatccatttggattgatcgttacgaatgcctgagggcctcaaaaagcgacgatgagaattttcgccccttcatcaaccgacataagcggcttttccgtgattttcagttcgacaagctcaacgagaaattttcgtgcctcatgcttttgacggcactgaagtcaacgaaggatgccgagctgagaaagcgaattctatcgaagcttgcagcggatggtgacttgatcgagtatgatggagttgtcgaagacctccaaatgtaccaatcaaccatcgctgaagcaaaagtcattgaagaacggccgatggcatcgcgaaatttgatggcggtcaaacagaagcagcggcccatgaaaccaacgcagaaagggaactaa

SEQ ID NO: 60291 - DNA, 2793 bp, Heterodera glycines
atgggcgacgcaattcaacagctcacagcggcacttcagcaatttttagcaaatccgccacaaaatgccgcacccgccttaaatgcgcatgctctgccttctcttccgaccatcgactgtttcgagccatccgacgatagaagcatttcggattggttggagcgcttcaatttcgctctcgactgtgcggcaccgcaactcgcagatcagtcgaaagtcaaacttctcatgacgaagctgagcgaggcggctttcagccaatacagcaaatcgtgcctgccgaaaaaagtcatcgattttgacttcaaccaaacggaggagcgactcaaacttgctttcagccggccacaatccatttggattgatcgttacgaatgcctgagggcctcaaaaagcgacgatgagaattttcgcccttttatcaaccgacataagcggcttttgcgtgattttcagttcgacaagctcaacgaggagcaattttcgtgcctcatgcttttgacggcactgaagtcaccgaacgatgccgagctgagaaagcgaattctatcgaagcttgcagcggatggtgacctggtcgagtatgatggagttgtcgaagacctccaaatgtaccaatcaaccatcgctgaagcaaaagtcattgaagaacggccgatggcatcgcgaaatttgatggcggtcaaacagaagcagcggcccatgaaaccaacgcaaaaagggaaccaagttcagaaccaaactcaaagggtttgctggcgttgtggcaagtttcaccatgctccaagcgaatgtccaagcatcaaaactgtttgccgaaagtgcaacaaagctggacatttggaggcacaatgcgagaagcaccatgagtggctcaaccggaacaaaaacggcaaatttcaagggaaaagagcttgcactcttcggatcggaggtgtaatggtgaacattgtgaaccatccaacgaggctcattgaaattaccgtggaaatgaatggaagaaaagtgatttttgtgcttgattccggcgccgaggtcacagtgatcaacgaagagactcactgtctgattggaaaatctcaattgcgccgatgccaagaacaagcagcatatcacgacggctccaagtgcactcttctcggaagaggggaagcgaagttcaaatttggagacaccacgaaaaacggaacattttatgtgtccaaaagtggatcattgaatttattggggattgaaatgctggatgctttcggacttttggacgacattcgacaaaaagtcaattcttcattgcatttgaatgcaatcgaaaaagaaaatggtgaccaagcaacgattatcaaggatctcaaaaagatttttcctgaaattgttgccgacggacttgggcattgcaaaaaggtgaaggcacatttgtcgctgaaacccaatgcaactccaatttactgccgaccgcgtcccgtcccattcaacaccaaatctgttgttgaggcagaattggagcgacttcaatcgatgaatgtcatccgtccggttgaacacacaaattgggccgcacccattgtggttgtgaagaaggccaatggttcaactcgcgtctgtgccgacttttcgactggcttaaacagcgcactgcttttgcatcagcatcccctgccgcttcctgaagacatcttcgccactttgaatggaggccgaattttttcgcaaatcgactttcgggatgcttatctacaagtcgagttggacgaaaattctaaagagttgtgcacaattgccactcatagaggaaattttcagtaccaacgtttgccatttggggtgaagtcagcccccggcattttccagtcaattatggattcgatgttggctggttgtgcattcgcagttgcatatctggatgatgtgatcgtggtaagccgatcaccagaagaacacaagaagcaccttcaagaggtcttcaagcgaattgccaagtttgggttccgaattaagccagagaagtgctccttcttcaaaatggaaattaagtaccttggcttcatcattaataaggatggaagaaggccggacccagccaaaatacaggcgatcgctgagatgcctgtgccgaccaatttgtccacacttcgttcgtttttggtgatgataaaccattatcagcagttcgagaagaacatgcgtttcatccgccaacctttggacaatctgcttaagcaagatgtggtctggagttggtccaccgattgtcagaaggcctttgatcaggtcattcagattctgcaatctgatcagctattggctcactacgacccatcgcaacaaatcatcgtgtccgcagatgcatcagagcatggaatcggagcagtgatttctcaccgctattccgacggcacaatgaaagcagtcgcccatgcttcacattccctgtccccagcggaaaagaattattcgcaaattgaaaaagagggactggctttggtgtatgccgtgcagaagtttcacaaatatctttttggaaggcattttcttctacagacggatcacaagccattattgtccatttttggcaataaaaagggaatcaaagcgtgcaccgccaatcggttgcagcgctgggcaatcattcttctggggtacgattttgaaattgagtaccaacaaacattggagttcggccaagccgatgtgctttcccgacttattgcgaaaactccgatgccagaagacgacataattttggccaaactttctacgagtgctacaattgggaccctaaattctgttctgtag

SEQ ID NO: 60292 - DNA, 963 bp, Heterodera glycines
atggacatggcaatggcccgtattggtgctgttggtgacggtggtgatcgccgccgccgcacttggtggtaagaaaatttactattttggttaaatattttatggtaaaatttaacttttcagtgggtttgtggtgtcggtatcgccggtcgcggacggggcctgacgacgtggagtcgcaggcgcctgttgcggtaatcataatttttacaaaaattcttttagaaaaattcttttttgggtgggtaataaaaatgtggggttgaaaacaaaaaatgctaaaaaaagttgctttatatcccccgaaaaaaattttcagcgaccggaggaggaaaatggcaaggacaaaaagaagaatgaggaaaatggcaaggacaaaaaggaggaggaaaatggcaaggacaaaacaaaatgtcgtcatgcaaaaagcgacgaaaagttctggaaaatttactaatctaaaacttttttaagaaaaaatattatgaagtttttcttattagaaaattctaagaaaaaaacttagaaaattattatggtgaattactaagatttttcaaaaaatttcccaaattcgttgaaatttattgtgaattttttttgttagtaatttttttggaatttctggcgttttttggcacgatttacgacgttttgtcccgacgacgtttcggccgacgttttgtccggcgccggcgcacccttgcttgttcactttgctctgattgtgaattaatggtggtgacattggtgggtcaatgccagttcgtacagtaaaaaggtttacaaaattacacctaagactcagcttataggcctaagcctaaagttagggattattctagcaatacacctttctagaaacgtctattttacgaactgtcaattcaaaaaaaatttctgttttcggtggataatgagtagggctcggatttttatgtgctaaaaatcctgaaatatgta

SEQ ID NO: 60293 - DNA, 1005 bp, Heterodera glycines
atggacgaacaaattgcgaaaaaattacaaaccagcgcaagctcaatttatagttggaaaaggcaatttggatatggtgagttcgtattaaggctacccgtaactggattttcaattatggtaatccgtgaatcgtaattacgacatacggaagtagtaatccgtaattacgagagtccaaaaaggcctttatttccgtagcgccgtaatgcgtgcaaccctggttcgtcgcgatccatttggtcaaatatttcattttaaataaaatcacatttttttttggaagcaccaaacgaatatttttttagtgtaattcgataggcattattttttctcgattacattgcaaaattttataccttttttaatagtaattaatagagcgtacttagtaagctagcgaatgaaactaaatttttatttttaaatattgtattaaaatttatttatataataatagaatatttcaatatttagttgaaaaaataagtcacgaacgcgatgaaaaacttcgaattattaagcaatttcaaaaaagaaagcaggaatgtgcggaggagccaataacaacaaataaaatcgccaaagaattgggcgttggccgaaatacaataagtcgatggaaaaaagaattgggactttcaagtacaaaaataaattatataaatttgaaataatagactacctatttttatacttaaacgaaagaaaaagtataggacttggttctcttattcaaatttattttaaaattgaaaaggttttgcattaatttagaaaatttttacctgtcttttaagggaatttattagacgaatttaaatttaaacatttaaaaaatctaaaatattaatttaataaattattaatatattttacatattcagctcataaacaatattcaaaacaagataagtttaatatagtgaatccaatttgaagaaagaaaaaaacaactgaaaagaaaaggacaaaaaatgccatgcattgaaatgggaaattaaa

SEQ ID NO: 60294 - DNA, 157 bp, Heterodera glycines
atgttcagatgggatcacgggcctatccgcccatcagattcaaatcctacagaagatttgggaacgctctccggaagtggagatctccgactgtgcccgcaatattatggcccacctcctccgctcaaatgcccaaatgtaccaattcttcgatttg

SEQ ID NO: 60295 - DNA, 697 bp, Heterodera glycines
ggtgcgtttggagcattttctgaaaaaatatttatgaaataaaaaaatcgattttttcaagtgtccgtttggggtactcaaacaattatggggagcaaaaatccaacgcagaattaaagtacagactatagggaagctattcccgaaggattcggtctccccataaatctgggcgcatcggttcggggggactgccccgaaaacaaaaaaatcgattttttcaagtgtccgtttggggtactcaaacaattatggggagcaaaaatccaacgcagaattaaagtacaggctatagggaagctattcccgaaggattcggtctccccataaatctgggcgcatcggttcggggggactgccccgaaaacaaaaataaatcgattttttcaagtgtccgtttggggtactcaaacaattatggggagcaaaaatccaacgcagaattaaagtacaggctatagggaagctattccggaaggattcggtctccccataaatctgggcgcatcggttcggggggactgccccgaaaacaaaaaaatcgattttttcaagtgtccgtttggggtactcaaacaattatggggagcaaaaatccaaggtaaaaataaagtagaggtatatcgaagctattcccgaaggattcggactccttataaatctgggcgcatcggttcggggggactgccccgaaaac

SEQ ID NO: 60296 - DNA, 997 bp, Heterodera glycines
atgtaccgtatccgtgttcgagttgtacaaagtgggtacaggaacgaaaacaaacacatatgtgatttgctaatcatctggtaagtaatggacattaaaattcattttgacttttagggatactttttgggcggcatcgctttgtttgtgctgatcattggcgccagcattttctgcgtcgcttatttgatacagtatgcaaaataaaagaagcaaaaggccaaaataaaaatgggaaaaacaatttcaaatttagcgcaaaaattgttgacaagcgaaaaggcaatttgcagtggaaaatcccttttgcgttgttgcagcgacagaaccaaagagtgagtggacgaagaaagaaaattgtattattcgaccgaattccctttcgaatccctaaattcgaggctatgaccaattccttgggggatgaggtttaacatgaaagaaattcctttgcctgagaccgaagtcaaggagaagcgaacccattaaagccctaatactaattaaaggcccggattgattttactgggatccccgattatcgtttttagggtgaaatgccgaatgcgcgagtcacaagaaaacgaatttttaatctcggaatccctgtccattgcaaggctccgttcccagtttttttttcaaaatccgggatcaatcaataaatggggttgttgaaaaagccttatttgttttctttaattcagcgatctgaacggaccgccgaacggagtcaccactctctccgctccaaccaaacaaatatttccgcgttgacccatgcgaccaccagcagcagcttggcacagtcaaaaaacttcacactgtacgcttacaatggacaaatgtgcattgtacacgcgtacggcccaacaatgttggccatgccattgtctgccgaggggatggccgagtgccgaacggtagaagggaaattagcaataatcaataatatggtagactaaattgcaacaatacggtaagataattaacatta

SEQ ID NO: 60297 - DNA, 345 bp, Heterodera glycines
atgaagagaaaaaggaagaaggagaagaggaagagaaaaaggaagaaggagaagaggaagagaaaaaggaagaaggagaagaggaagagaaaaaggaagaaggagaagaggaagagaaaaaggaagaaggagaagaggaagagaaaaaggaagaaggagcagatgaagagaaaaaggaagaaggaaaagaggaagagaaaaaggaagaaggagcagatgaagagaaaaaggaagaaggagaagaggaagagaaaaaggaagaaggagaagaggaagagaaaaaggaagaaggagaagaggaagagaaaaaggaagaaggagaagaggaagagaaaaaggaaagtg

SEQ ID NO: 60298 - DNA, 769 bp, Heterodera glycines
cgggtcgccgggccaccgggtggcccgacttaacacaaaatggacaccctttcgggcgcactcccgttttaccgattaagtaaggaatcgatgaaagtagtggtatttcactggcgccttgcggctcccacttatgctacacctctcatgattcttcacaaagtcagactagagtcaagctcaacagggtcttctttccccgctaaatttgccaagcccgttcccttggctgtggtttcgctagatagtagatagggacagtgggaatctcgttgatccattcgtgcgcgtcggtagttagccgacgaggcatttggctaccttaagagagtcatagttactcccgccgtttacccgcgcttaatcaagtttccttggcttaacattcagagcactgggcagaaatcagacacggtcaacgtccacaaggaccatccgtctcctctgttttaattagacagtcggattccccgagttcgtgccagttctaaactggtcgttcagcgccaaccgaagtgcataccctgacgagcatacacgcagctgaagcgctccacaagcagctctcaccactagtccacgcaccatccccgaaagaacagcacgcagccacgggcaaaagccgcctgtttcacgcaacagcccggctgacccgacctttagagccaattcttttcccgaagttacgaatctaatttgccgacttcccttacctacattattctatcgactagaggctgttcaccttggagacctgctgcggatatcg

SEQ ID NO: 60299 - DNA, 748 bp, Heterodera glycines
atgggcaatctttacctaaaacggcgtattggcttcaacattgtacaatcatacattcccaccggtctaattgttattataagctgggtaattgaaaataataaaatattttacaatttttaaattaatttaaaaaatattttaaaatttaaataaatttgaaaggtctccttttggattgatcgccgtgctgtgccagcaagagttaccttatcatttacaactttgcttacaatgacgacattagtgcgtcaattttattatttattggaaattaattaaagatattaattaatttttataataccttttagggtaatggaatgcgatttgtacttccgcgtgtttcctatgccaaggcaattgattattggtttggcggtaattttattttaatttcccagtgtagcttattgcattttaaaataggaaactgaaatcttatgcttcaaaattaaggatttatctccatttattatttttttaattcgttttcgtgtgccaaaatctcttaatgtatatggggtctcaccccaaaacatgaactaaaatgggaaaataacttaaaaatcccaaatttaagggagcttaattttaatttggttacttttttcttttttgattccattcacaaatttcatcaaaacaaaatcataaaattttactctatttcaggtatctatttttgaagctgtgtattgtttctttgtgactcttatcatattttatgacctaaaaacaaagcata

SEQ ID NO: 60300 - DNA, 772 bp, Heterodera glycines
atgtacacaaggggaggggagctttccctggctaaaccccctcttggcaaagattcggtcgtcccatcgccaaaagtgtcggatacggtagtggaaccgtacaacgcgactttgtcagtgcaccaattggtggagaatacggacgagacattctgcatcgacaacgaagcactttatgacatctgtttccgaactctgaaactgaccacgccaacgtacggcgacctgaaccacttggtcagcatcaccatgtccggggtcaccacttgcctccgttttccgggccaactgaacgccgacctgcgaaaattggccacaaagtttgtgtgcgggtgcgtgctgttccgtgcagtgtttggctcgcttcagcatggtgcccttcccccggctccacttcttcatgcccggcttcgccccgctcacttcccgcggcagtcagcagtaccgggcattgtccgtccccgaacttacccagcaaatgttcgatgccaaggttcgcttgaactttggactcgccctttggtgagtccttttcatatgacagaatatgatggccgcgtgcgaccctcgccacgggcgttatctgacggtggcggccattttccggggtcggatgagcatgaaggaggtccgctgggagggaatgcttctgcttcgctgcccttctttcttatggtgtcgttccctaaaggtcgacgagcaaatgctgaatgtgcagaacaaaaactccgcctattttgtcgaatggataccgaacaatgtgaagacggcc

SEQ ID NO: 60301 - DNA, 1123 bp, Heterodera glycines
atggacagttcagcaacagtcagtgaggagttgtccgcagcagaaagccgagataagcagcacaacagcagcagaagagcaaaacaccggcagcagcaagcagtacctgtagcacaacatccacgacaacaaaatcatttgccaccaaatatgggcaatggcagcagcaggctgaaaaagtgcttcagcaatgccggtgaaggtggtggttgtggaaacggcatgcccaattatcatcaaaccaccactacgccgggaatgatgaacggttcatattatggtaatgtgatgttcgcattacggtagcatttcgactccaactgtgatttggcttgtacttttagtcttgaaaactttttatttcgggtttttgttagctaagtcaatgtgctggttcgtttcgaaaatcggccattttaatattttcgacaaacatggcataacaattttgcattcttggtatcattcgatagccgagatttttctttattgctgaaaatttccaaaaatttgttaaccttcgaaaaatgtatgaaaataagaagtatattattgatgaaaattatgccaaaaatagctaaaatgccgtaatttacgaaaaacccggccagaaacgcactcgaaaaaccaaaaaattttgtgacgctttgcgaatgcttcctgtaaaaactttgtaacacgatcattcttcactatagccaagttgattatcattcatttagacaacatgaattggtcactgaatggaagaaaaggtttggaggacaattttgtgccagaaaagttgaagaaaagtggcggcatttcggtggcatttgccatggacgaattggtcaaaggcagaacattgaatggaactccatgtaagaaattccaattagcatacctattcgttttacaatattaatttttgcttttaaggtgattacttgtttccggattttaatgggaaaaaagatttgaagcaaaatgacaaattacacccagacaatgcgatcaaatacctggaggtgaagcagaattttttttttttgattttttctatgggtcggggtcattttggcgcaggccattttggcgcagacaagtttaaagattcataacttttttttaattcgaccaa

SEQ ID NO: 60302 - DNA, 1122 bp, Heterodera glycines
atggacttcgaagccaggatcaaagcttaccgcttcgtggcctactccacggtgtccttctccatcatttcgctgctgtccgtttgcttcactttgcctatgcttcaaaattacgtgtccaatgtcgctcagaatatggacagggaattgagtgcttgtcaggtgcgccaattcttgaatttttcactaatttcttaatgtttctcctcttaagggttctgcaaaggacatttggtcggaagtgaaccaactgaagagcatccccgtggtgggaggaaatcgtacggcgcgtcaagcggacggatacggaggaggaggcggcgcagtgtccggcggaggaggaggaggtggctcgtgcagtgaatgctgctcaggcggaggcccgggcccagcaggtcccccgggaccgccccggcaatcccggaaaccccggagcacccggatcaccaggacaacccgggaaatctgtttccgctccatgcgaacaagctaccccggtaactttaagctattattggctaaagttaatgtcgcaattcagcctccgtgcaaaccgtgccctggcggccaacccggccagcccggccctcccggaccgcccggccagcccggctcaccagggcagcccggaagtggtggcggaaaccccgagccaggacctcctggacctcccggaccacctggaaaccccggagggcccggccaacctggaggccccggtcaacccggacagcctgcagcatcagaagcagctggccctgctcctcccggaccgcccggagaagctggagccccaggacagcctggaaacgctggcccgcctggacaacccggaggacctggacagcccggcccgaaaggaccgcccggacctcctggccagcccggaaacgacggacagcccggacagcctggcaacgccggacagcccggaggagccggcgaaaagggcatctgccccaaatactgtgccatcgatggcggagtgttcttcgaggacgggactcgaaggcgttgaacattttgaaatctttggagaaaaaacaccgtcttctcttcacttaaatttacctgagtctgtattttggctcttttgtctttatataaattttaagaaataaa

SEQ ID NO: 60303 - DNA, 477 bp, Heterodera glycines
cctccgtgcaaaccgtgccctggcggccaacccggccagcccggccctcccggaccgcccggccagcccggctcaccagggcagcccggaaattctggcggaaacccggagccaggacctcctggacctcccggaccacctggaaaccccggagggcccggccaacctggaggccccggtcaacccggacagcctgcagcatcagaagcagctggccctgctcctcccggaccgcccggagaagctggagccccaggacagcctggaaacgctggcccgcctggacaacccggaggacctggacagcccggcccgaaaggaccgcccggacctcctggccagcccggaaacgacggacagcccggacagcctggcaacgccggacagcccggaggagccggcgaaaagggcatctgccccaaatactgtgccatcgatggcggagtgttcttcgaggacgggactcgaaggcgttaa

SEQ ID NO: 60304 - DNA, 469 bp, Heterodera glycines
atgttctaccaaatcattgccatgggcactttcgccgtctcttccctttgtgtactcactcaacttgtccttctcccttggctcaatcagcacacccaacagctgaagaacgattttgagagtcgcctccgtcgctttcacgtttgacagttgggcaatttcggttcagtgagtgcttctgtttaagcacaacactcgtctcttcgatgaacaattccgtcgggtcagccaattcgccgttggcagtggcggcagtctgacggacaatgcatttggacggcttgtcaaacgccaattagatgagtgccctcctcagcgagtgggccctcctgggccaccgggtgaagtcggaggtgacggcgagtcgggggacacgggggaagacggaccccccggactggacgccataacacttttgttggaagaagcccagaaatgcattatttgtgagttggaattgtttagctga

SEQ ID NO: 60305 - DNA, 848 bp, Heterodera glycines
tgggcgatgttgcaccgggaacaccactaccatcttttcacggcaatgctggcattaccaatgccacaacgcctttggccgttggaaatccctacggacccacgccgcatcaagcttttagtaaattaaacaaacatctgttaattttaaacaaagccatatcccgagtataatttttcagcccaaaaggatcttttccagtcttgcaaaattcaaataccgcctggaaaaccatattagcagatttttgacgcaaattagttttttatttttattaaagatgttgtttaggcgctgtcaaccctgttataggtgctgcgcctgctcagcaagacccttcggcttggactcagtattacaaccaacaacaagcgatggcaattgcggggggtccgccttcccaacctgcttcttttggtgccacgccggcacagcattaccaaacagtgcccgggactatgcaaactgctgtttcacaagcagcacagctccattcaacccaaatgcagcagcaacaaatccatcaacagcagcaagcgaccattgctcagcctcagcaagctgtttccgccggaatgggcgcagtttcttgtatattttatttgtataaatcgaatagttttctatatataaccgatttcaacacataaaaccgtttcctttgttcagcttctggcggacctgcgattaatccgcaaactggacaaccggactacagtgcccagtgggccgaatactaccgcaccatgggaatgcatgaacaggccgcactcatcgaagctcagatgaagcaaacccacgccgccgctcaggcacaacgtcctcagcaacaactttacatgcaatga

SEQ ID NO: 60306 - DNA, 254 bp, Heterodera glycines
aaatgaaaaggggacgaagtcggatgctcaacaacaaaatgagaatgggtctgcgatggcactcgaaaaagtgccaaaaatcgactggaaccaattcgaggtgggcacctcccccccccccttttgcccatttgttttgtttggctcaggtccaatatttggacttagtcagtgccctccattatttgctcaccgtggaagtgcctcgaaaccccgttcttggaaacaccgaattgaccgcgttgaaacgtttc

SEQ ID NO: 60307 - DNA, 3461 bp, Heterodera glycines
atgtatccggaccagtcgctgtacccgtgcaattcggggcccgagttggcccggcgcatcaaccgtgccctgcgtcgtgccgatcaggtggagtgtgtagaggcggaggactacacggcacagcgcgactggtacgcgccaattgttgcggacgcggaggcgggcttcggcggtgcattgaactgcttcgagctgatgaagtcgtacatcgagtcgggcgtgtcgggcgtccactttgaggaccagctaggctcggagaagaagtgcggccacatgggcggaaaggtgatcagcagcagcgggagggacttgcaattaaatattggccgagattgttgaattaaccttttggccgcgatcctgaaatcagaaaatttttatgcgtttggcgtcaatgattttatgattcccggcctgagcctaattgcttcttttggtctcaactcttgggccatgttaattaagcagctaatgatcttttaattcccggtctaattccaattatttttttggtctcgcctcttgggtcatgcataattaagcaactacttagggtggaacataatttttgatacccaaattttttccaatatttaaaaattcataactccgttatttctgcgcctatttaaatgattctttttttattttgttcttcatggtgtcctcttttatatcttactatcgtttcactttttatttgattgatagatttttctgccttttttcccgaccatgccaaaattgaaaattggcccactaattttctcgaattttttatggtcaaaaaaccaaagctgatataacaaaatcttagtttttctatacaatttagaccagtagaatccgaatatggacttaaatgggacctatcttttcaacctgagcttgtactgctccaactccatgcatgaagttcgagctgtacaggtttgttgcgatcccagagaccaaatctaagaccatattcgaactcaacatacccgatttatcttgtttaattaaattcagaatttccaaaaccacttttaaaacattatgttacttggtggtcttgaaaaatgccgtttttggagaccactttcagtctcggctctccaataattcaatttttgtaattaaaattttatatttttgtgttcttatagtcctaactttgctctatttaatcactatttctctggctctgtatctcttttatttttctttaaatcagccatcaaaaatacctacctctaaaatgaccattttcttacttaactctaactccctaaatacttttccattggtattgatctcttgccagaataatggcaacatattattgataataatggcgggtattttgaatcatgattgtgttttgttgaaattaaaaaaaatttttaataaaaaaaatttgtgtatcaaaaattatgttccaccctaagtaatatgagcatttaattcccggcctatttttttgtgcgaattaaataacaaggcaaatgataagggaaacactaatttaattgattacggaattttctttgcttggtctgatcacttcactcatggtcattacacatttgacttttgatcatttcaggtgttgatccctacggcgcaacacattcgtcatctgaatgccgctcgcttggctgctgatgtttgtttttttttaaattatttttcatatacacgaggataattaattttgtaaattgggtggagtgttttttaaaagagatattttttagatataaaattttccaaaaattaacgaaaaacatattctttaagaaaagaatagttaatataataagtaaataattgtttaatgacataaattattaagatttttcatcaaaaattaaaaacaaaaagataaattacaatggaacgcgtcttggtttttaaaagaattgacaacatttaaatgatgctgctgaacttgttgcggacgaattaaaaaaatttccgaatgtcttgcaaaccggaatttttacgtttcatctaacaaaattggaaaatagaaaaaattaagcaattcataggcaattctaacgcttcatttaattggaatttgttaaatcgatggtagaaagcaacggaacagccgaatgacgattgcgagcagatttgtgcggagagaagattggccaagcctccattctttgttcaaatcttttaatccccccccccctccgcctcgccatctcttcccatccaaattgttggttcagcatatgtattttatgcaaatgagccaattttacaaaaaaaaaaattacaaattgcacaaagagttagaataagaagaaaaattataaattactcgaaattttcaaaaaacacacccacctaattcgggatttcagaaaaacaaaaaatacacccctaagaatcgaataaaaaaaaataaaaatacacccctaaaaattgggtttttgaattcagccccccccccccccgaagccaagggtctggctacgcacttgcctcccaatttttgagggtcagaaattcgagtcccaaacaaatcaaaatcccctctcctccctcccaggtttgcggtgtgccaaccatcattgtggcacgcactgacgccgagtcggcacggctgttgaccacggacattgatgagcgtgaccatccgtacattgactacgccgccgggcgcaccgcagagggctattttcgtctgcgcgacgacaacgccattcagtcgtgcattgaccgtgccaaattctacgcgccccattgtgatctgatctggatggagacatcgtacccgaaactgtcggtggcacgcgaatttgcagaaggcgtgcgcaaggaggtgagccaaactcaaagcgagtgaatggaaaaactagtgatcggagaagcgaatgatcggaaaagtgagtgatctggctgctggttactctgctaattgagcctgacaaatcactttcgactcgagaaaagtctattgggcattccgttataattttggattttaatctcggaattagcgtttttttattttcctaaggaataggttatggcgaagcttttcttgcttaaaattaaatcaaattttatttgctaaaacagaaagctttcgagccatttttttttctaattgcattttaataagcattgaaaatctctttggaaaaggtgccaaaaccaatagtaaatgaacttgagaaattttgaaattctcgagtctcggaaaattcaattattacatgcatcaatagccatcaaatcccggttccgatcaggcttaatcagacctctatccgggtaaatttcgacccattatcccatttattttgcataaccccttttttgtttgttttttttagtttcctgacaagttgttctcctacaactgctcgccctccttcaactggcgtcagcaccttcggcccagcgacatggagaagttccaaaaggagctgggcgccatgggcttcaaatatcagtga

SEQ ID NO: 60308 - DNA, 61 bp, Heterodera glycines
aaaggctcaggaggcctttatttttgcgagtaaagcgccacacggccaaaacacaaaataa

SEQ ID NO: 60309 - DNA, 521 bp, Heterodera glycines
aatttggacactacggaaaaaataaatagaaattcttagtccaaaaattggccataacaagaatttttttattgtaaattttcataaattattcaaataatattttcgaaaattttttgtgtgcctattttttcaaaaattatttttgcgtcttgaatagaataaaaaaaaacaaaatctgctatatgaaattaaaattacgtaaaattaaaaaattgtaacaaaaaatgatttttaaaaagatggcgcaaaaaatttccaggacgaccgccaatgatctgtgaggagattgaaattccgccatgcaacccgtgcccgcctggcccacccggcaggcaaggcccaaccggacagcccggcacacctggcagatccggacctcctggccgacctggcaccaacggtgagtggagttaaaaaagtagtttttgttttttaattttacaattttaggcttgcccggacccccgggccctcctggaccgcccggcacgcctggacctactggacccgatggagag

SEQ ID NO: 60310 - DNA, 189 bp, Heterodera glycines
atgaaccacgggttcaagctgttcgaccagcaccataaacaaaatgtagcacagattgccgccgaagcagtgatgcaacacaatttcggagcagagaatatggaagaggaagtgcagaaaatggaattggccagggttaatggaaacgatcagcagacgataatgacgacgatggcaaatggaaataac

SEQ ID NO: 60311 - DNA, 459 bp, Heterodera glycines
atgggtgtttccggttcttcattgtctgcttacgtgcaagtcgcagtccacgtacgaaaagatgtttgacatgatcagaaaccgctggccgacatttgcaccgaaaaacgcatccatggacttcgaacaggcgatggtcaacgccctccgcgcaaaacatccacagagctcaatcaacttttgtctcttccacttggtgcgcaacatgaaatctcgcctaacagacgaacaaactcgcgtaagaaaaataaaaatttattgattttgaaatctcaaatttagcgtttcacaaccgacgctgcctttgcacaagctgtcaaaatgatcacttcgctggcgtttgtgctgcttgaggacattacaccggcgctggcagcgctcgaagatcatcttccggatgagcttgagggcgttctcgattggttgtttgagtttaattttttttttcaatttcattag

SEQ ID NO: 60312 - DNA, 666 bp, Heterodera glycines
atggaaggaaaggaaaaaatcggaaatgaaatggaggatgaaattgggttgccgggaaatccgcgtgaagttcgatgttttaaatgtggacgttctggacattttgctcgtgaatgccgtgatgctggagaccgagaccgtggacgcagagtttggcgcaattggggcgacgctcgaggtcgaactggacgtggaacgtggcgaaacagcgaccagaacgaagtcggtgagggcccgtccacttcgacgtcatcagcgcacttgacggacttcggcacgttcttcaattacatcggaggaaaccaataaatgctaagcgatcggacattttcattattcattcaaattatcttactctttttaatctttaatttctctattttttaattgtattagtcaggaccggggacggtctattcggagggggccgatgatatacttaatttcttaattctctctttctctctcttatcctctgatcattgttcccccgtcaatgtcagcccggggggcggtccttcttttcactaatcgagactctttataagtgttcatccgcctcttctctctctcagtcttgcccggggctcccgcccatcagtctctgtccccgagaccgaatcgggttgggggttgcccattgtatcctgaacattggacaccaga

SEQ ID NO: 60313 - DNA, 618 bp, Heterodera glycines
atgaatctcatgaaaagtaaggaattttaaataaaatttaaataaatcgatttatcctttttgataaaaatgttaaaataattatttgacaaattatataaaaaaaattccggcggctcctatcggcaccaggctgggcgaagctcggcttaacactcgaagccgaaggcgaagcccaatttttattcgaaggcgaagtccgaagctcgaagctcaaaaaacccggttttcgaagttttgaagccgaagccgaagtttttttcaaaattttttttaatttcaaaaatttttcatcacaaatttcggttagataccaaattgattcaattgacaaaactgctaaagaccaacaaacccgataaaaaaaatataatgaactttttgatcaatatattttgaaaatttttataatttttgagtattcacggttttgactcaatttaaaaatgaaatataacttttgggtgccgggggtgccgataggcgccgccggggaaaattttgaaattttagtgcgttttgttaatagattgaattcaaaaatcaaaacattttgcgattttaatttttaattgtattgaatttccgtctaaaaaaggaataattttgaaaaataaa

SEQ ID NO: 60314 - DNA, 1615 bp, Heterodera glycines
atgaaaagccacacaacgcacgaactgccatctttttatacagatgagcagttacttgcgtacatagacctaaaatttggtaatttaagcagttgtagagcacaaataaaatactttttaaggtggaataggtaatgaaattgctcatcatggaaatgtgcaaggtggaataggagatatgcaatcgattcgatctgccgcatacacatacgtaagttaccactaaataagttttctaaatagcttaaaattaataaaatttattcattaaaatttatatcgttgcgtctttctatcgcaaaatacttgtaatttagcctctcggaatttggaatttcttaaaaacaataataaaccgagggatcataaagagagttaagcaccctattattaaaatttttcaagattaaataggcaaattttttgaaaattttacaaagttttcttatatatctatttaaatttccaaaaatataactcaaaaatggaaaaagtattcgctttttggcaaaaaaccactataatttctgctttccgccccagcgttgctaattttacaaaaataaaattggataaaaaattattttcacccatagagcaaaaaaagctctttggatgccctccccgaaatttttttctggatacggcctctcgaatcgggcgtcgcacgaatcgtcaaccacacaaaaatttaaaattttgagttttaattcttaatttaatcttatttactttgttcaacttaattctaacagtatcctatcattaaattaaattcataattatcaatttcttaggtgatgaagcagatattcgcatttaaccaaattcgactgttggctcttccgtctgtagttagcgccgacgttgagagccaaatgcaaaaaatcattaccgaaagaaaatgtgctgtggttgctcgacttcaaaaaccagaaatcaaagcgaaaacagtgcaggtaataattggtttaatttggatgtgtctaaaaattatttcataaactgaggatgctctcaaaaatgtgatagccacgcggcaccgtttagaaacctttaatttatacataaagcggtgctagtgcacttcacaaaaaatactgatttgggcgctccacatatgcccaaagcggggcgcatcaaaaagtgcaaatttgggcagttaacaaattcaattctgggcgcttcaaaaaatgcaaaaaacaaaatctgatttttaatgttttttaccaatttttaaattatcaatatgtctaaatttgattgaattgatgcttaaatacccattctttctaaaagttttgctggatttcgaataaaaaataattaaattttactgataattaaatcattagtcagattactgttaatttttaaatattgattaattacgaatggactaaaatcaaaaaataccgatgaatggaaaattatctgtaaatgtatctgtttcatctctacgtggaatttcttgggccaaggtctatgctaaagctttatttttgaaaatttataggctccatgaaacttcaagatttaaaaaattctaagtaatcggttaatgatttttttttaatgtgcagtaatatttgattatttttttattcgaaatcca

SEQ ID NO: 60315 - DNA, 501 bp, Heterodera glycines
atggacaatgccatggcctcaatgtgcgagggcgaacgtcgtcatgtagtgatcccagccgcattgggtgggaacccacgtttaaaaccaagggtccccggcacaaagctcatgaaaatttctggcttctttctccctgtttatttatactgtttctcctttgttataaaattgatttttttttattttctaattaggctatggcgacaagggccatgacaatatcccaggcggcgccagtcccaactttgacattgtgctacacaaactaatcaggccgagagcaggcgaactttgataagcaggacggacaaatgataacatggcacagagggaatcgtcaattaattaattattattaatttatcaatttatttccaaattaaaatgattgcttttacctacatttgatgatgtttttcaaatctccttttaatttctttatatatttcttttgatgcttaaatacccattctttctaaaagttttgctggatttcga

SEQ ID NO: 60316 - DNA, 541 bp, Heterodera glycines
taacctatgcgtttggactcagcgacaattatcaggtcacgtttcagatcaaacatgtgaagttgtggtaatgcttctcgttctttccgtcaacctgtcaagcgaaagcaaataaaatattgtaaaattgggtagcgccgatgcatatattgaaattcattaaaaatccaattattaaatttgtccatcaaaattttggcgaaacaatataagccctgaattttacacattttcctgtggcggtatcaattttaacaattgcaaaatctgatgctcgacgttcatttttattttcctaactctttattaattctattttcttctctctcactctcttgctttctctctctctcctctcacttctttctcgttgatctcagtctttctctttctctttgtttttattttgtttcggcataatatttcggattgagcacgagaaacggcagcagcctcatgttgaaggagaaaagaccaagaaaaaggatggttgttccgaggcgattgtgcatcaggaaattacatcactcactggagtggt

SEQ ID NO: 60317 - DNA, 2057 bp, Heterodera glycines
  unsure (1)..(2057): unsure at all n locations
atgaccccaacatttgtagttgacttttctaaggcaatggttgaaggcaaagatttggaagagctgaaggcattaattgaagaatttncagacgtttttagtaagtttaggtatgatctgggcttttcacagctgctgaacatcacattacaaccacaactgaggaaccaatcgcatctgcgccaagacgaatgccgtacaaatacaaagaggaattgaagaagcacattaatcagcttttagaagcaggagtcatggttgagtccgataccccatgggtaactccaattgtcattgtacagaagaaggacggtggaattcgtccttgtttagactttcgcaaactcaacgaagttacggtgcccgacaagtaccctctcccacgccttgatagcatcatggaaagggttggaaattgccaattttacagctctcttgacttggccagtggctattttcaaattaaattgagtgaagaaacgtcaagaaaatgtggaattataactgaagacaaagtgtaccaaatgattacgatgccatttgggctgaaaaatgcaactgcagcattttcgagggccatggctatcgttttgtctggattggaggatacttcattggcctacgttgatgatgtgctcattttcacaaaaagtccgaacttttcagagcacctaacggcggtaaggaaggttttggagcgttttcggctttacaatctgaagcttagcccgaaaaagtgcatttttgcctcgaatgagatgaattttcttggatttgttttaacagctgaaggttttaagccaagcttaagtcgaatcgaaattctcaaagaaatgcctgtgcctttaaatgttaaggaagtaaagagagtgctaggacaggcaggcttttacagacggcacattgagaactttgcaatggtcgtagagccattgctgaagcttacgaggcaaggcaataaattcgaatgggggcagggaacagcaaaacgctttcgacaagataaaagaattacttacgcaagccccgagtttaatttttccagattacgacaaagcatttcacattttcactgatgcatcatcgactggacaaggaggagttttaatgcaaaaggatgacgtgacgggcacattttctgccatttcctattgcagcagaaccctctctgctgctgaaaggaaatggccggcagttcaaattgaaatgagtgccattatttatgctttaagggaattcagaccattcatcttcatgtcggacattgaacttcacacagatcacaaacccctcgcgtttttgctgaaaaaatccgaaccaatcagcaattggcacgatggctcattgactacaaaattatcaggtcaaaattgtccacgtggcgggaaaagccaacactttgactgatgcactttctcgtgccgctgaagacaagcccttgtcggagatatacaatgtggatgaactcgaggatattatcgaatttccggtctgtctcgctttggcggcacattccagggtggtcgcggacccatttttgcacactttgaccatccgacacgaggatggaaacacttacaaagttagtttgttggaagagcaggcaggagatcctgaagccgcagcctacattgcgtttgtcagagatggggaatttccagctgatttggatgagaaagaaaatagttatttgctgtagcactgccaattacaaattgatttcgggaattctttattttgaggacaagggactccctccgaggatctatgtcccaatttcgttacgtggactcatttttgaatcacttcactcgtctcttttgggtggtggtcatttgaattacaggaaaacaattgccaaatgcaaaaaatatttttggcccaaaatgtactctgacgttttaacttgggtcaaattgtgtgtcacctgccaattgagacacaatccaacacccgcgtaccgggaagagatgctcatggtgccagccaacacactttttgccaaagttgggctggacttggccggcccctttccgatcacttaaaaagggaataaa

SEQ ID NO: 60318 - DNA, 1056 bp, Heterodera glycines; identical to SEQ ID NO: 29854
  unsure (1)..(1056): unsure at all n locations

SEQ ID NO: 60319 - DNA, 375 bp, Heterodera glycines
atttaagccaacgtgtagaaagtgtgcgggaggagagcacgcgattgagggcggagaatgtcgtgttgggaaagtacatcaaaaatttgatgcgttcgacttcgctcttccaaccgacgaattcgaaggaacaaccgccaaagtaataagagaacgctttacatttggagtgaaatgtttgattgtgttttgctttgcagttcgaaaccattttattctgggttagaattttttgctgtcaatatcgctgtttttccatgccatatttactgaattagagcccccccccccatgtggctctattttcaactcccctcggaaggggttttatttcaagggtgattctaattcagaggggtggttttaattcagtaa

SEQ ID NO: 60320 - DNA, 624 bp, Heterodera glycines
atggtccaacctcgaaaatgtgcaattcctaagctcaaactcaatgatgtcgagcaattccgaaattggtttcttaaaagtttaatttaattaaaaatattccgtttctttttaagttaatttgtgctcagaagtgcttgagatgttgcaaatgggaggagaggtgtataaaattattagatttttaatgatttatgtttttaggaccaatttcacgatgcttcgctttttgatatttttatgaacgaatacacagggaaatgactcaaaaacattaatttatgattgtgagtgctttattttcttcctcagttccgattttttatttttatggactgatctccattgcatataattattacaatcaatcggttggatgatcattggtcccttttccaaaaatcgtaaaacattttaacgtatgatgcccgaaaaattttcaaaaaataagacgaatgcagatatttgtatttgcatttagccggcaattgttgtgtagcttcatttatttcaccaaaattcatcgtaaaccatcttttcttgtgaatcgcgcctaaaactaattattaacaacaaaagctttattttgctgcaagcaaaaaattacaaaaaaaaaataataaa

SEQ ID NO: 60321 - DNA, 658 bp, Heterodera glycines
gttttcggggcagtccccccgaaccgatgcgcccagatttatggggagaccgaatccttcgggaatagcttccctatagcctgtactttaattctgcgttggatttttgctccccataattgtttgagtaccccaaacggacacttgaaaaaatcgatttttttgttttcggggcagtccccccgaaccgatgcgcccagatttatggggagaccgaatccttccggaatagcttccctatagcctgtactttaattctgcgttggatttttgctccccataattgtttgagtaccccaaacggacacttgaaaaaatcgattttttttgttttcggggcagtccccccgaaccgatgcgcccagatttatggggagaccgaatccttcgggaatagcttccctatagcctgtactttaattctgcgttggatttttgctccccataattgtttgagtaccccaaacggacacttgaaaaaatcgatttttttgttttcggggcagtccccccgaaccgatgcgcccagatttatggggagaccgaatccttcgggagtagcttccctatagcctgtactttaattctgcgttggatttttgctccccataattgtttgagtaccccaaacggacacttgaaaaaatcgatttttttt

SEQ ID NO: 60322 - DNA, 662 bp, Heterodera glycines
aacaaaaaaatcgattttttcaagtgtccgtttggggtactcaaacaattatggggagcaaaaatccaacgcagaattaaagtacaggctatagggaagctattcccgaaggattcggtctccccataaatctgggcgcatcggttcggggggactgccccgaaaacaaaaaaaatcgattttttcaagtgtccgtttggggtactcaaacaattatggggagcaaaaatccaacgcagaattaaagtacaggctatagggaagctattccggaaggattcggtctccccataaatctgggcgcatcggttcggggggactgccccgaaaacaaaaaaatcgattttttcaagtgtccgtttggggtactcaaacaattatggggagcaaaaatccaacgcagaattaaagtacaggctatagggaagctattcccgaaggattcggtctccccataaatctgggcgcatcggttcggggggactgccccgaaaacaaaaataaatcgattttttcaagtgtccgtttggggtactcaaacaattatggggagcaaaaatccaacgcagaattaaagtacaggctatagtgaagctattccggaaggattcggtctccccataaatctgggcgcatcggttcagggggactgccccgaaaac

SEQ ID NO: 60323 - DNA, 256 bp, Heterodera glycines
atgaacagacggtaagcaatttgaaaagtcacaaattcttatttgccctaatttactttcattatttcagttggatttgcaacgacgtttggatggacattttcccctcttttgaccgtgctcaactcggcctcaaattggcattgctttcgccacgtttcaatgcgttggtggacaaacattttgatggcaaaagcgaattgactatttggagaacgatcgaaattagcaaggacaaaggaccagaaacgaaact

SEQ ID NO: 60324 - DNA, 225 bp, Heterodera glycines
atgcctcagccccaattggtcgcagttggtcctcgctccgccctccaaataccgtactccttcctaccgttcgccttcgactttcacgtccttttgcaacgaccacaaaggaaaatgtatcagcagcagcaaggaacaacagttggagcagtacacggacaaaaacagcaacaagagaacgaagtgccattgctgagcattttggacatggccaacacaacactg

SEQ ID NO: 60325 - DNA, 398 bp, Heterodera glycines
atgtgtccaggattatttgacaccaaaatgttctgttacattctgtgtctgctgcttgttcaatcacgatctggtaaaaattgtattataattaattagccttgttaattaacaaaaaaaaacaataaagaacatttaataattaataaaaaaattactttgcttaaattaagatgcaacaaaaaattgttatgcaggccaaaacagcgtattcgaaccgaagcaatgcggcaacgaaagttttggtggtaattttttgaaattattaaaatgaataaatgaaaatattaaagatgatgacacttttgtttgtcaaacctacacttgtgatggtggaaaatgtaagaatcttttatttgtgcttcgttaattgacctaaatataaagcattaaataaa

SEQ ID NO: 60326 - DNA, 926 bp, Heterodera glycines
gtgtgattgcgtatgcctcccgaacgctaaattcttcggagcgcaattactcgcagattgaaaaagaagcgagggcaatcattttcggagtcgacaaattcaagcagtacttgtacggtcgaaagttcgtacttcaaactgaccacgagccactaaaagagatttttgggccaaaaggagagctcccgattgtggcggcaaaacgacttcatcgatggtcactgacattgatgaacttcgactttgaagttgtgtactgctctacaaagaatttggcaatgcagacggtctgtcgcgattggcgtgtccggaagagaaaaccatcgactgtgttggactggaagttcagcaagttcaagccgaaatcccatcgcaaaagaagtcaaaaaggatgaaattcttcgaaaagtgaaagaattcatcgaaaaaggatggccacaaaaagtcgaagaaggactaaaaagttttaatgtcatccgaaatgagttcgccttaatggaaggggcgccggatgagcggaaagtgccattgcatccgtgggaatcaccggaaagactgtggcaacgaatacacaccgatttctgcggaccattttggggatcaatgtgctgatcagcatgtatgccaaaagtaaatggctttaagtggtcagaatgcgaacaacaacggtattggccacgattgaggcgctaaggattgtcatcgaatggagccgctgagagatttgttcaaactttcaagcagggaatgaacaagctccaaaaggaggggatgaagcaagaaattgcattgtctcaatttctcctgaaatacggtgtcacaccgcacgcagcaacagaattggcgccttcggaaatcctcttcggccgcaggcttcgaactttgttggatttagtaaaaccaaccgcggcgaatgattttgaaga

SEQ ID NO: 60327 - DNA, 1421 bp, Heterodera glycines
atggagaaattggcaccgcaaaattattgtctagccgattcaacagcatcatctttggcaaaagctgcccaaatggaattggacttcatccaaagcgttttgttgggcccacagcgaggaaatttgacggcaattgaatgtttattggcacaaaactttagcaaacagtcatcaatgatgccaaattatggcacggaacgtaaaaatgcaaaagtaccaaaattagaaatggaaaaggctggtggtggtgatgaagccaaattggacaatggaagcgagaccgatcaaagtgatcagaagcaaaagagaaaaggggtgggacgaccgaaaaggcatccgagtgaatgcaaagtgtgcgggaggaagagcttttactgttattacagtgtccgatgttgtgaaagtgagtgatggaaaaagaattaaataacgaaatcccgataatcatgtgggatccccaaaaaaagccacgtgatagccgggatcgggaaatgcctggactccgtcttgggatccctcccgatggttttccaaaatctttgggattgatcggaatttggtcgggaacccgactcgggatccctctgacaccagtggccggtctctagtgtgaacaggagttcggcggaagtacagcactttttgccgaaaagaaaactgaaaatggaaacatttttcaatggaccgaaaatggccatccctaatttgaaatgaaaattgttcagcagattctcttttaaattcattaatatataatatttacaaatttgtataaattaaggctgcaagcaattctttcgtcgtattgttgccaagcgaacattgttcaactgttttggagcgaaaaattgtcaaattggaaaaggttgataaagagaaaaaaactaattagcccaaaacattggaatatttatttaaaaagtattaatattttttcagatggcattcgatgccgcggctgtcgcctggacaaatgccttttggccggcatggacccgacaatggtcattgcaatgcaacaggaaggaatggcccaatatttggacagattggaattgcgaaaaaggagtgctttgttgtgaaagaattgcagagaagggaataatttgtttttgtgaccaaaattatgctaaaaaatttttattttattgtattgagaatttagaatatttttgtgattaggtctccaattatatgtaggaatccatatatgtttttatcctagactgtgagagacaaaaaaaaacaacatatttttagcttggttggaagcttttaggatgaatatctatatccatatttttcatatttcgcattatgtccataatttatattttcatatattatgcccaaaagttggtgagatcgtgtcaaaaataagtcaaagagttgaaaaattcgctttttagcttcttttttta

SEQ ID NO: 60328 - DNA, 586 bp, Heterodera glycines
atggtgttttctattcttttggcattctgtcttgcggtaccaatccacttcgtggatgccaagtgcgcgtcggatgtcgtggagggaaacaaattgctttcaaaccgtaaaaccataatgaaaaacccacctaaagaaatcggaaagaatgatgatacggaaattaaacagtttgtgcgagatctgttggatcattacaacatggtaggtaaagtactgttcgtggatcagagccaggcaatcgattacagtgtgattgaagcgatactgtacaaaagtgaccagacaaaggtgatcagagaagatttttgggctaaaattgaccacttttttttacaatatgtatagttcaaattagggttgctacccaacttttggagatacaaaagtccgggatcaaaatttcgcgatggctggaagaaaattgaaaaaatgcaaaccaataatgatcattctagataagtgatttgtcaaaatccaattcaaatatcgaagaaattgtcaatgggattggaaagatcacgttgacaaagtttgataaaaaaggaaaaaatggtaaaaagttaaattttttgtatatctaata

SEQ ID NO: 60329 - DNA, 410 bp, Heterodera glycines
atgcattgtggagcggtcagccgatagtgcttcatcatccaacatgcgatcatgcaccccgtacggccaagtccggcctttaaagaaaagttgcaaaatttttgtggctcgactaaaaaaacaaaaaaatttttgggccattttttgataaattttacccacctccataaattcttttaaaacagtaactattgtaaattttcagctttttttttttggttacggcgccgccaaaattgatcagagaaaaattgatttaatgaaaatgccagcaaaatatgtgttaattattctcttacattttaatgcccatttgtcatgggttcggatccgcacgacagcttggtgatttattttgaattttttttctaatcatttttttgatcacttttggcgccgagaaatttaca

SEQ ID NO: 60330 - DNA, 1812 bp, Heterodera glycines
gttcaccgatgctggctttgcacaccatgacttgtacttcatcgacggttcgacgcccaccgaggaaattgtgctccgatttttggatgtcgtcgattcggcgccgggcgcaattgcggtgcattgtaaagtcagtttcttttttttgtgtcaaaactagtaaaaaggcatggatttttatgaaatctctttgattttgagggtttttggtaaattttatggcatttttatccatttttgggccaaaagaatttaatcccccctcccatccataattcgtcatagagcatattccatttgtttattgtaaatttctcggcgccaaaagtgatcaaaaaaatgattagaaaaaaaattcaaaataaatcaccaagctgtcgtgcggatccgaacccatgacaaatgggcattaaaatgtaagagaataattaacacatattttgctggcattttcattaaatcaatttttctctgatcaattttggcggcgccgtaaccaaaaaaaaaaagctgaaaatttacaatagttactgttttaaaagaatttatggaggtgggtaaaatttatcaaaaaatggcccaaaaatttttttgtttttttagtcgagccacaaaaattttgcaacttttctttaaaggccggacttggccgtacggggtgcatgatcgcatgttggatgatgaagcactatcggctgaccgctccacaatgcatggtggtgctttttttctgtcaacaaattaaataattccgttgttttccgacggcggattttcgggtcaatggcatttctcatacaatataaaatttttctgggattgaaattgcaatttcctataattttcatttaactttttcaagggttggcttcgcgtgtgtcgtcctggatcagtgatcggtaggacgggaaaaaattgagaaaaaatgacatactactgtatttccgaaaactcaagctcccagtggatattttcaatccccctctaaatggattctttatttcaggggaggggtcttttttttgggctcccggacaatctgtcagtaatggacaatccgtcagcaaaatttatttttaaaaacaccacattttatttaaaaccaagtgaaatgaatttcaatcgctaaaaaaatgaattaataatttgtgttattttataaaaaaaaaaatatgaaataattattttttaacgaattaaatgataatttctatagatgatcaattaaatgaagtcttaaacaattaccaaatgttttaaaaacctagataatttatttgttgaatttaacaatgattttcgcaagatttttgatcattgttcaaaataaaatttttgacgaattgtccaccgacggattgtctgtccttcactggcggaatgtcctgatccctttttaatgggggggggacagtattttaggaaataccgtacttaaaaatcacatatcaaaggtcctcagcaacagtttctgatcgagaaacaggcgtggtgttggaatttgggcaaagccaacggactatggaatacaaacaggcaatggaggagtagtgggagggagggggggggacatgtactaaattttatcagaatttgttgaaatccaatccaaacttttcaataggggttctcatatgcccgttaagcgtggggtaattctttagaaaattttgggttaattttctttcccaattttcattaaatttgcaaaacttttcctcatcggcgcatatcagctgagctctaaattctgttaaattttcaaaatttggcttaaaattggtcatttctcatttatgtccaacaattaaa

SEQ ID NO: 60331 - DNA, 141 bp, Heterodera glycines
atgcaccgcaattgcgcccggcgccgaatcgacgacatccaaaaatcggagcacaatttcctcggtgggcgtcgaaccgtcgatgaagtacaagtcatggtgtgcaaagccagcatcggtgaacctttaactcacacattg

SEQ ID NO: 60332 - DNA, 216 bp, Heterodera glycines
atggtctacgcctcattcacaacaaaaagggaactccatgttcggtccctcctcgatagaaggggaccggtaaactggacaccagaaaattggacaccggaaaatgggggaccggtaaattggacaccaaacggaaaactggacaccgtcggaattttggacaccaaaggaaaattggacactggaaaactggacaccaaattcctcttttaaaaa

SEQ ID NO: 60333 - DNA, 100 bp, Heterodera glycines
tgttcggtccccgaaatgtcgaatggacgaacaaataaatatttattgaagacaaattaaaataacaaataaatatgtcggaggacggcggaggagacaa

SEQ ID NO: 60334 - DNA, 554 bp, Heterodera glycines
gtttcggggcagtccccccgaaccgatgcgcccagatttatggggagaccgaatccttccggaatagcttccctatagtctgtacttaattctgcgttggatttttgctccccataattgtttgagtaccccaaacggacacttgaaaaaatcgatttttttgttttcggggcagtccccccgaaccgatgcgcccagatttatggggagaccgaattcttcgggaatagcttccctatagtctgtactttaattctgcgttggatttttgctccccataattgtttgagtaccccaaacggacacttgaaaaaatcgatttttttgttttcggggcagtccccccgaaccgatgcgcccagatttatggggagaccgaatccttccggaatagcttccctatagcctgtactttaattctgcgttggatttttgctccccataattgtttgagtaccccaaacggacacttgaaaaaatcgatttttttgttttcggggcagtccccccgaaccgatgcgcccagatttatggggagaccgaatccttcggga

SEQ ID NO: 60335 - DNA, 77 bp, Heterodera glycines
ccttgatgttgagcagtgaacccgaggagcgtgccctttgcaaaaaacgcgacatcgaaccggaggacatgtattcg

SEQ ID NO: 60336 - DNA, 206 bp, Heterodera glycines
atggctgatctgaacaatttaacggtaattaacaaattatttttatgtgattattattttttaatgaatttaagttctttttggaattcgcaaatgaaactccaaactggaaactgatcagctttgctaccatatttggtttcatcgccactcttggaattgttcttaatttttcagtcatttatgtcaccattaggacaaagtaa

SEQ ID NO: 60337 - DNA, 737 bp, Heterodera glycines
  unsure (1)..(737): unsure at all n locations
atggcaacaattcaatttttgaaaagctttggcaaatgtacggcaaaggtgagttagggaatgccaacaaaatattatgatgataatgaaatatttacaatgtttatttcttaatatttttaattatttctacaatttgaatttttaaaatgtccaatatcaaaaggcaaaaatccaaaaaaaaaacatttaacattttaaaaagatcaacaaatgcaattgaccaacataatatgtgaagcggataaaatgtattgcattttggaggcaattaaaacggaagtaaaaattaatttattataattcatataaattttaatttctcaattaaagaaaccaatttgttgtaatttggtaaaaaatgatgaatacaattttatcaaaaagcgtatcacattaattaatcacagtgatccgccgttgagccaagtgatggacactttaattgttacactaatgagaattaaaaaggcaatggaatcgggtaaaaagcaaataatatttttattttaataaaaaaaactcctattattttgataatttttaatataactttaatttaaagttaaaataattttttattataaaaaaaacaaatttaaattaaaaattatttttttacataaatataattaatttcctcatataaaatttaggaaattttggcgattctctgattaaaatggtcaaactccgtttgaaanttgcactanaatttgctgcaaaacgtcatggaa

SEQ ID NO: 60338 - DNA, 721 bp, Heterodera glycines
atgagctttcgaatgataccaaaattacccaatttgattggaaataccttcaaaaatgaatttcacaaatcgtcattttttaatttttttggacaaaaaataaataaaaatactcatgttgcacacggactcgaacctcaaccctttgtctctttaccatcttacaaaagccacttagccacacatgcaaatcttattggaactgaaaggtaaaattgaaatggtgtgtatataaggggaggattctttgaatcgacttattttttgaaccaatgcgtttttatggatgcatcctaaaacgtcgtcggccgaagcgtcgccggaagactttttgcaccataactttgttcattgtcaatcaaattaagcattctttggtgttgttcgatagctctatgtgtttattatttatttgcaaaatttcataaattttcgttaagttaaaaaagttatggccagaatgaactcaaaatctaatctttcgaactttttttgccttgttttttttgtacatgaataaaacttcttgaaaatttgcaggttaatagagtttttcaaatgctttcgaacaataccaagaatgtttaatttagttgagaaagaaaaaatttgtgttgcaaaaattcgtccggcgaaacgtttcggctggcgacgttttttcctggtccggtttttaatacctcgattcccttttctgtttaaaaaaccaaaaaaatcttag

SEQ ID NO: 60339 - DNA, 317 bp, Heterodera glycines
tttaaatccattccttcgggggaccgtgccgggtgccgcggggtaagcagtgctggttcgtttcatcacggcaccgaaccttttggctagtcagcaatcgttgcttaacttgccagatcggacgggtgcgcatgattccactgttccaagcaccccaccaaaagcaaaacgatataaccaaaatataaggaaaaattttaaaaaatttttttctccatcttcctttttgatactaaagcatcagagtgctaaaattgacttgtaaataaaatttggtgcgctttagagcattttctgaaaaaatatttatgaattaa

SEQ ID NO: 60340 - DNA, 609 bp, Heterodera glycines
atgataccgaagggaacagcgaagaatggcacaaacggacggaaaagggccaatttggccaaggagccgaagggatttcacaaattcacggccgaatatgcgagtccggaattacacgtgatggacgaggagacgggggtaattaaagcgaaaatcaagtggcaaaaagcgaccgaatttcaggcgaaagtctcgccaaaatcggacatgtgggcattagggattatgctcattgaattgctaatcctgcaaaatccatcattttatcacctgagggaagaagaagagaaacgcgacaaattggaagtgagcggacaaaaggccaaaacggcacaaaagtcaactccattaaggcggatgttcggaaacggttgatggaaattggcgcactgtacaaagggtttactgtagacaatcgaagtgggcacattgtgccaattgaattcgaagaatatcaatggccatacgcattttgggatgcgctgtacgatattctgcgcatttggagacattttccgcgaacggcgcttctgattacggtaagtgggcgggaagggggaagggtacggtaaatggaaaggtgaattaagcattttgtaattagcatta

SEQ ID NO: 60341 - DNA, 1695 bp, Heterodera glycines
  unsure (1)..(1695): unsure at all n locations
atgccatcgtcattcgcttccgtgtggaagcattgggccaattttctgggcaatctttacctggctaaccagtgagtttacttcactttttttcaatgagttttggttaattttaagacgttgctatttgaattaaaatttaaaaataaaataaatttttgaaaaattttcctagcagattttaaaatttatgataaattattaacaatgcaattaaaaaatttcaaaattcaccactttagctctgagagttcagcactgagcaccggtgtgcaggccatggcgtccactttggagcacatttcgatggtcggtgcgcaaaaggcgcgcacttctgtcgccaaattgttgtggctgctcaaaattgcctccgcatgcccttccgaaaagctgatgaatgccgtggatgagctgctgttccgctacgtggacaccattcagccggcgaattggcttttttggtgtgaatggcacattttaaaatgggcactgttttctcttaatttgcactaaatccaggttgaacgaactgatcactgatgttcaacagcggaggggtaacgcgatggccgagattctaaagcgagtcggtctcctgcagccgcaagaagtgttctgcgcattgcgcgtcgaacttgggccaagccatgttggccgttacatccaacaatgttcgtaagacattcctcggagtgtttttttccattcaattttctatgaatctttggaagtgtcctaaaatttgagaaacctgtcgatacaagaacaaaaaaaaagtggaatttctttttctccctatttttttgcatattttttatttgaaaaattttaaaaacataattttgataatgaagcccagtcccgctcttctcttaaaaactgaacttttaaatttttcaaaaattcttttttattttattttttaatcattttttgttttaaaatataataagtttttcaaattttcagtcataaatcaacgacaactgcttgcttcttcgggtgcaaatgcctctgctgctactactgccgtttctcaccatccttccatggcattggcatcacaacaatcatcatcatccgctggtgccctaattagcggtgaaaaccgactgttcgatgtgttggatgccattctgaatcgccatttaacgcaaatttgcgtactgaaccaaatgctggacgaacttgacaatttcggcattggtccagccgaggcattcaattaaaatttatattttaattaccattttttctgaattttagttcacattgaacaaatttcgtcattttctctccatctgccatttgtaagacaaataatcgagcaatttgcaaatttatttactttcttttttaatcgatttcagtgatcagttcaccaaaatagccgatttgaccaacacaacatccgatcctcagctgctgaagagtctcgttgaatggctgcaatcacccgaaattgtgatggccgttaatgctaacactgacgaagggaaagtaagtgtaaatttttttatttttttattgcctatttatcattcgcttctttttttttctcgttctctgaaagttttccatcatatttaatgaatttaattgtttttttcacagatgttcaatgagttgctcaatgatttcgccttttgctgttccccatccttcctcnccacaacaacaacaacaacagcgtga

SEQ ID NO: 60342 - DNA, 1237 bp, Heterodera glycines
  unsure (1)..(1237): unsure at all n locations
atggccgaaaaattggtggcacaactgaatgaccgcctgtcaaaaacgctgtcgtcggatgccatcagcggactttccaccgctctacagacggaacaaagggcatgggaagaatgctggaccaggtgagcaatgctcacaacccatttctatcgatcatatcattagcgaggaatttgaattaaagtaaaaattaggagacccctaattatttatgtaagagggtaagttgtaaattttcagttcatgtgtgcagttgaacgattgggcttcgttggaccattttgccaagtcggaagagatttcggatgccgccctggcgatggagtcggcttggcaccttcacgattggaaccagctgaagtgggcactttattattttttaaatatgtcaaaaacatattaatgcatttttgtaactaaaagcaatccttttgtttttaacacagtttaataaattttacattccatccatttttaagggatcgctttgcccaagtggatgccatttcgagcccacagactgccgtgcgatcaacaatgcttcaactgatgcttaatgtttgtagttttcacaagccattcacccattaaattatgcatttgcatccgtttaggtgaccaattttcggctgaacaaggagacaatcgaacgccaactgatcgatttgtacagggcactgattagtgaatggcgtcgactgccctcaattgtgtcgcatgttcacatcaacattctcaacgtgggatttgcacataaatcttttttccaattcctatccatttaaaaattactctacattcgggatcccgaccaagtttcaaaatgtagtcgtcggtaattggtgctatttaaaaatgggattactgttggattggctgacaatgagtcgcaactttcccatcaaaacattcatttcagaattcacatttgctccacgaaatttccgagtcggccaatttgctgtattcgaatttgccactgttgacgaattggagcggtaacagcaacaacgggactccagccagcacaaacagcaaccactcactgaacaacgccgtcaaacacctgatgaagacgtggaggtggagatacactgaataataaataaataaatcgtaaaaattttttaaaaaatccgttttttaatggatttcagaaatcgccctctgaccaccgtcgaccaaaactcggnctggtcggacctgttcaactggcgtctgcagttcttcaaca

SEQ ID NO: 60343 - DNA, 947 bp, Heterodera glycines
atgggtcgctacgattggttggcccatgttgtgcatttgctgttgttgtccgaacatgctgtcgacgacgacaaacaacagcagcagcagcaccaccgtttggtggagttgaagcaatgcgctacgctggacaacacattggcacagattgttgctgctgcagattccgacacaatcgaaagggtacaactccagcagcgacaacaagttggagaagtacatggacaagctgttgccgagcggttgggggacagcccgacgaagcagctggaccaagtccgcgatggtggtgcagcgacggagggcacaacaatccatgccaagattgcttcactgcgcctttccgcaccggcggacaacattgatggcacatctccaccccaggcacctccatcgttgtcagtgccaagcggtggcgaagaatcgctgctggaggcggcgacggccaacaggaattcaccgcagaacagcaacaggacgacaatgctcgacatgcaaatcaggttttagaatattaaatacgttttcgggaaaatttggaaattcatttccggaaaaaaatggaaaaccgaatccaaattttttacaatttaattactaaactttttcatttttagccttctttcactggccactcaacttaccgtggcccaacttatttcaaatttggtcgacattttacacaccgacctggcattttgtaggaaaacgtttgttgaggtctaatctacatactatcctcctacaattattttacaattaactcgtttttgtttaagcttttctgctctctgtggaccaccttttctccggaagagcgagcacagattgaaagtgttgccggtccgttcctttcgtccgctgtccatttgtgccagagggactccccccgtgccgtggtcacctgtttcatggaggcgtttgttctttgctctccacccattaaa

SEQ ID NO: 60344 - DNA, 1393 bp, Heterodera glycines
atggtgctcgacattttccggcccctccaacgcgcgatgatttcgtgcatcagctacaccaactcacaggtgacagtagcaaaaacgcacggaaatttttttataaaatttaaactttttattttctaaaaacagcgtatccctgccctgaacatgtccaaattttaaaaaacgaaaatttttagttttctacaaaaaatttttttaaaaattcaaaatttttagcatttttttcaaaatttttaaagaaattcctgttctttgattaaattcccattttttgcagcaaattctgcgcagcacttacaatgtgctgagtaaactgttggagaagaccaaatgttcggctaacgggttggacgagttggacatgctcaaccaccacatcgcccgggtcatccaggactcgttcgcgaagtatgccggctcattgaacaacgcctctccaccgatgaccaccatcactctgttgcggctgatgcactcggcacagcccagttatttggaggcggtgtgcctgatgccgtttattaacctgctgcagaggtacgtttttggggggggagcagttcttctccccccccccccccccaatttttttcaaacttagaaaaatttcaagataaaatctttaaaaaaaatttaaagaaatttcgtaaaaaaaattcgacaaatttttatttaatggtgtaattttttggttattttttccagactcgtccgggaacacatcatgtccaatgtgggcacaaccggtgcacttgatcaggcgcaaaagctgatcagtgatctgctgtccatctgtatagaaatgctgtgcactcgaacaaaattcttaaggtgagtttctctcccatatttcctatacattttttctaccatatttttcgatatatgatactactttttaaaacaaatattttgttttaattaaacccttttcgttgctttttccagcgccgaatctcaacataacgtcattcaacttgtgctcctcccgctgatcgagaagggaacggtggacaaaatagtggaaaacatcatcaaagtggcgcaagaaattgtgacaagcgaaatcgcacttgcacaacaacaccaagacgggcagccgtcgcagcagcaacagtaccaccaccagtcacaacaaagtcagggtgcactcgtgcttgtcaagctgtacggcgcgatggaacaacgactgtacgccaacaatgaactgcaacggcatttcctgaatgttgtggttcaactatacgagcaagaacgcctgttactgtccgaaggcgacgccacactgaataaacttgagcccgtgttccactggggactggccagcccgaacccggaactcagaaacaggtccggaaagaacgctgaccttataggattataa

SEQ ID NO: 60345 - DNA, 184 bp, Heterodera glycines
ccgggactcaaatgtcccgctcaggccaaaatttttttctatttccgggaaaaaatcgaaatttttccgaaaaaaataccagtcgatagagctcgaaaaactatgttttggaagtggtctccgtttttctgggaaaattcgttaaaaaatcataaaattaaaaaacccgaaaaccgtttttagg

SEQ ID NO: 60346 - DNA, 57 bp, Heterodera glycines
atgcgctatttggcgttatgagcaattttgtctgacactggcgcgtacccatagtgc

SEQ ID NO: 60347 - DNA, 588 bp, Heterodera glycines
atgggacttcaaaatcaggtaactgtacgtacataaagcagacccgtgcatcagcaggccttacaacgcgttcatagttttggcccgagccaaatgagttcgggccggtcagggctctttagaagcgggcttttgcctaaaatctcgaggctaaaatttcaaaaataaatcaaatcaatcagagccaactattactgtgacccttttctgtacacccattaccgtatagaaaccacgcgaatacgaatcaatcagcaaaaataaacgtggaccattctttttagacagtccaattgtccccactttcttttcgccgatgactctttttgtttggtcgtttgtttttggtaaattggttttaccttcttttaattctttattttgaattttcagctcattttattgtggtgccgcttttctaggccactcttacggcacagtttggacgaatttgccaaattgacgaacatttttgtgtgtaaagaagaaatataagacagaaaaatgatgaattatttattcctaattaaaattttaattattgtaatttcaaattgcatttttaatgttcatattttcgaattttga

SEQ ID NO: 60348 - DNA, 717 bp, Heterodera glycines
atgctaatcgcaccgcctcctgtaaaaatactctattgttattccgagatgaacgattctgtgatcgggttaatgaaacaaggaattgagacacataatggggtaccgacccaaacgttggttcaaagtatgcccaaacccttacttttaatcctggacgacctgatgttgagtgtaaataacgattttttggatttattgttcacccgaggctcccataactgggatgtaagtgtgatttttgtaacacaaagtctctacggacgcaatattcgtaccgcaagagccaacagccattatttggttttaacccggaatccttctggtcaacttcaggtcagaacggtgggctctcaattgtttccgaagaggctaaactattttatggaggcatacaacgatgcaaccagcgaaccattcagctatctggttataaatatgcatcctaatgcgtccgagtctgaacgtttaacaactaaaatcttcccggatgaacagcgtgaggtgtacctaccaattgaataaagaaagggtataaaaggttgagaaaatctgtaattttcactacaaatgtatgaattcagtccatatataagtgaaaacgcagaattttttaaaaaaatcgcctccacgaaatcggaaaaaaagaaaaacatccttctgcgagacgcaacagccgaacaaatattaggacttgttgaaatttgtgcaaacata

SEQ ID NO: 60349 - DNA, 271 bp, Heterodera glycines
atgagacagatggacaacatgatgaattcgatgttgggcgatgcgtgggacatgctgaacggcttcggaatgatgggccccccgttccccaaccatcctatgctcaccgatggtctgaatcgtcaaaaccaagctcttcgtcgtcagcagcctccacagcatcactttggtcctgatacgatgatgagtccgtttggaggatttggccttttcggcggaatgatgcagcaaatggtccaattttaaaaaatagttttattttagttattaa

SEQ ID NO: 60350 - DNA, 1699 bp, Heterodera glycines
ctataaaaaccccaggattacaccgaacggaaccaaaacgcaaatttaaacctgaattatgggcaagactatagcaccaaagcagccgactgtggataaattattggaacaaatttattacgatttacgctcaccggccagctatgctggtatgctaaaagtttgggaggaggccaagagaagagatcctcgaatttccttacacaatgtctatgaatttcttcatcgccaacgcacttacacattgtttaagccacggagaaacaaatttcctaggctcaaaacggtgccgagtggcctgcatacagattggcaatgtgacctgtgcattatggatacgttaagggcgcataatgacggttaccgctacattttggtttgtatcgatgtgcttagtagaaaaatttttaccgcagagtcggagtcgaagaaaagcgaacacatgattgaagcatttgaaaaggtgttcaaaaaagccggtgtgctgcctaacaaactatacagtgatgcaggtttggagttccaagcaaaacggatgattgaatactggaagcaaaaggacataatcaaacacataatgtacagtcctagcctgcatgcgggtgtggttgaacgggcgaatcgaacactcaaggagcgcttatacaaatattttagcgaaaataacactctaaggtggttaggggtgatagataaaatcgcaaataatgtgaacagtactacaaatcgtaccattggtacaaatccagcttctgtaacctttaagaatgctccgacgttaagaaaacgcctatataaagaacacactgatgacaaggaaatcaaaataaacacaaaattcaaatttggtgatattgtaagaattagcaaagagaaaggccaattttcaaaaggttactatcccaattttaccgacgaactttttagggtccaacgtgtaaacaacacaaacccgcactcgtacagaatacgtgatttgaacggagaagacataaagggaattttctacgatcaagaacttgtaaagacaacggaaaacggtacccatcgcgcagaagtgctaaaatcgcgtacactaaacggagtcaaagaacatttcgtccgttgggttggcttgtctgacaaatacaacagctgggtccgtgactcagacctagtgaaacgtcgagcatttgaataaagctaaataatggaagatttttacattgtacttccctcgaacacacctggtccaggaaatactgcttcaaattttacggttagacttccgcacactttagagcttgactccaaatggtccgtcgcattatcggcattaatctatccatattcattcccatcgatcagtgtggacgaggatgactctatctctgtcaaactggttaatcctaactacagagaagatgccggaaattctgacgaggaatcgcaaaagtttatcaatttatcagtgaagattccaaatgtacaattccaaagttacaaagtttacaaaaaacactgaatcagataatccagaatgcttacgctacaaagtttggcggctcatcatcattaaatgatcccccctgggacccgtccctggcctccaccacaggtaaaggggggggggggggcggaggacccggccttcatctcgagaaacttatcgcttagtctcttttcttgaccatcgcttttgattctcggaaacagataa

SEQ ID NO: 60351 - DNA, 279 bp, Heterodera glycines
atgccaaatttggaaattgcggtgagcccggaaggcacttcgaaagtgcctactttggacttaaatgcgagccaattcatgcgaaaaagattggcaaagtcaggcgaacagcagaagacgcacaaaacggaactgaaagtgactctcgaggcagaactaaatgtgccgactttggatttgaatgccgcccaactgtcaatgaaacgattaacggagaaaaataagggaaaatttacgacggcggaagaagcgaaaaatgaaaaaaaggaaaagcaatga

SEQ ID NO: 60352 - DNA, 1227 bp, Heterodera glycines
gtgagaaagaaggtggtgcgcaaggtggtgcgcaaaagcagcaacaaatcggacagtccggaaaagaacggaagtccggcaccggaagagccgccccaatcgccgacagtgaaggcgacgacgacgacaaatggcacagtgccaacggctggtgccaaaacaacggttggcaacaacactcagtctggcactggcgctaaaagtgtgtcggcaattattgccggaaggatggcgtcattgtttaataattgtgccgggaatggagtagaaggagcagctaatggcgagaacggcactggcacgaacagaaacgatgccgcgccggcaacgacgggggatgggggtggagcagcaatacatgagatcagtgtggcacggtttggcggcgacgaaccgacggcacaatccgatgaagaagcggctggcaataattccacgagaaaagaagcggctagcgatgccaaaaagggggaatcaactggcataaatgccaagagagaagaagcggctggcaataatgccaagagagaagaagcggctggcaataatgccaagagggaagaagcggcaaagaataatgccaagagggaagaagcggctggcaataatgccaagaaggaagaagcggctaagaataatgccaagagggaagaagcggctaagaataatgccatgagggaagaatcgtttgacactgcttgcaaacaaagcaatggtcctgacgtgacagagtccggaactaatcgctcggcttctgaaacggtgccgaaatccggcacggctgttgagataaagccggcaaaagccggtcagttggagtcggaaccaaaaactgatcacactgttgatgattcgccgccaattgttggcagccggcgagttggagcagtgtccaaaacatctaccgaagcacccaatgaatcagcagtgcctgaacattcgtcggcgatcaaagaacggcgcagccaatcactggacgggcatgaattggcgaatggcacgaccaacggagtcggcactttgcgcatgacggagtcgtcgtcagaagacaatggacgggtaagaaaatgaaatttttagaaaattaagttttaaactaaggcttgaccaactgtctaaatttaattgggtttgaccaagacccaagggcgtagccagacccttggctttgggggggctgaagtcaaaaattcgattttaggggtgtatttttttttttttcagtag

SEQ ID NO: 60353 - DNA, 182 bp, Heterodera glycines
gagaagtccaatcactcggcccaattaaattagccatccctttaattgtccttaattaagagaatttcatatctctgaattaacctcggcaatgcattctctcgcctttatttccttcgctttttgcctttcactaacggacgcttttcgtactcaatcgtccggcgtccgggggacacttc

SEQ ID NO: 60354 - DNA, 447 bp, Heterodera glycines
atgtcccttcaccttccacagaaatgtgaacagttggcgcagtgcacgcagtgtgaacagtacaagaaggagcgggacaagaagacagaagcactcctcgacaaaatcaaggagtccttcgacacgaagaagcagaagaaacaaatggagaacgaactgaacgaacagcgccaaaagtgtgcggacctcggcaaacagaaggacctgctgacatgcgaagtgtgttcactgcgcgaagagttggagcgggagaagaaggccaacgcacacttcgacgacgacctcaaagagttcaaacggcgtcgcttggccatggacgacgagctgaagcagttcaaacgtcgagagaaggacattggagccgagttggagcagtgcaaggaacagaaccagcaacttgtcgcggcagcagaggaacgcgaaagccgaattatggagctggaaagg

SEQ ID NO: 60355 - DNA, 1693 bp, Heterodera glycines
atgcccacgaaaccgttcaagccattggagcagttaatgggtgtgtttcctgctgctagcaggtgtgttgatatgttttgttttgttccccgactggcacttttataattattcatttgcagagctcatattcctgacgggtggcgttggctgatgaccgactcaagttcgccgataattgatttttacccggaaacttttgaaattgatctgaacgggaagaaatatgcttggcaaggcgtcgctctgcttccatttgtcgaggaaaaacgtcttttggatgcacttgactcggttttacaattttttttcaaaaaacaaaaaatattttaggtgtacgccactctcacaaccgatgaaattgcgcggaatgccaccggaccagaccgtctttttgtcggcaataaacacaacttgttttcgctcgtttatgaggtgcactcccaaaagacgacaattccgataaaagatgaactaacaaatgatgacacaaaagaaacaagcgaagggacgcgagaaactgaaggagaagccgaggaaactcaacaggcggaaaatggtaaattaaattttgactaccaatcatttgccatataaaattgttttttaattaaaaataggtgaaagcgaacaaatagcgaaagccgaagaaacgacggcacaagaggaacaagcgaacgaagaagctatctcaaaacctgaacaggcaccgaaacagggtaagccatttaaggcatttcctctttaaatatcgagatttagaattcgagactgaaattgaatttgtcgatgacgaagaaaagaaatgggtgcacatcgacgcagtcaaagcgtatgggatgtctggcgaagtgtcttatgacgtcgaagcactcgcttttggtgaggcgcatcggtcgctgttcagaaattcgttggagtttggcgacatcaaagtgagttgtttttacaaatagcctatgtttcaataaattgcatctcttcaggagaatacctgcattatggttcggtttttatcatttacaatgttcgatttatattttttgtgcacaggttgagttccgagatccccaattcccaatgcacttcatcttcaaagccaacaggctggacggcatcaaggaattgcctcgtgtgctcaaaccgaacgattgggaccaacgacggcacggctccttccaaccccaaatcggattcaggttcatcgtcaaattgttgtctcgtgagacaatgagcacttgacatttacagtcgtgacatcccacgtgcaaatctctccatggcgggccatcgtacgctcaaccaccacataaacgacaaccgtcgcagttgtccggcctctcttttctcagtgcaaacatcgccaccagcgcacacacttccatggcacatgagcacaaactcaccacaacaacaacatcaaatgcagtaccaacatcagcaacaatggcagcagggtcaattttacaacgggcaacagcagcagcagcccgtgccgttgttcagttttgggcagatggcaatgcccccgcctccgccgctcccaccgcaaaattggattactagtcacccgccaccacaaatccagtctcacgtgccgtacgggcagcccccacctctaatatcacagccacggaatactcagcatcaccatcgcagaaacgacaacaacagaacttacaataggaaataa

SEQ ID NO: 60356 - DNA, 962 bp, Heterodera glycines
ccaatgatcgaatcccattgttgtttaatgccaaaaaaatcgaacaaggaggctattatcgacagtatttaacttaattgcccgttctttttttacttttttaaaatttcagtcccgaaattattagtcaaaggcctgagggaatcactaccaaaagtgacgtgtggtccttcgccgtcgttctatgggaaattttctcgcgtgaaataccttacaacggtagagaacgaatatccatcccttctgttgttaatgggtttccgtgttttaggccttacggaatttaaaatttattcgataatttcccaacacggagttcgtctggttattcccgagacatgtccttctcaactcaataatattatccaaaactgttggcgcacggaacctgccgatagaccggacatgcgatacggttcgccacggtcttaggctatgtaaaagcgcatttttcagtgcttgccgttctgcaacagataggcaatgatgccgaattgcaacgcgaagttgcgcagtttttggtctttcgcaaggacgaatggcgggaaatgattcgcgagcagaccttcgcattggaagtaggcatctgagattgcttcgacatgaaatagggcataatttatccaggaactgaagttggatttggcccgacagatggaggatttacgaaggcgggaggccattgtccgaaagcgggagaacagccatcgtaattttctccatttggtaaacatcgctcttctaattaggtttattgcattcgtgagacttttaggtggacgtcatgaacgtggaggacgtttgcgaatggaacgaggattgtgtttgcgaatgggtgagcaaatgatcagcaaatttcagcccattttgagcttttgttttaaggtgcaaaacattgcggcaagtgccatggaagacttcagcgaggcgattgtcgatcagctcatttcgtgtattcttca

SEQ ID NO: 60357 - DNA, 705 bp, Heterodera glycines
aatttggtgcgctttagagcactttctgaaaaaaatatttatgaaacaaaaaaatcgattttttcaagtgtccgtttggggtactcaaacatttatggggagcaaaaatccaacgcagaattaaagtacaggctatagggaagctattcccgaaggattcggtctccccataaatctgggcgcatcggttcggggggactgccccgaaaacaaaaaaatcgattttttcaagtgtccgtttggggtactcaaacaattatggggagcaaaaatccaacgcagaattaaagtacaggctatagggaagctattcccgaaggattcggtctccccataaatctgggcgcatcggttcggggggactgccccgaaaacaaaaataaatcgattttttcaagtgtccgtttggggtactcaaacaattatggggagcaaaaatccaacgcagaattaaagtacaggctatagggaagctattccggaaggattcggtctccccataaatctgggcgcatcggttcggggggactgccccgaaaacaaaaaaatcgattttttcaagtgtccgtttggggtactcaaacaattatggggagcaaaaatccaacgcagaattaaagtacaggctatagggaagctattccggaaggattcggtctccccataaatctgggcgcatcggttcggggggactgccccgaaaac

SEQ ID NO: 60358 - DNA, 953 bp, Heterodera glycines
atgttatttattttttcaatttttctcatttatatacatttaaacgcttcgaacggatgtggcactgaactcggaatatgggaaaatgttagtaaaagtggtgccgaatttttaaaaaacattaacattgaagcaaaagtattggcacgccaattgtgccaacttgacgaagtcatcttgaaaattgcagaaaccccagcggaaaaggcatttttaattcgtttaaaaaattttaattaaaatttcaatttcagaaaatggtacaaaatcagttgcaaaatgatccggcacttttatacagtttggaaaaattatttttcatttatcaaatgctgaagagcttaaaaattggtacgtttcgggcttaatggaatttaatcgaaaaccgcacctaatattatgttcattataattaattacttgctgattctttctaagattggcaacaaattattgcaatatttttgaataatttaattcaacttttttttcaaaattttcgggactaatttttttttttgactttttgttgccaattaatttttttcaattttcgatggaaaggtggaggtaaaagagttttggggtcaaaatcttaggatcaagcatatattattaataaaatctacttaaaaaactatttttagatgccaatcgtcataaaaactatttgaccgcctcattagaacattctatgaccttaatggccaaccgttttggcattccgttcaacgaaatttcgaatgttgttgagccaagaaaaagtgcatttatgcttaaagaaatcacaaatttgttaaatgatcaatttgaaaatgagaggactggaaatgagcatgaaaaagaagaaaatgggcaggacggatatcggaaaaaccaaaaatggacatttcgccaactcagcaacaattcgaacaatttgtttgggaaatggtttaattcatttcataaag

SEQ ID NO: 60359 - DNA, 226 bp, Heterodera glycines
atgaccaccgcaattggcgacactatcattttgctgatcactttgatcgctttcccaaacgccgcggtcgaattccttttctatgccgtcgtaatggtggtggtcagtgccattttggcacttttggccatattttactacgagtacaacaattacacaacgacggacagcgaaatgataacgaaattggaagaaacagaagggaaaagagagccattgaaaggag

SEQ ID NO: 60360 - DNA, 2001 bp, Heterodera glycines
atggcggcggctgtcgcagcgcagtcgttcgatgtgaaggctgatctgcggaagcacactctgttcgtcgagccggtcgtcatcaatgagatctcaacccgaagcgttgtcatccaattcgtcatgccggtgccgagcattgaggagctcaccgaattgtgcaaaatctgggagatcgatttggcggtgggttgcaaagtcaatccggcagccaaggcaaagccttgtgcgcatgggtatgtgctgagcatcgataaaagggcgttgtgtgtaggatacgaaattgatgccaaagtcatcctttcctaccaggcagcgaaggaccaggatgcgcaggacgaatttgatcagatgcgttgtggagaactcgacggatgcgttgaactcatccctcagacgtccgtcagagccctacaggagcgaatgttcacactgcggtccaatgactgctcgaaagtggcgacggacgaaggaaaagaaaaggtgggccgaattatgtcaattttattgggccgaccggtaaaaccggaaagcccaaaggccaataacccattaatgacttttggggctctttcaaaattgaaagagggacagatcgacaccgcgctgtgtatgctcgacgaggtgccgcgcctggtcttccaacaggccgggcccggcaccggcaagacgttcagcgcggcatcgatcgtggccactgtcctggccacggatcccacggcacgtgtgttggcgctggccccgccgaatgtcgccgtcgtcaagctggtgctggagatgcaggacgcactggccgccggaaaccacgtggagccgatgcttgccttgttctccggcacaggtaagttgagatatgccaaggaagttgagcggatttccccccacctgctcgccaccgcggtggaggcacaggactttcaggaactcctacagaaggaccaagaccgcgtcaaggtggagcggtacctggacgcctgcgagcggaacccacgcctggcccaggaaatggcagttgccaaaattgtgcaggagcacaaaaatcgccgcctgtgcttcgccactttgtccttctgtgagcaattgccggcactgtttggggaaacgacgcatttgatcatcgatgaagctggacaggcgccatacgtccagatcctcaacttggtaagccaactcccctgcctaaccaaggtgctgatcaccggtgatcgccgccaacttcgtgtccatttgccctccctgccgatcgcaatccgcgaggacttcggcatggacacggtcatccagaacctggatgttgcacaagggacggacgtcacaactttgtcggtctgttttcgctcacattcagctctcgtccgttgcacggaggccggcttttacaaaccgcacggcgagctgttgacaccaggacgcgacgactccgagcgggcactgatgaccaaccaaacggcattcaaattgccgaaaaagggagtccccctcgttttagtccatcagagcacgcctgcgcaacgcgacgaagtgtccacttcttcggccaatcctggacaaacagacacggcgatgagagcactgtggcgtttggcgcgggccttccccggcacactcatccgctgcatctgtttctacgccgcgcaagcattggaaatcgaacggttggtggcccagcaagaaattcccgacattttagtgaccacggcggacgcgacacagggccacgagtcgtcacttgccgtcgtcgtcacaacatgctccgtcctcgacagtggagccgactctcagcctttctgggctgatgccgcgcgggtggacgtcgccatctctcgcgccagccatggaatgatcatcattggcgatttgctgctgctcaaccggacggagacatggcggcgctctacctggaccaagcgacaacggaaacgacagtggtcggcccggagtacttcgacttcgagcagttcaacaaccccgacaactattacgacagagacggtcagctga

SEQ ID NO: 60361 - DNA, 359 bp, Heterodera glycines
atgccaattctgttcagaactcgcttttggcttgtggtcgttgccggcggtgccgcctccgcctttggcattgttgccaatgcgatgctcacgcgtctgttcctcactcggcctgcgttccgccactcgcccttctttttcctcggcttcgtcgctttgtttgacactcttttggattccgtttacattttccttttggtcagttagcaaatgccatttttaatatttgaaaattaatttaaatatggaaaaagaaattattatcacgtttttatggcacaaagaattaaagctaatgctaatgaatgcttaaaattattaaagttttgttttcgttgttttaaataatatttgtgaga

SEQ ID NO: 60362 - DNA, 444 bp, Heterodera glycines
gttgttgaggaccgaattcgcattaatgaggcgaatggtggcatccgaaaggacggactaatgcacagcgaaggatcactgtacaaaggcaaaattatggcatttttggactttttgctgacactgcgcgaggagcaaaagttgagcacggagcaagtgagggagcaggtggacgcgttcatgttcggaggtgagaagaattagcagcaaaaatgccgtaaaagattgggtcggaaatgccaaaacttaataatgcatcatagtgaggacttggaaatttcccgaaaaagaatattgggcaaatcgccaaaaaatgtgatcatgtcaacaaaaaatcttttttattgaatttttttgttgttaaagaatttattttacatgaaaattcaaaaaatgccaaaataaatataattcagatcacaaattatattaaatgcaaggtca

SEQ ID NO: 60363 - DNA, 295 bp, Heterodera glycines
atggcaatttgttcacatcagaggcggtcaattccagctcagtttccccctgagttgctactccaaaatggtcagcaatttcggcacgcaatttgtcttggaaatcgggatggcatgccattgaccacagaaacctggcattatagatggaaatattttgtgggcaggcatgtaaatgacgcaaataaatatttttttttaaatgaattcgaattttaaattttaatcgaagaaatttctttttttttaattcattaaaaattgttatatattttagattaattgctatgtataa

SEQ ID NO: 60364 - DNA, 571 bp, Heterodera glycines
atgaatgaatttgggttagtttgcgaattttaattggcaaagtgaatacttagcgaaataaaattgctttacattcaaattaaatgattagacccgcccctctcctccagcagattcttcagactcgagtttttcttggttaaatttttacttcagcagtataaaagaaaattgccgaaaaaatcattttaaatacaaaaaataaatatcagttttcaatcttcaaaaatgtttaaaagagctaaccatgagaaagaattgaaactgagaaagaaggaacagaagcaaagagattaaccactaagccaacaattaacttttcaataatttttcattcctccaactttgctcaaaaatttgatccagaaccccatgcttaccagtgtacttttggacccggacctaccgggtcgggtaccgggtttgcaacagggttgcgcaaatcacccgaaaccctacattttctcgacccgaaacgcgacccgatatttttctcgacccgcggcaaccctggtatgcaatagagagactctaaaatttatattgtctatgagtgaaattattgggccaa

SEQ ID NO: 60365 - DNA, 258 bp, Heterodera glycines
atggaagccctaataatcgaagtctgtgcgagtaaatttataaaaattcaaatttgcgaccaccaaaaaagaaaaattaattgcaaaaagaattataaaataaatgagttttattattttgtgaatttgaaattagaagatgagagccaaccgaatattataacatcaatttggaggcatcagagacaggcatttaaactcagttaaactcagacaaaaataattaaagtaactaaaaatcaaagagtaattattaaa

SEQ ID NO: 60366 - DNA, 1251 bp, Heterodera glycines
atgaccgaatccaccggttctttgtgctcctccaatttcgcctcggctgcccaacaaaatgttgtcccaccagcaacagcagcatcagcagtcgatgttcatcaacaacaacaacaacaacaacagccgatgctgcagaccaattctttccacgaccggcgccgtctgaacactttggccgagaaacggtcctttctcgtccgaatggtaagtgccgccgggatggcacggaattccgatttccgaaaattttttgcttctcggaatgccatcccttgtaagtgcgccgggagcggccctttgatgtttgcccgagttatcacagctaattagcattcatttgctaatcactcctttctctttcattaatcactaattatttttattttctcttttttcttttcattcctccgctattttcttatcattaattgacttttcccatgatgtttctcatctgttcacaggtcagtgacccgaagtgttacaatccgaaaattgtgcaccatttgaacatgcgcacgcacaaccaaacatcacaagacttattcagggacagaacattgaggtgtgcagcaggggaggaggacaaagtgacaaatgacaaatgggacaaatgacaaatgggaccaaaatgacaaattggaacaaatgaataagaaaactcaaaaatgggcatcggttgtgatttcgttagatttttggcaattttgtcttgctcctttcccccccccccccccccaaataggcatgcaattgaacaaagcagccgtgccatcggtggactgtgtgtcgcaactgctgccgcccaatcggcgccgtcgtcgtcctctaccgccccgctcaacagtgccaaccatcacttccatttgccaagtgccagggcggcacagtttcgaagcggaaaatgtttgtgcccattcaaaaggaatgccaatgatgtttcctcagatttgtacatgagcatcgatcagcaggggtcggacgacgattaaacggcgaacaaacaattaacggatgaattttggttttcgtctcggcgtattcaaaggaaaaaggtccgcaaaaactattacaaccgtattagaccaggaattgtgtttctggataattaccgttaattacccaccgcaagtatcattttattagccatgtatccattcatcattattatcattttgttccatcggtgcgtcgttcgttttgtttgttttttgaataatttctcccttttttggcatagtgtaacaa

SEQ ID NO: 60367 - DNA, 1472 bp, Heterodera glycines
aagagaaggctaaaaaggatgccgaggataaagctaagaaagacgcagaagagaaggctaaaaaggatgccgaggctaaagccaagaaagaagcagaagagaaggctaaaaaggatgccgaagctaaagccaagaaagacgcagaagagaaggctaaaaaggatgccgaggataaaaaagccaagaaagacgcagaagagaaggctaaaaaggatgccgaggctaaagccaagaaagacgcagaagagaaggctaaaaaggatgccgaggctaaagccaataaagacgcagaagagaaggctaaaaaggatgccgaggataaagctaagaaagacgcagaagagaaggctaaaaaggatgccgaggctaaagccaagaaagacacagaagagaaggctcagaaggatgccgaggctaaagccaagaaagacgcagaagagaaggctaatgccgaggctaaagccaagaaagacgcagaagagaaggctaaaaaggatgccgaggctaaagccaagaaagacgcagaagagaaggctaaaaaggatgccgaggctaaagccaagaaagacgcagaagcaaagaaaaaggaggaagaaatgaagaagcaaaaggctaagcccgaagaaaagcctgaggcacctgccgaaggcgtggccgtagtgccggaagcgaagaaggcggaagagacaaaggaaaagctgaagcaggaagagaaaccagtggaagtgccaccatctccagcagaaaagaagagaaaagaggctgaggagaagaaggctcagaaggatgccgaggctaaagccaagaaagacgcagaagagaaggctaaaaaggatgccgaggctaaagccaagaaagacgcagaagagaaggctaaaaaggatgccgaggctaaagccaataaagacgcagaagcaaagaaaaaggaggaagaaatgaagcaaaaggctaagcccgaagaaaagcctgaggcacctgccgaaggcgtggccgtagtgccggaagcgaagaaggcggaagagacaaaggaaaagctgaaacaggaagagaaaccaatggaagtgccacaatctccagcagaaaagaagagaaaagaggctgaggagaagaaggatcagaaggatgccgaggctaaagccaagaaagacgcagaagagaaggctcagaaggatgccgaggctaaagccaagaaagacgcagaagagaaggctaaaaaggatgccgaggctaaagccaagaaagacgcagaagagaaggctaaaaaggatgccgagactaaagcgaagaaagacgcagaagagaaggctaaaaaggatgccgaggctgaagccaagcaagacgcagaagcaaagaaaaatgagcaagaaatgaagaagcaaaaggctaagcccgaagaaaagcctgaggcacctgccgagggcgtagccgtagtgccggaagcgaagaagcggaagagacaaaggaaaagctga

SEQ ID NO: 60368 - DNA, 59 bp, Heterodera glycines; identical to SEQ ID NO: 52421

SEQ ID NO: 60369 - DNA, 59 bp, Heterodera glycines; identical to SEQ ID NO: 52421

SEQ ID NO: 60370 - DNA, 59 bp, Heterodera glycines; identical to SEQ ID NO: 52422

SEQ ID NO: 60371 - DNA, 59 bp, Heterodera glycines; identical to SEQ ID NO: 52422

SEQ ID NO: 60372 - DNA, 59 bp, Heterodera glycines; identical to SEQ ID NO: 52421

SEQ ID NO: 60373 - DNA, 59 bp, Heterodera glycines; identical to SEQ ID NO: 52421

SEQ ID NO: 60374 - DNA, 1335 bp, Heterodera glycines
atggacatttggtcagcagcaattacaatttatgagattgtgctcatcaatttcctgaacggttcttggtcatcaaattcgatgccaattaatatggcggactttagggtaaggcattaacaattcaaaactcacactaatggcataattaaaagctggtcgctttaaacttggtcaagtcctgggatgtgtagtatttgactgtgactccaaatttctgagttcattttggtttctaatttcgaaaaccgagaaaaattaactattttagcttactaatttcaaaattacttgtaaggaaaagcaaaaaatcctcccttcccaacttaaaaatataatttttattactctatttttttcgtcaaatttttaatttaaacttaccatattttcgagaaaatggatatttaaaatatttcgccgaaaatttgttaattaatttttacctattttaacatttttgggtttttttgtgcattttggcgcccattttgctagttttcgttgttttgcatctttatttatcagttccctcatcagctcactccgaaactcaaattagttcaaaaacgagcggaatcgatgccaaaagcataaaatatgaattagggtgcgcttgccattttcatgagataattagggtgcaccacaaaatttcgacgggacataattcgccgacgaatttaaaaaaaaattagaaatttagaaattttcagaaaaaaatcttagaaaatttttcaaatgacaaatatcaatggaaaaaacttttgaaaaattttttagcgattttttgtccaggcaaaatttcggccagcaaaattttgtccagttcccgaaaattagcatttttctcatcgttttgggccgtttcaaatcgattccaaccgttttttgatcttggataaatttatcttgatttgaatttacaaaattttcagccaaatatcgaaaacaaagtgaaacgaattggcgaattgtgtcggtttgcccgactatatgatggcacacttaatgaacaacaacaacaaatgatgatcattaaactgggtcttctagaaggggcttttaagccaggctctgaagattggtggctacggtattcgggagtggtcatcaacattctcgacatgtggggcaacaaatacggaatgccagacattgcctaccttttggtggtaagagcgcgggaaaattggaattaaattacacaatttgtttggatattgaaagcattattggcacaaccactcaataatgaatgatgccatactcccaatttgtcacagacaatttgtacaaatgctaatagattctaatatagcaaaagcaaataaa

SEQ ID NO: 60375 - DNA, 718 bp, Heterodera glycines
atgccaaagttaggcattataaaagtcatcctaggcaccccaaaccaagcggaaaatgcgtttttcgtgcttatttgtgcgtattaaatggctcccggtaaattggacactggaaaattggacaccagaaaattggacactaaaatactggacaccaatggaaaattagacaccggaaaattggacactattgtacataaaataaataagttaaaaataaataaacaaaaattttaattgaaatatataatgttattattatttgtagcatcagcagcagaacgccatcatacattcataacgaaaaaagttttcattttgatcgggttcccattttttgcgtatttttggcacattgaacaaccatcgccaattttctacattttttggcatcttaatcaatcatcgcctaatttcgtacacttttttccacatttgatcaatcatcgtgcctatttaatgtttgattcactctaaatgccttaatccatttatccacaccaattatttttcaagctaattcctgtgtttattttttaaaagaggaatttggtgtccagttttccagtgtccaattttcctttggtgtccaattttctggtgtccaatttaccggtccccgtattaaattgcgcaaaaattttaggcatttgcctaaaaatcgcatccctactaacagagcccggatttttatgtcctaaaaatcttgaaatatgta

SEQ ID NO: 60376 - DNA, 917 bp, Heterodera glycines
atggcatttttggggtcgctgatcacgaatgtgacattcatttcgaacaattccgaaaagtgttatgatcagggagccaactctgctgattatcatcatcattttgctgatctcaaggggtcaaagatgattttttttatgattatgatcattaaagcgcaaataaaaaatgtttgcttataactttactaaaaagcaatcatattttaaaattgatatcatcgatagccctaaatgttctccattaatcctgccaaattccgaaaaaatttcgttaattttgcaaaaagttatgaacaaaaatgtactaaaaacttgttgttgttgttgttgtttttttttgagttcctctggccataacttttttccaaagttaacgaatttttttttgaaatttagcaggctaatagagtacacttaagctatcgaatattatcaagaattaaatgttcggttactcttgagcgatgtcatgaattaaatttttgtcaaaaaaatttccatttgatcgtttttgagtccagcaccgttttttcttcttctaatttattgtttttaaataataatttgcggggaattgcccaggttagcagggatgacattccgaggctccaaaaatttttcggaaatcggaattccgagggtcaaatttttcggaaatcggaattccgtgtcatccctggtccatatagagccaatgcttttttttctcttaaagcatttgtaataataataacaattaaatattaaaaattgaaataaatttttagatttttgtcggttattatgcgggcgaagttatgccgtcaaacagccaaagcctgccgcccaaaagcaaatgtgttaccatcaaaattcattatcaccaaaagctcccctacattattaattatataaatattataaacataaataaa

SEQ ID NO: 60377 - DNA, 168 bp, Heterodera glycines
cgccaaaagcactccttcaaagagtttgccatcgtattactcgcacaattcgccgacaaagacaacctttggcgtcaaagagaatgtgccaatctcttccccgttgccttgcggcacacaaattccaccaaagactccgccgttgggttacatggatcacagaataaa

SEQ ID NO: 60378 - DNA, 84 bp, Heterodera glycines
atgcgcacccgtccgatctggcaagttaagcaacgattgctgactagccaaaaggttcggtgccgtgatgaaacgaaccaacag

SEQ ID NO: 60379 - DNA, 777 bp, Heterodera glycines
atgaagaaaggatggataaaaacgatgtaaaaatcatttttgagggcacatttttgggttttttaattgaataattgggaaaaaccaaagccaaatgatagtttattttcatttttctaaaaaaattattattgctctttgaatattttaagtgatttccaaatttcgcagttccattttgagaatttaagggaatcttttggcaattccgacgctttgttcgtaattttgtcggcaaaatggaacaaatacaaatacgaattgcgcaacattgaggacgaattggagcgattgtctggggggaaattgcgcgttgaatatgttccgctgttggaaggatatgagaagtaaaataaatttaaaaaataaacgaatatttttgaggttttaaaatctgcaaaaaatataaaaatcaacattaattaaatatatttattcaatttaaatgctaaattagagaaaaacaaattctagcgctattgattttttataaacaaattttttgtttaacaataatttttttagcttttcattggccgatgataattcgcttttgctaaatggcaaaatcgttggcgttgtgtattcagggctttccgcacttggctatcaagcaaatgaaaaggaaatgcacacgcggaaaatagttgaattgtcgacagcaattgtaaaataaaaaaatataaaattaatcaatcaaaaaatagtcaaaaaaaaattatttaaaaagcggcaagagagagattaatgagatttttgtaatatgatttaaataaa

SEQ ID NO: 60380 - DNA, 351 bp, Heterodera glycines; identical to SEQ ID NO: 53910

SEQ ID NO: 60381 - DNA, 279 bp, Heterodera glycines
atgataatttggcgttccgctggctgctattccgattttgcttgggctgctaaagtagagcccggagcaggaccggatcctgcgcaggattttgcaggatcccagtacgcaatcctgattgcaggatttgcaggattaatccggccggatccggtcctgcaaaaatttttgaattccaatcctgcaacaggatccgtaaatttgaaatttccgggctctatgctaaagttcggaacgcaaatgtccgatttacagcaggcagcaattcggggtcgttga

SEQ ID NO: 60382 - DNA, 304 bp, Heterodera glycines
atggctatctcttttttgagaattttctatgcaacaaacgctctcgaacatgaaacgaagtgcggtgcgccatggccattttatttttcaaataatttttatatttaatagatattccagaaaaatggctatctctttttttgagaattttctatgcaacaaacgctctcgaacatgaaacgaagtgcggtgcgccatggccattttatttttcaaataatttttatatttaatagatattccagaaaaatggctatctctttttttgagaaattttctatgcaacaaacgctctcgaacatga

SEQ ID NO: 60383 - DNA, 235 bp, Heterodera glycines
atggctatctctttttttgagaaattttctatgcaacaaacgctctcgaacatgaaacgaagtgcggtgcgccatggccattttatttttcaaataatttttatatttaatagatattccagaaaaatggctatctctttttttgagaaattttctatgcaacaaagctctcgaacatgaaacgaagtgcggtgcgccatggccattttatttttcaaataatttttatatttaa

SEQ ID NO: 60384 - DNA, 900 bp, Heterodera glycines
atgcgtgtaacaattattgctggtgaaaatgttgcttcattggagatttcggcagacatggaactggaaaacttcttggccttgtgcaagttcgaactcccctccattgccgacacaccaatcgaaagaatcgcgctcaactgcagcggtcggcaattcatcgccaatgctggactagcaaagaaacagcttaaggttggctgtctgtttattgttgaacaatgggtgattacaaatgcttttaaaaccaaaatcttgtctctcatctcacaactggccaattttaatgcattttttataatttactattgtccatagactcaaatttacagctttaaggatttcccccaattatcgtttttcaggagttgaacattcaacatgaagacgcgattcatttcgaaacgatcaggttctttgattgtcaaccctgtttccttttgacattttaatacggcactccaccgaaacttctttggtatttgaaaatgtcaaataaaaagaggggggggggtatcatcagaaaatgttaatggaccatcacccaaattgctttccgttgctgacctcactctgttgttcatttgatgcatttgctcttttcgttcagtgcttcttccaccgcccaaaccccccactcgtccctttccacgccgtcctcagccgcttcgtcctccctcggcgctccgctgcaaacttccaatttgatctcttccctcgtccaaaacatcaaagtgccccagaagcaaaagagcgtggcggaagaccgcgccatgtccgaccaaatcttcaccatgctccaacacccggcacggctcgacttcctccgggtggaccaccccgagttggccgctgcttatgagaaaaaccaacggacagaggttcttgtccatcgcatca

SEQ ID NO: 60385 - DNA, 1181 bp, Heterodera glycines
atgtccgaaatttcgcccggtcaaacactgaacattcatggcaatgtgaacgcggatgcgcaccgtttcgaggtcaatttgttgagcaattgcgtcgaaattgatgcccacatgggctccgcgccgctgcacttcagcgtccgatttgacgaaggcaaagtcgtgctcaactcatttgctgtacgtgtactgcttgctctccgtttttgtcgatacatttattgggggaatgaatgctttcgattgcatgttttgaaattttaggccggagaatgggggaaggaagagcgccactcgaaccctttcaccaagggacagcccttcgacctgcgattccgcgtaattcattttgttttccccttgcaaccgatttcccgcccattttcccgtcattaggtccacgaagatcgaatcgaaatattcgccaatcaaaaacaaatcaccgaattcaaacatcggtcagtggcaattttggggagggaacagttgtgaagaaaatgtttaagaatcctttacaccaacgttgaccacattcaggtaattgagaaatgtctttttttttgctgtttgttggcgttgtgccctttttaaaacattgacaaatggccattcattcccccgcccgaggcacttcaatttttaaggtccgtggcgacgtcacattgagtggcgttcactggggcggtcgctacttcgaacttccattccaagcgaatttccacggcacttctctcaaaagcggcacgtttagcaattgcaacagcacaaatgttcctttccatgtttgagtgggtccgttttttcaggccaacgtctttttgtctatggcattccgaagggcaatttcagcatcaatttgatcggtgccaacggggacacacttttccatttgaatccgcgttttagcgagaaaaaggtgtgggcaaatggaaaggaaatgctttacagtctcaacagattgtccgcggctcccaaaaagacggcgtgtggggcgaggaagagcgcgagggcgccttcccactgaagaaggaacaggcggcggacatcgccgtgttcaacgagccgtactccctgcagattttcatcaacggccaccattactgcgcatttgcacaccgtgtggagtcgccgaacaccgactacaaatttgtgcgcgttgaaggagacattgaactgacggg

SEQ ID NO: 60386 - DNA, 131 bp, Heterodera glycines
taaaaaaagggatttattcattttatgaaagaactatgcttgcattgataaaatattagcaaaaggcatttaggaaaaagccaagttaaaagttgttggaaagatagaaaagtgaaaaccttactcatttt

SEQ ID NO: 60387 - DNA, 1051 bp, Heterodera glycines
atggcacttccaacaaaaatccaccaaattcccaatttactcacagttttcatttcgtcgtcacgttgtatttacgagaatctcgcccttgaggaatggctttttcggaacaatggcgtgaaggaggacggtgattctcttctcatttggaggtcagtccaaaaaatatattatatgttttaatctactgattttatcccaaaaatcagcaaaattttgccaataattatttttcaaggaattctccagcggttgtcatcggcaggtatcaaaatccgtggttggaaagcgatgtccgtttctgtgcggccaatggcattcgaatttcgagacggtacagcggcggaggcgctgtttatcacgacgaaggtattttcgaggaagaacggagtattttgccaagaaatgcccaatccatcttttttataaataaatcccaaccttaaaaattctctttctttgaggtaacctgaacattagtcttatgaccacacatgaacggcattcgcgcaaaaagaatttgcaaattgtggccgattttctgaatgccaaattgttcggcggttgtgcttctgccaccgctccgcgactgatcgcaaacgaacgcgacgatttgctaattgagccaagcggtgccaaagtgtcgggcacagccgcacgaattgcacgcggacgcgcataccatcacttcactttgctggtggatgttgacattggcactgtccgacgcgcactcaagtcgccctttgatgatcagcggattcaaaccaatgcgagccgaagtgtccgcgcaaaatccgtcgactgtttggcacgacatttaaaacaaaatgtagaaggaaatgccgaaacggtacggcacgaaataattttattttcgtaagaagatcaatttggagtttcgagtcttatggcactttaaaatattttatcagttcacaaaatgatgaatgcctctacaaaaggtggccgattctgttctcaaagcgttcgttttgcagtacaaaagcagcgaattggttcggtggaacggcgaaatggacaaatttga

SEQ ID NO: 60388 - DNA, 130 bp, Heterodera glycines
atgcccaaaaaacatacgcaatcgaataaaacgaggaaaaggtcgggaagagaccttgacgagatccatgctgatctgatcaggcccgacaaaatgcaaagaattcaggtccttttcatcagtcattggg

SEQ ID NO: 60389 - DNA, 636 bp, Heterodera glycines
atgttcggctgcaacggaggcgcacacattcccggctcactggtaactgggcgcattttggctaataccttagcctctcatttcatcaaggtgtatgtcaattgggaggaggacggaaaaacgtaccaagcctattaccggggacaaagcccgcgcaaaaagtacaaggtcaagctgtacccaccgttgagcttcgaaatgaaggaacggagaagggcagaagaggcggcggaggatgggggcgaaacgccaaaaaataaacggagagacgacgaagttgaggtgattaacaaatgcatcatcaaaaatggaaattggaatggtgacttaaattccttttcttcccaaggtcacttccgaaatgatcttccgccgtgacgaccttttccccgaatacattcgccaagcattgctcaaacgaaagtcgggcgagtcgatcggtcagcctcagcacggaaggaacagctgacagagcggaagcacacaatctttcgtatcagaagaataagctttaatttccaaactgcttcttcataatgttcttccatcattattttttgtgctttcgtttttcgctccttttgtttgttttccttcgccatctcaattctgttttttactgctgtcctcattaaa

SEQ ID NO: 60390 - DNA, 240 bp, Heterodera glycines
aggtcacaagcgtcgcctgcgcgccctcggagaaaaaccgtacacgcaaagagaggcggaattggccggcggattgggcgtggaagagcaaatcaaattggaaagcctggcggatttgacattttagcacccatttcttatagggtgaatttatgtttttttttgttgttgtttttgagttctttatcatacaaacagaaaataataaataacattttcgcaaaacaaaatatcaaacaa

SEQ ID NO: 60391 - DNA, 624 bp, Heterodera glycines
atgtccgttcgcagaggttcgacctcctcccaacccgcgtccaagtcgggcagtgtggagacgaataacagcgacgacagtttgccagtgccgtgcacaaagcgacagaaagccattttcaaggcacgcaaactgatggacgcactttgggccaacaaaccggtggatttgtacgcggaaaaggtgcattttcaccacgcattgcaaaaagtgaacaatcactaaattttcaaacatatttattatgttgttggatagtaaaatttaatttataaatcaaatgctcggaaggtgcacaactcgcgcagcggacgactgtacccgcactgtgccgtctgtcaattctttttgcaacgttccgtttggatgaagggcacaccggtggagaaagtgccggaaaagtcagtgccctttaatcaatcaaatctttaaaatccaacaaaaagaattttctttcgtgttcaggtcaaagcgatttgtatccgaccaaatgttcgagaaggattttcggatggacacgttggacttgggtcgttcgaaactgagggacgaccaactgagggaatgttcgaattgcaaagtggtggtccacgttgggtgttatccgagccaatgcacccttaa

SEQ ID NO: 60392 - DNA, 1119 bp, Heterodera glycines
atgaaatgccacttgataaaactgatcaatttgcctgttttagtacctttccaattcggtgaggtcgtaattcggttttggaggacgaaattgcttggagagtgccatccgccggaaatcgccgacgcgcatttccttccggtaaacggtgttgttcttgacatagcatcccgtgctcgagccgccctcaatccgttctttcctgaaaggcttttattcgaaacgttttttagcctaagcaaagttgcgaaaattattaaatacgagaaaaacaaaaaaaattatgatttttcaattgatcagcagaaggggaaattctttttgagacagcggcgacacaattcggtaagcaacagaactcgccgccctcccgtcgtccgtccgttctgcggtcgtttcccccttcccctgccccccccccctttcgtcgtcttcccttacggcgccattgcgtcggtctgtctcttttcccttcccttctctcctcacttcgctttgtctttcctttgctcgccatttttaatgaaaaaattattttacttaaaccaaaaataactgcaatcactcaataacttttcaactgttgttatagtattattatgacagttgattaaaaatccaagtttcagatgactattattttttgcagaatgtgcagtgctcacactgggcaatgaatgacgaagtcgttcagatcggagtaatcggacggatttttggacggacgcgggtgccaaccgggcggaggaatgacctgtgaaagaaacaagttttgtggcaatatgtaacattgaaaaaataattagcaaaaaaatgacaattaaaaagtaaaatatccgacgaaatgtccgaccttacaaacgccagaagataaatgcgctctgctgcgctcgatagtttcgatgtatttgctgaaattcgaaaactcctccatcgtcggtcgaaaaaccattatctctccgtccgctgtgcccgtgttgacccattctttttccttggtgtaaatgggtctataagctgccattcgaactgtgaaaagattaaaaaagaactggtttaagctaaatgtaccaaaaaggcatttaggtaattaaacaaaagaaagtaacataaaaaaca

SEQ ID NO: 60393 - DNA, 2215 bp, Heterodera glycines
  unsure (1)..(2215): unsure at all n locations
acagttcgaatggcagcttatagacccatttacaccaaggaaaaagaatgggtcaacacgggcacagcggacggagagataatggtttttcgaccgacgatggaggagttttcgaatttcagcaaatacatcgaaactatcgagcgcagcagagcgcatttatcttctggcgtttgtaaggtcggacatttcgtcggatattttactttttaattgtcatttttttgctaattattttttcaatgttacatattgccacaaaacttgtttctttcacaggtcattcctccgcccggttggcacccgcgtccgtccaaaaatccgtccgattactccgatctgaacgacttcgtcattcattgcccagtgtgagcactgcacattctgcaaaaaataatagtcatctgaaacttggatttttaatcaactgtcataataatactataacaacagttgaaaagttattgagtgattgcagttatttttggtttaagtaaaataattttttcattaaaaatggcgagcaaaggaaagacaaagcgaagtgaggagagaagggaagggaaaagagacagaccgacgcaatggcgccgtaagggaagacgacgaaagggggggggggcaggggaagggggaaacgaccgcagaacggacggacgacgggagggcggcgagttctgttgcttaccgaattgtgtcgccgctgtctcaaaaagaatttccccttctgctgatcaattgaaaaatcataattttttttgtttttctcgtatttaataattttcgcaactttgcttaggctaaaaaacgtttcgaataaaagcctttcaggaaagaacggattgagggcggctcgagcacgggatgctatgtcaagaacaacaccgtttaccggaaggaaatgcgcgtcggcgatttccggcggatggcactctccaagcaatttcgtcctccaaaaccgaattacgacctcaccgaattggaaaggtactaaaacaggcaaattgatcagttttatcaagtggcatttcattttttgttttattgagtaattaacccgacttactttatgcgatttgttcggttgggacaacaaaaagcagagagatatttatcgattaagatagttaacagcaagtaatttcaatttctttacaaaactcaattattccctcagttttttcttaaaaaacataatctttaaaaatataatttttaaaacctatagaattatatattttaatccaaaatgttagttagtctttatgcatcaaactaatcattggattaagacatttttggcgcaatttgctccaccacgagcccatctacggggcggacacgccgggctccatctacgacccgggtgtctctcagttcaacatgaacgggttgggcaccattttggacctgctcaaagagcaagaggttggccaaacatggaagaacaaagttttaatttgacatttcattcagctcgagatcaaaggggtgaacacggtttttctctattttggcatgtggaaaacgatgttcccgtggcatgtcgaggacatggatctgtactccatcaattacctccattttggcgaggttaaaaaaactcaatgaagttcattttcaataaattttgatgggagtgtccatgaaattctcttcaatttttccttatttaagcccaaattttggtatgccattcctccgtccgcggcggcaaaatttgaacgattggcggctcaacgatttccggacggtctccaaatttgcaaggcatttctccgccacaaagtgtacatcgtctcaccgtcagtgctgcgcacgaatggcgttccgttcggctcaatggtgcaataccccggagaatttatgatcagtaagcgagcagaatgggagggcagaaaaatggaatggttgaagaaaacggcaaaatcaaacgtggagacaaacggaggatggggtcgggagatggatcattcgaatagaactggcgtcgatttgattgttttgattctgatttctaattattttatttctccagcatttcctcgaggttatcacatgggcttcaatttgggttacaattgcgcagaatcgacaaactttgcgctcgaacggtggatcgattacggtaatcagaaagacccctaattttcacttttcaaaaatgcaggcaaaaatgcggtgctgtgctattgtcgaaacgatntgtgtggag

SEQ ID NO: 60394 - DNA, 388 bp, Heterodera glycines
cggtaggggtcaactccgtctggccaactccgtctcagcaatgttcaaaaagctataacttttttctttgttggccaaacttcacaatcatggtatcattcgaaagccctagatgtttagaagatatttataagctatttctcagtgattaatcagctctcaaaaaagttgtcagtttaaaaccgcaaaaaaggcagaattttcaaagttttttatttctatctttttttatagttcgaaattttctgtaatttttagtaggctaatagagcctgtgaagagctttcgaatgatatcaagattgtttgattcggtcaataacttcaagagttatattgactcaaagttggctcagacggagttggccagacggagttggcccgttccg

SEQ ID NO: 60395 - DNA, 986 bp, Heterodera glycines
gcccgaaaagtcgggggtattaagagataatcactttcagattcgttacgaaccctacgtcaaagtggagccggatgagcttagcgtaatgcaaaatctttggaaaccgtaaatttgctcctcaattaggcattggctcaccgacgacttgtcgccaccgttgacacaattgaacatttttgcgcactgatggaccttcataacatcaaagatagggttggtctgagggggacaacgaggggacctaattaagggcaattagggggtggtgaaataataattttctggccactattttccatttcttagctggcgttggtaaaggcggcgttcgctccgctgactttgttctgtgccgtctcttccaccgcacgggtgagtttttcgtcttcctaaattccttttccatttttttagcattttgtgccattttccgcgttatttcatttttcttgacttccccccccccctttctcttaggtcacccgtaaccgtgacattctttgcctctgcaatttcggctacgtcccgcgcggtgcccacctcagttacgccgagccatagttgttaattgcctcaaatggtttaaaaatggcatccattttcagtcatttttccaatcgattggtggacagagcgctggacgaattggtggagccgttcagaacgttcaacttcaaagagcaggaaattgtgctgatgaaggcaattgttgcgctgaatccatgttagagagcgatgaaaaaagcaattaattattttgctaattactcattaagacctgcccaatttgtcggcagaagccgcagaacaagtggccgacttcagagaccgagttcaggtgcaacaaattacttaaaaacagccaaacaatttgtcaatttgaacaggaaactctgtacaacgtggtgagagaaagtcacccgaaggaagtggcttcttcccgatttggcaatttgcttcttttcctccccaatattatggta

SEQ ID NO: 60396 - DNA, 810 bp, Heterodera glycines
atggtcgacggcgactcggacttggccggctcggcggagatggaagaggcgagggaccgaatggcagatactttgccatcgatggcgccgcaaaaaatggcatggctaatgcaacagagtacaacagcaacagaagcagcgaaggaagaggaggaggaaaatgaacacgtacagatgggaggggggacggccaactgaagaagccaaactccaacaattggacatcgatcgtcgtttaaaaacgctcaatactctctttgatttcatatttacatttgcctacctctaacaataaatgccattcgttaaaccatttaaatacatatccattaaattggttttacatacaatttgtattttattgttgaaaatactcgttcaatacgtttgttttcgttgttggtttcgtgttaattgcatgagcagcaacaccccccaaaatcagccgactccgtttgattgttcttcggtcgttcactctttgaaaaaccttctacagttgaacagagctgtccaaaacattctcgaaagcactgacaaggcccaacctgagcttttcggtcggatcaatcaggtccgtccatatccgattcggttaattattttcattttgcgattttgcaggtgaccaattcgttgcgatcgctgcgcgaaaacgttggacaaattgaggacatcgatcggagtgaggaagagcagcgcgaactgatcgaggaccttcagcggcgattgaagaccaaaaatgacttcttcagaaacatcggcggagaaaatcggaacggagaagggacagcagcagacggagtttag

SEQ ID NO: 60397 - DNA, 1581 bp, Heterodera glycines
tcccttttagcctccaaaaacaacaattgtgtcgactcaaatttcaattgcttcgatgcgtttgacttggacagccaattgacggaggaagagcgcactctgagggaccaagcgcacgcgtactgccaggaaaagttgcagccgcgggtcacgcaggcattccgcgaagagagtgggtagaagtggtcaaaggggaaatcggcagaaaaattggatgaaatttaaggggaaattaaaacccataatcgatgggttattttcagtagtacaattccaaataaatgccttaaatcaaatcctacttttgctactgactcttttttcactggcttttccctttcctccagagttcgacccttctcttctgcccgaactcggtcggatgggttttctcggcgcgccttacaaagtgagccttcgctgtctttaatttttttggcattcgcccgctaagtgtccataaaaatgccaattcgggcttcattcggctatagggttacggttgtgccggcacttccttcgtcggctacggtctgttggcgcgtgagttggaacgtgtggacagtggctaccggtcgattgtgagcgtccagacgagtttggtcatcggtccgatcgtcacttatggcaaacattggcaaagggtccaccagacgcccaaactgaacgctttgttaaggttccgaggctcagaaggaaaaatttctgcccaaattggcgagcggtgaattgatcggtgccttcggacttactgagcccgaccacgggtcgaacccggcggggatggagacgaaggcggagtgggacgagcagcaacagttgtacaggtggacacggcccattgagaggccaaacgcaatgccaaccgaacccaaaaaggctgagcggctctaagtcgtggatcagcaacgctccggtggccgacctgttcattgtgtgggcccgaagtccaaagcatggaaatgccgtcaaagttggccattgtcactgtccagttggcatttttccattattcagggttttatcatcgaacgtggcgccaaaggactaagtacacccaaaattgagggcaaactttcgcttcggacttcgatcacagggcaaattgtgatggtcggttgttgtcacgacgaatctttaacaaaatgaaccaaaataaaatggaattaggacgaagtgccggttccggaagcgaatttgctgcccggtgcccagggactcagtgggccgttcggctgtttgaacagtgcgcggcttggcatcagttggggggcgctcggcgcggccgaaagttgtttcgccgctgccagggaatatgccatggacaggtgtgagagaaatggcattgtttgggaaataacggggtgaaaaagggagagaaagaagaaattcagaccattcttgacaaattttcataacaattccatggccatgtttatcagtaccgccgggccccaacagtccaggaaattttcaaaatttgacccaaacaattaaaattttatcacagccggacttttgaccatcgagcagaattaatttgcagaaaacaatttggcaagccaatcgcagcgacgcaaa

SEQ ID NO: 60398 - DNA, 577 bp, Heterodera glycines
atgtcgaatgcgtggaccgttctcttccggcaaagatcgtcaagggacgccgcccaaacaccaacgccggcggcaaagccatggagcagcacaaagggacacggactttggggatggtcagaggacggtttaatggtcagcgtatgcactgaactgttccaaagacgaaccttaggacggaaaattgtgaattatgattattaaattcaaattccaaaaggaataaaaaatagaaaattcaaaaataatttcccgacacaaaataaagggtaatcacagtaattgatttggtgctgatgtgtgtccgaactctgctgagtaaacggcgttccgcgtccgcaagtctgaccaacgaagactgaccccaacggaaccacgaactgcaaagggtcaccaattattaatagaggagcattactatgtttatattgactcaaaattccaagtgccttttttttgctttcggcctttaaatgtcaaattgaaggtgccatgggcgaaaaaacagcaaacaatgaccaatttcgcagtatttgataaaaatttaagggtaattgtcgtccgacggtgccgataa

SEQ ID NO: 60399 - DNA, 304 bp, Heterodera glycines; identical to SEQ ID NO: 51570

SEQ ID NO: 60400 - DNA, 202 bp, Heterodera glycines
aaagggtgaaaaatacagtttggaaaaagggcatgccgaacttttgttccaattcaaatggtccaataatgatgatggttcagcagaggagaaattcgtgttggacttgaccccaacacagttaaaagatggcaaattggagttcacaattgacagcaaaggcattgagctgaagaggacttggtaaatgatgaaaaaaata

SEQ ID NO: 60401 - DNA, 1396 bp, Heterodera glycines; identical to SEQ ID NO: 29926

SEQ ID NO: 60402 - DNA, 461 bp, Heterodera glycines
atgcttttcttaaagatgctgaacagcttcctaactcatggctcttcttgggagcacagtgggcactttcctcgcgtcactctttgcgacctgaaggtaaaatttcctaatttgagcaccattactaataaatttccgaattattctgagtgccaattaacttcatttttccgaatatttaataaatgggaattaatttaccaaaagttatcaactaataagattttttcgaaccgttcagatccgtcaaccaaacgaacgctttcacgagttcactgtccaatgtgtgctggtggcgaattttgtcagttaaatgcacttgaaatatgggtcaatttagtctggtagttttaagtctgctggaatgcctcaaaacgatcttttttttaattttaaggccgtaactgtttgtaaatttacaaattataaattaatgggcatgtttcgaggtagaaacatta

SEQ ID NO: 60403 - DNA, 62 bp, Heterodera glycines; identical to SEQ ID NO: 57164

SEQ ID NO: 60404 - DNA, 459 bp, Heterodera glycines
atggtaaaagcggacaatgaaaggcattcgcgacaattacaaatggcaaaaaatgtgcaaaagttagactcactaaatggaagaaaatcaaagggaattgaaataaaagagccgacacaaaaagtgccaaaagtggagaaaaatgacgagggaattgaggcgaagggcaaggaaattgtggaagaaaaaacgaagaaaacgaagccgaaaaagaaaaaaggggatggaaaaagtcgaaagtcgaaggacacttctgttgataaacataaagcagaaggggaaggaatggacgaaatttgggctaagataaaatcagatcaaaaacaggaggaggaggaggaggaggggaaaggaacggacaaaaaggacggaaaggaagaagtattggaagaggaggaggaggggagtggatcggcaatgttgcgcgaactcagacaaaaaaggggaaaactgaagaag

SEQ ID NO: 60405 - DNA, 218 bp, Heterodera glycines
atggcttctttagcattgtcgaccggtaggtttcgggtttaaggtgtaataaattaatagtttcagtgaaatgcaagaagcgtggaaacttctcaacataggcgtcccttcgctaaaggatatatgcaccaaaagcatttctgagaatgagaaagctttggaagaatttcgatcgttcccatttgtttttaaaaaaatatttacacgtttttaataaa

SEQ ID NO: 60406 - DNA, 2020 bp, Heterodera glycines
atgagagccctctggcgtttggcgcgggccttccccggcaaactcatccgctgcatttgcttctacgccgcccaagccctggagatcgaacggttggtggcccaacaagaaatcccggacattttagtgacgacagcggacgcgacacagggccacgagtcgtcacttgccgtcgtcgtcacaacatgctccgtcttcgacagtggagccgactctcagcctttctgggctgatgccgcacgggtggatgtcgccatctcccgcgccagccatggaatgatcatcatcggcgatttgctgctgctcaaccggacggagacatggcggcgctacctggaccaagcgacaacggaaacgacagtggtcggcccggaatacttcgacttcgagcagttcaacaaccccgacaactattacgacaaggacggacagctgatctcatcctcaaggtggcactcgggaacgcactcgtggcaaagcctcaacttttggtgcgcgcagacgaatgaaagccaagctgtacgacttcagccatggacggcaactgcgcatggacctgcttccctcttcattcaattcccctcacgttttaccattttccttttgttttgactctctctttctcactctctctcgtcatccatttcttttaaaattatcattcattttgtctttatttccgaactattaatggcctttctttcccccaattcaaatttcttaaaaatgcgtcggtttcctcacactttctctgacccattctctctctcttctctcatcatgcttttacatctcgtccccaaaccggaatgacccctggttgcttttctccgatttcccatgccatccatctgagatgaaggtggaccgctgctcattattgtaatgcgcagcttggccgtggaagttcggattggagagacgaagggcgaatccgagagtttggtccattcattcactttcacttcatttttcatttaaggatcggggacgatcctaagggaagggggaagttgtaagtattattcgacgcatttccctcatttaattattccttattggccattatcaattcaatcacatttatccattttcacacgtttttccttttctcattgtaatgtttctccgcccattctcttcgcatttttccttccccagtgatcagtcagtcagtaatgatggaacagacttcaattattattccgatttctcgcttcgtataaatccaacaacgaatgaataaagacatctttaacagtcaatgagtcgtttgggggttcggggcttggtcaaaggcgccttggcttttccccattccctcccaaactccatccgggataaacggtgcatagttggtctgggggcatagtgcgcatccctcactatggtgagactgtaaattatacggtgttttattttatttttaggacaactagtgctgcacgtttagttttatataaaaatatggaaagggtatttaatacgccgggctgtcgtcttttttattgcgataccggtatgtaaaaatacaaatttagttgatttttattttgttcagattcattagttattgcccaccctccgaactcatgtcctcttaaagaaggaaaattttttggggaaatgactagagaatatgcggattccgatattattgagtatgtttcgggtggtcctaaacagtatgcattgaaattaaaagacgggaaactggagaaatttggtataaaaccaaaatacgcgggataactttggatcgtaataatatttgattatgaaacttttaagaaaatgattttaaaatatagagacggagctaatttcaaatttacatacccggacagttttaggtagtgttaaaaaaatttctgaattaaatttcttttattaaggcccggccgggacagtttaatcattaatcgtgaggttaagaaagactataaaccgatacagaagaagggcattattgatgccaatttaaacgtactgccttttggatatttttgagtaaaataaa

SEQ ID NO: 60407 - DNA, 2136 bp, Heterodera glycines
atgcaaaaacctattccttcaaatcgccccaactcttctgtctccaaaacccttgcctgcgggcttgaaaaaatggtgaatgcgagtggaattgagccactcacggtgccggtgctggcggatcggagtgatccgctggggctcaagtcggttcaacccgacccggtgccaatggaaagtgccaaggctggcacaaaagaaatggaagtgatggaagtcgatgaaatgagcggagaaaaagggaaaaagggagaaatgggtaaagaaaaggtgaaaagtggtggaattgaagaggaggaagaaagtgagggcagtgagggtgaactgctaggagacggtggatttggcaatttgcaactaaaccccagcctgagggcgggaaataaagcagttgaaaaggaagataaggggaaatcctatctggtcgcccaagtgagaagcgacggtgtgatcgcggcacggatgaaacttttctgggatttcccagaattggtctttgtcccttttagcctcttcgacaacgcccagccgatcgaaatcggcgatttgttccgcttacataagtgtgagtggacgaagagcgaaacaggatgggaagagcgcggagattggctgtatgaagcaaccggacggctgaactaccaagctacggcaacggacgtgagccaattgcgccagcgcatccccactctggccgtcggcattttggtcgatgtgcaaagagcccgtgaccgacacgtcaaagtggccatggtgtcagcacctgagctgagctgcgtgatgcgcgcctaccgtcgccacttcccggccgatttcacggataacgacatccgctaccgctccgttgttcgtcttcaacttcggcagatcaacagtccgccatgggtgctgtattcacagcagtttgcgtatgttttgccatctgattttggtaaaaaaaggggcgatgaactgctcgttcatcacgcaaacgtcattgctggcgttgagcctgagccaatgggctatgagttccctttcagtgccgaactgagctgggcgaaggtccagctgggtgagaaggtcatggcggcggctgtcgcagcgcagtcgttcgatgtgaaggctgatctgcggaagcacactctgttcgtcgaaccggtcgtcatcaatgagatctcgacaagaagcgtgatcatccagttcgtcatgccggtgccgagcatcgaagagctcaccgaattgtgcaaaatctgggaggtcgatttggcggtgggttgcaaagtcaatccggcagccaaggcaaagccttgtgcgcatgggtatgtgctaagcatcgaaaagcgggcattctgtgtaggatacgagatcgatgtaaaagtgatcctttcctatcaggcagcgaaggagcaggatgcccaggaggaattcgatcagctgcgcaccggcgaactcgacggatgcgttgaactcatcccgcagacgtccgtcagggccctgcaggaacggatgttcacgctgcggtccaatgactgctcgaaagtggcgaaggacgaggcaaaggtgggccgaatcatgtcgattttattgggccgaccggtaaaaccggaaagcccaaaggccaataacccattaatgacttttggtgctctttcaaaattgaaagagagacagatcgacaccgcgctgtgcatgctcgacgaggtgccgcgcctggtcttccaacaggccgggcccggcaccggcaagacgttcagcgcggcgtcgatcgtggccacggtcctggccacggatcccacggcacgtgtgttggcgctggccccaccgaacgtcgccgtcgtcaagctggtgctggagatgcaggatgccctggccgccggaaaccacgtggaaccaatgcttgccttgttctccgggacaggtaagttgagatatgccaaggaagttgagcggatttcccccccacctgctcgccaccgcggtggaggcacaggactttcaggaactcctgcagaaggatcaagaacgcgtcaaggtggagcggtacctggacgcctgcgagcggaacccacgcctggcccaggaaatggcagtggcgaaaattgtgcaggagcacaaaaatcgccgcttgtgcttcgccaccttgtccttctgtga

SEQ ID NO: 60408 - DNA, 468 bp, Heterodera glycines
atggccggaaatggaaatgagttaataaaaagagaggatgacgaaaattctgttaatttcatgaatttgtttgaaaatctggaattgatggattctgaaaaactagccagtctaagggacattgagaaaatatttgcggacacctcaccgccgccaactggtccatcgccaattgaaagctcagttttgggggttgtgttcatctcacaccccatactgtgggcactggtacaaccggacattttgggcgaacgaaatgagctattggaccgaaaaaatctaagcttagaatcggatcaattagtcttccaaagtacaccaagttatgtgacgacaattacacttgaccctaacaataactggccacatttcacacaaatttcgttgaattggttcgactatcataccgttacctatgtgccgccatggacttgcaacaatcaccaaaacgcagatgaattgatttaa

SEQ ID NO: 60409 - DNA, 806 bp, Heterodera glycines
atggccagagattgggggacgttgcgatcgtcggactcggcggtgggtcgttggacgcattccttcacctcaaaattccatcggtgccaacgacggaattgggaggaattttggggaacttgctttgttcagctcaacatcactgtctacgagagtgactcagttgtggtcgaattggccaaacaatggttcgaagtttcggacgatcagacgcggagaacggtggtcggagacggagcggccgcaatttccgatcacgtcaaaaggggtgagtggtagaagaactgcagaaaagtgacccacagaaaagcggagaattcgccaccatcccaagccgtgtattaaatccgatataagcctaacattgacgtcatatctttgatttttctggcgttaaaagtcagtcctatgacctttttgtagccacgtcggtgcaccccaaaactccgccgataattcactattaaattttgaaaaaattcgctggaaattgaggcaatcgcttcgacgcgatcattttggacgcgtgcgactcgtcccctcacattccgtgcccagcctcgccattcatcgctttgaaaatgctcggaaatgccaaaagcgcacttcgaccacagggtttgccaatcaatccacgatatttgtgttggtgccttcaaatttgctaatcccttaaggcgttttcgtaatgaatgctctccccgccagcgaacagaacgagcagaagactctcgcccttctccaagacaaattgctctcagtgtttccgctttgcgttcggatgacaatgggtcgtcaaatgaatt

SEQ ID NO: 60410 - DNA, 433 bp, Heterodera glycines
atgccgtttcatcatgtgctgctgcttgtgctcgtgtgcttctttttgctttttgcatttttaaattttggcaatgcacaaatttttggcttcacgggttcgtttggattcgtttgacgtttcgacaaatgaatattcagtaaccccggaaacacatggaaattcttaattttccgaaacgccctaaatttttgttaagaaatgatttcatcattttgaaggtataggaatcggattctccggccccgaaaatctgagtttggaagtacacagtaaacgcctgaggcattgaaaccggaattacccatgtctaaaatttagaaaaaaattttttactgtttatcaatatgtgtttcttttttgagcccagaaattttgagtttctggtcctgtatgtaatgaatgttagcagataaattttaacaaaaataaa

SEQ ID NO: 60411 - DNA, 49 bp, Heterodera glycines; identical to SEQ ID NO: 51181

SEQ ID NO: 60412 - DNA, 658 bp, Heterodera glycines
acaaaaagatcgattttttcaagtgtccgtttggggtactcaaacaattatggggagcaaatatccaacgcagaattaaagtacaggctatagggaagctattcccgaaggattcggtctccccataaatctgggcgcatcggttcggggggactgccccgaaaacaaaaaaatcgattttttcaagtgtccgtttggggtactcaaacaattatggggagcaaaaatccaacgcagaattaaagtacaggctatagggaagctattccggaaggattcggtctccccataaatctgggcgcatcggttcggggggactgccccgaaaacaaaaaaatcgattttttcaagtgtccgtttggggtactcaaacaattatggggagcaaaaatccaacgcagaattaaagtacaggctatagggaagctattccggaaggattcggtctccccataaatctgggcgcatcggttcggggggactgccccgaaaacaaaaaaatcgattttttcaagtgtccgtttggggtactcaaacaattatggggagcaaaaatccaacgcagaattaaagtacaggctatagggaagctattcccgaaggattcggtctccccataaatctgggcgcatcggttcggggggactgccccgaaaac

SEQ ID NO: 60413 - DNA, 240 bp, Heterodera glycines
atggaacagaaagtggaagagaaagtggaagaggaacagaaagtggaagagaaagtggaagaggaacagaaagtggaagagaaagtggaagaggatcagaaagtggaagagaaacagaaagtgaaagagaaactggaagaggaacacaaagtggaagaggaacagaaagagaaagcggaacagaaagtggaagagaaagtgaaagggacagtggaagaggaacagaaagtggaagagaaa

SEQ ID NO: 60414 - DNA, 291 bp, Heterodera glycines
atggaagagaaagtggaagaggaacagaaagtggaagagaaagtggaagaggaacagaaagtggaagaggaacagaaagtggaagagaaagtgaaagtggaagagaaagtggaagaggaacagaaagtggaagagaaagtggaagaggaacagaaagtggaagagaaagtgaaagtggaagagaaagtggaagagaaagtggaagaggaacagaaagtggaagagaaagtggaagaggaacagaaagtggaagagaaagtggaagaggaacagaaagtggaagaggaatag

SEQ ID NO: 60415 - DNA, 1450 bp, Heterodera glycines
atgaggtggacagcgaagtggaaggccgagtgttggccatcaattttggccgcaaggaataccgcgagttggagcaggtggccaaaccgggcgggggcatggcatttggaattgaagggcggcatggcaatcggagtcttttatccgatcacaaacaattggcttagcttcctgatcagtgattgcacaaataaaataaccacccaatatcaattagttttgctaactgatcttgaagaaatttatttctgtccaattttgaaattaaattttcaaaaaaatggggacttacatcgaaccttagccgaggggtaattaattatcagggttcttctgggttcgtatttacgatttgcgactcggtaaatttctcgagttttcgcttcacgatcccgactcctgtgttcatttcccggggtcatttttcctcaaaattctcgggtaaacgaatttaccgcaatgcccacgtaattttcggggacggagacggtcccaaaaaaatcgggggcctcagagttttggggaaacgcataatttttccatttttatagcttcatttcgagggccaaactggcgaagtgtggcgagtggtgaaaaagcatttgggaaatgaagcgtaaatatattttttggaaatttttttaccattaaaaactaaattttagcctcataaaatacatttacgcttaccgacaagctcaggtaaaaaaacggaaattaaaaaaaattaattgaattaaataagtttaataagtttaattaaagagccgattgacatcggcattcagtgccatcgaagcaaatgacatgcgcaaaatgaaaagtttggtggacgatgagattgtacagtcgcgcgactcaaggggtacggtaatgtaacaaacagacaaatatactgtattattaaaagcaattaaaaaaaaaatttgatttcaattttcaatttaaattcaggcctgacacctttgcatgtcgctgttttaaaggtgaaaaatcattcgaactgctcggcaacgagaattgattgatcattaccaaagtttacagaaaaactcgatgtttcttcgaatcgataccgagactttttaatttaaaaatttgtaaaagaaaaagtgtaaaaaaaaaatttaaaaaaaaaattctcggagtttttttaggaaaactaaaaaaattcaaaaaaaatgcaaaaatctttgtaaaaaatgaaaaaatattttttaaagcccaaaatccacaaaaaatattattgtcaattacatactttttaagatttccctaagcaatcatttatttttaaaatatttgtttgcttttaaaacaaatttcaaaaaatccagttttccaggccttgacaagcctggattttttctggacctgggttttcatgaatgtttgtccagaaaatccaggtccaggttacaaaatgtcgagccttgtcacaattaattaa

SEQ ID NO: 60416 - DNA, 2613 bp, Heterodera glycines
aaaataatatttaaaattttctttcaattttttttttctcgccacagatgcgccttcggacgagcaggtgaagcgatggctgaccattggcgaagtgtcacagcttgaacaaattgtgctcgacggacgtgcccatcttttggccgacaaaacgtcaaccaatttggcatccgccgaatttttgcagggggttcggaaaattcgaggaaattttctttttccaatttcgtaatttttttctaggtatcccaataccaatccaaaattgatgccatccacaagggtaagtgccatgtgaaattcagtgatgtcgccggcattttaacctatttttcaaaaaaatttaaaaattgtatttccaagtaaccccctgggttttcaattttctgacgacccatggctgttcgtggcttcgaattttttttttttatcattttctgccaattttttcacatatcctctcacaaaaacaaaattcctaaggaaatactccaaaattatttcactcgattaccatacgatacccgtgagtaattaattaattacatgtcctcattaccgtatccagctgttgaggagggcgatgttcgccgtgtcaaatcgttgattgaccgcaattcgttggcaaccgcccgggacacacatggtcaggcaaaagaaaatcaagattttatattttatatatttctatccccctaggaatttaaatttttaaaaattctcaaatttcaggggcttaatggctaaattttagactggcatatattttgcgggaattttcaaaaaagcctaattttcaccaaaattcaggcatgacccctctgcacaaggcgctcctttacggtcagacaaatacggtatttgtatagaacaaaaaatgcaaaaaaaaaaaaaaaaaaaaattgaaacggtttttcattattttttgtaggtgcgctttctgttggcgaaatatgcgcactgtgtcaacgaagctgatcatgttataattttggataataatttattaagaaataaactaatataaattaatttttatttttaattaaattcatattaaagttatttacaaagaatttttgtcctgaatttatttaattattttaaaatatatctatttattaattaaaaaattaaacaaaattaatttacgaaaaaacaatatttaattaattaattgattagttgtaatctaattatacatattataaaggaatattcaaattttaggccggtcgtactgcgcttcattacgcagcagctgatgcaaatggggagcatatgattaaagtaaaaaatattttaaatgaaaattgaaaattttaattggaaaaaatatcgaaaacttaaataattaaaaataaattttaattaaattcaaaaaataaatataaaaaataataataattgttaggtgcttcaaaaggccgggggagatgcattcattgaggaccgatatgggcacacgccatttttctaccgaacgcacggcaaaaggctgaacattcgaacactgaaagacaatgcggtgagatcaaaggaatgaaaatgataaaaaggacgggggacgagtgatcggagtgatcaattggagtaacgaacaatcgataattttttgtaggggaggtgagtattttgtaataaatgatcgaactgatcaaagggattaatcaaattggaaaaggtgaacagattgatcaaagggagtaagcgagttcgaatgatcggacaaataagaaggataagaggaattaagcaattgtaaaaagtgatcagagtgacgaaaggaataggcaaattgttgcgagtttgaaaagtgattggactgagaagcaggttaatagggatttagcaaattgttgcgagtttgaaaaggggccggattgatcaggcgctagcaaaatgattaaactgatcagagggatagggttttaaaaaaaaattgatttactcatctggttccaaaaaagaatcaaagctccaaaggtgatcaaccatctgatcgccggccaattgaaccgcactctgttgcaagacttggaggaggacatcaccgattgggtacacacgggcaacatcggcaagctggaggagctggtgctgaacgggtacgccgacctgttgcttggccgaaaccatcaagtgaaccaataattatcataacagatcaattaatcaattaaggcatcaattaatcaattatttgcccatcaaaaaaccaattagtaatcaattggagcgtcaatcaattagcccaaattatcggcatcattaatttataattagtccataaaaagtcaattagtaatcaattggaacattaatcaattagccccaaattacaagcaattaggcatcatttaatttttcaggttgaggatgccgaggccatcagtttcttggaagtgttgccacaataccaggccaaaatacacgccatccacaaggccattgagcagggcaatctcagagcagtcaaactgttgactgaccgcaaaaagttggcattgtgccgtgacggccggggattggtcagttctagagaatactcttcgactgaccctgctgatcagctccccgtaattctgtctgattttttttccagttggcaaa

SEQ ID NO: 60417 - DNA, 1103 bp, Heterodera glycines
atgccaaaagaaccttcgtcccgcgcatttcttttcaaaaaatgggtttccaattacatgaacgatgtttacacaactgattcaaagataatttattgtcaagcatgtcaaatagaggttttaaggaatatgcatttggaaattaatactttaaatttatatttgaaggtaaaatgcaaaaaaatgggccatttggagcaacacaatcaaacagcaaaacatatcaaaaattgtgatcgttttttgtcgtcaaaacaaaagcaaccattgatcagtcaaccgtttgttgttgataaatttgctgctgaattgtgttcaatgctgctttcagcgaatattcctctttttaaagtgaatacatatattcattttttaacaatttaactttatttaaggtcaataatccttcattcaaggcttttttggagaaatattgtggaagatccatcctacaccatgaaaccctcagaagcaattatgtgaaaaattgttttgaaggggtaaaatttgaaattttttgattgaccaatttttttcctttaggttttgtcaaaaagcaaggacgacattggcgaaaatggattcgtttggtgttcggttgatgaaaggacagacagaaatggacgctgtatggctaatttgcttattggacttctgaatgaacgttggaacgcgccgcatctgatttcggtgaagccactgttggacgaaaatggtgacccaaaagttgatcatcaaacggttgctcgttttgtggatgagggtttgggtgtgttagacatattaatgttttgattttatttattttagcggatttgctatctacaggagcaaagaaaaatcggcttctttttatggtgacggacagcgctgaatacatgaagaaggcggctcggaatctgcgtgttttctatcccaacatggtgcattttacttgcctcgctcatggactgcatcgaatcgctgaagagatccgcaatcagtttaaagacgtcgacgaattaatttcttctaccaaaatggtgtttcgcaaagcaccgtcacgtgttgctttctacagaaagaagttacctacagttcctctggttcccaaacccatctag

SEQ ID NO: 60418 - DNA, 1131 bp, Heterodera glycines
aatttaatttttaattaattaattatttttaaataatcattttatttatacatttttattaatagtcatcgcgtattgggcatcagtgaaggcattgaacatgtgggttttaaaaaattcaatgtttattctaaaaaaagaatttgtatttttttgccaaaaaatttttttttaaaaaaaatccaaaagaaattttttttacaaaattttcattttgaaaaatccaatttccgaaaatttttactaaaaattttcatttgaatttaatgggtctgtctttttttgaaaaatattttctttaaaaattctcgtaaatttttttttgttttttcaaaatctttttgaaaatttattccgaaaggaatttttatgaaaattttatttttattttttttgaaaaatcatcgtttctctcttcaaaaatttaaaaaatttctgcaaaggtcggttctcttcgacaagacatggcgctgtacttgctgatctgctggatcatctgctacttttgcatttttaaaggcgtcaaatggacgggaaaagtaaaaaaaaaaaaaaaatttcaaagaaaatttcttgaaatttttaggcccctaaattttgttcctccctcggccaaccttttaaaaaaaattttgatcgatttcccatttccacctctttttcttgtccaaaatccgggaatttttcttaaattttcggcccctaaattttctaagtcctccggaattttcaaaaaaataattaggccccttaatttagtcccccctcgccccttctctacacttctcatattatcctaatgcaacttgttcatttattaggcttaaagaattttgtaaaaaaatttcgcaaattttgtaaggcatcctaaaaattttcaaaaaattgtttaggcccccctaatttcctttcctctcaggttgtctatctgaccgcatcatttctctatttgatgctgttctttttgcttttgcgcggcctttcgttgcctggcgccagcctcggcctcgagtaaggcccaaattttcaaaaaaaaaatttctataaaatctatcctctaagattttatttgaaacccaacttttccaaactgctggagagcaaagtttggattgacggggtcacacaggt

SEQ ID NO: 60419 - DNA, 388 bp, Heterodera glycines
atggaaactgaaggaaaggtaatttatttgattaaagtttaatttataatttagttatattatttaatttaattttaaggtttaataaaatatttattctatatttttatttatttttgttaaatatgaaaatattggccaggtaatttgttgtcgtgccgccgttgcatgggagccaaataagccattagttattgaacaaattgaagtgagtccgccaaaagaaggtgaagtgcgcgtaaaggtaagggacatttgaaaaaaaacacattttaataaaaaaattaaatatttttatttttagattctcttcactggcatatgccatactgatatttttgtaataattttatttatataaatcagttgaaatatgtattttaataaa

SEQ ID NO: 60420 - DNA, 625 bp, Heterodera glycines
atgttcacgaagaatttctttttgtcagtgcttattttgttggtgcttataggtgtgaagaatgtgagtctgttataaataataattatttcattcaacattaattaataccaccttaaacagtgtgccgcatatggaagccgtaaagcgtcggcatttgtgccggaaaagggctttctcgcttttgagctcattaagcacagaagcaacgatgcggcaaccgactcacaaaaagcgccttacacagttagcaatgatccatgcggaattaagctgggcccaacttttagagtaatttataactaattaattgaccatttaccttgataatttaccaattgcggctttatcttctttaaatgattaatatatatttgatttaggttgaacatgggcatgaggtgatggtcttgcacggaccgggtcagtttagtctggccggtttagtctggtcgttttagtctggccgttttaggctggccagtttagtcagagggtcggttttagtctggcaagctgtttttgcccataactcttaaaatgtttttttttgtcaattataaacaaggaaaaacttaaaatatctatgtttagctacaatataaatgaatatcccaattagaaa

SEQ ID NO: 60421 - DNA, 907 bp, Heterodera glycines
atggccatttatggcttatgtgtcgatcgcctgtaccgtcaatggccacaagcggacaatacagtactgtggaggactacggcagcacattgtaccgacgtcaatgtaacactgtttgttgagaacaaatgcgccgaaacaaatcaatttcttatggatctacgtttgcgttataaaccggaagaaatgtatggcagtttcagtaaagttttaaaacttgaattattaaattattctgataaagcgaaaaatacacgccaaagaatcgagtttttttgggaattaattaaatacaccttaaaaatcgaaaaattttgaaatttttgtaagaaattttgaaaaaaaattgttgatataaaaaatgtaattttgtttagcatttaaaaaaaatcgaaattgcatatacaaattttgaaaatcaagttttttgaaattgtctaaaaaagcttatgcatttttttttgatggttaaagccatttttttgcagtttttaaggcatattttactgcatatttgggtattgttcgggttttcagggcattttgaggggttttattttatattttatgcacatatttggcactttttagggcatagaacttaaccctaattatcaccttttccttcatttaggcatgaagtcatgcacgattttgtgttgccagtcaaagcatccgagatgcaagtgaccgttgggagcaaagacataacaaaagggactgttcacgaggtggcacggataaaacgacacgaattctacagactgacttcatcagcaaatgacattactttattagaagtacagttttaaatttttaaaaattaatgaatttaaatgaattttatttgtttagctaaaagatgttttggaatttggcccacaaattaacagaatttgtcttccaa

SEQ ID NO: 60422 - DNA, 759 bp, Heterodera glycines
atgtcggcacacgcggagctgatcgattcgaagatattacgacaggatttggtccatttgtctccggtgtgtccacaaggatttttctgtcagtttagtgccatccataagacgtctcatgtaagctatttatttgttttataaaatattctataaaatacatattctcgaagacttttttagcatttctttaattttcgtatatattacttttgaattttttaattgaaagcttgttttaatagtaaataataacccatgttttttcatcacaaatcaatgattttatacagtaaccaaaagaaatcaaaatattatttataaccaaaaaaagtagaattaaatttatttttgtttgagggagacagcggttcaccattgttacgcgaaattgggggcagtttgtatgcaattggaattgtacggggccatgagtcgaagaaaagtaagtgcggaaattgatttaaattgaaatttttattgacaaatttttaattatccttcaaatccaatataaattctcaaatatggaaagcatatcttaactgtgatattttagatttgttcgcaaaaatcagcccatattgtgattggttgaaagaaaaaagccgtggagaagtccgttgcagctgaatattgaatgttttttgctgtgaatatgaagatgcaagacgaacagtccggaaaaccaacattcatatttttcagcgctaaaatcataaaaaaacttgtgtcgtaaaaattcttatattttatgaa

SEQ ID NO: 60423 - DNA, 774 bp, Heterodera glycines
atggccaaaccaagcagcgattggagaaccattgaaggtttgatcagtaaaaagtacaacaaacggaggtccgtgagaaactgcttttaattgctacaattaaaaatggtgcattaaaaaaaactacgaggagtcatattttgtcaatagcaaacccatatcaaaatattttaatttctgtagagggattgaaccatgggaaagaagtagaaaatcaagaagattcgattggcagtgttactttaaaagaatatattaattattatttttatattttttcctctaactccaatttgcatcactaatttttttctcaaacccccattattaccagtgcttgtttttcccggttcccggttgccctaccgggaccgggacctgagattttcaaaacccgggaaccgggacctcggaggaccgctgcactctagttttaataatgaagccccttttctatatttaaagcgacccaattttttaaattatcattattttaaaatcaacattacaaaaatatttttatttgaaacaaagttttgtttttttaacaattatgtgtttttttcaatttcaaaaattaaagcaaataattttagccagctcgttttaaatttaaaaattaaaaaaaagcaatttatttgtaaatgaaaaaatgaaattagtgaatttatatgactaggtgatcactgatcgaagcttcgcaaatgtttttcatccaaattggttcggcatctgattgcacttttttattatgttgatggcgtaacaaataaa

SEQ ID NO: 60424 - DNA, 683 bp, Heterodera glycines
  unsure (1)..(683): unsure at all n locations
atggatacaagtatgtaaacaaattcgacatntaaatattataaaaatagtgagaaaaataagataatntaaaaataatntaatatatgaattatttgatttttttaattttaaattcttgattccattgaaaatctaattactaaaataacctataaattttcaaaaatatattgtttttatagatatttttttataaacagcggctgaaataatcggagttacacgagaatgatgaagaaaagattcctttaaaaactcaaatatgaataaattttaaaaaaatagtaaaggaatttgcaaaaatttttgcatcaaatttttgcttattaagtttaaaaaagatagaaaaacctaaatatgtaaataaaaattaaattcaaatttaattatattgggaatttatgaacataagttcatcagagggtgaattgtggctttttctataggtacgaaaatatataaatattaaattaatgataaaattaaattgataatgtataaacaaaaaatcgataataaattaaaaataaaaagtcaaaatactaaacttcagataaggaacagctaagagttttttcggtgaaaattgacataggagatgaagagttgtcattggcaaaaccatcaacaattttcagaatagccaatttgaattttcaggaagaaaataaataaataaa

SEQ ID NO: 60425 - DNA, 737 bp, Heterodera glycines
atttattcagtgtccgtttggggtactcaaacatttatggggagcaaaaatccaacgcagaattaaagtacaggctatagggaagctattcccgaaggattcggtctccccataaatctgggcgcatcggttcggggggactgccccgaaaacaaaaaaaatcgattttttcaagtgtccgtttggggtactcaaacaattatggggagcaaaaatccaacgcagaattaaagtacaggctatagggaagctattccggaaggattcggtctccccataaatctgggcgcatcggttcggggggactgccccgaaaacaaaaaaatcgattttttcaagtgtccgtttggggtactcaaacaattatggggagcaaaaatccaacgcagaattaaagtacaggctatagggaagctattccggaaggattcggtctccccataaatctgggcgcatcggttcagggggactgccccgaaaacccaaaaaaaaattttttggataaaaattatttaaatgaactgactagataatatttaaaataggttatttctcttcctttcagtattcctgcaaagtttggtgcgcttctgatcagtttctgaaaaaaaaagttaagcctaaactttttggcctgtttaaaaaggaattaaaaatttttaaaaattttattcatctccctttttgatagaaaaagcatcagagtgcctaaactaacatgtaaataaaatttggtg

SEQ ID NO: 60426 - DNA, 308 bp, Heterodera glycines
atgtcggcacacgcggcaatgagcggtgccatcgcattcagtggagcaacagtaagttaatggcaaaaaaggagagggagggagtcaaaaatggggggggaaggcacaccacgaggccgcgaagcggccgagtgagtaccttcggtgcaggaaaattattaaggaagagagttcattatttatttgttttttgcataattaatttataaatatttttttcagaaagggttctgaaacgcaccaaattttatttacatgttagtttaggcactctgatgctttttctatcaaattgggagatgaataaa

SEQ ID NO: 60427 - DNA, 365 bp, Heterodera glycines
atgttgggcagcgtccacaagtcagctcgaacgacctgtgcccgtcagcggacgggggcatttggtggtgccaacgctagcccaacaggacagcaggtaggtggtgaataggaatcacttgggtaatgatccagcagcaggttcacctacagctaccttgttacgacttttgcccggttcaagccactgcgattaaatcggttccagtctgcataccgaccgaagccggaacactaaccgtccccgaatttctcgaaatggctcagtcccgggcagcgacgggcggtgtgtacaaagggcagggacgtattcagagcgagttgatgactcgcccctacaaggaattcctcgttcacggacaataa

SEQ ID NO: 60428 - DNA, 559 bp, Heterodera glycines
aggagtggagcctgcggcttaatttgactcaacacggggaaactcacccggcccggacaccgtaaggattgacagattgatagctttttcatgattcggtggatggtggtgcatggccgttcttagttcgtggagcgatttgtctggtttattccgataacgagcgagactctagcctactaaatagttggctcattgcttctgtgggcacaacttcttagagggattttcggtgttcagccgcacgaaattgagcaataacaggtctgtgatgcccttagatgtccggggctgcacgcgcgctacactggcaaaatcagcgtgcttgtccttccccgaaaggggttggtaaaccggtgaaaatttgccgtgattgggatcggacattgcaattattgtccgtgaacgaggaattccttgtaggggcgagtcatcaactcgctctgaatacgtccctgccctttgtacacaccgcccgtcgctgcccgggactgagccatttcgagaaattcggggacggttagtgttccggcttcggtcggtatgcagactggaaccg

SEQ ID NO: 60429 - DNA, 4216 bp, Heterodera glycines
cccgtttccaacgggtgccattctctttgctcctcaaattctgtccagacgcaggcccaaacggagtttcaacgcattcaagcagcttctctgcgatcgacgcacgaccaaatggtacgaatgaattggaaatcgccggggaagtccttcttttcagagggcgtgtattagcattgatttgttagtcgcgtgccaaagggaagtgaactttttgcgaatgatcgacaggtgagggacaaattggacggggggggggggaaatcgcagggaaaaaacgaacaaatcgaacggacggaggaaacttttcactaaggaaagcgccggtgctttacgaaaaagtcgttgtggagaatgccatccgacgatatgagatgtgttggttgccggcacaagtgagacggagcaaatcacttgctaattaaggggagaggccattgattaatgggattttattgaattgcgagggtttccccacaaattatggaaaagccaaagagaaaaaatgacaaaaaagtgaaaataataaggcacaaatccaattcaggctgcaaagccaaatctgcacaacattccgccgttggatgtgagaatttgaagagtttgtgaaaatgaatgactttcccttaaggtccattggatttggcacacccacgtccgttgcttttcctaatgattcaaatttgctgcgctttcagatgctttccccaacgcattaccgcgaagattgtttggccatctgtgggacagtggtcgaccacaaattgctaaatgcggacgaaatccagcagagatatgagcaggtgactggcaatttgtgccaatttccgctgccattttctcttcgtccccttggctttctcctctctcaattcgttggtgtctttggcttcggcatttgcccccccccccgccttcgatttgttcgtctgctcatcccctctttcctgctcagtcggtgtcctcgtggagcgaattctgtccggaagaaccgtacgactttctgcaaagtaacgaccgcgtccgcgagcagtaccaacaaaaaagcaaatacaacttggcggaagcggtgcaacgacagcgcaacttcaactaccaagtgggtggtgcggtgtttgttggtcgccgtccaaactccgtcccttggcacaggtgtctttgccccatttcaccgccccgcgctttctgaccgatgccatcgatcgctacatcaaattcctgcagctgaagcagacatacgccgaccattttctgacgccatgttacgacttcgacttggtgtggcacactcaccaagtgcacccgttggactaccacagagactggtcggactttgcttgttttgccaacatcgctaaatccaaatttagcgtggccattttcggggcggtgcttaaacacgacggtgagtcactcggaagtcaccaaagtacaattactgtgaaaagattccgtcaacgaccgatccaaaggcagcaaattgttgaaaggtaaaagaacgagcgaaggaatgatgagagaagaaaagcatttaaaggcgaaacgatgacgaaaaaggcatggaacacgcacttcaaagagagcttttggagacgcggatgcatgtacaggtggggacggagagaagaagcgaatccaatgcaaatgagagagagagagagacccatttgctaatgggactcggctaattgaatttgatccacagaggacacgtggcaccggcttttttggggtttgagtcccaagacaatgcggtaaaaacaaagggttaaccttttgttgaatgacacccattaagacgattacatatgggcacattcacattccttcgatagcactgaaagagattccggtgcagagagagcaacttcggatgaagctcaattacggaggtgagcaaaaaggaatttgtgaagagtgattattaattggggggggggggtaattaattaatgggcgcaccgaagggaaactgaaaaagaaatggcaccctcaggcaagaagatcatcactttcaacgccgacttgtgcgacaagccggtcagagatgcgtttgcggttgcgttagcttttccttggcaggtcactcgttcctccttttccctcgtttggcaaccgaatgccaccgccaattcggcgtcgcccaccgacgcccatccgccccagcagcagaacgggtgctcgtccggctcttcctccgccacttcctccggctcttccgcttcttccgtccccctcacttccatcgtcaaatttcccttcgagcgcaaaacaccggtgccttttgctcttcaatttgctctatttcgaagcatttcagcacgaccttctcatctcgttggacctgtggaatcgaactttgatacacaagcgtgacgtcgtccgacttttggtttgatcacccaaaagcccaaaacattggttggtctttcttttcatagggccgtcttccgctcgaacggttattgccctcggaaaatacgaagccccagcagcgagtggtccaagcttatttagaaagtgttaacagtgccatcgccacagaaggcgaatttcgagctcgggtgaacgtgactgccaggcaagtcgaacgtcgcctggggcatttaattccctcgccaattccccgagacaattcgcccgcccgctcaaattgtcacagggaaaaacggcacttagtacttagtttatatataataagcgaaagcctctccctcccttaagcgtctcgctgaatcgggagcttgagttgttggccggtgattacgtcgagcagagtttgcagcccgactcgcgactttgggccctttgccaaagcgcggcacttaacagaagccaattgcatccgggcgtccatgtttttacggccattcacacgtcaattgggggagggttgggaacggacaaaacgaaacgcaattggctatttcagactcgtggatgtgagagacggcaccaaatatttcgcacaaattgtgcactcggcgccactgcttctgtccatgatcctcatttttggcacggaacaaagtcagctgtttgtcactaggcttaaactggcgatcgatttaggactgctgagcatggctcatctgatcggagccgactctttgccctccaaggaacagttggactccaatttggtttggtctcccaacactcggcgaagggcacttctcacggcctttcctattagcaatttcttcctcatttgtcttcgcccgatgagcgagtgcttctggtgctgaaccgggagggcgacttcggcatccttaaaggacggtggcacggcttcgtgcgacgacagacgggcgacaaacgcagaaaagtcggggaattgcggtgggggcgaacgaaatccgaaacttaggggaaaagcggaagtgcgggcgtactcaacgtggagctgttcaacctgctcaagtcggccaaggagagaaccttttgactgtttccccattcagaaacaccgtgcagaaattccaagtcccaaattcggacggtaagcattggaatttcggaatttgctaattgcccttttaaggctccactctctttacaatcgggggtttcgtttgcttgtgaagcgtcccaaactgctcaattttcagatgcccaagcgcgccttaacggacgccgaatggtttttctgtttctttgaccatcaaatttttaattctctaaagcattgtcgcaccactcaaacttcggaatatttgagttgcattttcggcatcggcactctgttcattctttgcaacccggacaaagttcgagctcggtctgagtcaacgacacctgtcagccatcaagtaaaagggctgaatcagtaaaacgaaacccaggcctaaattaagtgtcagaaatggccgatgacattggcgtgtggttacggtaatttttatggactttttgaattggcgttcccgaaggcaaagctacgccgaggaacgaatccgcgttttaagagtcaccaaaccgaacgaaggaatcattgacccaaaaccttaatacctttgaggccgtcccgtgccgtcaaatcgaattttggctgcgcaacgctaccaacaaaacttcacttcagccgaagttgcccctatgcttttgatgatgaatgccatgactgacggcactttctccggctgtgacggggccgcaagttgcggtagtgtcacagatattgccaattgttgacatgaaccccttgaacttcttgaac

SEQ ID NO: 60430 - DNA, 1642 bp, Heterodera glycines
tttcaattaaaaagttgaataggtcaagaatcttacaattagagcattagttgtttatcattgttttttttagggaatggcacttaatttggaaactgacaacgttggtgtggtcgtctttggaaatgataaagtgatcaaggaaggtgacgtggtaaagcgaacaggttcaattgtcgatgtcggcgttggcgaggctttgcttggacgtgtcgttgacgcgttgggcaatcccatcgacggaaaaggtccaatcaatgtcagcaaacgctctcgtgttgaagtcaaagcgccgggaatcattccgcgtgttggtgtgcgagagccaatgttgacgggggtaaaggcggtagactcattagtgcccattggccgtggacagcgtgaattgatcatcggagaccgtcagactgggttagtggtatccacacattcactcggttttacgtgaaattaaggaaaactgccattgccatcgacaccataatcaatcaaaagcgtttcaactcaagcacagaagaaaagaagaaattgtactgcatttacgttgccattggccagaagcgatcgacggtggcacaaattgtgaaacgactcactgacacggacgcaatgaagttgcttttcatcgtaattaaatatatgtattaaatgaaaggtacacaatcatcgtttccgccactgcttcggatgctgcgccgctgcagtttttggccccctattctggcgccgccatgggcgagttttttcgcgataacggcaaacacgcgttgattatctacgacgatctctccaaacaagcggtcgcttaccgtcaaatgtctctgctgttgcgccgtccacccggtcgtgaagcttacccaggtattattctgttggtacgttgatggtatcgatctgtataaaggtgatgtcttctacctccactcgcgtctgctcgaacgtgcggccaaaatgaatgagactcatggcggcggctcaatgaccgctctgccgatcattgagacacaggcaggggatgtgtccgcctacattcctacaaacgttatctccatcaccgatggccaaatcttccttgaaaccgagttgttctacaagggagttcgtcctgcgattaacgttgggctttccgtgtcacgtgtgggttccgcagcacagacaaagtcgatgaagcaggttatttctcgactatttttttatttatagtacaaatgaatgattaggtcgccggttcgatgaagctcgagcttgctcaataccgcgaagtggcagcctttgcccagttcggatccgacttggatgcctccacgcagcagttgttgaaccgaggagttcgtcttactgagctgctcaagcagggtcagtacgtgccgatggcgattgaggagcaagtggcggttatctacgccggcgtgaagggacatttggacaaaatcgacccgtctcaaatcacgcgcttcgagcgtgaattccttgcgcacattcgagcgcatgagcaggaattgctgaaggtattctaataaagtattcccagggaaatactctctctctttaggtcatccgagaagaaggccaactcacaaccgcgactgacgaaaaactcaagaatttggtgacttccttcttgggaggtttcaaggct

SEQ ID NO: 60431 - DNA, 478 bp, Heterodera glycines
atgctagagactatgaatattattaggtaaaattttaaaaatttgcgcccggaaggtgtgccgtgaatttttttggcatttttatgcatttgtaacagattttgcctaaaaatgccatttttggacatctttgtgcccaaatttttgcatcaattaacagaattgataatcttcggaagcagtgccgacgacaggcgccgccggagacataatttcaaatttagtgcttaaatgggttcataaaaaatatttatcctcatttaaaaattttcgtctccaatcccttcaaaaagccacaaaatgcggataaaatatcctcagaattcacagctttgctttaagcggtgttcgtatcacaacttaaatttcacagcctcccctccctgaacattaagctttcccacacaagcaaaagcagcttttcccaacatctgttcacacacatctctgtttactcatattattttttctaaataaa

SEQ ID NO: 60432 - DNA, 473 bp, Heterodera glycines
atgcgaaaaactttttgtgggcaaataattgaaggaaaaggtattgaaaatgcgacagaaaaagtaggaaaaatgtcaatagaattggccaaagaattggagaatgataaaactcttaaagaaaatatacaaaatgctttgaaaaataaaaaagataaatttatttttaaattttcaaatgcaattgaattgaccgatcaattaacaaataattatactcaagaatatttggaaaaactcaaaacaactttttatttagagcttgccggctttttaaagtcatccaaaggtaattatttttaaataataatttaatttataacagaattaaatacttcaatcagcgctctcaattgtcataattaaaaaattgtatgatttaaatttcagcttcaatagaaaatttgtgccaaaagcaacaaattgcgtttgctccacgacggcatcgacgtgcagatttcgccgacaaataa

SEQ ID NO: 60433 - DNA, 603 bp, Heterodera glycines
atgctcgccctaataataaataatacaccatattttctttacagctcggatttttggatcgaaatcagaaattcgatgaaaactttaagaaatttggaattttacttgaaagacaagaagccacgttttttacttctttttttgggtggaggaggggaaatgcaacaaattgatgaaaagcatcagtaagaacaatttgtattattattttttgttcataagtctttgcaatatgtttaataaattaatttggaaattaaatggtaattttttagcaatttgaaaattagccaatcattcaaatcttttcaaattcagatgtttttgcttgcaatagtaatgcttttaagtattatttgttcaaatggaatttacgaagttagacagaatgaaggcaatgatttatttggtgagttgcggcaaaatgctatcattggcggaatggaacaatttggaaacgaattcaaacacaacggaatatgcaaaggcataatgtcacgctcgtccttactcttctgattcaaaaacttgtttaggtttaaaaccaaattttgtctgttaattcacttttctcgtggttggctgaacattttctggaataaa

SEQ ID NO: 60434 - DNA, 878 bp, Heterodera glycines
atgtacgattgggtgtccggaaagcgcattctgaagaactcttattacatcgacaaggaaaaggcgttggagcgatttccgatgctcaaaaaggaatcgttaaagggagcgcttatttattacgacggttcgctttcagtagaacattcatttctcgagttttttgtttcattggtaccaattaatcccctccaatttcaccccattttaggccaacacaatgacgcgcgcatgaacttggccatagtgttgtccgcaatacgaaacggtgccaaatgctgcaatcacgtggcggtggaacatttgctgaaggacgagaacggcaaattgtgcggtgctcaagtcaaaaacatggttctttcaattagccactttttcaaatctcccccccccccctccaacggtcagttgactggcgaattgtttcccatccgtgccaaatgcattgtgaatgccaccggtccattcaccgactccatccgtatgatggccgatccggacacggagccaatctgtcgtccgtccgccggcgtgcacattgtgttgcccggctattacagtcccgccaacacgggccttttggacccgtccaccaccgacggacgagtgattttctttctgtgcgtttttgtgttggaatgtcctcataaactgtcgtacatttttagtccatggcagagaatgacggtggccggcacgacggactcgccgtgcgacgtttcgttttctccgaagccgcgcaacagtgacattgagttcattctgggcgaaatccgtggctatttgaacaaagatatttcgggttggcagtgccaaaaaagccaaatttaaagtgaaaattcaatttcagtccgtcgcggagatgtgatgagtgcatg

SEQ ID NO: 60435 - DNA, 507 bp, Heterodera glycines
tgaaaaaacaacaaattcctgatgacaattcacaaaccatgcactcatcacatctccgcgacggactgaaattgaattttcactttaaatttggcttttttggcactgccaacccgaaatatctttgttcaaatagccacggatttcgcccagaatgaactcaatgtcactgttgcgcggcttcggagaaaacgaaacgtcgcacggcgagtccgtcgtgccggccaccgtcattctctgccatggactaaaaatgtacgacagtttatgaggacattccaacacaaaaacgcacagaaagaaaatcactcgtccgtcggtggtggacgggtccaaaaggcccgtgttggcgggactgtaatagccgggcaacacaatgtgcacgccggcggacggacgacagattggctccgtgtccggatcggccatcatacggatggagtcggtgaatggaccggtggcattcacaatgcatttggcacggatgggaaacaattcgccagtcaa

SEQ ID NO: 60436 - DNA, 355 bp, Heterodera glycines
atgtctataactcaaaataaagttcatattcatgatcagcgacccaaattacgtaagaaaatatgttttttttaaattttagagcaaaaaaatgtgtccatgaaatttccaaaggggtatccctttgaattttggctccaaaatcagttttatttttataactttttttaaaaaagcgataaaaatatgaaataaattcctacttgtagagaaaaaaattgcggattttatcaatatttttttataccttagcactttgtttggagtgagttattaatttttatgtgaaaaattgaaatcttcaagtttttcaggaataacttttattgtttgcaagatagaaatcccaaataaa

SEQ ID NO: 60437 - DNA, 1916 bp, Heterodera glycines
atgccacaatttattgaagcgcggaacttgcataggccacacacttttgaaagtcagcaaaatgagaagaattgggattatccattaaacatatttatttttagaaatatttttattttaaatttataaaattcctttgtttaaatagttgatgcaactgcggctggctcgggcaatttggaaattgtgatcaatggcgggcgagtcgcgtgccgcgtgcgtgagacaagcccaaggtgccgaaaaacccacaactaattagaatctattattttataatcattttttcaattaaacattttgttttaaggaattttttggccgaatttacgcccgtccacgagaccaaacacacagtggaaatgcggtgatttgattatttcttgccaacttaaaattgaatttcgcagtttcaacggcgaacacgtgcgcgactcgccctggcacatccaattttcgggggcagtcggtcctgcaagttcgcctgcactgtcatcggaccacgaagagcatgtggcacgcaatcttgcagcgttacgccggcatgaacagcgtgcagctgggggcgcgctgaacgggagagacggagtcgcggaggaatttgtcaacggaaatggcgaagacatgtgaggggaatattaattattggtcaatttagatttttaaattaattatttttaattttattgcttttctttttatttgtcattatcatagagtgcgggttttaagctttcaaaactttgaagcattgttttgatgggagaaacacaaaagcacatttttcaaacctgtttcgcgttttttttttaattttgattattaaatagcagtttaatcaattaccaatattataattttttgattttatcatattttgggaccttggcaattaaaatattttatttattccgcagttttcatttatttttcttttactggaaatttgagaaaaatggccatatcaaagttttaataaatatttgttcaaataaattttaattattttatagtttgtgcaaataaaatcttttcattaattactcgggcttccttttttaggcacaaaaaatcgcgaaataggcacctaaaaaggcataaaaaaatcgcaaaataggcattaaataggcacaaaaacaggcaaaaaattttttttattaacgcttttttggtattaagacaagtaaaattttaaatatttcaattgtaaatgaaattattaaataaggacaaaattttaaaccaaaaattctttttaagaaaaaaatatattaaattttgggatcattttttttgaaaattttttcaattcttaagggtgtattttctcaaatttttttcggtcatttcttaggggtgtgtttttcgtttttattgcatttttcttatggattttttcaaaaaccccaaaataggcactttatgcacaataaacccgatataggcaaaaataggcattataaaagtcatcgtagacaccccaaaccaagcggaaaacgcgtttttcttgcttatctacacgtattaaatgtgcaaaaattttaggcatttgcctaaaaaaggaagccctattaattaccaatattttttaataattgaaaactgttaattgctttattattattaattgttttcattttttagcatcactgagttggtcggccctggccttaaccgtgcggctgtcaatgaattggcccatttttccatccattcaaatcagcgtttgcggtgttaattttgttttattttacatttaatttttttgtttttcggtcctcaaatgttgtcgttcgaattgtcgaatgtgtctctggacgtcctgtggaagcacaaattgccgagcgcgggcccggcaccattcattgcgagtacactttgccaagggtgagagccaattgaattttagcaataaa

SEQ ID NO: 60438 - DNA, 67 bp, Heterodera glycines
atggcacgcattgtgccgcaggaagcggacgggacagtgcgcgttgaatggaagccaattgaagcgg

SEQ ID NO: 60439 - DNA, 941 bp, Heterodera glycines
  unsure (1)..(941): unsure at all n locations
cgccgttgtgacaatgtgtgtgatttgggcatcaactcattgnaaggcctatttcacttcactccattactttggccgtgccaaacgcttcttgggcatgagcgaagaattgcgcgaaattgtcacactgttaggagttttgaggagaaaaaagcatggaaaagttagggcaattttttgaaaatttcaaaaatttttaacccctaaaattttcactcagatcacctgggatgatgtgtgcaattttctggaaaatgagctctacaatcgtccatttgaaccacatgaattactgatgaaggtaaggcagagaaaaaatattaaaaatggaattttttttctggtgcaatacaattttaaatttaatttaattgaataaaaattattttaatttattatcgttaattaaaaattttttgtctacagtaacgcaaatttttataaatttattttaagttagaaataatattttaaaatttataaattaaagataatattttaaaatttattaaatgaaaataattttaattttatgatagctgattaaaaaatattttattcattagatcaattaatgtgtaaaaacaatattaaaaaaacttacaaaaattttatatttaattatttatttaatttttacttaaattttatttatttatattttttacctaataattaaaaaatatatttatttacctaataataaaaatttttaataagtttttttttgttaaagttacgatttattgacgagaacacactgagttctgcactgtccaccatgcgccacaacagtttccaatctgattttttgcgtgatgccgaatacttgcgcaggtaaaataattcattttaaaataaattaatatttaaattaattttgcccaatttattttaaaattaggcttcgtgcactccgtccagaccaacctgcctacctc

SEQ ID NO: 60440 - DNA, 453 bp, Heterodera glycines
atggtgtgtatacgacctaatctttttttcctcatcaaaaggttggtgttttgtctttggtgaatattcgattttattaaacaataactcgtccaacattttttattacgaaatttcggtcaaaaatatgaaaaagtaaatgcttttttgaatgttcaatgatcagaaatattaaaaaattattgttaattattattaattgtcattctttttttaattaatttttcgtttttcagttacattttcttcggattcaccgtcaaacggctgatgtatgaaagcatttctgcgtatgatagtgatggcttggctcggaataacggagaaattaaaaaaaatgccaaacattcctacggtgttggcgatactgttggaattggcgtcaattctgccactcggcagatctttttcaccaaaaatggaattcgtttgggttggcaaataaataaataa

SEQ ID NO: 60441 - DNA, 589 bp, Heterodera glycines
atgaattcccagcagcgccaggcagaacgtgcccaacttcgcgcaagattgaacttgcttgtcgatgaggtagatattgtggtgcaagggctcatcaacaattatcaggccgatgggttgatcaatggggtaagttttctttattttttatgctgtttttgcttttttttgaattttaatcttgattgaacaggccccgcatgagggacagctgatgggcatggaccatggacaaggtctacagcatgagcagcagcagcagcagcagccatgggaactggatccaccaatgcctgcacagcaattggaaattgggccacagctcccggatgcgtgggaactggttccctaccagccgacaccacaatgggaccaagttgcacatgtggaacaacaaccgcagcagcagcaacactaccaccaccagcaacaacaacaacaacagcagcaaggcgcgtgggatgaggaatgggaggggccgctttcgccaaatgcgcttgctcaaatccaggacgaagcggacgggctgcgtcaggatttgagtaaggattttgggtcggggtccctccataaaacaaaaattaagtga

SEQ ID NO: 60442 - DNA, 1501 bp, Heterodera glycines
ttttgaaaagcaaaaaaaaaaagggtcatcggcggcctatcccccttcgcagaaatttttaccgaccccccccccccccttttttaatgtatgatgaaaaagaataaaatttttaggtgaaaaaagaataaaaattatttattacttttatctatttaaaaattgtgccaagaatgatgatgacactgatggcactttgtttcaggtgcttggcacggttgtgatccacgaggtgtacccggacggggcggccgcaatcgacgcgcgtctgaagcccggcgaccaagtgttggaggtgggcgccaaaagtgtttaaattttgaaatttaagctaaaaatattttgtaagtttaagtattttaaaaattgaaaaaagttgtgaattttttgtacaggtcaatggcacttcacttcgcggcacggcccacgaacaggccatttcactgctgcgccgaacgcccgccaaagtgcgactgctcatttacagaggcaaggcaaattgaaaaattaatttccatttaaataattaattatttcgatttatttttcttttaatttttttttgaaactttaatttaaataaagcaaacattttttaaaataaagaattcctttttgtgagataatacagcttttcagacgtcaatctgcagatgagcatgttggacccggcccaaatttacaacattttggccatcgaattgaccaaaaaaagtggcaaaggcctcggcgtttccatcgtcgggcgcaaaaatgagccgggcgtttacatttccgaaattgtgaagggcggcgtggcggacaacgacggacgactgatgcagggcgatcaggtgaaaaaagggaggctgatcgttgatcagagagggaggaaatgatcagaaaggatgaaggggagaagaagctgatcggagttggggagggagagaagaaaaaagcgactgatcaaggggacgctaatcagagaggagaactgtggaacgggagtagggtgattgggtcacagggacgaagctgatcaggcacagcgggagaggttagaactgatcaggagggaggaaaagaaatatatatttggaagatcaagactgatcgcaaaagacgaactggcagcggaagaaggcgggaggattatgaaaaattcggagggcggaggggcaggaaattatgaaaaattcgcagggcgggaggagggaaatctacggaaaattccaaatataattgctaaattaggatcattaggaaaataattttgggatttgtttaaatggagtttttcagattttggaagtgaatggccaaaacgtggccaactgtttgcaggaggacgtggccacccttttgaaggtgtcaaacatcccattcaaattgaaaagtttgtttgtttttctgttagacttgcactggtcgcgtggtgctcaaagttggccgttggaaattgaacgaaactgcgcaaaaggttcggtccgcgcagccgccgaatggcacaaatgccgtcgca

SEQ ID NO: 60443 - DNA, 1131 bp, Heterodera glycines
atgttcgccttctccaccttctcctccctatcctggccattttcacctccaattttgctgctcttctctttgttgaccctccaaaattcgctgtccgtcgatgctttgttcggttggggcgacaagtcggaatccgcggaacagtcggacacctctctttcgataaacttggcattgaaccaccagcacagcagtgtctcacaatcggatgaggacgaaacgcaagaaaatgctgaacaacccgctgtacaacaacagcaacagcagcagcaatacggtagtggcggatacggcagctactccagcggtggttacggtagcgggagttggtcaaatagcgctgggacaggaacggcgtccgcctcaagctcggcacaacaacagcaatctgggtcccagccatcgaaggaaagtgacgatgacagtgaggagacaataccgtatggcgacgatatgatcactggtggcgatgctggtgctgatcaatcagttgatggtcaacagacggtgatcagttcgggttccgagatcatctactcttccaacatgaacacgagcgacgtcacaaattacgcatcggggtcctatgataacagttcaaataattatgactccagcagcaatggcacgggtggaaacaatgcaattccacagcaaccgttgatcagccccaactccggctccatttcttcatcaaagtcaaattacaattactcatccgtgtcatcatcggttcaaattgactattcctcgtcccaaaatgggggcggcggcacaaattatttggaggagcaacacaattcggactattcagcttcctccaattctaaccaaaatggagacaatgctgctgatcagcaaaatcaacaacaacagagccaagagtacactaattacctcaattccattcgcacggcgttgaaccaaacgaatgggcaaacgcagcagcgccaagcacgggctcgtctcgcggcatgtgtgcacgcgatcagcgtactgttgtggcaggggtacgatcaattgttgcaaaacaacggcacgagctgcagaaagaacggcgacactggaaatagtggtggtgaacaggcaaacgatggttcttcatcatgcacggtgaaatcaagaaattga

SEQ ID NO: 60444 - DNA, 1033 bp, Heterodera glycines
atgaaaattttatttgtgctctttttgtattttgccattttgacgatttttttccaccgcttttccgctgctaacgagacaaatgagcatatttcaacagcagttgatgctgatgcagaaattgagaagctgtcaaaaaagcacgtcacttttgccgatccgatcgaaactgaaatcaaaggacgtgtgacattggcggaactgatcaaaaaggaacgggacggggaaagcacagcactgatcagccaagagggaccatcagcagcagatgatgctgatcaactgatcaaaaaggatgaacggataagagagaaacaatggctaattaagggaagtgaaatggaaaatgcagcagaaaaaagggacgaaaaagcaattgctgaacaggtcgagaagactcataatagcctatcattaacacaggaggaatcagccgacctgctcaaaacagaacgtaagccaatgatcaatggaagtttagcagaaaatcccaaccccaataatggcacaatatttgctgatgtgattgaggaaatggaagcgaaaagggcacttaagcgcaacgcattagtaaaactgatcgaaatggagcaaaagggggtacatcagacggatccggcaccaatgccaaaagcggaggatggcattcgtgaatcatcaacaacagatgtagctgatcggattgtagaggagcagaagaaagcggcagatggaccgaaggcaccgatcgcaaagcaaacgctggccgaactgttagaaatggaaagaagcagtcaagaagaggcaatttgatcaattgttgatttgaagtgatttgatcatctttttcttctattgtaattcttgttgaaataatcccgaaagttctttttctcgaccatgccccatcaaaaaaggatattattgatttatactaaaactaaaaatttatttttttgtaaaaaaatttcgcaaaacttctacttgaattttaaaaatgcgctgcgaaaaattgtccgaaaggcaaaaaaaggtcgcaaatttctgactttca

SEQ ID NO: 60445 - DNA, 2175 bp, Heterodera glycines
atggcttcttcggctgatgcttttccgaacggcgccgttgccattgaatgtgagctgcaacttttggcaaaacaaattgacgaaacgctgactacggcacagcaaaaggaggcgacgacggcaaaagtgcgttttgtgagcagagacattttttactggatttaattttcatatttagcagaaaattaaaatatttttcatattctcagttgaatgggtcaggtaggaccaggccgggagttcctgcctttatgaggtcccagcaaatacataagcgattttttgaagtgacatttaattaccactaatttgacagtttaaaaaaataattaacatgtttttctattttaaaaatagactaagatccacaaattttggtgcaaaatctgttaaaaactattcaaaatcccaaattcttctccgattgcgactgtcagctccgcctgacctcttccttccgctgattttttcttaaatgactcaaaatctgcaaaattttattagaatttaatattccctttattatttcttagaagattttcctgaataaaacagatttaattaaagtaatactttttgatccctctaaaattttcaaatttgggtcgaatgttcggtaatacgccgatttcttgttccattttttaaaaaaaatctttaaattttttgaaaaagtaaaattcaaaaagtttcccccaatttccttcatttgtcagctgattgctgcttctccctcgtcttcctcttcttctgatggcttctcccattgttccgctgtttccgtgccaaactttgcgcaaattgtgcagtccattggcaacacaatgaaagtgcaaaacgaactttgcttcaaattgttacaaattggaagagatttggtgaagagcagcgaggaattggcacaacgaaatgacaaattggagaaggaaaacggcaaaatgaaggccatgaaacagtcgttggacgaatcacaggcagcatttcaaaaaaaaaaaaatcattttggaaaattaggattgatcctgggcagacaccgatcttcgcttcccatgttttcgtcgaaaattcaaaaaagtccaattgtgtcccggtgggaccggcactaaaacagaaagtggcaaaaatggggtctgattttgagtctcttgaatcactgatttatcattttataattactcgccccgaccacaggaaaagcataaaaatggaacttcgtcttccttttctgtgctcctcaatttcgtctaataaacaaaaagggcttaaattttttaccttaaaatgattggcgtaaataaaacatcacctaatttaaccaaaggaaacgttcattcattttcaggacaatgttcttctgttgcggcaaaagtgccaaaaattggagcaaaatttggcggaatgtaaagaatttttgaaccgaatggcaatggaagacgatttccgaaccaacaccaacaggacaataattgttgtggaagataaggaaaatgtgccagaagttgtgcaaaaaggtggggaggggaagagaaaatcgaattattaaataaaaataaatattttaaaaagtgccaattattagtgtcggtcaaaatcttttctcctaatttggttctttttaatcggaatatttttaaaaatgggcaaatttttcgaaaattttaagcaatttcttaacaaaatagcattaaaatttccaaaaaaaaattttccggcggcgtctaacggcaccccatagacccccagtttacgatattttttgaaaatttgaacccaattgaccaaaattagtcattttttgccgaaaacggctacaaattcctgctgcttttttgtctccgatgctgaggattttaaaaaacacggataaaaattatcttttttttatttcactaaattttgtccgttccataaatctatctaatttttggccttggatttgtggttggcttcatcccctgctattttcttttcgttctgtggcaattttcatcataaaaatcgctgtcattttaccaattttcagctgctgaccaaacggacggaaacaatgcgtcggacattatttttgtggacgacgttatccgaaacaaatgggtggccaaaattggacaaaaaagtgtcaaaaatgagccgactgaagtggtggagttggacgaccagccgagcgaggcggaa

SEQ ID NO: 60446 - DNA, 491 bp, Heterodera glycines
atgagacttgactccgacgaatcggacatcgcttggtttttgggaagtgtcattcatttgttggctttccaaacttatccgcttgaggaatggcacagtcggaacaaaacattggctgaccaatgccaattggacggcactttcaaaatgccgcaggttttatttaatattttatttaatgtttaattttattaattttgaatatttattcagacttccaatcattttgtatgtttctgctccaaaacagcgtcaacaaaatgctattttctgctgaaaagctccaaattcgtactgattttcctcatggtttcgagaaagagtacgccattcttggccaaataatgatggtattattattaattaattaattaattcaaaaactaaaattctttcgttttaattcatttttagaatgctctccacgccgattcggaaaagagaactttttgacggaaatggacaattgctgaaattggctgccaattaaa

SEQ ID NO: 60447 - DNA, 285 bp, Heterodera glycines
atggcagaagagaggcgggaaaaagtggagggacagagaggaaaacccagaggagaaaacggagaaaaagaaaatgaaaaagatgaaatggaaaaagaaaaaagagaaaaggaaatggaagaaggaaaaagagagggaggagaaggaaaaggaaaaggaagagaaatggaaatggaagaaggaaaaagagaaacggaggaagaaagaaaagaaaaagaaataagagaagaaatggaagaaggaaaaagagatggcgaagaaagagaagaaatctttgttttctaa

SEQ ID NO: 60448 - DNA, 712 bp, Heterodera glycines
atgcttcacaaggcgactcggatggttgtgctcgaatactttgagagtttcttcggacaatgggacaaaaagcaggcgcagccgtggatggacgaatacgaagtgcgaagtgtgcgcagacaggcggagaaaataaaggcgggcaaagccgggggcacggtcgagctgatagcggcggcgaaaaagttcaacatgaacgtgctggtctacaagacggacaaggacatgtggctgtgcatgtcgccaaagacggcgcacaaatgggacttggacaaggtgggcaattagtgacggatcgggacattggataaggtgacaaatgggggtataggataagataggcaattagtgacaaatgggggtattggcaggtaattattgacaaatggtgagctcaccgaacaattagctaattgggtcattagtggaaattcggcaatttagaactgccaaagcaaggatgcgatgaccattgcgttggaattgtacgacaacgaaaattacgacgtgattatggacgtgcaacaaaagaagtgaacggagaggcggacggacggtcaactcaaaaggaagaatgaaatgagaaaatgagtgaagattttgttcgtagtgattaggggcttaatgatcgtcggatgatacaaatcactttataagcaaatgtaaagtaatcatcgaaaatcattcggcagccgtattcccaccaaataaa

SEQ ID NO: 60449 - DNA, 877 bp, Heterodera glycines
atgaatttgtgtggtgagtggtggatgtggtaagacgagagttggtaatgtatgatacgagtcacgagcactacgggaacagacacgccagcgcacattttcgaaccgcgatttggcaacggttgtgcaaagagttggactacccaaggtgaaaagagtgttttatggaagcggggaaatggataaaaatgaaaggaatttaaacggagggactgaaatggtcgaaaaaagtggtccaaagcgacggaaggggtcaaatgcgtcccaaggaatttttaaagggcattcttttttctcatatggccaaattttacaattttggcagcatttgaaagagcctacacatttaaaagctgttgaaaagttatttttctaagcgaaaagctactacatgaatgctgcaaaagtcaggattattgcatatttttatttatacttttttacatatcggcgagtttttctgattttttgaaatcaaatagagattgctaaaggcttttgaatgatgctaaatatgtaaaatttggtattctgtggagcaagttgcgacctattaaacttgtctgggatgttgttggcaggttccgaaaaacgattggaagggaatttgggtgcaaaaatgtgacggaattgggggactaaaaacagtgccattttcagatgatccgcaggcactgcaaaagcaatggaaaagcattagggacaaatacatcaaagagaagaagcggagaaaagggggcacaacaacaatgatggtaagcatttgagaggtttttaaattttgtagaaattttactgacattttcaggaccattccgaatcgacgacaaatggcacacgaaatttcaacggtaaaatggacaaaaaatattcttaa

SEQ ID NO: 60450 - DNA, 56 bp, Heterodera glycines; identical to SEQ ID NO: 52733

SEQ ID NO: 60451 - DNA, 111 bp, Heterodera glycines
atgagcgacagttcaattcggagacttagcattctgagcattttgccaactgatatgagtcgtagccaccaccacaaaggcgcgaaaatggatggaagaattgtggttttg

SEQ ID NO: 60452 - DNA, 651 bp, Heterodera glycines
atggctacgcccttggttggtgggtggttcgtgaacgcacagcaaaagaaggtggttactggttacctaaccccatgtaaccatggtaaagcgcctgtcctgcccctccctccctacccatggtagcagtcgtaaccaccaacctttaaaaatctgccaaaaaaaaccaatgtaaagttttaatcgaattaaatgccgaaatatcttaaataataataaaaaaatttacaaaaaattaatccgtaaataataataattattatttttatttattctaccaattttctaggtactttaaacattattttgcccatttattaaaaaaatcagtgcaaattttactaagttcatggtagcgtagttggtgataaagtaaaagaagatggttggcggttaaaaaaaggtggttgctggttggttgctccagctgaaaatttaccatcttcttttgctaccgtttttctcatggttggtggttatttgaccgggttaaataccatggttaaataataatgacctggtcaaataaccatcttcttttactacggcccccgggggggggggacggacggacggatggacggacacccaactcgtactgtttttcgacaaaaaatcgtcataactcttgacaaagtcaaccaaattaaa

SEQ ID NO: 60453 - DNA, 1122 bp, Heterodera glycines
atggttattaagtcggggatgggttggaaaaaaatgcatttcgagcgaaaattcacaccgcatttctgcacggctgttggtttcacctgtcacgtgctcattggcggtcagttgtgtcacgttttaatgacctggcagaaaggttcattcagcggtttggagacactcaacagcaccaggattttcttgaaaacacttggatggttgtcagcgtcgcactccgtcatttttgctcgatttttggaattgcaaagacattactgaactccatttgccgaaggacaacaaatggcgtggaaagctggcatgcccgactgcagaagacttttgcctctccacatctcacctttttcacttttatagaagatttaatcttttaatttcgaaatgattttgcaaaaactttttattttaaaggattactgaacgaaaatgttcgagcaaatgcaatttgcgttaaattggaaagtggtgaatctattccattgtatacgcgcattgagtatcgtcaggcaaatgatcgtctgctcaacattttgcgccgttacaacgaatatttgccggacgattacaatttaattattgtacgaaacgccaaattgaaactttgtacgaaactccattgtacgaactgcccattgtacgaactgaatattgtacgaactgcctattgtacgaacagcattgtacgaactgcctttgtacgaactgcaaattgtacgactgcctattgtacgaacagcattgtacgaactgcctttgtacgaactgcccaatgtacgaactgccatgaccccgaatttaagacggctagttttaatttattttatgactaattttacaagtttttttaaattaattggtttatgcgttttaagaatctgattactaaatgttagaaatataaaatactctgttttatagtatttccattattataagccatattaaatttcatattcggcatgatgaaatattcgattttagtgtatgtttttagagagtaagaaacatgttttctaaatttatcattttttaaaattaatttctcttgagaccgtgccatcatcttgcagatttttcctgtgcattttataattcataatatatctaatgaaaata

SEQ ID NO: 60454 - DNA, 102 bp, Heterodera glycines
atgtcgaagatgggccgaatggaatcggacacggacccaaatacggtgacaattctgaggaagcaccaagcgccccagcgtgtacttaagtcggacgcggct

SEQ ID NO: 60455 - DNA, 288 bp, Heterodera glycines
attaccatcgaaggtgacccagttccgggccatgttggtgtgccggttccatgctgtgccgtcaagttgattgatgtgcccgaactcaactattttgccaaggatggtgcgggcgaagtgtgcatcaaggggcccaacgtatttcgtggctactacaaaatggctgaacaaacggcggaaacgctggacatcgacgggtggctgcacacgggtgacattggacgatggacagaacagggaacgctcaaaattgtggaccgcaagaagcacatcttcaagttagcccag

SEQ ID NO: 60456 - DNA, 792 bp, Heterodera glycines
atggctcaatcctttggtgatattggccaatttggcattaattatgctaatgatggcactgtgctgcgcaatattccgatcattaccaccgtttcattggacggaattccgaagataaatggcattatacaacgccgacaagaggatgaaggagaggaggaacaccaactgtcaatcgacgaatccctgcagatggtggaaagcacattcatcctggaagatgcggaggaagaggaggaggaggaggaaataccggacatcgatgtggaagtggaggaggaagtgatgctgacgaagctgtacaaaggggcaccgaatgccgaaattgagacgattgaggaggaggaagagcccatggatgaggaagagagtgggagagaaagggagaaggaagagcggtggaagagagtgggaatggaggaagagcagagggatggacgagaaacagagagggtggaggacggagaggggaaggaagagaaacggagatggaatagagagataacggacgaaaaggtggaagagagatggaagagactggggatggaggaggagcagagggatggacgagaaacggagagagagagaggggaggaggaagaggaagaaagagaaatcggagttggcattgaattggtgaaggagaaggaagaaagcgccgaagttctgctggatgttactgaaggaacagcacaaaagcagcagcaacgaattgtgttgattgtgccggacaaccaaatgccaaagcagccagtggcgatgcctttgccggaggaaaatgcgtccaaaacg

SEQ ID NO: 60457 - DNA, 693 bp, Heterodera glycines
atgttgaatgtggttgagggtcagactgaagaagagccaacctatgaaattaaacaggtaaaatcccatatattttattatttaaaacatttttaaattcagttggaagtgaattgtggctcagttgccggcacaagtttggaccgacgcgcggcacagctgaaccatgtgatgctgaagaaggtcggatttcatgcggcaccagaagatttgccagagaattggcccgacagagcgcaaattgagtcaataaaaatggcatggtgagaggaagcatgaagaatagttaattatataaaataattagctaatttgacataaagagcgaatttttgggattatgacagtatctctcattcagggaagcatacgataaccctgacgcgattgtgctgcttacgatgtcgccgggttcgcagaccgcgttcgatgcgcgcttttttgagactgagttggaccgactctctgatgggcgcatcaaaatggtgcgcagttccatgggcgattgtgcgaggaggtggggaatgcaattaaaatatattgctaattaattaaaatggctaattgccaaagactatggatcccgcaatgggtcagcaaatttggtttttgtgcggcacccggccagagacccgcaatatgttttttttaaattgcagaaaagagatacctaatgccaaattttcaattaca

SEQ ID NO: 60458 - DNA, 387 bp, Heterodera glycines
atgttgcccaatttcctttcgctttgctccgtttttgcggtttttctgctgcttttcaccgcacaattccctccaaaagtgcggggaatgatttgtggagcaaaagcattaaaataccaaaggatggaaggtaattagtgctaacgcaatacgtaatgatttattattatagaaaaacaatcgctcaaaaatttattagattattttttggattttttcagggttttccctgacctcatctccccgatggcgtctttcccgacccaaatccatgagcactgatacattgaaatctcctaagattttcacccccgaaaggtccgagagcaacctttgactttattgttcgtcgttgtttaagtgccgaaagatttatgccccattaaa

SEQ ID NO: 60459 - DNA, 1123 bp, Heterodera glycines
atggcattggtgaagaatggcacagtacgaataccatttttaatgaaaacccggtaatttttggtgaaagcccggaaactttcatctgtcgttagaaaagacaaaataagcataagttgtttattttgcatttttaattagttaaacactcatcaaaataaaaacaaaaacaaaaaacggaagtcatataaaaataatgttggccggaaacaataaaacatttgttggcatttgttttcacatgttttttttctattatataaggacaaatttttttatttcttttatagataaaatatacagaataaaattcccaataattctcaagagaatgtttggtaaacacagtaagcaattattgttcggtatgcttaccgtaatggttactgtaatgctcaatgtaagctcaatgaataatgacgatgataacaacaacaactatcatccttattactactacaataattatggttatggtaacgacagtaattttcctggaaataataattggtataacgcaaacgcatacactgataactggtatagcgtaaatgatggtgatgatgacacgagtggttacggtagtactacaagtggaaactacggttttgagacgaacagttacagtagcagtacactgggtggcaattacgattacggtaacagtagtgagtcatcatcagcaccagcgttgacaaaaaagaaaaaagaattgcagcaaatattcagaggaaacgttcaaatccgagaaactgacagtgatggtttagtgagttatcggccggccaaaaagaacgaagtggtaatcaaatttaataaataaataatgcaaaatataaaaggtttcaaattcagcttaaattatactaatattttattttaaaaaattcaaaatgcatataattttttcttttagtgttttgaagtttattgcggcactagtaatccaactgacggcatttttactgatcactatggcaattttgaagaaactttgcataaggaacaaattaaagcgctgaaaaaaatgcaaatttggaattaatattggattctacaaacaagaagtacttaagtgcgaagtgtcaaagcaaaaaatttaaaaataattataaaattaaaa

SEQ ID NO: 60460 - DNA, 659 bp, Heterodera glycines
atgggggctcagtccgcatcattggcctacggaaacggcactttgttcgctgcacttggaggtttgtgtcccgggtttgcgagcctccatccgtccagactgatccggccagagctggctggatcagccccgtgcgctatttgcccggcgcacccatccgtcgactttccccatttttaccccaagggaaatgtgtcagtcctcctcgggcacacgccacccctcaggggtggtgtggcgtgcggatttgtattgggttgattgtttgtttgtttagcgtgtgtgtggttgctgtttagcggggacccccggcagtgcaactgaccgtgcgtacggcctccgcccgctccgtcatttccttcactcgtctaccccgagcggtggcccatcactgaccaaaactgagcccacgagtgcgtccgcttgctcattcttcttttatatgatgaaagcaattagtgaaatattttttggatgggttcatatggaagagagagatttatagtgacaaatagacactctcgcactgctactcttgtttcttttccgttctctgctatttgttcactatctatacagcccgctctgctacaattcattaattagtaagcaaaaacgaggtacccaattttgattggcaataggaagaaatttatcaa

SEQ ID NO: 60461 - DNA, 1213 bp, Heterodera glycines
atggttccattgttgaatgaggcgcggaaaacaaacagttcgatcaagcgcagggatgtggaagaatatttggctgaacagcccagctacactatgcatcgtcaagctattagacggttcaaacgtttgcctacgcttgcttcgggtctacataccgattggcaagccgatcttgcagtttttgaccgtttagccccgcaaaataaggggttccgttatttgttggtttgtgttgatactctgagtagacagttgtttgttgagccagtaaaaagtaaaaaaagtgaggacatggttcatgcatttgataggctgtttgcccattccaaatatattccatggaagttggtaacggaccaaggcctcgagttcaccgccaaacgcatgcaaacatatttcgattcaaagaatgtcaagcatttttgcatgtacacgtccccacaatttcatgctggtatagcagaaagagcaaatcgaacaattaaggaacgattatttcgttattttacggcgcgtcaaacccaacgatggttggatgtcatccaggatattgtgaatggaattaaccattcatacaattcatcaattcaaatgcgcccagttgacgttacatttcggaatgcggacacgctaagagagaaattagccaatgaggcagctatgagtagaccaaaacgtctgcctcgtttccatgtaggggatctggttcgcattgaaaaacataaacatgtgttccagaagggttatgttggccgttttacgagcgaaatattcaaggttgacagtgcggatgaaggccgttcacctgtcacataccgaatcagagatgcggataatgaactgatcaaaggtcgtttttatgcttcggatctatgtcgcgtccgcaaaaacacccaccaggatggtgaaaaattatatgacattgagaaagtgttgaggaaaaagaaaaaggatggtgtagagtatgcatatgtgaagtggaaaggttataacaaacagcataacagctggattccaatcagttcaatcacccataaaaatatataaatatatagggaaaaatgataaaacaaaaaaatgtccaccatttcgtcaaattctttttatgttgttgttccctcgaacacgaacgttgaagggaaccggacgaactctttccgtgtgcgactaccacgaaaaatacaatttaattcggaatgggatgtgggcctag

SEQ ID NO: 60462 - DNA, 181 bp, Heterodera glycines; identical to SEQ ID NO: 52969

SEQ ID NO: 60463 - DNA, 669 bp, Heterodera glycines
atgcggctgatgtccatccgagaggctgtcgagtctggcttgttcgacgtgaccagcggcgagctgatcaacccaatttccggtcggcattatcccgtgcagcgtgctgtgcaaatgcgactagtacaaacaacgccggaacgtgcacaacagttggaggacgcgttggcccaagcgcaacaacaacatgcgcacattgtgcagccgctgcagaaacggccaagcggtcaattctcgccgagcagcattagcttgggtagcggtggcggcggcggtgtgatcgccggtccagcaggcggtgccgagcacggctacagtagttactcccagcggcgctcgtcctacggtgttggcgacgggtatccatcataagcatttcatttagtttacttttctcgctggcactcaaattttagcgattggggagccgaatctcgaagccttttatacagtagccatggtgttagactaaggtagtggcaattaccgtcctttccagtatgattactgtagcggtcttgacttccatttcgaattgagtggcagcgagtaggaacaaaaaatcaaccaatccaaggataatcaatttgactcataacttaacaaagcagcgaattgatgtgtttttttacagtaattaccgtaaaaaatcatacaccgtaatcaaaa

SEQ ID NO: 60464 - DNA, 616 bp, Heterodera glycines
atgtattttgggagtggaggtgacccggaattgaaaaagtgcgtaatttgtggcaatttggtacaattggccgacaaaatgatgatcgacagggtcacatgtaattattacttatttggtcaaaatttaaaaacttgtccaatgttattgaaaatggttaaaagagaaatttggatgaaattaaagtttcttgtgaaaaattaaatatttctctttgaagcgaccgcttaatttcaaaaacatttatttcatttcactttttttatctccaaaatgccctacattgaaatactgtaaataattctgcttttttacaaaatcatttcagtgcacaacaaatgcttcaattgtggctactgtggcaacccgttgaagccgggcgaatgtgccatggaagtgcactcattcggccgccggtggtactgctcgggcccggccggcagctgcgcaatgcttccaacggcacaaaaggaagcgcgacgcaaaacgcaagcagcgaaacagtgaaaggagaggcatttttcgagtttggtccaattttgaacccgatttgaacccgaaatgccaatgtattatggcaattaattgacttaattgttatgagaagcaaaataaa

SEQ ID NO: 60465 - DNA, 470 bp, Heterodera glycines
atgaaaaggaaggaatttattcagcgaagtgatgagcttaaaagaatgttcgaaattggaaaacagaaacaatttgtgaaagagttgggcattggtaaagaaatgtttagaaaattgaaaagggaatttggcattgaaatgagaaaaagtaaatttgaataaataaataaattattgtttatttgttttaatttttaatatttaggtggaaatcgcttttcgaatgaagaaaaaatgagtaaaatgacaatttattatcaaatgaaaaaagcgaatccttctttgcttgataaagaaattgctgaattattggaaatctctgaacgcactctcagaaattggaaaaacaaaaatcaaaatttgtgatttgtgtcaacgaagcagatcatttcacatctggcttccctagaaacgttttgatgattttctttattttttttattatttgggtttttattttgctaaataaa

SEQ ID NO: 60466 - DNA, 414 bp, Heterodera glycines
atgctggcggatcaacaaaaaatggtgcaggaccaatcacagcaaattgctcaattgattgcgatccgacaaaacgcaccaaatgcggcggcacagcccaatcaaggagcaaattcagtgccaatattgccggacatttcaccattcgagccaacggacgacaagagccgaatttcggaatggattgagcgattcaaattcgcgttggattgcacagcaccaacggcggacgacgaagtcaaggttaaatgcctgatgaataagctgagcgaatcggcattcagtgaatacagcagatcagttctgccgtcgtctgttacagatttcagttttaaagtgacgaccgaaaagcttgagaagctatttgccaaggctcagtccatattcatcgaccgctacgagtgtttaaaagcg

SEQ ID NO: 60467 - DNA, 2992 bp, Heterodera glycines
ctaaaaacagcggttctgttcaacaagaagccagttgaattccatctcgacacggggtcggacattgtcgtcattgatcaattaacgcacgaatatgttggacgaccaccgatcgaaaaatgcaacgaaattggcaaggctttcgacggcacaaaaatttcctttattggaaaaggattcggtacattcaaatttggtaaaattgaagtggagcaaacattttttgttgccaaagcaggctcactaaatttgttgagctgcaaaatgatggacttatttgggcttttagacgaattaaagctgaagatcagcaatcctgcagtaaatgcatgccacgcgaatggcaaaaaggctgaaaatttaatcccgaatgaagcaacgcagattgctgggacagaagtcgaaattcaaggcctggaaaaggcatttcacgaaattttcagtgaggaattgggccattgcctaaaggagaaggctcatcttgccctaaaagatgacgcaaggccagtctatcgcaaagcccgaccagtaccctacaattcgttagaggtggttgagagcgaactgagccggttggaaaagatgaacgtcatcaacaaagtcgaacatttggagtgggccgcacctattttgattgttaaaaaggctgacggatccgcccgactttgcattgattactctacgggcctaaacgatgcccttctcgactgccaatacccacttccaataccggaagacatttttgcgacgctaaatggaggcaaaattttctcacaaattgatttgcgagacgcctatttccaagtcgaattggacgaaaattctaaaaatttgtgtgggctggcaacccacaagggcaattaccggatggaaagattaccgttcggtgtaaaatcagcccccgccatatttcaatcaattatggataaaatgttggcaggattggaatttgccaccgcctatttggacgacattataatcgtcagcaaaagcattccggaacacaccaatcacttaaaagaagtttttggtcgaattcaggcatacggattccgcgtcaaattggcgaaatgcaaatttttccgtgatcaaatcaaatatctcggacagattatcgataaaaacggacgccgaccggatccagcaaaaatctatgcaattagtcaaatgcctgcaccaaacgacattccatctctccgatcattccttggtatggtaaatcattaccaacaatacgtcaaaaacatgcggttcatccgaaaaccgctcgacgatttgcttaaaaaggaaattgattggagttggagtgaaggatgcgaaaatgcgtttcgaaaaattaaggaaattttggcatcagatttgctgctaacacattacgatccaaaaatggagatcattgttgcagctgacgcttccgaattgggcatcggagcggtcatttatcacaaatttcaggacggaaacatcaaagcaattgcccatgcttcaaaatcactcgcccctgcggaaaaaaattattcgcagattgaaaaagagggcttggcgttaatttttgcagtacaaaaattccataaaatgatttatggacggcatttcactctgcaaactgaccataaaccccttgtcagtatttttggcagcaaaaagggaattcggcagtgcagtgccaatcgtcttcttcgctggtccttaatccttttggcctacgattttacgatcgaatacatcaacacaaaggattttggcccagccgatgcgctctcgcgcctaatcgccaaaggaaatgagaccgaagacgagaaaatcatcgccatgatcaatgccgaaacggattttgaaacaaattttggccaaacaatttcaaaattgccattaaaattttcggacctagtcgctgcttctgagcgcgatgaaaatattattcaagtccaaaaatttgtcaaaaaatggctggccaaatgaaaaggccatggacaaagaaaatcaaattgtccgtgatttatgtcgaagaaaggaagaactttcaaccgaaaagggatgccttatgtatggagaaagagtggtaatcccgaaagtcttccactccaaaattctaaaattgctgcacaaaggacatcccggaatgaagaggatgaagcagctggcacgccaatatgtgttctggccaaaaatcgatcaggacattgaagattttgtccgtgaatgtgtgccatgtcaggctgctgcaaaagcgccaattaagacaaatttacagtcatggccaaaaacatcaggcccgtggcaacgcgtgcacctggattttgccggaccgtttttcgggaagcactttctgattgtggtcgactctttttcgaaataccccgaggtattcgaaatgtcaacaatttcaacggcaatgacaattgaaaagctaagatatttggcttcacggcacggaattccagaaacattggtttctgacaacggcacacaattcaagagcacggaattcgccaaatttacagcggccaatggaatcaaccatttattctcggctccatataatcccatgtccaatggacaagcggagagatttgttgacacgtttaaacgtgccttcagaaaattaaaaggggagggaatgtcatcagtgaaagaaataattgagacatttttggtcacatatcggaccacccccaatgattcgttgccggactcgaaaagtccagccgaaatgctcctgggacggaagccacgaacaactttggacctgctgaagccgcctccaattcagccgatcgaacgtgatcaggcaatggagaagaaattcaatcgccgatttggcacgcgtcctcaaattttcgcttcaaaggacgcagtttgggcccgacatcgcctttcacaaaattggaaagccggaacgatctgtgggtgttccggtgtcatttacaatgtccgatttgaagatggatccagcggtcgctatcatgcgaatcagctgaggttccgaaag

SEQ ID NO: 60468 - DNA, 602 bp, Heterodera glycines
atgaaatcaggcgccgcattggcgcctctacttgcccggcatccgttgggtataaaaatttttttaataagaaatgtttcttcgtaaattaatttgttcaatacagtatgccataggttattttcaaaccaagttcggttcgcttacaagtaaatgttttttgccagtaaatatttttggctcttttttttgttttggtatattaatgaaagcgattatagttatttttgaaaaaaatctcatcaaaatcccacttatattaagttgttttttttttgaaattattgcttgttttaatctctttttctccatttgaaattttacaaataaaatcaagaatttctcttcaaataattcaaaattaccttttttgatggaaaatataaaaaaaattcgcttcaatttctttttttttgaaaatataattaaagaatttttcaaattttttatttcatgaataaatcagttgaaatgaacaatttataatttcaaaagaattttctcatcttataattattaaatttattaccagaaaatttgagaaatttgaataaaataatcgctcaattaacattgtgtgagctaaaataatttttaattta

SEQ ID NO: 60469 - DNA, 695 bp, Heterodera glycines
cctcaaaacgagcatattgaactacacagaaaacgccatgggcgaaaattggatcacgaagagcgcacgtgagtaaattatgcaaataacttaatttgattattcatttttatactattccttttgatttaatcaggcgaaagaaactggccagagctgttcatgaccgttcaaaagtggccaagaaattgcggaaagggaaggcgaagttgtaccacaagaagagatatgcggagaaggttgcttcttgtcttactttaaaactaaagaaaaagttaaggtccaaatgcgaaaattgatcaaacaacacgaggagaagaagcaaaaggggacgacggacactcaaacggagggagcagtccccgcctatttgttggaccggcaaaaggaaacggcggggaaggcactttcgactgccatcaaacagaaacggaaggaaaaagcggtaaggaaataggcaaatgctcattggcatttctatcatttacacatttaaggcaaagtaccaagtgcctttgccaaaagtgagggcggtcagcgacgcggaggccttcaaagttgtcaatacgggaaaaactagacgaaaagggtggaaaaggatggtcaccaaagtcactttcgtcggcgaaacattcacacggaaaccggcaaaattcgaacgattcattcgtccgatgggtctccgttttaaaaag

SEQ ID NO: 60470 - DNA, 918 bp, Heterodera glycines
atggtcatggaggacattcatgaagttggaaagaaggctgggctcttcacctttgaacaggtcggtcaattcggtttgaatttgaatgaaaaaatacaagtgagcgtagaacagctattttcttaatttagtttttgttttattctttaaaaataatatgagacagttttagctactgtaccaaaaaaatgggtggctcagtggtttttgtaagatagtaaagggacacaggaaggatgttcgagaccgttctgcaacatgaatatttttttatttttgtccaaaaaattaaaaaaatgcccatttttgggaattatttttggagggttttgccaaccaaattggacaattttggtatcattcgaaagcttctaaaccaaagctaaggtatttgatgttttaaaaaaggatacaggctttcaaaattttcttttttaaataactttttagctaatacactttttgctctcaaaaacctcaaattttgttcgtaatttttttctctatcgatatgcaaaatttgaggaagatttaacgtattgaaaaaagttaaactagcgaagtaaattcaggttttttcaactaacagaggcaaagaaatagtacgctaaaatgagagatgtttttttctctgcactctctatttattggtacacatcagggatgtgccgaatcggaatcgcaattaatcggattttgggccataatcggaatcggattttgtctggctcggcacatccctggtacacatctcgttttttcggatggtgtgtttatttatttattttttcattttaaggcgaaagacattcatttgtacgccgagcttttcacggtggagaacgacctgttgactccgaccatgaaaagcaagcgaccacaattgatggcccatttcaaagatgagctgtgcaaaat

SEQ ID NO: 60471 - DNA, 89 bp, Heterodera glycines
atgtcccatttgattgggctcaaaaatgacggacagcaaatgtcgtttttggcagtttggccacaaatgtcgggacacgccatgatatg

SEQ ID NO: 60472 - DNA, 419 bp, Heterodera glycines
atggcaaaattaatcactgttaactctgcaaaaggaaagttttgtgacgggtattgttatcacaaacacaaaatgacaaaaaataaaacttggtggaagtgtgaactttaccaacaaggatgcaaaggttggggttttgagagtaatggtgagtttttcggaactcgaatgcataatcatcctccagaccaaattctacttcaaatcgagagagaacagcagatttgaagatgtcaaacatagaaatcagatttcaccttggaatttcaaaaatatcacacgaacttttatttttcctctcacctgcgtgattttgggtaacccaaaacttggaaaaaaggtttgatatttcacgaccctgagcttttgaatgagcgtaatttttgtttacaccggttcaattttagcgatcgaataaa

SEQ ID NO: 60473 - DNA, 1931 bp, Heterodera glycines
catattaaagaggcgtgtgtgctcacgcggttggtcgcctcgtcggtgcgactgtccgaagcggtggtcggaattattaaggcactaatcacctgcgaagccctcaattaaaaacagaccaatttaggacataaggaacagtggtgacctgcaaattgtgaacaaggaccaaacgggactaatggaggatttacaaaccgaggccgatcggttggacattttggcattttatcaaaaggaagggcggattaagcgaattacacccgcaaattccctaaaaatacgaaagttttctgggcaaaacgccatattcattagtcgcatttttcggctttcaataaaaggaatcctcctaattattgttccatttttttgtggataaattgacgtttagatctgctcaattgtgcattgaacggtcactgcgcgagaaattcggcaaaaatcttacgattgttggcgaggaagtgaatgaatgccgcctttgatcccttttcggctaattgccctttttgcaggaaattgagctcccatcgacgccctttgaaccgcttgaagctttgccgccttcacatcattttcacatcttcttaaaagacgtccgtccggcttttttaatgtttaataattaatttgccaattgaataatttttcttttcccaatgtccttttgttgttttaattttttaattgcaagatgcaaggctttaatttgcccgttgcttttcgcatataatttgttgtccccgtgttagcttgttgtttgggtcgacccgttggacggcacttccgattttacaaagtcaaaagataatcggggtcagataaattaggtcacaaatggcaaaaataaataaatttcaagcgctccttcgtcatgtcactgtgctcattggcatcacttacaaaggccgaccggtggccggcattgtgcatcagccgttttataatggggaacaaagtcgaaccgtttggtcaattgtcggagttggcacttttggccttaagaaaacggcgcaacaaaatatgaatttcccgaagggtaaagcagcatttatttgtctggttgtgccgagtatgtgaccggaaaatgcatcagtacaatttttaaaaaagttctgtagcattaagtagtgtaaacaaagtaaaattctgtaagaacttcgttgaaattccgaatcccggaaccgaattcgaactaaaagtcgaaagtccaagtttcaattttacccgttttttgttcaaaatcggttgaaaaacacggaaacaaaactgaaaggcaccaatcctgcaataagagattatttacgcattttagaaccaaaaatgggtaaaatttaaatttgtatttcgactttttatttgtgtcaggaattcggaattgacgcattttccgggagctgccgaatattctcaccccccctttttttagctaatgaacaaatgccgccgcgggtcgctgtcattaccttccgtagccgctccgaattggtcgaacagctttttgttctttcaattttattttaattgaatataattggtattttttccttcttccgccttaggtgcaaaaggcattggacgcgttggaggagaaaaagctgatcagcgaagtggaacgcgcaggaggcgcgggctttaaagtgttgcgctgtttggagggggccactgcttttgtttacgccgcgggggacaccaaaaaatgggacattgccgcgcccgaggcattgctaatggctgccggtacactttttagaaattgttgtttttttacaacaaacagttttttgccacttttaggtggcactttatcggatatgtccgggcgacagattcgttacgacggacctccgttcagctggcaaacagcgggggactgcttgcgaccgcctcgggcgtggaccatcaggtgagcgggcggaaaaggaaag

SEQ ID NO: 60474 - DNA, 888 bp, Heterodera glycines
atgaatgcaaagaaatgtttaactactgtaagttggacaattttaacatttttggctattccaatttagactggcttttacagttaaaacaattcattttctctcgctgacgatcttttaaggtagagaattataaatgcaccttaagcttaccaaaaaaaatatgaaaaataaaaattttcagtgtggggattgtaccatgaaaataaaaaaaaacgaagatttagctataaaaaattttttagtcgaaatcgaactgaaaccatcggagccggacttcggctcgggaaaaagccgggttccggaacatccgaaagagacttaaaggatttaagattttaaattttttttcataattttatttaaaaaaaatttaacagctattgaaaaggaaaaagttttaaataggaaaaaaggtaacggaaaaactaaaagtaaattaagcagtagagcccgggcgcgcgggaatatcgagaaaacgtggcaaaacaattcggaacaggacaaaacgtcgcccactgaagcatccccggacgaatttttggactatatcttttttcttactcaacaaatcaaacatttttggcacgaacaaacacgctatacattttccattaaaacgatatataaatgttatgggtgggttgtatgtggtggcatttctgtgacagactcaaaattttgtaccgtaagtgcggagacctgaaaattggtgtacactgccggaattttgaacactaagtgtccaattaccgggaaccgtgcaccgtttcccgcactaaatcatttaattaaacttaatacatgtttaattgtcgctggaaatttttattgcaatttcttagactattcaacatagaatgggagcccgttgaacagagtaataaa

SEQ ID NO: 60475 - DNA, 3623 bp, Heterodera glycines
atgaatcgcgccagatcggacccagagcttaatgcaaattttcctcagcgaacaaacgatttgttcggtgggagagtttactgtattggcagtcttaggcggttgaccaatgtaatcttccttatcgacaccggtaaagcgtatgacaataattaacatgccgccaaaaaaaattttcaatttttattatttttgatcacgaaattgagatttcacctgacaatcggggattccttgatatttgcttttgaaaaattcaaaaaattcattgaacctgatccattcacaaaaaactccctatattcacaacattggcgtagaaaaattaagaaattctcaatttagctctaaaattcgataaaaaactttggcatggccgcgtccggtctctactaattataattaaggctctcccttttgtttgatcgcggcgcaattcattcgcgaacacaatttggctattgttaacaccaatatcacgttctctcttggaggagttggtggtgttagtctccgaactttgggccggtaatttaagaattaatataaccgaataaaataataaaaacaaaagcaagtctcatcatttcaaattttattttaactttttgtagtgtaatcgatattttttcagggctgaaggtgtagaaatgagaatcggaaggaccagattctcttctgatttggattgtgtcagggatgaatcataccatgttctgtgagcttttaaagttttataccccaatcggatatttgcggcaaaactttttgttttgttttgcggtcaaagccaaaatcggacatttgcggtccgacattttgcgatttcgcccaaatttcatggtcaaaataaaaattaaacccaaaacgagctcattttttacattttaaccattcattaagcccttgtgcaaggtgctacaatgttactcaaaaaatcatcaaaatgggcgttaataaaaaacggtgccgcgcgtttcgcgaaaaccgcaaatatttaaaaagagagactgagccacatcagtacgatgtctctatttgttaaattaataaaaacaatttaatgtgttttaagctactataatcaaacaaagcaaagcaaaggaatattttttaagtaaaataaatataaaaatattttaattagtttatttaaaagtgtttttgtgaatgaggttctgtgatttgttaattaactgataacttatatttttattgataatttgcatgcgtgcatatgtaaaaatatgaatcggcgatttctgtatgcaaccaactatttgatctttaacatccgatagccttaagtgttttctattattctactaaatttcaaagagtttcgttaacttaagaaagttaacaacaaaaaggttcaaaaaaacttgcttttttgagtttctctgattattatttttttaaaacttaatgaatttttttgaaattttgcagaaaaacttcgggctaccgaataacaccaagattataaaatttaattaattttgggcgaacttatgaataatttactgtcaaaaaattttttaagcatttttgagtaatggcctggcactttcagaaagggaaacggttaaaagtgcgctgcacaaaaagcattttttcaaaacaaaaaagtcgtcgccttgctaagaatcgcaaaaaaaattttttcgtttttgatgaaattctgttaaaaattgacaaaaattttcaaaaatttttccccggcggcccaaatgtctttggaaaaactgcgccgagaaaaaatattttgaaaaacaaaaaataacaaaatcgattatactgatcatgatgattttaatgatgatttaaactatttttcctttttttttgttaggcttctattcctgtttacaatttacatttattaactttcaaatggaaaagcaaataatttttaaataaaagttttcatacttttaataattcatttaaattacaaatttaatgcccaaatagccttaataaaaaataaaaattaattaaaaaaaattttatcaaaataataattttatttttcacgttttaagattgggatgcagcattttggtgtctagaggggtggcaattaactgtcaaccgaggactgttacgtttctgaatggaaatgcagttcagtttatgaccgaagaggggttcagacaactcagaacaacagcttctatcagctttggttcaaattcttatggaacattacatggtctgttcacttaaaataggttttatatttcatttccaccatttttaagctattggttattttgcgccccaacgtataaactttattaatgacggtgatgaccatatagaaaagccatacgatttaataagtttgttttgtaacttttatatatagcactaaatttaattttaaaattttcatgtaccgtcacttggacattacaaggaagaggtattgcggtagtaaaaatagataccttcgatccaaaggtagtattttttaataataatttaacagtagaaaataaagctgagcgggactgaaaaattttgaaaaaaaattgaaaaatttcaaaaattttaatctcaattcatagatgaataatcatttaaatatttttttaaataaaactgcattttttttaaattccaaaagactcggtgcttaaaatctttttgagaattgttaattgttttaataaattataataatctcttaaatttatttactacaaatagctttttttcttgcgcagttttccgaaaaactttttgggaacattgtggggggggggggtgggtccggcggtgccgataggcgccgccgggaaaaattgaaaattgagtgaaatatattaacagcttgtcctaaaaatgatcaaagccttggttaaatttgtggtttgggcagtttaaaaaaataatattttaagttgtaatactttttattataaattgaaattgaaataatgtacagaaaatatggaacattttcagttcagttggggaattgcacccaagcgataaatataagtagaaatagggcggctacacgggcccgggtatttaagcaaaaaacgagcccgggcattaccgggtactgaagttttgttacttaaaaagtgtaaaatccacttttttggcgtttggttactacttttcactatttcaacattttttagaaaattccttaacaaaaatgcaataaagtacacctataagaatcgacctaaaaaatttcaaataatacacccttaagaatcgatctaaaaaatttttggaaaattttttcaagagatcatagaccaaattttttcccagacgcccattcttaccagtacttatttagtcccgttgggagcgggactggcaaactgggaccgggatttttttttcagaaactgggaccgtggcctgaaaaaactgggaattcccaatccggtcctgcttagccctagtctaaaataacaagtaacaaaatgggattggagggtccttttttgctttctcttttttgaaactgcttaatgttctattaaattttcgttttcaggaaaacacaatcaatcatgacgtattggatgacttgcacaagacgttcgctgccattgagcagaattcgtcagtgcgtggcgttgtgctga

SEQ ID NO: 60476 - DNA, 186 bp, Heterodera glycines
cgaaatcagcctgggcaaccgctgagtgccgccggcgcacggcaacagaccaagcatcacctcgggcagtgcaaactgcgtcttgggccagctgaccgcgatccggtagtggcacgccagcgccatctccaagccaataccaatgcaggagccggagatggcagcaacgatcaaaaagcaatttag

SEQ ID NO: 60477 - DNA, 668 bp, Heterodera glycines
atgacttctccctttaaggtcggcgctgcagccttcggggcgggaatggtaagtttttttttgttgttgttcgctccaaaatttacatctcaaacaaattttcaaattttcagtgcttcgcgaagacgtacatggagaaaccgaagagcgaagacgacaaagaagcgcccaagaaggaagaagccacgaccggcggcgacgcggaggagaaggcaaagaagaaggacaagaaaggcgacggcgcagctgcggcggacaagaaggaggagaagcgcaaggacaaacacaaatcaaaggaggggaagagcgacgacagcaaccgccgttccaagaaggacaagcacgggaagaaggacgctgccgagccagccgctaacgccggagaacagagcacagcggagacgacccaagcggacgaatagccagcgatgagaacgacgacggtgcacgacgacctctcccttccgatcagtcccccctactgcttgctgttgtttgtgtgaagttcgttccccatattttgtacatattccatgtgatcagagcgaccttcctaatgtgatcaaaatatgtatgtatgtataatatccattaatgtgctgcttcatattcgttatttgtgtgtatgtacagtgtttgcgtattcattgttcaatgtgtgtaataaa

SEQ ID NO: 60478 - DNA, 726 bp, Heterodera glycines
atgacggaccaaaaaaatgaaaatcgaaaacaacaacgaggtagttgagaatgttcaaatgtaaaaattttagaaataaaaatatctaaatatattccatttaaaatataatttttttttttattaaactgaccactaatttgaaattattttttagaatttgttctaagacacaagctagcggaacgcaccaaaaaacgaacacgttacgggcttaacagcatcaaaaaaatgctgattggtggtggaaaattagcagaaaaattttctaatgaatttcaggtgaaaatttgcgaaaaatttccatgtgggattgttatcaactactatatcatatagttcgaatgtacctctctgggagatatggactccaaaaattcattttgactaaattattattaaatttcaatacaaaaacataagcaggtcatttttgatcagatttaaaatatagagagtttttcgctgctcatatttttgatattattttgaaaccaaaacaattctctgattttcaaatattaaaaaatttttacccttcaggatttttatctcaccagtataaatttagaaaaagtgcccacatatgcttcattaaaccgagagtttcatcctttgtgatcagatcaatcagaaggtgctaggtcgtttcgtaaattccgccatttttaacgactttactttgacaaactcacaatatcttttctcaaacgtccacaaaataaa

SEQ ID NO: 60479 - DNA, 49 bp, Heterodera glycines; identical to SEQ ID NO: 51181

SEQ ID NO: 60480 - DNA, 88 bp, Heterodera glycines
atgaataatgggattcagtttgggcttatggatcaaaataatttggtggatttttgggacacttatcagacgacaaatttgaggggcg

SEQ ID NO: 60481 - DNA, 2295 bp, Heterodera glycines; identical to SEQ ID NO: 6140
  unsure (1)..(2295): unsure at all n locations

SEQ ID NO: 60482 - DNA, 1416 bp, Heterodera glycines
tcatctgaatttttaaggtgttgaacgaggaggaacagttgggaatgcgtttggccgccaaattgggccgcgaggtgctcgacgaggcggcacgtgccattgagcctggcgtaatgaattttttttttttttttttattaaaatcccataaaaatacaaaccggatcaggggattccggaaaatagttttttttccctaaatcctatccatttcatgtttccaagctgatttttttcaaattggttatggtcttttgttgttgttaaacatttggttttaaagaaagttgttcaattttttatcattttttcatttttcaaaaaattcgaatcaaataaaaacgccaatttttcgtatgattcgatttaaataagtgccattatttgtattaaacatcaggtgaccaccgatgagattgaccgtgttgtgcacgaggcgtgcattgagcgggagtgctatccgagcccactgggctactacaaattcccgaagagttgttgtacgtcggtcaacgaggtgtttcaaattttcaaaaaaaataaaatttatctgaaaaatttttccataaaaaatgtgtacactggcaatggttatttttattgggccaattgccagaaaaatggttgatgcccctagagaagcacaggaagaaatatttgaaagttggacatatacattttgctagcagattttgcccctaaaaacggttgctttttgagacttttcggtaataaatcaaaaatttcacaaaaaaaaaaaattttatccaatttttttttgttgtaacttgcaccttgcctccaagcacatttttttaaagtttaatagagcaaaatgctaatttcgttgcttttttttggaagattttggtttttgtacgctaattgtcttaggtcatttgccatggcatcccggataaacgggcactgatcaatggagacatttgcgatggtttgttatgtttttattgcattttttaagcctcaattttgctaaatttgaaatttcaaaaaattcctggcattctaattcaagttgatgtgactgtgttccatcgcggcttccatggcgatttgaatgaaacttttctggtcggtgatgcggtcagtgaggagaacttgaagctgatcacggttggttttccaccaatggaccaaatcaaaccgaaaattttattacgcttttttaattaaatttgctttttgggactagaatttgtgttttaaaaattggtaaacaaaatgagtaaatctccaattactagaaccaacaaaattttacaatacatttttttaatcttgaaaaaaattattcttaactctacgtaatttttttttcctcactaattttcggggctgggaaaaagcacgctgacgtttattttaaaaaattccgagaaaaaatggcaaattttt

SEQ ID NO: 60483 - DNA, 746 bp, Heterodera glycines
atgtccaatttgcccgtttcttctctgattcgtcaacagcacggcggtggtttaggagaggaagatggtatagaaagtgggaaaagaaagtccaaggatgagtacagacgacaaaaggacttggaggagcagcgaaaagccggcacggcgccggcgatggtcgacgtggagacggggagagacataaatccgcacattcccgagttcatcgagaaaacgccctggtatgtgccatcttcaggacccacgctcaaggtaagtggacgaataacaaacaatgcgacaacgaatccattttagcaccagcggccacatcctgaacgccaaaaacagatgtcatcggttgctgaatggtaccctaaggttcattttggttacaaaacaaagggacattgtgactcattggcttattgtcagggcactaccgaacgcgtggcattcaaataccgtgacggggcttgtcaaaattgcggtgctttgggacataacagaaaaaattgctttgagaagcctcgattagtcggtgctaaatttacgaactcaaacattgctccggatgaccatgttctggtgggtgaccactttgttaaaatgttagcaaaatgaccccaattcagccatccctcgaaatgggatacgacgcgaaaagggaccgatggaacgggtacaacgcggaggattattcattggtggcagctgagtttgaaaaaatggaggaaacgcggaaattgatcagagcggaacag

SEQ ID NO: 60484 - DNA, 428 bp, Heterodera glycines
atggggccacttggagctcaaacattcaacgcctgggttcagagtcaagcaaccctggcttcatacccatttagagtttgagaataggttaaggacatttcgtccccaagtcctctaatcattcgctttaccgaggataactgcttaacgagctccagctatcctgggggaaacttcggagggaaccagctactagatgtctcgattatcctttcgcccctatacccaagtcagacgatcgatttgctcgtcagaatcgcttcggacttccaccagagtttcctctggcttcatcctgctcaggaatagttcaccatctttcgggtctcagcgcatacgctctgtctccgccccatcgcatgcgatcgagacgggactatgttgcgccccaacaccgcagtgccagggatcacacatcagctccgtaa

SEQ ID NO: 60485 - DNA, 368 bp, Heterodera glycines
  unsure (1)..(368): unsure at all n locations
atggagnagagtggcgatgagttgggcactgataagcaggtattttattgctctcattttttcaaaatattatttaaaataaaaattaaaatgttttccagagtgtttctcgcgatcgtgatgatgacaatattgcacagcagcaggattctactaatccaataagtcaaaatatggtttcaccaaaaaagcgttggacatcggcacttcgggttgtcacggcaatggcacgcttccgaaacatgccaagggttggcaattagtttttattttatttattttttgaaatctgcattttcatatgttatttaaaaaatatagttttttttgttgggtgtgaattttaccgcatattgggattgaataaa

SEQ ID NO: 60486 - DNA, 940 bp, Heterodera glycines
atgattttatcgaagatcgccgaaacattggcgccatcgaagaaatcccttggaaaaagtgagcaaggagaagctgtttctgctgctgaagctgcaccggctgtccgacaacaaaaggaacagaaaaaaggtgcaattaaagcgaatgaaatttaaaaaaattaaaaatttagaggacgaaatgccaaaaaaatacgaagacaaatatgaaaaagtgaaaaagttgggcaatgaagccaaagaagtcgcccgttccgctgggcacagcgcgaaagaagctgcttcgagagttgggagttcattgaaaaacgcattcacagaaaaggaccaccaacagagaaatggacagaacgacaacaataatcaaaaagggacagaaggacaaaatgggatagaagaacgacaaaaacaatcgaaaagtgatcagaaaaacggagagcgcagtgatcaaaggatgggaagtgatcagagaatgggaagtgatcagagaatgggagacaacgtgatcaaaggatgggaagtgatcagagaaacggagcacaaagtgatcaaaggatggggagtgatcagagaaacggagcacaaagtgatcaaaggatggggagtgatcagagaaacggagcacaaagtgatcaaaggatggggagtgatcagagaaacggagcacaaagtgatcaaaggatggggagtgatcagagaaacggagcacaaagtgatcaaaggatggggagtgatcagagaaacggagcacaaagtgatcaaaggatggggagtgatcagagaaacggagcacaacgtgatcaaaggatgggaagtgatcaaaggatgggaagtgatcagagaaacggagcacaaagtgatcaaaggatggggagtgatcagagaaacggagcacaaagtgatcaaaggatggggagtgatcagagaaacggagcacaaa

SEQ ID NO: 60487 - DNA, 559 bp, Heterodera glycines
atgtatgaaatttcagctgacccaactgacaaaggagtgaaaaaacgtgtcatttctacggacaacggtcaatttaagtggaatatttggaatgctgtgcgagatcttgacactaatgccaagattacggtactcttgtgtttggacgatgagtaccgtgtgtatggccaatttgcggattatgatgcgatggaagatgagatgggtgaacggttccacgaagtgtttcaagtggtgtacaataattaccccatttatgagattgacgaaacggtgccaattgaacacgacgtgccgattgagtacgaagacgaaggccattcgacatgcacaattcaaaagtcagtttaatcaaattcaaaaattgttaagcttattttttaggtgatcgaatttttggcaaatattaggaaaagaatttagaatctttaattgaaaaccaaagaaaatgatgtacaacgaacggattattcatttgaaatatttaccccaaaatgagcatggatttaatttatttcatgtcattttgtaaaaattgtttttttttgactctatgata

SEQ ID NO: 60488 - DNA, 246 bp, Heterodera glycines
gcatttgtatgtgtataaaatttatcaaaaaaagagatagccatttttctgggataacctctaaatataaaaatcctctgtgaaataaaatggcgattgtgcacagccctccgtctcatacgcaagcgcttttgtgaggtataaaatttctcaaaaaaagagatagccatttttctgggatagagtataaatttaaaaattccctcaaaaataaaaggtctattgcgcaccgccctccctatcatg

SEQ ID NO: 60489 - DNA, 304 bp, Heterodera glycines; identical to SEQ ID NO: 51570

SEQ ID NO: 60490 - DNA, 2013 bp, Heterodera glycines
atgcatctcaatcgccgggactcaacccaccagaattccattcactggattcaattatccgcatttcaatcattggaactcaatcctctatcattccaatcgccaggatccaatcgaccagcattccaatcactgggactcaattctccggtattctaatcactgggactcaacccacatgcatttcaatcactgggactcaatccaccagcattcaaatatattataatgaacttctgattttacacacaaaataaaaaatttcctggcatactaacataaccatcggacaaaattctctttaatttcttataaataaggtttaaaaaaatctgcagaaatattttacgtgagaacaaacattttctccgtgaaaaacttatattccgcctaatttccgatagaatgacttttattaatatttttttaggtattttcgcataaaaatagcacatattttggcgattttaaacataaaacattttatggcaaaaataattaaaaatagggaaaaatttgaattacgcgcttggtacttggaagcaagaaatgcatttttaaaattcgatatgtttggataactgaaacttgaagattaataaaataaaaatatccttgatttattaaagataggtaccaaaagctaaggacgcttattttttgaatatataataatattattttaaaaattgttcatatagtgcgaagtaaactaattatttatttagttttaatacctttcataatgtactaatttgttagaataaatttgaatttttgacaaattgcaaaaataacaataaactaactttaaggttggacaacacgacgcaccgaaatatgaaaccgttccaaaacttatggaagattttgtgcgcgatgttaaccaccatctgcatagaatggatgcgcctgaattggctgcgagagctcatttcgagctggtaataaatttaattaattaaaatttataattattgaaatttggagaaatgaaaaaagaagaaattatttttttattaaattaaatgaataatggcctaaaaggcagaaattccctactttctccttgaccgcaaccgtcagtgaatcaaaatttttagatcaacgatatactgtagaaataataattttaatgagaataaatccgcaataacaaaaagtgttcgtttttaaaattttcaaaattctattaatgttttcgaatattgaaaacaaaatatcaaattctgaactcattttttattaaagaaaattattttcgaaatataacattactgatgcattttctactggccaatttaattactattttcaacagttttatttgctttttccacataggtaaatttattttttaaactaattagaatccaaaaatcatttttggtgcaaaatttcttacaatttcatgaaaacccaaactttcccagtggagtgcccgtcggcaccgctagattacttactgcttattttgttttatttgcacaaaatatcctgaaattggcttcttgttataaattctgttagcacattgcttttaaccaaaaaaaaagttttacaaaatctaaaatggctttttttggctatttttcatgttttttattttttaaaatttttttggtgatatttatggcttttttaattttttatttacttatttgacgtttgtatatttcgtgactttaacccctctcgtagatatttttatttcctaatttaatttaggcctatatacatccgtatatggatggaaatgggcgcgtttgcaggctagtggcaaactggattttgtcaaagggccgattccgaatgttcgagcttccggagattgcccgagacgaatataacgcaggccttgatttggccgtacgtggaagacgtgaagggcacgcgacgggccttgatgcgaacatcaatcgaagtggcgagcatgattggccccgaccctttatactattaatatattttcacgtgcagaatgcacagcaagaaaatgttacatttgattag

SEQ ID NO: 60491 - DNA, 1021 bp, Heterodera glycines
atgcctaatgaaaaacaaaagttgtgagaaaaagcaagggttattctgttccaatttatccattgatctggtcaaattttttacaaaatcagaacatcaaattcaaaaaatcgcattttgaggtcaaaaaatatgcaaaattgcttcaaatgattaacttacaattttttcgttcaaaaataataaattatttttatctttcgtctctcatctctagggttataaattaatatgatttttaatatatttttctttgcgcatatgctattaaaaagcggctcagaaatagcatttctacgttaaaattttttggttgttttggtgtttattctcctgatgagataacacaaaaaattattaaaaaaacaaagattcatttttagagaaagggaaaacattaaaatagtgtatgccagagatattttctgcttttccaaaaaatccaaccaaaaagggggaccaaaactaatttgtaagacaacattagtaccaaaaatatacatattctaaatttagtgtaaataaaggcacaactttttttctagttattttgttcaaattataattttaaattaaaaaaataggaatgaaataaaagacaaaattgaacttttttatagagggaagagagcgcaaacaaattaacttctcgcaattacactgatgcccctgttttttttctaaaccatagcctcaaatttaggagtgtaaaatgacaaaatttattcaaaaattataaaaattaggcaaagtcaatattaagataaataattttaaaatccaaattcttgtcaagaaaataaataaataaattttggagatggatttttgagaaatttttcatttcttagggatgtatttttgaaaactttcgggtcgattcttatggggtgtattttttttttaattttcaggtcgattcataggggtgtatttttcgttgttgcatttttgggcaatggccaaaatagatcgaaataggttttttcaaaatttttaaaatctctttaagctctaaaaa

SEQ ID NO: 60492 - DNA, 646 bp, Heterodera glycines
atgaatttactaatcactgttgtacctcttctaatcaaatttgtactacttctattcactgttcaacctcttctaatcattgttccacctcttctaatcactgttgaacctcttctaataactgctgtaccttttctaatcactgttgtacctcttctaatcattgttgtacctcttttaatcacttttgtacctcttctcatcactgttgtgcctcttctaatcaatcacagttatacctcttctaatcacagttgtacctcttctaatcattgttgtactacttctaatcaaatttgtactacttctattcactgttcaacctcttctaatcattgttccacctcttctaatcactgttgaacctcttctaataactgctgtaccttttctaatcactgttgtacctcttctaatcattgttgtaccccttttaatcaccgttgtacctcttctgatcactgttgcacctcttttagtcacttttgcacctcttctaatcatttttgtaactcttctaatctctgttgtacctcttttaatctctgttgtacctcttataatcgctgttgtatctcttctcttcattgttgtacctcttttaatcactgttgcacctcttctaataacagtttacctcttctaa

SEQ ID NO: 60493 - DNA, 351 bp, Heterodera glycines
ggaatcgaaggtgttgtaagcttttttcctttttcacttttaaatttatttaaattttcaatttttttagcttttttcgaaatattttttgtcttttttttcggcaggcactgcctctgacaatattttttatttatttagaaaaataaatttttttttctttttgatttattttaattatatttcattcttaaattttttaataaacattttcaaactttcaccttattaatttaaggcgaattttgccttttttaataaattctcttgtgaaaaggcaaaaaaataggctcttttaaatatgcctatttaaattactttcattgctttcctttgcttacgaccatacca

SEQ ID NO: 60494 - DNA, 612 bp, Heterodera glycines
atgtgttatgtgcctgccacaacaaccgctcaacgacgcacagatgccagcacagccgttaggtcgccccacgagcgtgcatcccacattggcgcagcgaaccaaccaagcgaggcggcccgccaccgacacattgccacgcagcagccatacacaggctttcacatgtgcagcactgagcggtataccacagctccaacgtatggaagcaccccaaaagcatggctcgtgaggcagctgccccgtaatgttgggcagcgtccacaagtcatctcgaacgacctgtgcccatcagcggacgggggcatttggtggtgccaacgctagcccaacaggacagcaggtaggtggtgaataggaatcacttgggtaatgatccagcagcaggttcacctacagctaccttgttacgacttttgcccggttcaagccactgcgattaaatcggttccagtctgcataccgaccgaagccggaacactaaccgtccccgaatttctcgaaatggctcagtcccgggcagcgacgggcggtgtgtacaaagggcagggacgtattcagagcgagttgatgactcgcccctacaaggaattcctcgttcacggacaataa

SEQ ID NO: 60495 - DNA, 88 bp, Heterodera glycines
atggtggtttcgttcccggtcttacgtgccgtaactagcggtgtgtttgtgcttgctgctacgtccgtggccgtgatgagacgacgcg

SEQ ID NO: 60496 - DNA, 606 bp, Heterodera glycines
atcattgaacgagccgattggacagcgagcgatttttgtggccaattgtttacggactgtccaccaaactcagatgaaatgcaacaaattttgtcttcctttgagttagccaacaaattgaatggaagcgcggcgaatagagacgaagaaaatggcggaggaaatgatggcggaggaggaggagggaccggcaatttattggaatgaccaattaattagaaaaaaaaacaaaaaaaagcatcaaaacgccaatgtgtattttgttttctttattttaaatggagacttttaaatgcacttttcctctgtgtcacaattgtcattatttctgtaaccaactccatttggaaatttatatgttcatgagtaatgacggttccgagctgctttgtgggtagggccaagggttttgaaaaagtcgggaccgggattcgggagtggaaccaggctgggataggattgattatctgaagtttaggtttgccggtgtttgaagaccctggcggaatttaaatccaaatttgtcggaatcgaattccggctccttttcaaaaaaacaaagccaggattgtggtcctggactggaccccgtcctggctctatgta

SEQ ID NO: 60497 - DNA, 232 bp, Heterodera glycines
ccgtgccttatggtgaacatatatgtgtacatttgtttgcgagttgctttcagcctcagacagcagtgaaagaggcaaagaaagaacgaaaaacattggggaggaagtgatcggcagagcaaatgatatgaaaaatggaaatgattgtgattttgtgaattgaattgatcaaaaatgaaaagccaagacttttgtgagtagtcccaacttgaaaatacacgtaaataattaa

SEQ ID NO: 60498 - DNA, 443 bp, Heterodera glycines
ttcatcgattacaccatcgacactttctggagaacctgcccccgccgttggcaccaaaattgaagctcaattagcgctttacaaagatgttgaacgagttggaattgatgctgacatatttttgtggtggaaggaaaacggacttcgctttcctgagttggcaaaaattgctcaaattgtgcattcaattccagcaacctctgtgagcagtgagagactttttagcaaggctggactaatttatgcaaatagtttgagaaacaagtgaattgcattattctcaaataaattaaaaataagtatattttagactttccggaaaaacggtacgacaaatgttagtggttaaggcaaatatggatgatgtaaagctggcacctccaattgaacctgatcctatcgatctcattgattatgaaaatgaaatgattaatgatgattaa

SEQ ID NO: 60499 - DNA, 553 bp, Heterodera glycines
atgaaggttcttccgccgtcgcttagtccgccaccgtatcgtcaattcgacttgcaacaaccgtatcggtggccggcagctgccgaacttcaacaacaaccagaacaaacgcaattttccagcaattttggaccattgcgtcaacaacagcaacaacaacaacaacaacaacaacaactgaatcaaaggcagcaaatgaaaagtggaattggtaattaataaatgaacaaaattaaaagcgtattattttattttttaagggttttataaaaatattttattttcatcaaaatttatcaattaatttgcttgaaatccgtgaaattatcgcttgaaggttcgcctccttattattttgacatataaaaaagaaagacactaagagacagacctaaatgcatggaaactttaaaacttttcaactttagaatagagcaaaaaagtcaatttttgataaaaaaaacacagcaacaaattttacaaaaaattgataccccaaataccaaaaactttgcatatatcgaagttattaaattaatatataatttttata

SEQ ID NO: 60500 - DNA, 948 bp, Heterodera glycines
atggaacttgaacaatctttcgaactgcccgtctatcctgacgacgagtctctttctccagccaactctttgccaacagacaccgtcccctttggtcccgatgtcgacgaagtgccggaattgggtcccaacccgcacgaccaggtagtggagatggtagaagacgcggtttcggctgcgtattcttctgaccacgaattcgaggtcgaaagaatatgtggccaaaagcgcgtcaacggccaccaacactacctggtaaagtgggttgggtttcccaaggaccccaacgattggatacctgtcggggatttggtatctgattttctaaatcctttttcttcatcccccaccccccattcagaactgtgaagaggccataaatgattattggcagcgatatcgagaaggcaaagagtacagagagcggaagaaagaggaaaagatgaaaaagacgggacagcggaagagaaaagtctcgggaatggctacggccgcgggagaaaaggagcaaaaggaggaaaagaaagaggacgaaaagaagggagcggaggaagaattgcagcaacagctcccgataaatgccgggactgagggcacgaatgaaggaaaagcagaggtcggggaagaaactgatggggcggaaacaacagaggaagcgaaaaaagagatgggctctgccccgggggagatggtggaggacgggactgaaggtcgggaggatgtgtgcaaaaaagggaattcggaatcggcagatgtgggactggaggttgaacagttgaagaaaatgttacgcgacagtggccaaatggcgacggacaatgccccacttcccctacctcgatgggtgaagggttgtggggcattcaaaaggaaatataagaaaatttatgataacatgattaaaataaacaattcgtgagctgtattgtattattgttgcgtaataaa

SEQ ID NO: 60501 - DNA, 612 bp, Heterodera glycines
atggacgtaactcttcccgtcagcaactcggcaggtgaatggatcggagaggaacggagggatggtgttgtgctctatgcgccgtggacggacgagtggcatgtgcaacagcagcagcaacagcagcagcatcaacagcaacaacaccaacaacaacaacagcagcagcaacagcagtttgtccggcgaacaggcacggggtggacgcggtttccagcatggaacgaaccgctcgttgccaacgattggcgagagaaggaggaaaatctgatccaaaggaagagactacagcgtgaaaacccggagtattgggcgcaaatattggaggaggaaaagcgagccggtgaggagcgccgcttaagggatttgcggttagagcgcacatgggatggctacaaggaaggccactttgagcgtcggcacaatgacggctcgttttttgaggccagaaaatttcttggttcaaatcgacagaatgactttttttcattttcagtttgttgctggggtcgggaagacagtggttggaagttctggaggagggctttggtgaatgatgtttgcatgggattgaaagtgttaagattaactatgattggggatggtatttga

SEQ ID NO: 60502 - DNA, 604 bp, Heterodera glycines
atggacgtaactcttcccgtcagcaactcagttggtgaatggatcggtgaggaacggggggatggcagtgttgtgctctacgcgccgtggacggacgtgtggcatgtgcagcaacaacaacatcaacaacaccaacaacaacaacagcaaaacgaggtgcagcagcagcaacaacagcttgtccggcgaacaggcacggggtggacgcggtttccagcatggaacgaaccgctcgttgccaacgattggcgagagaaggaggaaaatctgatccaaaggaagcgactacagcgtgaaaacccggtgtattgggcgcgaatattggaggaggaaaagcgagccggtgaggagcgccgcttaagggatttgcggttggagcacacatgggatggctacaaggaaggccacttcgagcgtcggcacaatgacggctcgttttttgaggccagaaaatttcttggttcaaatcgacagaatgactttttttcattttcagtttgttgctggggtcgggaagacagtggttggaagttctggaggagggctttggtgaatgatgttggcatgggattgaaagtgttaagattaactatgattggggatg

SEQ ID NO: 60503 - DNA, 826 bp, Heterodera glycines
atgagcgaatttgttgattggattttgggatttaaacgatttgaaacggttgcttttgctcattatggtggaaggttcgactcgcattttgtgttaaaagagctgactgaaagaggggtcgaaaccgagttgatgatggcagacctgaagatttatcaaatgaaagcgcgtggtgtgtattttcgggatttctggctgctcagccaaaacaagttggcagatcttccaaagactttgggttttaaaaccttagcaaagttgtacttccctcataagtacaacaaaaatgtgaactttggaaaaaaattgacacacctaccaccccttgaagattattgtccggacaatatgaaggaggaggaatgtgctaaattggtaaaatggcacaatgaaaattatagaatggaatttgagctaggttagagaaaatctgttttccttttaaaattgaattttaggagagcagctcaaggtttattgcgaaaatgacgtcgaaattttgatggaggcaattttgaaattccggcaattgtttttggagattactgatgggatggatgtgttgaaggacagtgtaacaattgcgggggttgtgatgagaatttttcgaacaaaatttttgagagaaaatcatctcccaattattccggaaggcggttatgagagagccgagaatcagagcaaaattgccgtgaagtattttgaatggttggctcaaagcaaaagagtgagacttagacacgcatgcaatgggggtgaagtggaaatcgggggattaaaagtggattgtatcattggagctgagaaaaaaataattgaatttcag

SEQ ID NO: 60504 - DNA, 357 bp, Heterodera glycines
  unsure (1)..(357): unsure at all n locations
ggaatcgaaggtgttgtaagctttttttccttttttcacttgtaaatttatttaaattttcaatttttttagctttttttcgaaaatttttttgtctttttttcggcaggcactgcctctgacaatgttttttatttatttagaaaaataaattgattttttttctttttgatttattttaattatattttatccttaaattttttaataaacattttcaaactttcaccttattaatttaaggcgaattttgccttttttaataaattctcttgtgaaaaggcaaaaaaataggctcttttaaatatgcctatttanattactttaattgctgtcctttcgcttacgaccatagca

SEQ ID NO: 60505 - DNA, 351 bp, Heterodera glycines
ggaatcgaaggtgttgtaagcttttttcctttttcacttgtaaatttatttaaattttcaatttttttagctttttttcgaaaatttttttgtctttttttcggcaggcactgcctctgacaatgttttttatttatttagaaaaataaatttttttttcttgttgatttattttaattatatttcatccttaaattttttaataaacattttcaaactttcaccttattaatttaaggcgaattttgccttttttaataaattctcttgtgaaaaggcaaaaaaataggctcttttaattatgcctatttaaattactttcattgctttcctttgcttacgaccatacca

SEQ ID NO: 60506 - DNA, 292 bp, Heterodera glycines
  unsure (1)..(292): unsure at all n locations
tttttagctttttttcgaaaaattttttgtctttttttcggcaggcactgcctctgacaaatgttttttatttatntagaaaaataaattgattttttttctttttgatttattttaattatatttcattcttaaattttttaataaacattttcaaactttcaccttattaatttaaggcgaattttgccttttttaataaattctcttgtgaaaaggcaaaaaaataggctcttttaaatatgcctatttaaattactttcattgctttcctttgcttacgaccatacca

SEQ ID NO: 60507 - DNA, 1025 bp, Heterodera glycines
atgattctaccgacaagattattttttcttttatttcaatttcttcttgtcatttcgactttgtctgaaactcaaccaaaatgtaaaaattatacataaaaaaaagaaaataaaaaatttagcataaataccgagaattaattttgggctttcgtttgaaaaaactgcgaattctataatttgattaccataattttgaaaagtgtctactatttacaactaatttatttacgaatagtttcatttttacatatttgagaatttttgagatttataaaaatgaaatttcgaaaatagctgaacttgattataagcttatttaggtctttttatgcattttttgcctattttatttttttcgaagttttttgtccaaaactaataataataaaaattattttacatattttgttttatatttgtttttttgttcgtaatacaataagaaaatcctcgggaaaagtctcggctttcagctgtttcggtcacaagtctcgggaaagtttcgctcccgagcatcactaatggggttgattcaattctgatgatcccctattttcttttcactgcaaagaattgttgttttaatttttaattacattttttgtattttaaataaattttttgttaaataaattcttttttcagtgccttcttgggcccaaattgatgaaatgtattcaaaattgttcggcttgccgataaaaaaggagcagcagacagttgatgaattgactgaagcgaatgttcccaaagaattggaccaaaatttaatatttgaaatcgaagcgtcggtatttgcaaacgaaattgaggaaatattaaaaaatgctagcatcaaaagcttaaccgaagagcaaaataaaattttagagaaaaaacgcaaaaatttcaaagagttttttggggttgccgaagagaagcgccgtcccacaatgagcagagtttgcgaactttggaaatttggtcgccaaattggcgatgagttcggtgggattaaaacgttttttacttcatttttttaa

SEQ ID NO: 60508 - DNA, 585 bp, Heterodera glycines
atgcttggcccggcacttttcaatattcgttttccgctcgtccaaaaaatggaattttcggagaaaattggtaaaaaaaatataaattaattttatttattttttctaaatctttcagttcctttcggcgtgttaacaatggaagaagtgatcggcattgaaaagtaccacagtcctccaaattttcgtgggatgtccaacggcatattgtacccattgcaatttccatgtcatggacgcatttcacctcgtggcacaattctggtgcacattgacaaattgtccgaatttgcgggagaatctgtggggagtcgccgatacagcataattgagccaataatgggatttggatggagaattgtggcgcaaataagaataaatataaaaaccaaagaaaaatttttgggcttttgtcttttctctctggtgccaaaaggaggttaaaaaaaagcattattaaaattgcctaatgattgttttatttgttttaagattcgtgcctttgctcggcaacctttcgaattgtcacacaaaatgccgaagctgagaattgcattgggaaatttaatgacatcatttttaaca

SEQ ID NO: 60509 - DNA, 583 bp, Heterodera glycines
atgagcataaaaaatgatgtcgaaaattgttcatcgtttattttgcaacacgtcactggtcatttctcaaagaataatgtcgaatggtggtacgatttaaaaaagagaatttttgtgcaaactttgccagaaaaaatgacaaaaattggcaaaattatcaatttggaatttgtgataaaggcttacacatgtgaaatagaaggtggacttaatgctaaaatgacttttattacggattttcttctgaaggatgaaatggtaattttggtaaaattatttatttatttttaatattcggctttttagacatttaaatccgtcatgccaataaaaatatgccattcacacaaattgaatggagaagcaagcaatcttgaacagctaacggatcatgttatacacattgtcatttaattacagacatataagtatgaatcagacaaattatttaggtcaaagagattattatttttgttggatgatttatgtcaataatttcgtttgcaattttgatgatttttaaagaaatgttgaaaattgtcaatttatgtgtttatcggaatataaaaaacaaagaaataaa

SEQ ID NO: 60510 - DNA, 234 bp, Heterodera glycines
atgcgctcccttctgttcctcgctttcgtggcacttttcgtcgtcaaatgttcggccgatgagtcaatgcaaaatgatgaaaatgatgagcaatcccctcccggaccaccgccaagcaatgaaatgtcggaagaatcaaacgatcgccgcaagcgaagccctttcttcaactttttcgggggcttcaaaaagggaggacgaggaggacggccaaaaggggaaaagccgaacgga

SEQ ID NO: 60511 - DNA, 315 bp, Heterodera glycines
atgcgcaggcgcagcattcgttccggcatcgcgtctggggaaataagtcgggtgtcgccctttctgaacgacattgttcacgtgaacaagttgggccatgaggagatgatgaacagcagcaaattctcgtccgctgcctccgtccgttctgccaatgtgccgcgtcaacgaatgcgttctcgttccgctggtcgccaatcgatcgctcgactcatcccagcttcaaaaccgaatgttcatatccataaacccgccattccggcttcaagaccgaatgttcagatccataaacccgctccgaaagaacacatttaa

SEQ ID NO: 60512 - DNA, 2766 bp, Heterodera glycines; identical to SEQ ID NO: 6147

SEQ ID NO: 60513 - DNA, 485 bp, Heterodera glycines
atgcaaaatgaagcagtgttattaaatggctctgataaaggaggagcctcatttgagtttgatgacggatcagcgtcatcggacacaactgatgccaatgatgatgaatttgttgtccccaattcgaccgacgaaagtgatgaaacttgttgtgacacctttttcgaatttaacgaagcgcacacttcgtcaagaaaacaaaataaaggaaaagccaaaagaagggaaaaaacggtcaaaggcgttaaggacgacggggaagaggccaattatatggaacggattaagtaatgaataaatatcagagaagtacttggccaaccccaatttcagagagcatcggtcactccaagaattggccaaatttaagggcgacccttttgacgaccccaatgacttccaaacactgtccaatgactgccgcatttcaaattccgtttggaacagactttacaggtcataaaaggaatgaaagtcgtcaataa

SEQ ID NO: 60514 - DNA, 824 bp, Heterodera glycines
tggtgccatcgctcaactgatgctttccaacagtaccacgtttgtcaaggattgctgttggttgatctccaatgtgttggctggtaacacctcgcaaatccaagtgatctctcaatttttggttcccctttttaattcaaacatttctgttttcttaggatgtcattgatgcgcaattgttgccaattttgctcagtgttttgcaaaagggtgaacatcgtttgcagaatgaggctggtgagtgaatttgtctaagttcgctttcgagttttaattcgaatttccccctttgggttgggcaatttcgaatctgtgctgtggtggaacagcgaatcaaatcatcgaaatttgtcgtgtcaagaacggagtggaggcaatttgcgactgtctgatcacaaagaacaacgaattggttgctgtttttcattatcaatttcaatattttccattttttagactttgaatatgctcgaatctctccgttcggtgctgcgcactgttgcacaaacgtagggcctaaacttgcatcaatttgactgtttgttctcattccccgctttttagtgatcctgaaaatttggaccgaattcgcgaccgtgtcgaggaatgcgatggggtggaccatttggagacattgcaacaacatgagtctgaggccagtgttttgtctgtcatattgtatatatttttttttccaatttttagcaaatatattcgaatgtgttcaagataatcgaagaattcttctcggaggatgaaaacgagggcttggaaatgaagggcgatgttcagccacaaaaccaggccatccagcagaagcccct

SEQ ID NO: 60515 - DNA, 931 bp, Heterodera glycines
atgaaaagagaaaatggtaaataaacaaaaaaaaatttttttaattttaaatatttttaaatgaaaaattcatattattgtttttttaataaaaaattattttttttaatattttcacataactatttacttgaaaaaattcacccgttttaaaaacttaaaatttaataataaaaaataaaaaaaatttttggtatttaaaaaagtttaaatttttcaaagagaaaatatataaaattttaagtcattagaaggattttatacttttaaaataattaagcaaaaataaataaacattttcaaaataaaatttactaaacttttttaattttaggattattgaccagaaatttttcaaatgaacaaaagaaggaaataatccatcgatttgaaataataaaagaagaatttatgcgcaaattcaaaataaaaaccaatgccaaaattagcgataaaattgcgcgaaaagttggcgtcaatttggagacaattaatcgttggaagaggtcatttggctcaactggtaaaaaataataatcaaaataaaactaaatcttttgtttttaaaagatttttgcatagctttttggggataaatgtttaatttttacagcaaagccaatctatacgagcgcagaacaattggaatttatccgaaaatatgatgcactgaaaattcaaaacccactgatcagcgatcagaacaccgcccaaatgatcggaacaaacgcaataagcataaaaagatggaagaagaagtttggtatcgcatatccttgcaaaagagacggatcacgtgaattgattgggcagtgatcagcaatggcagttgcttgaacatcacagaagcggaagagtgatcggtggcttctgatcagaattggtctgctgacctggtctgagtgatctgcttaatttaatatgttcgtaa

SEQ ID NO: 60516 - DNA, 1003 bp, Heterodera glycines
gaaaattataataaaatggacaatgcctcgggcaccgatttgctaattggctatttgtcccttttcgtctcgtgtctttccttcggctttctctttgtgccattgaaacgttgcgacaccaaagatggtctcaaactgaaacaataatttcaaattgggcttttccccccaagggcttttcgtccaatgggtccaatgcgccgtcgtttttatggccggactgatcataaacatcgcccgaggccttcccccgttcaatctgatcgctgccattggcggttttctttatgccaccggtgaattaaagcatttaaaattgattgggttttaattgtctcattaatatttgaatttgttttaattatcctgaagatgccactcatttaacacattaattgttcaccttaatctgtcattaacaaatgttcctggggcgaaaaagagcggtcccttcgattgccatccttttccccgtcgttctcctctgatcagtcttgggatttggccaatccaattttgcttgagagggacccccctcaggcgctcctctgttccagaggacgttttgtgttgagccctcagttgtacctctttattttacccatataaaggactattgtttgaaggtacaccatttgtattgggaatttcaactgggaaaagggccccccgttatatcactgacattaatcctttaaggaaatataattaacaatttaaatttcgttttaattgtcccttaaggaaatgttgcctctgtgccgattatcgccgaaatgggcattggccttggcatgttcatttggggctcttttcaggttcatagattgggttcaaattatcaaatggcacttcattcatttcatgcagataatcgtcggatggtccgtggccaaattcggtctgttcggcaccaaaccgcagcaaatcaaaagtccgctgatcaattatttgggcgttctgatcactctgatcagtggagtgatgttcgtcttcgtttaca

SEQ ID NO: 60517 - DNA, 247 bp, Heterodera glycines
ggcacccccacaaagtgtccaagccacgaaatgtccaaaagagtaaaaacccacgaaatgtccaaaatttttcaaaatttataaaaacaaaatgagtctaatttaggatttttagggttttcggggtcgctgaatacgaatataccctttatattaccccttgcctaaccttaggcccatctgaataataaaaaactcaaattcgagacttggacatttcgtgggctggacattttgtgggtcagcg

SEQ ID NO: 60518 - DNA, 486 bp, Heterodera glycines
atgttaaatttggacccgaaagaacgaatgactgccaaaggggtggttgactatttggacgggaaatgtaagccaaaatattacgagaaaacagctgagaaagtcgcaatgtttggtaatgtgtcggtagaagaattgcggaaattaacggaaacagaaggatttacggaaggatttaacgcatttcttaaaggtccggaaaaagaatggaaaaacgaaatggagaaaaaggaagccaacgagaaaaaacacgaggaacaaataaagaaaatggaacaacagaaagcattaaaggaaaaggaaaaaaagaaaacggaaaaggagaaaaagaaaatggaaaagaaaaaggaagaagccattgaaaatttgaaagagaaggctttgatgaaaaaaaagaatatcaaggaacatttggccaatgctttgaaaagtattgccggcttattggaagagttgaaacaacgaagcgcaatttgcgaagattaa

SEQ ID NO: 60519 - DNA, 557 bp, Heterodera glycines
aaatatgccgccaaacaagcccacgtggagttagcggagcgaatgcgcaagcgtgaccccggctccgccccgcgtctcggcgaccgcgtgccctacgtcattgtcaaccgcggcggcggcgccaatacgcccgcctatgagaaggcggaagacccgatttttgtgctccaaaacaacatccccatcgactttgactactatttggagcaccaactggtcaaaccgttggcacgtattttggacccggtgatgggcgaccaggcggaaaagctgttgatcagtgcgttttccatttattccttcggcaactgactctttttacaggcggcgaacacacaaagaaaaaggcgcggacaaaactgaagagtgggatgatggcgggctatttctccaaaaagtccgtctgtttggggtgcaaaacgcgcatggacttcgaggaggaggcggcacccgccacatgcgagcagtgcaggccgcggatcgacaaaatctatttggaacaggcgagaagaccaattagttttgtatttgttattccatttgcacttaattcataa

SEQ ID NO: 60520 - DNA, 1083 bp, Heterodera glycines
tttaaggtgtaattgagtgcctgaaaatcatgacgcgagagaagtgcgaaagggtggccaaatttgcgtttgattatgcgactaaacatggccgcaaaaaggtcaccgccgttcagtgagtgtttttcaatgaatgcttttctcgggagcaggacaaaacgtcgccagccgaaacgtcgccgcaaaattttttaaaattttataaacaaaattatcaaaaaatttttagttacctagcctggttcggaaaaaattctagaaaaattcgaaaaacttttttattaagaaattcaaggaaaaaattttatttttttaagtttttttttgattttttttttcttagaaatcaacaatttagtttttattaacacttagattttcaaaaaagctaaaataactttaaattttattaaaatttttaatttttttttgcggcgacgttttggggtttacccgcttttctcactcatttttcatattcatttcactcatagcaaagcgaacataatgaaattgggcgacggactctttttgaatgtgtgcacggagacgtcgaaactgtacccaaaaattgagataagttaataatgggaaaagggggttaattgtccatttattgaaattctgattttgaagactatcaaattcctttttcaatttgaacaaatgatcattgacaactgttgcatgcagttggtcgcccatcctgaacagttcgacgtgatggtaatgcccaatttgtatggcaacattgtcgacaacttggccgccggtttggtcggcggtgccggcgtggtcaatggggaatcagtgggctctgactacgtcatttttgagcccggatcacgacacacatacaaagaggcgtttggaaggtgtgtgaaattgttgacccatcctttgattcagattcgtaatttaattttatttttaggcaaattgccaacccaaccgcaatgattttgtgctgtgccaacatgctcaaccatctccacttggatcagtacggctcggcactgcgagaatccgtcgagaaagtgatcagagacgggaaagtgcgcaccagggacttgggaggtgtgt

SEQ ID NO: 60521 - DNA, 466 bp, Heterodera glycines
atgtcggacaaaatcccgcacaatgacgcgttggacttggccagacagattgccccggacctgacaaataatctctttgacgatgttagcgaagccaatcaaattctcaattcaatcccaaaggacgaattgcagaagctcaacccagaacaaaagtggatgaagctatttgaagccgatttaccgcacttgtacaagttggtcagcattgtactttccgtgccggtctcaaatgcatctgtcgagagagtgttttcgctttgcggctcacaatggactgatgttcgaaattcgttgaaagtcgaaaccgtgaaggctctgctccagacgaaaataaattttgatctcacttgcccagaaatgtatcagatgctcatttccaatcacaaactgttggatcagatcggtggatgggacaaatactttgaatgactcttttttgaaaaaaacaatattattttcaata

SEQ ID NO: 60522 - DNA, 71 bp, Heterodera glycines
aacttcacaatcatggtatcattcgaaagccatagatgtttagaagatatttataatcgatttctcagtga

SEQ ID NO: 60523 - DNA, 3400 bp, Heterodera glycines
atagagagagacatttatgtggacaacataatacttggtttagaaagggctgaagaaattaagtcatattattctcttctcaaatagattttttctaatgcggatatgaatgtgagagaatttgtgtccaactgtaccaaggaaatagagagattaccaagtgaagaccaagtggtaaaaggaggagttaaattgttaggaataaaatgggacatcaacaatgacactctggtcatacattttcccgtgtttaagtctgagaagttgacaagaaggaaggtcttggcacaaattgctaaaccttttgatccgaacggatttgcggccccagcaattttgccagcaaaattatttcggcaaagggtagaaacgaataaaaagctcaaatgggacacctcgttgtctaatgaagagctaaatgaatggataacactgatgaaagactgggaaaatcagtcaataacagtaccaaggaatatcattccgaaagaaatgattaaaaattgtcagtgtgaattgcatgcgttctcagacgcatcacataaggccatgggaacggcaatatatttgagagtcattaatccaaatcaaataaatgccaatctcatatttggtaagagccttgtggttccagcaataattccatcaaagtatcggaccattccgattttggaattacacgcaatgcttttgacttcgaaatggttaaattatgtcaaaggtcaaatagaaaaatcactgaaaattgagactgtacagttgtggacggattccacggatgtattagattttctgaatagcaacaggaaattagaaagatacattaaaaatcgggtagagaaaatgagacaatggaatgtcaaacatattgagggtcaatcaaatccggcagacgttgcctctcgtggcacaagtccggaagatttacaatgaattatggtggaaaggaccgccgtttataagtctaaaaaatacacagtggccacaaacaatcagggaatttgatccaaatgtatgggcagatcaaaatcaagaggtcactgtttgtgaattgacgaatccggcaagggaaagaaaccaaaggaaattgggttcctttctgacagtttatgtgaaccacttctcaaagtggaagaggattagaaatacagtggcgtatatttggcgaatttacaagggacctctccaatttgtacaacgaattgagccaattcaggaacgtaaattgctcaaggcaaggagtgaaactataaaaagaattaattcttattggctttagagagattcatgaggcgtagaagagtgccaaaaatgataatttctgacaatgcttgccaatttgttctttctcataagatattggctaaaattactgaggcacattggagaaaaaataaggtttgggggcaaattcagaccagacaaagggaattagaagaaaaggagaaatggtcaatgatcatgaacgaaagagaggtacaagagcgtacagctaataagggtatcacatggcaatttgcctctccattagcgccttggcgctcgggattttttgagcgactaatcggtctagtcaaacaccatttataccgagggttaggtaaaaagttattggattatgaagaattattgacttatcttatccaaatagaaaggatagtcaatgaaaggccaattacatacattgagaatgatgaaattatggagcccttgtgcccaatgcatattctcaatgcatcagaaggggaaccatttgagtatcagcgtgacactaatgaaacagaggatacagacgatttagatgctcaaattaaccaaacaaaacgggatgaactcctcgaagttcacaagaaaacaatgtataagagtaccaaattctgggaagtctttagggatgactatttattggcattaagggaacaggaaaaagccaaaaatgtggatgaacaaaggtttccaaaaataggacaagtggtactaatcaatgaccaaaaaccgtgtccccggaataaatggaaattaggtaaaatagaaggtataatcaataaccgaactgccaaattaaaaatgcccgacggaaaaataatggaaagagcaacgattttattatacccactggaaatagagaccctcgagtctgaccctaatcccattaatgaaatttcagcattaacaatggaggacacagttagtttggccagcatggaggaagagtggtacgaaattgatgaagggcaaccgaccgaacaacccagctcaacaacaacaccaactgcacatctggaggacaacatttaccatgacgacgaaccgtcgttgaaggtcatcaaggccccaattttgatattggggcaaggggaagaggacggtggtgcgctccgcaattgtctcatcaatgcggacgcacgacaattttgccattttcccgaagagtgggacgcgcacctctttacagaggaattacacattgaaggtgtacagtcaattattgtctggaggaagggagtgacgttggacgatttggggtttatgcaaactttggcaacggctcaacaattgtacagcgacagattgttgttttggatctcatccataccgcagaccgaattgtcaccaaatcatctccgaatgcttcaccattggcacatcattgacgaaagagagccgacttcggacatgattctcctcatgatgcagatgggcatggaaataattaagaggaaggaaaaaccagcaaagcgcgttcgtccggacaaatggcaaagagaatgggacgcgaatcggaaaaaatttcatcaaggcacattccaacaacaacaaccacaacaacagcagcctttaccgattcaagtgccaaaggcattttggggtgaaaggccaatgatgcccaaacgggttgaaaggacccctggtcaatatcagcctctcacggctgttaaaagtgtggcggatgacgtatgggacaaacccccataccctaaatgggttgaaattgaggggagaggtggctacttcttctttcgccatgtgtacgcgttcagcaacttcttctccgtggagttcagagtggacaacaacgtgtttaggtgctcggagcaattttacacatggagaaaggcgttggaattccgaatgccaaacctggctcgacaaatactacggggagaattgccaccgattaccatgaagagtgccaccgatcgagaagtgcatcaatgggcgctgcgggaacctgatccaattccatacaatcaaagccactggaaccagctaagggtggaggtgatgataatcgccctgagagccaagtttggccagaatagtgggctaaagcaaatgcttgtggacaccgggtacgagccgatttttgaagcctcgtcttctttgagttgggggatcg

SEQ ID NO: 60524 - DNA, 1185 bp, Heterodera glycines
atgaaaatattattaatatttttattattatgcgcattaatattcaaaaaagcaattaaccaaattgaggctggcaaaataatccaagaaaaaagttttgctgaaatatttggccaaagatgggacgacggagcagaagaaaacatctgtcaaaatgatcaaataattcatggagaaattgctgatcagaataaccaatttggacaaaatgttcgacaatttgatcagatttttgatgaaaatgtgaaagtgaaagaagaggagagtgaagaaatgtccacagattatgatgaattgggcgaccaattgccaatgccaacaaataatggacaaagttgtgacaatttttcaaatgcaattgataaaaagaaaagagaaactgtggaaaaatttcataatattaaggagaaagttaagcaaatgggaaagaaatattcaagaaaagaatgggtgaaaattgaaagaaaaattgcaaaaaaattgggcgtcagtcaagagaaaatttacaaatggaaaagagaatttggaatgatgaagaacaaaaattattcagttgaagaaaaaagaataatgttaaagcaatttgatcaaatatatggcaaattaaaaacgaaatttaatgaaaaattggaaggaaaaaggacaaaatgccaaaaaataatagcaaaacatttgggcatacatatcaaaacaattttttattggaagaaacaattaaaagttggaaaaatggtgaaaaagcaaaaaactgatgatgaaaaaagagaaattgttgaaaaatattttaaaacaaaaattaaatttatgcaaaatgagaaacattcgctgaaggaatggaaagaatttaatgcaaaaattaaacaaatgtttggaatttattatagaacaattgaaaaatgggacaagaaaattggcttaaatcaaattctttcaaagggtgaaatttttaaacaaattgttatttattaattaaatttaaaaatttttattatttaatatattacagggcagaagcattatacatttgcggaaaaaacggaaaaaataaaacaatattatcaattgaaaaaccaaaacccaaagctcaacgatcgccaaattgcggaaattttaaatattacaaaaagatctttagaaagatataaatctgaattcaagagaaaaagtgaaggtgtcacggattga

SEQ ID NO: 60525 - DNA, 1100 bp, Heterodera glycines
  unsure (1)..(1100): unsure at all n locations
atntgggatgtttttgtccgtgaaatntggcccatttttgcgccaaacattcgccatttgttcttttccaatgcttatcatttggacaattttcgtcgtcttatttcgccgacaattctcaccgatctgaacccttcaatgtgttctggtgatctgttccccgatggaattgctgatgatgggccaaatgcaactgctggccaatcgttgtccaaatggttgcacaccccgacaaaagatggaaagccgaagcgattgacttgctatgattatccgtcaaaatccagtgaatgggtcaacactttcaaggaggccagtccccacattggcacaaaactatttggattaattgccatttgattttgtttctcaattgtttaggcatttcttagtgccaccacttctgccagctacaaaattcaacttgaactgcaacaattaatgcctgagccatttgaattggtaaacgaaaggaccaaagaaaagctaacactggagaatgtgccgcgcgaagtttacaattgggtgatgaagcgatgccaaattggggagacggcgtcggttcagtgggaggacgaaaagacgaacaatttgaacattgtcaacttttggctttacaatgccaaaaattggcttgggtaaacaacaaaatgcatttccttttgtttaaaaattattcaaatttcgcttaattaaggtcattgtctccgtcgcaagtagtagaagaaaaagcgggataaaacggcgaaaagtgcgcctaattattggtgtgtttcagagcactttctgaaaaaatatttatgaattaattttgcaaaaaattgaaaaagtacagaaaatcagaaaatctaaaaaatttttaacaaggcctagtaagcgggaaaaaagtataaattaggtatggttctcagctgttaccctgcaaaatctgggatttttctgatcactactcgtaaaactatgagtgagtgaaatttcagtaaaaagttaagcctaaacttttcgcatatttaaaaagcaattaaaaaatttttaagaattttattcatccctttttggtattaaaagcatcagagtgccttaattaacctgtaaataaa

SEQ ID NO: 60526 - DNA, 1041 bp, Heterodera glycines
atggaggagaagaagaagaagcgaagacagagaatgcggagaaaaggagagaaattcgaaagatccgttgaaaaaggaaatgtttggcgttgtgtcgacggcggtcatttggtcgtctgtccatcggtttgttgtcgttgcgttgcgacaccccccccccattaattcacaaatccattctctcattgaactgccaaacacagcagaagccaaacattactcttattcaccattagctaagttaactttgaataaaggtcatttattcattttttcaattgctttccgagattcccggtcacggtctttccctcatccccacaaaaaaaggggaccgggagtccggtaaaattccattgtaatcctggtctcgtccagctctatatccttgtttgcccttaatgttatgctaattacctcttcccatcccactaattaatgccatttcccttgcctccacctcgtccaaattaatctcgtttgcttttttggttttatctttttgttgcataatgcgtttaatcatttcaacaaataaatgaataatcgtcgcttcttctttcccacaaaaacaacctgtccaacattacaacataagcccatctcgccgactttttcttattctttgcatttttatttatatttttagtattaaagaaagttttttgaggcaacaaatttttttttgattatgcgcaattaatttcaaaactgaattcgttggcatttgggtgatttccaattcaattttgtcgtttgcctctttctattccattccccccccccccccaatttcgcctttcgccgtttctttggtcatccgtcgttcgtccatttcactctccgaaacgccatatttccaatttctctgcttctcccattttcttcttttcgcttcatttgttccattatatacaaatccataagaagccaggaggctgatgctggcgattacgagcattgctccgatgatggacgacgggggggcgaagacgagttgagggggggaggaaacgcacaaaaagttgaggcttaaataaa

SEQ ID NO: 60527 - DNA, 1068 bp, Heterodera glycines
atggtggtgttaaatcaaatctttgcggtgtttgtggtgtcgtttttgagtgcattttttaatggtattaaaaaataatttaaataatattaattagggatgcgaaattttataaaaagatattttttggttaaatttccaaaaaatacatttcaaatttgtcattttaaaactcattgtaaaaggggacatgaaattggggagatttcaataaaaaactaagctttcaaaattctaaaaagtaaaaagggaaatttaagcttttaaaaaaaacaatttttgctttcgtgcaaaacttatttcttttttttttttgtagaaatgaaaatttttgcctataaattaaaattggaatttttgattcaaattttgccagctttgtgaattaacaaacacaaaaattgtgattaatcatcgattaattccaaattaggtggcgtaaattcgactagtggaagaagtgtcttcctctcaaatgttcaaaatccgccggcaaacattccgaagaattcaaatgccaatttgctgcagcaaattggcgtgactaattatcaacagcagcagcggcagaacgccaacaaaacattgaagggtaattaataaggatgccaaatttaaaaatagcttagataaacatatttttttgcgttccatttcaggtaaatcttatgggaatattcaaaaagatttttataagtttcaaagttttctgtgaattactaattttttcaaaaattttactaaaaaatcactggaaaattttaaaaatttttaggaaaaaaatttctaatcttgctgaaaaattctgcttgaaaatttaaaaaaaaaatttcgtgcggcggggaaacgagctgatcccgtgctcgagaattttcttgctatttgggtctcgatcttgaatctcggagccagcattcgtctgtggggttcatattttaaagtgaaaaaagccttctttcaatatgtttagaaatttttttttctaaccctacctactcaaaaatccgttgaaaaaaaattgttctagtgaaaatttttaaaggagattttgcgtatttttagaataaa

SEQ ID NO: 60528 - DNA, 1464 bp, Heterodera glycines
ttagcaatgcaaatgtccaaaattgggtccgacatttggcttagccgttgggcttccgccgtttcaccgctgcccaatgggtccgagttcactttccctgcggctgattggaggtgcatctccgatcgctttttccttcgcttgataatctgaatcatttccgtcccttttagttttcctcttttctcgcgtcccattcaaaaaatggtcccatcaacgaatgctcagcaggaggaaaccaatttttatcttttcgtatacattggaatcgctgctctgaacaccatttgcactctgatcagggcctttttgtatgccttcggttgcattttggcagctaagcaaatgcacgaacgaattctccaccgaatacttaatgtatttaattgactaattagttgtccctatcaaaacatccccacaggccacgctgacttggtgggaccggacgccctgtggccgtgtgaccaatcggtgcgttttcggcatttcgcttcccaatcagtcagtcatttttgtccttttttcgactgtccaccgacgtgaaccgtgttgacgatgcgttacccttccaactgaacattctactcgcctccctcttccccctcgtctcctcccttttggtcacggtcgttgctcttccgctgctcagtccctttgtgctgcttctgaccgtcgcttatttcttcctccaggcacattcccttccatccaatcattcccatttgtgctgtttagcgatactatcgaaggactacggtcgaattggtacgtacagtactccatttgtgtgcaaagggagtcaaaacgggggataggaggggggggggggggggtggaaaggtcgagatggtagcacattctcctttgatttacttagcgtcgtatcgcagcccttagcctgtcgcccctgtacagtcatttggccgagactgtgtccggcctcgtgtccatccgcgccttccgaatcactcaccggcatgatcaattcaatccttgccgtccattgtcattaattaattggtttgtccattcggcagattctcctcgctgatgtgccaccgtttggagggcaatgtccgtgctctcttctctcaattagcttgttaccaatggttggctgttcgcacccaaatgctcggtgttgccattgtctctgtggtcgctttcgccagtgttttcgatgttcatttcttccatttggctgaccccggtgggtccaattggtctctcttttccagctccaaactcattaaggcttaattggcctttccattacttacgctctttcatttaccgcccttttcaacggcgctttaaacacttttgttgaaacggaaaaaggtgggaattgtaattacaactgttgaagcgcattaattgccatttcctgggcttttaattcagaattggtttctgtggaacgaatttgcgattatttggccaatgttccggaagaaattg

SEQ ID NO: 60529 - DNA, 999 bp, Heterodera glycines
atgccctctaaaaaaacatcttgcaccggcgaattctgcttccgagcgttcatcaaatcgaaacttggccatttgaatgcttatcggacggtgagagagagcgcagcagcaacaccaattgcccccccccccccaccttctttttcatgtgcttccttcccttggagattggctgcgcctctttttcgcgcgattcgaaattggcggaggaattggagccgacggggtgcgcaaagttcaattcggaagacttgcaagtggaagtttgcttcacggtaatctatcaaatcatatggcaaccaattaactaattgtgtttatgcaattgataatttagacaaacgacaccgaagccattgaacgtgccaaagaaagtcggcaaaatggggaaagaaaagcagggaaaatgaggccaaaaaatgggagggaaagggtaaagggcaaagggacgagagaaaaggaggaacgggaaaagacaaaggaagaagatgagacggaaggggaagaagcgaaagacaagggacacaagggcgtgagagagcagggggaagacggagggagcaggaggagagagttacaggaagacgaggagggagaggaagagacagcggaaaaggaggagacggagcaggaggaggaggcgcaggaagagatggagaacggacgcggggacagcgagacgaagcagcaacagcaacacgtcatcttcgaacggccgacattggcaccggcggtcactgagagtaataacaccgcgtgggtttttttttactaaaattttaattttcctaaggctttttccttttccgcaaaaagctttttctatcacacaggcttatctttgtctttcttcttctcatcctcctcattttgttgagtggcgccgtgtggaagttgcaactccacaaaaaattgtttcgcgcgagttacgatacggtagcgggcggatgagatatacggtagggacagcaaatggaagcggaaagaagcattaataaa

SEQ ID NO: 60530 - DNA, 1141 bp, Heterodera glycines
atggaacgaattgaaatgtggaaagtgatagcatatgccaaacacagtgagtgaagagggacacgcacggcacacggaggcattggcttacaattagctaaaaactaaaaagggttgggcgattcgaaaagacagaagtttctggcacccccccccccttatcgcataatcgtatacctttcgtattgacattttttaaatttattttcccgttttagggtatgagaatcggccgtttaatttgactgttttgatggacggtgaaattacggacgacgaaaaggcgaacacttggactgatgcctgctcgtcaacatttggtaggttttatttttaatcattcgtttgaataaatcactcattttcagtgtttttgtctctactccttcccccctttcttaggtggtcaaattccccaagagaaacttttgcgacttttctccgccgcttccctcggcgccgtcgtcgcgcgtcactgcgacgatggcgaagtgttgggcacggcccttttccatcggaagacttattcgagttggactggacgggtacaaatgcaacactaacgattgtttgaatccatcatctgttgttttttgagtttttgtttgtggaccgtttgctggtaaagccggaatatcgacgcaaaggcattgggacggcaattatagccgaattagccatcgtaacattttaattttcaatttaacttttttttcttttttggtccctggctacggggaattttgtgactatgttactttttagcattttaaatcgactgtcttttcccgacagattggccttcggaaaggttgccgacggatcggatttgccgcgcaacaaaaagggagcggcgccgaaccatttttaagagctgtatgaaacacataaatatttaaaaagccctttcatatttcagttgaattgtgtgaatatgacagcgaaagagaaactgctcactttccgatggaatggtcaaattgaaaaagaaaagggggagaagagaagggaacttagcaaatgagagatggacggccaaagaaaacgtaaccataatattgctcacaaaaccaaaattgcatttgttgtatatacagtatatatggtggtattttttgatacagtaaacacactaattaaa

SEQ ID NO: 60531 - DNA, 1276 bp, Heterodera glycines
gctgtcgtcgattgtttttctttttgcgtttgcccttgcactgtttggtcaattttcgggaacattacaacgctttttacctgctgaacagcatcaatctgtacgtgtgttttgtcagtgcttttccgatttgattgtccattaaaaattacttattaaccgatcatttatttaccaataaaataagaccaaatattttactattcattcaccttttaagcatggtttgcatttatgcggtgaaaagcagccgaattcgaagtttgcgcgtatgtttttcactgaaaatttgggtaatttcatgaaaaacaatgccctgtcagctgctcacttttttgatgctggcgatgttcatctacgacctgttcatggtgttcggcacaacactgctcacaaccgatgggtgttcggtgatgatggaggtaaaaacggcagaatttcaaccgaaaaaacatcaattcgccacgtctaaagccttaattttatttgggacggcgagacttatttattcctttcgcgtggcggtgaccatttttttatttatccgaattttgtatgtcttttaaacgatcgtccggaattttcgtacacgctgcataatgagagacttgtaaataataattttcatttctttttcaggttgtcaccggagtcgactgtcagcagaagagagccgactcggcttcgggcactggaaaaaactaccagccgattgcgccgattgaccttaaggaagtgccggaaaaggtacggcatcacatatccgtccatcgtctcaatggccgttcttttggcagattcctctgcttttttacgtgccaatgtttgccgatccgatggggcgttgtttcgacgtcgaagtggaacgcgagtacagacgcgtgatgctcggccttggcgacgtaatcattcccggtcagagtgcactcattcccatctgatccgaccgcaaatcacctttcaggctatctgatcgccttctgtttctacgtggacgtggtcaaacggagtcgcttctacgcctacgggtccatttcgatcattggtaccttttataaaaaccaaaaatgatttgactatcctcccttattgggggtcacttttggtaaaatatccaaattaattcgatttgatcctttcatttttgtcactcatttttaggctattccctcggaatgttcgccacttttgtcgcccttttgctgatggagacgggtcaacccgctcttctctatttggtcccttttacgcttggtcccattttcgcttgggcctt

SEQ ID NO: 60532 - DNA, 1184 bp, Heterodera glycines
atggcatttgagacaaatgagttggatggaaatcaaaccctttattggtcggctcattcggctgcgcaggttggtcctcgtcactgagtgccgcccgactcgaacccaatccatcggacacggaaacgtccaacggcacgcgttttgcgagcattgctttggactcgaaagcagcccaaagagagcctaggaatttgagacacaaattggaaaatgataattacaagcgggttttcagacaaatttttattttgacaatttgtctctaatgagtgagccaaaataaacacaccgacaagaattgatccgacggcaaacagccaaagaacgccgaccgccgggtccattggccacgccgtttggggacggtaaaagcgaagctcagtggaagacgaattgagtagtaaaggctgaattaattaattcatttataatttgaatttctatttacttcgatttcctgtcgaaatgtgtcattgtaaacgaaaaacacggacatcgaagtgtcggaatcgttaatttcggcattgtaaaattgcgaaaactgaactttttttaaagtgataaatcagtaaaatattatgtgagtggacacaccaaaaagtcgcgacttctgtatcggttgcgtttacccttttccatcaaaaacagcacatttcgcacaccctttggcttaagacgattcaactgaaagggaaaagccaaacgaattgaaaccgaataacaaaaacaattaacaaatggatgaccgtggcattgaccaccgcctcgccctctttaaatttgcatggcaaaagctccgaggacagagttcgataatcgactggaacgagttcatttttggcgaaattgtgcccattttcaaggcaaatgttcgtgtttaaattgctattccaccagccaatttggacaaaattctttaaaaaaaaattattttagaaacagcgcgaaaatcacttttgtgtcggccgacgatggcaattgacggctgtgccattgttggaaattgacacagaaatcggagcctccggtgggcaaacttttgctacggacattcaaaaaagcgaagctggagtcgtatttgtagaaagcggaggttggacactgaaaattttagggatttgaaaaagtgaaaaaaggggaaaagtaacaaccaatggaaggaagaggagaaaagaaaggga

SEQ ID NO: 60533 - DNA, 650 bp, Heterodera glycines
atgtccgtgtttttcgtttacaatgacacatttcgacaggaaatcgaagtaaatagaaattcaaattataaatgaattaattaattcagcctttactactcaattcgtcttccactgagcttcgcttttaccgtccccaaacggcgtggccaatggacccggcggtcggcgttctttggctgtttgccgtcggatcaattcttgtcggtgtgtttattttggctcactcattagagacaaattgtcaaaataaaaatttgtctgaaaacccgcttgtaattatcattttccaatttgtgtctcaaattcctaggctctctttgggctgctttcgagtccaaagcaatgctcgcaaaacgcgtgccgttggacgtttccgtgtccgatggattgggttcgagtcgggcggcactcagtgacgaggaccaacctgcgcagccgaatgagccgaccaataaagggtttgatttccatccaactcatttgtctcaaatgccatctttttatggcatattttagccccttgaaacgcacgcaaagtgccgaaattgcccagatgaatgtgtgccaacatttgtccgtcgttttggttgctctcgtcttcatcgtcattgtgctcactctcgcctacttttttcgcaaattcgctg

SEQ ID NO: 60534 - DNA, 263 bp, Heterodera glycines
atgcttggaaaaattcccacggtgtgcaggtcattttgcatgcgatgcgtcacaaattcagcgaccaacatcaggtgggcactttcctcgattggttttgagtttttttttgaattcattgtcaggagttatgtgaccaattgctggcgactgaagacgctttgttggtgcaggcatatgacaaagactcgttctttgctgccggaatggtcgagaacggagtgcgcgaatgggccaaggaaaacgaaggcaaagtgctcaag

SEQ ID NO: 60535 - DNA, 806 bp, Heterodera glycines
atgagcataaaatggttttatttggtctagtatttaccaagatataaactaaaaaaatttataaaatcattggtaaaacatagtgctatcttttatttttgtatttttattttattttggcgttctgtaattgattagtagggcccggatttttatgtgctaaaaatcctgaaatatgtaataaaatatgtgctaaaaaatgctgaaatatgtgctaaaaacccccaaaaatgccaaaatatgtgctaaaatatgtgttaaaaattgaaaaaataagtgtgtttttgcataaaaattcccaaaaatctcattctttatcatttttagcccatacaacgcaaatcaaatacatttcgaagtgtttggggtaaaattgtctttttttgataaatcatttctataaattgaaagttccagcagagaacttcgaaatccaatgacgaattaatgaattcgagatttcattagtttctacaatcgaagaaaacattttttaatttgaaaattatgttaataattaggaaaaaagtcgatttttaggggtgtatttttcaattttcttgtatttttattgcaatttttctcaaaaatgccaaaatatgtgcaaaatatgtgccaaactccaaaatatgtgctaacatattttatgtgacaaaacgccaaaatatgtgtttttatgtttttataagtcgctctaaatcaaaaattgttcggagataatgctatttttgggcttctctcgccataactaagccgcaaaaaaaatatgtaaaaacataaaaatccggtctctagttataaataaa

SEQ ID NO: 60536 - DNA, 139 bp, Heterodera glycines
atggagcggtataaacggcaacaacaacgacaacaacaacaacaacaagctaaagttagtcaagtgcttgaacattgttgcttcccgattccgactgacaacttggcagaagaaacgactaatgccctacgtggacacg

SEQ ID NO: 60537 - DNA, 689 bp, Heterodera glycines
atgatggatgcgacgataattttgaagaagaatgcgccatcatcaacttcgaactcggaaaaacaaaagggaggcatttgtctttggtctgaaggtgggaaatttgatagagaattatgaaaagttgtcaaaggttttcggtacacgcacgaaaaaaacgtccgatggaggtgcactgtgtgtgctgccatgcccgcgtgacaattgcggacaaaagtgacagcagcatgtccggttttctcggacaaaaagaacaatcatttgcctaagcccccgaaacaaaatgtttgggaggcatttaattcattagacaaagaagaatttaggcggaaattcgacggcaaaaaactcgagcgcgtgaaagccgaaccccgaatcaggacaaattgcggctggatggcgaggacatcgtgctatacgacagtcgcactgtcagaattggaacaaagaacgttgtgctcgtttttgggtgcgaacgggttgtctcattaggggccaaagacagaatttatatttaattttttagagtttggacatttgagcaaaaacagtgcaagatggcatttggacgggacaatgatgccgagattcacgatgttattacggatcttggtctgcaggtcgaaggatacgcagaaaaattgaaggactacgaaaacatggaagattcaagcatggctgttgcttaa

SEQ ID NO: 60538 - DNA, 362 bp, Heterodera glycines
atgggggataaaaagagcaaatacggtattgaaataaaaaatttttttaagtggtgctttagtggaagaggatcagaaagtggaagaggaacagaaagtggaagtgaaacgaaagtggaagaggaacagaaagtggaagagaaacagaaagtggaagaggaacagaaagtggaagaggaacagaaagtgaaagagaaagtggaagaggaacagaaagtggaagaggaacagaaagtggaagaggaacagaaagtggaagagaaacagaaagtggaagagaaagtggaagaggaacagaaagtggaagaggaccagaaagtggaagagaaacagaaagtggaagaggaacagaaagtggaaga

SEQ ID NO: 60539 - DNA, 663 bp, Heterodera glycines
atgtcagaatttctcattttccttttgggtttctcctttgcaatgcttctcatgttgtgtttgctggtttcgctggtgctctttgttctttatacaacatggtattattggacaaaagaagaacaacaagaagaatgtgatgattttccagaatacccaccgccttattaatgaaataaattttttgttgaaatgtgtcatgaaaaaacttgggtttaatccataatatctttttaactttttctgttttaacattaccatttcaaatatctaagatttgaaaaatgttcaattcatccttttttgttgatgtgaaagaactagggcgtattccaacaccaaaggggaaatttagtgagaagaaaaatgaaacacaatttatgaaaatatttaggtatattttatgcacttgagttcgctaagctttatcaaacggttggacgtgaaatttctcgtgataaattccgacatatcatgaaaacagggaaaaaacaacacgaattagcattggttttgatggaaaaggctgggataaatacacagcagaaaacttttgggcttaaacacctccaatttgtgcaaaactgggacaaggaattcccagatatatttcgtatcgttgcgtttgatatggtaaacgaacatttccaaaactgtttgtga

SEQ ID NO: 60540 - DNA, 2495 bp, Heterodera glycines
atgtcggaggagggcgaaggctcgtgggtggacatttactcgtttatgggcgccgaagggacggaggagagacacgggacgaccctttggaacatttacgaattggcgaagatacaaagtgccaaattggacggaatgatcaacgaggccatgtgggcggagcacgaggaaaattggaggaataaaacggagaaaaatgggcaaaaaaagaaagggtaaaaaatgggaatgaaaagaaaaacagacatttataagaaaactatcaatgggaatatgaaaatataatatggattaataaaataattaaaaaaatataacacaaaaaaataaaacaattgaaattaaaaaacatttggtattttttaggaaaatccccaaatccatcttgtataattctttgaaatttcattttcatttaatttttaaaatgaattagctaaaaatgtgaaaaatgtaaaagggagcggaaggtcacaaaaagtgattgaatgagtgatttatttgcgatttgcgtttttcgtgtttataaggtatcattaatgaatgaattaattaattggatattacaactcattaattaattaagcaatgaacgagtgctcattgaaggcgctggtccgattggtttgttctgtgccgttcacctgtttttggccggtgccaatgtcactttggtcaatgaccgccccgagctctattcgcgcaaccatatgacctttttggacgcaaaatttatggcacaatttcgctttttcttgggcacaaaatttgatgaaatttacaacaaagaaagggtacggtttacggattacggttactgtaaagagtaaatttaaaaataaaatttgaaagcggacaaaatggttaaaatatttaaattggttaaagaaaatattaaaaattaaaatcagtgaaatgtttaaaacaaaattaatccaacggtaaaacgtaaatttaaaatgccgaaatttaaaagaaaattaaaaaatggataaataatttttgaatttgatttatgaagttatcactacaaaaaatatgatttctttaattcaaaaaagtcaaaattatttaattaaattgaaattaatttttaatgaatttgtttttgtttagtcatttggtcggattaacactttggacggggaagtggggcaacagaatgtgaaagacatcgagcaaattttgaaaatgcgactggtcgaattgaccagttttgtggagagcaaaattgggccggaacagccgaatcggctgaaattgctttatcagacggaacttaaagggattaaacgcgatggcccaatgggtaattgaagaaaaagtattaattaataattaaatttaatgtttttgaaaggaattgaagcgattgttaaagtgtcacccaaattcaatgcaaaagagcaaaaacattttaatagaagaaaagtcgaaataagagcagataacagagggattgacttggaaagtgcggagaagcaaatctttggtcagtcaaatttaaaagggaaaaaattattaaaaatttaagaagaaaaagtcgaaaatgccaaagaaatttatgctgcccgtcgcgcggcggcacttcaccaacagaagcaagctgatcagagtgatctgccatcacaaaagcaagctgatcaggaggatcataatgcggcggttgagcaagttcgcttggaaaaatgggaggggaaagtgcccgaattgcgccatttggcgccaattccctttgacattttgttttgtgccggcggagccaacgatcggattcgcaacaagcttttgggtatgacacgaaattgttgtcattgtttaatttatgtaaaaaattataggaaatccaattcgacgaagcatttcgaagaattacggattggttgtgttccataagggcagcccaaatgagaaagacggaataatggagcagagagtgttcgaccatttgaccggctttttcaaagtcaaaatgagcgattttgagccaattttgcaaaagcaaaatttcgataaatttgtcacaaatcacgggaacattttgccaaaagaattcataaaaaagtatgaaaatttgacgcaactgattgtccgagggctggtcaaggaaaacgaaggcaaatacgaggaggacgaaattcacaaaccgcacacgaaacacatttacaaacagcgtaagtcattagtggggtaattagcgtaattattagtgaagaacccacaaacggactacggtaatatttaaaatgaacgaaatgccaaaaagctgttcaaaccaaatgtttaaaaattggtttttttttattaaaatgggtaattctggatttaatccaagaaaatggccgttttgtgctcgccgacccaaaagaggagcccagtcaaatcgttcgtctgtttgagaatcggccaacacttcacatcgcttcgataacgccgccggcggtggaggaatttgttcgggacataaggcgagagtggctgcgatcggaaaatga

SEQ ID NO: 60541 - DNA, 70 bp, Heterodera glycines
taaaaaagcacatttttctatttttgggttgggcccaaacgaccccggggcccaaaaacgggggcccaaa

SEQ ID NO: 60542 - DNA, 1094 bp, Heterodera glycines
atgcgtagtggaaaaatcgtcagtagaaaatgcgtcagtggaaattttattgtcacaaaaacagagtcccttgctttttcgaggtcactgaccacgatccagtatccattttggcctcttccgaatcccggacctgaattcgaacaaaaagtcgaaagcccaaattttcgatttagcatttttggttaaaaaacgccataaatgatctcttattgaaggattgatgggtttcagtttgtttccgtgtatttaaacctattttgaagaaaagccctaatttcgaaaattttggctttcgactttttgttcgaattcgggttcttgattcgaaattcagaacgaggttcttatagaagtttacttttatattacaatactaatgctacagaactttatactaaaatatttgtatcattgacacattttccactgacgcattttccggtcacggttttaattgggtcgaaagccgaaaccgaacaaaaaacgaaaagattggcatttaacgaagcatttgaatttgactgcttttggaatatatttgactttgcaggaaattctttggctttttttcctacctctgcacttatacgggaatgacccattaattgattaattaactaactaaccattcccattcattaggccgtttgggcgttgaatggtccgcgtacgccttgagggattatcaccagggaaaaataacggagaaggaactgatcgaacggatgagcaaaaaattgaattcaatagaacaaagagtggtgaaaaaagtgcgagaatatgtgacaattgaggacaaagagggcgaaaagacggacaaagcatcaaccattttggacaaggacgaggacaaagtgtacaaagccatttaccatgccaaaaagacgcaatgaatgggcaaaaaatgatcgaccgaccaaagaacgaacagaaaacgaaatgaattttgaaaaaattgaattgagatatgtgattttgttcagagatatgtaaatgcatttttaaattagttggaaagcttaattatttcggaaaattttttaattaaaatttcaaaattaattaattaattaagtaatatttgcttaaaa

SEQ ID NO: 60543 - DNA, 521 bp, Heterodera glycines
gaagccaaagggcacgacagtgacgcggcagtttcagcggtgcaaaatgagtacggaaacaatcggtaaaagtttctgctataactccaaattacaacaaattgggtcacatttgcttcactccctcactttcagtgtcgaaatggaagtgccaaagttcgtggagctgttcattgaacgtgccactgctcccttcttcgtcttccaagttttctgcgtcggtctttggtgtttgggtgagtgagtcaccgccgaccattgcccattaataaacaaattatgcatttatttccttttattagccctaaaattacacttcaaccttttggtgacttaattttttgaaattcagaggacatgtggtacttttcactgctcactctgttcatgttggtcactttcgaggtgcaaaatatgcaattttttaaaattttaattttatttttcaggcgaccattgtaaagcaacagctcaaaaatatgtccgaaattcggttggacttatttgccatttttctttga

SEQ ID NO: 60544 - DNA, 502 bp, Heterodera glycines
atgaaccgacggtaaggaatttaaaaaacaaattcatttaactaaactgttttccccgcattctatgttgggtttgtaacgatgtttggatggacattctaccagtttttaaccgtcttcaactcggcctcaaattggcacttctttcgccacgtttcgatgttttagtggacaaacattttgatggcaaaagcgaactgacaatttggagacatatcaatattctaaaaggcgctggaccagaaccagaattatctgtacggattgatcgcaaaaccatggtttccattgcccgaccgtccgctgcccaccaaaatccgcattaaggacattcatatcgggtaatttaaaattcaaataattattaaattacaaagcattcctttccaggtacactgaccattccgtcatcacagcaagctacataattcgacttctatcaacagaaattgacccagttgaattgatgaaccgaatggaccaacgaaatgctgacatttga

SEQ ID NO: 60545 - DNA, 321 bp, Heterodera glycines
tttttgggccccggggtcgtttgggccccaacccaaaaatcggaaaatgtgcttttttaaaaattaagaatctaaaaactaagcctgagggatccctcgccacttggcataagttaggtttaattaacactcgctcattttttacaattttacttattccaaatcctattattttttaatagttaaccaatttgatgtacattctgatttggatatttttcagaaatggcttacccaattgcaaccaaaaaacaaaaagtaaaattgtcttacgaaggccacctttacaccttcgctaaaatgagttctgatgggatgaca

SEQ ID NO: 60546 - DNA, 340 bp, Heterodera glycines
  unsure (1)..(340): unsure at all n locations
atgngcagcagtgaaagccgtgccaaaggcggcggagaatgctcagaagggaccgtcgagtgcggaagtggtggcggaggaaaacaacttggancactgaggcggtcgacgacttgggggcggaagagtcggactttgaccaattggcagaggacgaactgctcgaggaggacgccatgggcggcgaggcgaacgaattggagggcatgggggaagagacggagatggacagccaaatggctctttgatggacaattgaggcaaattggacaaatggcaaacggaaaaaacgggacaaatgacacaaaaatataatttttatcatagaaattaaagaata

SEQ ID NO: 60547 - DNA, 758 bp, Heterodera glycines
atgccgtgcaacttcactccaacattcccgtttgggcagttcaatatattacagtaagaaactcaaacaataccgtatatagaaaaaacgaattcatattaaaaatgccaaggtgacgcccaaatgttatcaaatattttgccatttcatgagaaaaatgttacataatgtgaaaaagttttaaaattttaatttattatttgaaagtatattttacttttaggcgatattttttcatatttatttttatcttctcactaatttgttgtttttatcattatcaatgatattattaaattcataggttgaacataacgaaaatgccaaaattggaaagccggtgataaaatgtgaaccgcaaagtcgctgcttggccaaatcagaagttgacaattatttgggttcacacaatttataatttatattaattttcatttccatggcaacatttcttttttcatttatgtcattttaatcgttccaatttttaaattttttgtttgaataaaaattgcaatttttgaaatatattttatttttaggtgttttgcaatttgcttattatcaaaattaaaataaaaaaagattaaactcaaaattaattcaagaagaaattcaaattcaaaataatattttaaattatccaatcattttttataacaaaatgttttagggctactgaactgaagagatttatgtttttgtaagtagaagaaaattccaggtatcaaagctatgctcactgaatacaaaataaa

SEQ ID NO: 60548 - DNA, 610 bp, Heterodera glycines
ttcctcttattgtaaaagaagagcccattgatgaacagttcagattggcagatttggagaaggaaatccaggcattggcgaaacgtctttcattgcttttccgtattgaaaagtcagttaaaaatggcatttgaattataattaacaaatttattaaataacttattttactttataattgacttaattaatcaaataaatttactttggattaacatcgataatttaatctaatcatttaattttgttccgtttaagcgatgtcttcgttttgatgcttcccactgaagaaggtgaccattggttgtctcgtcttttgatgcttcgcgatgacaacagctccattagacttgccgaattcaccggctcttccgaagcattcgcagaaaaagccgaacattggctgaaaagtgattttgaagggccgcaacaactgatggaagcggtacagttaaatcaattttgaaattgatcagttgatcgattatatcagtttttaaactgatcagctgatctgatcacttttataattaatttccttcagttgaatgcgaaatgtgtagaatactttcaacagcagaaaatggcacaggacgaggacaatctttga

SEQ ID NO: 60549 - DNA, 881 bp, Heterodera glycines
atgccgtgccatctgcacactgtcggtggaggaacaacagcgcatttacatgcaacacttgcgcaaacaatgggcaacacaatagcggcggtgagcagaggaataaattaaatcgccggtcaaataatttgaggaaatatttaaatggccaacaccatttttaattcgtgaaaataaatatttaatatttttataattttataattttaaatgtatgttttttctttatttaaaggaaccctccactttggaaaataacttttttaatcgtttgtgaccaacttgaaatattgcaaatttaaattttacattaaaaaaaattaaatctgggttattctgatttaagtatttataaaaattcgttaagccgctgaattacgattttttgctgttggcttaatccctgttgtacggcctcacaaattaattcactttcatttattttatttttttaacgactttttttaatttaacatttgttaaggaaaaatgtttttgactttgtgctgaagcatatggagttttggtcggcattgacaagacaagcaaaatgcaccatgcccaatgctactcgactgatcagtgatcactcagttttcgatcggaggaaaatttaacaatcaattccgattctaattaaatggaatccatttaattttcacttgtttgatatacattttctatttattcaattgattgcttttaaattcattaagcaaagtaattggttcatttatgtgtgtgtgattaatttcagttgggagccccggttataggtatttttgttggaattgcttcaatttcgaaacttttattatgaagcaaaaactcaactttatcagagagagataaagcattcacaaaaattctaaatcaataaa

SEQ ID NO: 60550 - DNA, 307 bp, Heterodera glycines
atggcagcctgggtttttttggtcccgaacagttggctcattatgggattatggcagaaaagccgagaaaaatcttgggttggctttaaccgccaagtcatgtttctggttgaaaaatttttacaaaatcgaaaattcctaggccttaaatggcaggaatcgggcatgccaatttccaagcaaaacaaaagtggaattgatcttcgggattgtaaatgttttgaaattgacaacggaactttcaattagagtagagcgggaccgggaattttgggcaaaaccgggactgggacttgccgggatctga

SEQ ID NO: 60551 - DNA, 411 bp, Heterodera glycines
atgaatcaaattaaactttgttctttaactgaaaagggcgacagcggaggtccattgctcagaaccctgaatggtaggtggacccaaatcggtgttatattgggacatgaatcagaacgatcaaacaagagtacgtttctgatcacattttgtaaaaaatttttaattacgcgattaattatacttaataaactcattaacttcctcttattaagattttttcaacaaagtctccgtattttgtgaatggataaatcgagcgacgagaggcgaagtttcttgcaaatgaatggaaatttgtaaaggcacgaaacaataattgttcatcaaagttgagataaccatgaagaagattttttacaaattcaaaaatacacttaattttttgagttttatttcggataaaataaa

SEQ ID NO: 60552 - DNA, 433 bp, Heterodera glycines
atgatttatgtgttaatttacggtaatgattcacatgttaattcccgggcatgtacgtttaatttacagtcattattcacgtgtcaatttacggcttaaagcacgtgtcaattcacggtcatgatttacgtgttaatacacgggttaaatcacgtgtcaattcacggtcatgatttacttgtaaattcacgatcatgatttacgtgttaatacacggtcattattcacgtgttaattcacggtcatgtacgttaaatttacagtcattattcacgtgtcaaaccggtattttaaacatttggatccaaattaaagttgataaataattgaagactctaatacatcaaatttaaaagaaatcaaattaaaaggcatgaaatatatatatatatatatatatataaattagtcataaattaatagtatgaataaa

SEQ ID NO: 60553 - DNA, 674 bp, Heterodera glycines
  unsure (1)..(674): unsure at all n locations
atgcgcacccgtccgatctggcaagttaagcaacgattgctgactagccaaaaggttcggtgccgtgatgaaacgaaccagcactgcttaccccgcggcacccggcacggtcccccgaaggaatggatttaattanattctctccttcggggatttttttccattaggtcgtccgttagcgttcgattgctctagtcaatttttcaaaatttttgttgaaatatttgtcgtgctctgaaggcggggaggggggggggggggggaaaggcccccccccagggccggaaagaaggccgagtgagtaacttccggtggcaggaaaatttattaaatttttaaaatttttttaattggctttttaaaatatgccaaaaaaatgtaggctttactttttttagtgaaaattcgatcactcatattttttgctaattgagcagaagcgtaccaaactttgcagggatactccccggtaaaggactaacttacactgaaatgagcgccgagctagctggctcaaaaaaatttttcgaaaatctgagtctttcgtttttatttatttgcaaaattaattcataaatattttttcagaaagggttctgaaacgcaccaaattttatttacatgttagtttaggcactctgatgctttttctttcaataatggaggtgaataaa

SEQ ID NO: 60554 - DNA, 588 bp, Heterodera glycines
aaaaaaatatttatgaaacaaaaaaatcgattttttcaagtgtccgtttggggtactcaaacatttatggggagcaaaaatccaacgcagaattaaagtacaggctatagggaagctattcccgaaggattcggtctccccataaatctgggcgcatcggttcggggggactgccccgaaaacaaaaaaatcgattttttcaagtgtccgtttggggtactcaaacaattatggggagcaaaaatccaacgcagaattaaagtacaggctatagggaagctattccggaaggattcggtctccccataaatctgggcgcatcggttcggggggactgccccgaaaacaaaaaaatcgattttttcaagtgtccgtttggggtactcaaacaattatggggagcaaaaatccaacgcagaattaaagtacaggctatagggaagctattcccgaaggattcggtctccccataaatctgggcgcatcggttcggggggactgccccgaaaacaaaaaaatcgattttttcaagtgtccgtttggggtactgaaacaattatggggagcaaaaatccaacgcagaattaa

SEQ ID NO: 60555 - DNA, 741 bp, Heterodera glycines
atggcattggctcatcaattggcggaatttgctgttgctccattggcattggcactacttaaaaatgggaaaggttttttgaaaatttctcatggatttttttacatatttggttaaatattttggacttttttcttatatatttcattttttacagattttgaggattttttacggaaatttttggaaatcatcaaaaaaaatccaaaatttcggcaaattttttgtatattttttcattttttatatattttgagaatttttgaaaatttgtagtgaaaaaataattttgaaaatgtacccctgaaaaataccaaaaaataatttttaaatactaaaaggttattctaagcctatttaggacgtttttatggcattttgtgcctatttaatccattaggaagaatttttttccaaaaaaaaagtttagaaattttatttaaatattcagtacatatttatggttttgtgtacatatttcgggatttttgttacatatttatgtacatattacatattttgaccaatttttgtacttatttttggcagccctatttattagcattttaaaaataaaaaaacattaataatcagtgttaaattagggacaaccattttttagagcacattctggcctttttttaacatttccagcaaataaagaaaatatttttcataaattcaaaattttcagaaatttttcctcgaaaatacaccaaaaacggatttcccaacaattag

SEQ ID NO: 60556 - DNA, 297 bp, Heterodera glycines
gtagacagtgctgatcgggagaagcgccaagacaaccgagctgatcgggagaagcgccaagacaaccgagctgatcgggagaagcgccaagacaaccgggctgatcgggagaagcgccaagacaaccgagctgatcgcgagaagcgccaagacaaccgggctgatcgcgagaagcgccaagacaaccgagcaataatgtattaagccattacggatgacattagattttccgacaagaaacgtctcgtatgaaaatgtttcaataatacaccgaaccttattatgtaaaataatcaa

SEQ ID NO: 60557 - DNA, 2744 bp, Heterodera glycines
atggcaaataaatttgtgcttgtaccacaagaaatttaccggggtctcacctctgcgactgacacgggtgacatcaatttggatgctgtacgacacgatttgacgcgtgccagggctgaacgaacaaacccttcagctaaaaatgtcagctacaatcaacagcttaggcgatacttgcaaatgagacgggaggtcacggacaaaccagcacgggttgagctagtcaagggattgagtgttctgatgaggcgaggcggtgctgatgatgaagcagaagttgtagatacaccaccccgccctcctcgtcctcctcctccaccaccgcctcctggtcagcatcctcctcgtcgtccaccaagccctccaggcccaggcccgtccccgccggggagtcctccgccgcgtccacagcgtcctccgagaccacctagagctgctgcgccgccctctcggagagatgggcgtgtggaggaatggcgaaaaaagagaaacgacatacaacaacggcagccggttgtgcgggaccttcttgctgaagcagctgctgctccgctacccgaaagtgacgaagaggatgactacatgttggagagcggattcgctctgccagcaccatcacaatattatggcgatttgcccgttctgcctgacaacgcggacgcaattgaggagatggacactgcacagcacaggattgcaaccagaagaaagttaaagaaagcagatgacgatgatggcgatgacgatttgcatcgcaaaaaataccgggtctattatcctcctcccccttctcgcccacccccgtctcgtccacagccaaaaattgaaacacctcgacctccaccgcgtcctagcctcaagaaagaaccacaaccactgctcgatcctcggccatccacatcacaacaagttgatcgcaaacataaaagggagccaaagttcgatctggatccgcgaccatccacatcacggcaagccgggtacaacccccctgcggaaccaaaacatgagcagaaaccgtcaaaaaagccacctcctcgcgccacaccctatcatattccgaaaagagagccaaaaattgaagaaacactgccgcggcagcaaccttctcctgctgccccacaagtgccgcctgttccgccacctaggagagggaccaaacgtcgacaccccccggaaaatggtgatgagagtggtgagctgcgcatacgtaaacgagtgaggcaagcgcgaagagtacgagtgtattactcaccagagccgggtccatcaacatcagcacaaagcgatgaacaacaacaacaacaacaacaacaacaacaacgtgaactgtttgccattccgtcaaatcagctgaccatggcacagagaattgagctaatatacatcaaatgcaaccgttatgccgatcgtatgggtgtccggggaaacgcaattatcaacactcaaaatgctcaaccattggtgcgaagcaatttgcgaacggccatcaggtatataattgacagaagagcgggtcgacctaccattagaccaccgggagcggaccaattggaggagcggcttaggcaggacccaattttgtattcattgacggctccaccaaagagaccatcgcagagcacaagcagcaggacgtcaataaagaaggaatttcatccgaaaaaatggaaatgatcaacaccactcttgacaagctgtacaacgatccatcctctccggctgcgtttgccggtgttagtgcactgtggaaggaggcgcggaaaaagctaaagaatttacgcaaaaaggatgtacaacactatttggagggacaccgcacgtacaccctgatgcgccccaggcgggtacgatttccgagagcaaaaactgtagctgctggcttcatgaccgacgtccaagtggatttggctgactttcaagcgctttctcgtcacaatcgcggtcaccgatacctgctggttgcggttgatgttctctcaaaacgcctgtttgtcgttccactcaaaaataagaaggccgaggagatgctggatgcattcaaagagcttgtcaagcaaatgccaatggtcccacaccgcattttctccgacaaaggcaccgaattcaaaaacaaattgctgaaggaattctttgaggagcaggagattgagaaacatgagcccgtgcattcgtcagtgaaagcgtcagttgctgagcgggcaatccgaaatgtgaagcagcgactgtacagatactttgccgaaagggagacgctgaattgggttgatgttgtacaacaaatagtggatggaattaacagcactccgtcacgggttcacggaatgcgaccaattgatgtcaattttgaaaatgctcagaaggtgtggaagcgaatttatgaatcaccgcaaaaacgcaagaagccacgtttccgtaaagatgaatttgtgcgcatgagcagagagaagggacagttcgagaaggggtatttgccaaactatggagacgaaatcttggaaattgacgaggtgctgaaggcggtgcgtcccatcagatacaagctccgggatgatcgtggtgaaaaattccggggcaccttctatgaccaggagttggcccgcgtgagaaaagatgccgacaccagttacagaattgaaaaagtgtacagaaagcgaagaaaaccggatggaaccacagagatgctcgtaaagttcattgggtatcccgaacgagaatggattgacgagtctcagattgtataa

SEQ ID NO: 60558 - DNA, 516 bp, Heterodera glycines
atgtcaaatagtttctttgtgtttttgcctagcaatgtgacggattatccggacaatcaaccaaacaagttccgggtcaggcttccaaaacctttgcatttcaacgggtcttgggtgtgtgggctgcacagcattagctacccatactcgtggtcaacaattgggacattggatgagcagtggatagacatccacttcacggatattggtgttcctgaagaagacaaacaccgcatcgtacgcgtgccggtaccgagatcgtcacacaatcgggttgaacagctgagagactttgtagcaacaacgctgagaaaccatgccaatgctaaactaaagccgcttcctcgagaggaagaggcggaccgtaataggacaaaaccactatattctccaccgcctgctaaaagaagtataaaagacgtgaatgatttgtctttgtttccttcacccccgagagttaatgagccggaaaagccgcctaagtctcctccagcacatgtaccacctactgaaccg

SEQ ID NO: 60559 - DNA, 1866 bp, Heterodera glycines
atgtcaaatagtttctttgtgtttttgcctagcaatgtgacggattatccggacaatcagccaaacaaattccgggtccggcttccaaaacctttgcatttcaacgggtcttgggtgtgtgggctgcacagcattagctacccatactcgtggtcaacaattggtacattggatgagcagtggatagacatccacttcacggatattggggttcctgaagaagacaaacaccgcattgtacgcgtgccggtcccaaggtcttcacagaatcgagttgaacagctgagagactttttgacgacaacgctgagaaaccatgccaatgctaaactaaagccgcttcctcgagaggaagaggcggaccgtaacaggacaaaaccactttactctccgccacctgcaaagcgtgcccggagatctctagcgctctcttcgcctcccagacatgaagaagctcctgcacgaccacttgaatcgcctcctttgtatgacgagccaaagctgcaaaaagcacaaaaaacacccgaaaaaccagccaaaacagccccggctacaccaattctgcttgactcgccaccgttgtatgacgagacaaagctgcaaaaaccacaaaaaacacccgaaaaaccagcaaaaactccagctaagccaccgtcgcaagctcctcctataccagcaacccctacagcagctgtttctaaaccgtctcaaccgattgctcctgttgctcctccaacacctactgctaaatcagtagcaacacccactccagctaaaacggtttctcctcctccagctaaaacgccttctcctcctcctccagctaaaatgccttctcctccttctcctcctccagctaaaaccgcttctcctccttctcctcctccggctaaaacggcttctcctcctcctccggctaaaacggcttctcctcctgccactactattaccactactaccaagccaaaaacaccgcctccgctggtcaaacatagtcctcctccaacagctgcaaaacagccttctcccgtaaagactacgcccgcgtctaagctaaagcccgcgaaaacggttccaaaaccaccaccacctcctcctaaacaaaaaacaccaccaaaaccttcaccgatacttgagtcaccgcctcggtatgaagaatcgaacagaacaattgtaaagccaccagtcatacaaccatctccacctcatcttgaagaagcgaacaaaacaattaccaaacaaacgacatttaatactactgcaaaagaagtgatgccgacagagcctgttgcagctgctttaacacaactagcagatttaccagaaaacaccttcagctttcgcatcaatccgctcccagttgtgccccgctcagtatcgattcaataccttgatgatgttgaacgttttaaagtttcattcaatgatcggttgatacgtcatttgtcattctcaccacagttgggctatgtgctcgggtttgaaaaccctcagcacgtgatgtctaatgaagtggcaaaatatccggtggatttgcgaggcggaatctcgagttttgccgtttactcaaaaggactaactgagaatatgattgttggaaattcgctgagttcgctgctccgtgttgtgtcagtcagcggtgcaacacccggtgactacaatgagaaaatttacgattcgcccatttttgcgcgagtgctacccagggagatcaacgaaattgagattgagctgcgcacaatggacaagggtcgcctcgtcccattcgcctacggcacgacgctggtcgtgttattatttaagaaagtgataaatttctgaaaccactcattttttgtattcattcattcattaaacgtaaaaaaa

SEQ ID NO: 60560 - DNA, 227 bp, Heterodera glycines
aatccgaagaaggaataaaataacgccaacttttttggaatacatgtttatcgttatggaaaaaatgaaaataagtgtgccttaaatagtgatgtcagtgctgatcgatcgatttttatccaacatcaccagcgagtcgcactcgcccatcaccaccaacattattcctccagcgggcaccgcctgattaaatttgatgctcactgctgtggtcccgttccttatca

SEQ ID NO: 60561 - DNA, 1102 bp, Heterodera glycines
aagggtgttattgctttagtcgatgtgatgtttgaggagaaaaggacaccgaagaagaagaaagtggggagactgcttctacaggaagaactgccgcaggacctcagccgaaatgagctcctgcactacctgtgctacggacgacttggaacgaatttgttcgagatttatttcgtgatgacccaagccataaatgtgagtgaaatactttaaatttttaatgacaacacaaaatttttagtcaattgccattgggaatttgtttggacttctgctcgattttgcaatgagctcaccaactccttggctcatgaagcggcccatttgctgtggaattttctaccgtcaacacatgccgtggattctgcaacaaccgatgagtgtaatgctatcacatggcatttttccggaggtccgaagtgatggttttgaatttttttggctgttcaatccacacttgaaaaagtacgctgggtatgtccgaattctccctgagcttagtcagcctgacaatttgtattttttctttagcgttttgtaagcatttatttgaccattttattcatcattattattacatacagatcagaatttgtcgatttttccaatttctcaataaaattttcaaatgaatgaccttgtgacatgtggtagacaaaaacaatacagtgtggggcacatgttgacactaattgggattgataggaacgaatattttttcttagacccatcggaaacttattcaggaatgatgacacaatgacagatggtattttttgggctaagctgtcataataaatcactggttcttccattcccttcgcataaattgcacaccaatgagaccctcccttgtaatgtgggtcccggttcacaattagcgctgcgggatattgtagagtgaccggaggcggtaattggtcactggcgaagcagccccgaaagacttgtgcggtcccccggttttcgctcaaaattgatgtgatttgcacgctgtccattcttgagccaaaaaattgagcaaagttgatggagaaccaggctgacaataagcatcaaatacaatgcgaacaccgcccagcaaacggcttgttggaataaa

SEQ ID NO: 60562 - DNA, 792 bp, Heterodera glycines
atggacaatcatccccgaaaacgatcctctaacttttccattgaccatattctctccgcacctaaaaggccccgacaaggcttcctgatcaatgaactcttgggcgtagtccacttccttggatcttttcaacaaggcgaaggaacatcaaaacaggccaaggactacgttaaaaaattggacaacagcattgaacacgtggccaaattccactacgtaaaagtcaagtcaaagttcaccattacggatttgccaagcacacctgaggcactgttggccggaattttccaacactgcatcgacgaggctattgctgacagccgtgagcgcaacatcgagcctacacacctcggctgtatgatcagcagccctctgttggaaggcggcgacatcccaactccagtgcgacagatgactaacaacactctcgacaccattctcaaccagttcaaaaaagtggcgcagtccaaacaacagaaaaatgtatcgttatggggtgagccgtttaccgtcaccataacgacattgaatcgcaatggactgccacccaaacgtcgtgtcaaagggggagctcgtcgccctgtcaaaacggccgttcaccaccgaattaatgaccaatgcctgattaaaattcgcaataacgacaaccacttctgccttttctatgcgctgcaggcaacaatggtcgacaaaacgtgcaattggcctcgctggaagttttcccgttacttgaacaaccaatacggacagcagggacaacttcatcgtgatgcagttgagctcatgaagcag

SEQ ID NO: 60563 - DNA, 923 bp, Heterodera glycines
atggtttatgagttagaacaacagctgcaaattgacaattgttgcgcactaaaagtacaattatcagttgcgttggtgagttatcgagggcgttggtcacgaatcggacattcatttcgaacaaaatcgaatccaatcccgaacttaccctttttatgggactagtaaaggcaatgtttaatatcgaattgtgttggtagagaagccaatatttaattgaaaaaagtattctcgagattaatccttacccgtatttagagattaaataaatctttttaaataaaactgcggaaaattaaattaccgaaattctaatgttgtcgtcctcaaagccgaggaattcgatgggccgaatgaaacatttgttgagctcgggcgaggatgcggacgttttgggctaatttgccgataggcgccgccgggcgaattttgaaatctaagctctattagcagatattcaccaaaaaaaaattaagatttttccgataaatttttgtttttcttcggtattttgtaaaaatttttaaaatatattaaattttctgatttactcaaggaaaaaatgaaattttcatccggtggcgccggtaaatttttttgaaaagttgatttcaatttgttaacaaattatgcgaaaaattgtcaatttttatagatatttttgtctattaatcataaaaaaataaatgcaaaacaaaacgtcaaccggtatcgaactcatgttgaagcattaaccactaaaccacaaatatatcaaaaataaaagcaaaatttactatatttcataaaaatttgccaaagatggttaaaaaatttaaattgtataattttttatcttttatcccaacaattgctttccatttgatggtttttataactaccatttataaaatataaaaaatataattttattttaacaaata

SEQ ID NO: 60564 - DNA, 100 bp, Heterodera glycines
atgggaacaattgatgtgattcgacgggcccttttgtgcatattttggccaacaccggaggaaatactttgtcgaaattcgggcccaatacatttgaaat

SEQ ID NO: 60565 - DNA, 512 bp, Heterodera glycines
atgccattgtttgtgttgtgcaacggcttctactctgtgcaacaaaattgtgacgttttttgcacaccagatggtctaatgccaattaagaccttcgaaaactcgtattataagcaagattcagtgtgtgtgaattttaaattatttttttattattaccatttaattgaaaatttttgaaatttcagtgccatgggaatgggtgacaaattgttttgtaaggccattcagccattcgtccgtttaaaactgagcaatgaagaatttgtacttattcgcgcaatcatttactcacatatgggtcagctaaggcctaaaaacattataattaatgagttaaaattaatctggattaaattctaaccgtatcgattgaatgcagagagagtttagccttttttaccttttcatagaaataaggaattaaacaattttgatattattaaatggcattaaatattttctataagcatacaaaaatttcgttaagttacataaaaattatgaataaa

SEQ ID NO: 60566 - DNA, 741 bp, Heterodera glycines
atgcctttaaaaattgcaggttgcaaacatttttttcgtcgcacaatttcgttgatgaaggaatacaactgcaaaaaaggcggagagtgcaaaggtgaaaaagggaaaaataaagcgcaaatataaatattaaaataaataaataataataataaaatttaaatttgcctttttgaatgaattaattggataagcatttttttataagctaaatttgaaagaatttcttatatattataatcttaaaaaattaaatcttagaaaaaaatttaaaattttattaaaaagatttatcatcatgtaaacgatgccgactgtacaaatgcttaacggtcggaatgaatccgcgaaatatttgtccaacaaaattgaatgacgaacaaacaatggcatttgcagaacgaatgaaagagcatccaggaaaaaatgccgtcctcaactcggttatacgaagagacggagaagggcaaaattcaattttaaactatattttaaggggactttagtttaatactcaaaaattttgttgggtaagcgcataactaagcgggatatatttttctaatgggccttctagcttgttttatggaagaaaactctcacaaaaaaatttgaaatttttttttaaattttggtaaaaattgaaaaacccaagaaagggcgtgaccaaacattgatgcaatatgtaacaatgtggaaatgtgcatttttaacgaaatttgtttaaaaaatttaattaaa

SEQ ID NO: 60567 - DNA, 716 bp, Heterodera glycines
atgatggatcaacaatgggcatgtggaacacttagaggcaagacacaaacaacaatttacggagttgaaatccgggaatttgcttcaaaaacaggaacaaaaggttaaccaataagtttttttaattttttacgtttgaaaattaccggtttttacctgtaccggtttttgcattaccggtcagtaccggtaccggattttttacaattaccgattaccgtgcaactctactcccaggtttaccaacgtttgaaaattaccggtttttaccggtaccggtttttgcattaccggtcagtaccggcaccggattttttacaattaccgattaccgtgcaactctactcccaggtttaccatcctttataataatttttgaaaattttaggattattctcattttttggtgatgcgaccctaaagaataattttcattataattgtaaaaattatcgttaagttaaaacgaaatacaaattgttacttcattatatctatcaacttcgtctttttgtcatattttttgtctattattattttttgaaatgccataaaaagccctgagggtgactgagcaaataatggggcgtccgtgccaaagttttgaaactttaaaggattaaaagagcaggttccatttggaggtggggttgtaatatatctgaaatatatcactcccatgtttagtattttagggactagggtataataataaa

SEQ ID NO: 60568 - DNA, 196 bp, Heterodera glycines
atttttctggtcaaagccaaaaccacggtagacaataaaacaataccggatgatttcacaataaaattgtcgacactgttcaactatggcgattctgtccgactgtccgtgcagcctgaacatggcgcccgaaatcaaagcaacaacaattttatgttcattttcatgcacgaatcgttggaagagaatggaaaga

SEQ ID NO: 60569 - DNA, 719 bp, Heterodera glycines
atgatcacaatttgcacttcggaagagcaatggacgaacggaaaaatagaagggacagaagggacggaagagacatttcggaagagagtggcggaggcggtcagggaggaggtggtggcgcggatgcgcgccatggatgacttggcggagttggactatgcggaggaagtgattcggcactacgtggaaagggccgcgggggacggccccgacgcattggtcaacagagtgaggggaatttgcaggaccagcgacaattgtgtgccatgtttatccacgtgacagattagaacagactttttcctggtcggccccgctctcctcgaggcgttcgtccgttcgcgcgttggctccgcccgcgtgttcgccctcctcttccgttcatcctcaaatgtttcccaggtcgacgtggccgaagtggcggccaactcggccaatccgtgggccgcttctcagtccgtttgtgcggacgatttggtgtttaatccaacgccgcggggacaaagtgtggaagacaaagaacaaaaggacatgcgaagttttgccgaaatggttgcaaatttcgtaacttttgggtgagttggccaaattttacgaaacaaaaaacgaaaaaacatcgaattttgagggacccgaacagagaagaacggaggacggacaaaaacacttttacgacggtttaccaaagagaaaaggcgaattgtgaaggtgctaattaa

SEQ ID NO: 60570 - DNA, 182 bp, Heterodera glycines
gtcgaccctcgcctttactatgcgctgatgatcactgtcatcggctcgacctttcccctcatcaacgtgtccatgaacaccattttctctgctgcagttggccctcggctacaggccaagcaacagagcattctgatggtatcgggtgggatgggccgaatgctgggcccacttctaatcgg

SEQ ID NO: 60571 - DNA, 728 bp, Heterodera glycines
atgattgctgccgttaatgactttgagatgacacagaagcgattccaatcggtgattgaccaggccatttacgaattccgtcgcactttttccttcactccgccgtataagcggaaaacggaagccgccaaattgatttggacaattatcggtgccaatgtggccatcttcctactctggcgagtgccaactctggtaccattgttgtggcagtatttctccagtggtgtcgcttcgagtgaggcttttttggggggaggggtgggcacagtttggtggtgccgatattcctatttttgaactacaaatttcaatgatcgagtgtttattccacttttcagaaagtctttgcatgccaatgcttttcagtgtgttctcccaccaaaatctcatgcatttgttcttcaacatgtacgtgttgaatagctttgctatcggtgcaattacccttttgggtccgtctcaggttttttttttggtttttatgaaatcattattaatggttgtgtccgaacccaaattaattcgacccagtcgttaaaattaaattcaaaacgcatatactcaaatggaattttttttggccatctaataatgtgtgtccctttcagttcttggcaatgtatttgagtggcggtctgttcagttcgtgggtgtctctgtgccaaaaggccgttatgcgcagcacaatgccatcgctgggcgccagcggcgcaatttgtgacgtg

SEQ ID NO: 60572 - DNA, 52 bp, Heterodera glycines
aacaattgcgggagaagctgcgctcgttgcaggaatacggcgacttcaagca

SEQ ID NO: 60573 - DNA, 647 bp, Heterodera glycines
ttttttcaagtgtccgtttggggtacgcaaacacttttggggagcaaaaatccaacgcagaattaaagtacaggctatagggaagctattccggaaggattcggtctccccataaatctgggcgcatcggctcggggggactgccccgaaaacaaaaaaatcgattttttcaagtgtccgtttggggtactcaaacaattatggggagcaaaaatccaacgcagaattaaagtacaggctatagggaagctattcccgaaggattcggtctccccataaatctgggcgcatcggttcggggggactgccccgaaaacaaaaaaatcgattttttcaagtgtccgtttggggtactcaaacaattatggggagcaaaaatccaacgcagaattaaagtacaggctatagggaagctattcccgaaggattcggtctccccataaatctgggcgcatcggttcggggggactgccccgaaaacaaaaataaatcgattttttcaagtgtccgtttggggtactcaaacaattatggggagcaaaaatccaacgcagaattaaagtacaggctatagtgaagctattccggaaggattcggtctccccataaatctgggcgcatcggttcagggggactgccccgaaaac

SEQ ID NO: 60574 - DNA, 642 bp, Heterodera glycines
atgtttcgcggtccgttcactctaattctctcgggggctactgggagtggtaagacccgttggctattacggtttttaaaacatcataagaatctaattgaaccatcgcctaagaaaattctttattgttatggtgagatgaatgatagtattttaggattaatcggggagggcgttgagacttttaacgggattccggacatgaataagattaaagaacaggaaaaaccccttttgttaatacttgatgatttaatgcttaatatgcagaatactttcctcgatctactctttaccaggggctcccataattggaacgtaagcgtaatttttgtaacccaaagtctctatggtcgggacattaaaacggcaagagccaacgcacattatctggttttaatgcgcaacccttccggccaattacaagtgagaacattggggtcacaactgttcccaaaaagactgaattatttcatggatgcatatcatgatgcgaccaataatcaatttagttatctcatgattaacatgcacccaaattctgaggaggaatttagattatgtagcaaaatttttccagatgagactctggaaatttatttaccaattgaatagtatataagaatatgaatttaaattaaa

SEQ ID NO: 60575 - DNA, 414 bp, Heterodera glycines
atgcaaaaaccgataatcgtaaatataattgctctcgctaatctcggtaccggaattaaactaaactctctgacgatcaccgagtgtgaatttaagtataaccctagaaaattcaatgccgcggttatcaaatgtgcaagccccatcaaagccacggcattattatgggaatccgggaaaatgatatgtctggggacgaaaagtctgatagactgtgaaaatgctattaaaaattttatagaaataattaagggctcggggtgtccgggggcttcttacaccggacacacggttgaaaatattgtttcgacctttaaattcggacgtgaaattgaactgaacgagtttcgaaaaaatcgtcgtgcattttatgaaccggaaatatgttgcggtttaaatttcaagacggggtaa

SEQ ID NO: 60576 - DNA, 1415 bp, Heterodera glycines; identical to SEQ ID NO: 30140
  unsure (1)..(1415): unsure at all n locations

SEQ ID NO: 60577 - DNA, 1454 bp, Heterodera glycines
ggaagtgtattgtggaccagaaagtgtgtgctcgctggacggattgcatttcaacactttgtacagtgcgcgagtgagggcattcaatgggtcgggcgaaggcccttacagcgaactgatcagtctgcagacagccccaggcaatgatcgaaacaattagcactcatttgtcagggagaaacccgaaaaacgttttcattcagaattctgcccgggaaaattgtccttgttagctcaaaaggttgacccccgcctttgggggcgaattgccatgggaaaacacccgaaaaataatcaaatcactattaaccgtctgcttttttcaatctttgtgctcaagttttgattttctcttctaaaataacatttgtatgggaatttgctgtgccaagggaacacccctgccttcgtgaaactttcgggaacatggcgcgacatttggggttatctcgggtagccttcgggattaatccgcctcccccccccattttaccccataaattgtccctctctttcagttgcctggttccatctcagccccgatgattcctcctctgtcccttcctcctccaccgctgccgagtccgcttcttcttcagctgaagttggcctcggcattgccatgcgcagttcttccccgctcccaatcgctgaaggggacgatttgctgctgcttttctccaacgattgttgtaccgtaaccggcgcgtccattgactaccgtaccgtgctgggcacagtgaccttttcgcaaggcattcattactgggaggcgagcgtggaccggtacgacgggaacgcagacgttgtgatcggagtggcacagccaccggtcaaccgaagggcgatgctcggtgagaccaaaaatgggaggagcgaagactaattaactaattggtcattgtaatgggacatacaaacaaaaaataattaattaattagctaattttccattttaaaattttgtctaatcaggaaaagatgcgcatggctggagtatgtacgtggacgggcagcgctcgtggtttttccacgcggacactcaccacgggcggatgagcagcggggtgatcggctgcggaagtgtgatcggagtggcgatggactgcgaccggggcacgctcagcttcgccatcaatggcacgccgctttgtgtacacgcatttaagtcggtggacggggaaaagacagagggggagggcagaacgttgccgcaggggacatttgcggataatcggaaaaattaaaaaaaaattgaattttttctaaaaagtgaatggaaaaaatcagttaaccccattccctgaagcttcgattaaaattaaacttgcaaattaaaaaataattagccttatttgtacagaaacatgccccgcggccttttctgtccggcattcagcgtcaattccaaggcgaccattacagtacacagtgggctgaagttaccggaagtt

SEQ ID NO: 60578 - DNA, 2629 bp, Heterodera glycines
  unsure (1)..(2629): unsure at all n locations
ctttgggttatgcgaaatggagcccacccccggcacactttattctctgctgcttcttcgcccctcgagagttgggagtgcgggaaaatgtaattgaataatgaccgacgaataaatgaatgaatttgaatgaataacggagaacgccatagagagaaagagaaagaggaaagagaaagaaagagggaaaaacaaaagaaaaaagagaaaagaaagagggaaaaacaaaagaaaaaagagaaaagaaagttgccaattttaaaagcaattaatgccactttggcagaaatgtacgggattcatttattagcaatttgcgagggtggcaagcagcaaaagtgcaaatgagagatgctaataaatttttaatttgaatccgatcgtttaaatccgttccctcaaagagtgaccgccgcccacggccgacgccaattgtttatttgcccacaaagactcatttcatggtcgaccaatagcctcaaagtgttcgttttcgtcctttatgtgtttgtcataggcattcctttgttctttgtatttaaagttgaggaaaagaaaaagccgccccggggggacaaacggacaaacagtcgaaaaaggggacaaattgccaaaaaggacaaaatgaaagaacagacaaatagcggggaacggagacaaacaaaataggacaaaagaagggaaaggcgaaggaaaagtcaaaaatggtaaagggacaaattaagaaatgaacaaaaaaacagacaaatgttcaaggaaaaagcaaatgaaaaaaaattaaaccgcaaatggacaaagtgtcgaaaaagacaattggaagaaaaaggacaacggaaaaaattgctaatgatgggagacaaattattaaactgagccaaatgtaaagacaaatgacaaatttgtgattggacactcatcagaaaaaaagggggaaaaagatggatgattaattggatggatttacaatgaaaaaaaaatgaaaaaggatataggaacgaaagataataatgaaagggacaatttgcaaaagacatctttttaaattcagaccgaattgtcccaatcgctgcaaatgctcagtgccaaagtgcgacaagcgaccgaagacatcacggcattgaaacagttgcaaaacgaaatcgacgtaggtgttgggtaggagacaaaagatggaaacttgggaatggcagatcagagagaaagaggggggggggggggggattttggcatttctttgggcttaatatattcgtaagcatatttggtaattaacgattaatgttataatgttaatgttggtgggtggtgccacatcagcagatggttaaccaaactcaatatttttcattctggggaaatgtttaaagccaaaaaaggaagtgaatttttggtgccataaaacaattcgcttgtttctgttctaatgaggaaaagctttgcacgttaaaggccaattgcgacgcgttcagccgaggcattgagcgagagatggacgaactgatcgcccttctccaactgcgaaggcaacagctgactgatttcgccgcgggggaaaaggagcggaggaaagcgcagttgcgggaacagatcggacggtctacggcacaactcggtcggaacagggcactgatccaattttgcatcgaacttctgaaggagtccgacccggcggcgtatttgcaggtgatcggagtaatcagaaccgggtggacattaattgtatatttaatgatcttccaaaggttggcttcgcgttggcctcccgtgtgactgaccaggaattcctttggcaccgcgagatcagaaccaagcccgaggtggaggtccaattcgaattcgacatcgattcggcacaacttcggacggccatcgatcagttggaatttattcagttgaaaggtgagtcactcacgacaattttcttttgttttttgcttccatttgcgtttaattgctctccaaacaaaaaaataaataaaaagttattttaattaaatattttaattaaattttgaaacctaagaaattggagagaagcaacacaaaaatgaggccggaccaattgagagaggaggtgggcaagaggaaatggaaatgccatttccaattgtttatttccacgccaaggaaatgaaatttcatttttaatattttaatttttaaacaaaattttgtggaaatcatttggaaaatgacaagaatttgtcgtgtgttttgtgaagaaagtctcagtttttgtggtgtcctccaaatgcatttttaggtaattcgaagttgtttttgccattagcttatcccattttcccaaatgcctcctcttccttcgttttgatagggtcgttttgcgtgccaattcgaatgagtgacaaaaattcactttccataatctttggtcgaatttttagatattttgtacaattttttgggatttttttttttgaaatattgcagggtcattaagcccaaatatttgatttaccgggaaattgaaaatttattggcactctcgcgccgaatcggccatggataatgaatgccatccgaagaatcatttgccgattttccattgttcagcgccttctgcgccccaattngtggcggatgaatgttcagcggagaacaattcgat

SEQ ID NO: 60579 - DNA, 312 bp, Heterodera glycines
atgcagcaatttggctgcctttccctgttccccgttggcatttcagccgggctattaataatgccaatgcttttgctgttactgatgccatcatccactgatggcattgaaattgtagtgaatgttgatgaaaatattgccaatgaaatcaatcagcagcaaatcactgtcaaggtcagggcttctaggggtacagctgcttatttgagaaagcttgctgatttttggggaaagaaaccttcagaaatggccatttttagcctgtcgacatcgccggccccaaatttccctaacattttcaaaatttgacca

SEQ ID NO: 60580 - DNA, 1040 bp, Heterodera glycines
atgaaagtcaccaaattgggaaggtaaaatgacatttattaactaattaaattcacaaaattcgcataaaattattgtttttgtgcattttttgttaattttcatatatttacatttttatagttttgtctcgattggattcgccaccaaggaaatgccactggacggagcaatcggacagcatttgaacagttacgggtaccgaagcgatggctcatttggctgcaatggtatcagtcggccgtataaaatgggatttggcaccatgccaatgccattcaacgcggcgattggacaacagagggaccgccgctacgttgggagtgccaattggccatttccattggaatttgtgcccgtgccaatgccatcggacggcgcattggcattccaatcgccagcattttccaccggagatgtggtcggatgcggcgtttgtttggccactcgacagatctttttgacgaagaatggccgacgaatcggtgggccaaacacaaaacgaaaaagcaaataatttcaatttcaatttgtcagatgactcctcttttttcactacaactcccatcaattctctgtttccatgcgtttctctgtggactggcgacaaaattgaggcgaactttgggccaagtttcaaattcaatttggccactctttgaagaaagccgaagaaacaacggaaagggcgattactcatttaattaattaattaattcaataatctttttttctttattttatttttaattttttatattattttatgatgtatttgttaatcagataattttctgtttttttattcacttttattttctgtttttccttttttatgtaaagatttggttaaaaagagaccaccgaagaaaatcttgaagttgaagtaattagtaattttgaagaaattgctaaaactattaaattccccaaatttcctctttgttctttccactcattttggtgccattttattaatatttaaaatcgtttaatgggcctttttattaattttttcgcacttccagcagaggcaacaa

SEQ ID NO: 60581 - DNA, 583 bp, Heterodera glycines
aatcgaacgctaacggacgacctaatggaaaaaaatccccgaaggagagaatttaattaaatccattccttcgggggaccgtgccgggtgccgcggggtaagcagtgctggttcgtttcatcacggcaccgaaccttttggctagtcagcaatcgttgcttaacttgccagatcggacgggtgcgcatgattccactgttccaagcaccccaccaaaagcaaaacgatataaccaaaatataaggaaaaattttttaaaaaattttttctccatcttcctttttgatactaaagcatcagagtgctaaaattaagttgtaaataaaatttggtgcgctttagagcactttctgaaaaaaatatttatgaaacaaaaaaatcgattttttcaagtgtccgtttgaggtactcaaacatttatggggagcaaaaatccaacgcagaattatagtacaggctatagggaagctattctcgaaggattcggtctccccataaatctgggcgcatcggttcggggggactgccccgaaacaaaaaaatcgatttttcaagtgtccgtttggggtactcaaacaattat

SEQ ID NO: 60582 - DNA, 155 bp, Heterodera glycines
taagcctaaactttttggcctgtttaaaaaggaattaaaaatttttaaaatatttattcatctcccttttgatagaaaaagcatcagagagccttatttaacttttaattaacatttggtgcgtttcagagcacgttctaaaaaatatttatgaa

SEQ ID NO: 60583 - DNA, 134 bp, Heterodera glycines
caggcctcgacacgacctccgccgaactgtccgtgttggagtccatcttcaaattgggagacgcggcgccgagcgcaatttccaccgatttgcgcgacactttgatagaatcgatgctttgaaagaccaaattt

SEQ ID NO: 60584 - DNA, 1711 bp, Heterodera glycines
atgaacgtcgaagaatcgcctcttttgacggagtttaagacctttcttcaggcgactcttgtcgcattcggaagcgacggagcacttttctcactggtcaatcagaaattcaggttcaaaaattggccagccctaaaatcgagtcaatgatttgtcttgtttgattttagcgaggattgggttggctcgccctctctcaaggaatacgcgaccaaattgggtttcgccggttcaaaaggcatcctcaaattgctgcagtccattcccgaccaggtcattgagcagtgcgttatggtctctaatcgctgcaataatttacatgtgatcattttgaaggtgtcaattttggtgaatccgaccggagaagtgattttgaagcccgtccctatggaggagacgcgcgacaatctggccaaaattgacgcgaccaacagagagctcaaagcgtgtgttatttgtttgggacagctaacttcctaccggctttcctcccccccccccacccctcccgcactcgaaaattttaaaattacataggttttattttaaaaaaagtttgaagaaatctaaacctccattttggaaaatcagctttgttttccttttgaaaaatctgtttgttctttttcgatttttggtgaatttttttaaaataaagtttcgaattttggtttaattcgggccctgggttcgaaattgatgacgcattcgtgatcagcgatcccgaaaactaaatattgtttttttttgtttaattgaaaaaaatataaaaaatgtggggcctaaacggaatgagagccagaaaattctatgtgtttgaatttctcaatccaacagtttatttatgaaatttttcttcgaatttcaaactcatgctttgctaacaaacgtcctttgctttgcagtgagaaaatgcgacgccaacaattccatgggcctcttccggcggctgtcactgcgcaattggccgctgcgatgatgccgggttggccacccaagtgccggtgcatccgttggcctcagttttcaatgcgagcatcaaacgcaccgcaacgactccgtccaatgctggacttttcccagcaccggcgaagaagaaaatcaatcccaatttgattccacttgaaccgactcgtattgcacagtgtgacagtaccaataacatcgtggacaatggcaatgccaataaagtcaccagcggtgtcagttgcagtgccagcaaaattaccaacaatgccaatggaaatgccagcaaagttcccagcggtgccaataaaatcaccaacaatgccaatggaaatgccagcaaagttcccagcgcttccaatcgaagtcccagcaaagttaccagcggtgccaataaaatcaccaacaatgccaatggaaatgccagcaaaagcggtgctaatggaagggccaataaagtcacaaacggtgccaatgctagtgccggcaaagttcccagcgcttccaatcgaagacccagcaaagttaccagcggtgccaatataattaccaacagtaccaatggaagtgccaaaattgcgcgaaatgccggtgctattgggacaaacggttcgacggcggtgacacgaacgacgagcgcaactgagcaacggcagcagaacatcaagatcaggaaagtgagctttgagaaggcgatgagatacatggagagggaggcgtggaagcaagcggagaagcgaagcga

SEQ ID NO: 60585 - DNA, 86 bp, Heterodera glycines; identical to SEQ ID NO: 57243

SEQ ID NO: 60586 - DNA, 746 bp, Heterodera glycines
ccctaatattatgctcactttatccaataatggattttttctgaatttctttttcatttttgtgctgatttatgcaactaattacggatatgctttatttgctgttgtgagtaatttttacatattaaattatttcaatgcttaaatatcttttcccagcaaaatgaacgccggcaattggatagtctcgacggtttgtggacctttgtgagagagcccccgaatagtgtcgggattggtctccaaaaccaatgggcttcgttggaattggccctgtttgaggtcagctgagccacaccaaggcaatgaattgttttggcagcccaaaaaagtgtctgttctgaatgtttggtgcagaattcttcacaaattcccgtcccttcggctttcaacgatttgacggcggacagtgagcagcgcgaccatgtcggatgggtgtggtaccaacgcaaatactttttgtctcattttttgcgggacgcgtcacccaacggaagaagatcatttttgcgttttgaaagtgtcaattattacgcttttgtggtaggactttgttggacatttgtgaaatttgtcgcagttttcagtttgtaaatggaaaattggtgacggaacattgtggcgggcatttgccattccaagtcgaagtcgaactcgtcgatgtcaacctcatttcggtggcggtcaacaacactttgtcacatgacacaattccgcccggcgatttcgccaccataaaactgtga

SEQ ID NO: 60587 - DNA, 462 bp, Heterodera glycines
tagctaacaccggagctccaaacatcatgggacttgattggattgtgccgtttgagaaggctacgcagtctcccatcgcgacaacattggatttgtcaagcgccccaacaaaagtcaacacaattgatgaacgtccccgtcatttcaaaatcggtgacactgttcgtgtgttgaactacggaaaatctggcaagcctaactggcttgaaggcaaagtcgtcgctggtaaaggtctgatttggaaagtcaaaattccattgttgaatattactgtcaacagacatgtaaaccaaatgcgttcttttgtcccttatcaatcagaaacgacgtttccgaatgatacagttgaccaagttccgcaacaaaagagtccttgccacagcactgtcacgactactccgccgaccaacttgccagttcaaccaacgcaacgtcctcagagacaacgccgtccgccgatac

SEQ ID NO: 60588 - DNA, 541 bp, Heterodera glycines
  unsure (1)..(541): unsure at all n locations
atgacaaaaaatggttagccaattttaagcaagacttagctgaagttcaccatttgttgttggaaaatttgttagaaaactcgaaaaatactaattttgatactgtaccgatgcgaaaattggcagatattttttccaacaaaaaagcaatttgggaaaatgaattgacattccgtctacgaatggttgtttttttgaagaatgctttaaatccaaacttaatgaaaacgctgatcaaagatcggatttacgaaatatttggggcgaaaaatgccgaaattacgcaccaattgtacgacaaatacccatcattaacatatggaattggtgacttaatataaactataatttttttttaaattcagaaaatcaaatcatattaaaaattataaatatattttttcaaaaaaataataatattttcgccaaaatttgaatttttaaatgagtttgtgaaaatatttttaacatttttatgaggaagtttttgcttacaaaaaaaaaagaaaatttanatatctttcattcggttttttgtcaa

SEQ ID NO: 60589 - DNA, 951 bp, Heterodera glycines
  unsure (1)..(951): unsure at all n locations
atggatttttttgcctattttcatgccattgaagtgatttttgaacaaaaagaatacccaataagtgaatggccaaagcttcgaattcaatgtgctcaattaattgatacaattccattagaggtaaattttaccgaaaatgatgaaattatgaaaatgataaatgagctcaatgcaaaaattggcaaaatgcaatcatttttaaaggagaacaaaaattgcatggatgagaaacaaattgagaaaaccagcaacgaacttgagaaaaagattgaactgttaaagatacttaagcaaatttctaatgagattgatcagttgttagctagagaaaatcaggacgaagcccaggaggaggagggtaggaaattgtatgaaaaagttaaaaaaattcaatcagaatttgaagaaattgagctgggtgatcagcagaagcagcagcatttgttgtcagatgttgaatttggatcggaggacagtaaagaatttgaaaaggataaaacttttggattaggagaccaaaatgggcaaaacgttgagttctccggatcaaggcctgatcaaaacaagcaaactgacaacacagattatgatcagtatccatcatcatctaatgaaatgaggtccaatactgctgctgatcgtaatcaatcgtatgccaaatatggacaatttatacctgctgatcagcagattggatcagatgccgaaaataaagctagaagttcaaaaaattgtggcactgtaccaaatccaccgtttatcaatttgaagacactttttttgttgaaagcggacatggaaaagcttaaatcaaatgacaaaaaagaaaaggaatcgaaaaataagaacaaaagcaaagaacggaaggcaaattcaattgatgatttaacggcagtgcagaatgatttaagccaaatgcatgtgcaaacaatggnaaaagtgcccatg

SEQ ID NO: 60590 - DNA, 386 bp, Heterodera glycines
atggttagcatggaccatccgaacgccgacttttattttgatcgcgatgtgcaatgtgtacgcacctttttcaatcggagatttaagtttgagtcagaggattggccccgttttggggacatggtcagaagacgcaatttggacgtggaattggaggcgagcggattcactcggaaaatgcgacgcgatttgaacaaagtctttttccattttggcactgatgtgccatcacagtgaatgatttacaggcatatgacgagggaaactttgaggcgcatttggccgaggacagtgaagaggaaacggaggatggatcatctagggatgaaacagaggagcaacaaaaggaaggcgacgaggaggaaaagcacgagggggagcaaatg

SEQ ID NO: 60591 - DNA, 127 bp, Heterodera glycines
  unsure (1)..(127): unsure at all n locations
aaattgtacaanacttactagttttaaaaaaaaaaattaaaaaatttacgacttttcatcaaaaatttcggaagtcggaattccgacccccaaaaatgttggaaatcggaagtctttccgtgccata

SEQ ID NO: 60592 - DNA, 1185 bp, Heterodera glycines
  unsure (1)..(1185): unsure at all n locations
actcaacccaccaacatttcaatcactggggactcaatccaccaacatttcaatcactgggactcaacccaccaacatttcaatcactgggactcaacccaccaacatttcaatcactgggactcaacccaccaacatttcaatcactgggactcaacccaccagcattccaatcactggcactcaattctcctgcatttcaatcactgggactcaacccaccaacatttcaatcactgggactcaacccaccaacatttcaatcactgggactcaattctcctgcatttcaatcactgggactcaacccaccaacatttcaatcactgggactcaacccaccagcattccaatcactgggactcaacccaacagcattccaatcactgggactcaattctcctgcatttcaatcacttgggctcaacccaacagcattctaatcactgggactcaactctccagcattcaatcactgggactcaacccaccagcattccaatcactgggactcaacccaccagcattccaatcactgggactcaattctcctgcatttcaatcactggcactcaattctcctgcattccaatcactggcactcaattctcctgcatttcaatcactggcactcaattctcctgcatttcaatcactggcactcaattctcctgcattacaatcactggcactcaacccaccagcattccaatcactgggactcaaccgntacggngggccttcggccccactcaccaaatttttgcgtcaaaggtactcactcggccgcttcgcggactcgcactcttcttttggcattttcttatggcataacagttcttccttgtttcttgactttttcttacgcacaacatttttcttctatacaaatttttcaaacaaattctcattcattcatttaaaatttcattaccatttacataagcaaaacaatatctttcatatcaaaaccaaatcaatttataacacacaacaaagaaaaaaaagaaacatttttaagaccgttttttacacaaaatgacaaaagaaaaaaaatgtaaaacaaaaacatttcatttttcaaagcatttatacaacacaacacaatgttaatattataggattttcttagtgaacaaactaatgagtgtcctctttcttttgttaaattttttatacaataaa

SEQ ID NO: 60593 - DNA, 1135 bp, Heterodera glycines
atggttttcacaaaattttccacctaaattttctctgttttttaggtcgtgctgttgaccccctgtttgcacatgctcccggtgagtatcgtctctataaatttcaaataaatttttgtttttaagcgctcacattttggcatcaaaaacatcgagacacggtaattttacaatttacttgcctcttgaacattggattttgatcattttattcgcgcgaagtgattcgcagattttttcaaaaaaaaaaaattttttttttttttttgcttacgttagaaattcttttttgttggttttcctcacgagttacggtatttttcattccgttcagctaccgtatgcgctacttggatctgatcgtgaacccggaagtgcgtgacaagttcgtgacgcgcgcaaaaattatcacatttttgcgcaaatatttggacgcgctcggctttcttgaaggttttttttgttttccagttttttttttgcgaaaatttagaattttatacaagaaatttttgtttttttttggagtgcatttcattccctccccccgtcgttttccatccgaaattttttttttaatttgcaaagcgctgaatgtttttctaaaaaagaaattctagaaattttcttaagaaaaaatttcctaaaatttttttttgaaattaatgtttgaaaatttttttttcaaatcggggaaagggggaagtgacatgctccgatcttttagcatgtccgaatttgcatgtttgaaaaaaattcacccgaattattcgagtcaattaggatccaaaactggaaattacgaaaaattgatttttaaaaaattttattaaaaaaaattccggaatttttagtcgaaactccgatcatgaacccaatcgctggcggtgcgactgcgaaaccgttcaccacgcaccacaacgacttggacatgaagctgtacttgcgcgtggcgcccgagctgtaccacaaggcagcatttatattttttaatgaaaaattctagggcaaagcaattggtttttaaccccttacccgtttccaaaaatttttgtaccaaaattcgaattttttgaaaaaaaatctatggcgtttgaattttttaatttttatgagtcaaattcattttattaaa

SEQ ID NO: 60594 - DNA, 655 bp, Heterodera glycines
atgtcttcagaaattctgtacgtttattatttctttcttttctgacatttcgcattttcttttgcttcacttttgaccagaattgggagatgcaaatttcaaaagcatttttgaaagattagctttttggaggctaaaaattcaatttcaattccctcgctttgatgcttttccttttcttaattaattcattcattcatttccccaatttattttcagtgtgtctaccgtgtttcttctattggtcgattgtgccaccattcttttttgcttctttttggacaatgccaaaaaacgacgacgccctcacaaaaaagaaatgtaaataaaaacaaaaattttaatatttcgaaaatttttttcaattttcagctttatctgcagcgactgttggcttttggtgttcgattttcttgcgccttctcaacttggcctcgaaattgcactgattagccatcgctttgacatttacgtggacgaacatttcaagacgcgcaaatggaaattgaacaaacaatttcttatccaatgggacattcaagaaaatgggacgaagaaaatgcaaattgtcaattccgatggaaatccattgccaatcccgcaaaatccgttgcctaacaaagtcatcggattccgagacattcatatcatgtaa

SEQ ID NO: 60595 - DNA, 1538 bp, Heterodera glycines
atggaaaacagcaacagcaacaacaatgaacttattggaggtggtggcaggttggcagttccggaacgaaatgtcgccttagaacaagatggagaagccgaggccgatgcggggagggaggcggataaagcggaggatgacgacgacgacggtgacgacgactactcgccgttcgctggggacaacatttttttgccagcccactggaagcctaatttctgggcccgccagttcactctggaggtgaaacagtagatgaaacattggcgcaataaaaaagctgttctcctcagacgttctgcacattgcacctggaggtcatgggacttcggaacaccatggccggcacattgagggactgtgagatgacagttggcaatttccatccaatgccacccgaagaagtgcccggcgcaatgcagcagttcgtcgcctggttcaaccacgagctggcttccgcgtcgtcatctgccgctgaattcgcagcgcgggctcagcacacgcttgtgagtagaataaattaaaaggccgatggtaattagtagggctacgatttttagttgctaaaaactgtgaaaatagttgcaaaagactttcaaatttagcgtgtaaaatcacaaaaattttatccaaaaaggaataaaaatagccaaatcagtattgagataaatcattttaaaactacaaattcttgtaaagaataattttaaaaattaatttcttaggggtgtattttcgcttttattgcgtttttgtttatatttttggaaaaaacgccaaaataatttttaaaaatttttttcaaattttcgtttgattttttcggttttgttcttaaaaacaaaaacctagaaaaatagttcgtaataactcgagaaccagtttaacaacaaccgaaaaaaacatgtttttcagtgaacaggacaaaatcacgccgccaaaatccgccgggaaaaaatcccacccccaaaatcgcgctgggacaaaatcacgccgccaaaagccacggggagctcaggaaaatattgaaaaaaactaaaaatcgtagcctcatatatcatcattttgacaaaaattgcctaaggacaaaacgccaaaaaaccccactaatttaaaaattttgccgagattttcccttgattcatccgttttacgacggcaatggaaggacctcacgcctgctgatgaacctcatcatgctgcgccgtggataccacccggtcatcctgcccgagaaaaaacgtgatgaatattacacgtggctggaggaagcttcagacaacaacaacattgagccattcataaagttcatcagcttccaccagcaatgtgctcaagacctggagcccgcgtcctccctcccctcatcctcatcctaattttcaatcactaacccatattatattgtacttatatgtgtatatattaggtatatttgagaaatgatcttcaatctcaccaattggaatttgatttgatgctctcattttctctcagactcactttttgttgaataattcattcgttcgaatatacaa

SEQ ID NO: 60596 - DNA, 438 bp, Heterodera glycines
atggacattctcccatcttttgaccgtccccaactcggcctcaaaatggcacttctttcgccacgttttgatgcgttggtggacaaacatttcgatggccaatcagaatttccaattttgagaacaatcaaaatttgcaaaggtgctgttgcagcaatgccgaaattagccgtgattatcgacgaagacaattcagtgccatttccgttgcccgaccattcgctgcttgagccatttgaattggtgaacggacgaaccaatgaaaagctgatattgatcaaagcaagcgaagatgaatgggtcgaccgatggataatgaaacggtgccaaaatggggagacgacggcggcgattcagtgggaaggcgaagaagtaaattcgagcaatttgaacaatgtgcacattgggattcacgatgtcaatatttgcattgggtga

SEQ ID NO: 60597 - DNA, 844 bp, Heterodera glycines
atggatcctgctaataatgcttcttctgctgaacaggcaccgaatgtgcctttttttcgcatgcgtcgaaaaccgatgaatacgacgacgatgcgcaaacgaagggaggaggacgaaaatgaagaggaaaaacggagggaacggaagagggcggaagaggaagatgaggaggaagcgatggaagcggaagggaaaggagaaaagcagcgacagagaggggaagaaagcgacggaagtggcacttcaacagaggacgacgaaggggcgaaagcagcggcggaagcgacgcggatgaaactcgtggagagacgcaaacatttgcggggccgcaatttgatgcacacagtcggaccttatttacaccataaaaataaaaaaggtattcagactagcaaaaaacggaggagggaaattgaagcgttggcggaagaggaatcctcggaggacgaatcggacgagaagtcggggcgagaaggacagacgtcgtttgaccccgacgtgaaatttgcatccagcggaacgcagcggactgggccgagtgacatgggcgcaacggcgagaagtgaagtgagtcactccggcggaaccttcggattttagtattcaatggcatttttaggttgacactgaatatggacgtgattcgcaatctcaatttgaacggattcaagaaatgctgaagaaagagcgaatggagcgggaaaagagggaggcggaagaggaggaggacaggaagaaatacggggagaaggcgaagcgcaaggagcagccgggcacttcccagcaggtggtcacaattactattagcccatcggacattttgtctatgtaccaattaaattaa

SEQ ID NO: 60598 - DNA, 735 bp, Heterodera glycines
atgaaaatccttctggcaaggccaggactgaagtgtccaaattcctcaaaaaaattaagttaaattttcaaaattttgcaatatgatcttttaaaataaaatttaaaaaatgaatgttttcattcgttttttcatttgacagacggatacatagaccaataattgtcgagcatttagccgtatctttaagctcaaaattcttgatgttttatgccaaattttctcggcatttttctccggctctgattgggcaactttctttgcttcggttggcccgttgcgctccgcgctccacgcgtctttaccatttgacacgacatttgggcgagtaacgacacaatgatttaatttaactaaaactatccaatttttggtgcatttcaggcggtgaagtggtcgaaatccaagggccggcttttgcggaatcgatctccgaaggtgacatccgctggaataagcaagtgggcgactttgtgaagacggacgacatcgtggcggaaattgagacggacaaggtttgggcatttggcctccaaaattacgtatgatggactgctttttaagacatcagtcgaagtgccagccccatttgccggcaaaatcgtggagcttttggtggaggaaggagcgaaagtattggccaaacaaaagctatacaaattggagaagggagccgaggggggtgaagggccggcgaaagaagcgaaggaggaaatgccgaaaaaggagggagaa

SEQ ID NO: 60599 - DNA, 588 bp, Heterodera glycines
atgcattcttgcccatggtttatgagtcatctaatgagcctacctcaggtaattaataaggttgtaaattatatggactaaaaacgccaaatatggacataaaatatggactaaaaactgccaaaatataagttttaagcgctcaaaaaatccgaaaaaatggatttatagtttttaaatgccaaattttatcaaattctagcttcacaattgaaaaccaaatacatttcaattttttggttaataatctcattctttgtcagcgaaatttttcttaagcgaagaaaaacccaaaaaaattttacaaaattttggagaaattctcatttctgggggtgtattttttaaaaatttcccaaaaagtcgatctttatgagtgtatttttctctttttttgcatttttttgtggaaatttgctaaaaaggcaaaaatggcgaaatggatttattcccgaaaacccccaaaatatggatttataaaaaattgtgactctttattcagcgtgaactcaatttcctcaaattttctcgtaaaaattcaaaaaaaaattcatgaacctagccaagggtatttattcagcttgaaaa

SEQ ID NO: 60600 - DNA, 500 bp, Heterodera glycines
caaaagttttttacaaccacatattgccaatctaatttcttgcagattgaaagccatccattgcctgccggttctcggcacagcaaagcactaatagggtgtttgactcacttcaaaaaataattcattacccaaaagttttttacaaccacttattgccaatctaatttcttgcagattgaaagccatccattgcctgccggttctcggcacagcaaagcactaatagggtgtttgactcacttcaaaaaataattccatacccaaaagttttttacaaccacatattgccaatctaatttcttgcagattgaaagccatccattgcctgccggttctcggcacagcaaagcactaatagggtgtttgactcacttcaaaaaataattccatacccaaaagttttttacaaccacatattgccaatctaatttcttgcagattgaaagccatccattgcctgccggttctcggcacagcaaagcactaatagggtgttt

SEQ ID NO: 60601 - DNA, 470 bp, Heterodera glycines
cccaccagcattccaatcactggtactcaacccaccaacatttcaatcactgggactcaacccaacagcatttcaatcactgggagtcaacccaccaacatttcaatcactgggactcaacccaccagcatttcaatcactgggactcaattctcctgcatttcaatcactgggactcaacccaccagcattccaatcactgggactcaattctgcatttcaatcactggcactcaacccaccagcattccaatcactgggactcaattctcctgcatttcaatcactgggactcaacccaccagcattccaatcgccaggactcaacccaccagaatcaatcaccgagactcaattctctggcatttcaagcaacgcgactcaaattaagcaattctccgatattcttccagtctctcaatcaccagacaaaaaattgtgccaaattcatcactgcaatataatatcgt

SEQ ID NO: 60602 - DNA, 500 bp, Heterodera glycines
atgttcgctgctgttgttggcgatttctgtgggaagcgcgcggatttatttatttcgggcgaaaaactcccagaaatgtttgggcaattggacagcaaggaccagcttgaactaaaacgttgttttgtcaaaattgaaggtttttgcctaattgcttttttgtttatctatgatttaattattttgtagatgagtgtatgcagcttaatgttttggcttctgatgttaatgtgtgtggatgtaaagtgacgattggtgataagttggtcactccggtcaagagaaagagtgatgaagcaatttgagtccgcaatcggctaagaaatagtgtgtttttttgtttttgcttttttctttttatctacatataaataagtgaatgtttatgtttgtatgtttattgtgaatttattttggatggtgtttagctagatttttgtatgaatttaaaagtgttgtcagttctatgtttgtatttgtgtggtgttttggatattaaa

SEQ ID NO: 60603 - DNA, 454 bp, Heterodera glycines
atgtcctcgtcccatgccaaagtgactgtgcttcttctgctgttcgtcattgcctttgtggcactggcagtttcggcaccgattgaagaagaagcaaatgccattgttgaagcaaacaatggcaaattagcggcttccattggcacggatgaagcaacaaggtgagatgaaatgcgatacaagacaattaatagtataattaccaaatttcttcgattattagacccgggtcttttattgaactcaaatccggttcgaaatttccttgaaattacgtgtgtttttaagtttggtacgccataaacgatacggatacggctacggctacggtagacgctatggcggctacggtggatggggcggctacggctatggcggctggggtggcggctacggatatcgcagttgttattgtggctatggcggctatggctatggctattatggaaaataa

SEQ ID NO: 60604 - DNA, 538 bp, Heterodera glycines
gaaagccgggtccgggtccaagtttttaaaccgggtacgggaggaacagaaagtggaagaggaacagaaagtggaagagaaagtggaagaggaacagaaagtggaagagaaagaggaacagaaagtggaagagaaagtggaagaggaacagaaagtggaagagaaagtggaagagaaagtggaagaggaacagaaagtggaagagaaagtggaagaggaacagaaagtggaagagaaagtggaagagaaagtggaagaggaacagaaagtggaagagaaagtggaagaggaacagaaagtggaagagaaagtggaagagaaagtggaagaggaagtggaagaggaacagaaagtggaagaaaaagtggatgaggaacagaaagtggaagagaaagtggaagagaaagtggaagaggaacagaaagtggaagagaaagtggaagaggaacagaaagtggaagagaaagtggaagaggaagagaaagtggaagaggaccagaaagtggaagaggaacagaaagtggaagagaaagtgtaa

SEQ ID NO: 60605 - DNA, 380 bp, Heterodera glycines
atgcgaacacgaaacgcactaaaaacaacgaaaatgcgaaacgcaaaacacgaaataatcaacgtccctggtatatgcccctggcattttatttatgaaattatgcatttaaattaatattttagtgttctcagcaatactctcgaatgaatgggagtttaaaatttaaactagggttgggcccccgaccgtcggggttggaaaactcggggttcggggtcgtcggggttggaagcgtcggggttcgggtcggggtcgaccaaatcgttcggggtcggtgttcggggtttttcaatttttttcttccattttttaaaatttatacaagcaaatgattcaaaattaaattcttaatcatcaataatcaattcattttcata

SEQ ID NO: 60606 - DNA, 707 bp, Heterodera glycines
atgcacaattacagagaaaatgaattattgcgaatttcaatgttgttggacccccattttgcatatgatctgaatttatttatgggtggtttctggaaatcaattgaagaggatttaattgattttgcaaaggaaagtaatttaaacaattttaaacagaattttggatcaatcagaattggctcaatttacggattttagtgaaagcgacgagagtgcgttaaaatgtaaaccattaattgaatataaaactttaatttgtaataaaaattttagtggacatttggaacagtaacccaaaatctccttgctgttcataaattacaccatcgacactttctggagaacctgtccccgccgttggcaccaaaatcgaagctcaattagcgctttacaaagatgtttaacgatttggaattgatgcggacatatttatgtggtggagggaaaacggacctcgctttcctgagttggcaaaaattgctcaaattgtgcattcaattccagcaacctccgtgtgcagcgagagactttttagcaaggctggactaatttatgcaaatagtttgagaaacaggtgaattggtttatttgatcgtaaaacaaattaaaaataattatatcttagactttccggaaaaacagtgcgacagatgttagtagttaaggcaaatatggatgatataaagctggcacctccaatttaa

SEQ ID NO: 60607 - DNA, 481 bp, Heterodera glycines
atggcaaaccgacttcaactccttcattatgaaggttttaagttctcgttatttcgtatttaattgactacttatagcattgctgtccatcatactaacaatgaattcaatcgaaacgattttgttttggacgccattcctatcgaatcacattcaggcaacgacattgcagactcaatttataatgcacttgatgaaaacggattaaaaattgtgaaattaatttccattgtccgtgatgacgcaaaaaacatgcagcgaatggctagggtcttaggaaaatcaaggtaaaacattttataaaacgaaaatgattcaaaatttaagtcatcaatgtgtggttcattttttacatcttgtggttcatgatgtactgaaattgggccaaatcaaggaacttacggacaaagtacacgaatgggtaaaattttgcctgacaaggaagggatttgatgtttgaaacgccaccaagaaaaataaa

SEQ ID NO: 60608 - DNA, 1004 bp, Heterodera glycines
atgatcaaaaatgtgatgaatcgtcgtcatggctcagcacattcaccaatggaaattggtaaaagaaaataaaataaatatatttattaataaacaaattctagcaattgaaaagccgataaaagcaatagaaaagaatattattagaccaaaaattgaaataaatttggaaaatgaattggatggacaaagcgccacaaactcaaacatttcgccaaatttcaaatgccctatcaacgaatatttggccgctgttgtggcttatcacggcttttactacaaagtgcccgcgaaaacaatcgcaaaaattgcaatgaatttgatttttgctgttctgttctcccaaaattggtccaccaaacagcaacagaattctgatcagccaatttttgatggcattttgatatttgaccatttttcggtgatccgtcaaaatgaatttgaatttggcgccgaagaattggcgggaaatttgaaaattgaatttaacggaacggtggaaaaagtcaaagactcacgggaaagaacacttccatcagaacagagatcgaaaaagcagatgatttggctgaaagatgtgctgtttatgagtccagagcaaataaaagtttgtcattaattgcttaattacccatttaattacccaattaaataaataaaattaaataattcaggataaaagaagcacaacaaccggcaaagacttggtgtggttcgttggtttgctgctctaccgaatgttgttcaacaacaaacaccccatggacaattgggagccaaagcgccgtttggacatggaattcatggccaagatgggcttctccaagttgaaccagttcaattgcatgtacaaaacggacgattttgtgacgggagactttggcatcgttccattgaagccgaaaagtcggtggatttggatgccggagagtgagcgagatgaaactggggaaatggcactggtggaggaacggattggcatggaacaggtggctgccaattaa

SEQ ID NO: 60609 - DNA, 357 bp, Heterodera glycines
  unsure (1)..(357): unsure at all n locations
atgcattcaanttattcaagatttgctggtgatgaagagtatacngcgcctcagaaaaaactgtttgatctgaccaaagtaattataattaattaattattcaacaaaattatttaattttaatttgttttgctttaattaattgatattgcatttatttttatttaaaattaatattttagatgtgccttcatacatttcctgagcatcgaatctcgcctaatttccttgagcaaatccttgttttgatttcaaactggcagatgtattgtgattaattgtcgaaagcattgcttcgttctaattagccaaaatgatttgataattcatattattgttgtaccggattgtttttaa

SEQ ID NO: 60610 - DNA, 757 bp, Heterodera glycines
atgaatgacatccaaattcaaagccaacaacacaatgtcggagggcatttacagcagaatgacaacaaattgaagcaggagttggacgaagtgattgtgaacagttacaaattcattggtttgggcggtggacggagaggcggtgccaatttgaatttggcggaacaaaaaattcaaaaacatttcgccagaaacaatttatcccaagcaatagatgaggccaatcaacgtgattttgtcaatttggaatcagaatacattgacaagcagatagtagctgatttaatttaatttaacatttatttgtttatttatttttggatttttaaatttcgaattattactagcgaaattgatgtagtcattttttttgaaacaagtaaaaaatatttcaaaaattaataatatttgtaaaacttgaaaatgattccgattaattttaattggcagccgtgcgatggtcccattatatttaatttatttttctaatattaaacagcagaacctaatattagtgttgacaggctgttccctatagttcgatattttttgaattatttcgtaaaaattcaaaaattgatcattttctaaaaaacagggacccaaaataccattaactaaacatgaacttcgatattattagctattttttcagtaaatatggcctaattttgttgaaaagtaacaaaatttcatattcttgttattgttcgatatcccagaattttctctgatagcctgcaaaaattcaaataaa

SEQ ID NO: 60611 - DNA, 1590 bp, Heterodera glycines
ttcttccaccgcaatattttcctcgcatcgccgccactcccccaggcgatgagttcccttgacgagtgcgaatcggaccccattttgggccgtccgatcattcgcattcccattattctcgcgtacatcgccgtgtttctgatctgtctgatcggtcggtcggtcttcgcttttctatttgacccatcgctcccaggcaattcgttcgcaattctcgtcatttgtgcccaccgttccatgcgcaccgccaccaatttctttttggctaatctcgccgttgcggaccttttggttgccattttttgcattttctaggcaaactcttctccccgaagcaataggcattctcactttgttgtagaatatgttccatttggttggcattgtcaccaacgacggacgttggcttttcggtgagaatggtcaaatggcgtgccattcactcatccttcgctttgaggtgccactttgtgcaaattgtacgcgttcgtacttcacctcttcccctgcaccagcattggcattctcgtctgcgcctctgtcgagaaatacatcgccggtttgctttccaagtgtgccttccccttttaaagtgaacattcgttttggtgctccacccgcttttggccctcaaagtgttcaccccgcgcttccgcgttttgctaatggcctccatttgggccatttctctcctgttcagcttgccctattacattttcaccagttacatcttttacaagaatgttgcggtgtgtactcggttgatgcctttgactaattcgacaaaaaggtcgaaaaatgcttaaaaagggaagaggggcgctttttgtgccaaaatctttgataagctttaaaattttccccggatttttttttggcttgaagaaaagtccttggattctattctctctgcgaattatttctggttccggcgttggccacagttatttagtggtggggagtgtttcgaattttgttgtttcatctgctaactgattggaattgtcacaggttaacaatgtcctctccttttgagcacgcgttaccgaattttccattattattattattaaattttagctgtcattgtgattccaattcccttatctctaaaaaagcaatgtgtttgtttggaagggtttgttgtgaaagatacgataaaagggcagatgaatggtgcaaaactggaaaattgattagcaattagaattggacaacgacaaaatgggaaaaatgtgcccattgattgagtgaaggggcgggggcggcaaaaacaatcgcttcattcgccgctttcactggcattctccgatcagtctgatgagcacccgaaacatcgtcacctcctccttcgtcctttggtactgcgttccgttgctgatcatcctctttctttacactcgcaatggtttggtcctgtggcatagtgcgccgctgaagaaactgacccaagtgggcaaattgcgaacaaacagcaacggttggttaagagaagggaaagcaaaggatcagcacaaaaaggcgattgatcattgatcagagacgacgacaattgcctcggggataggcagtgccaaaacaagagccaaa

SEQ ID NO: 60612 - DNA, 1352 bp, Heterodera glycines
cttgcaaattcatttattactgggcatgcaatattcagcataatcattgtcctaaatccagtaaatcaggccgctgaaaaatttttcaaaattccaccaagtaaatttaaaatttatttttgtattttttctaactttattttttttaattagaatttggcatccaacgtattttggtccgtgccattgtgatgggaatggcaatttttgtggccgaatctgtgccaacatttggcccattgttggatttgagtggaggctcaacgcaaagctcaatgtctttgatatttccgccaatttgttatttgtttttgaacgccgctgagaagtatgaaaaagaaaataaaaataaattttatataataaaaatttagatattaaaataacatttaaaaaatttttcatttatttttaaaaataattttacatttttaatatttatttaaattttcaaacaattttaaagaagataaatttattgtatttctataataaataataaattaatatcttcaataacaaagaattatcgtattaaagaaacaattatttaaatattacaataataactgataataaatttatttgcataaatactcagcaattttacatttaaaagtaaattaatatattatttttttttattttaattttttttatatatttgaatttttcatgaaaacggaaatgcgccgagcatggttaaataaggctgacaagcaaaaggagaagcattttgaatcctttcaacaacgagccaccatttctgagtgacaacgaaaataaatcaaaataaaatatttttaatcaaaaaatataaatagtaaattttaatttaattacctaattgctttagtgtgatcaattttacggaacctaaactgttgtttttctgcacttttattagcggtgacaattttgcacaatttttttttttataaataattttattttaataatttagtattcggtcttttgggaggatttgcggcaacattttcggcaattcgggcacttacatcaacacattttgtcccaccatgttacgtttcggcactaatttctgcttcagtcaatgatgtaattaatgaataaataaaaatcggatttttacacacaaaaattcacggattttgagaaaattaagattttctatctcaattgtttctaaatttcttttttttcaattttaggaagacaaaagcattgctggtggcccagtaaattgttgtggcgccttccaaaacatctcaatttacggcgagaatggagcctattgttcaagagtggatcttcatttttatgaataaaactaaattttttatttaaagaattaatgtgatgggaataaa

SEQ ID NO: 60613 - DNA, 839 bp, Heterodera glycines
atgagtgatttcgacagtgaagttcggctccgaccggttcgtccccgttgctaataatttttctcattacccatcaaattaaatatatgttggtatcattcgagagctatataaaatttaaaaaattttggtcagttaaaaaaaaagttatggccaaaaacctcaaaaatcaactttgagcttgttaccagatttgctatcgtgaactgacaaagaaaaaagttatagcatttctaatttgttggcgccgaaacgggccgtgccgaactgatctcggccctattttaagggggggggggggggagagaccgaattatcagggctgctgctttaatttaattgatgggcacactaattaggagtttatacaatatttgttttccaactagtccaaagagaaggggcagatttaatttggatttttgttttgaattttttatgaaaaatggtgaaattcaaaaattttaaaaattaaatggcttttgtatgtgaaatgaaaattttcaacatttaagctcacttgtatgatttatctgagtacggtttcttcactgaaattttcagttgattgttagcaaaaacatttgtcgaacaaatgagtacaagtgtaaaaagaagaataatattcattgatctttattaaaattttgcataaatattaaaattattcattgttattttgattgcctaaagcaatatgtttcataatgttaatgactacctaaattcgtaattacctccccataaatgccacgaacacaaattgatttattttatggttttgtaaaaaaagccaatttccgatttatttggcatacctatgtttacgtttgtgacaa

SEQ ID NO: 60614 - DNA, 940 bp, Heterodera glycines
taattaaatccattccttcgggggaccgtgccgggtgccgcggggtaagcagtgctggttcgtttcatcacggcaccgaaccttttggctagtcagcaatcgttgcttaacttgccagatcggacgggtgcgcatgattccactgttccaagcaccccaccaaaagcaaaacgatataaccaaaatataaggaaaaattttttctccatcttcctttttgatactaaagcatcagagtgctaaaattaagttgtaaataaaatttggtgcgcattagggcactttctgaaaaaaatatttatgaaacaaaaaaatcgattttttcaagtgtccgtttggggtactcaaacatttatggggagcaaaaatccaacgcagaattaaagtacaggctatagggaagctattcccgaaggattcggtctccccataaatctgggcgcatcggttcggggggactgccccgaaaacaaaaaaatcgattttttcaagtgtccgtttggggtactcaaacaattatggggagcaaaaatccaacgcagaattaaagtacaggctatagggaagctattcccgaaggattcggtctccccataaatctgggcgcatcggttcggggggactgccccgaaaacaaaaataaatcgattttttcaagtgtccgtttggggtactcaaacaattatggggagcaaaaatccaacgcagaattaaagtacaggctatagtgaagctattccggaaggattcggtctccccataaatctgggcgcatcggttcagggggactgccccgaaaacccaaaaaaaaattttttggataaaaattatttaaatgaactgactagataatatttaaaataggttatttctcttcctttcagtatccctgcaaagtttggtgcgcttctgatcagtttctgaaaaaaaagttaagcct

SEQ ID NO: 60615 - DNA, 540 bp, Heterodera glycines
cgagtaccagcagcagtgccatcggaacaacatcattaacagcggcggcagctgccctttggcactttcgtcgtccgagcgaatggtcagcgaactgatcgcagcggtcattgagcagagcagacaaaggcaacagctgcagaaacaccagcaacagttgctgatcagtacgaacaaagtagaggagaccaataacagcggaggaagcgaaaatgaggcggagggggaggaaagaggggacgaaatggcaccggaggagggcgggagcatttggcaacagagtaagggcgagaacggcacggtaacggcggaagctgtgccgaaccatccgacgacggcaaatgccgggggagacgaagcacaacagaaaaaggaaatgttcatgagggtacggcatattggacaatcattatcagaatgtatgctaattggtcaattaatgtcccctttcagtgggtccatcagcacggcaacaacatgtacccgtcccgagaacagaaggaacggttggcggcacagatggacaccagctatgagaag

SEQ ID NO: 60616 - DNA, 297 bp, Heterodera glycines
atgcttgaactgctcggagtcgacgtggttgaggaagatggagtcgaatccgttgaagtgctcgaacagctcggagttgacgaggttgatgatgctgaacttgttgaactgcttagagtcgacgaagttgatgatgttgaactagttgaactgctcggagtagacgatgttgaactactagaggttgttgacgttggtgttgttgcagttgaggtacttaaagttgttgtggaagttgatgaagtcgatgttgaagatgtgcttgttgtcatgctttctttgcagcagcaaatgtaa

SEQ ID NO: 60617 - DNA, 669 bp, Heterodera glycines
atggatggtcaactgattgcttctgatcagaaatcgctttcttctgtctctggtgcttcctcaagtgggactcagttgacttgtactgtttgcggagatgtggccaccggtcgacattatggctctgtaggcaaactctcaataaacaagaaattcttgttggttaaggtggcgtgcaacggttgtaaaggtgggaaattacggcatttggtaaaagcgaaggacatgacacatataaccaacttaggctttttccgaagaaccatccgacgcggctacaaatacacgtgtcgtttcaactcaaactgtcagattgacaaacgtagaaataaaaacccatccagagttattgaatgaaaggcaattcacagataaccgtgctgtttgtcgagcttgtcgttacgcgagatgtattcagttcggcatgaaagtggacggtgcgttcgagggaatgttctgtcatttataacgggattgcgtttgatttagcggtacagagtgagcgcgatttaatcggaaaacgctcgcgtactttccccacgacttctccttcagcagcctctactgctgctacggatgcacccacagaagaagaatcgcagggggcgttgtctccagagcctaataaaaatacaattgttcaccagaaaatggaggagaggcataaat

SEQ ID NO: 60618 - DNA, 1386 bp, Heterodera glycines
atggcatttgtggcacttgcgacggtaacagcaatggtggtggtggtcgtggtggtggtggaaaaggcaggtatggttggtggtgtaccggcaacggaaatgtcaaaccatcataccacgcaggctgaaaccgggtaagaaatgtacatttattcttaaaacgaaaaaataacaaaatttgtttgtccattaaatgcaaacggtgctctaatttcagtgaggttctaaatatatttttaaacaggaaacattgctgtgacaacttgccctcgcattcgacactgagtgctttgtgcagaaaaaaagaaaagctaaaatgtgatttttttaatgtgcaaatatagtgacttagcaatagttatccctgccttttattacgcaaaaatagttgcagtctttaaacgaaaaaatagaatcgctaatcgttgtaacataataaaaacttaacaaacaacaatcagaaaattaaataaaatccccccccccatcatcatcatcatataaattttaatgcattacagtatttaagaaaaggtttgagaccaagattgccaggaacggagtatggatggatagatcggaggggaaaggagggggggggattatttgttccatggagcaaaaggagcttaagcaacaaaagaatccaatggaagacatggaatgaaagcaagtatttactttattttagggcaacggattcaattcaatccaattcaattgaattattattattatagtttatttggttaacagtgttgaaaaactttcaacatcacaattcccaaccaatcgatcgatcatccactggcaaatgacagtacacccctcagaaaggcaacatctcgaccaggttgaacagaaagtcgggcccgaaatttgcacgcacagaatcgttcatgtcgaccagagtacaacacgcgtacataggcaatgaattggcttgcataaatccgcatgcttaagaatgaggcaactcgaaattgtttttactcaattcattaacttacaaattttgcgtccattcaatgtgaagtaaacacccctgttggatgcgtcaatgccacatccgaccacgtcccctgtaccaaattgcgcgaatccatccatcatatccggcacgtgcggcaaattacagtggatagacccatcagcccacagcgcaatgctggactcaaaatgcccgaccaattcatgcatcaacatatgctcgggtgccagtcccactccaacatcacttaatatgatcaaaatttttcaaaacatttttttttaattcacgattccatgcgcagaatggtaacttcgaagtaaaacaagccaaaggcacagttggcaggtaacagacaacggaccgacacaaaaccttttttaaaaaataataaa

SEQ ID NO: 60619 - DNA, 598 bp, Heterodera glycines
atgccgccacttcgagctgagcaacatccgccaccactggcgccacaaacaaacaatgtacagcagcaacaaccaactgtaccgagtccgctgaacgagcgccaacagagtgtacaaccaacgcagggtgaacatccacaaatccgggcaaacgccaccttgcaaccaaacgtggttcaagcgcagcagcagcagcagcagcaaagtcatcagtttttggcacttgaccacgacaatgacgatcagcttttgaaccaaatttttttggtagtaaaaatgtaaaaaaaaaatagacatatcaattacaggatctcaccactacagctgaaatggaacctatcgctttggacaacagcaacaacaacaacaacaacaatatggttgttaacgatttttggttttgtctatttgtttaatattgcattttgtttagaacccacaaatttcttcatctcggcgccgaaacaatgccaatgccaatgccggacgtggccgaggaagaggaggaggaaccagacgcagagcggtgagacgcatgaatgaatgaagattaaaaaaaaaaacattttgtgaattattattatttgtttatttttaa

SEQ ID NO: 60620 - DNA, 694 bp, Heterodera glycines
atggtcgacatgtcgaaaatgtggactgaagaccagccaatccatgtgcgtgtggcagccaaaggggccaaaccatgtgccaccggcttcatcatgaatgttgaacgacaggaatcggaaacgggactcagcattgtcgccaaactcttcctagcgtaccaagaagccaagaactacgattgtgaggaggcatgggaccgaataatggacggggaattgaccgaaattgagcctttgcattctaggaaaatcctaatgcaaagggccgaaaaattttcagttaatttattcactgaaatggcgaaaaacacaacgacgggactcggcacaattatgtccattctaatggcacgccaaggggaacgaacgcctccacaaaattcatgggatgagctattcgtagctacgtctgctgatgttgaccactccgaccgggaattgctgctgctgcttggttgtcgtcaagaagactaaaagcaaatttaaattatggcaattccatgttataccatcggagagtgcaaaatggaggtggaacaaaatgctgatcaaattttaaaattttacatttagctaaggatgggactgaaaggaccgtcgctgatacggtggccccaaatgtgaacaaaatgttggtaccgaagcgaaaagtcactgctgacgcattgttggattcttttcggagagaagacgg

SEQ ID NO: 60621 - DNA, 653 bp, Heterodera glycines
atgcaattaagtaatgaggaatttggtacaaatgaccaacaattcaaaactgcacggatcggcaaagtttttgtggaagtgttccgtgcgaccaaaaaattggttaattgtgaggccaattcgctgatgatcaaattattaatggcttttcttgatgaaagtattgaccaattagacgcattcttttgccgatttaatttggccaaaaaagatattcacaacagagtgacggagaagggattcatcagtgactatttgatggaaaattgcgttaattacataattaaaacgaatgataccaacggaaacagcggctgaacaaaaaagagacaaatcggagaaattttagcaaattccattaaaaaacgtataattttttctccgccggacatggaaattttcgaaattttccctaaaaatcaagaagactgtcaatttcggtgtaaaatctgttaattgcataaaaaattccaaaaatttctcgataattgaaaagtctccaatatttttaattatatattaaatatgggtggactaatgagatccgtattttttattcaaatataaaattaaatatggtcaaattcgttgatttgttctggaatagtgacactaataattgatataatcaaactttgaatggcatcaataaa

SEQ ID NO: 60622 - DNA, 361 bp, Heterodera glycines
taattaaatccattccttcgggggaccgtgccgggtgccgcggggtaagcagtgctggttcgtttcatcacggcaccgaaccttttggctagtcagcaatcgttgcttaacttgccagatcggacgggtgcgcatgattccactgttccaagcaccccaccaaaagcaaaacgatataaccaaaatataaggaaaaattttttaaaacattttttctccatcttcctttttgatactaaagcatcagagtgctaaaattaagttgtaaataaaatttggtgcgctttagagcactttctgaaaaaaatatttatgaaacaaaaaaatcgattttttcaagtgtccgtttggggtactcaaa

SEQ ID NO: 60623 - DNA, 583 bp, Heterodera glycines
atgcaaagcgaatgcccgaaagactgcacctggggagcgtgccatcctcacgaaggcgccatcggagacgaatgctgcaaagccggctatgggttcaaatgctgtgaagaggtaaaaaattaaaagatatttttaacatcgtatttatttaatacccatttaaaaaaggaaattctagatccccaaaaaggaaacggactgtgaccttctgaaaaaaagatgcgtccgtggctctgggaaatgtttcccggcgaacggaactaaaggcgatggctgttgcgcagctgaccatgagttggtgtgcgcccaggatgtaatttttttacatttttaaaattaattaataaattttgttttagatgagtcacgatcaaaggaccgccgcttacccgctctatgtaagtttggataaataaataggatttgaaatcataagcattcaaatgaggggaccagtacaaattttgaaaaataattttaaatttgagtatcccgaattctgaagcattttatacccttttttccggttctcaatttctgatcaattttggatgcaattatttattagaattatgccaataaa

SEQ ID NO: 60624 - DNA, 1172 bp, Heterodera glycines
atgttccgctttgattcaaagaatgcaaaatcagaaaatggtaaaaaatatttggaatattaatctattaaaattattaaaattagggattaatgagggaccggatttttatgtatttccattttttcacatttatttcttaaaaattaatttaaataattttttttagcttagtttgaagcgtttaggaatgtattttatgttcagttttacacataccattttttctatatttagatattttaatcatatttcagcaagttaaaattagcctctttttattaccttaattaattttcaattagccaccactgattatcctgtagaggtccccgatgttgaagcagcagcgttcaaagtgatgttgagcttcatttatacgggcgaattggctgaattgaacggagacaatgcaatggcagtactttacgccggtgaattttatttttttaaatttaatttattaattttttttaattagccaaaaagtacaatatcccaggcttggtagacgcatctttgcaagttcctgtttcatcactgcgcaatgttttcgtggcttatgttcaggccgaactttatgaattggaggtgggttggacagattgaaatagtgaatttactgaattttaagcggctttgcccgcttatatttatgagttaatcaaagaccattttgcctaccattgcttgttttacattgatgaaaatgcggacgatttgatcaaatcggaggaatttttgcaaattgaccaaaatttgttgtgtgaaattttgggacgtgaagaattgaaaatccgtgaagaaatttcaatttggaacgctgtaattttactataaataagtaatatttctaattaatttgttatttctcattaataaaggcactccgttgggccgacgcgaagtgccgtcaaaattgcattgaacgctcggcagggaatcgtcgtgtcgttctcggtccggcactgttcaaaattcgctttccattgatcccaaatgaggaattttcgaagaaaattggtaaaaataaccaagccaaaatgtttgaattttttccgatgagcagctgccgattttataaaaaacgaatttattttattataattttttataagttttaaaatccagttttttagttccatctggtgttttatcaaaagatgaactga

SEQ ID NO: 60625 - DNA, 118 bp, Heterodera glycines
ttcttaactttttaattttttatttcttgcggctaatatcttctacaataatttgtcagtttggtcggatgtgcgtaaaacggaaaaaataattaaaattttataaaaatataacaaa

SEQ ID NO: 60626 - DNA, 388 bp, Heterodera glycines
cggtaggggtcaactccgtctggccaactccgtctcaacatcgttcaaaaagctataacttttatctttgttggccaaacttcacaatcatggtatcattcgaatgccctagatgtttagaagatatttataatctatttctcagtgattaatccgctctcaaaaaagttgtcagttgaaaaccgcaaaaaaggcagaattttcgaagttttttatttcaatctttttttatagttcgaaattttctgtaatttttagtaggctaatagagcctgtgaagagctttcgaatgatatcaagattgtttgattcggtcaataacttcaagagttatattgactaaagtttgctcagacggagttggccagacggagttggcccgttccgc

SEQ ID NO: 60627 - DNA, 1898 bp, Heterodera glycines
atgatcacccggcacatgcgcacccatttgttgctggacggctcgccggtgccatttttgttcgccggcacgccaacaatggaatatgccgaaattccgccgatcagcaaactgtcgctgaactcgtcgtcatcgtcgtcgcctggtgccgctgtcaacgccgcaactgcgagcagtaccagcactagcggtagttgtggcactacggccacagctcaacagtcgctcagtgacactgggacaacaactgcactcgctggcgggtcgctgtcatcggcgtcgtcggcgactgtgccatgggacgagccccaagcgactcgcgtcgtcgcgcaaccacaacctccggcgccgcctgacccggcaccggcagagcccggcaacagcaacaaccacaaaacggcggcaatggagcaacaacaacagagacagcagcagcacatggagcacatggttgcggctgccaagctgttgtccgccgcggcacagcaacagaaccagcagcagcatcaagcagtacaagaagcggcggcggcggcacgcatgccatccctggagggcttactgaaccagcaaatggtgctgtccacgctacacggtaaaaaatttttctgatcaattttctgaaagctgctgtggctgatcaaaattccccctgaacacatcaatttgtatatcgcgtggtcttgatcaaattccctgatcacattcattgtatatcgtattggaaccaatatttttcgatcaactttttcgatcactgccaattttccgatcacccgactgatcagtagtaactaattcccctccaaatatttcagcccaattgccggcacatatgaggcggtccactccaaatctgttcagcgtccctgactatcagcagccgagcgcatttcgaccgccgcctcccgcagccgccgcggttgccaaccttttgcagtcgcagcaaccgcctcaacagtcgccctcctcagtcgccgcgaacgcgtcagcgacggttgcggcggtcgcactgagcaacgcactgtcttccgttcagcaactgctccaacaccagcaacaacaacaccagcagcaacagcaacaacaacggcttgccgcgatggcagtcgctgccgccggcgccgctaccgccaacggactgttccggcaacactcatttggcggcatcggcttcaccgagcagcagcagcagcaacaactggtgcaactgcaacaaatcgctgctacacaaccgacgcctccaccactgctgcaacaacaacaacaacagcaacaagctgctcacaatcagcaacaaaatccgccaaaatgagatggatggcattagcacacagcacacaaaactcgttgttgttgttgttgttgttttgttgttttcagcagggctttcttttcctcttctatgtattaataagtgattttttgtatggttcatggtattttctgatcactgccttagtgatcgtttttttaatggatttcactgatcagagatcaaaattttctcggctttctttgatcatccactgatttgagttgatcattgatcattttctgtctgtttaattttttcaattttcttgtctcattgatcagttcatgatcaagtgatccagcctcctttttgatcagatttctgatcggattattatgactaatcaattaattaattcattagcttattcaattgttcaaattcaaattgtacagaattcattcatcattttttttctgaattgtcctctctttctttgtacagtacaaatgttctatgttattacattggccaaactacggtatacttctactctaataattaatatacgataattacatttctaattatacattgtttcctatctttaatttaattaattaattaataatggaataaa

SEQ ID NO: 60628 - DNA, 64 bp, Heterodera glycines
  unsure (1)..(64): unsure at all n locations
gccaaattccctcgcctccctttgccctttgatctgttcctttttgttttcaaatgntgcggtt

SEQ ID NO: 60629 - DNA, 627 bp, Heterodera glycines
atgtcaaacttaaatcctggtaattggtggtattattttgagcgtcaaggcaaatcaactgctaaatgtaaagccgatggatgttcctactcaaagacattaaatgcttctctcagtacaacagtgcttgcttctcatctcaaaaatcaccacccacaactttacaaacagcgtgaagattttgttcaagcagagaagcaaaaaacagaaaagaagggacaaagtggaataaacccattaaaaagggcttttgtcggtttacgtgaggacaaggacaatcgttattcaaatataaagaaaacaattgcgaatgccatcgaattgcggcttaaacaagccgaagaacaaaaaaacctagttcttgcaactattttggacccacgttttaagaccatttaccttgacagcagtcggctgaatcagtacaaagactggttgataagtgaagttgagagttaccatgcaaagactgatgtgattttattttttctatttttgtaacttaatttttttaggaaattgatttacaaattgacgtaagagactgcagtggttcaagttcggctggggatattttttctcgttttgaaaaggacgcagaatttgagcaaataatgaatactgtaa

SEQ ID NO: 60630 - DNA, 1015 bp, Heterodera glycines
atgccaatacaacaaaaacaccaacaagttgctcggaaactgaacacatcaattctaaagtcgctcaatgagcgtttatacccgcaaccgtgggtaagaagaaataaaacaaaatgccaaaatcaaaaatcaaaaaatagtggatgggaataggccgaaatatgcatttatagccccatttattactaattaacttcaggaattaaaatggcgcaaggtgaatgtgtcagaaactgaccaaaacggtttcattttgacacgtaagaatagtttttttaaactaatatgtcgaattttctgttatattttagcgtgctttcatgatttggccgaattccccgcggcaaatttgttcaacaaaaaatttcgaattcgaatgaaggccgaacttgagcaggagcagaaaacatgtaatttagtaatttaaaaaatagaaaattaaaaataataaaaaaagaaaaataattaaataaaacaaacgcttgaaagacattgtaaaattgaaaaaaaactattattgtttttccaattttaggtcaaattcgatttccgactggcgttcgtctccgttatcggtttcgcttcgttaatcccaatgtggccaatttttttattttacttattttttaaaaattctaaattaaatcacgtaaatattcaaaatatttttgtaattcatcaaatttccattttttcaaattttccatccattaattttcccgagttcgtcagactcaagtcttttttacgtatggcagctcaaaggaacgaatggtgttcttttcgcggaaaatctcaacttttgagccgggacttcccgataatatttggaagggtaattaattttaaggataattaattatttttaatttaataaatattttcaaaacatttttaggcattattcacatcccatgcaaattttctctgctgatttttaacccatttgtggccggcgaagtgttcgaatttcatattctcgacggcgttgaacatttggacaaatgctctgctg

SEQ ID NO: 60631 - DNA, 504 bp, Heterodera glycines
atggagaaggcctgcaaaatttggagagattatatcgattttagtgcgctaggttcgatgaaactttttaaaatataagcctaaactttttggcctgtttaaaaaggaattaaaaatttttaaaaattttattcatctcccttttgatagaaaaagcatcagagagccttatttaacttttaattaacatttggtgcgtttcagagcagtttctgaaaaaatatttatgaattgattttgctaaaaaaataaaatagtgaagctttaaaaattaataaaaaattttaaattcagaattactggagttagcatcatagcagtgcttttccttgtctttttgatgctctcgcaaaatctggttcgcttctgaccagtttataaaaaaaaagttaagcctaaaatttttcgcatatttaaaaagcaattaaaaatttttagattttttattcatctccctttttgatagtgaaagcatctgagtgcctaaaataacttgcaaataaa

SEQ ID NO: 60632 - DNA, 75 bp, Heterodera glycines
atgagttgttataatagcattaagcaaaagtccgaaaagagtgaaataagcagcacagacagtcaacgaaaaaag

SEQ ID NO: 60633 - DNA, 1385 bp, Heterodera glycines
ttggctttttgtgcatttaaattgattttgttttgttttttagaattattcttccgtttttaattgcaaagggaacgaagtgaacgaaggtgtgccgttgaaactcactgagtttgcccttttcacttttgactgtttgctttttcgctaggccttctcatcgcttttcgtaacgaccatttccattcgctggcggagggtgacggggacaattttacggtcaaattgtcacagtttttggaggaggacaccgaaaattcggacattcgctcgtatttgaggcatagggaaatgctgcgcaagaaaatcacctcacgtccgacaattcttcaggtttttcatcatctaacggaaataaaattggttgtgaagtccgatcaaatctcggattatgccattaaaattgctccactttttttaagttggttcgactacgtgctaaacatgggggacaacaattgttgtgtgcaaacacgcatttgtattatgacccgaaatacgaggaagtggtcagtgggcggtgctttcatttggctttgttagccttccattcattccccgcttcttcaatttgtctttgaataaaaaaaaattcaaaatctttggttcccatattgatggtcgtcttttttgctcattttttaaattttttttaaatatttcatttttttatggaagaaaacggtaaaagttttgttttcttaaaatgtcgttctttttaagaaaatcattcaaacccttctctgtcttcggtacattgacaaaatccgtgcgcaactttcaaatgattcgtcgtgccaaatccaagtgatattcgccggcgatttcaacaggtgagtcgaatgcttaattgggcatcgtcaaattcgaacagttcgttcgtcgtttttttgagtgtttttcattttgtttaaatgcaagtttcgtttccttgttgtcccgccctttttcagcactcccgaaagtcgcccaattgcattgattggtggcgacgaccaaactttggaaatgaaaccagacgaaaaaaactacgaaactaacgctgaatctctgaaagttaaaggtgactggccaagctgagtgattagcaccgaaaccctggcccttcctcccctgtcgtggttgaatttttttggcattccgtctgtttagcgcccttcaaaagccaacttctgtccggttctcccgactacaccaacttcacgtgtccccccggctcctccctgggcttcaacggctgcttggattacatttgggcccaccctccgctgcgcattgagcacatttggccaatgccggaccatcggctggtcaccaaatacgacgcacttccgtctccaattgcgcccagcgaccatttgcccattttgtgcgacgtccaattg

SEQ ID NO: 60634 - DNA, 60 bp, Heterodera glycines; identical to SEQ ID NO: 52045

SEQ ID NO: 60635 - DNA, 321 bp, Heterodera glycines
atggctttgaccatcgagcaacatttgcaggaaatttcgcagcaaaatcaaaacccgtcactttcaggcattgacgtatttgaattgggcgacgaaaccaccaacatcgaagattggctgcaacaattctgctttgcgttggattgttcggcgcccaatctgaaagatgagcaaaaagtcaagctactgatgacgaaattgagcaaagcggcattcagcgagtacaagaagtcgtgcttgccgaaagatgtgaccgactccaattttgccaaaacggagcagcaactcaaggcattgttcgccaaaccacagtcggtgtag

SEQ ID NO: 60636 - DNA, 2328 bp, Heterodera glycines
atgtatttgtccacaattgctgaagctaaatgcatcgaacagccagccccatcaaagcaaattttggctgtcaagcaaaattttgttccaaaaacaaaaggctttgaagcacgtggtcaatttcaacagcagcttaaggtgtgctggcgctgtgggcgaggctcacattttccaagtgcatgtccgcatattaaaattgcgtgccgaaagtgcagcaaagtgggacatttggaagcgcagtgcaaccaacaccaaacatggctgataaggcaagggaaaatgcaaagccgtaagcaaggcaacctcaagcttggaggtgtgctgatcaatttggtgaaccaaccgaaacggctgattgaatgccctattaaaatgaatggaaattttgtggaattcgcgctggactcaggtgctgaggttgtagtggtcaatgaagagacacatgaagcgatcggaaaaccgaagctgagtccatgcaatgttgaagcgaaataccacgacggaacaaaatgcacccttcttggaaaaggggaagctgagttcgaattcggagggataatccgaaaagggcaattttacgtctccaagagagggtcattgaatttgttcggcatcgaaatgttggatgcttttggcctcatggacgacgtcagaaagaaagtggccatgacattgaatgtgaataatgtcaaaaaggaagagtctgttgttgatgaaacactgagcagactcagggcgaagttccctaatgtcttttcgacaaatttgggccactgtaaaaaggcaaaagcgcgcctttccttaatggctgacgcaaagccagtgtattgcaggccacgtccggttccttacaacaccaagttggttgttgaagctgaattggaccgtcttttggctgcaaatgtcatccgtcctgttgaccacactcggtgggcagcaccaatcgtggtcgtcaaaaaggcagctggttcggcacgtgtatgtgctgatttttcaacgggtcttaacaatgttttgctgtcgaatcagcacccgttgccagtgcctgaggacatttttgcgacactaaacggaggacatgttttctctcagatcgatttccgtgatgcgtatcatcaaatcgaattggaagagggatcaaaagagttgtgtacgatcgcaacgcaccgtggtaattttgagtaccagcggttgccattcggagtgaagtccgctcctggcatttttcaatccattatggattcgatgttagcagattgtccatttgccattgcttatttggatgatgtcattattgtgagccggactcggaaggaacattggactcatttggcagaagttttcaaaagaattgacaattttggctttcggatcaagccagagaagtgttccttcggcaaggaacgaatcaaattcctcggattcatcattgataaggatggccgaaggcccgactcaaccaaaattgaggcaatccgaaggatgcccattccaaccaatgtgtccactctccgatcatttttgggaatggttaaccactaccaacaattcgtaaagaatttgcggttcattcgccaaccgttggacgaccttttgaagcaggacacggtctggaattggtccagcgaatgtcagaaagcctttgatcaggtcattggcacgcttcagtcggaccaactgctcacacattatgacccatcacaagaaataattgtgtccgctgatgcctctgagcatggtatcggagcagttatttcccatcgttatgcggatggaagcatcaaggccatcgcgcatgcatcgcattcgttggctccggcagaaaggaattatgcccaaattgagaaggaaggcttagccttaatttatgccgtgcaaaaattccacaaatacctttatggaaggcattttatcctgcaaacggatcataaacctttgctgtcaattttcggcaacaaaaaaggaattaaatcctgcaccgccaatcgattgcaacgttgggcattgattttgctcgcttatgattttgatattgagtatcaaaacacatcggagttcggacaagcagacgctttgtctcgattgatctcaaaaacgacgattgaagacgacgaagtgatcgtggccaatttgatgaatgtggaaacggaacttttgaatgctgttgtaaagcaatttccgttgaattccgatcaattaattgttgagattggaaaagatgaagtgctaaaaggtcatgaagtaccttcgcactcaatggcccacttcaaagaatatgtctttaaaaatcattccatttcaccgcaggcgagaagccttatcaattga

SEQ ID NO: 60637 - DNA, 691 bp, Heterodera glycines
atttgtaccccttctaataatgctgtacctcttttaatcactgttgtacctcttttaatcactgttgtacctcttctaatcactgctgtacctcttctcatcattgttgtacctcttctaatcactgttgcacctcttttgatcactgttgtacctcttctaatcactgttgcacctcttttgatcactgttgtacctcttctaatcactgttgcacctcttttgatcactgttgtacctcttctaatcactgctgtacctcttctcatcattgttgtacctcttctaatcactgttgcacctcttttgatcactgttgtacctcttctaatcactgctgtacctcttctcatcattgttgtacctcttctaatcactgttgtacctcttttaatcactgttgtacctcttctaatcactgctgtacctcttctcatcattgttgtacctcttctaatcactgttgcacctcttttgatcactgttgtacctcttctaatcactgttgcacctcttttgatcactgttgtacctcttctaatcactgttgcacctcttttaatcactgttgtacctcttctaatcactgttgtacctcttctaatcactgttgtacctcttctaatcactgttgcactcttctaatcgctgttgtacctcttctagggcgcgaagcgcccgcccaagccca

SEQ ID NO: 60638 - DNA, 870 bp, Heterodera glycines
gaagaggtacaacagcgattagaagagtgcaacagtgattagaagaggtacaacagtgattagaagaggtacaacagtgattagaagaggtacaacagtgattaaaagaggtgcaacagtgattagaagaggtacaacagtgatcaaaagaggtgcaacagtgattagaagaggtacaacagtgatcaaaagaggtgcaacagtgattagaagaggtacaacaatgatgagaagaggtacagcagtgattagaagaggtacaacagtgattaaaagaggtacaacagtgattagaagaggtacaacaatgatgagaagaggtacagcagtgattagaagaggtacaacagtgatcaaaagaggtgcaacagtgattagaagaggtacaacaatgatgagaagaggtacagcagtgattagaagaggtacaacagtgatcaaaagaggtgcaacagtgattagaagaggtacaacagtgatcaaaagaggtgcaacagtgattagaagaggtacaacagtgatcaaaagaggtgcaacagtgattagaagaggtacaacaatgatgagaagaggtacagcagtgattagaagaggtacaacagtgattaaaagaggtacaacagtgattaaaagaggtacagcattattagaaggggtacaaatctgattagaagaggtacaacaatgatgagaagaggtacagcagtgattagaagaggtacaacagagattaaaagaggtacaacagagattagaaagtgggcattcaaatattgcatttacggtaattaaggaattgtttttattcaaaatagataaaaaatcgatgtgttatatttttcattttttaaaatataatacactttttat

SEQ ID NO: 60639 - DNA, 962 bp, Heterodera glycines
  unsure (1)..(962): unsure at all n locations
atggagcaggaaaatggagaaataattgaaaaaatggacaaagaaaaagcaaaagccgatcagaaaatgaaagaactgatcggggaagaaaaaaggacaaaaaagaaaaacaaaagagcaatgaaaaggaaacaaaggcaaagatcagcagctgatcagaaagagggagagagtgagcagaaggaggagaaaggaaaagaaagaaatagggaagagagcgagcagaaggaggagaaaggaaaagaaagaaatagggaagagagcgaaaggatcagtgaagagagtgagcaggaggaggagaaaagaaaagaaaggacagaagaagagagtcaatggaataccaaagagagtgagcagaaggaggagaaaggaaaagaaagaaagggagaggaaagtggacaggattttgctagagaggaaaacgacgtggaaatagtgaatgaccaaaatggtggtgagagaaagcaagcaaagaaaaattgtgaaaacaattcaatggagttaagagaaaaccaagagagaaaaattagaaaagaaaagaaaacgcaaaaaagagagagtgcgcaaaaagagttgaaacgaaaaaaagacaacgatggaaaaagtgagagaatcagtgaagaaaaaattgaagaaaaaggcagaaaaaacaacaatgagagaaaggagagcagagaaaaaaatgaaggagagagtacgcaaaatgagaggaaaagaaataaggaaaaaagaaaacagaaattgaaagcattggaggaaaataatgaaataaacataaatagttggaataaaacagcaacagattcagtgacaacagaagaaagtcaaaaacagggacaagaatatggagaagagacaatggaaaagggaggaaaagcatncgcagagaaagaaagggaaaatgccatcgaatgatgggagcgaaattggcaaaagtcaatttgngaagtaagtaattacaa

SEQ ID NO: 60640 - DNA, 93 bp, Heterodera glycines
ggattatttttcaaaacacctcgtagactggggataattggagactgcgggattaatagagactgggctataattagagcatatacggtaatt

SEQ ID NO: 60641 - DNA, 807 bp, Heterodera glycines
ggggaccgtgccgggtgcgcgggggtaagcagtgctggtccgtttcatcacggcaccgaaccttttggctagtcagcaatcgttgcttacttgccagatcggacgggtgcgcatgattccactgttccaagcaccccaccaaaagcaaaacgatatacccaaaatataaggaaaaattttttaaaaaattttttctccatcttcctttttgatactaaagcatcagagtgctaaaattaagttgtaaataaaatttggtgcgctttagagcactttctgaaaaaaatatttatgaaacaaaaaaatcgattttttcaagtgtccgtttggggtactcaaacatttatggggagcaaaaatccaacgcagaattaaagtacaggctatagggaagctattcccgaaggattcggtctccccataaatctgggcgcatcggttcggggggactgccccgaaaacaaaaaaatcgattttttcaagtgtccgtttggggtactcaaacaattatggggagcaaaaatccaacgcagaattaaagtacaggctatagggaagctattccggaaggattcggtctccccataaatctgggcgcatcggttcggggggactgccccgaaaacaaaaaaatcgattttttcaagtgtccgtttggggtactcaaacaattatggggagcaaaaatccaacgcagaattaaagtacaggctatagggaagctattccggaaggattcggtctccccataaatctgggcgcatcggctcggggggactgccccgaaaacaaaaaaatcgatttttt

SEQ ID NO: 60642 - DNA, 684 bp, Heterodera glycines
atgaaacgcccaatggactcaacagcaactccgccttcttccaaaaccacacgtatttccgcggacgctttggctggacaaatcgactcactttctgctgcagtcaacgcactgcttgttcaggacgacatttcacaggccgtcaaacttcagtttggcgttttgcttactaccctccacacgtgccaacacgtcatcgatggtctgaacaacaacgcaaacaacaacagtgccgaggaacaggaacgccgccgttccttggtcatagtcggtcttccggagaacgcttcaacccgtccttcggagcgtgttcgcgaggatcaaaaggttgtctcggggattttggacgaattgggtgttgtggcggtgccaacgacgacctaccgaatgggccgaccctatgttcaccgtgcctctccacgcctgctcaaagtggtgctgcccgcgtcggtccatcagcacatcgccctcggcggctggaaaaaggagcgcattcgcctccgttctctgccaaactggggccgtttgctgattcgcccgtctctcagccgtgaacaactccaggcggaatacgaacaaagacaggccaaacgcaacggaatgaccaaccatccgcctaatgccaacaccatttcaacccaattgcatgaacttggacgacagatgaaccaaaattttcactga

SEQ ID NO: 60643 - DNA, 304 bp, Heterodera glycines; identical to SEQ ID NO: 51570

SEQ ID NO: 60644 - DNA, 303 bp, Heterodera glycines
aaaattccctcaaaaataaaaggtctattgcgcaccgccctccctatcatgctcgagagcatttgtatgtgtataaaatttatcaaaaaaagagatagccatttttctgggataacctctaaatataaaaatcctctgtgaaataaaatggcgattgtgcacagccctccgtctctacgcaagcgcttttgtgaggtataaaatttctcaaaaaaagagatagacatttttctgggatagagtataaatttaaaaattccctcaaaaataaaaggtctattgcgcaccgccctccctatcatg

SEQ ID NO: 60645 - DNA, 305 bp, Heterodera glycines
atgtatatatttggctatggaagtcttctctggaacccaaatttcctttacgacgaagcaattcaaggcgttgtgattggatacgttcgcagattttggcatctttcgcctgaccatcggggtacccccgacaacgtaacacttcatcaaatatcattcagataaatttgtttcagcctggccgtgtcgtgagtttgtttcccgatgtcagtggaagttgctggggtattgcgtacaaaatcaacaggaagaacatcgaaagcactttgaaatatttggaccatcgggagaaggcggggtaccaa

SEQ ID NO: 60646 - DNA, 302 bp, Heterodera glycines
gtcaatggcgagtcattagtcaatgcgcggcatgacgagggtttgttttgcatttggaagtgattttcatgccaaattttaattaatttgctcttttgcagctgtccgtgcacttaaacaagccgggaaaatggtcaatttgcaaggcattcaattgattcattcatttatcttcaacatttttgaattcttttctctttccagtgcaatatcgacgcgatttgcacctccgtcgggagaatatgctgcaccggctgagttgggaggagagtcgggtcggtgcgtcgtcggctgggccgacg

SEQ ID NO: 60647 - DNA, 812 bp, Heterodera glycines
atgaaaatctttttaaattccatggacaaatgcgaaaatggcggaggaacacgaattattggagtaattaacgaccaattgacggaagaaaaaagtaaaaaaaaaaaaattcaaaaagatattattaataataaaatcatattaaaaaatagaaaacaataaaattttattttcataaaaaatgaaatctataatgtaatctaataattttaaagacatttacataaaaaaaaatattttaacggttattttttagtttttattgacttaatttaatttttggctataagaaatttcattattggaaaattttaaaaattcaaaaattttattttattaatttaaaaaatttctcaataaattttatatttaatttcttttttatattatatttatttacaaatattaaacgcttttttatagagaaaggcttttccgcatcaagttcaaacattcaatttggaaagcatttgctgacaaagaattcttttctgacaacagataaacttggtaatattttgaatttttttaaaaaaaattattgaaatataaaattgttgtatttaaataatgccaaattttagaaatatgcgcatacagcttgagctttatccgttccattttcaaccttggcgttgaatcgctgaattatcttcagctagtgacgaccgcttcaaaagctaatattaaaatttttaaggaacaaatcaaacaaattgacagcatttgtaacaagtttcaaattggcattaatgccaatgtttatttcgaagcgccatggggtaattaattaaaaatatttatttatttaa

SEQ ID NO: 60648 - DNA, 4793 bp, Heterodera glycines
gcaaccggcagccgaacttttgccagttcgacgtcggcttttgtcaccaatgaccaccaacaacagcagcaaattcatcggcggaccagcggcaccacaacatttgttaagggaactgccttaattagtcgtggtagcattgttggcggattggtggaactgaaaacgtttggcatggcgtcgtcgaacggcgcggagttggggctgaacccgtgggactttgacgtgcagccggacgacgactttgtcagccaagtgagtgatagctcaaaatggaattgattgattgtgcaggcatatttactctgatgaatgtgccaaattttgattccgactcaattttcggcaggcaatcccgagagtgaaatcgggaatgacaaaatttaagcgatttgtctcttattctcctgtgatggtgccgtagtgttattatgccgtcgtaaattttaaaaattgaaaaaaagttttcccaatttttaaattgttttcccatttttgtttttatatatttcctttattttgtacagaccaaaatcttggaaatgccaaattcgcatcggctcggcgcctgtcacagctgtaagggtgaaatgttggtgcactgtttccactgccgtgggtcgggcaacgacaaatgctcatactgccggcaagtgtttttttattatttatattttttgttataattttaaaataacatttttagtggcaccggcatgaaggcgggcgttgctcatccaggtaaaaaactgacgtggacaccacaaaatgggtatttcggcacaaacccttaaatagttatgtctgaatccaaaatccttgaccaaaaaatctctaaatttgtcgtatattccaaaaactcctcaaattaaattttttatcaaaccacaaaaacctatttgtttataggaggcgcactacctttttagaagaaatttctatacaaaatgttttcgaagtgttatatagcgttttttcaaaatttatgatgaaatattattttttttaaacagtgaaattttttcatttttttaactttttcggggaggcggggaataaagagcacacattataaggactcttgatgctatttctttctgttcatcctctgtgtccccaattttcagctgtgtacacccatccgatgattggcggcggcacttttcccggcgcgcccgcttctgttggtggttgtggtgttgctggtactgctccaaaccgtggtgctgctggtttccaccaccaacaccagcttcaccacccgtttgccaacccgtcaatggtccgtccggcactgctcggtgcccagcgggacaaaccgtacgcggccggcacgcccgtccatttcatggcaaaggctgggctaccaccaccggtgcgagtattgtattatacatcttacatgtacacccaaatgtcgccagcagaaaatcgcaggaaaaaacaataataaaaaaattttcaaaaaattcaggaaaagttctaaaaaaattttttaaagctttttgttttttgaaaatctaggtgttactggaaagcaaatttctgaatttccacaagaataaaaaaacataagaattttcttttatcttattgctcgaatgaaaattaatttgtattttactgtattccgacagtatgccaagtgaaaatcatttccgggtgcatttaaaaaaatcaacctgattatatgactccgtgaaagccctggcaggatccgatcctgatccgggcccttccctatacaatcatcataaaaaaataatttctgttttccagggcattggccaacacgacctgtgcattttctgccacggccggggcatccgcgactgccagcactgcaagggccagggcaaaaagcactgtttgacatgcggtggcaatggccaagtgcacgtgtacaccaaactcaaagtggtcttgtgagtcgtttgttcatttttttatttcggtcatttcaaatgtttggcgtaatggtgttgtgtccgtacccaaactctggacttttcccggttacttttcagcaaggcttcttttaagacaatttattaaaatggaaatcaaaagtggaaatgcaaagttaaataaagaatgatcgctttttaatagtaagaaaaacaaagcaaattgttaagtgagttgtatcgctttaggcagggatcctgaggataagagaataagcaaagacttaaataccaatgacaaatgggaggggccaaacagatggaattacacaaaattgtttggaagaatattttccgatggattggacgaaggggtcacttttatgagtgagtgaggaacagaagggccagggaaattacaacataggaaatgccaaaaacggagaaaagagaaacaaataaataaatggcaatgattaagccaaaaatgcagatccaacaaatggttttttcaaattttagttctgtcgagtgcaccgattattacagcgcgtgcggcgtgcctgaagttctcttacgacaggcgaacggcgagctgattttctccgaaacgcggccttatgtaagtgccccccccccctcaaattttatagattttttttccaaattagactaattaaattatccgatcaaggaaaatatttcgaccacttttacggttggagaaagatcactttttgtggagaaaaatagtttttttttttgcattaattcattttttaaatattaaatgtcatttacgctttaaaaattcatttgtcagaggcaaaatacggtgataaataaattaaaatcaaattattgggaatatatttagattaataaaaaatttcaatagaattatggtgaaattcttttaaggtgcagccaattaaacgggacggactcaccgaaatcaacgatgtcagccgacgcttctgtgccgcccacctgaagaagttgttggactcgtgccgtgtgctgaagcaacggcactgtgtggagagcattgaggtggccaaagtgcgctttcgtcttggctcaaaaatgggccatttttttgtgtacggacgccaacggttgtgctacattccggaggggccgacccggtgcagtgtgatgtgaaaagtgtgtgcacgaacgacccaaaaagcggagggaccgtcaaatgacggacagacaaactgacaaaactaccgtagtactattactacggtgtaaaaatactgtattagacaatgccaatgaatgaaccgccggagaaattaggccgccgtatttgctaatgagcgcagttagccacccccgaaaaaatagtgaaattttactttctctgcactttgggaaatttaaaatttaaaaaaatctttaaaattattttttgttttctattaaaatataaatttgatttgaagaatggtaattaaaatttttaattttttaaaggaatttcaaatttcgaaaaaaacacagaacaactatttctcatttccatttgagcaaatacggtattctcagctcgaatgtattcccatcctcaggcctcttccggtgaaaaattcctaaaatttaaatttcgacagtttttcctcttgtccatggtttcttaatcctgatttttggactaaaagccccaaacaatcaatttgaatttatcttttttgtgtttaaatgcaacccaaagaatgatctctcgcgttttgcttactttttgttcaattcatcttttcctagcgtttttctccctcatcaagttcaagcagttcagctttaatatttacatttaaatcccaaattcggttgatttttcgcctcggtttttgttgttattttctagtcatcatttttttttattcttcctcaccttttttcattacaattttttgttcatttaccttatacaaatatatttgtggtgcaaatgctaataaaaatgcaagtattcatttttctcatacatttaaataaatatttttttaatatacatttagttgaattattaaattgccacattttttattaaaataattcaatgttttttaagtgttttagttttttgttttttgctcgtttatgaagttcgtctttctgttgctgttggtcagctgcttcctgctgctgattgtgaacattgcttttggcattgacgaccattcatcatcatcatcgtcgtcagcagccgacggcgttggcacgtgtcccgcgctttcggcattcccattttggctgcgccgccagtgccccccatttgaggatacgcgttgtgccatagcgtttccaagcgatgtgccggcaccgcccgggcaactcagctgcgcgttgggtaattctggcggatggacaactgggccccggaaaactcaaattgtggcagaatgattggaccaccgcccaaattgggttgactcggacaacggagttatgtttcaaaaaacttttccgatgccaagttgctctcccaccgtgattatatggatcggaagaaattttgtagttggaatcggttcaatatgggaataaattgtttgtttttgaatcctgacaaagaggcccctaatattgggaattgcaattttggaggggacaaacaaaactcggcaaaccatctgccggtgtagggaggggtaatttttttttgaatttccaatttaaaaaccgagtctgaatttcgtgtttgaatatgctgctgaaccaacatgttttacagcgagtgcccagcccaacgcgcgccttcgccagctgtccgcccgtgagctgctcgcgttcgcgaagcggcgcgacccgtacgggcgcccggtgtgcatgctgacactgttctacgcgcccgactgtgtgttctcggccaag

SEQ ID NO: 60649 - DNA, 647 bp, Heterodera glycines
atggctgcccagtttgagaaagcgaggcctgaacaatggaagaaaatttgtcaggtataaagtctgtgcgtaaaattgaaagctaaatttcattataatccacgcgacatgccccaccatttccaccctttttcggccaccaaaattaaaatatattttgtcctggacttgtgctatattatttatttttttgctcttcgggccaaaaaatttatctagtgttatttttcaaacttttcagcgccgggtgaaaccccaggaaattggagcagttttgcgggacaaatgtttgcctttggaggcaaatgttcaataaataatggtacaatgggttatatgtaaggcaccgcctgggaaaaactcatggaacttttaatgaaaaagtgagaaaaaaattgtgcaaattttccgccacccacccgtgtctccgtgtcccattggaaatggatgagtgcggacgggaccaattcgtagtccaacagcgtgtgctcctcctcgcgcaactgttgctgctgctgctgattggcaccaagcgcagcggtcagtgtgaaagtgccgtgatggatggccaagtgttgggccacaaactcacgcacattggcaaaccgttcgtgcacattgaaaatgccctgaacaaaagtggggta

SEQ ID NO: 60650 - DNA, 1272 bp, Heterodera glycines
gaaaaagtgctgccagtgaaagggaccattgaatttttgaaagcgattggttttcgtgaggaaatgcgtgccgcccccgcggctgatggacagcaacaatcggcggagcgttacctggtgctgtcggcacagccaaccgccggtggtgtggacacgctgcgcaacgcattggcgacactgttggacggcaaaccgattgcgatccgagtgtttcgtgaagcgaaggtgggtgtgaccaagtgtttgatattctgtcagtcctgtagtaattaaaattatttgccttttttgcggtccaatttttcaaaaaaaaaacctgtcaagtttggttccggcggtgctgaaaggcgcaacgagaattttttatgaaattttattggataatttgtttgtcactattatacctatacccatcctaccctcacattcaactatttcaaacaatgtcaaaaaaccaaatttgtctcaggtgttcaaaattgagtcgaaccaacagcagttgccgaacccggaaattccgcccgactttttcaagcgaactgttgaagaaatccgacgggagcaacagcgaatgtcggaagagttggagaagataatgacgttgcggactcggaagatgcgcgaggcggacaccaagcgaaaggacgcggagggcaacccgttcaagtactgctacatccgggtccgcttccccaacagctttgtgctgcaggcgagtgaacagtttttgccgggagaaaactgattgggggcggcaataaaaaaaattctagtgattttttcgaaattctatggagtattttataaaaaaaaattttttaaatttcatgaaaaatcgttataaaagattttccgtaaaaacccggccagagtaaatgaataatcgtgcaaaattttaaaaaagcgatttgcttttcggtgcgaaatttttgaattctaatggttttttgttgttgtttgagttagacttttattgcattctataatgattcgactttttcaaagcgaaaacccggcgctttaataattttatgttccttttattaccccacttttgttcagggcattttcaatgtgcacgaacggtttgccaatgtgcgtgagtttgtggcccaacacttggccatccatcacggcactttcacactgaccgctgcgcttggtgccaatcagcagcagcagcaacagttgcgcgaggaggagcacacgctgttggactacgaattggtcccgtccgcactcatccatttccaatgggacacggagacacgg

SEQ ID NO: 60651 - DNA, 149 bp, Heterodera glycines
atttagcccgcaaaaataatcgaatattttattcaaattcatcatggaggatgaatgtaacggtaatggtgcttcttcgtcttcatctcttttgggacggctccgtcgctttttgccccgaattgcagccgcaaatgcagctttgtcag

SEQ ID NO: 60652 - DNA, 890 bp, Heterodera glycines
atgaggcggaggcgacacttccgctggctctgcaaatgcctcctcctcctcgtgaggttcgtcatcctgaggcggaggcggtgtacttctgtactgagtgacttgtctatagaatccttctttctagtgtatttggcttgtaccactcacttaatgagtgacttggatacagaactcttctttctatagttttcgtatacttggcttatgccttactgagtgaatgtctatagaactcttgtttctatagtgtatttggcttgtaccactcacttactgagtgacttgactatagaatccttctttctatagtgtatttaaatattttgacgacaccgaaaagacccttcttttgaatgccaatgcaattgtgggcaagccccttttttcctcaaaactatcaaatttggacttccatttactcattttccgacaaaaacaagaacatgaaaaaatgggaacctcctgtgccgtttgcggcgctgaaatcgctgccttggatcataaaatttttgatgacccgatgaaacattgagcctttgaagtgcaacggtttgcccgtcactttgaagcagcgccgtctctcagcctttgacaccgatttttaaactgtcttttaattaaattaataattttttttaatttttttctatacaaaagcaaaaaatggcatactttaattcaaacaataacagtatttaggtaatcattttaaaaaaatgaatcaaaatttcgagtttaaacgagcccctcacccgaggaaaacactcggtgttcgaaacggcattctgcggtcgaatgcagaagggatcgacccatttccataccgccgtttccataccagccatttccataccaaaaatttttcgaaaattttcaggtaaaattca

SEQ ID NO: 60653 - DNA, 1733 bp, Heterodera glycines
gtgtcaaaggctgagagagggcgctgtttttttgacattcacatcgatggtgagccggttggacgcattgtgatggaattgtttgacgagcttgttccccacacaaccgagtttgcatttaatggacatttttgcgtattttatttggcaataggaattttgtgatgctttgtactggccaggctggcattggcaaagtgacgggcaaaccgttgcacttcaaaggctcaatgtttcatcgggtcatcaaaaattttatgatccaggcagcgatttcagcgccgcaaacggcacaggaggttcccattttttcatgttcttgtttttgtcggaaaatgagtaaatggaagtccaaatttgatagttttgaggaaaaaaggggcttgcccacaattgcattggcattcaaaagaagggtcttttcggtgtcgtcaaaatatttaaatacactatagaaagaaggattctatagtcaagtcactcagtaagtgagtggtacaagccaaatacactatagaaacaagagttctatagacattcactcagtaaggcataagccaagtatacgaaaactatagaaagaagagttctgtatccaagtcactcattaagtgagtggtacaagccaaatacactagaaagaaggattctatagacaagtcactcagtacagaagtacaccgcctccgcctcaggatgacgaacctcacgaggaggaagaggcatttgcagagccagcggaagtgctgcctcccgctctgatagaaaatgcaaaattttcagaaatttactcattcttgtttgaaaaattctttcaaatgagtcaaaaaaattacaaatgattttttcatgaaatccgttaaacactcatacctacagtcgtcttaacctactcgtctcttaaaaaactgacccaaatgatttccccagtttgctgcttgaacctgattctcatttcttcaaaatcgaagcaacagcgaaagcggatgaattcgtcaattccaaatctaaaacatattacattatggatgcaattcctcaattctctgaccgaaacctacgtcaattcatcactgtcattttccagcacagcgcatcggaagccagtctccacaaaccaattttgttcatcgtcatcttgtatttcaagcgtcaggttgttcactctagattttttgtttgcagataattgttcactaatttaaaaaacccactggccaatggaagtctgtgaggggccaaaaacaccggaaaaacgcttccgattgttgggatcaagcatttgataataagtgtcaacattggcatggtaaaaattgccccccatgacggctgacgtacatcctgtgagaatgtaaaactcacttcaatcaaatgctgtggatcaaagctctcacccgtatccaataagatagcgttcacttctgttttggagccaagcagacacatgtgtttggcgcccatacaagtcattgtttgcgtagttctgatcaaccatgtctgttgttgaagcacttcttttgagtccaaaaagaagcctgacacgcaacgatcctagccaagggggtgccaatatctaacgacagagactgcgcttcttcaccaattggccactgttggcgatgacaacgtcggccaacgtctagaaaagtgaccattaaatggaaactaatttaaatatatattaaaaaaacaaaccagacaacgagcacacataaagtgcttaaacgagc

SEQ ID NO: 60654 - DNA, 781 bp, Heterodera glycines
atgctgggctttgtttacgcggacgatttgagcgaattgaacggagacaatgcaatggaagtgctttatgccggtgaatttattattttttaaaaatttaattgaaaattgtgttagccaaaaagtataacatcactggcctgatcggcccacctttacaaattcccatctccgaattgcgcaatgttttcttagcctatgcccaggctctcctcttcgaattagaggtgagaaggtcaaaataaatttaattttattatttttttttttgtatgaattatgccttagattttctgaagatccaataatttttttgtataattttctgtaattaatacatttttaaggattttgtcagcgaatgtttgcggtacatttgtcaaaatgcagccaaattgttcaaatcaactgattttttgcaaattgatcaggaaatgttgtgctatttttttgaacgcgatcagttgttgatcagcaatgaatgtgaactttggaaagctgtaatttcaattaaattttgcattttattttgtttttcatttttgctttaggcacttcgttgggccgacgaaaaatgccgacaaaatggtgttgaatgctcaccggaaaatcttcgtgccgtcctcggcccggcattgttcaaaatacatttgccaaacatccatgaagcggatttttcaaaatacgttggtaaaaatgtttgaaatcggataattgaaatttttaagctcggaattaatttccttttaatgtttgaaattaattcaacttttttaaaaaa

SEQ ID NO: 60655 - DNA, 1210 bp, Heterodera glycines
  unsure (1)..(1210): unsure at all n locations
atgcggccaaaagaagaggccaaagggtgtaaaaaatgggattcaaaaattttgtaacttgcaattttgtttataattgggaaaaaaagggtgcgaattgaactcaatgtccattagcaaaaatcttctttcaaaacttattattattgtaagagtccattctataaattngcttcgatatgatcagtttttagaggatgcataaaactatttcgctttttgacatttcatgagatgaattatagcaaaatgttttattttcgaatttatttttgagaaattgctattttgaaatgtcttgtcttaaaaaagacagactttttattttcaggtgccattgaaattttggtatttacagagaaaattagcaatataatagaaagttaatttcaagctccagaaaaatcggtttaggtctgaaagtttctccttatcaatcactatttgcattcgctaccaaaaggtatgttctttttaaaatgtgttttctataaatctagaaaatggaacaaccacagataaataatactgaaaaatcgcccctagacgaataaaacaattaaaattatgcaagtttgggacgggtaatttagctgaggtttaaaatttaaaatttctgagaagaaaaatcagcatgaattgtggtcttttccattgtttcagatgcggccaaaggagaggccaaacgtgtaaaaaatggattcaaaattttgtaactgcaatttgtttataattgtgaaaaaagggtgcgaattgaactcaatgtccattagcaaaattcttctttcaaaacttattattattgtaagagtccattctataaatttgcttcgatatgatcagttttttagaggatgcataaaactatttcgctttttgacatttcatgagatgaattatagcaaaatgttttattttcgaatttttcagatgcggccaaaggagaggccaaacgtgtaaaaaatggattcaaaattttgtaactgcaatttgtttataattgtgaaaaaagggtgcgaattgaactcaatgtccatttttaagttgaaattaatctctacctcttttgcgtcgccgtatcccaccaaaaaatgcacatccgaatgatcacccgaggtttttatgtttttacatatttttttggattgttatggcgagagaaaatagcattttttctccaaacaatttttgatttagagcgactaataaa

SEQ ID NO: 60656 - DNA, 2994 bp, Heterodera glycines
atgcatgtaaatcctttaaatgtcattcaactgctccaaaaaaaattctcaaaatacaaagaacaaacaccaattaatgcatttgaatcggatattgcaaaaaactttgccgaagaaattgaaaggtgcaataaaaacgatgaggaaatggagatctcccatgatctggtgattgacgaaaatgcaaattatgtcagaattgaaggccaaaatgatgacttttccgattttgatgaaaatacagatgaagaaaccgatgaagtcgggagtcctttcggttcaggtggtataatatgcttttaaaaatattttaaaatctagaaaaatcgagtgggtcgagtttctttccgtcccccgaaaaaaaaacaccacggaaagacacaatttcatactctgacaagaaaaaggcattgcaattttatcgctcaccaggaaagggatgccgttctttaaattgtatgaaatccaattttcgttttatcaagtcagaatcggatcttaaaatgatacgaaggtgaaatagaaaataaatcttttaaaaaatatattttaaggtttgaaattaatttaaaaagccgagaagaggctttaaaacaaattgatttgtttgtaatcgatcgcttcaaggaaaaattccagaacaatttgagcatatcagatctcattttacgaaaatgggcgattcacacgaacaattcacttggggaaaacaaaataacggaatttaaggcttcgaaaaattggttggccaaattcaaaaaacgccatcggattgtttcccgaaaggtcaaccctattctccggaattaataatttacttttttagatcacaaagttcatttcaaaaagtcattatattaatcttgaaaaggtcaaaaaagaggcggaagaatttgtagagtgtgttaagaattttgtcaaagatgaacaaatctcatcccgtgatcttttgaatgccgatcaaagcgggttcgagttagaacttcatgctaaaagatcgttggcaccagtcgggaccaaattaatcgaatgcgttgtgcaatctgtttccagcacaacgcatagctatacagtaatgccaatgataactgcaagtggctcgcttttatccccgttatttattgtgttagccgagcagaaagggaaatttcctcaaaaaggaatatttcaggttttgagaaattgaaaaaaatattacatttaatttaaggccaaaaatatatatgcggtcccaaatactagtcatataatgacaaaaaagttaatgattgaatggctcactcatgttttatgtccgtctttgcgtgttgatcaaaaaacattgttattggttgacagttggacagggtggaatgattttaaaccaccagagaatgtccaacttaacgttaaacaaattccgaaatcgagaatccgctcaaagcgctgttgacaatgtttctgctgaagtctgaagcggtcgcatcggcatctgctgccaaaaagctcatttcgcaaattctggacacggatgccgattgggaactcgcaacatattgcagtgcccgagaagacgacgtcaaaaacggcacatttccatccgaatcggacgtggaaagcgttttgcgaatttggatcggccactgccaaattgcccgaaaagaagtcaaaaatcggcatttgggccaatttcaattgagctgccccaaggcctatcacttctgcccgaaactgaaagagaaggcatgaggaaatcgctcgaaagtgcgccatttttgctggagaagctccgtgccacggaaatccaaaagaagacactcgtcaccgccgaaagagtgattttaggcgattcaaatgcctaccaattgaagaaactatggccgagatcagcatttgtcggagtgcaagaaggatccacagccgaagtgatcagacaatttgatcaagtggtgctggcctcaaaagtgaagtggctgattgcgatggtcggaaaggactcaattttggctggcgactcggtggacagtgtcatcgaaaaagtgaagagactgcgccaactttgcctccgatttgcgcatgtgaagatcttctggctgttgccgccttttatctacaacaaaaaggccgaatctgaagaattctgtggaagaatgagggcgctgtttcggaagaaaagcgaaattgagctggtagcagtgacagaagaaggaagaagtttgctggagatttggcgtttcgggaagaattttaacaatgaacatgttaatcataacggatggatgacagaaaaggggctgaaaacgctgaatgcctggctcacatcattggttccgaattttccgggcgatcgagagctcgggatcagaaccgtgaagtcgaaagtggtgaaaattggtgccgtgaagggtggtggtccaggagacccttccttaattcgtggcaatgcaccagagagaaatgtgagaggagaaggcccaggtgacccctccccatctcgaacgattggcatttctgacaatggccccacaggttccgcccgaccaatgaccaatcaaaatcgcgggtttgagtttggacgagtcggcacaggttaccgctcggtccctcctccgacgttccgtggcccgtcttcacgtttccatccatatcagcaaagtcgtggtcgtccggcgttccatccgactccgatgaatcgtcgcaatcggttcgagccgcgtcgctgagcagtgatcccagacgagcccccccaccttttgacagccgaatcgaatctcatttttgttttatttttttgtctttccttctttaacggcagggacgccgctcgtaattgggtgggatgtgatatttgacctcgtttttaatttaaataattaatttgtggcattttgtctatttaattttgttccccttctaaatttttttgttttctcagtgttttctcatattatattttggcttcaaaatgatggtaatttattctcatcgctctccgactttcgaatttttattgaa

SEQ ID NO: 60657 - DNA, 764 bp, Heterodera glycines
atggattttaaagcagtaattgtcggatttatttactatttttatgtcacttataaatcaattgttaaagtacatacgtttggaaatcaaaatataaatctagacagattaagtctaagtgacaaattattaattaaaaaataatagtattttaatttttcttttttttcttctcccgtaatctcggaacttgggcaattaaatcattgaaatgtaattaaattacaaaatgaaatgcttccaaagaacatgattcataatttgactgtagatattaaattagttataataaatcgtatattcgtatttatgataataggctcatcattttctcatgatatttgtatttttttattattatcatccgtaaggttcaaataaaatttaattttctgtctaaacagtatcatttttcaaataaatttaaaagaatatttttttatttggaatgatttattatgttattaataagtccggccggttccattatcttatgcattaaaataataataaattcaatttcttgaatgtttaatatttattacaaacaataaatataattcgattttgttttatctttttttttactttcatgtctttttaatcgaaccaaatcgccataaatttatcattttaataatttttctgcagcttgattaaatttaaaaaattatttgttttaaattttttcattaattttcagtatttattttttataaattcaatcctaaatcagaaaaaaagaaactaatattttcaataaa

SEQ ID NO: 60658 - DNA, 1122 bp, Heterodera glycines
atggcagaaaaattcgttttgccattgactgcacaaaattttcgattggaaaggaaaacttcaggttggtttaagcttatttttataatcgaactatttaataatacaagaatattgccattacttaatcaaagaatgtcaacaaaactctaaaaatttctactgacaaaagcgatttgaatgaagaatcctaattgtaattgctcttcaaaaatcatagaatcaacatctagataaataaaaattgcgaattttctgctcagaattcgcttttaagtttttaaatttgttatttaaattcaaattcattttccatattcccagagaatcatatgaatttttcatcatttaatcaatttcaaccaaatttgtcaatttttgaaggttttccctttaaattagaaaaagactctaagcataattttgaaaatttagcctcattaggctctaaaaaaccacaaaatgaggataaagcctcacatcttagggaatactgaatatgatcccggtcaatgccgatccgatcccgactctacccataattttcatttagggattaatctacgctgtgttagtagttttgtccatttagcatcacgccattttcccagatcactttgcatatcaaggctaaacaatgttttgcgcaattaaagattaatgccagtaagaaaaatgctgataaatataaatcaaaaagctaaaatttttaaaatatttcttaaggaaataaattaaaaaaaaagaaatttagttgaggagcctttattcatattaggccagaatttttttgaacaattgcattatggtgcatttttggacgattacgcgggcatttggttgtttggcattgacacgatgcaaaaatggggacgaagatcaacgaaaattgttgttcacagacaccaaaaatgtggactaatggtataacttaattaagtgaaaaattaaataattaacatatcaatttaatatttttaataatttatttaagtgtgaaagttgtattggtaaattagaaaggaaatttgaaaagtgcacaattttcaacacaacgagaattaaacggaaaaaaagaggaagcgacttacacattaaaccattggtaaatattttttaaaa

SEQ ID NO: 60659 - DNA, 1145 bp, Heterodera glycines
cattgcggcatcggacggcgtgatggtcgctcggggcgacttgggcatcgaaattccagcccagaaggtgtttctggcccagaagatgatgatcgcaaagtgcaacatggccgggaagccggtgataactgcaacgcaaatgctcgaatcgatggtaaaaaattagggttttaaaaaatgaatgaaaatgtgtgtatttaatttccaaatttgtcattaggtgaacaagccgagaccgactcgtgccgaggtcagtgacgtggccaacgcagtgctggacggctcggactgtgttatgttgtcgggcgagtcggccaagggcgattatccggtggaatctctcaaaaccatgcacgacgttcgtttccctcgttacatttgataattaaagactgaaaatttaatttttcagatttgtctggaggccgaaaccgcctttttccactcgaggtacttcgaggagttgttgcagaacacgcccagccccaccgggccgggcgaaaccatcgcaagcgctgccgccaacgccgcgaggagatgccgggcaagcgcaatcattgtgctgaccaccaccggaaagtgggcattcatttttttattgtttgaactatttgcaaaactaattttattgtcctaattccaattacaaaaaagaggcataacttttgaacaattgcattctgcagattctctggtcaggagcaggtcgtttccctctccctttcgccgcccctccccccgaaaatattacttagtttttcctttggttttgaattataaaatttaaaaaagacaaatatttaaacctcaaaattttgaactttttccagtgaaatatggactataaactaattaataatcaaaataaaatatctgaaaataacaatttttcaaccgcaacacacccaacacgcactctcaggtcggcccaggagtgttcccgcttccgcgtgccaatccccgtgttggccatcacccgctatgagcaggtggcgcgtcagctgcagttgtgccgtggtctgttcccgctgtactacccgcacatggaacgcgacacggagtggacggaggacgtgaacaagcgcatcgcgtacggcatcggagtgggcaaggagcgcgggttcatccacaacggcgactttgtg

SEQ ID NO: 60660 - DNA, 632 bp, Heterodera glycines
atggagaaattggctcaacagaatccgagtctagtcgattcaacagcatcatctttggaaaaagctgcccaaatggagttggacttcatccagcgcgttttgttgggcccacatcggggcaatttgacggcaattgaatgtttattggcccaaaattttagccaaaattcatcgatgatgcctaattatggcggcgcaacatggaaaaattcgaaaatgccaaaattagaaaccgaaaagcacattgttggtgatgttgatgaacccaaatcagacaatgaaagcgaaacggaccgaggtgatcagaagctgaagagaaaaggagtggaacgaccgaaaaggaatccgagtgaatgcaaagtgtgcgggaggaaaagcatgtactgttattacagtgtcagatgttgcgaaggtgagtgacgaaaaaatattaaatttttaattttaattattttattagagttgatggattataaaatactagataagcgtttgaattaatcttggtataaaacggaaaaaactgagttgcagcaaatcccgcactatcacgaaaaaagactcgggaccggaacttagacgggattccgattcagtatgctcccggtcgtttttccaaatatcttcggtaa

SEQ ID NO: 60661 - DNA, 118 bp, Heterodera glycines
atggcaaaacggcaaatttcgcttctgaaaattgaagagatttacgaacaaatgggcaatgtttatcatgttgttaaccttaacgagcttgaatgggtgaatctattttttgagaaag

SEQ ID NO: 60662 - DNA, 1007 bp, Heterodera glycines
atgactacagtagggaagacagacggttcgcagggacggacagtcgcgcagaatgtatggggcgaactgtcgcaaacatcggaactccgctggccaaaattccatgccgcagactttgccccggagcaatggccaaagcttgcacataaggtactcagcagtgcgatcagtgagtgagccaaatccaatggacaaattaatcccagaagagccgaaaagagagcgaaaacggtggagaaaggagacgacattttggtggaagtatctgaaaaaaaacgagaaatgttagccaatttttcataaatgttcaattcactcgattgtaatgcatttaaatccgatgattttctttggcatcggcttttgcggaattggcagtgccttcccatgcgaattgacaattagtacttctttggtgccattctctccgattttgcgccaaatgtccattgaatcgaatgcccattttctcgttttaaagtgttcatcgacaagacagtcaaatcggtggctgagcagtgcaatttcgaggccaagctgagaaggcgcaagaaaagcaaagaccgccagccgccaatcgccacgggggatgaagcagctgaaaaacaattataaacttaattaattattaatttttgctacttttcttttttgtcgtcaatggggcgccgtcgtcgtccttttttgacgtgtcgttttttggcgtagtcccaacacatccaaagaatggcgcaacagccgaccaacaaaggcacaccgaacaaactgaaaagacggaatgagagaaagaaaagagggataaaaagaaagagagaaggaaagagaaaaagaaaaacatacagaatcttttttgaagacattgcggcggcaaaaggaaaagaaaaagtgagtgaaagagtgaaagaggcaaagagaaaagccaggacttttatagtgaagaacagtgaacaataggaaaaagagaggtacctaatttctgcgtaatacaacataccgtatttcctaaa

SEQ ID NO: 60663 - DNA, 1921 bp, Heterodera glycines
atggaggagccgaggaggaaatacgacgacgaggaagaggaggaggcggaagcggcgttggtcagcgacggcggcgactcgtccgccgccacagacagcccaccgctgagccgcgcgttgctcgcgctgtggtgggacgagcactcggagacggacgaggcggacgacgtgcgcgcgtggggacgcgcggcactactcgcgccgcggcgtttgccatgccttggcaaaggaaaaggggggaaatgccccgattattaatcaactaattaggctattatcagaatgagtctaagtatttaccggttatgtccatttgccacccgcgtctgattattatgggcatctttttgttgctctgcgactgtcgccggtgtcttttttggcgccgggccaatggcagtgaaacgcggagagagtgacgcgcccaaccaccagcccatcgagccttaaaagcagagcaaatcaaatagattagcatcggtttcgtcattcgctgcttcttttacctgccgtactttcggatgcgctgcgcgcactcgccgaaccgcccgaagtcgtcggcctccggcgcgtgcatttcagcgccgcctccgctttgcactgtccgtgcagcgaacatgagcacattttgcaccgcacgccatgccgcatccaaagctgaaagtgcgtgatcaccaaaataagtgccaaaagcgtccacgccgaaatagtgtcctttttggtcagaccaaatgaccgttgggccaaattgtgcccgttaaaaccaaaaccgggattttcgattcaaaatgatgaggcgggaacacaacccgtaatgccggctaatatccctattctaattgaacaaaaatcccgtgactgtacccagagagtaattccggcggatacagttcaaaattcaccaatttgttgcaatgggcacaaacagcgggtgccagaaactgagcgtcagtccattggtgcgcgagtccgttgcggcgcaggccggccaccaaaacgctgctgtccgcctcctcctccgcggcgcccgccggacattttcgtctgttcaaccgttggaaatgcctgcacatttctgcccgactgatcagtcctgatcaaaagaatgatgtgagactgatcagtcatttaattgccgataaattcgcttgccatctctgtccgagtcaatttcgccaaatgcgtcgagaaagggaaaattggaggcgaactgtttgaactcggcacgcgaaatgtagctgaacaacaagcaaattgaaatcccaaaaagagatgcgttctcttttttggcttcctacccgtcccggtcgttgtcgtagtgtttgaacacggcgtcgaccattgcggcgatgtgcctgaataggaaatttttgcattttttggcaggaggtacggcggaaatctataatgaaaattctatcataataaatgataaattttgcaaagtttggccatggcccctcccccatcgtgccgggtctgatcagcagactgatcacacttcggattgattgactgattggtaacatggtcagtcagccaatccctcgctaacaaataagcattgtcccaacaccgacttgtccaccgtgtccgggtccggctgtgcgcatacgcccgccgcccaatcagcgaacaccgccggcggctccgccgcgccgctcggcgccgactgcgcggcagcgacggaagatgccgtcttcggttcacgctccagcgacagttggtacagctcacgctcatcgtacgcgatgtcgaacagcactttgagtgtgttgatcagatccaggttgacgtcgccgaaacagtgggccgtccgacaaacgccgagaaaatgggacaaaagttgcgagagttggaaaaggcctgcggaagtgcggcaccgatgaaacaaattggatggcaatgccctcggaggtaa

SEQ ID NO: 60664 - DNA, 4155 bp, Heterodera glycines
gccgattccccgtgctgctcgaattacgcaaccgaaccgatggatttgttcgaattgatccgtcgatgttgcgattgtttcggtgtcctcccataataataataataataataataatttaatttgcatttaaaaattcaattcttttcagagggcgacccggctgagcccgatcccgactttccctgctggtttttctcggcctccgaatggctttgccccgaattggccgaattaatggccattttcgtttcgctttaccaggcaattgaaaatggaaaaaatattaataattaaaaatgatgtttttgcagaatgatccgctcggatatggccaaaaggtttgttcggccgtcggcttttggatccgtcggcacccggcacatttcgacgccaacgcccaattgggccgactgttggaccgattgaaagtcaaaatgagcaaacggtaaaacaataacaaagccaaaatggtttagaaattggccgccgccgatgaaacgatttcccgggcattggtcgacgaacttttggacatttcggcgatgtacaaaatcttaattttgaaaaatgaattaaatggcattttgtttggcattctgtccgtccagtccctcctatgcttggctgcgcaatgtctctgtgcgaaacccggtctctcgccacgtttcgctgtgttttgaacagtggagccccgaagacattgcgacttcgatgaggtgaaaaagttgagactgctcgagaattgaacgtttccgagactcgagaaccgaaaattggtgccgaaaactgagaatcgtccccaaaaacgagaccgagaatggcaccaagactaagaccacaaaaatccaagagattttccaaccgattagcgacgtcgagaatctcgagaatcctcgaaatacaagacgaataacaattgaaagcattttttttggtttagtcacattgatcacaaagtgctcagccgagtcaacgtgagtattttatgcaaaatattagcaaaattttggccttttctcccaattaatggcaaaggtttccgagttgaaacgctacgtccgcgtggggagactttgccaacaaacgccacttttggaacgatcgatcggaattttcaatgtaattaaatataattaaaaatttaagttttcaaactgtttcccctttagtccttctccggttgggtgcaatgccaagtgttaagcaaagcgacggcaagcgaacgcgctgaaatcatcacgaaatttgtgcaagtgggcagggtacggtaaagggagtgggggtgggtgggatactgtaggtacacagaaacaacagtaaccaagtgacaggtaacaaaataattctgtttattttttagcatcttcggcgcaacaataattttaacactttgatggccgtaatagtgagtttttttgatcatttaatcccatttcttccatttttggatttttcgttcattttcattctgaacatacactttaattactcattctcagtaagttttctgatcactcattcatttttctattcggtaaatcatttttcttttttcccatcgatcgatcatacattctaatcactcgttttccatttgatcactcacccattttccattctgatcactcgttttccagttgatcactcacccattttccatctgatcattcgttttctcttctgatcactcctgctgatccttcccctgttgagggtggcattacgcattcgaacgtggcccgcctcctcctcacccattccctcctcccgcccgacattctcgacgacctttccgccctcaccaaattgctttcccatgccaataattacgccgcttaccgcaaaactttgcgttcggtcggtggccgcttcaaagttccgataatgtgaaaagagggacatgactttctccttttttgaattcccataacatacaggggagttcatctgaaggatttgatcgcattttggcacagtgccgggttggaacagttcgaaaactcgcgccgaatgtccgaaaaatgtttgtttacctccgagggcattgccatccaatttgtttcatcggtgccgcacttccgcaggccttttccaactctcgcaacttttgtcccattttctcggcgtttgtcggacggcccactgtttcggcgacgtcaacctggatctgatcaacacactcaaagtgctgttcgacatcgcgtacgatgagcgtgagctgtaccaactgtcgctggagcgtgaaccgaagacggcatcttccgtcgctgccgcgcagtcggcgccgagcggcgcggcggagccgccggcggtgttcgctgattgggcggcgggcgtatgcgcacagccggacccggacacggtggacaagtcggtgttgggacaatgcttatttgttagcgagggattggctgactgaccatgttaccaatcagtcaatcaatccgaagtgtgatcagtctgctgatcagacccggcacgatgggggaggggccatggccaaactttgcaaaatttatcatttattatgatagaattttcattatagatttccgccgtacctcctgccaaaaaatgcaaaaatttcctattcaggcacatcgccgcaatggtcgacgccgtgttcaaacactacgacaacgaccgggacgggtaggaagccaaaaaagagaacgcatctctttttgggatttcaatttgcttgttgttcagctacatttcgcgtgccgagttcaaacagttcgcctccaattttccctttctcgacgcatttggcgaaattgactcggacagagatggcaagcgaatttatcggcaattaaatgactgatcagtctcacatcattcttttgatcaggactgatcagtcgggcagaaatgtgcaggcatttccaacggttgaacagacgaaaatgtccggcgggcgccgcggaggaggaggcggacagcagcgttttggtggccggcctgcgccgcaacggactcgcgcaccaatggactgacgctcagtttctggcacccgctgtttgtgcccattgcaacaaattggtgaattttgaactgtatccgccggaattactctctgggtacagtcacgggatttttgttcaattagaatagggatattagccggcattacgggttgtgttcccgcctcatcattttgaatcgaaaatcccggttttggttttaacgggcacaatttggcccaacggtcatttggtctgaccaaaaaggacactatttcggcgtggacgcttttggcacttattttggtgatcacgcactttcagctttggatgcggcatggcgtgcggtgcaaaatgtgctcatgttcgctgcacggacagtgcaaagcggaggcggcgctgaaatgcacgcgccggaggccgacgacttcgggcggttcggcgagtgcgcgcagcgcatccgaaagtacggcaggtaaaagaagcagcgaatgacgaaaccgatgctaatctatttgatttgctctgcttttaaggctcgatgggctggtggttgggcgcgtcactctctccgcgtttcactgccattggcccggcgccaaaaaagacaccggcgacagtcgcagagcaacaaaaagatgcccataataatcagacgcgggtggcaaatggacataaccggtaaatacttagactcattctgataatagcctaattagttgattaataatcggggcatttccccccttttcctttgccaaggcatggcaaacgccgcggcgcgagtagtgccgcgcgtccccacgcgcgcacgtcgtccgcctcgtccgtctccgagtgctcgtcccaccacagcgcgagcaacgcgcggctcagcggtgggctgtctgtggcggcggacgagtcgccgccgtcgctgaccaacgccgcttccgcctcctcctcttcctcgtcgtcgtatttcctcctcggctcctccattcgctcgtcgttccatcgattgatccgacggacgccgaccgtaaggggaaaaagagagaaatgccaaaacgaaaaataaaacaatgcctaaatttgaaaggtgtccaaagaaacggtctcagaagagggcgaaagacagcgaagtgacgcaccagcggaaagtgaaaagtgagcaaaagccaagggaaggcgcaccttttaa

SEQ ID NO: 60665 - DNA, 659 bp, Heterodera glycines
caaaaaaatcgattttttcaagtgtccgtgtggggtactcaaacaattatggggagcaaaaatccaacgcagaattaaagtacaggctatagggaagctattcccgaaggattcggtctccccataaatctgggcgcatcggttcggggggactgccccgaaaacaaaaaaatcgattttttcaagtgtccgtttggggtactcaaacaattatggggagcaaaaatccaacgcagaattaaagtacaggctatagggaagctattcccgaaagattcggtctccccataaatctgggcgcatcggttcggggggactgccccgaaaacaaaaataaatcgattttttcaagtgtccgtttggggtactcaaacaattatggggagcaaaaatccaacgcagaattaaagtacaggctatagggaagctattccggaaggattcggtctccccataaatctgggcgcatcggttcggggggactgccccgaaaacaaaaaaatcgattttttcaagtgtccgtttggggtactcaaacatttatggggagcaaaaatccaacgcagaattaaagtacagactatagggaagctattcccgaaggattcggtctccccataaatctgggcgcatcggttcagggggactgccccgaaaac

SEQ ID NO: 60666 - DNA, 587 bp, Heterodera glycines
atggtagagaatgggaccgaaattaaaacataccgaaatgaacttaaatcttttcaagaagaagtagataaagccaaaaacacaacattagagcatgtggcaaataatgacatgaaacaagcaaagaaatcagccgacgtcgcaaagggaatcgccaaacaggcaaagatcaaatatacatcaattctcgagggatataatgataaatcggaaaagggttttagtggtaaggtgaataggcttaatgaggtgcttggtgagcatattaaacttaaagatattgaaaatagacaagtatctgaagctgagaaaggccataaaaaagagagagactagccaatgaggatgttcaatttcaatatgacagcattgatcaaaaatgtattgtctatctttccgctgctgtctcccacatagatttgtcaaaacacctcgcctatgtgctcggttttaagaacgcaaggctatttcacgcggaagaggcgaattatatgccagatttgacgggtggcgtaaggcaactatacatttatgcaccaaatttaatagaaaacacaattatcgggaaccagatggctccactctaa

SEQ ID NO: 60667 - DNA, 167 bp, Heterodera glycines
gcaagaaacatccgcgtaatccgcccctgtgcaccattgacggagtgcgaccgccgccggcaccgttgcagaagttcacgctcaccaagaagcagttgagccacaactttggcagtgcggcggtgccacaactggtggccgagttcaacaatttggtccgactttaa

SEQ ID NO: 60668 - DNA, 985 bp, Heterodera glycines; identical to SEQ ID NO: 30238

SEQ ID NO: 60669 - DNA, 465 bp, Heterodera glycines
tttttttgttttcggggcagtccccccgaaccgatgcgcccagatttatggggagaccgaatccttcgggaatagcttccctataccctgtactttaattctgcgttggatttttgctccccataattgtttgagtaccccaaacggacacttgaaaaaatcgatttttttgttttcggggcagtccccccgaaccgatgcgcccagatttatggggagaccgaatccttcgggagtagcttccctatagcctgtactttaattctgcgttggatttttgctccccattattgtttgagtaccccaaacggacacttgaaaaaatcgatttttttgttttcggggcagtccccccgaaccgatgcgcccagatttatggggagaccgaatccttcgggagtagcttccctatagcctgtactttaattctgcgttggatttttgctcaggaaacaattgtttgag

SEQ ID NO: 60670 - DNA, 557 bp, Heterodera glycines
atgaacattgccgcacaattacatatcagcacggcaaagaccttgcagaagtgagaattacaattaattgtaacaaatctggggctatgagacctcagcataattatccactaattattctttccatggagtctaattaatatgctcaatggagattatttttgaataaaattgagaattatttcaaaaatattttgaattcgaatatttcggattgttcctctgatctgatttgctttttcacctcattttgatcatcaatttttcaaaccttattaggaatatggcatgttgttcttcgaatcaagcgcatttactgggcaaggcattgaggaaacgatgcaatcgttggcactgtgaatttaaaattattataattataatagtacaaattatgcatgattaattcgaatttagtcgtcttcaacagagagaggatgatcagttgaaggaattgataaaactcgaaaaaagacagggcaaacggcgaaattggtgttgtatttagctgggcctttttgttttcttattttcatcatttttttatatattacgga

SEQ ID NO: 60671 - DNA, 409 bp, Heterodera glycines
atgttatctcgtgtatttgggatttgtgttttttccgtcgttctcgactgtccgcgttcatatcctcgggccggtccaactgttacatttaataaaccaattatccaccctaatggtgcgttttgagttgagaatctgacgagtttaatttatttcagtttctaatgccagtgatcgtacgcggaatcaaatgtgtattaatttgttggatttatggaacgacacaaacaacttatcgcaagttgttgaaggcattcgaagtggaactatgagaatgcggccaataccgatgcagctgtaagttcatctgtttaatctgtcaaatttatcaattattttgttttcaaggcagcatatggtcggaacagggccaactacgaagcaatggtccgagggcatgagtagttaa

SEQ ID NO: 60672 - DNA, 123 bp, Heterodera glycines
atgcgcgtggttccaattccggccaacaccgacaattacatgtatttgatcatcgacgatgacgacaaataccaaaaaggacatcgaccggcggcactcgttgacccggtgaatgtggaaaag

SEQ ID NO: 60673 - DNA, 515 bp, Heterodera glycines
tgggaagagtccagcgctgaatcgcagctcctctggggttgcgaggtgtagcgtatagaccgtgagcttgggttggcccgcttgttcaagtttcccttgaccggggctccagagaaggtgcaagacctgtccaactggcggtgcctacccatctttacgtgtcttggagtcgggttgtttgggatcgcagcccaaatcaggtggtaaacttcatctaagactaaatacggccacgagtccgatagcgaacaagtaccgtgagggaaagttgcaaagcactttgaagagagagttaaagaggacgtgaaaccgatgaggtggaaacggacagagctggcgtatctggtctgcattcacccgtttgttgctgtacgttggcctgctagcctccagactggggtttgctgtccttctgttcagtggcgaatggggcatttgcaggcggagtgcgctgagatgctcggagtagctgcgtgagctcggtcttgaggccagcctttcggggtctggtaccc

SEQ ID NO: 60674 - DNA, 592 bp, Heterodera glycines
attttatgctaattctggctcttttctaagaacccctgcggaaatataaaagcaaggaagtattatgctcgcctttgcagcctctgtacggcactggggccaacactttatgtgtcgttaattttatgctaattctggctcttttctaagaacccgtgcggaaatataaaagcaaggaagtcttctgcacgcctttgcagcctctgtacggcactggggccaacactttatgtgtcgttaattttatgctaattctggctcttttctaagaacccgtgcggaaatataaaagcaaggaagtcttctgcacgcctttgcagcctctgtacggcactggggccaacactttatgtgtcgttaattttatgctaattctggctcttttctaagaacccctgcggaaatataaaagcaaggaagtattatgctcgcctttgcagcctctgtacggcactggggccaacactttatgtgtcgttaattttatgctaattgtggctcttttctaagaacccgtgcggaaatataaaagcaaggaagtcttctgctcgcctttgcagcctctgtacggcactggggccaacactttgtg

SEQ ID NO: 60675 - DNA, 1210 bp, Heterodera glycines
atgccggaccggaccggactggtattttcaaaaatgaccggattcgggatccggtctctcataatccggtcaatccggtaatccggtcaatccggtaatccggtcaatccagattttcaaattgccggatccggaaccggattccggattggtaaaaatttaaattttcacatgttaattttggaaaaaacccttaaaatttcatctattatatgtagaaatttggtgcaccagaaaatgtcgtcatagaaaagacaatgcgccgaaaaaaatatataaaatttcaatttttcaaaaaaaatttaaaaaatttattttagagttttttatttttgaaaacctatgtttaatgaaaaaataaaaaattttttttgcggcgccctttttccaaaaaacttttgggaaagaaagtagtgggtccggcggtgccgataggcgccgccgggaaaaattttgaaaatttgaggcgatttgtaaacagattttcaccaaaaatgagcatttttttttgcttttttgggcaaattttttaaaaagaaaaaagttttggaggcccggcggtgctgacaggctccggcgggggagaaattgaaattttgaccatttaaagttaaagacattatgccaaatagatatttttcaaagaaaaacgaacaaacgtcaaggttttttggttgagaccaagccggaccggatccggtcaaaaattcgccggaccggaccggattggcattttcaaaatgaccggattcgggatccggtctctcataatccggtcaatctatgtaatccggtcaatccctatttttccaaaaaatcgccggaccggattcctgatccaggaaaatcgggtaccggatccggtccggtccgctctctacttctgaacaattctaatgctaaaaaacaggcactcgcgcgaaaactgaataaaaattttgtatttggaaaattttgtccaaaaatttttatgttctaaaattaccggtttttaccggtaccggtaccggtaccggttgaaaaagttggtaccggtaccggtaccggtttttgcagtaccggtcagtaccggtaccggtttttttgcaattaccgattaccgctcaactctattagctattcttattttcagtgtcttcaataagtcgtttcaattatcttaggttcatgaaacaaattgttttcggattctttctgttttatgaatata

SEQ ID NO: 60676 - DNA, 75 bp, Heterodera glycines; identical to SEQ ID NO: 54636

SEQ ID NO: 60677 - DNA, 73 bp, Heterodera glycines
  unsure (1)..(73): unsure at all n locations
aaatgcgaaacgccaaaanatgcgaataatgcgaaaggcgaaatgcgaaaagcgaaacctcggcccatccctg

SEQ ID NO: 60678 - DNA, 1148 bp, Heterodera glycines
caaatcccgataatcccgcgggatcccgaaaaaaatcttcgggattcatcgggattcggtcgggatcccgactcgggatccgtctcgatcgtttttccaaaatgttcgggattgatcgggatcgggattcagtcggtatcccgactcgggatccctccgaccccagttgtccggtctctactgcaaaagcccgcagcaatggacataaactcaaaccctatgtgttggtcaacagaaagcgaccggttccgcaaattatcaaccaatttgctggaaaattgttttgtttttcagaaaaaattagtgccaaacaatgttctcaaaattctatttatcccccatggggggtaaatggagactgggtgattattttttaaactcctcagaaagggggggggataattggagactgcggtattaatagagactgggctataattagagcatatacggtaagtttggcgttttataaattatttttgactctatagcactatgtgtccaatcgcattttttgagtccaatcaattgataaaacctaagtttgttcatgttcgaacaaaccctatctttttggtatcattcgaacgcacaaagtctaaagagctaaaataataatttcagcgtttaggcaattgccaaaaacgattgattaattaagcaatagttgattagtttcgtttgtaactttctttaaatgttaccattttcttgttttcccgtattattatcttattcagactttgtgctttcgatgataccaaaaagataggctttgttcgaacatgaacaaatgtaaaaaaccaggtatgttaattgattggactcataaagtgcaatagagcctaattttttgcttttctgaagtcatacttctctggcggctgctctagcgtcggctaggtcatcagcatggccagtgctaacaccgaccaatttgatttccacggccttgccggccatcgttgccattaatgctgctctcaattgcgctggcgtgcagtcttcattcggcctccgtgttgacaatgtttggccatcaagaccattctggccaatgatggtggtgctgatgaagcttttcgcgatgtcctcattcaataggaccactattgaatgtgccgcttcgtgcgcagcgaccaatgcgg

SEQ ID NO: 60679 - DNA, 854 bp, Heterodera glycines
atgaggtgggattggtatcgtaactgttgatgtatttttgaatgcgatcgattggccgttctggtctgaatcggcgttcgatttattgatagatcattcttgtcgaaaaatcagtccgatcactagtgaactctgaattcactgttcaatttgagagagcataactatttgtgcaccctttcgtgagtctaaaatggtgcagcgcccgaggagggagcagcttgttccccccgtatcatttctcaaaattttttttaaagaaattgaaaaaatctcagaaattatcatcaataaatttggttttggaatttttaaattaattttaacaatttcttaagttttcaatttcaaaaaggaggcaaatgggggcgagacactaaaaaagggggcaccaaacattgttttgtcagtttttttgcgggttttcgatcattcctccccccggtcattttaatgttcattatttttcaattaataattaaaaattaattttaaattattatttcagctcactgactacacttacgtggtgctgtcaaagcgcattacgactcgaaacaggtgaaactacacccgcattggtcgctgcgcacgaagcggcacattcaatagtggtcctattgaatgaggacatcgcgaaaagcttcatcagcaccaccatcattggccagaatggtcttgatggccaaacattgtcaacacggaggccgaatgaagactgcacgccagcgcaattgagagcagcattaatggcaacgatggccggcaaggccgtggaaatcaaattggtcggtgttagcactggccatgctgatgacctagccgacgctagagcagccgccagagaagtatga

SEQ ID NO: 60680 - DNA, 600 bp, Heterodera glycines
atgagtttgtttaatccaaacgaaccgttcgaaatgcgaattgaaacggtacaggaggagggtgaaggtaaggcaaagcaaaggattcgaaaaatcggcataaatccacaattattagccaattttagtccaaattataatcattgtactatgttgaaattgtggataaaactgataaacaacataaaatgatgaagcaaaatcacattttaatgttctggattttgacaccaaaaatatgctttatccgaattatgtttaattgaaatatgtaattttctaattccttttcattttaccccattgaattaagcgatttttcgaatacaatgcaaatttagtttttcttttttttgagcggatttcatctcacattgaatttattgtctttggcagagtttgggcagctcaacatcactattagcactccaaatggaatccgtcaaacaatctatcgcctcgtgtcaatgacctttcgggacattaactttattaatgtcaattattcctactaattatgactaattaattattcctactaattatgtctaattaattaaattaattatttttcctttttcagattgtcggttctcttga

SEQ ID NO: 60681 - DNA, 382 bp, Heterodera glycines
gttggcgactatctttgggtgttgcagtggacaaattgggagggcaaaagacaggaattggtgttggattatgtggtggagaggaaaaccctcgacgacctccgggttttatttccattttaaagagaatattcatttccattcagaggagcatcaaagaaacgcgatatttggagcagaaacagcggctgaaaaagtgtgggctaagaaatgttgtttttgtgctggagggagggacgacggccaacgaccggcagttggagcaggcgatggtgtcgagtggcgtggagagcgggttcctcgtccatcggacgccgaatgtgcaggggacggccaaatttctgcaaaatttgacgcgatggctcagagagcgttgttctaa

SEQ ID NO: 60682 - DNA, 125 bp, Heterodera glycines
ttaactcgcttcctccgtcctcctcttccgctgtgccgtccctctccccatcaaatgacttggacattgtccttctctctccgtcttcctccgttgccaaaccttcgctgctgctgagccattcg

SEQ ID NO: 60683 - DNA, 622 bp, Heterodera glycines
atgaccacagtgttgttcaccaattcgatcatcagtcgcgagttccattctatgcaattgcgcttcaattcactttgcaggtcgattcgaaaaataaaattgaatttctaaattaattataattattaattttaagggatctttcatcagttgttcgttgcactctcccaataatcaaagataattgtggcgaaaagccggccaatttgttgctcaaattcatcggattggaattctcgaggtattttgatgaacacaggaggaattcgagaattgtttatgagcaatatgagtggggtttagttgggtgttcgacaatccataatgtttgaatggtagtcagacaatacagttggttcaaatcaaccgtaaaattacgtcttataaaatccggaatcttggctttttcaaaatttttttggcattggcactgcccgacactcgtaaatcaacttttgttgaagatttctctcaaaaaaaatctttggtgcaaaaaatttagtaattcctcattcgagaatgacaactgctgctatcatcaacatgtggtccttgtaaaaaactattaatccaagaaataatttttgtacatataagatttagtgattaatttcataataaa

SEQ ID NO: 60684 - DNA, 1249 bp, Heterodera glycines
atgatgtccatgtgcgagcacacgtgcggcctgtgcgcagccgacgcatgttttgacgcggccgacgactgcacgtcgttaggccatctgtgcttccaccaggccgtctctccgctcgtccgtcagcagtgcgcgcgctcgtgcggtctctgcacgccgcagcaacgagcggagacggcaccacgcggcggaggcgcggagtcacgagaagtggttggcgtacagaagacgcctaaggaggtaattatattaattaagcgaaagccggaggaataaacagtttaaatggtcatttattagggaaggatttgaattccaatgcctaaaaatacggagtttggtttattaattcgagctttgtgccatcccctggaattacgttcataatttctcatcgaatggcatacgcatttaagcaaaataagtatgtggataataagtagtagtagatctaatctttcagctcagattattcatactaattgtaagtttaattttcggtcattgttcttgtgcggaaaaacagtcaaataactgcgagtccaaaaagtgccatttgccaggatatgtcgccttcgtgcgcggacaattcagggctttgtacagataaagtgacttttaaccaaaaactttttgcatttgttaaatcaattaagaatgtctaattattatatcccttttaataatattttaatttatgaattaattttttaaaaaataactgaaaattaacaaattttacacataaaattggcctttcagatctattccgactttctcaaggacaaatgtgccaaaacttgtggccattgcttatccgaagaagacaaagttcggcttgggaatgattacggcagtgacagcagcaatagcgaagattatgaccaaccctttgaatctgttcgacgcattcgaaatcgtccttcagctgctccccccgccggcgggcagaaaaattcagcggacaatggcactaccgttgcccaaagggccaagggtacggtatttcaataataaaaaaagtcaaaatcatttgcattaattgtgattttttggttcaatttatcatttttcagaaggctcttcaaagcgaagcaaatcaagtggaaaattttccgagcgaattatcatagaaattgggggcggtgatcaaaaagaacacatcgaattgcgggggaaactcggcgaagcattacggtactaaaaacaaaaagatttaaaatcgaaaaacaaaatttaaaaaaataaa

SEQ ID NO: 60685 - DNA, 112 bp, Heterodera glycines
atggaaaaggagaaactttggggagggattgaatttcgtgagaaaaacggagaatggaaggaagagatggagaggaagaaggagcagggagaagagagagagcagagcggag

SEQ ID NO: 60686 - DNA, 751 bp, Heterodera glycines
atgaacgccttcttttcgttcggcatttttcttgccattcaattccatgcccaatttgttttggctgatgttacggcctcaataaagccatcgtccacatggaacggtggtggccaatacattttgagcttcaagaacaatgacaactccaagacagtgtgctccgtcaaattcacgttgaccccagcaagcggagtaaaaataaaagaaatgtgcaaaatgccaaaatataattttttaatggggaaaagtggaaaaatgccatggaattaattaagtataaatgccaaaaaattttggaaaatgtcaaagaataattttaaaaatggggaaaatgtcaaaggataattttataatagggccaaaaaatatttttaaaatggaaaaaaatcataagcaattttttctttttctttgtccaaaaagaaaaatatttttcaaaatgaggtaaatggccaagaaagctttaaaaatagtaaaataaatttactccacccattaattgatattatcttcctaattactccgctgattcatcattcacaaattactaattagacgtccatctcggccaagtggggcttcgacgcggtcagtggcgcttccaaccaatacactctgtacaacaatgccgacatagcaccgggcgccacaaattcaaatggtggcctcaacattcagggcaccaaccctaacggaccaccagcaacgccaacactccaactgattgaggccaaatattacagcaacg

SEQ ID NO: 60687 - DNA, 787 bp, Heterodera glycines
atgaatcgtcattctattcaatatttaacaagtattgggtgtctcaaacaatccactccatctcataatcggcgggtgtcctctcaagagtcccctcgcgcgttaatgacgctcccggggtcgagctctcgatcactatactcagatctggcctctccctccgggcagtatctgttcccgagccgaattattgtaggtagagagcctaagaattgtatcattcctttcccggaataaagtcgttactgttgcatactgtattgaaatggtaataatgggatataaaggagtctacagtaagccagggcattcattgtcatggttttgaaagggaaatacaaaaggaaagatcaaagtaaaactgagacaaaaattggaagattattaggaacaaatagaaatttaatacagaaatgggaaaatgaattaaatttaacaaaaacaaaattaaaaagcgcatttgaggagaaaatgaaagaaattattgaacgatttgatgaacttaaagaattatatatgtacccaaagaaaacagcagaaagaatttgtgaaagaattgggcatttcggaaatgacctttatacgatggaaaaaagaattggtgccaaattaccataatagtaagagaaatttcaaaaaaacttttttcttatttaattcaccattctcgaataatgaaaaatttaaaaagatgcaacaatattttgaactaaaagaaagaaacttcaaaattagtgacgaaataattgccacgaaattggggattggatcagcaacgctgaataaa

SEQ ID NO: 60688 - DNA, 428 bp, Heterodera glycines
atgtgtcgaccatttagatatgctattttatattataatcagattggcataatttcttttaataatggcctagtaacaccgaaacaattcaagagaatgatcagcataaatattctaatcaaatataaatttgtagtaatttgttagagaatcaaattttcttgaaatagttataaatttgacccaagctgacaaagaaaattttatgggcacctatttataggacagaatacagcctaaataatggattaattttttattttatgaattattaattttagccattaaaaaaattggatgaaaatgtaaattttagacaattttttggaatttacattttgatattgattttaaatttgtaggtacaaattaaacatgaattgcattactttttcagaatgtgtcgaccatttagatatgctatttga

SEQ ID NO: 60689 - DNA, 529 bp, Heterodera glycines
atgaatgtcgacacaggagctcaggcgacagtccttaccattgaaacatggattaaattaggacaacctaaattgttgccaaccgacattgagactcgcaactgcaacgacgtcacatttaaaacaattggcaaatttagatgtcttgtcagcattatgggacaaccagccaaaaagctaacagcttatgtgactgaagagctcaattacgatttgtttggtttgccatggattgaggcaacggaactgattcccaaagaaatcatgtttccggagacgcacacatcggttggaatccgagcatcatctgccgcacctttccaagaaatagccgatgttaagtcactcacgacggctctcaaagaaaattttccggatgtttttggtaaagagctaggacagtgtaccaagattaaggcacaattgattcttaaatccgacgctcgaccggttttctgtaaagcccgacccgttcctcatggctcactggaagcagtcaacacggaactggaccgcctcttacagatcg

SEQ ID NO: 60690 - DNA, 1718 bp, Heterodera glycines
ccttccaaatctggtcttttgtatttgttcaccaaacttgggtatgttcatttgttcgacatcgaaactggtacaaaagtttgcaacacgcgcatttcggacaaagccgtgcttttgtcgacagaactgaaagaggatgacgaagtgctctgcatcgatgggtcgggaaaggtccgtcccatttcaaaacggaaatgcatataaacatttacaatcataataggcaattttaaatctaaaaatgactaccaatttattatatttaatgacttaccaaattcaggtcattagtgtcggtcttgataagtcagcaattattccgttcatattgaaacaccataaaaacacggaattggcgcttaaatttgcttctcgttacaatcttgacactgatggggtcactgtaattgtgattaatttacttttaagacatattttccttcttcagtctgacagtaacaacaatgatcaacccgtggctattcaagctcatcaccaatgccaatctgtacaacaggtgcttcaaagaaattcatctgtaaatgcaatgggattacttatatctgtttctaattgttttaaaaatttagtcgagcatttccaatggagcaaattctggcatctccaatgggacggcaccaatgccattgttcgagtcgaccccgagaaacgtgcttgttttcaaaggtgttcttttaaatcctttcaaaaaactctttcgttaaagaaaacgtcggacgcatcggctccgtttcttttacggtcacaaatcgtgaaacgtgtgccatttacttcaagatcaagtcgacttcaaatagcttttattcaatttgtcctgaaaacggaattatccaaccgaaagaaaacgtcgaagtgattattaagccaaatgatgacgagcttggccaatttgcaagaaataacgaccaaaaagcacaagttcttgatcatggtatcgagctgctgttttcggtttttcttaaattccttttcagtcggcaattgtttcgaatttggcagtgcaagcggaaaatttttggaaaggcaaaaagcacttctcagaaggtgtttattccaaaaagctgaagacgaaggtgaaagtggcattattatactcaaaaataagttttaaggtgcaaaaaactcctcacaatcagcaaaattccgaacaacggaaaggctcaacaaacaaaggaaaaatgtctaagaaggggaaacaaatgatggaacaaaaagaaaaagcatcagaaccgattgaaatcccaaaagcggatttgggagagacatcacaacactctgagggactgttggaaaagcggtcgaaaaagacgtctccaatcccagagaatttggaaacgatcttagagagcgatcgggagcagagtcagggattggcttcaccagcaccggagagctttcaaggctttgagttggttccacgtgtcgccgagacgtcaaacaattcggaaggagtgtctgttcaggaaccgaaagtggaggccaatcgctccaattcatccgtcaatcgtttatatggtctaaaaatgaattaccgttgtctcacctcctaattggtatttttttaaattttagctcaatattctgccgaaattgcattgtcactgctcgaaaaaatgtcagcgagggatgccgtgcagttcagaatcgatttgaacagctttttggagaaatacgaggctaaattccttgacgaatga

SEQ ID NO: 60691 - DNA, 1221 bp, Heterodera glycines
atgtcaacattggccgactttttcctcgacgattacatttttatcgcttacggcacggaacgcatttctttggacgatttttttgtcatttctgaaggtattcattttcccccttttctgtctgtttttaattttgccgggtttttaagaatataaacggatggaaatcaacaagaacaaaccaccgcgattgaacggacaattccgactcagaccgacgcagctgaaaatgctaaacaaacgcagcgaggggaaggagcgccggaagaaaggggacggcacttccaacggaggtggccaatcggagggggcggatgacttttgttttcggccattgcccgtgggacggacttttcaaatcttggccaaagaagcgtatttcttacatccgattcccaaaacacttcaaaatggagtgcgtttttacatgttcagaggtcgaactgccaatggaactgaaggaacaagtgaaaatattggaagtgctcggcgacggaaacaccgctttggtttataaggcggcattcaggtgggatggatttgcaaatgtttaattactcaaagttttctgttttgctttattattacttaaaaaaaatttcttttaggaccgaaaaaagggacaaaaacgaggaagagcaatggatgacggatgcgcttaaaattgtgcgcgaagaaacccttcagaatgacgaagtgcttggctttgtgcgcaccgaagtcggactgctcggagtgctgagccacgagcacattgtgcagttgagggacgtgcagattttggacgggtcctggttcatccgcatggaacttgtccaggtcggagtccaatcttgaaattggaaaagacaaacccaaccaactcgggaggattggaaacgccatttcacagagaaaattaaaattcggcttcaggacggcgatttgttcgaacttctcaggaaaaaacgaactctcagcgaaacggaaaggtcaatccgtaaaaaaataacaaatatttgtttattcgccttttccatgcctccttagtctctcctcatggtcttttttgtttgttttgttttgtttacaattcctttgcgtttcagtgcgagttgtgccgaatgcctttgccatgcgcttgattacctccatgccgagcattggatagtgcacagagacgtaaaattggagaatttactggtgattcattcaaaaactggatttcaataacaattaaaa

SEQ ID NO: 60692 - DNA, 793 bp, Heterodera glycines
atgcgttttggccaaaacgaggaggaggaggacggacatggggatgctgattcgtgcgattttgcggtgtccgagtcgagcgccgagtttttcttctcgagacgcgccagcatggacgagctcagcgagcagggcgggagcagcagcggaccaccgatggatcaacagcagaaaacaaatgcgaacagtgatggaaccaacaaaaagggaggcattgaagcggcaaatgttgtcggaacaagtcgaagagagagcgtccagaagcacattcaaattggcaccacgacaccggcgacattggcattggcactgaatgggacaacgatggacggcgagacagcgacgacgacgggcaaagaaacgccgaaagtgggccgacgggtggtggttggacagcagcagatgaggaagacatgagcagacagcgacgaagggacggattatggacggaggaaaagcccagaaaaacggaccctaaattatggaccgattgtttgttgccaaagttgctttctgttaatcggtttactattattatatatcatcatattattttattatttattttatttccctgtaacattcttctgatcaatcattgacattcactcttcacacactcccaaaatgactcgtttaaagttgccaattgttctcaacaccgaatgccatttttgtacattctttttcatatgcaaccattcgatatcgccaaatgctttatgatcaattacatggtgggcatttttgcctaattgattgttttgtgttaacagagatgtaaaatcaagaa

SEQ ID NO: 60693 - DNA, 377 bp, Heterodera glycines
atgaaatggatggcctcgcaatggaacactttgatagccggatggcattggttgtggctggacgaagtgaaaatggaggaggatgaagaaatcgaggacgtctcagtggtggtgccatgggcagaggaggcggaggaggacgagcagttcccaatgttttttaccggccttttacgcatccactgaaaaattttaaaaatttaaaaatggtttttttttaatttttagggcttatagaataccaatctttggcatcatgacaaaatacccaaggaaatgtacctcataaaataaattgagaaatttcaaaaaatctaaaaaatattatgacaaatcatacaatgtgggttggcaacttagaaaaaattttgagaaaa

SEQ ID NO: 60694 - DNA, 254 bp, Heterodera glycines
atgcatgtccatttgcaaagtgtttttgtgggctatgaccactgcttgacaacgccgtcctctccattccaattaaggtttgttttgggagagttcattcatttccatactcttttttcaaaatatgaaattgattttgactgttttttagggttgaaattggcctggcctatctgacctcgaacattgtcaaagacattgcacgcttgaaatttgactgccatctccacgatttgatcatggtctgtttttaa

SEQ ID NO: 60695 - DNA, 1422 bp, Heterodera glycines
atggtggcaccggcgtggggagacgggccaaaaaaggaggagtggccgaggaacggaggccacggactttgtcaatttgctcatggcgaattgggcgatgtgagacggttgttggcaccggtgccggcagtgccatgccgtgccacaacaacatcaaaagcactcgcccattgagacgcatgagaatttgcaaagtccgtgcactttgtgttctataaaaagcccatgattgaaggaagacacgtggaccacgaaccagcaagtgttggtcaaaaatttgtcatgaaattcacattaaaagaaaattttgtcggaaatcggaatccccgcccgagaactgaagaatctgaattatcgacatttttgggctcttaaatcaggcctatgaatcacgctttcaatttgaaagccaaaaatctgtctcgaaaatccaaaaaaaaacggaaaggcttttaatttatgtttttcatcggactgcaagtttaaagcttgggacactaatttgtaagcgaagtgaccgagtgaggcagtgattgactaaattaaaaaaattccattaaatctcaaaagcggtaaacgaacatttctattattcatttggacgaaattaccctctgagctaccagcagttgcaatgctcatttgtctttcccttttgggttttatgcattttaactgtccactggctaatccttacaatcgcatgtgcggaaagcatagatttagcaaatcaaaagcgtattcaaaaacaattagcatattctatctgataaaaatagtcacatttaatttaacattcataggtattattatatttaggtttctaacaaatacacttctaaaaacagaatatttttgataaaaattcaaaaatatccatttttcatgttcaaattctagagatcggaattttcaaatctgccgggccggactgatattttcagaagcaactggtttccgggaccggcctctccaaactgaagttttccaaaatcacaggggccgacaaaaagcggtgccgggcccggcacggtccgttctttataaattcctattttaaataaattctttgaaagttctttgattttcaaaaacccagatgttcattttcatcctttattatttaacccgcatatttattacggaaacgccgaaaagttcgcaccattcgatggtaattgaattttgcagcgtttttgttacttttttagcaaattttaatttgcagggcacccgaaccgttcctattgactttgaggatgagcgcgtgtccgaatctccgcaacttccgcctcctccgactgtgccaattccgatgggccatctgaacgattcggagtttgaacagtggtgcgagacggaaattgacgaggcaatggaagagtattgcgacgctgtcaagcagtacacggacaaatacag

SEQ ID NO: 60696 - DNA, 954 bp, Heterodera glycines
atggcacggactgcacttcgttgtgcccggcccaacaaatggtgtccaacattggccaccaaaaaccacgctgattttttgtggtggcttcaaatgatgatcaaaaatgggacagaaatgcgcaaattttttgacataatgcttgaacagatcaaggcggaggtggaccaattcaacaagaattgtgaagaaattgttgaaaaatgggcacaaaagcacaaaaaatcgaggacagcaacaaattcatcagcatcaatagcatcatgccaaaactttggacaaaatgtgccaactttgcaaagttattatgtctattatcaactattccggcatttgaacacaatcagagcagcacaaacggttaattagggtgtaaaaagggcaaattagtatcattaaaaaagtgggaaaaaacagtattagtggaaatcaacattcaaatttattacaaacattaggtacacccaaaaattgggaaccaaaattaagactttccaaaaattcggtcttagcaagttagggtttctggaattgtcattattctactagctatttttttacacagttatttgtccaaaaatgccaattaaataagcacttttttgcttataaaaattaaaactctgaaaattaaaaaaaattaataattttaagttaatataaaatttccaactttttagatgacatctgagcactatttgctcagttattgggttgccacaatgactgaccaattaaaaatacaaataaaatattttgcaaccaaaaatggatgtgcagagatgattcaatcgttgatctgatcattattttttttacctcaatttggttttcgaaatttttttttgtgcgaaatttaataattgccataattattgaattgagcctccggggtctgtatttccaatcccttccccttgaaaggctctgtggggatggacctaaaataattca

SEQ ID NO: 60697 - DNA, 321 bp, Heterodera glycines
atggcattccaatctctgggactcaacccaccagcatttcaatctctgagactcaattctaaggctttccaatcgctgggactcaacccaccagcatttcaatgtctgggactcaaatctccggcattccagacactgggactcacccaccaactttcaatggcattccaatctctggggctcaacccaccagcatttcaatctctgagactcaacccaccagcatttcaatctctgggactcaacacaccagcatttcaatctctgggactcaaatctccggcattccagacactgggactcaacccaccagcattttaa

SEQ ID NO: 60698 - DNA, 116 bp, Heterodera glycines
taggctaatagagcctgtgaagagctttcgaatgatatcaagattgtttgattcggtcaataacttcaagagttatattgactcaaagttggctcagacggagttggccagacgga

SEQ ID NO: 60699 - DNA, 482 bp, Heterodera glycines
atgcgactacacgtgcatcacgcccaccaggctgttatctcatcggtgggtggatgtgaccataaatagccaaagttttaccgttaattattgcgaaataaacatttttaaagcgaatgccatgcggcagcgcgtgccggcacatccgccgatgcggcgcgacaatttgaggacgaggatggccaagaaggcatcagtcggaggaacgagaaggtgcggaaaataaaaatactatttatgaattaattttaaattaaaaaaaggtcgcagaatttaagtgcgaatatttattttatgttatttttaaataaaataaatttatgcttttaatgctttaactaacacttaaattgcctatataaggaagtgattttgttcagtctcttcagttagtcacttacagcaggaaagcgcgaagatccggcggaaatcaagagacacacactttctttcagattttgacagccttttctccaatttga

SEQ ID NO: 60700 - DNA, 2481 bp, Heterodera glycines
atgctttgttttcttatcctggtaccctgccagatcagcatgatgtaatccaatttcaaatgaaatcccatttatttttccagccaccaacaaaatgccagtctagcttaacaccattgatggcacatcgtggccaattgttgccgccacatcgtacgacggctcatttgccggccgaaagtccgcccccgccgcgccgctttgccaccggtggtcgtactcaagtgttgccactgacggcacagaattgtcgtcgagtgacgccgcttgtcatgctaatggctgaccagcaacagcaacagcgtcaacagcaggtgaatacggtagagaggtatacggtataaaaaaatagagagcgaatacgggccggaccctgtatacggtttttcgaccgatacgggtttttacagagtactgaattttacgggttctttagctgatacgtccgtaccccatataggtgcccagctcgtaatctttatccgttccgttttctgtaattttgcttttttatcctcctttaacattcgaataatgcaattagggggtcgaaaaatagagcccccgggctctattataggaaaaacggtaattttcttcataaagtttccggttttgcggtttggcatcaccagacctataatttgcattattatttttttaatttcgcccaaaaattacattagtgtctcaatattggtgaaaatgatttaatcccctttcataagatggatgaacagcagggatttgacttttggtggcatttttaattaaataatttgtttttttgatcagtgatcagacattgtccgtacagattgcacgcggacggatgccaacaacatcggacagtcgcgcaacaacaaccactggaacgaatagcgcaatgaaaagttgcgcaaccattcatgaggatccggaggaggcgaatcgactgttatccgacgagcttctctccattgatcgggtaaaattgttcgaattcaatttacttgtataatattccactctaatcagcagattaaattcaccaaccacccgtaatttttttttgaaaattttcaaacagaaatatcaaaaaaataaaataattttttttaaaagaattcaaatttttgaaatatttttctatcgtttttcaaattttatgatggattactaattttttttaaatttttccaaaaaatctctaaatttttcataaattttttcttagaattttcttataaaaaatttttcgaaattttatttttttaaatttctaaatttgaatttttacttaaaaaatttttgcggcgggggcggggaacataatgcactgttgcattttaaattgtacccatcttcccagacatttgtatcagttggagatgaacaattgcaacagaatatgtattacgctgcgcatcggttgccgataaatcagcaaccgcccacctttgaggcaagcgataaaattttttaaaaatagggccctctaattaaatttaattttaaatttccaattttccaggttcaacccccttcatattcaccaccggaaccgcccaataataaaccattgacaattaatatttgtcgtgaaagcatcaatttctcaaggtgtacggctcaaatattaatagggcatacataaaaccgttagatttgtgaaaataaaatttttttttaaaattattttcttttcattataaacttaaatgcatgaaattttaagaaaaccctcatcaattcttctactcaccattataagggatacatatttaaaagaaattttcaaaaatttttgctgaaaattttgcgagtaaatttctgttctgtttttttttgcagtgcgcaaaaaattttaaaataattttggagaaataatttttggattttttggcctgaagagtaacaaaaaaaaatttcaggctatgggcctgaattatgccctaaatccccataaaaatctaccaaaaagtttaaaataatttaatatttccaacaggtgcagttacggtggtgctcagaccccgttgaacaccacaactggctcatcctcagctgacccaagtgtggacagcattctgaacggctgtggtcgccgaggtgcgcaggtgcgcatttccgaattggagtccgaaatcaacgcggacggcacgccaaattgtgccaatgtcgttaccggacaactcgagccttcgtgccatgccgtgatgtgccgacgagtgccgcgcagcatttcgcagcagttggaactgatgaacatggcccaacaacaacaacccagtcctgaccagcaacagtagatatgatggatgacacgaaattacgatttctgaattttttggttcgaaattccgtgtttcggaaaaattttgggcctcagaatgcttcgatttgacaattgctcaaatcttttttttaaaaataattagaaaaaatttttgtaaatatttttcgacagtaacacattttactgtatgtatgtataataaa

SEQ ID NO: 60701 - DNA, 367 bp, Heterodera glycines
atgcacgcgttttgcgctcgagctatttatcatcgggcttgtcaatccaaagcgaaacaacaaagatgctgttttgaacgaataaagggcataggttattttgaagaagtgtcaaagaacatgcagcaataagcctgcaaaatctaataagtggaaaatacatgagtatagaatttattttcagaaagtgtccacatacttttggaaaaatatatttgcaatttatcaacaattttgagaagtgagttagaaatgataaacttcacgattcaaaccaattttcgttgctctaattaaccgcgataaaaacattcgaatcaattaaatagcttctgagataataaggttatcataaaattcatttaaa

SEQ ID NO: 60702 - DNA, 1065 bp, Heterodera glycines
  unsure (1)..(1065): unsure at all n locations
atgcgtttgnaggcgcgtcagttgggaatggcggtggaagagtgctttccggattggccaaagcttcggcaacaatactgtcgcattcggaaacaagcagtcagagagcgcatgcagcgcaattgggagatgatggtgatgatgcacggcggagagagaatgatcgacgaagactttgacgggcaggagcaatattacgacggatcaggtgccaccctaattaaaaaaagtttttgcagtaataaaggggaagggggccggggtaaaatgcaatttttttaattgaaagttggattttttagacttttcttatggtcggcaattacaacaaaaacatcgaattcctcctgacattgacatggacgtcgatgtggaggacgacggcgatggaaatttgcgctgaatgagacgagaaaagggaaaatctcggctacatgacatttcgcctactaacccaaaaacattcatttcgcctactaaggtaaaatcggacattttgcctactgacatttcgcctacttgttattccgcctaccaagccaaaaacattcatttcgcctactaattagtaggcaaaatgaatgtttttggcttaataggcaaaatgaatgtttttggcttagtaggcgaaatgtcagtaggcgagatgtcggtaggcgagatgtcgagtaggcgaaatgtccgtacaccaaaatctccattcttctattgactattaatttgtttttggtactttttgtaaatgcataaatttgtttatacttttttttgaatcctcaaaggtttctctcctacaaattatctattattttcgtttttaatggtaaaacaatttttaaaattcaaccttttttatttgcagatgaaccgattaacaaaaatccaatcgttgaacaaaatcaatgaacgggagctgagcttgggcatttccggcgatttgggcaaatcgtggcaccaaaaatacgccgattcggcttggatttacgtgggcaatttgccgtacgatctcaacgaaggcgatgtgcttgcagttttttcgcagtatgcatgttattttgttattta

SEQ ID NO: 60703 - DNA, 538 bp, Heterodera glycines
  unsure (1)..(538): unsure at all n locations
atgcaaaagatttcaaaacggcattanatacagcagctaaagaacagccaaaaagcagcagcagggttttggagccattttaaaaagattttgacgaaaaagagaaatgcaataccaaatattcaaatgctgaaaataaattaaattagatattaaaactttctttttttggcaaaatgcttttttattaccctttttgaaaacaaaaaaatttaattaaatattagaaaattcactttcattttgaaaatttttgtgcatattttcagtttttatatgtgcgtcttttgcaatttcatataactttacgcataaataataaattaaaaaacagcaagtacatataaatatgaaaattaaaaaatttctgtaataaattaaataaattttaattaacaatttagattataattttaataataaaattatagaaaatgcaaaaaaaaacattcatcaaagaagagaaaaccaattaatgtacaataatttaaaaggaactttcttaaatattcacaattaaatagaagtgatactgaaa

SEQ ID NO: 60704 - DNA, 812 bp, Heterodera glycines
atggctttttcgaccgtttgcatgttaatggattttttcaaatggatggcttttggagttggcacaatttgcaatgtactaatgagccgcctgattatttggcacactcccaaattaatgcgaatttacagcaaagtaattataaataaaaaaaatttatctttttgaaataaaaactttttatttatagattttattgcaaacttgcgcagctgatcttttattgctcataatgaccatactttttattccggtaataataattgttaaattcaatattattaaaaaaaaatttcaaaaatttttaaaaaagtaaatgaaaaaagattctttttttgaatttattttaaaaaattattgaaaaaagtaatgctaaaaagcacgaaatttaagaatttctacaaacaaaaatttgtcagaaaattataataatttatttccaaaacaaagttttatgtcatttagtacacctttacaacgaacaaaggcgaacagatactgatagcaggtggtttgatcaatttgaatggatcaacggcagaaaatcatggcttgattttgctagcctctgtttcttggacttttctcgtaatggcatcattgtttagctatgtgtcacaattcatttaccgttaccttttgttaaattggtctgcaaacattttaacttttacttaatttgaaagaattggataaatgggcaaaccaacaaattctaaaaatttctaaaattgttgattttttggcaaaatttgagggaagctaagaaaaaagcaaccagtggcgcatggataaatttaaaatttttggaa

SEQ ID NO: 60705 - DNA, 814 bp, Heterodera glycines
atgggcactaaaaatgggagaattccttatgaattgcttttcgaactcatttccgctcttccgtttgacattcgatgggccgtcacccgggtttccaaggcttttgatggttttgtttggcagaagcaattttcatgggttagagctgaactgacccgcaaggaagcacaaaggcaaaaagtaggctaattactcgctaattatgtggggttttggcacaaaaaaattggcacaataatggtgagcacatttgtaatgcttcttcatttagaaactcgagttccaggaagctgcccaatctctttcgacggctgcccactctctttcgacggctgctcaatcgctttcgaactcggcgttcaacaaaaacaaattgttcttcaatttgcttaccaagcgtacgatttatttgggcataatgttttacaatattctttaatattttcagaaatgtgttctgttcgccaacttaccgttgacatgttgcaggtaataaagaaatggtaaaaaatattttgtaagttcggtttggtacaattaatagggaagggttgggggattagcatttctcacctattggtccttaattgttagacttttctttttggatttttcccatctttagggcattgaggcccaacaagccgtcaaaaagggcggacggattccaaaggctggttgctcgtcggcaggcggcggacgcggcggtggtgcgggtcgaaagggcggcggacgcggcggtggtgcgggtcgaaagggcggcggacgcggcggtggtgcgggtcgaaagggcggcggacgcggaggccgatga

SEQ ID NO: 60706 - DNA, 220 bp, Heterodera glycines
tctcaaattatgaggaaacaggcatgttcggtggaatgaacatttaccatcaaaaatatttcacagtcccgcttcctgaattccgtccagaagcagctgcactcggtgcttcgactcactctgtttcacaaagtccaacagttcgagcatccgcttgatcccaatcgatattcctctgttaattgccgatttaattatgacgttaaatacattaatttga

SEQ ID NO: 60707 - DNA, 1286 bp, Heterodera glycines
atggacccgattaatgggttttacagcaacaatgaggacaacgtgacattgacagttgactttatcttaaagaatgctgaaatgggcctatttgcttcttctgtaccaagaacatccgacaggacaattaattgggaaattgaaaaagtttccgaatttttccgtgaagccattggaagtgagcgcaaaagcgaaactgtgcacatcaaaggatttccgtggaaaattgtggccaaactaagccaattcaaagatttggactttttccttttgtgtgccatcccaaaaagtgagtgaacttaataaattaattcgaattagtaataataataaaattaattgctttaagcatcgaattggagttgcaaatgttcggcaactttacgaattggctcggatgattttagtgataggttcgataacttgatttttaacaatgaattacccatctgtcgatttgatgttggccttccgttttcgcatttggtaagaaatatttttgttttttcgaataacaaaaatatatatttaagttgcgcagagctcgaattttgaggcatatgccttttttctgcgcattagtttcgatatattaagcataaataacacattttccacttggttttatgctttccgttgacttttattatgcgttttttttttgcctttttcgggattttcgtgccttaaatgccttttaaatgccttttttcatgccattttcgggatttttgtgcccttttcatgtatttttcaattttttggtgcttaatctagtgcctttttcgtgatttttataaagatatattttttcctggctttctgtacgctccaacataaggaaaacattcccgccacctataaaagtcaaaaattgtcagtaccaaaagagaccctctgattttttcattttaaaaccaaaacaaaatggcctaattgcttttttaatgatataattaaggaattgattggcacaaacaaagggtggtacgacaaggaggaggacaaagtgactgtggtcattgattttttatttgacgatgaaaaaatggagaagccgtacggctcgattttcagttaaatttatgccattttttaaaaattttttctataatttttgtattcattttcaatatccgctttttatgctcataaattcccatttcgcagatcggggacgagcaggaagagaactaaattaatacatatattaattatatatataacttatactcagagaaaatttggaaatttgaaaaagaaaatccaaatcttgctctgcaaaa

SEQ ID NO: 60708 - DNA, 785 bp, Heterodera glycines
  unsure (1)..(785): unsure at all n locations
taccgggccgtccccgcaagtcactgaccaatttcgacccgacatgtgccgactatcgttccctgcaccgcattttgatgagtgataaggagagggccgaaatgtaccggaagcggaaccaacagcagcgcgagcggagacggcaaatgacgaaggacgaattggcagaggcgagggccaaggcacggcaaaaggcggaggagaggcgggcgcggatggacgcggcacagctcgaaacggcgcggaggaaacacgcggaacagaggcggaagtaccgcgagaaggtgcggagagcggagcagagggggaagagaaacgagtgaattggaagagagacggagcatttggaatgaaaatggagcgaaatcatcgtattgtcgggacagagtgttgtttaaggcatttttctaccctcccaaatttcttgtgtttgtcccccttcccctggtcattcagatttgtctctcattcctttggcattctctccatggtttcctctcctttttgttttttgtatctctgaatccgaaaattacatttttgatttttctatttgtatttgatatgctttattatgacgcctttctttttgttatcgtttagtggtaagtttttgacaaagtttcttttcaaatatctctgtccgtcttcacatttctacgcattnatccgtcgttgtttaagccggttgataaatacacatatttatgctttatgtttataccctccgtattcttatgtccacccttgtagcctccttcaaatgggttcctttgccgaataaa

SEQ ID NO: 60709 - DNA, 4727 bp, Heterodera glycines
atggccaattcccaagtcacttataccgttttcgactcggactgtctgatgctttccgatttggaattgaccgattcgacggtgctcagattggacgaggacgaaagtgacggaggagaaggggaggaggaggaggaagacgcttttcatcagaatcggatgtttttgctgacggaagaagcggaagagacaaagcgggggagttttctggacagatcggtcattttggacgggccaactctgaatttggcattgccagtgatcgaaagcaacaaaatgagggcggaggaggagaacgaagagacgcccactccgatggttgagatgagtcggacggacgactttcgaagggagcgggacgaggacagactgaacaggaaccatttgagactggagtttgcggccaaatcggagccaacgcaaaagacgacgacagcagcggtaaggactgatcaactgatcagcagcagaagagcgatgatcagagggagggacttgagcaatttgggaggaaaaggaaagaaatggaaatcggatcccttcagcagcagcagcagaacgcaaataacaacagcagcagcagcagcacaagtggagtggacagaagaggggacgggggattaagtgtcatcagccaaaaggaggagcagcagaacaataacaacaatcgcaacgacggggaaagacaacggcggggggaagagacccaccagcagcagagaaaagagacgccaaagcggcccagggcaagccaaccaagcggaggggggggggcaaaggacagcaaaaacactcccccgggcgagggaaacactcccccaggccattctcttttccgtatagccataaaagtgtgaagcggacattgtttttacacttcaagaatggcaggcatcatccaaaaagtgccaattcacttccctcctatctctgctaacccaggcagttccacttcatttttcacaggcctctctcttcccatccgcccctccggcaaatccaatgcgaaccaaatgcaaagcaccatcaaaatcccaaatgataatggaccaactgaaagcgagcatagaggcggaaaagcaacgggcaaagaggaaaaaggaggaagaggaggagaaaagaaaaagggacgaggaagaaaaaaagagaaaggaggaggaagaggaggagaagaagaaaaaagaggaggaagaggagaaaaagagaaaggaggaagaggaggaaaagaagaaaaagaaggaggaaaagaagaaaagggaggaggaggagaaaaagcggacaatggacgctgaaaagagcgaattaaacggtaaataggagaaggcaaaaaagcacctttatgttccatcgacacagaagatagagttccccccccccaccctaggggatggctgtagaaattttaaaaatatagcgaggaacacccttgtcgaggaataaatgttcaaaaaaacataattattaattttactaaaacaaaaaagtgtagaaacatatttaaagaccctcatatgactcgaagttctcataattcaacagcaatgacactcgcaattaacccatgggtcggggaggaaccaaagttcaaaatgaattaattgactttggaaaataattggtctttttgactatttaaatttaaaaacgttatgccaatttttaagtattcgctgccaaaaaattttttcaaaaaagttactgttttggagactaccttcgtagcatttagaaaaacttatcatcttccccgaataattttaaaccaaataagaaaaatattaacataccaaagtgtaatttagaaacagtcccaaccgaaagtaccgccaatttgactacaatggaacaaacggtccctaaagtaaaggaagtgaaaccgaggaggtcgctgttggcccaggcatcccaacaacggcctccgttgccacgcgcatctgcgcaaagttcggccagtgcccctacacagggtgatgcgtttttccgaatttactctgcgttaaatgttttcaatgtcgcttttcagttgctctcccacggagccattctcgctctcgaatcactccgtctgctcgtccggtgctcagttctcgcgaaaacacttccattgcactgaaaggaaccgcaccaatgtctgggatgacccgtcgttcaatgaccacgaaaagtcagtcggttgaacacgtcgcagtcgcacaaaaacatttgtccggcattggccgaaacatcgcaaacggaaggacgaaagagtcgaaaagtgcgaatgcatccgacagacagcgaaaggaagtcgaagacgaactgaacaggacgaagcaaatgctgaaacagaccacaaaaacattggatgtgttcgctgtggtggcatcacattttgacagaaaagtgagggggggggtattagtgatctgaaaccaaattaattagatttattaattttagttggacaatgccaacaccgaatcggctgttctgatggctcaaaagggcgacgaggcggcgcaacaccaaagggccatcgccgagcgtaagtcgtctactccttcgcatttgtggtgtttctcttgtttttgtgtggggttctttctttgtttcgactcccccgagcggtggtccatccgtcgcccctccgtccgcccattttatttcatttgactgcacaatgcctttcccatcgtttgatgcttatctccccctcattaccattcactccaattcatttgggcggttctccccttccattggtcatcggcttcggctccttccccccccccccatttccttttgcgtttattttctctcaaatgcttttccattgcgatcaaattgctttctcttttcccttttgataaagcattgaataacacaaagttattgaggcttatgtcacctatcaacagtcttttcttttcaaatttcaatgcaaaagaatgtcccaaagtttctccgtcctccgatggcccaaattgggttggctcccttctcttctgcactcacccccaatccgtctacactttattccttatcagtacctttttggccataatcgtttgttttgcagtggactgcaactggaaaaagcgacttcagcgggcgaaggaggaccatcgagtggaagtccgtaaaaggggagaaatggggaaaagagggcggattaaccaccgaaaaaatttcaaaaactttttacagttcgatgaattacgcgcaaaaatttcttctgaacaagcggaaaacatcgcgaagatccaactacagcatcaaaaaaccgtgaacgaattggaaaaacatgtacagaaactcggcaaaaaactggcggaacaagaagaaaaacaccgaagggaattggccgaatcggcgagtcaatcgacaaatgtgaacattaattgccatttacataaatatcacaatgcatatgataatttctttttaattttcagagacttcacaaagaattggagagtcggaattacgaattgcaaatgaagaacgaagaaatgttcaaattgagacaggcaaatcgcgaattgcaattcgaagtggacaaattgcccgaaaaagaggcccaaatagtcaaattggaagcacgaattggcgacttgcgagacgaagtgaaccgtttgagacagttgcaaaagtgagagagaaaaggcaaatgtagagggagaagagaaagagagataaacggagaaaaatgaaacaaaacttcgaaaaagaggaaataagcgagaatggttaatatgaaacgaattggttaaggaaattgattgtacagctcgagggataccaacacgagctcaacgacatccgagtcaaggctgacgccgtggtcaaagagaaggaagtgttggagtatcagctgaacggacagaacggaggggaagcaaacaacgggtgagtgaatcgcggaaagagaaaacccaccgaagcaatttgaaaatgactgtttcataatgagtttaatgaagcacttcgtttccaggacaccccggacgagaaaaagttttgccgtgccttcagtgagtgcgtccactccgccgaatcgaacacccgaaacgcagcgaaagcggacaagtcacttgagcatgtcctgtcattcgaatgggaaagcgaatacgccacgcttcggtcagtttcatatggaatttgcaccaaatttgtttagacgataaagatatgtctcgttcgatggattcttcgatgattggccaatctctgatcgcctgttacatccaagaaggacgaagcaaaccgcagaatacgccgactaaaatttacaccccgagggacgtcacggagagtcagttaaaacacgcatttatataaataattatttaattttatattttcactcattcagttccccccgattcgtcctcaaatggcagacgtgtggttaactttgactcaacgcgtgaggacaacgaagaacccaacagagccgtggacagtgaagaaaagtgtgaccgttccccttgactttttaattattactcgctttgcgtatgcttattcctaccacctttatttatgctatttctacctttattattattactcgactctgatctcgaccgcattttgcgcttatgccttcctcatctatctgtagattatcattattatcacttttattgttagagtcttgagcactttcgctccattgaccattgccgtttaaggaatgttatgcatggataaacatttccgatggattggaaggagtcaataaa

SEQ ID NO: 60710 - DNA, 758 bp, Heterodera glycines
tgccagagagaatgaaaaacgagcaatggtttcgaccaaaagtcattttttggaacatcggaattaaccacgagggtaaatcatccgcagagagtgccatctttcttttacctccctttttttgcttcgtttttagcttcgctggcggcgtccatcggcgacataagtctcgaagaagaaatcaacagaaccgcacttcggcacacggttgaacattgtcttacgttgacttcagaagccgaacatcggacgattgaaaatgctggactgctagagcaattgcttacggaactgcagcaaacggtgggagggcgagtaaaagaagtgaggaagggtaaggaaaagtacccttttaaataggtctcttcgtgtccttcaaagaagaattgggctattttcacccaagtgatggcactgaacagtgcctcaggcggagtgccaatcatttgttgtaaaagtgggaaggatcgtacatcgatgggagttacacttgacgaaggccgaattctgaaggagagttgcggggtatcgaaccaacaggtgaggggagaacgaagccgcatttggcgcaatgcaaccgaatccctatttttcagatttccgaaatgattaaatgtcttcggaagaacggagtccgtcgcgaaaactgcagaaagaacatcggcaaacccttctattcgttcagtcccttccaattaggctttttgccccctccatttcgtccgccatcaggaacattctcaaacgtagtctcctcc

SEQ ID NO: 60711 - DNA, 388 bp, Heterodera glycines; identical to SEQ ID NO: 51536

SEQ ID NO: 60712 - DNA, 420 bp, Heterodera glycines
tgagataggctcttcacttcactcttcttcaatttccaattccgatttttcgacccccttttttctccctcttttttacatcactttttcgccatccttcccctcgtttgcgtcaaataatcccatcacgcaataaattgttgagaagaccctccttttggtcacaggaaaggatttgagggacggcaaggtgggaaacggcgggaactccgacccctctccaatccgatccatcgttcggcgtcatccgcccttctcggcgcgcttcgaccactcctcctcccttttctcgtcgtctcggcttttcggcgtctccgctttttgagcgtgtctcgttcggtttcctccccccccccccccagtttgtcccctccctttttccgacaaactttttggtgcgacgacccgggaacacaaacc

SEQ ID NO: 60713 - DNA, 2732 bp, Heterodera glycines
atgtgcgaacacatgcagcacactgtgcgcaaggaggtgctgtccgactgcgacattgcccagggcaacaaactgttgctgtacctcagctgctgtttggcgggccgtgcctatccctacggcgaactgccggacgaacatttggccaaaactgtgccgttggagacgtacaaagtgagagggcacccttttaaaaaaaaatttaatttccattcagtttcttgtccaactgcgtcccaaatttgtcaccggaccgccctcctctgcgacgaccactccttcgcccaccaccgcctcaaaggaggacgatcaaggtggttatggcattgctctcgatgctgctgctgttgtacaacccatcaacaacaaccacgtcgacaacaacaacagcagcaacaaaccgtcggtggccgaccttcgcttcccgcacctgcaactgttgttgaagttggatccgcagcagttcctgaacgtgatcaacacctgcgcggacgcgcccgtgttcgcctccgtcgacggtggggccacaataactttttgggcccataatttcggattttccaaatatttttaagctattggatggattttcttatttgccctttcccaattgaacttcgatcggggcttcttcaggtcgtttgaagcgcctcgtggacgtgttgatcgcaatgtgtgtggagaaaaacggggaggacgaacgcaacgaactcgggcccctgctcatcgcatttgtggtcggactgttgcagaagggggccataccaaaggatgtgttcctcttcagtcaggtccttttcgcttttccaaactatttataagctaaaatttttaaaaattaaaaaaactataaaatatttaataatatttgttttgcagttgatcaaacgggtgttgcaacgtcagtttctgaatgtgcgtgcccagaaacaggccgaacagcacattgtggacctgttgaaagtggtgcccgaaatcgacttggacaatgtgttagacattgcgcaacgccggccctagtaaaaaatgttttactcataataattagggtcattaattacatttttgtccctgctcaaagtgttcacatttgtgcgtacattttcaccattcgcaagcagtacgttcagctgttggagtgctgtttaggcgacctttttgaaccggtcagaggatttctgcccattttttgccaaattattttgaaaaatttcagcaaaatgttttccatattttggccgatttgttgaccaatttgcgcgaccatggccaactgtgtgaacttcgtcagtttgtctgcgctcagcttggcaaattgtccaatttggaccctcaggcaaaacgaactgccaaaaataatgaaaattaaaaaaattccatcatttcagcttgcagcccacctggtgttgtcccacctgcccgggctgttggccgatgcccagtccaacccgcgcaaattgcccttccaattcatacgacaatgctttgcgctgcggtacgcttttaatttttaatggacacaaaagcatggctaggtttaagtcgtcagcaaggccatcggacgctgtgcggtgcggacgatgaccacgagcaggacgaacagttttttgactatctgttcgagggcatcatcgacgaggccgatgtcgccgccatgtcgtcgaacggtgtcgaagaaaactgcgagggttggaagccggaattattatttatttgttaattgttttttaattttattttagccaccactatcacttcgttggacaacgagttggcggacttgttgcgctattggcttccgcttggtgcagcgacggaccattgtctgaacgtggccatgcaatggcagcagcagaaacggcccaatggtcagtgactcaagaagacattttaaacgcaatttttagcttaaattttaattaaattaatttgttttaatcccttacattttcagctgtcctttacttttgttacaatgtttcagctgtccttatgtcgaccatttcgcttctgctggtcgcccgggggcacatccaacgcgcatttgagcacattttcaacgagggcgttgaacgacggttggacagcaccattagccaagttagtattgcgacatttggcatttacaagggcttattacatgataaaaaccatgacaatgatattccgatgccgttggaaatttaccccggggcggtaaaagcagggtttttggtatcccgaaattcggcacatgtgctttccccattttttgttgaagcctcccgccgccgacgaccgttgtgtcgcctctctgttggaattggcctccgcccatccgtcggatgcgcgacgtggcgattggttggccaaactgttccggcaccttttgaaggcattgcccgaggaaacggaagccaaaagtgatggtgatcagtcggggtgggagattatctgacgagactcccgacaaaatcattggattttggtcccaactcccgatttttttaaacggtcgttcattgaaagtcggagccattgattccttttcaaaaaattttttaattaattaatttttaaaaattagataatgcagcggaattcactgcctccgtcgttcatgaacaaatgacgcgtccaaattcgcaactttttcgtctgctctgtgctatcattgaacagcagcaccaccacgacgacgaacaggagcaggacggactgagggacatccaaattggagcggaaaaaggtga

SEQ ID NO: 60714 - DNA, 816 bp, Heterodera glycines
  unsure (1)..(816): unsure at all n locations
atgccagtgtcgaatgccaacgagacgaagaacccttctgccggcaaaaatgacagggaaatggacgaaaggtgggcaaaaaagngagaggattcagaggatagtctgacccgtcgagaattgacgccggcggtgggtcgggaccgaccagcagcacttcaaaccggacttacaattagcaaacaattagtcccctaattgcttttcaatgtgcaaatttggtcccttccaaatgatgggctctgttttcaatgtgatttcgcacattttattgtttcaattgcctcaggcgagctgcaagtgccgtcttccgtcgcctggagcacgacttcccaattcgtacgggccccccgccgccggcaaagacggcgaacaacgctttccaccgaacgtcttcgttgatttagacaaacttttcatttttattgagaaattacattttaatgtagagctattttcttctgactgttttgcccgaatgaatgaatgaatattaattaattagcataattcaaatggcctgctgaactttgttattattatttgccattttttaatttaaaaagaattttaaataatttatttattttcaaccctttttatgtcccgattttcactcatttaactgtgattgtgccagtcaaccaaaatcaaagaattgtttatttatgcgttctacttaattgaaaataaatgtgtgccttccaaactgacaattttaaattaaaaaatcaagttatattttattcaattaaaaaaagcatatataatttttagggctaggatttttatgtgctaaaaatcctgaaatatgta

SEQ ID NO: 60715 - DNA, 765 bp, Heterodera glycines
atgagcatgcatttccataaaaatgggttcgaaaaatacattaaaaaattggtaagttacctaaacagcaggggtttctgtaacaatatggtcgagattacggtaatggaagaaattatatttttcattatacatagttcccgaaaaaaatcacttttaataagttgaaaaaaaagatggccaaaaattttggaagaaatattttggtaataacctttttgaaattaacaaaaattttcaaaatttggaagctataccaaacacttgtaaagctatcggatgatatcataaaataaatgactcccattaaaatggcacaacattcctcaattggttttcaagtgtaccatcagcatcatgaacatttttggttgcagttatttgttgtacagttttcatacaattagctgcgcaatgatcaaaaaggtattttataatttattaataattgatcaattatcatttttgtacggattaccctcttttatgctaattagtaattacctacaattaatttgaaatattaagaaaaattgctatgtcgttgtcacattatgcttcgcactaacccttgactttttaccagcgcttgtcaacatcatttttgacctcgtatggcacatttttaaaatttaaaatataattaaaatcttttttaataattggaaaatccaaaataattttcagttcgacttgggcttcatcggaaattttgggtctacctgcactgttttggactcgctttgttgtgccgtttatttctaa

SEQ ID NO: 60716 - DNA, 962 bp, Heterodera glycines
  unsure (1)..(962): unsure at all n locations
tccttttcgcccattttcgaggctttgaactgtccgctgaccgttcaggtgaccaatgctgtttgctattttgttcccatttgaccacncctttctcttgctaaaggagtgtttgtcctttggcgacacatccaaaaatgtttttgccggcccttccgcccttttccatgctatcgaaccgtttgtgccgtgtcccgtggacaccgctcacatcgctttgccaaactttgctctcgaggcgcacttgcgattcgcagaaaatttgcacgaattgtgggcgatgcgcaaagttgacctgggctggacttacggggaggtgagtgaacggcacgcgagcagcagacggagggtattattaaggtgcgcaacgaacaaacgaagcggcacccgtgccttaccaacttcgagcggttgcccgacacggaaaaggcgtacaacgtcagtttggcattggacacaatgcgaaccatcgaagcgttgggctggcacatggtaccgagtgccgaccagcaggccaatgctcgttccaatttggcagatcctcgaccagccaccgacgcgacttcggcccgtccgactgccccaaaattatgcgcaagcgaacggatataagccgcaaccgttggacacgcacgaaatcgaactgagcgaggcaatggaaccgctaattgaagcattggcagggaacacacacaacgtttgggccaaagagaagatcaggcggggctggacattcggaatcagcgaggtgatcagcagaacaatggaaaatgggagtgatcggaggcaacggcattataggggaacatttgccaatagatcatcccccgagggaagctgccccctccattcctcgcatcgcttacgccttgccttcccttctttaatttcgaatttctcagtttgtcgatgcctcgcaaaaacggaccccccatttggtgccttatgatcaggtggacgaa

SEQ ID NO: 60717 - DNA, 242 bp, Heterodera glycines
  unsure (1)..(242): unsure at all n locations
atgtctactaatatgtcgagccatggtcgacgacaacgtcttgagaggagcagcagcagtattagggaactgcaacaactgcaagaaattgctttggccattgaaaatttggcggcaccaaatccgcgacgacggcatgactcttctgccggtgagagtgagcatggagaaattttgatggccattaaccaactgcaacaggtggatgagtgaattaagaaatacattttttanaaaataaa

SEQ ID NO: 60718 - DNA, 202 bp, Heterodera glycines
atggatcttctcgtcagtctggagctgctcgacttgcactacaacatgatcgcccggttgccggacgaactgtttcggtgcctcgtgctgcgcacgttggacatcagtggcaatcaatcgctgaacattggcaacctgcaaacctggccgagctggtgctgtgcgagaaccaaatccggcacttgcccagctcagtcgggcg

SEQ ID NO: 60719 - DNA, 1135 bp, Heterodera glycines
ttcagtgtccgtttggggtactcaaacatttatggggagcaaaaatccaacgcagaattaaagtacagactatagggaagctattcccgaaggattcggtctccccataaatctgggcgcatcggttcagggggactgccccgaaaacccaaaaaaaattttttggataaaaatattaaaatgaactgactagataatattaaaataggttatttctcttcctttcagtatccctgcaaagtttggtgcgcttctgatcagtttctgaaaaaaaagttaagcctaaactttttggcctgtttaaaaaggaattaaaaatttttaaaaattttattcatctccctttttgatagaaaaagcatcagagtgcctaaactaacatgtaaataaaatttggtgcgtttcagaaccctttctgaaaaaatatttaagaattaattttgcaaaaaataaataaaaacgaaagactcagattttcgaaaatttttttgagccagctagctcggcgctcatttcagtgtaagttagtcctttaccggggagtatccctgcaaagtttggtacgcttctgctcaattagcaaaaaatatgagtgatcgaattaaatctgggcgcatcggttcggggggactgccccgaaaacaaaaaaatcgattttttcaagtgtccgtttggggtactcaaacaattatggggagcaaaaatccaacgcagaattaaagtacaggctatagggaagctactcccgaaggattcggtctccccataaatctgggcgcatcggttcggggggactgccccgaaaacaaaaaaatcgattttttcaagtgtccgtttggggtactcaaacaattatggggagcaaaaatccaacgcagaattaaagtacaggctatagggaagctattcccgaaggattcggtctccccataaatctgggcgcatcggttcggggggactgccccgaaaacaaaaaaatcgattttttcaagtgtccgtttggggtactcaaacaattatggggagcaaaaatccaacgcagaattaaagtacaggctatagggaagctattcccgaaggattcggtctccccataaatctgggcgcatagggtcggggggactgccccgaaaac

SEQ ID NO: 60720 - DNA, 465 bp, Heterodera glycines
aaaatttttttaaatttattcatctccctttttgatagaaaaagcatcagagtgctaaaattaagttgtaaataaaatttggtgcgctttagagcactttctgaaaaaaatatttatgaaacaaaaaaatcgattttttcaagtgtccgtttggggtactcaaacaattatggggagcaaaaatccaacgcagaattaaagtacaggctatagggaagctattcccgaaggattcggtctccccataaatctgggcgcatcggttcggggggactgccccgaaaacaaaaaaatcgattttttcaagtgtccgtttggggtactcaaacaattatggggagcaaaaatccaacgcagaattaaagtacaggctatagggaagctattcccgaaggattcggtctcccaaaaatctgggcgcatcggttcggggggactgcccccgaaacaaaataaatcgatttt

SEQ ID NO: 60721 - DNA, 264 bp, Heterodera glycines
  unsure (1)..(264): unsure at all n locations
atttataagcatttgaagggttctcagcagtttccctgcaaaatttggtgagcttctgataagtctagaacgttgggtgataaaatgaaaaaaataattaaaaaaaaataatgctggtgtggtaagtgtgaagaactgtgttcctccaggcaaaaaattctaagaaaatttataagcatttgaagggttctcangcagtttccctgcaaaatttggtgagcttcagagcagtctagaacgttgggtgatcaaatgcaaaaaata

SEQ ID NO: 60722 - DNA, 457 bp, Heterodera glycines
tttgaactcgcatctccaaaattttgtcatcccatcagaactcattttagcgaaggtgtaaaggtggccttcgtaagacaattttactttttgttttttggttgcaattgggttagccatttctgaaaaatgtccaaatcagaatgtacatcaaattggttaactattaaaaaataataggatttggaataagtaaaattgtaaaaaatgagcgaatgttaattaaacctaacttatgccaagtggcgagggatccctcaggcttagtttttagaatcttaatttttaaaaaagcacttttcgatttttgggttggggcccaaacgaccccggggcccaaaaacgggggcccaaacgaccccggggcccaaaaacgggggcccaaacgaccccggggcccaaaaacgggggcccaaacgcgggggcccaaaaacgggggcccaaacgctctggtccc

SEQ ID NO: 60723 - DNA, 763 bp, Heterodera glycines
atgaccaatcgcataaattttgtgtgcatattcgaagaggcgatttcattcgacttggcatagaatcaaaaaaagattttactgagcagggaattgaatttggatttcaatcattgaaagttatgccgaaataaatatatattttttattttattaaaaatttagaaaaaatttaacaacactcccatttctttcgttttaatgggaaaagagaaagacttttttaaaaatttggcaatcaatcaaacggtaaaaaattcacaaaattcttaaaatatttgttgcaattgttttttacagcaattttccaacgtttatttgcccaaatcaatgccacgggcaaatgatttggcatttgccacaacggcatgcgactcgctgctgatcacggcacaatcttcaaccttttcgtggtggattgcttatttgatgccggacaatgcgaccattttttacaactcaaaaataaccaaaagtagcgcaaattgtctcttaattaattccaggatttttttaaaaattaaatttatttgaattttaaatacatatttagacatttacacaacaaatgaaaattttttggccgaatgggtgccaatcgaattggtcaacggaaatattatgttgtcaaatgggtaaaacatttaattgatcagaaatttaaaaaaattaatttaaagtatttttgatatcctatgtgtaaaaaaaaagttattatcccaattaaatggaaaaaatattttcaaatgtaaaaaataattaa

SEQ ID NO: 60724 - DNA, 1592 bp, Heterodera glycines
  unsure (1)..(1592): unsure at all n locations
atggctggacccgactctcgttttattctcgaattcttcaaccgtgaggctaaagagattggagtaacgcaggaattgcttgacaattcacaggtttttgactttatgatcgtttgaattttatttttttttattcagccgtccgatcagttgatccaggcctactactttctgtgtgatttgatttttgaaaatgtcggcaccaccaaagagaacgagtatgaaatggccactgaactgacgagggctcgtgccaagatgatcatccgaacgcaacagcattggtacgttggtttttgttattttgatcttacaattagtattttcgtatagttttatatacattgcatccacaatttgttcagcaatttggtgtacaacaagttgttcgatggttctaacgaatttctctactccgatctatttcaaccggacccccgcagaacgaagatgcacattgctcaactgattcgcttgtacaccacaaagtgtgacattgccaaagagctttcggcggtggacaatcacattgtgagtgtataatttggcggagtttactagttttagtttatcaattgggctaatttagtcggaatttacaaatttaaggatgaacaaatgaaagcgcatgactttgagaagaactgtgaacgttccacacatgctgtatgagatgatgtgtaattaattatacgcggaagagtttttcccttttagcaactgaaagatcgcgaagaagcgcttaaccgcatggagacgcgaaatgacgaaatgggcagcaaagtgcgacgattcaaggacaaattgaacgatcgacaagcgctagtggaggatgagaaaagtagagttgagcggtaatcggtaattgcaaaaaaaccggtaccggtactgaccggtactgcaaaaaccggtaccaactttttccaccggtaccggtaaaaaccggtaattttagaacataaaaatttttggacaaaattttccaaatacaaaatttttattcagttttcgcgcgagtacctgttttttagcattagaattgttcagaagtatatgtatattcaggttgaccaagtttttttttcaaattcaggacatagaacactaaaattcagatgtagacctcaaaattcagattattgcaaaacaaggggtcagcagccaattttccaattttgtgaaggggtctccggccatgtaaattaatgtaaatcaatgaccttttttttgctttcaacaccgctttttacgcggcacgttttttccaagacttttgggggacaggaggggccggcggtgccgataggcgccgccgggaaaaaatttgtaatttttaatgcgatttgttaacagaatttgtaaaaaaaatgaccaattgattaagttttgggtttttaggatgcttaacatgaaagaaaaaagttggaatattttttaaaattaaaattttaattaaaataatggtaaagaaaatgtgaggaatattctatccaagtggggaattgaacccaggcgaaaaattatgaaagatagaaagtttaaccactacaccacatgtgcatgtgtgtactcccatgactannatgaataaa

SEQ ID NO: 60725 - DNA, 409 bp, Heterodera glycines
atgccattctcagatttcgatgggcgtgccatgcaaaatgatttcctccgttcaaatggtccgtcttttttgtcggattatgccgacctttggcttcttgcgttggacatgctgccgatggcacaccaaacagcagaagagcaaagagaacagctgaagatggagctgttcatcagccgcagctccaattgctccatggaagcatgggtagaaagaaaggcaaacccgatctgaagagatccaattttttactgagttaaccatttttctttatctgggttatgtggatatataacatttagtaacaattttcccagcctaactatttgatcaatttaattcccttaagtttgtccaaccgtcggattccgttggaccatccgatccgaaaatgccattcgacgattcg

SEQ ID NO: 60726 - DNA, 300 bp, Heterodera glycines
atggcaacaaaaatggcacaatcatttggcgcgccattaaaatgcgcacagtgccaatgcaaacgaataacaatgacaaagaaagatcaatcattttggagtcatcaattgcctttaagaaattgttagtacatattttatttattaaaatattaatcaaaaatgcgtaagtgaactctttgaatttttgtaattttaaaatttttaataaaaaaaaaattatagtaaaaagattataaattattaagctatacattgggagcaggaaaacggctttctctgcttttcgaatggaataaa

SEQ ID NO: 60727 - DNA, 576 bp, Heterodera glycines
atgaatgaaaatgagaaacaaaaggaatttgttaaattgtttaagaaatataaaaagcaaaataaagaaatcatgaacctcgaaattgctaaaaaattgggaattcatcaaaataaactgttggaattcagaaaaagatttgacccaacctataaaagtaaataatttcgagtaaaataagggaaattatgggtaaataaataataaataatttttaaaatgtaaaaaattaattaaataaatattaaatttaatttaaaaaatattcccaaaaaacagaaaagcttcttgcgaactcagaaaaaattgcattagtgagaaaatattacaaattgaaaagaaaattcccagaactaagccaaaacaaaatagccaaaattttgaagattagtaaaaattcattaattaaatggaagcaacaatttggcaatcaatttgaaggacaaggtgaccaaatttaaaagattacgatgaatacagtaacataaaattacagtaaatgcccgggaaaatgacgatgaagcgaattccgaagaagacaggcattttttttatttgacagcaaaaattatgtaa

SEQ ID NO: 60728 - DNA, 59 bp, Heterodera glycines; identical to SEQ ID NO: 52421

SEQ ID NO: 60729 - DNA, 59 bp, Heterodera glycines; identical to SEQ ID NO: 52422

SEQ ID NO: 60730 - DNA, 59 bp, Heterodera glycines; identical to SEQ ID NO: 52421

SEQ ID NO: 60731 - DNA, 59 bp, Heterodera glycines; identical to SEQ ID NO: 52421

SEQ ID NO: 60732 - DNA, 59 bp, Heterodera glycines; identical to SEQ ID NO: 52422

SEQ ID NO: 60733 - DNA, 59 bp, Heterodera glycines; identical to SEQ ID NO: 52421

SEQ ID NO: 60734 - DNA, 59 bp, Heterodera glycines; identical to SEQ ID NO: 52421

SEQ ID NO: 60735 - DNA, 860 bp, Heterodera glycines
  unsure (1)..(860): unsure at all n locations
atgccacaggtacataaatagtacaagcaaaaacatacaacaagtatatttatttctttctttacaaaaaaccaatcataaggggtgtaaaaaagtctcggtctcgagtctcgaaagtctcgaagaccgagaccgagaccaaaaaaacccgagacttttctcgagtcgagaccgagactctcgaacatcactagtatgaacacatctatttctgacacattttcttccgggagccttattaacaatagaaaataatgagagcaaatatttgagaaatattgctgttacatcgcttaaacctaatttttccgattaatcacacattaaattttattatgcctgttatagggtttaatataaaattttaaaactcatattttacaggtttaaatatgaatatatacaatatttaattttcaggaagttggaagaactactgtagcagaattaacctattttgatccgaataatcctaatcgagttatgatgatgaaaaagaaaatttatttctcgtgggatgtacgtcagatcacaatctctgcttatcttggtactggtcacatctgtactgagcaaacggactttgatcagtggaccaataaatcgtacttggaattttttcctgatcaatgggtcgaattacaaaacaacactgggtgtgatgacaatgctttggttactttcaagataaatttagaggaggtaaattatttcttctatttttatagaatttaccaccgatttgtaaaatatgtaaacgcttattgcttggtttatattattgatttataggcgacccaaactttttattngtttaaaatttttaaaatccagttcactatgataaccaaaattctttg

SEQ ID NO: 60736 - DNA, 656 bp, Heterodera glycines
atggaggagtttattaatgtacgagtttgaatacaatagaaggccttttcatatgccagggctccaactcctggggcaataaacggcgaagcgggggcagaggtctgatggaccccgtggattttgtgtcacaactgaaacaattcttagcctttttctaaaaaaggactgataaaaatcagataaagccatattaagaatgatacagaattcataataactttgggtggggttcaaagccgcttggaggagaactgctttaaaggcgaattgcgggaaagcgagttttttacataagaaataattaaaaaggttattgtttaactcgtttaaaaagccaataaaagaagaaaattaattcgaagccaaatgcatttgaacaccagaaaataagaggtcaataaattatttttaaaaaatggaaacctaaaaatttgatttattctcttacatttaatagcttattccagagctgcatgccaattctagaacctggagatccatcgtgacaatggacgagttttcgcagtttcagtcaacaccaacagtgccaatggacatcggagacacgaccccaccaccgcatgccaccaacgaccgatcaaacacatcgaacaagtcgacaatcacataaacgaccggatgacaccattaaa

SEQ ID NO: 60737 - DNA, 1326 bp, Heterodera glycines
atggccgccaaacccatctttttctgtggatcgcatgaaactgttgctgagttcgggggatggggcggacgttcacttctttggtgggccaaagggaccctaaaagaggcgagatgccgtggaaattcaaagcattacaaaattgttttggtttttagcttttgtcggctcacaaactcatttctgatggccgcttccgacgtgttcgaggcaatgttccgttttgactccgcaaatgcgacgacttccacttcaaaacgtaataaaactgttggcctaaaaacattccctcaagattttggggaaaagtaaaatttagagatttttttgaaataaaaaaaaactctatttactagaaaaacctctactaaaaattagaaaactaacaaatttcgtttttttcgcaaaaaatgatgcggtgtaaaggcgggggaaggaaacgtagtgcaccccctaagaatgtcctaaaaattgaaatttcccgattttcagcgccttcggatttggccagcagcagcaaccctgtggtggtcagcgacgtcgacgccgatgtgttcagggcgatgttgggctttatttatgcggacgatttgagtgggatgaacggcgacaatttgttcgacgtgctttacgctggtaaaactttaaaattcattattttcttcgtttattttaatcacttttagccaaaaagtacaacatcgccggactggtcaaagcatgcgccgaatttcccatttctgagttgggcaatgtcttccacactttggccgaggcgcgacttttcggagagaaagtaacattttcaaggaatacgaattaaatgggactgaactgctcgagagtgaatctcggcttcaaatcccggcacaatcctctacatatggaaaaacgcatttttaaaggcattcgccgaacactgcttggaatacattgaccaaaatgcggacactttgctcaaatcggaggaatttctgcgcattgatcagcaaatgttgtgcgacattttgaagagtgatcagctggtgatcagcagagaatttacgctttggaaaactgtaaaattggattttaaaaattgtttaattaattaaaatttgttttttcggcactccgttgggccgattggcaatgtgagcaaaaaggcatcgaatgttcgggagagaatcggcgggaaatgctcggcttggcactgttcgaaattcgcttcccgcacatcacaaaggaggacttttcgaagagcattggtaatgccaattttatttattaaattttgtctaagttgggtcaaattaaaaaacaattaattttggcgtcacgcggaaa

SEQ ID NO: 60738 - DNA, 440 bp, Heterodera glycines
atggcagatgatagccaaagctgctatttggaattggcacggaatgacgaggacgggacgctgatgcttttcaatgggatcagtgccaaaacacttggccaactgttacagcagcgcatcgacgaattggacacggaaacgaacttttggatgatgggacttgacgtattggtgaaccgttttgacgaggagagggaatattttcgacaacttttggccaatttcaacacggcaattggcgcaatgaatgcggaggaccaacgaaagcgcctggggggacgaaaatgcgggggacaaacggcgggggaagagaacgaaatttaggggaataattcaaagactgttagaaatatgtgacctagtggctaagctttctgcctttcattatttatcgcttgggtgcaattccccgacctaatatttgtcatttttcgaataaa

SEQ ID NO: 60739 - DNA, 412 bp, Heterodera glycines
atgtccacaaaatccgacatttggtcgcttggagtcaccatttatgaattgctgctgatccaaccccattttgggctctacaaaaagccaaatcagcgatccaataaagtgtgaagttttggccaattaaattggcaaaaattgttgaaaattttaaataacaaaaatatttagcacaacaaatttttgagcgaattttccaacatttacaagggattcgcatttgataagaaggataaggaatttgaatattgtacaaatgatttggattggttggacggacacttggaccaaattgatcagatgattcgaatttggaatgaacaacatccgcgcatcgctttgcttttaacggtctaaaaaaatcaaatttatttttaaaattttgttacttcaaattcaacaaaataaa

SEQ ID NO: 60740 - DNA, 2068 bp, Heterodera glycines
cattctcggtccgccaacagttgtgacacgtgatgggcaccagcagcgtggacgtgtgaatggtaaccacgtgcttggcttttaatactgtacatttttaattttcattggcaagaagagccaataaatccgcaaaattcctgactcgaaaaattacattttgaattgaaccaaaaaagtaggcgtgactacaaaaaatcgaaaattttttcggctcgagaaactgaaactttcgcacagccctatggcttgacaaaacgcacaaaatgctttgccctcaggtgctgtgcgtggttttggtcctgcccgcgtttctgattctgttcgactccgttggccaacacacaccgaaaagcacggcgtggcgctgaagagacttcaaagacacactagcggacgtcacggacaggtggaagatgatgggcttggtgtccagcaggggactttcagatttacaagtgtcaaattgactaacaaataccaattttgtcttatgacaaaagcctcaatatttaagggtctcgggactcaaatgagactgattttgaatgtcaagtcaagttctgaacggtaaaaaattttcctgttttaaactacataaacattccaatttgaatccagggtaggaggcgaatattgcctaattgtaagccaaaaaatgcaaaaggtgattattcaattcattcactcattcattcatggcaatttgctcgaggcgccaattgaaaaattttcacacaaatttacattcattgttgtataaataaagcccaaataatgccgtagggaaggggcggcaatttgatgaaaagtgccaaatttgatgaagcggaagttacccgagagagagaaaaagtttttttgtcaagattcggcatgccatttaaggggggagcacagcctcgtaaaatcgcaaatttttaattcctaggcctcaaattttgaaagtgttggattccgttaaacccattttatatgtaaggctcgagaatcttgagtttttgaattttccgagactctcaaatttaagattttcatctaaccattggtcgagactctcgattaacagtttaatcatcaaataaactaaaatttcgcatttttacgcaaaaaagtattactgtaattctttagttagttctttgtatactgtaatctcgagactcttgaaccacccattttgtgctaaaatttatttggccttttttcagcaaagcaataatatgggcaaactcgcggcagctactgccggcgcaacagcacataatcaccatcaccaccatcaccataaccaccaccaccgtaatcatcattatcacaacaataatcaccattcctcatcgtctgcgcgtaacggtagttcgtccgccgccgcaacaactacggtagcccaccatgtggctactggtgaacaagcaacaggcggaatgccaacattgccattggtggtggcatcattaagcaacggcggcaatgccatggacaatgccactgtgccacgaactccagcaagtggtggcagcacatttgacgagctgttcaaaccttccaccaatggctactgtagcaccaacaacaataacaacaacaccaatagtgttatgaatacggtaggtttggacagggaaagggaaatatttcaattctctcccgggtactgtagttacagtacaagtttgtgtcaacgtttccaaaattccttttgccatattataagtctcttccacagaagggcaaatacatactgtatactgatttgtgatcgcctcctttatccctttaactgatgattgatcatttttccttcatccatttaacatcgtagtttttcttcgtcatactgtatacttttttttgttacagcagcaacagcagctgatggccacccaaatgatggcgcatatgttcgccgctgcgcaacaacagcaacaacagcaacaactgatcagtgctggcggcactgatcagcaggttgccgccgccgctgccgctgcggccgctaccacactgatggccaccgcgcagatggccgcgcatatggccgcggcatccgccgctggcggatttg

SEQ ID NO: 60741 - DNA, 1470 bp, Heterodera glycines
atggccgccgcgggtggtgccaatgcgtgcggtggcggtggagtgccaccgcctacgacgacgtctggcgcggcaacaacgccgcttttgtcccaacttacgctgccgctaacaccgtcggcaatgccatcgacaggcacaggcaataatagtaacggcggcggtagcaacggttgtggcggtgccggtgccaccaacggtagcagcaacgcgccgtcgccttcaccgcagaagcgagcacgcacccggatcgcggatgagcaagtgaaaatccttagacaggtgcggtgttgataggataaggagtgtacggatcagttttcggcgccgaccgtttcggcacggcaccgcccaatttgaaatagttttggccataacttttttttgtagccttacgaaatttttgggtttttcagtcaaacagaaaacccttaagggctctatcgcaagttaccaaatttggagttataataactgatgatggtattaatggtacggtatcttccttcccttacagtactttgacatcaacaactcgcccagcgaggagcaaatcaaggagatggcgcacaaagctcagttgcctgagaaggttatcaaggtaaaatgggttcattgaccccaaatactgatcagtgatcaattaccattattcgaatcaattaaattgccgctaattaattaattattattataagttacaaattccgtaaataattaattacatcactagcacccacacggcgattcaattttgggctccaagtacaattaagttggttttttcgtcttagtggtctgtgagttagtcatcaaaaagggggtctcaggttcaaatcctccttgtgtttgtgtataaatttcaattttttaaagcaaataaataaaatattaataaaaacagaacgccaaaagaacaaatacaaatagtggaaggtagacattatattttacccttgattttattaaatttttttagcttataactttgtcaataatagaccaaataaaaccattttatgctcattttggagggaaaattctgaagaatatttcttaattagtcaaaagtttaaaaaaattgtttattgacaaaaaaatgaaccatgtgttattttatatgttagagacatggaaatagtgcgtcaagatgagagaaaaagaaaaaactttgtccttgaaaaaaattttttcctattgaccaattttcttgaaattttgcataaacacatattttaacccaacctactggatgatgctttgttttttatcaaaatgctttttaactcgagatcggctcttccgtttttacaagggaaaatccccataaaatttttaagttttgcaaagttttggcgttctgattactaaataatatcgtgagacgcattcgcaaaaattagatgttttactgccgataaaataaggaatttttggtcaatccttgattttgcatgtttactgattgaa

SEQ ID NO: 60742 - DNA, 1130 bp, Heterodera glycines
atggaagaggatgaacagcagcaggaaaagaacagggaggaagaggaggaaaagagagagagggaagaggaggcggaaaagggaaaggaagaagaagaagcagagaggatgatggacaataaggaagaggaggaggaagagcaggcggaagaggaagagcaaaaactaaaggatgagggaagaatggaagaggaagaggaagaccgacggcatcggcatggggatgaagcattggtggaaaggcacggagataaagcgtcgtcgtcgccgccctcccattccgcggcggcatttgtcgaccccggcactttcttggccagccttggcaacccaacggcacagcaatcggcggcaatgatgcccccgctgttcccgttcttcggcactggcgccgctaacagtgcggcggcaacgccgggtgcaagcggtggtggcatggagtcatttgcctcaatgttctcgggtgagccgggggtaattttgccatcgcatttcggcacttttttcttgacttttttctggcatacttagaaatttattagctggatttttatcactatgattgaaatttccggtttttgttttacattttggcactttaaagcttcatcattgatagaaaaatctattctattttggcatttttatagagggtattttgtatcctgcataattggaattttggcttaattgatcatagttggacttctcctgttgcttttgccattctggatgaattttcttttcacttaaacattggtatctttggcctaatcattggtcggattttgtttttatttttagcatttttccttggcttaatcatagatgggctcttctcttcccatttcggcactttttggtttaattacacctatcaaatgcatttcctgttccagcttttccgttccattcttttggccaattggcgacagccgcttcttcctccacacccacttccaatggcttttcctctccatccgcggcacaacagcagcagcaacaaccatctccgtttctccagccgtcgcccgccggcctcatggcagccgctgctgcggcagcggctggcaccaacaacggcggcacatttggccacctgttttcgggccagaatatgttgctgaaca

SEQ ID NO: 60743 - DNA, 1665 bp, Heterodera glycines
atgagtaccgcatccgaaagtggaagtgacaaaattgtgttccaaaaggtttgtgctcaatggtcatgggttttctgcaaaagtcgattgctttaagaatgttactgggcgaggtagccaggttttggatgacgccgagtttgttaaaatgtatgatcggtcgacttcgaaaaccttggtacttttccctattaaactgctaattttggtggccctattcagaacacttcctcagccaatgacaacgcacagtcaaaccaacagaaagaacaggttcagaaggttggtagctcatttccttctgtctgactttttttcattaatttatttttaagtggaaagtcggtgatcaatgcatggcactctacgaagtggacggaaagtggtacccggccaaaatcgagcagatttcgcctgtaaaaaacacatgcactgtctcttacattggttacgaccaaaaggccattctgaagttggaggacattttggggtatgttttttttaatatagcgaaatcccttcaaatataatcaaatgttggctgttttttgaactataaagagtttttacttgtttggtcataacttctattttgatccagtagtgccgaatttgccgcaaattcgcactttcaacaccattcggttgatctcaattggtacttcaacacttctcactccctttcattttttgaacaaactccgcccataaagcgtagaagactgtccatcgaacagccaattgtgagtttaaccagcggaaatagttgcaatgaatagtagctgtttcgatggaatttggcggattcttcaaagtgccggacattccgcagcatatcctcgagggcaaaagcgggccaaagtggcgggaaagagagggacgacctggcggtcagaaggaatggcatgagaccactgataggaagcggccaaaaacttccgattattttgcataccttcgcttcctcttccggatggccccgcgccaaccttcgattggacagcataaaataaatgaactgtataaatgttcgacttcggttgcagagcgtttcttttccacttatggtctgttctcgaccaatttgtctcattgtcaggcattgaccaaatttttgcccgagtccaattgttgcattggaaatgagaaaagcggcaccacatcggacaacttaaaaaccccagatttcgttagtgaaaacagcacaactgtccgtttatatttggagggaattcgtgacaagctcagaccaaatatgtcaggaattgtcgttagcaacgtattcaatttttatttaagtgaatccgatgttgaggctgccgatgaccatggcgatgagcgtgaagcggaagggacaagcggaacgactaaggcaaaagacaaattggagaaagcaattttccctttcctcagattgcggacaatgatgtgaaaaaagatgcatttccggtatctttttagtatatatacaaggggtgtctcgggacaaaatttttattaatgaggttttcaaaaaaaattgtttaaatttaaattttaagttttcctcttcccccccccccctcccttacgcctaacgaggtggtgcaggccccttacgataaggggggggggttgtctcgagacagaccttgttctttcacaaattaaagcgagtccgtccta

SEQ ID NO: 60744 - DNA, 264 bp, Heterodera glycines
atgctcaagaagcaggatactaaggcggtaggcaacctacaagttcatcttcccatctccaattccaaccctttaagctgactgccaacgctgttgtccttgccggactttccgtcgccacttctgtggctttctacaacatcgacaagatttccgcttattggacgtgagttatttgggagttgtgtcaattgtatttgccaattcagcatgcccttcactctttgggccattttctgcgctggacttacggtgaaggcttga

SEQ ID NO: 60745 - DNA, 1154 bp, Heterodera glycines
atggcattcaaaatggaagttgccgcggaagagccgaagctaatgccgtaagtgatcactgatcagtgaacaccacacagaaagaatgatggtgatcagtttttggatgtgtttacagtattttaacaccgtaaagcatgtccatttttggcaattaaaaattgcaaaacgctgtttgttgggccaacaaaaacccaatggcttatttaaattaaataatttattcattttttagcggacttcgcaatgagcacgcattggtggtcaatggcaaagtgcttttcgtgaacaaatatgtaagccaaactgattgtatttaatttttaattattcaatttttatttcttttaaatttagcttttggccgctcattcgaaatttttcgaagaattattttttggcgcaaatgcgaaagaaacgccagagattgagatcaaagaagttgagaatgcggcggaacactttgaacgtgtgctttccgtaatgtatccgcagaacatcgaattagacggtgaaaatcgaaattaaattaaattttaattttaataatgaataaaaaaacattttatttaatatatattttcctgaattccgcattctctaattagtaaaaaaaaagatttttttaattatttaacataaatcgctatttgtgatttttacataaaaatcatattcaattttttattcaaatattatcattttcttcatttcgcagatgaatgcgtcgagaatgtccttctgttggcccatcattttctgttgggttccgttggaaatctctgcgtcaaatttttgctggagaaaagcaaaaagtcggccattagcaaattccgattggcacaccaatgcggcatcgttggcatgaaagtgaaaaagaattgaaaaataaaccaatttaaatcacaaatttatcttttagaagaaaattctgcaggggatgagcaaggaggactttgtggtgacggcgaccaattacatggacaatctgtggaacagcaagaagttggaggcggacgcagtggcggaactgacggaacgccacaacgaattgttcaaaaatgaatgaacgagaaaggacgggcagagagaagggaccattctgctgattatgttgtatcacaagttcatcatttcttacagtacacttatca

SEQ ID NO: 60746 - DNA, 1438 bp, Heterodera glycines
atgggccaaggaaatggagcctcgacatattctgcaccaccgccttcagcagttgtgagccacggaagggcccgacactcattggacaactcgcaacggacaatgccaagaaatgcgggaccaagagaaatcggaggactagaaggagggacaacaacggcacgggaatggtgccgaaagagagggaggaacagtgcagttggtgccgcaactcgtgcaacaaactcatgacgaacaaacgcaggaccatttggtgccgacgctgtcgctgcacaggcaccaacagcaggaccaagtcgtaccaggaaggcggcaattcacagctgaggaacaacaccagcagcaggacgaccaaattgtgccatagaagtgaaatggccggaggaagaaaagttagcaggcaaagaaagtgccattagcacgaaaaagaaataaaattcgaaattccaaaattaattataattattctttatcaatacaaactgaaatttgaaaatttatgtccctttctgatgatgataagaaggataatagaagaaaaagagcaatttatattaaaatgaatggatggaccaaatcgattcgccgaattttgtaaaataaataattattattaagcattcattttgttgtcctctgctcaattgctgaatttgctgcttgtttgtcttgccatcactttctttttcttttggtcgggtgattaattaattaatgattctttgctgtgctttgataaagacactgatagtaattagggtttatcagttgggttggacttccacgtttgatcattttgcacgttttgtgtactcaccaaaagcaagcaaaaccatggcaaatgtggacagtaaatatcacaggacaaactcaaaatatttgcaaattctctccctaaaaatccaaacaacggtaaaaatgaattggcaacaaatgaaatcacttttatttttggattgaggaatttaacacaaatcagcagaagggaagggcattctcgctccaccatttaaggcatttgttcgtctcgactaactcatttgaagttttacccaaaacaaatttgtcaaaactgggcattcaccaaatgggtgcataattaggggtacaattaattaatgatgatgacaaaatattaccacagatccttttgcactcaaatccttatagtaattactcaccatggacatatctctgtctctgaacggacttggaggtcggatttgtgaaaaatggcacttttatcattggcataatttgccattcgtttttagcaaagcctttggtgccgattgctgacctgggcgacagcaacaagtactcggcggaagagacggactgccgcaataaattggcctcattgtaccggctggtcgacctgttccattggagtcaggccatctacaaccacatcacagtcagtcagaaacagggatga

SEQ ID NO: 60747 - DNA, 561 bp, Heterodera glycines
atgccacaaggaactgagtgtggaagaaagtgggataaaggacataggagaaccgctaaaaggagcgcccgtagctcagttggttagatcacggcacggattgcttgggtcgggggtttgagtctcaccgggcgagttaccttttatgttctacaaaatgatatttttgtctaataaatattaatgtaaaagaagccgattcttgtcattatccaaaattataattttatgttttgtattagaaattttatatttgacaatttttgtagaaaaaaaataattattttctttaataaaaaaaattaaaatttcattttttctctgtttttaattttaaaaaacttttaaaattttataagttagtaatttatttgaaaactcttttcacaattttttaaatatatttatgaaataaattctcttttgtttgttttaaaatttctgttccgcttatctttgaggcttagccatttattaaatttattaaaattatttttcagttaatttttatttatttgtcaatattttatcaattttattatgatatatttaaatgaggga

SEQ ID NO: 60748 - DNA, 832 bp, Heterodera glycines
  unsure (1)..(832): unsure at all n locations
atgcgttccgtcgtgccacatttcccaccgttgcctgctcttcgtgactttatctacatgtaccggatggacgcggacaaaacgctgagccaaaattacttgatggatatgaacttgactcggaaggtatgtcggattggaatgtttatttttgtaaaaatcgactcggatccaaacctaaattgtcagaaataaagaaaagtctttggttccctctcccaccctcctaattttttattttctggctacggacctgtaagaccgggattttcttcatcgtttttcccagacgaaacccgatttataataagcggaccataagaaacagtactgggttttcaaaaagcaaaatcaaaaattcaggaacaacgacttcgccagcgcggaagcgaaactgaagagacaattgcgaagcggctgaagcacgccaaggaggacatggaagccggtgngacagtccaatgcttanataaatcgcccaacgaaatttcgaaatccgtggaaatttcattgaaaatttccttcccatggcccccctcattttgcccattccagtggagaagcagccgagcctgttcgactatgtggtgatcaacgacatcttggacaaggcgtacaacgactttttggacgtgatcaaccccgagttggacgcattgcaaaagcagaaacagcaccaacaacagcaatagggacggaatgccaagcgatggcgccaaaacggatgtttgaattacatgaagctttagtgtgcgtcctcctcctccacatcccttttttctttcaaaaatgtacatcaccacctcaaaaacagccaaaacgtcgcaataaa

SEQ ID NO: 60749 - DNA, 629 bp, Heterodera glycines
atggcttttgtccttcaagagtcagttttggcgtttaaaaaggtgcgatttgtttgttgtccccccccccccgggggctaaacagtccgcacaattcaccaaacaaaaagcgacgacacgacgacaattagcagaaaaattgatgatgatgatgatgtggagaaggaaattattttgtgtcgtcatcatcgcgcgcatttgtgaaatttgacaaataaatcatcggaacgacacccggccgacaaattagtccaaattacacgcgaattgcgtgtgatgtttccgcacctccgctgccaccagcagtggcagcagcagcggtagcacttttgccggacatttggcaaaaaattgagcatcaaaaattggttataaatattttttggagtgttatataaatgggaattttgttcacaattttcaaaattgtctcccattacctcaccaaatttcaaaagtttttcatttaaaaaatcaaattcatgttgcccttgactttttcgggcacactttttgaatttttagaaatcagatgctcattcaacccaagaagtaaatgtattttaatgaaaattcagactagacagcgccgaaaccctgcaaagggccgggacccggataaaagctaa

SEQ ID NO: 60750 - DNA, 1114 bp, Heterodera glycines
  unsure (1)..(1114): unsure at all n locations
cagctttcgccttttctcaagtttctgatgaaggggctgaacatcagtttgtcaacggacgacccacttaggttgcacattacaaaagtaaaaattgcttcaacgagattttgaataatgaacttgttcttttaataaattttcaggaacctctgttggaggagtacagcaatgcccgtattctatggaagttgagttcgtgtgacatgtgcgagttggccaggaacaggtgggcgagttcacatggcaaaccgggggtcatggcagttcgtacaatgggactttcgtacaatgttccaattgcggatttcgtacaaaatatatatataaagtcgattttttctttaaaaactcatttaacgacttgtttttattgccacttttgtgcatgtttgaaaaattaacacaataaattgtatttcctttcctaaaagcaagtatttaagttatgaaataattgtcgaaaactttcgttgaccaagttcagttgagtgagcaaatcctccgaaaaagcccccgaatgaattattattgtttgcgctattaatattgttattttggatactcatttagctcattacttatttataatttgcttatttttgtcattttgatgaaaagtatgtgtcgctgtcactatcacttatttttttaaatttaatattgtacgaaacgtcaaattaaaacgttgtacgaaacccgattgtacgaaacgcatttgtacgaactgccattgtacgaactgctattgacccggcaaaccgctttcgattgtactgattccccgttaaatttcagcgttctccagtcgggatttgaggtggggatgaccattctctccttttgtacaatttgtttttctcatttgtcaggaccggaccaaaatgtactggttgggctccaactacaaggaggagggcgtattcggcaacgacatgacgcggtaatttactccgaattattttgaattaattatctcgatgggaccgattttagcaaacatatttgatcaattttcagcactaatgtgcccgacattcgcgtctcattccgtcacgaggcgttggtcagcgaactgtacaatttnngtcaggcgctgatgctgtgaatgaaa

SEQ ID NO: 60751 - DNA, 710 bp, Heterodera glycines
atgttatccgaggacggaagcagggacaatcaaatggtaagcgagcagagaaatcaaaattcctagataaaaaaacatttttaatttaggagcgaagtcttgtacgtggagttgaaggacatgatgatttgtcggggcgaatcggctcgctgtcgctgcgcacaatccatcaacaacaacctgtcacactaccagctgatcgtggacgagctggaccgttggatgatggacaaccaccaactcaatcggcgggacgtcgtcgaacaagaagaagaggaaaacgtcgaccactcaacctggtgaaggcactgtgtcgtttcaacggcggctgcatgccatcagttttgccgcagatgattcagaggagacgaatagaaaatttgtgttttcttcgtgatctcaggctgcaaacagtgcatctgaagagtaacattatgatttccgccaactcattgtcatttcacagtgcaggcagtttgcttgcctaccgtggctatttgtccataacggtagagcagcacttgtacgttcgccatcgtgttcgtcttaggttccccttcctgccctgcgttgtgcaatatgggggaaatcaccatcactattattttccattagaactgcttgaaatatgttctcgtccaactgacgaatcctcctaatctacacaccttccgaatactgttttattgttgctgttgctattgtgaaaa

SEQ ID NO: 60752 - DNA, 884 bp, Heterodera glycines
atggttgatgagcgaactggcgaaatccgatatgtgcaaaaaattagaggaataacttttgacgtgcaaaacagtcagaccctacagtttgagcattttcgtcagaaagtgttgaactatggacgtcaaggagaggagccagccgtgttccattatgataaaattcaaccgactcgtgcgagtcagattgtgacacgtgagcagcgcaagcgatatctgcccgtctgccagaagggaattatcactgatgagcttgatgttcttccttttggttatcaatgaataagcgataatgaacctatcacatacctatttaatcgccgtagataaaattttaagaatttcataattccgttttcaattggtttttttggcaatgtttatttcattaatgactaatcaacaacctttaaagagcaattgtaggacaagaaattagcagtgacaacatggacaacagtgaatgcaaaactgaaaaggaaatggatctgaaaccggaggaaaaaggacatggagaggaaaagggcgaagaagaaattgtttttctcggcatgacgataaacgaaacgcccaaggatgaaaagaaggagctaccgccttccacgagcagtggtgatagccgaaaacgacgtcattcatttgatgggtccgctacctcaatgttgggcgcaatgatcaaggcacagggcgaagcacgtgccgaatggtaaattgtgaaagtggcataacatagatgcctcctattaaaaacaggctggatgcgttggaaaaaaaatactccaaactggaggaagaaatgggtgtggacgacaatgcctcggacgtggtcgattttggggaagactctttggacaccatactaaaaaagtattagcaaaaataaa

SEQ ID NO: 60753 - DNA, 181 bp, Heterodera glycines; identical to SEQ ID NO: 52969

SEQ ID NO: 60754 - DNA, 258 bp, Heterodera glycines
atgacatacaaattgatcggcagccctaaaatcaaagcctgtaaagaacaagcagtgctttacgatggaagcacaagaagcttcatcggaaaagggaccggcacattcgaattcaacggagtgaatgttgaacaagaattttatgtggccggcaaagattccctaaatttgctgtctattcaaacaatggacgcatttgggctgctcgacgaattgaaggaaaagatttcctcaaaaatggtgatatgtgcaaaggcg

SEQ ID NO: 60755 - DNA, 913 bp, Heterodera glycines
atggtatttaacgcgttatttcgtcatttacttggccatgtgctcatcattgaacggtttctggcaacaatctcaacaaattcatatgaaaatttctcaaagatgcagttcaccttcatttggctcatcattacggtagtttttattttttaaaattagtatatagtaaaaaaataaataagcttgaattaaaacaactaaaaaatcaaaaataaaattattaaaaaaatgaaaccagtggcattttattacagttcatcatcgcatttgtgaatacggtaaccaatggacagtcatggacatttactacattaaatttaatcacccaaacaatgtcaacagtgataagtctctttgaatatttggtcagcaattaaaattaaatatttaatatatttattttaaattaatttttatttttaagttaattatcgtaattcggaattacaactgtagaagatatattagtcaatttgaagaagcatcgccaaaaaattatcatatcggacagcgatatcaagtaaagtgtaaacatttattgtaaattaaaaatgtttgtgccttaataaatatgaattaatgaaggtttctgaaaatgtgaaaacagcaacgcaactctcaccaacatttttatgcctatttttgacaaatttatcatcaaatttttttgtatttgtcacaacatttggaattgtcactgaatcaaataatatctgtttgacatttgcttttggcatatggactgatgtatttttaagtgccgcaacagaactcacaattatgacgtaatttttaaattttatatttagaaaattagttttgcgatgtttttttgaaaaccaaaatttctcagtcgaatagttttatccttttagtgaaaaaagctttttcataattcctgaaaactattaaa

SEQ ID NO: 60756 - DNA, 91 bp, Heterodera glycines
atgttaaatattttttctacaaataaaattaatttcaatctattagtacctggatccaggcctgtagttttcctggcttcaggtcaggcag

SEQ ID NO: 60757 - DNA, 316 bp, Heterodera glycines
atgaatgggccaaaaagtggcgaaaacagcggaaaaaagaaacaaataaaaaaaggtgagcaaacggaggaccaaaagagaaaaggcaaaagagaaaaggcaaaagagaaaaggcaaaagagaaaaggcaaaagagaaaaggcaaaagagtgtcataatttgtattattatttggtaatgtttgttttattaatttttgtattattattaaatgaaagtgtttatttgttttgtatttggtcgaaagaaaaaaagggaaaaacccgagaaaacaaacaaaaaatcccgcaaatattttgttgtttttgcagtataa

SEQ ID NO: 60758 - DNA, 1018 bp, Heterodera glycines
atggttctcacaaccgtaagtcattaaactccatttgttttattatttataaatttatttattttttatactattattttattttctattctttgttaggtcctttcaatgatgcgttatgtgtccgaaattgatgatcgcgattttgttgatcgtttgcatagcttttttacaacaaatttactcattgggctgtcagttttagtcagctttaaggtcattttttaaatttgcttttaatattattttataaattaatatttaattccaatattttaatatgattaatattaataaaattttaaaaattataaattaattaaaaatattaatcaatatactcaaaaaataatcgtaattttgagaaaaaaacattgtttaggataaagaaatattctgtataatttttttcaaaatttacattaataatttaaagttcattttaaataattgaaaaaattgaattatttatttaatttccatattcattaattaaatgttttttttattaaactaaagacaaaatttcagcaattcggtggcaaaccaattgaatgtttaactccggacatattttccagctcttgggaagaagtaaatgagagaattcaggatttctcaattaattaattaattacagtacgccgagaattactgttgggcccaagacacttattttgttgcaccgtcaacaaacgttgagagtttggaaaaaattgaaagaaaacagcgtcggatcagctattatcaatgggtgggcgttaacatgcatcgctaaacataatgccaatgattggccactcccatccccgaaaaataatttaaaagaaaaacgagagtaaaaattataaattctaccgataaatcatttcccggtggcatcgcccaacggcaccatcgtacaatgatttttcctgttttgcgccaacgagtgaaaaattcggaggggcgtgggaggggtgaggtagttcaggcctgtagccagaaaaaaaaattcagatcggggaacccgaagaca

SEQ ID NO: 60759 - DNA, 1112 bp, Heterodera glycines
atgcgaacatcaaattcagcttcttcagcagctgttgctgatgatgctaatggtggtcgaaattcgtcggacgattcaccgccggttgagccggaagaagaagcattggattacatggtcaccattcccgagacggacggggaggtgcaaattttggaattaaatacattaaaaaattaaaactatgaaaaaatgcaaaaatttaattaaaatattttaattaaaaaaattatcattttttttattttgttaaaataataaaattttttaacactaaaaaaaatcattttaatttcttatattttttaaataagaatttttttaatgaaaatattgttttttaatatacattttttcagtcggcgttcagttttcgcaagctatgggccttgtaagttaattttctttttcaattatttaaatgaattttttgttcagtaccgggcccggctttctgatgagcattgcctatttggacccgggcaacatcgaatccgaccttcagtccggcactgttgccaggtacagggtaagcggaccttttgcggaagaaagctaatttcaccatttttcaagttaataaatttagatttttttgaatttgtgctaaattttaaaccatttaattttcttcgttttcttagtccttcgatatgaaaattcttaaaaacataaaaaaattctcaattaaaaatatttcctcattaatggcttttcgttttttcaaatattttcttgaatgtttatcctccctgcttttttttattgcattttttgaaattttatttctttcataaacaaactttacaaattttaatattttttagtaaattttaaattttcctatttttaatttatcattaatttaatttattttcaattttccttttttatatttttcccattttcagctcctttgggtgcttttgttggcccattgcgtcggctttttcctccagcgtttgtccgctcggctcggcgtcgtcgccggccgaagcatggccgaattggcatttgagtattacccgcgggtgccgcgcctttgtctgtgggcaatggtcgaaattgccatcatttgtcagtttaatacactaataagccattacaaatag

SEQ ID NO: 60760 - DNA, 271 bp, Heterodera glycines
atgacctacccatttttgcgttacagtatattaattgtcattttgtgccttgtgtacggtaatgatgacgaaaacaggcaagaagcaattcataaaaatgacgattatatcattggtgatgtttatcttggtgacgaattttgggaccaattttcaccgatcactgatttgcccacaattgatggagtcgaatttattggaaatcatttaaaatatactgatcaaacggagaatgataaaactcatgaaagtgtgattgaaaaataactaa

SEQ ID NO: 60761 - DNA, 624 bp, Heterodera glycines
atggcactgctgttccaacagctaacagacactctcaaaaacattgcaaatcaaaatgcaaatcccaataaacaaaactccgatttattcgctacaattaattcccaattgtccgaattcatctacaacccggaggcggatttggtttttgaaatttggcacgaacgttatgggccatttcttgagacagatggacaatcattgccagatgaaatgaagacacgtctgttggtcggtaagcttggtgcgcaagaatacgcgcggttcacggagagcattctcccgcaaaaaccaacagacctatcatacaatgtcacagtaagcaagttaaagagtctattttgcggcatcaaatcaatttttgttaaacgatttgagtgttttcagttgcagaaagcaccttcacagagtccaatcgatttcgcggcacaagtcagcgcacaatgtgaacgggcacaaatgacactgaccaaggaggagatcaaagctctcgtgttcatcagcggtctgagctcagctgaccgcgatttgagggagcgctgtctcaaaatgatggaagaggaccgagccaagaacacggacatcaagtttgagcggctcgtcgaggaatgccgctccatttaa

SEQ ID NO: 60762 - DNA, 775 bp, Heterodera glycines
atggaatacacatatgttggcttcactgtccacctcaatgtgttctcattcactttcaactgtgcgggtgttcacagagctcgcaatgagttggaattccacacagagtgttacgtggaggtggcctcgggttttgccaaagatgaatgaatgaggagagaaatgaaagatgcctgggactgccaaaatttaaatgaaatggatgaaaaatgccttatgctgactgcgccaaaaatgttgtgtcttttgcttgaccacaacacttagaaggaataaactttaataaacaaaataagtccacaaatagataaataaaatagaacaataaattgatgacagaaaataatgcgaaatgaatgagagatggcaaatgacatggactgaccaagactcactgtgtgttcggctatttatgaggacgaacacagggaagagacgcatgaatagtgaaggagagagacatgacaaaataagagagtgcagcgggagagaaatagagaaatgactgaaagggaaatgagcgaagagcaaatattgattgactacccaacacttttgctttttattgttgaaatgcgctcgacctttctgcggctgatcactgctcttttcaggcgattacgtcaacggcacaatgctcaccggactgtgccggcaaattctgctcgaagaccttaaggagtcgcgaaagcacgacattctcgagtggacagaagtgccgcaaaagctgaaagaacagctggaaaagcaggaatttgatcagaaatgcaactga

SEQ ID NO: 60763 - DNA, 362 bp, Heterodera glycines
atgccctcaagctatggaacaagcggcgcaatgagtcagagttacggtatgggaggaggaggaccacccgcggcatacgataccggtgcacgaggatcatacggtagtgcaggagcagcctcatacggtaccggcagtatgggttcgggagcatcttatggacaggcagaaccgaaaatgtccgtggcaatgccatcggcaatgccgccaccgccggcaatgccaatggctgcgccatacggtggggacggaagtggccgctatggaaatgacggtcgtcgatgaacgaaaagaaacgaaacgatagattaattaccgtatcattaattcccactaattacaaaacatttactattttttaa

SEQ ID NO: 60764 - DNA, 398 bp, Heterodera glycines
aatccgccgccaactcctctcccgtcgcctcagccctgcgggcagtacaatcagtacggaagcggcggcgcctttggaggcggcggaggaggcagctacagtcagccgaactgcaacacatacgggcagcagaacaactacggccagtccaattacggtggtcagagtaattacggtcagcaggaaagtgcgggtggatttggcggaattggcggcagcccatctcagttcggagtgggggcgccaggctgtggcggggcgagttgctaatcgactgaccgatcggaccgatgcgaaaagccaaccgatcagcgaccaggcgattgaatccgtcatttcctgttaatcaattcatcttagcgttctttttacaaccaaaaaaacaaaacaaaaaaagg

SEQ ID NO: 60765 - DNA, 1238 bp, Heterodera glycines
cgaagtcggcatcaccattttgaactcgatgttggtcagtgtgccgtttccgtccacgcgccttttttggtccgtcccttaggaaaacggcgaatggggcgaggaggagtttcattcgaatcccttcttccatgggaaaccatttgatgtgcgaattcgagtccacgagaaaagattcgacttttttgtcaaccaagtgccgtgggctgtgttcgaacaccgcacggatttccgaaaaatcgaccacatccaagtaaaaacacatttggtggtcctatgatttgtgccgtgcattcgccaatatttgccaattcaaaggcgtcgggcgacgtttcgctgtccgccgtccattggggcggccgatacttcgaaatgccgtacgaaatgactttccacgaccacgcgctcgaaagtgggcagcgactgttcgtttatggcattccccgcggcgatttcgccgtttcactgatcagcgacagtttggaggagctgttcagaatgagtgcactgttcgacaagcaaattgtcattcccataatccatggacatttaaatgattctcatcaatttgcaggtggtccgaaatgcccaaacggacaaagaatggggcgccgaagaaagtgaaggaggccctttcccgttcagaaagggcgaggggttcgacttggtcattctgaacgagccattggcactccaagtcagtccttttcggcatttcttttctgtcctttgtttctcttctttctctctctctgttcccttccgttctttttccccgcctcaatgaatcttttatatcatttcgaagctctactttttaagacaattgttaagctgttgtcaagcgattaaacttaaaaaagctgcaatgaaaaccgcaaattaagaattttaaacttgcctggggccaattgacgggacatcgttggccttttccgctttctcatcttccttactcacactgtcttcccccgccctttctcacattatcactctccactatccatccctccctcgtccccctctttttctcctcaccacctctctcctctatccctcccccccccttatctccctcccgtttcttatatcccttttcccctctaattttccctcagatttccatcaatggcactcccttctgttcatttttccaccgcaccatcgatgcccacaaagactacaaacaggtacgcattagcggtgaggtggaattgaccgggatggaagtgagtctg

SEQ ID NO: 60766 - DNA, 736 bp, Heterodera glycines
  unsure (1)..(736): unsure at all n locations
atgccacaggcacaaagtgtcattcttctcgcgcacgacgggcacaacaccgacttggcctcggaaacgctcacagcgaggtgaaaaatgccaaaattactataaatgcgtttcaacacttatttgattaattaagtgctcgcctgtcaaagaaagtgccaatttttgcaattgccggtggaaaaacgccgccggcgctggccaaattggacgaatacacgggaggacagcgccggagagtgttcgcctttgagcaggacggacaacagtttttggacgcgttggacgaggtaaattgaaaaaatgttgagcgatttgattttaataataataattatttaggaaattgagttttgcccctcgccttcatcggtgccggcggagaaaaatgaagcggaaccatcgccatcggttgctttggcggcggaagcggaaaagccaattcagaagagcgaagtgaagaagccgatggaaattattcggaaacaagtccgaaactcaaaggacctggtcaaactggagtgtgggacgaactcgggagaagtacggaacaattgcaaatttaataatccattagggcaaaaaattaaaaataaatgtttaggatttatgacctaaaaagtacgaaaatttcgatttaggtgttgttgataatcttaagacaattttttaggattttttaaatatttaatatttcgattttgngattttaaaatttcaaaaaatgtccattaaa

SEQ ID NO: 60767 - DNA, 274 bp, Heterodera glycines
gggaaagatgactttttgctgctgccacctgttttgtggaaatcgcgacaagaaggccgcctttgtgcgtctcggaagcgcaatgaaacattttgacagggacattgtgccaacatcggatggggcaagaaggaggaggaaaagcgaacagaaactcagactggagacggacgaacagagaatgaggctggagatggagaggcggacgaagacgcgcaagcaaataggggagaggaaacgcagaagattgagcaccgatgataattgggaatag

SEQ ID NO: 60768 - DNA, 169 bp, Heterodera glycines
atgttgttccaaaatggtgcgtaagaagaaacgtgatcaaaaacgaaggaaggaagaggacgatgacgaagaccaggaagtagaggaaaagcgacagaaactgaacttttctgagaaggacacggaattattcgttggaggaattaaacttggacagcggagctcctga

SEQ ID NO: 60769 - DNA, 438 bp, Heterodera glycines
gacccaacatttatacaaccattcgctttgctttacgtggcctcaattttcgcgcagttccctcttttctttacgccgtttgaatgctttttgaaatgggcgttcacactttggcattttgctctttgccaattcttggccaattttgtgtggcgcattcgattggccgaatttgcgcagtttaccgtcgttaaattggcactttttcaaatgattttggctcaattttatgccgatttttgtcatcgggtaatcgtttttttaatagaattcctttttttgtgtcttttcagctgatttttggctcaaattttgcgtttttgccgatgatggtcccttctgttgcctgtgctcttctcgtcttttttgcttattgccatttcattctcattgtttttgcggaatctgttcaaatccattttttcaaatttcgttgtc

SEQ ID NO: 60770 - DNA, 530 bp, Heterodera glycines
atgaatgcattaatgctctccgcgttgtcaacgttttttgttcttttttgtgccatcgttgggggtggagtgataagaaaggcgcaggacactgaacaaccgccgatggcgacaggtaacaaaataaaaataaattaaaaaaaaaaactcaaatttgtattcaaaattaaattatttgcttgtgtgtagggtgctgagccgttataaaaaaaaagccatcaaaaagggcgtcataaaaaaccattaaataagaattttcaacaaaaaactgtccataacttttgtcaaagtcaactaaaatagacatacttggtatcattcgatatccctaagaattctcaattagctcggctaaatttcaaaaaatttggtcaaggttgagcaaagctatggccaaaagtacacatgtggccaggttttcgaatatttttggccataagttttttgaaacctatcgaaattttttgatatttttcaggctaatagagaggacacatagggcaatcgaataatcaaaaaaaagaaataaa

SEQ ID NO: 60771 - DNA, 63 bp, Heterodera glycines
gagacccccggcggtgttcgacagacgccgcgtgagaaattggcaactgatcagacgacctaa

SEQ ID NO: 60772 - DNA, 3474 bp, Heterodera glycines
  unsure (1)..(3474): unsure at all n locations
aatcagcacnacgcgtggacgcgctaggcacagtaaaacggggaacaataaatcactaatggttaaatattttttacttttacttcaggtacaatcgcgcaaaggacgacccgttctcactgtttttggccgaggccgagaacaacccgtntgtgcaggaagttgcagttgaaggacatgattccggcggaaatgcagcgactcgtcaaataccctttggtgggggggggggggggaatattggccaaatgagcattattttcaaataatttacaaaaaaaaattaaaataaatttattatatgtacacgatttcagttgctggaaaccgtggccaaatacaccccggagccaagcgacgaattgcaaagggtaaagcaatttttgacaatgattgtgcatttgtattaattaaataatcgattcatcagttaactgattaatcggaattatttcccaattgtttaagctgctgagcggaatccaaggcgcaaaaaacattgtgtcggaagtgaacaggtgggtgaacaaaggaattacaaaaaaatttctgaaagattatgatcatctccggcgggggcggtgatatagctaatgggacactttaaaaatgcaattaaatttattgaaaaattacgtgatttttttaatatttccacaatcttcaacattgttctgtctctttacaaattagcccaacttctttacggatgctcaaatcattttacacataatccattcattgatttattaatgagaatgattagtccgctaataatcgcattcagtgcaaaacgaaatgcggagaatgtgcggcggatggaggagctgcagaagaaattggacttttctggggctgaaaagagcttcttccagaagttcgactttcgaatgtgcgcctttcaattatatataattaataaatttatccaagatcaatacaaattaaggcacaaattggtcttcgagggtccgctggtgtggcggcaagcacgcggcaagaacattgaccttcacgttgtgctgctcgaacatctgttggtgttcctcaccaaaacggagacgggcggcggcggacagcagcccaattttcagctcaaaattcacgaggtggcagcagaagagcactttttttaatcgaattaataaatatttttaattactcctccgattgctccgcccttttgcgctttttacttttgcttttccttaggccgggtgcattccgatcatgcgactgacatcggttgaggtggaggagaaggcgggcgacaagcgttcattcaacctgctctacaaatgcgatctgcgcatgttcgagttggttgcacaaacggcgacggaacggaaaacgttggtttatggaaagggacggggatttattgatcagataaatggaagcccatccctagtcaatgactgaccaacattgattaatcccttccgatgatcaaatgctggaaaaattctctctaattagtccattgacttgacaacggttggagaatttacaaattcattatcactgatcaatgttttggctattcccacataactttttgctcattcccctctctaattttaccacttttttcgatttccagttggtttcggctgatcgacaaccaggcgtccgtctcgcggctgtcgcccgtaccggccgaactattcctggacggcactctgtccgcctcggctctgacgatggctcagcatggcggcggcgtgacgccgctgacgaacaaaagcagcgaagacgggtcgctgcaaaggctgaacagttccagcatggaccacgtgcacgtgctaatgcacccggcacttgtcaacgcggtatgatcttatccaatcacagtatccaattaccatatccaatcctcatttactaataattggtaaaacaacctgcggcctctttcggcattaaatcgaatttttgtttatgagtttttctctgtcttaaagtgatgataattcacattttcgattctcgggaaattgttcgagtaccgtaaattataaattaaaatcttcaataattagccgctcactccttggcatttctgacatacaaagcgcaatgcttacttgtacattttatcattttgccctttcagaatgaaattgtcatccaacagcccaccgtgatggacaatgcgcagccggtgctgagcgtatcggaacggttgcgcaaaaatgaccggatgatttttgcggcattggcggaaaagcaccaaattttggcagaacttttgaacgattacggaggagcagcagcagcggaggaggacggggaaaggaataatgaagtgagtgaggagagaaaaaagagcaaattggggggggggaataagcaccaggggaaggatggcacggcacaaagtgggaacagagggggagtcacggcgcaaaagcatggcacggcacagatcgcattaccaagcgtacaagctaattttttttttcattaatttaaattgattttttctcgcttatttcttgtaataactcttttggttttttcattctctgctaattgataatattgataagttttgcccctatcatttaactcttcagaacaatggcggtcgaaaagcagcgccaaacactgccgagctgctcgatcggatggctgatcagatgaccggcctggcggtgctcgacttaaagcaacggaacgccaaggaattggcgatgtccgccattgtgcagggcaaccgattgctggagagcatcaacaaagtgggccatcatttcgtatatatttctatgaaattaaaataattttgttagggaatggttgtgaagccgtccgacgacccaactgcgaagcccaagttggacaacgaagacgaactgatgttgccgtcagtgccctgctacaaattgacctcggtcgattgtgcccaaaactgaaatttatgtaaaaattgcaattttcaggtggcagcccccctaatgaaccatctgaaggtttattggaggaccaaacaaatttcaaataatttttaaattttttcaggcaatgctccaagtgcttcaggaccaagagcgcgaaattcagacactgaagcagcggctaaaggtgcggcacttttcatcccttagctaaacaaaatgccaaatttaccaccactattcacatataaatttttatttggcaactcgtacttttcgtatttttgaatttctacagtatacgattggatggatcagtccgaatcagttttgcccttctttatgaagcaaattttcacttaacaaaaaaggcccacagaagcgaaaattactaattattttatatatttacatttaaaaacaaatttcgctttgcttaattcgattcattccgcaggacactcagtcaaatccgtcgagaaaaacggcaagcgaagaaacgcttgtcgagagtggagagcagcgcataaaagtgacgaggacatccgtcgaggaggacacgccgccgccccct

SEQ ID NO: 60773 - DNA, 63 bp, Heterodera glycines
tggccctttgccttttggccctccccgtcttttccatgtcccaattggaatattttgtaccct

SEQ ID NO: 60774 - DNA, 1188 bp, Heterodera glycines; identical to SEQ ID NO: 30360

SEQ ID NO: 60775 - DNA, 796 bp, Heterodera glycines
atggaagatggagagcctgtccaggctttgcccccacagaacccagggcaagggcccaaagagccaattaatcgagcgcctctgggaaagagaggcaggggctatgccatgggagggcatggccctagagggcaatggaagaatggaggccagaaaatccaaaagcgcgtgggctatctggtccgtcagctggagcgcgaattccatggtcatcacgatgtgccgccaagctgttcatcatggacctgtcaccgtgcacgaggatgggaccgcggaggccgtggaggaggtcgtggacgcgggggacgtggaatgcaatttggacgcgcgcactaccatgccggcccatctcacggaggacgctgattgggaatgatgatggacgggacgtctcgaaggaggagagggattgtggtgtctgcattttggtctttttatttatttttgtttttggcatttttgcattgacccattttccaccaattctcatcgtaaacattttattcatccatctctcaatccttaccaaatccctctctccaaaattctctctctccgctttgtgtaatgtggcctagactattctcacccgcttggcttcgcttggctcctcccaaaaattgtgccgtatttaagctctctttctgctttggaaaacacttcttcttactgccattctcccttcctacttactctccctttgcttactcttaaccaattttgctataaccaattttgcttattcttactcttaaacaattttgctttgctttaataactgttttgctttaataaa

SEQ ID NO: 60776 - DNA, 2100 bp, Heterodera glycines
atggccaatttgactgaattatattcaccggaaaattttaacgagacaattgaagcagcaaagattgttcaagaaattacccgtttatcaaagcccgactcgtgggacgaacagtcagaacgaactgatcaaattgcggcaacaattgttgccaacggattatttgctttcttaagaggaggtctttttacgttaaatcaattgtgggtgtttatctgttgctgctatgtcacgataactattttaatccaattattcctcccacaacgaattgcccaggcctttcagtacttaggactaatcggtcaaattacaaagatttttcggaaaaggcgaagaattccaagagagagaaatgcaagccgtccggaaataaaaaataattcaaatgaattggcaatacctcctaagcccattttaaaaaaagaaagggaagtgataaatatcatgccattaacagaaaggtggccatccccggaaaatggccaaatgtcacaaggaaaaaaggtgaattttaaagaaaatgggcaagacgaaggagtggcacaagtaaatattgttgagaaggaggcatgcggcccaaattttaaaattggtgggatggtaaatgagaaaagagttattttcttgttagacactggagctcatgtgtcattgtgcagtatgaaaactgcaatcagattgggaatcacaaaattggaaatggcccaaatttctggagtaatcggagtgggtggaaagattgttcctattttgggacagagcaaaattttgttggaattagccggatgttatgtggagacaattgtttatgtgaccgaagcggaaatcggcggaacgcagagttatgatttaattgtgggaagaaacacattccgccaaatgcctctattgttggatttgcaaacaggaaatttgattagtaaagaaaatggtcaaatttttgcttgtgaaaaagttaaaggagttaaaattgaattttgtgaggaaaatcggaaaattgaagacggagagcaaatgaaggttgaattagaacgctgtttggagagacataaacatgtgttttcaagtcatgaatatgacttaggacactgtgcctacgaggcccctccaattttaacaacaactgaaatcccagagaaaataaagccttatccagtgccggaaaaatatgaaagtgaattgaaagtgcaaattgagaaaatgttggagtcgggagtaattaaagaaagttgcactccctgggcacacagcatagtgttggtaaagaagtcgaatggtcagctacgcccatgtgtagattttagaccgctgaataaaattacgatcccggatccgtacccaattccgagaatggataaaacgattatcagagctgcgggaaaaaggtggtatacaaccttagatttggcttcggggttttggcaaattccgctggataaaaagagctcatataaatgcggaattgtaacaccatggggactttatcaaatgcttaagttgccttttggtctaaaaaatgccccaagcatatttcaaagagtcatggataaaattttggatggaattccaaacgttactgtgtacatagacgatattctcgtccacacaaatacagttgaacagcacttggacactttgaacaatatttttgaaaaattgggaaaaaacggattaaaagtaaaaaaggaaaaatgcagtttccttaaaacacagtgcacttatttggggcatgttttgacaaaagatgggtacagtccatccctgaacaatcgagaagtaatcgaagcctttcctgtgccgaaaaatgccaaagaagtgaagagatttttgggaatgatgtcattttttagaaaattcatccctgattttgcaaaattagcctatcccttaaatcaattgacaaaacaggaaaacatagagtttaaatgggaagatcaggagacagaagcttttgaaaacttgaaaaggcaattacttaaagcgccctgtcttagagcgccggactataagctgccattttatttgtttaccgacgcatccgcaactgcatatgccggagcattgatgcagtctgagaaaagtgatgaaatgcatgcg

SEQ ID NO: 60777 - DNA, 184 bp, Heterodera glycines
atgtctgaagaaggcgaaattcgtgaggattcgccggaagcaccggaggcagttccacctcaggctgatcagcaagaagttgatcagacaatttttcgtgagaagaaatcgacgcacaaaaaaacaattcttgtccacgacggttatgagtacgggttcgacaaattaagccgtgcagacccca

SEQ ID NO: 60778 - DNA, 874 bp, Heterodera glycines
atggggcctcaaaaatcgaaaatttgcctgtgttttcacttttgtgatggtggtcaagtggtgcacgatggcgaagtggtgactgatggttcgagtccgcgtgggtttaacaattttttattatttttactaactattttaaagtgaaaataagtgggcaaaaaattaaaatgcacaaaatatttaattacaacgatgtttgacgaaaataaaatgatcaaaacagagatttttagaacaccatgcgcaccgaataaaaggaggagaagtacagttttggcaagcaatataaacatcaaaattcttaaaacaatattcgggtggagttttaaaagtcactgccgctttcagaatcaaaatccaaatattcagtgaggggatcagtggggctttcagcgagaatggtctcaagattttgcacaaagtgtgaaacctcagcattatttttgtggcggttaaaatgaaaaatgtacaaatttatttaaacaaaaggttaaatgtttacatgaatatttgcaagaaaaattacaatcgtaaacataaaaccgaattaagtattcttgatttagaaaatctatgatcagatggctaaaaaatgtttttttttgttttttgctattttctcgtgatttttttttagaatcgttcaaaaattcgtccggcgaaaattttgtccaatgcatttcaaacttcaaactttggaattttatgtatagccaggcgattcagtgctcagatggttctgtcgttgttgtggttgtgggcgatttggtcgaagtaccgtaacaccgccaatgtggctgacccggttacggttgaacagtttcatgtacagtttaaggcaatcttggcgcacagttttattcagcgtcaa

SEQ ID NO: 60779 - DNA, 259 bp, Heterodera glycines
gctttccaccggtcatttatttgacgctgaataaaactgtgcgccaagattgccttaaactgtacatgaaactgttcaaccgtaaccgggtcagccacattggcggtgttacggtacttcgaccaaatcgcccacaaccacaacaacgacagaaccatctgagcactgaatcgcctggctatacataaaattccaaagtttgaagtttgaaatgcattggacaaaattttcgccggacgaatttttgaacgattctaaa

SEQ ID NO: 60780 - DNA, 738 bp, Heterodera glycines
atggacgaggaaatgttggaatttggcgattcgctgccgtcgaaatcagcgacgccaatcggcgatttggtgccgttcccgtcgacacccactgcaccaatggacactggagagatgacaccgccaccagtggccatcgacgagcgatcaccgcgcatcgaacagctggaaaagcaactgaaggaccgggatgacaccattcaatttctgcgcgagcaggtccgaaaccgagaagcgctgatcagtgatctgcgtcgtcagctggagcaatgtgcggcaccaccaacggcgacaccaaccacaagcaaaagtgagtgaaatttcgatgccttctcttttcccaattaattttctcaaaaattgatcattcattttttgtcaattttagcaacgccaaacagaggaagaccaaggaaggccatcgacgaactccaacgcagctcgcgaaaatggttgacggagcagattttggacgccattgatcgggaccgatcgagatcggcaagtcggtgttcactggagcgcatccaccgagaagtccggtacaaatacggccattatacaccaaaaaaggcaccagcgaagaagggcaaagatgaaatggaggccaatgacggcttgcttttgatgacccaacttggcacacaaaaaacttatcagcggatgaaagcaacccttcgtctgatccacaaaaaattcgacattttaccgccattaaaaaaggtgcatttgggttga

SEQ ID NO: 60781 - DNA, 171 bp, Heterodera glycines
atgatgtcaaatgcaaataatttgaataaactgcagaaaaaagagccgattgaagattgttttgactgcaaagtgacgtttgccactggctccttcttgctcggctcctacatgttttacgacagtttcaagtccacttccaaatcgccaattcttttgcgttcgatcgcc

SEQ ID NO: 60782 - DNA, 930 bp, Heterodera glycines
atggactcactttttgatgccggcaaaaacgagggacgaaaaaaggatgagaccaatggagggggagatgggaatatgctgagaaatggacagcggaagagaagccagagaaaagatgaggaacaccaagttgaagcgcaaaatgaaccaaacgccgacaaagccacggtaacggtaaattggggtcctaaaaaggagggaaatggggaaagaacccaaaatcctggagcaaaatgaaagattgataatgaattagggatgggacttccaaaacaaattgaaaagtaaaacattctaattttcagtcatttaatttcatttggccccatcttaaagtgccaccaaaccatgcatttttggctgtcgctttctctttcagtgccaattcgtccgccgtccattccatgggttgggcagactcttcaacgagccggacattcttcgaatcagacgacagtggcatgccactcaggaagtgtgttggtcggttgggagttttgccgaaaagggacggaaggcaaaatgaaattcgatggacggaacgaaaggcattggccaagggaatggccgagacatttggaatgaacagctgtctagcacaaaaatgcatctgaagaatctgataatgtgaaatggattcgtattgtaaactgcatgatttttatgtattttaagggtagttctagagaatacaaaatgagtagtgaactgaacccttttaaaatttaaatataagaaactttttactgacaatgattactttttttaattatataaacataaagccagagtaaaaatttaaatttatttagtaggagaaaaagaacggattaatggatttgtaacttctgtagtgataacgatggtctgaattttaatggttagcgttacaagttgtaacactaaaaaaaattccaaatatgcattaaa

SEQ ID NO: 60783 - DNA, 864 bp, Heterodera glycines
cagattcttcagatgcatttttgtgctagacagctgttcattccaaatgtctcggccattcccttggccaatgcctttcgttccgtccatcgaatttcattttgccttccgtcccttttcggcaaaactcccaaccgaccaacacacttcctgagtggcatgccactgtcgtctgattcgaagaatgtccggctcgttgaagagtctgcccaacccatggaatggacggcggacgaattggcactgaaagagaaagcgacagccaaaaatgcatggtttggtggcactttaagatggggccaaatgaaattaaatgactgaaaattagaatgttttacttttcaatttgttttggaagtcccatccctaattcattatcaatctttcattttgctccaggattttgggttctttccccatttccctcctttttaggaccccaatttaccgttaccgtggctttgtcggcgtttggttcattttgcgcttcaacttggtgttcctcatcttttctctggcttctcttccgctgtccatttctcagcatattcccatctccccctccattggtctcatccttttttcgtccctcgtttttgccggcatcaaaaagtgagtccattttcgttttctccaattttccatttttactcccccaccccccgtttcgtcacagatatttcacgcgaattgtcgccgtcatttccgtggacaccgcctcccggtccatctatcgcattggctacccctccgtttttgccacacggcgcagtcgcttcgcccgctttttggacgttcagccgttgtccaccaattcggacagtgtgcgaggcgttgcacgccttcgctttaccgatgggtttg

SEQ ID NO: 60784 - DNA, 1080 bp, Heterodera glycines
atgaatgtaaataaagaagaggaacgactggaaaagaaagtcaccaaatgggctattatgctaaccagtgaagacaaggtgagcatgggcattcctcagtatgggattttgggtaatacataatactgaaaaattgcggtaaaaaggtaaaacagaaacccataaataattagatggttttgcaaaatataagtcagattcgcaatttagcaattttttttactggatttatttcagagaaagttataacttggaatcgcaattctgcaatactaccgggcccattctgcaatataaccagatattcaaatcgtctccgccgccggggggaaatttgaaaatttgcgtgtaatttgttcacagattttcagcaaaaaaaaggctggtttttgggataataggctcaaattgtaaatggatttctttaaaaaatgataaaatatgtgtcaattaaaaagaagactatgaggaatcatattttctcaataggaaaccaatgagtatacaaaaaggaaattgaaaataaactccaattttcatcaataatttttcactcagacccccattcttaccagtgcttgtttttcccggttgccttgccgggaccgggacctgagcttttcaaaatccggaaccgggacctcgaaaaaccgggaattcccggcctggtcccggtcccgctgcactctagttttttgtatcgttaaagcccagcagaaatattaaaatctatgaacctttgggcttaattttagcacttcgggaaattctttgaaaagaattttctcaaatcagctgaatgaataatgatctttgatcgatttaatagtgtaaaaaacaattttagttatattttggcttatgcaacgccacgttgggaaattgaagaagtaaaagcccattttcaaactaattcttcttttgttgttatttcagaacggaagaaacacaaatcaacattttgtgctataattagggctatacattgtatttttgtgattggatcccggaaaatgcgtcagtaatacagtattttacgtaacaaatacatatataaaaattctttctgaatttttttca

SEQ ID NO: 60785 - DNA, 795 bp, Heterodera glycines
atggatgtgccttcaaaacaggaaagtaccaattttgtcattcagttggatgacgaggatgacaaaaaggcggacgatgagaaggaagtggagccgaaggaagtgtatcgacgacttatcgaattgctaaacgaaaaagagacaattggcgctgcgctgaagagactgaacaacgaaaaaagtgagtgatcggagggttggggatttttaggacaatttcacagcattggataatactgttgaatttaacacaagcatttttctagacttaaaatctatttttaagagtcaaacgcagcggaggagcgcaaacgccgttgggcggccaaaaagtcgggtgcgaatgtgcaggaggatgagaagaccaagcaaatcgcggaactaacctcgttggccgactcactgatttcacttggcaacatggaagcctatcagttggaccaggtgggaaaagcggacaaattggcacataataagccgacctttcgttgtttgttgaattccctgcgtttttcggctacccgacttttggggatcccgcccgacatagggaccggatatttgggcaccgactgactgtctccaaatgccgaatcctcaattgcccaaaaagtcgggtccccaagttgcaaattcccaaaagacgtcacggttttttcagaacagcatcaacgctttgttggacgacttgcaagcgaaaaacaaaattccgggcgcaaaagaagcgactttggatatgttttcggaggggtgaaggagaactgaattttaattgaatttggacctttgaataaa

SEQ ID NO: 60786 - DNA, 117 bp, Heterodera glycines
gacaaaattggcaacttcgaagcgacggtgtacaactacaagggccttagctttgaaaccaccacacggacgaatctggatgggccgacaaagcgcaactgggagaagtacattaag

SEQ ID NO: 60787 - DNA, 140 bp, Heterodera glycines
ttccaataaagcgactggattcgccgcctatgcccgtttttccaccagcgatgggccgccgtccggcagcagtgcccctcacaacaatcagttggcatcgccaaagccaagtgcggacaaaatggccgagatgggcaatg

SEQ ID NO: 60788 - DNA, 165 bp, Heterodera glycines
aatcgaacgctaacggacgacctaatggaaaaaaatccccgaaggagagaatttaattaaatccattccttcgggggaccgtgccgggtgccgcggggtaagcagtgctggttcgtttcatcacggcaccgaaccttttggctagtcagcaatcgttgcttaact

SEQ ID NO: 60789 - DNA, 499 bp, Heterodera glycines
atggagaaggcctgcaaaatttggagagattatatcgattttagtgcgctaggttcgatgaaactttttaaaatataagcctaaactttttggcctgtttaaaaaggaattaaaaatttttaaaaattttattcatctcccttttgatagaaaaagcatcagagagccttatttaacttttaattaacatttggtgcgtttcagagcagtttctgaaaaaatatttatgaattgattttgctaaaaaaataaaatagtgaagctttaaaaattaataaaaaattttaaattcagaattactggagttagcatcatagcagtgcttttccttgtctttttgatgctctcgcaaaatctggttcgcttctgaccagtttataaaaaaaaagttaagcctaaaatttttcgcatatttaaaaagcaattaaaaatttttagattttttattcatctccctttttgatagtgaaagcatctgagtgcctaaaataacttgcaa

SEQ ID NO: 60790 - DNA, 882 bp, Heterodera glycines
ataattgtttgagtaccccaaacggacacttgaaaaaatcgatttttttgttttcggggcagtccccccgaaccgatgcgcccagatttatggggaggccgaatccttcgggaatagcttccctatagcctgtactttaattctgctttggatttttgctccccataattgtttgagtaccccaaacggacacttgaaaaaatcgatttttttgttttcggggcagtccccccgaaccgatgcgcccagatttatggggagaccgaatccttcgggaatagcttccctatagcctgtactttaattctgcgttggatttttgctccccataattgtttgagtaccccaaaggacacttgaaaaaatcgattttttgttttcggggcattccccccgaaccgatgcgcccagatttatggggagaccgaatccctcgggaatagcttccctatagcctgtactttaattctgcgttggatttttgctccccataattgtttgagtaccccaaacggacacttgaaaaaatcgattttttgttttcggggcattccccccgaaccgattttatttgcaagttattttaggcactcagatgctttcactatcaaaaagggagatgaataaaaaatctaaaaatttttaattgctttttaaatatgcgaaaaattttaggcttaactttttttttataaactggtcagaagcgaaccagattttgcgagagcatcaaaaagacaaggaaaagcactgctatgatgctaactccagtaattctgaatttaaaattttttattaatttttaaagcttcactattttatttttttagcaaaatcaattcataaatattttttcagaaactgctctgaaacgcaccaaat

SEQ ID NO: 60791 - DNA, 1438 bp, Heterodera glycines
  unsure (1)..(1438): unsure at all n locations
aaccccggcgagggcttcaatttgcgaagggatgtctatttgagagtggccaacacagtacggcagctcagagagaaaggtgaaactgaatgaagtggagggaatgaattcgacaattaaattggaaggcttcgactttgttcttgtgctgccgccttggggaaactgttggcattggcgcacaaagccgcggcagacgaaaatccgttggtctgaactgttcgacttggacagtctgtcggactttgtgccggtcatagagttcgacgagttcctcgaaggtggacaaaaggaccgcctccccgggagtcattttcaacattagctcagggcacttccgtcagcactgttttgtatttgcagcattacgcggagggatgggccgaaggcggcgaatacactctcaaatacgacattcgcccgtgcattgaggcggacaaatattacgctaaaaggggcgacaaatggtgggaaaacgaagagaaagtgacacatttgccaaggataaacaaaaaaggaaatcacaggaacggccatttcttcgattacgctgaccatttccatgcgaaggatttgcaatgtctgtccatccagggacagtcgagcacactcgcagaagcaattgcacaattattccccgaggggttggcgaagtgtaaaagtgcggcggaatttgcctcctcaattttaagtcgttctttgatggtcgaccgtgccgaaacgattctgcacgaccaattcggcgaccatttcttttggaaggcgcggaaatcaatgcgatacgccaaaagacttcgttcgattggcgacactttccgcgccgaccaattggccaatacgtccgactatttgtgcgctcatttgcgacgggccgactttgtgtgggcccatcgcgaggaaattccgtcaattgaaggcgccgcggcacaggtcgaaagcaagcgatggcactttggattgtcagcaaaaaacaatgccccttctaagattgcgcaaaatgcgtcgaaattggacatcagcgacgttttccttagcaccgacgcgaccccctcagaagtcngaaacattggcgaatcttttggcgaaacaaaatgtccgaatggtaaaattttctgatgaaaatgagcaaatggaactgtcgggagcggccatttcgataatcgaccaagtcggacacattccgtgtttacaattaacccattaatccccaaaaatttcagtggatttgcgcaaattcaaggcaaattacccatgccattttctgtgacatccgtaaataaatgacaggtttttcatcggcactcatttgtccaccttttccttccgtattcacgaggaccgcgaaatactcggccacgacgcacggacaaccttcaaccgtttctgtcctgacaacgtctcggactgtgaacagccggccaaatggacaattgtaaat

SEQ ID NO: 60792 - DNA, 1095 bp, Heterodera glycines
atgcacaatcgcctctgttctgccgaaaaagcatccgttaaacgcgacggtcaccgaaaaagcgtcgatttgacttcgaatgcgagtacggcgctggtaaagtgtcattattttctcgttttaatttgcctatttccccagaattctcacatccttctgaatggcaataacgatccgaaatgggtggtcatggtcaattctctcgactcattggacccggagactcgcaaaaagacgagtgttccccgttactattcacagcagcagcacacgcgactgcaagggatgttcagaagcgcaacactcagtccgaacggaaggggagagttggaaaagacagcacacgacggccgttgcccgcgttatttattcgcacgaccaccgctaaatggggaggaaacgacgaagaataaaaagaaaagggtagaagaaaagccaaaagggaaggagaaacaatcgaagaaagaggcgaaaacggacgaaaagggaaaaaacaaaggcaaagacgaattggacgtattcgccgcattgggcacactgcaaaagtcactggtgaccagagacttgatgagccgattctgtggacaacaggtgagagaaaaagagcggaattggcatttgttgctcattttatcgataaatgccatcaaattttgccatttaagcgttcgtcattggtggcgccctccgaagaagcgattgtcagtcattcgacaaaagcggacaaatctatggacaatggctaccccctccgcggcacaaattcctttttgccacaatcgccgtccgttgggccacggtcgactgcaacgccattaacaaattcgtcgggcagcagcgaaagcgacagctcatcgttgggccggtttcgaagaggtcgtcgacaaaaaatacaacttttgttcagtttcattagtcttttaggactgtccattggcccggcatttcccggtatttctgattccgtcgaagacccctcgctggccgagaaaattacacggaattacgaaagtatcttcctaaagacattggagcaggtgaacatcactcgccgttgctctgagacaccgtcggcatcctctccggtaattgcaa

SEQ ID NO: 60793 - DNA, 928 bp, Heterodera glycines
atgtcaagacccattctcgacgaattaactagggcgctttttgcgcatctccgagggggaaatgcgtgctttgatgaagtaagccaaaagggttggagaaaccctccgacccaacggacggtcggaccgtccggggcatttcatgacggatttgctgggcgagtgatgtcggtgtgggcatgcgaaacgaactgaaaatgcacttttgcaggaaaacgaactcattgaactcttccgacggtgtccccgctgctcgcgcagtcttcgcccgatcattttggacaaatttaccgacgaaaaagatggccaacagtacgagcgaatgtggtggacatgtccgggcatagagcagaaggtaggcatatccatttttgaaattagcttttatcattttgtccactatttgtttctttaggagtgtttcttccccctggacatccccaaggaggtgttctggactcgtcgctccatggatcagtcccttcgtggcattctccctttgcccaacctccatttgttgcccctctctttgcgcgccctttaccacaaactcttcaaaagcaaggtcaacattgagaaaattgtgcgcatttccgccttcgttccgtcggatggacagaagagtgccgtacaacaagcaaattttggtgccgaagaacagccaaaacggcaagaaagtgctcaaattgtgcaggtaaaatctggaaatttctccaatcatttccattttccgaatggtttcccttttcagcgttccgtcggttctgtcggcccttcgcttccgagcactttcccgccacttcctgcctcttctgttcgacatttgccaacccctccctcagttcgttctcacaatcagtgcgcctccctttgtgacggctttccatcgtcgtcaaagcgttgcgaccaacgaacggtgcattcgtag

SEQ ID NO: 60794 - DNA, 1152 bp, Heterodera glycines
  unsure (1)..(1152): unsure at all n locations
atagccattggtgaggtatttaagtttgaaagcattgccttggaatgccattctctgttctgtcagtgcaccgttggatggttggagcctttgttggcgcgaattggcgaggagaaaagggcggtggcatgtccaatcattgacgtgatcaacgaccgaacctttgcctatcaggtgggaactgatcaaaccaaagaacgaagagaacggaacttcagaagggcatcgaactgttcagaggcggattcaattggaacttgcaattccgttggtaagtgacaaagttcagaaatggcactttgatggccaatcggatggaattccctccccccccccccccggtgccaaaggtattccgtgccattggacattgcgcgcgcacggagtgccgtcccaacagcgccaatcaggtgagcatggcattagcaccttaattactccgccactgcactgctcgcgcagttcgcccacaatggctggcggtctgttcagcatcgaccgggcctatttcgagcagttgggcacttacgatccgggcatggacatttggggcggtgaaaacatcgaaatgtctttacgggtccgttttgtggggaatgaatgccacggcatttttgcgtgcttttcgctccaaaggtttggcagtgcggcggtcgagtagagatcgtcccatgctcccacgttggccacgtgttccgcaaggcgtcgccacatgactttccctccggcagttcgtccaacagagttttaaatgcgaatttggcacgactgagtgaagtttggatggacgaatggaggtaaagcgagccaaaaggaaggccaaaaccacccaaaccattgcaggcatttcttctataaagtggcgccccgtaagtcgcaaaatcccccaaaaaagcactaatttcccgaacagaagcacggatggctgtcaactcgcaggatgtcagtgaaagcggggcaattagcaaaatggcactaattaaaataatgacaaagtgaaggtcagtgaacgcgtggaattgcgccgtcggttgggctgtcgtccgttcgcatgggtaaagggacagaaacaactcaacaaaaacacccattcatcaacatcgaacagtacctgnagcacgtgtggcccgaacattttctgcaacaccggat

SEQ ID NO: 60795 - DNA, 682 bp, Heterodera glycines
tttcaattgaccaatttggagcaattctggaaaaaatagacaaattggagcagcaaaagcaggacgaaaagaacacaaagcgtaagaaaatgaagaaaaaataagaaaataaaaactaattttgtatgtttaagcattggttgtccaaattgaacagttgcaaaatgatcagaaggcacttttgggacgaatcgcacaattggagaagctggaacccaatcgaaaaggtaatagtcatgactaattaccctaaatcatgctaattgacttgctaatttaagtgtattttcaatttgtataatatatattcccaattgagaacactagtatatattttcattggtcataaaaatctattttcacttacaaatttggggagtgaaatatttttctgtattttttgtttttcattttaccattttttaaaatttaaattttatgatgggctaaattttggttgaatatgaaatttttatattaatttatctaaatttaagaaagtttttcgtcgatatttattattttttaaactttttataaatcagttttcacagaaatggacaatggtgcacaaattgagagaacatttgagacaaacgctgattataaccagcagcagaaggtgaaaatagtattatttgattgttgttttttagttcttaaccataaaatgcttcattga

SEQ ID NO: 60796 - DNA, 56 bp, Heterodera glycines; identical to SEQ ID NO: 52733

SEQ ID NO: 60797 - DNA, 674 bp, Heterodera glycines
gttggatattgccaaggctctgccttcatcgtcggccaattgcttctccaaatgcctgaggaggaggcattcgccgtgttcatgcgtctgatggagacgtatcggcttcgggagctatacaagccgacaatgaccgagttgggcttgtgcatgtttcaactggaagtgatcgtgcaggagcaaatgccagatttgcacatgcatttgtacgttgttctgccggtgtcaattagtctgataaattggttcagcaacaacatgggctttgacacctccatgtacgcctcctcatggtttctcactgttttcctcaccaccgtctcgttggagctcgccaatcgcatcatggattggtttttggtcgacggaattgacgctgtttttcgcattgccatttccattctccaacaatcgcggatcgacttgcttcagttggacatggaagggatgctaaaggtgtacgactacgccattcctttcgaattgccaatattcttttttccgttttaagtatttccaaagggaagtccgggaaaggtacgaaaatgaccacgaactgctctttgccatcgcgtcaaaagtgcatttgaacgtgaaaagaatgaaacggctcgagaaggaatacatgacgaagaagacgaaggagcaggaggaagcaatcgaactcagggcaa

SEQ ID NO: 60798 - DNA, 660 bp, Heterodera glycines
atgcgcacccgtccgatctggcaagttaagcaacgattgctgactagccaaaaggttcggtgccgtgatgaaacgaaccagcactgcttaccccgcggcacccggcacggtcccccgaaggaatggatttaattaaattctctccttcggggatttttttccattaggtcgtccgttagcgttcgattgctctagtcaatttttcaaaatttttgttgaaatatttgtcgtgctctgaagggcgtgggaggggggggggcgaaggcccaccacgaggccgcgaagaggccgagtgagtaccttcggtgcaggaaaattattaaattttaaaattttttaattgctttttaaatatgccaaaaaatgtaggcttaacttttttagtgaaaattcgatcactcatattttttgctaattgagcagaagcgtaccaaactttgcagggatactccccggtaaaggactaacttacactgaaatgagcgccgagctagctggctcaaaaaaatttttcgaaaatctgagtctttcgtttttatttatttgcaaaattaattcataaatattttttcagaaagggttctgaaacgcaccaaattttatttacatgttagtttaggcactctgatgctttttctatcaataatggaggtgaataaa

SEQ ID NO: 60799 - DNA, 262 bp, Heterodera glycines
aaacaaaaaaatcgattttttcaagtgtccgtttggggtactcaaacaattatggggagcaaaaatccaacgcagaattaaagtacaggctatagggaagctattccggaaggattcggtctccccataaatctgggcgcatcggttcggggggactgccccgaaaacaaaaaaatcgattttttcaagtgtccgtttggggtactcaaacaattatggggagcaaaaatccaacgcagaattaaagtacaggctataggga

SEQ ID NO: 60800 - DNA, 112 bp, Heterodera glycines
atgctgatcagatcaattttttacgaaatttctgatcgggtgatctttgatccttcatactttagaaagtacgtgttctacaaagctgccacatggctgtcccttttgtctg

SEQ ID NO: 60801 - DNA, 399 bp, Heterodera glycines
atggcaaatagtgtggcggctgctgccacaatgatcagcactgcggcagttcggacaaatactgtacaaattggagatgggggaaatttgaatttggcacatcacaaagccaaacgtgtgttccgtgccggcggctgacattggccctcgggcgccgcgtttggcaccgggttggacagtgcaccgacagaccgatcagtgcattcttggaacaagcctgttgtgattggaaattataattttgtagaataacctgttttaatttttttgtaaaaaaaatttctagggatgggattttgcagcagtcactgtctcagattttaaagtcattcccaaaaaattaaataattttttgttttgctaaaaacctccccaaatgtgggataatatggaaaaaaa

SEQ ID NO: 60802 - DNA, 170 bp, Heterodera glycines
atgacaagcagaaaaagggacaaacagaggcaaaccagtgaaatcacctttaaaatggaggaaaaagcatatatttggaggaatgggtaagtaatgaattaattagtcaattcattataatatttaattcttagggtgttaattgtataaaaaaaattttttaatggaca

SEQ ID NO: 60803 - DNA, 401 bp, Heterodera glycines
agcaagaatattgctatcttgcctaggcgggattctgacttagaggcgttcagtcataatccctcagatggtagcttcgcaccattggtctatcgaccaagcacatgaaccaaatgtctgaacctgcggttcctctcgtactaagcaggattactatcatagcaacaggtctttagtagggtaaaactaacctgtctcacgacggtctaaacccagctcacgttccctattggtgggtgaacaatccaacgcttggcgaattctgcttcgcaatgataggaagagccgacatcgaaggatcaaaaagcgacgtcgctatggacgcttggccgccacaagccagttatccctgtggtaacttttctgacacctcttgctggaaactttacacattcaaaagg

SEQ ID NO: 60804 - DNA, 90 bp, Heterodera glycines
actagcggggtcagcgccttcggcgcatcccccgctaggtagtacgattgtagtgtaagattatgtttgataaaatcgactggctcggcc

SEQ ID NO: 60805 - DNA, 115 bp, Heterodera glycines
atggatattcgatctgaccagcaccggtatcctttttgcattgtttggacgccaatccccctcatcagttggttatttccctttattggacacattggtattgcaactagcaaag

SEQ ID NO: 60806 - DNA, 925 bp, Heterodera glycines
taagcagcgtgaaatttcccttcggaatctgcaaattcctaccattgaaaatctcggagttaccagggtaagacagaaatgctgttgttatatataaagtttaattaataggatcaatttgatgtcattgatttgactgacaataatattcgaaaattggacaatttgccgagattgaaacgtttggaaactctgcttttgcacaacaatcgtgtcgactttatttcaaaggaaatcggagatcaattgacgaaattgtccacccttgtgttgactaacaataacctggcacaacttggtgatattgacgttttggcctcctgccctcgtttggaatatttgaggtgccatttttcgtatgtttgttaattattcaatttttcagtctccaagggaaccctttgacccatttgcccaaatatcgtcagtacgtcatttataaactgaagaatgttcgggtcctcgattataaacgcattcgccttgcggtcagtcattttttggcggggagcgatgtttttcgtttgtttaatcggacagatactacacttaatccccccttaggaacgccaagcagcgaagaaactctttaaaggtgaaagcggtgcgcggctgaagagcgaattggtaaagcgttcgcagcaaatttcggaaggaggcgaagagacggaacagccgccgaaaaagcgcgcgacggaagagcagaaaaaaatcagagtgagttgccaatgagcacagcagcagtacacctagcaaagtgacaagaaaagtaaagtaatattggccatgtcaggaactgatctccggtgctaaaacacttgtggacgttgaacgagtccaacaaatactccaaagtggcgaagccaacgggacagaggagcagcagaacggccaaaatgggacagacgtacacatggaggagcag

SEQ ID NO: 60807 - DNA, 396 bp, Heterodera glycines
atggaagtggtgcacagacggaatttgatcgaacgtttggataaactgaaggcatcgcacgaagccttcttcacagttccgcaggtcattcggagagactcgattttttgaattgaattttttaagcttaaagccgtctcaaataatcaattgtctctttttctgcgtcggctgctaaagtcagcggacatcaaacagcacatttcaacagaacttttggaaaggattcttttgattgaagaatcgaatgaaaatgcatcagacacagcaaaaatggcattccgaacggagggcgaattgggccaatttgcagatcgactgacatacattgggaagtccgagacacatctgaatttaaatcaacaaactgacgaggaggacgaactaacggacgaa

SEQ ID NO: 60808 - DNA, 1374 bp, Heterodera glycines
atgaccaacgaaattgatcaagaaaggtgtttaactgggtaaaatcgagatggcggaaggacagtgcgttttcggagcagccaatgcaaaacgacgaccaattgggggaggggcagcggccaacggagaatagtgcgcggtgccgagcatttctcagtgggccacgacgtgccgtcatacggcgcgattttgacaggtgaacgaagcgatttgatcattgaattgaacagtttttgacatttaacgaattttagttcgctgaaaaaacagcgcaaaagtcggcccataataccaaacaaacggtgcagcacggaacagtacgccttcgcggactgttcgattcactcggaattgtcacttccttccggtgcgctcatttgtttgattattaattaatagggctgtttatataatacatattttttcctggattctccatgctctgaataataggaaaaacatttcttttttgtgtttgcgaacaaaagtgtggggacatttatttacatatatttacatatttctattttctaattatttcggaatttgctacatattttcaactttttcctacatttttgcactttttgaggattttaaattcttatcaaatgccccaagatttcacaaatttttcgtatataccctacacatcgaaaatttttgagaaatttgtagaattgcttgttaaaaattaaaaataattttttattcaaaaaaggagatatcaaaaattaatttgtaaaatataaaaagggatctaagcctatttaattttatggcattttgtgcctatttcaccgtttacaggatttttttccaaaaatataaatataattcagccgtaccattggatgctcaaattatgaaatatttgcatgtcgccgatttcatcccagtggaaattgaaatgagaaggttctaattatatatgaaaacgcccttttaagaatcatgcaaaaacagagcgattgattctctaaacctgacaaacgcttcggtttctgcccaattcttatttttccctcttttaggtttaaaacctaccaaacggcgttgaaaagtcaagaacaactaaatgagctgaagcatgcattttacaatttggaggaggactttcatgaagacgacgacagatttggcactaccgaagctaagggcatcaaaatttcgctgccattccgtaaaatgttaaagaagcgaagtgttattgtggaccaaaataccgagcaaactgacaccgaaagcgacccggaagattatgaatatgatgccgacccatcctcgccacgggaaatgtgcaaattcaaacgacgacggatgacatactcttcaggaacagcgaagccacccaaagtgactaaatcgaaataa

SEQ ID NO: 60809 - DNA, 1621 bp, Heterodera glycines
  unsure (1)..(1621): unsure at all n locations
atgaaggatgcgatcgacaacatgataaaggtggctttaaagactacggaagaaaaaatgaagcgaaaagtgcggatgtttggagttgcaattacgggtgccgggcttgctttcccggtgtgggtgccgtatcgggcgtacccccagaataatgcggatgttatcatggaggagattaataagctggggcagagcggggacggggatgaaaataagaaaatgcttttattatctgaaccgattactatgaaaattacatgcgttacaatgcccagtggagaggggccgaggaatgtccacaaatttgactttggattcaaggaacattagcggatagggtaagtgttttaataaaataaaattaaaatagaaaaaaatcaataaataaatttaaaataattatttctaaaaaatttaatgaagcaaaaaaaaaattttttttaaagaaaaaaaatgaaaaaataataatttaatgaaacaaaaaaaaacagaataaaatttaaaataaagaaagtaaaaaataaatttaaaataattattttaaaaaattttaatgaaagaaaaaaaaacttaaaatatttatttttaaataatttaattaggcaaaaaaaaaaagtaaattttaggattgtgaatactgataaattttgccttttttacgcactggcgtcgtcgatgaattatttaattatggataaatattcgtttattcgttttatgaagaacttagcaagacaaaaggaagcggctgttgaacttttacggaattgtggaattgatggaaacgaaattagttatggtgtggagcaattgccgaatgttcagaaatattgggtgggttaaatgaaaaaatgcaaaattaataaatttttcaggatgagatttaccccggaaagtaccgggttgttgcgtttgagaagtctgcagatccgcgaaaatcgatctgtgttttgtggaaggcccctatgggacgagagaaggtcgtaccgatatttttggagaatggtcactgggatggtctgaagaattacgtctgtttttttaatcgtgggagaaaattttgtattgattgtgagtgcttttttgacaaggatgtcaaacatactttcgagtgccgggcaaggtgttattattgcaatagagtggggggaatgccatgtgaaaaggagagtggagtgaagattgaatgcccaaagtgtcaccgttacttttacaattgggagtgttataattatcatcagggacatcagacttgcaaattatggaggcgttgcgtgatctgtgacaagacatatttatttaacccgaagaaggaacatgaatgtggtgagacttattgccagctttgtagtgtgagccatgaccccaagcgggggtgttatattatgccgatcgaggagaaggaggaaaaagatgtctacagaattgtagtttgggtaagttctacaaataaaatcaacaaaaataagtctttaactccaggattcggagacttcgcaggattctatttacaagggggaccagaaggagcatgttattaattatatttcggagaaatttacttttacacaatactntnataacaaaaacaccacnaattncaaaatcncncncgaggaga

SEQ ID NO: 60810 - DNA, 260 bp, Heterodera glycines
caatttcgccgtgccaccaatgccgccagctacaaaattcagtttactgctcatgcgccgtcaacgtcaaccatggtgccatttgaattggtgaatgaaagaacccgggaaaagctgacattcaccaaagcaggatacgaccgatggataattaaacgatgccaaattggggagacgacgacggcacaatggacggacgaaaattcgatcaacaatttgaacaatgtcagcattaatttgagcggtgtcaattgcatatg

SEQ ID NO: 60811 - DNA, 691 bp, Heterodera glycines
ttttctcgaaacggatcgttaccaattgtatggatttggtgccgttgttgatttgttgaatggcaccaattgggagcaaagtggcattttcccacgtgtttcgctctgcgattttcaggtgcataatcatttatttatttttaaatttatacacacagagatgctaaatatatattcttatttataaaatttgtccttatttggcgggtatttgtttgcaccattttcctttttttagtgttggcagacataaaatttcaacaaaatttttttttggcaatttatttttaagaattttcccgacaatgtctgtcgaacccatcgtctccataatttcttttaaaattgaccaaaagttttgacaaaatttgaaaccttttgtccgtatttcggagaaagacttggtataatatgttttaaaaaggctaatgaataaaagcacaggtccgcgtaatgggaaatcttcaagaatataccattcaatgtgttctcatcatcaacatattcaatgaaaaaatttttgttctgctttggttttggtcagaaattattattattttctaataattaattcatttttaaatgtttttgcttcatctttttaattttatattttaaaaatattaaaatgtaaacatatttaatacttagaagattgtttaatgaattttatttgaatggcttatttttc

SEQ ID NO: 60812 - DNA, 2074 bp, Heterodera glycines
aaaaataaaattttaacaaaactttattataatttaaaatctccggcaagttttgcggggattcaaaaaattttaaacgaagcgaaaaagattgacccagacataacgaccgatgacgtaaataaattcctagaaaaacagagaacttacacgattcacaagccaatcaggaaaagattccctagactaaagacaataccgagtggcttccacaccgattggcagtgtgatttatgcatatttgatcaattgaaaaaacataacgacggttacaagtatttattggtctgcatcgacgtgctgagtcgaatgatctttagtgcaccagccaagtcaaagaagagtgaggacattatcgaggcttttgatcgggttttcgaaaagtcgaaaattatcccgatgaagatatatagtgacagcggactcgaatttcaggcgggaaaaatgaaaaattattttgagggaaaattcatcatcaaaaatgtaatgtatagccccgacctccacgccggcgttgttgaaagggcaaatcgaacaataaaagagcgcttgtacagatactttacaaaaatggacactctacgatgggtcgatgtaatagataaaataattacaaacattaacaacagtgtaaataggacactggggatcaagccaacttcaattacttttgaaaatgcaggaattatttgggaaagattatttggaaatatagaaactcaaaaaaataataaattcaaaattggtgatttggtccgaattacaaaagaaaagggtatatttgcaaagggttatcttccgaattttacggaagaaatttttaaaatttataaaataattaaatcagacccaatcgcttatagaattgaagatttaaatggagataacattaagggaatattttatgatgccgagttggtaagagtttcgaaaaatcaaataaataaaatataaaagaactttgacaaaagcaaaaaataaataatgaataaaataattttcttcgtagtttttggtttggcaatcggccaaataaatagtgattgttgttgcctatctaatgaagagaaacaacaattaaattctgctagaaaaactattgaaaaatgttttcgggatacattccgattaaatactgaagcccgagattttgctgctgcttctcatagggcaattacggaagcagaaaaaattaaagttcgtcatcctgaggcaccgggtatgaaaacgtggttcggtaggttattagaaggggtgagaaaagtacaaggaatttccgaaaaaattaacgaagaaaggcagaaaataggccacattagaaaagaaatggataagtgtttggaccgaaaagatgttttaatgtgtcgtgaattggcagacgaagcgaagggagcattagaaattgttaagcagtatagacaggacgtcggtactgcgtaccgtaacgcctatactcaatctgacctcgggattggggaattggccgataaagtaaagaaaacaatgaaggaatatttatcccgccccggaccttccccaagaccaacatttaaagaccaatttatatctgattaatgtataaaagagaatggaaagataataataaatttttaaaaatgattcaaagaacagaaaaaggaacagcaattttgttggaagcgctcaaaaaagaggctgaaagggcatggaaggaagtttcggtattggcagaggaagccgatgattttgccaaatcttcacatggagcccttaatcgggcaattaaatctcgagaaaaggccccctatgccccaggggttcgagaatggttcgtaaaaatgtcagattgtatctgggaaatttacaccattctggataaaattaatgcagagtctgaaagggttgagaccatgtggtttgagattgaacgttctaaagatttcgatcagaccacaaaacttgaggagaaagtatttaagagtttaaacgaaaccaagaagttgcatttcgagtcccgtcggattcatactaaaatattggagcaagaaagcagaattcagtctatagtgttgggatttattgagcttcacgagta

SEQ ID NO: 60813 - DNA, 1435 bp, Heterodera glycines
aggcttttccgcccgacttttctgagtgctccaatcagcatcacttcgccaacgcacaaatgcgtccgttcgatttgaccaacaaagatggtcagtgccaaaattggaatcgtagaattatttaaatccaaaaatggttagataaatgctggacattttgtccttttttaggtttgtccaacgcttacacggacaatttgttcagattctcagcacgcccaagttgcagttttgaagtgattgcatttggatcggcatttttccagacatttctcttggcattttcctaactttccccaacatttacttcggcaattccttggcatttcctcaacttttccttggcatttccttcctttgcatttttctcaacatttcttttaggatgactgcggttctccgtttttattctgcgaccgaagggacgccgaaactccgcattgcgtgtcaaaggtggaaaggacacaacaaattaatgtcattaagggcattactctcgaaataattaatgtttgtaatgataatttttcccagataagaatcggcggaaattgtcaaggatttgaggggatcgactgctgctgggagggcgagtgccaaaattggcgttgcgtcgcccgccaaattcaattgtcgaaaagggtatcccattgattagtgataatttcgatcactttgactcctgcttttcagcctccacaggcgatgtcccttcagcacagcaacggcgaatcgtttgccgaacttctccaaaatgcgattggttcgatgcctcagatacaaacgcggcgagtcgaggcaattttgaaattggcgaattaatcgaaatgattggcatttcgcgcaaaaggcgttcaattcgacagaagcgacgacgacaatggcaaagggagcagagaatggcacaaactcacaatcagtagcaataattggccacagcaacgactgtttcaacgacgacccgtgctgttcggcatgggcaaaactcagcgaatgctcggccaacccggcatttatgcacagatattgccgcagagcgtgccatcaatgcgaagcgcaaacggcgcacaaaggtcggaccgaatttgtgaagctttcattttgtttcgtcttaaggatgcactgatcggcacatttcctgcggctattggcggtccgccggcgaatgttcgcgaagacgccaatggatggcggagaattgtcggcagagctgtggctggtcagtgttcatcttttggccctgtttggcatttctttttcctttttgtccatttttataatccgaaccatttcctaaaggtgccaaatcagccaacaacaattgtgtgcatcagtggcaagaatgagtcggatgtgagaagcctttttgtccttttgtctttggtcggccgatagtaagcgaaaagttgaaaaatttcaaaacggcagacaacag

SEQ ID NO: 60814 - DNA, 58 bp, Heterodera glycines
tgccctatcgggaccgggacctgagcttttcaaaatccgggaccgggaaccgggaccg

SEQ ID NO: 60815 - DNA, 580 bp, Heterodera glycines
atgtcaaacggagcggcggagagattcgtcgacatcttcaaaagggctatgaaaaagtcccgaaaagaaggaaaggagtgggcagagaaagcacttttggcatatcggacaacgccaagtgcggcccttgatggacattcgcccgacgaattgtttcttggacgacgactccgaacgaaactctcactcattcatccgccaaatcaaaaatcaaaactaattgatttggaaaattttcaaaattcaaagaaaatttacatccgaaaaatggaacaccaattcaattccaaacacggaacaaaaacgacgaatttccaagcggaagaacccgtctatttttggaattttaaggacaacaaaagtgtttggctgccaggaaaagtgatcgaaagagtcgagaattctccgacctatcgaatttttgcaccatctcttggccgagcagtacaccaacacgccaaccaactccgtcgccgttttcccgtcgaattgaattttgaaaatgatcagtcgaaaaatcccgcaaaaccgggtatattcgactctgagaaggaagtcagcttaagaagggaggtgttag

SEQ ID NO: 60816 - DNA, 570 bp, Heterodera glycines
atgtatattattgtgtttttattatctacattaaatatttcgataagttttgcgcggatttcaggaactattggaccgattcaaaccaaaatttacgtggatggggaaaattatgaaaacaggtaaaaaaatgaataattcatctatacaattttttttttgtatatcatattttagtaattttcaaattttgattacgtagctgagataaaaaaatgcttaaattgcattgtgttccaataaaaaaaaaatttcttggattagccgagtgaaatttcacatattacataaaatttaaaaagaatttttgaagtttagcgcagtgaacgtattacggtttcatgaaatttttaaaaattggctttctgctgattgttgtataataattaaaataattatcttttaagcaaagcgaatttggatcgatttccttttctaaaagatgcgacaaaggaggcaaaaaaagaattcgagaaaatttcgaacaacaaaagtctgacaaagtttgaattggaagcggcacgaatggagtgggcgaagaagcaaacgaagacaattaaggcaaattaa

SEQ ID NO: 60817 - DNA, 590 bp, Heterodera glycines
atgattatctcaattaagagcgcaatttctgcgctgccatttgagccggaaaatggcaaaaagcttaatcattttccaattccgtactatcgccagtttcaaccaccatatgattcgccaagtcgtaacaattaaatgaaataaattaattttaaaactaaatgtatgataattctctcagctttgatccctccattttttggtgatgattataattccttcgataagaatatttggtgcaaaaattgtacaaacctaagaaaatgacaaatttaatgctttttttttgtacaggaatatcccaaaatcgtggtctgtttttggctatggcaaatggaaatgctaatggcgacagcgttgggaaagaagaaaacgagcgcggatttttaccaaaacggcttaggcctccaccacggtttccgagaccacgcccgacgagaccacggccaacacagccaccacgcccagtgcctatgacgaatgcttatacaccggcaccgtcgccagtgccgcacccaactcaggcaaaccatggcgattacccagcgggtccaccatataatccgcattggaaaaatcaatgcaattaa

SEQ ID NO: 60818 - DNA, 59 bp, Heterodera glycines
cctccgttagatccatccatggccgtaatgatgatgtgggtcgggtccacccggtgaca

SEQ ID NO: 60819 - DNA, 3033 bp, Heterodera glycines
acgcaaagccagtgtattgcaggcctcgtccggtaccatacaacaccaagttggttgttgacgctgaattggaccgacttttggctgcaaatgtcttccgtcctgttgaccacactcggtgggcagcaccaatcgtggtcgtcaaaaaggctactggttcggcacgtgtgtgtgctgacttttcaactggtcttaataatgttttgctgtcaaatcagcacccgttgccagtgcctgaagacatttttgcgacactaaacggaggacaatttttctctcagatcgatttccgggatgcgtatcatcaaattgaattagaagagggatcaaaagagttgtgtacgatcgcaacgcaccgtggtaattttgagtaccattggttgccattcggagtgaagtcagctcctggctttttcaatccattatggattcgatgttggcagattgtccatttgccattgcttatttggatgatgtgattgttgtgagccggactcggaaagagcattggacacatttaatggaagtcttcaaaagaattgacaattaattttgtttaaacaataagtaattatttaaaaattaattattataaaaataagcccatagaactataaataattaatgcgtttcacaggaaagataataaagttttttgatattttgcagaataatagcgaacttatagtgctatgaactatttaagcaaggttatgataattttttatattacaatttagatataatgtattttcataccatgtatatttttatttaaatttgattttattgcatctttttaacatttttctattaaaaatttatgaaaataaaaatgaaattaaaaaaaaaattaatttctaagataactcaaatatgaaaaaacattaaaagaaattctattattaatttattttttaatgtttcgaggccaaaataagaagtaaatatattgtttcctatttattttcgataaatatttacattcatttttattaaatatgttcagttacaaaattatttttatttaatatgcacagaaaaaattaaattatattcagaaaatatttttcgatgaattaaacagattttattcgtcttaactcctatttttgtaaccatatttcgaaaaatgaagattgacgtctgctttaaaattttgatgaaataattctacgacagagctatagtttgtttattatcgttttttaattgttacttagttctatattttctaatatattcttgatttgactgcattgagttacgtagttgattgaagaccttttaacaatttttttataattaatattagttacaaattattcttttttcaaataggtggataaattttttatttaaaaatgaaattttataattctttatcttcttgagcagccaagtacaagttctttcacgaaatataatttgcttcacacttgacccttggatatgtttattcatcagtatttattatgtaattttcaaaaaaaaatcttttcaaatatatctattgcttttcccgctacatttataaaataaaaattaagctaattgcagttatgttttataacaaattttactaactggaatttaataataaatataatttttatttaataattataaactttcattaaaaaaaatgaaaattgcgctcgataaattataaaattttattgtatgaaatttaaaatacaaataattagggatgcgatttttaggccttctccgtaatgggaattacaaaagtaaaatagtcacaaatgtaaaggataatcagattaatttaatattcataaatattattttaatccgtattttaaaaattaattttatttaatataaatattaatttaaaaatttattcattatatgcggaataaataacaattaattacgacattttacctttttttaaaatataaaaataaattaaataaaaaaacaaaaaaaatgtaaagtttacaaagtgtaaattacattgacattcctaaaaagacaattcattgatggctgtaaaaactggagcagctcaaagtctcaatgtattatataaattttacgtgaaatacaaaattaagaatttattttaagaatttgatattaaataatttaattaactattgaacaataaaaatatacaaaaataaatgaaattgatttttttaatataaaattcatcaggaattataaaatgatcaaatacatattatgggactcagttttttttggataacaaaaaaaacctatttgttaacacaaattatggacaaaaaaaaatttttttaaattcaaaatgcaaaattatattattaaaattgaaaatttctaggtaaagtgataattgttaatttagacaaaatactttgataattaattttttatatcagcaaatgcttgtttatttatagagttgcgtgcactataaaattatatttgtttttccaaggatatatttcttttaaattattttgttaaaaatattggttaagttttattcctgtacatatgttttttattagtttctttaaattttttaaatttaaagctataatgtaatgatttaatttgtccaagcataaacattttccaataaaaacaaaacttaataaagttaaagctcaaattcactttttggttaaatatatggtatctcgtttaattactttcaaaactccagtattcgaaacatacaatttaataaaatttgatacattatttttaatttttatcttttaattagctcgttttctctaacatgcttttaagagtattatcatatttataacaattttaatattattttattaattggttcaggaattgtaattgactcattccatttattctcgtttcaagcttccattcgattgttgaagcttatagtctaagatattttaaatatatatttttagtatgttttttatttttcattattttctttacaattttgaattttaattattaatgaatggacactctgatttaaaatactgtttttaatgaaaaattattaataaatattttttg

SEQ ID NO: 60820 - DNA, 709 bp, Heterodera glycines
atgcagtacaatgcttttaagccccgccgtgaggcgggacagttccaaaattttgtaccacattttactgtggaaagtccaagtaccttattggacaactacgtgtcaatgagcacagtcgcctttggccagttgtggaacggaaaaatgggaatatcagatggggtgcgctcttttctaaaaattcctcttttcgtctaaccatccctcccttttgtgcactatttcgtttcaaaattgaatcattttttttgtcttttgaaataaattgtgaaaaatatacgaaaattattttcggttttaattatgctgtacaatgcttttaagccccgccgtgcggcggctccccttttgtgcactattttagtttttaaaattggttccggactttttggctttttgaaataaattgtgaaaaatatacgaaaattattttagcttttaattatgcagtacaatgcttttaagccccgccgtgaggcgggacagttccaaaattttgtaccacattttactgtggaaagtccaagtaccttattggacaactacgtgtcaatgagcacagtcgcctttggccagttgtggaacggaaaaatgggaatatcagatgggggcgctcttttctaaaaattcctcttttcgtctaaccatccctcccttttgtgcactatttcgtttcaaaattgaatcattttttttgtcttttgaa

SEQ ID NO: 60821 - DNA, 528 bp, Heterodera glycines
gcttaaaagcattgtactgcataattaaaagctaaaataattttcgtatatttttcacaatttatttcaaaaagccaaaaagtccggaaccaattttaaaaactaaaatagtgcacaaaaggggagccgccgcacggcggggcttaaaagcattgtacagcataattaaaaccgaaaataattttcgtatatttttcacaatttatttcaaaagacaaaaaaaatgattcaattttgaaacgaaatagtgcacaaaagggagggatggttagacgaaaagaggaatttttagaaaagagcgcaccccatctgatattcccatttttccgttccacaactggccaaaggcgactgtgctcattgacacgtagttgtccaataaggtacttggactttccacagtaaaatgtggtacaaaattttggaactgtcccgcctcacggcggggcttaaaagcattgtactgcataattaaaagctaaaataattttcgtatatttttcacaatttatttcaaaaagccaaaaa

SEQ ID NO: 60822 - DNA, 142 bp, Heterodera glycines
ggactttccacagtaaaatggtggtacaaaattttgcaactgtcccgcctcacggcggggcttaaaagcattgtactgcataattaaaaccgaaaataattttcgtatatttttcacaatttatttcaaaagacaaaaaaaa

SEQ ID NO: 60823 - DNA, 1185 bp, Heterodera glycines
atgttgtcaaattgggcaattcatttgccaaaccaacagcccattgtatatagggcattccagctggtgagcaaagctcaacaaatccagcaaggcgaactgccagaaacgcattgttcagcatattggaaacaatggcaaaatgagtggaagaatgacccaaagtttaaggacattctttttgaaaaagtcccagagcagttccgatgggcaaaggacaaatgggtcctgtacaaaaggcagcaaataaaaaggccacctatcggccgaattgttgctgtacccccatcggacccggaaaggttcgcgctctattcacttatgcgtcactttcctggagatccagatcatcttaagatggttaatgggttgctttgtacctcattcactgatgctgcaataatgcatggtcttcttgaagacggcaaaatttgggacaaaactctggcggaggcagctctgtcgcgctggccagatcagatgagatggctttttgtgagcatcatggtctatggccagccgagtaatgccatagaattgtggaacaagtacaaagaccaaatgtacaatccgcaaggcattattactccggcacagcataaagcagcagagcttgaagccctagccgaccttgattggcggctgcacagctgctttaacttaagctgtgtgcattttggcctgccagacccgccaaactcaattgccaaaaatactgacgcggcaattgaagagtttttctttggcgatgatgatttgaatttgcctccagggcaaccaaatcttcgtccacagccaaaagcccctccgccacttaacagcgaccaacagaaggtctttgatgctgttttgttggcaatacagtcgaaccctagggatccgactgtcccccgccgtttcttcatatacggcgatggaggtacaggaaagacattcctgtttggccaaattattaggcgcttgcgaaaggccccatacacctacaaagtgcttgccacggcatccactgggtgtgcagccattttgctgccatatgggaaaacagcccattccacgtttcgtctgggtagagaagtgtcattagacaagctcccaagcattccgctggagaaattctttgcccgtcggattcgtgaggcccaactcatctggaagatgagatcaccatgcttcacaacacggtga

SEQ ID NO: 60824 - DNA, 113 bp, Heterodera glycines
aaaattccctcaaaaataaaaggtctattgcgcaccgccctccctatcatgctcgagagcatttgtatgtgtataaaatttatcaaaaaaagagatagccattttttctggga

SEQ ID NO: 60825 - DNA, 998 bp, Heterodera glycines
atggatgtgcaaaaaacaggcaaaaatccacagcgccgcccgaacccggatttggcctccggcgactttgtgaatgccccgccaaagcgccgaagaaacaccaactcggtgagtttacaattaggttctgccaggttaagacattccggttttcaaccgcatattggcaatggaaacctttgcagctttagttcactaaagattggcatgacctccccagttttttttagagccgtctcgaaggcaatcccccgcaagagcaaccggggcaagtccagccgtccgtcttaatggttcagcaacaacagcccgttttaccgatacagcagcaacagcagcagcgccaatttgtgaacgtaagagtgtgttcaggggtggggcgagggggaagcgggcaatgcaatgccgatgttagcatagcctggggctatttatttattatctggttttgaacccgagcattaaccaaaaaaggggggggggaatgtacattttggccaatgcaatgccaaatattatcattaccatggggctatttattgtcgaattttggaatcagagcattaaccaaaagggtgctgatccacattttataatatccaacccccccccccccccattttagcagagtccgcaaataagcttcagcccgtttgtcgaccctcagctgctacatcaaccgcaacaactgccgccgccggccactcgcatttccatttcggtaaataataatgatcaaattagttttcattgccaatcacacttctttttcagtattctaagccttttacgatgggggagcagcagcaacaacaacaacagggagaagaagatgtgatccgggagcgcattcggcgccgtcagctccaagaattggccgcaatggaattggccaagccgctccccgaagacctgcaattctgtgcccaatacaatgcctatggtctgaccgacatcggctggctgttgatgggatggcgggaccagatggtcattgg

SEQ ID NO: 60826 - DNA, 3110 bp, Heterodera glycines
atgttcccaaatgacgatggatacgaatcggaagatgatgaaattctcttgccacctccgccgatccccccgcaacttggccaccctccgccaaatgtgccggtaatttcggtctcgcttttcgttgctttttctcaaatttccgagtgcttttttcaggcagttcgagttcagccaatgcatgttgggcagcagcggctgccgctgagagacctgccgcaaattttccaccctccaccaaatgtgccggtaattttgggtctttctttcgattgctttttctcaattcccgagtgcatttttcaggccgttcgtgtccaaccaatgcagcaacccgtaccaatgagagccgtgccacaattcctccaccctccgccaaatgctccggtaatcttgagtctcgttttcggttgttttttcaaaatcccgagtgcattgtttttcaggaaattggtgtgggaccaattcatgatgggcaacaaccactaccactaagagcgttgccacaattcgcccaacctccaccaaatgtgccggtaattttgggtcgtttttttgttgctttttttaattcccgaatgttttttcaggccgttcgtgtccaaccaattcaacaaccgataccattgagagacgtgccgctatttgtcaacccaccaccaaatgtgccggtaattttggctcgcttttgttactttttttcaagatcccgaatgcattttttcaggtaattcgtgtccaaccgatgcctcaaccgttgccgttgagagacatgccgcaaattcaccatccaccgcgaaatgtgacttcaatttggatcaaattgtggttgctttttctcagtctctgggtgtttcttcagggaattcatgttcgacaaattcaacgggaatacgccgtaccgcaatttgcccatccgccgccaaacgtgccgtatcatccaccagaaaacgttccggtaatgttgggtcttgtttctcatatttccggatgcttattcaggtaatccaaccacggcaacgaccgcgcgagctgagagacgtgccactattcgaccacccactgccaaacggacaggtaatttcagaccctgtcttttacctaacaccgaaacatcttttcttaagcaaatgtatgccaaccccccgagagtgctggaagtgatccgacggctgggcgagtggagaggaagaccaagggacccagacgtccgcctcaatgaatgaatggaatttggattttgataaaatttgttgttttaattttttgaattgataagggttaaatcccgttacctaaattgtttgaaaattattaaaattttaagaaattagatgctaaacctaacctttgacaaagattatgaaaaaatgaaaagaaatgacgaaatttttggaatgttccttctttttattatttatggattttttttcatgtgcattattctggtgctagtaagatattgccgaatgaattaattggttttttctcttcattttaaaatatttcacgtccccatgccctgcccacttcccacggaattgatcaaggaaataattgacgctctcccccctccaaaaacacatcggcttttgcgcgtaaattttgttttggcatactttgttaaatgtcggttttattccatgatgagaagattgtttcgcccagagcatatatcaataccaatggcccgaagaactggaatttatttctttttcgatgttcatactccccctatttattttccactctaccaataataacatttaaaataaaattataattttttatttcttatctgattaatttcgatcaatattttttgataattaaacaaattgtatttttccaaaaagaattttctcgcagtagcaactcatcgtcttttttactcccttcataaaatgtctcgcttttgccccctcgcccaaatcaatgaatcgggtcggcttaacacaccaaaggggaaatttagtgagttccaaacctatcaaattaaaaaagaattttgatattcgttttaggtcttttttacgctttggaaattgctcgaagctaccagctcatagggaaaagtataacggaaaacaaattccgttatctgatgaagacggagaagaaacaaagggaaatggccatggaattgatggaaaaggcagggataaacacggatgacaaaacttttggtacccaacaccttgaggctgtacaaaaatactgggacagggaattcccggatatgtttcgcattgtggcttttgaaatggtaaccaaattcgcttgaaaaaatatcccgttacttatttttagaagaccgggcttaggccaattttcaaaggagaaggtgttcgaagaaatgaagtgggtgtgataagagaaggagaccattgggatgggatcaaatcggcttcttggttttttggtgttcgatacttctgtgtcagctgtgaagtgacgtatgatcgacctgaaagacacagaatggagtgtaaggaacgctgcaaaaaatgttgccggatgggatttgggtttccatgtgcaaatgtatgcgaggaaatacactgcggcgaatgcaatctcaagttttacaacccgaaatgttttgaagcgcacaagaaggcggcttgtattgagtacaaaaaatgcgaaaagtgccgagagacacacaatactcggaacaaacacacatgcggggaaaagttttgcaaactgtgcaaagtttgtcacccagggcggcaatgtttcatcaaaaaaatttcaagtgcgaccacagaaagcctacagaattgtggcatacgacctagagacgactgtagatgggggagaacaccggctttaatcttgttagtgcggcacgtacttgtagcatttgtgcgggagaagagcgggaatgtgagatttgcgaaggccccagtaaaatcacatggtcagtagcggacggttttgatccaatgagcgagtttatcgtttggataatgggttttcaacgatttgaaacgattgctttcgcgcattatgctgggaggttcgattcacactttgtcttgtccgagctaacaaagaaggaaattgcgacggagttgatgatggctgatttgaaaatttatcaa

SEQ ID NO: 60827 - DNA, 1468 bp, Heterodera glycines
tggacctttattgcagtgccctgtcagaccccgtgatcatccctgcccgccccttccaacaatcgaacccagacattgttttcaacgagttcatgcacagacagcaatcatttggggaagtgaatttgttagaccagagaatttcaataattattgccacttattctttccctgttaaataaatttgtttcatttttccctttcattattttttgtttattacaataattatttattcgaccttttttctttattaatttttcagttaaaatgtactcgtttcaaaaatattttgaggaggctctcgaaaaagaagattttttctgccagaaaaacagagcagaagtggaggcattgttaattgaggcttcaaattataaaattataatacacagggactacgaaagccgctattctgattatattgccacctatcgccgcaccccactcttctgtttctgcatgattgagagaaatttaagatttttttacgacacaggaaccgggacgcctataggaagggttacaaccgtgctacatgttaccgttgaggcgagctatacaggagaggggttcatttcgcctatgttttccttttggttttattgggagggcaggagtcaaacaacaaacgaatctttcacgagccgtctttatttgtacactgtttcgatgctaagagcaatgggcaaagcctggggcagagaactacttttgaaccctgttgaagttttaattgatatgttctaccaacgtatagataggttggaacatagaaaaaacaattaaaaaaaatattttagagatttggtcggatcgtggtcattgttctatagactcccaccctcactttttgacacttcacgccgggtggttgcggagaataaactggaagaatttttaaaattaccatcattttttcgcatgcttttttataataaatattaaatgttcatgttgtatttaaagtgaaggttttgacccaaatatttaatcaattttaatttattattttttcgtagaaattcagaaaaaaatgcaaacaattgctgaaattaaaaatttcgagattattgaaggcggaagagtttttattgtgagagcgagaattgagaacgtagtacatgtggagtacagggtttgtattaaaaatgaaaaaaatatatcagtttttaaggcttgcgttttatgccgtaagggggcgtgttcatgtggcgttgagaaggcactgacaccttatttgaaggtgtctgtggcagatgatactgagatattggaaaatgtggcattttttggtgtacgtgggaagaaaaacggaatggtaatgttttaaagaaaaaataccattctaatttaaattcaggaggagttgagaggattgtctggggccgtgtgcaccatgaaaatcggcgcgagggtgaaagaattcggagggaagaaggggatctattactctttgatcgatatt

SEQ ID NO: 60828 - DNA, 886 bp, Heterodera glycines
ttgtacaatttgcatccgcacacgcgcatcctcggccatctctcctccattttttgcgtggcctttgaccgctccggacgatttttgttcactggggccgacgacaatttggtgagcacggaggggagggggcgggcaataataattaagcatattgacgaatcccatcaaaatgaattattgagtaattaatcaataaaaaatttaagaaaaaacattgcaatgttaatttttctttaattaacaattaaccaattgtttttcaaaaattcaggtcaaagtttgggatgctcagcggtgccttcttcgtttcacggtactgaagtaaaaaaaaaaatcggtaacatattaaaatggcacaaattatctaccaataaattatttcataagccgcaacagagacgaaaaaaaaatccaaaaacttttcagttccgcggccacagcggtgagataacggacctttcggtttcgtacgacaacaatttgctggccagcggttctgtggacaaaacgatcaggtgattttgagtgtttgatgtttttttaaatcacgtttcagagtttggtgtcttcgcaaagggaccgcttttcgcatttttcggggccacaccggcacagtgaactccgtccaatgggtccctttgttggccggtccgatgcgctatttgctttcggctggaaacgactgcgctgtgatgttccaacgatacaatgcagaaacgcttgcatttgaggacccacccttcaaattcaacgaacgtgccacggggtgagcgcatagcaccaaaaagccaaatacgacggaatgcacaatttatggggggggggggggatcttttgcttatcataccactttttcggcgcatttttcaaaaaaaaaaatgga

SEQ ID NO: 60829 - DNA, 1582 bp, Heterodera glycines
atgatgtacaaactgagtgcgcaaggcgtcgcccgactgtacgagttccaagcacattcggtaaattaacataatttggttgtttaatttcaattggcattttacattttgattttttaggatcgcattgacactttggtgtggtcgcaccattcactgcgttttgtcagcggaagcaaagacggcaccgccaaagtgtggagtttggacgaggagggacgctgggcacccgtcgaattgaatcccttcccgacggtgcaacaaacaccgcgcgtaacagcgacaacgggcgatggtgaatcaccagcagcagggggtaaaattggcactagcaggcccgtactccgaaaaaatttcgggatggcacttttttcctgaatttgtaacagttttgtgtcaacaaatttttgcaatttggggttatgttctcaaaaaataatggtaaatggggtccggcggtgccggggatgtgcgccttccctggatacgggcctgggcactacaaaatgagtttttgttccttcactttacattttttgctgtagttgcattgccaccgtcgcaacaatcgaccaacagaagggcagccaacgcaaacgccggggcgacaccgaacaacgggtacaaactgacaatgttgtgctggacattggacgacgacatggtgatcagcatcggtgtgtgtttttgtgctggtttaaatgttgttccaatcaaaaactgctgttggggtgtgacgattccctgctgtttcctccctccccgagtttagggtccgactttttgttgcgttgttgggactggcgaaggggccaacttttggccaaatatccgggccatcagaacgacgtgttctgtctgaacgcgcatccgattcacaaagtgaacacacaaaacaattacttggtaaatttgtcaatttaaggaactgattgtgagcgcaggccatgacggattagtcattgtaagttactttttttgaatgtaaataaggcttttgccaattttttactccatttcaaggtttggaatgtttacaatggcaaacaaatgtccaaacatcgcaatgaaaacaacgaccgcgaggcggtggccattttcgacaaccaaatttcggcggacggcacaacggtcgcgtgtgtggacgccatgggccatctgtccatctacggtgtggaccacaaccaggaggcattgaaacggccccacgagcagttctttaccaccgattataagtaagtgtgatgctatttaaaaaaaacaaaaatgaggagtggaagatttttgttttgactgcaataacacggcaatagaattatttggaaaaatactactagtaattcatccgaaattttctaaaaacagaaaagtttttcaattccatttaactcaattttcacattaaaatcaaaatgcatctaaacaatcgaatcgttggatagcaattaaaaaaactcaaagaacattcggtaatactttgatatctccatgtgttttcagggtcgctgaacacgaatccggcatccatttcgctcgatttcgaaagccggatccggattcgaacaaaaagtcgaaaatttaa

SEQ ID NO: 60830 - DNA, 1990 bp, Heterodera glycines
ccccaattgggcgacgaggtggcctactttttgcaagggcacaagacgtacctgaaagagctgaaggaaaatgggatacaagttaccaaagtaatgcagccacggtcagtgctaaaaagaaaagaaaacaaataaagaaacaattgaattcgtcaggcccgatctgaacgcgatggagttttgctttgtggacaagcttgagtgggttcagcattccggcattcacatggcccaccttcggttggcacggtgccagaatggacgacgcattggctcaaccttccaaatattgtatttgcaaattgcaaaattccttcacttcctcttcaaaaatttgttcagtttccacgacatgcaaaatgtgctcgactttctcgttctcaagcagcattttgacgccagcaaacagctgaatttgcagccgggcaaccgagtggagtcaattgtggacgacaaattctacacgggcaaagtgttgcgagtgaccgcggcggagtacgactcttatccaaagtggggaactccaaaaataatacagcaaaacactaacagacaatttttataatttttatttttcttaaaaatttgaattttcaatttcggggagggggtcattaagactttttcctcttccagctctgattggtgcgccgtttgtgtcgagtgggacaacggagaggatgaccgctattcgccttgggacttgcaagcgttgaccaaaggcagaaagtctggtgcgtgcgtaaccgtaaatggatggagtcattattacagccaaacaatatgaaaatgggggcttagaccgcctttggcttattgtcgatagaaaaaattttagggtcttttttctgaaaaattccggttttagtaaattttaaaaaactttcggggaggcgagggggagaccgtgctcatgaaaaaatattttcttttcagaaagtccggctaccaaacatgacactgccaaattgggcgagtaccatccaatggccggcgaatggctcgtgccagaatgggcgcttgccaacgcgccgccacgtgcctccagcagcgccgtttcgtcacggccgtcgaattcgttactgttagcccaggagttgttccagcagcgcatttccaagctgatcgaacagctcagccatgtaaaagaggttatcccttggatattgtttttaaaaatcggtagaatttttgactgtagctaaaagatatactatacattgaattgcttagcttttcgagctttcaactagtaatttctcggggttttccggtaaaattccgttttcaaatggcgttttaaccactactaaccttttggtctgtcgtttaggtgctcccctttttggaaccggtggacctgcacttgtaccaggactaccccacttatgtgttttatccgatggatttgacaacaatccaagagcgcattcacagcaatttctacaggtggggagagaaataatcaaaattaagaattaattaaaacacataaatgttcaggagaagtttggccattctgtacgacgtgcaaatgttgggcaaaaatgcgttggcttacaacaaaccgaagtatcccatcgtgcgccatgcttgcgctctcgtcgaaaccatttttgtgtttatggagtaagaaatatcctgttttttgaattaaaatgggttttttgccatcttttccagggattggaagcaaaacgatcccttgccgatgtttcggcattttgtcgaggccggcaccgaaggcaccaaatattggcagttggatctcctggccacgtcgaacggtggcggcattgggtcaacttcgactttgttcaccaccggctccggcagtgtttctgggtcggcattgagcaacggaaccgccaatcaccaacaaaatgccacttctgcacgtcttcaagtggcaccggggccatcttcttcgtccgcaactgccggattgccgctgtgggcttctgagtgttctgccatggtggacgaattg

SEQ ID NO: 60831 - DNA, 1047 bp, Heterodera glycines
atggaagaaaagcaaaaatttattcaccaatttgacaaaataattggcaaaaaggagcaacaatcggtgggacgaaaggacaaattggaaattgctgaaagggtgggcattaatttgagaaccattgacaaatggaaaagcgaaatgggcttaaaaggtaaaatgggaaaaggaatttaaatcatattatttaaaattttaaatgaaaagttacgaaagaaagtcaaagaattgcccttgtaaaagaatactacagaataaaaaaggaagacccaaaagtgccgacaaaagaaattgccaaaagtttcaatgccagcaaagcgacattattttattggaaaaaacaatttgacaagaataattatgagtcatcatcatcagcggatggaccggaacaattaagctggtaaagagcttctgcatttggattcccgttcactgcccgcctctctaattatccccggcgggcggaagtttttccgcgatttgatttcctggacccgtagaaaaagacgatgtaagggttaaccgaccgttacccgcattaatcaagattgagaattaattagtgacttttggactacatatcaaaatccgtttctggggaaaggcgcgcctgtttcactaattccgtgttaattaatttgaaaataaatgcgagacaaaaggttttgaaaacagttagagatgagttaagcccattttgcaaatgtgacaatttaattgtataaaatgcaagaatttagaacccagaaaatgcattttctgtcccaaattccgttgttaaatttgttgttaaatgtccagttttatagtcctttgaccacaccaaaaccgaaagcacagtacgacacaaaattcaaaattccttttttagttctgatgggcctcatttgtgtgatcatttgccagtagatcaaaaggcatgggaatggaacaatggcacaaggaaacgaagtcgaaaaagaaaaataagtgaattttattgaaatatttgcaatatttcattggaatttatttgcaaaaacacgatgaattattaataaa

SEQ ID NO: 60832 - DNA, 186 bp, Heterodera glycines
  unsure (1)..(186): unsure at all n locations
aaaaaaccaagaccattggatgaaaaacagaaagtggaaatagttaaaaaatatgaacaaatgaaaaacgaaaatggcaaaatgaaggacagcgaaatttccaaaaaactgaaaatntttccctggaaaattattggagctgagaaaggaatttcagcctaattataaaagtaacggcggaataaa

SEQ ID NO: 60833 - DNA, 984 bp, Heterodera glycines
tttgaagaatcgccaccagctgatgctgatcaatcaactcagaaattggaaaaacaaaaagtaaacgaagaaattaatttttaagcctatttaattcggaataatttggcttaaatttaattcattccaaattaaagtgcttattctcattagataaaaaaatttaatggtttttgtttatataatgtattttattttttagtttgaagaggctccgctaccgccgcaagagcaaactgtggaaaacggccgacacacaatgaatggagaaaatgtaataaaaattaattatttaattattggcaataaatacataaaataaaattaagtttaacatattttaaattaaaaaacaaatgcgggttaattctaacaaaattaaataaattttccaaaattactttttttaattttaggcttatttttttatttaagagcaatataattcaataaacataattattttaaatggttattaataaatccaggttcttcaccaacagcagctcaaagaagaggaaaggacttctgctgctgatgcggtgccatcgaaaaacggcaacggcatgccaaaagttttggatttggaccaggcggctgaaatcatttacaagtcgatcaaccgcggcgggcacggcggtggactgatcaaaatgttcaaaaaggcacccaaatcggacaccgaccaaattttgaccattctgacagcgtccaattaccatacggtgggtggaatgtaagggcgtagccaggggggagggctgagtgggctaacccccccccccccctcagccgaatacaaaactaaaaatttttcagcaaatttttgaaacttttcggtctaaatttcaaataatagggtaaaatggggtccgatggtgcagataaggcgccgctgggaaaaacttatagccaaatttccgaaaaaaaaacgcaaaatttccaaaaatgcacaaaacaatcaaatcttggcgaaatattaaa

SEQ ID NO: 60834 - DNA, 740 bp, Heterodera glycines
atgaaagtggtccggacaatccatctatggacggacaatcggtcactgaataatccatcaatagacaatctgtcattgaaagacattctgagtcagtaatggacaatccgtcagtgatcaattcgtcggcaaattttattttcttaaatgtttaaaaatcatttaagaaaaaaatggatgggaatttacaacattgttatttaattattcaattcaatttattattctatagaaaatttttaggaaaattcagctatatggcgctcagtggcactgaatgaatcatttcttagcacgaaaacggcacgacaaattaacagacgatttaaatccgacattttcaagcgcaatttcggcacatttcgtaaattgccaacgaagagaatgtatgctgaaatgatggcaaaatgttatgacaacattttttatttgcatgataaacaagtgacggattgtccgggtaagaatttcgacaaaatttgaaaaaaattatatttttaaaattaaatattttttaaaggaccacaccgatgcagaatcaaaccaattaatgggctaaactgttttattgcaaaacgtaaattaattgaacaagagttggcgctcggaattttttggtatatttcgccaaagaaaggaaaatttcgcttttcaaacgaaggatgttcactttaatattgtttttaatttcaaaacatatatctatctaacatgttatttggtcacaaaatttaaataaa

SEQ ID NO: 60835 - DNA, 280 bp, Heterodera glycines
atgaatgcaaaagtgaggcataaaaattatttgctcaattggaaatccatgccgtgatgctcgagcagcttttagcaaataataataataataataataatctttcagctgttttacaattttgtgatgacctgcgaaacattgtccattcatttttggcatttccgtcagaaaagcaaagaatgatcaaagtctttcaaaaattgaatgaattcgaacttttaatgtcatttctaaccacgcatgaattttattggtatgaaacggcggtaaaattaaa

SEQ ID NO: 60836 - DNA, 439 bp, Heterodera glycines
gcgcattacacggtcgcgaaacctctcattaccaacaagccgcattttttgagctcggcgccatgattctacaaaatatgtttggtgaatataaaaaaaaataataaaataaataaataatgttgttttattgccatttccccaggcgctctctcctttttgcgcttccaaaaggacgacgacctcgtcgatcggctgtcctacttctacacttcctccttcctcattatgatggccgtattggtcagcttcaagcaggtgcttggcccttccgttggcattctgttccaccccaaatcgttcagtttggcggtcgtcctttggagtgttgggtacccgcgcagttcacttcgtcctgggaggcgtacacggaaatgttttgttggtccgaaaacacttattttgtgcccgttgaggaggtcggaataattggattatg

SEQ ID NO: 60837 - DNA, 607 bp, Heterodera glycines
atggcacaaatggttgcaaacattgtgactgtgatcttggcggctctgaagtcagtgcctttaattgaaaattaaaaaaaattattattaattaatcattaaaaatgaaaaagtttattattattattattataaaaataaattccgaattttttttttattaataacttaaaaattcaccgcattttttattttatttattaaatattttgtcaatccctttttgaagagtacccattgcactgctgaagaaggcaaatgcaagtgcaaaccgaactttgaaggacgccgctgcaatataaccaccagtggttattattgcccaaccatcgacgaattcactttcgaggcaaaaaaaagcaaaacacaaaaacaaatttccaattttatttaattaaattgatatttaaatatattttagggttgcttcccgaccgaccctccgggagagaaaaaaagtcgggaaacggggagggaaattctcacaaaaatctgtcggggatggctgtaagaacttaaaaaaagatatcggagaacgacagcaacggtgttggggaatatttttcataaaaagttgaaaaaaagagaaccagaaataatttattta

SEQ ID NO: 60838 - DNA, 353 bp, Heterodera glycines
gaactagcttatggattgacaagatttgagcttctttgtggttttcggccatccgacgaaattgcattcaatatgaaaggtaaaaagttagatagaaaatgatatgcgcctactgatttggataaagcttacccggctttataatatatttacatgagaaaatttaataataaaatttatttataaaattaaacgaattattttaaataatattttattaagcatttcctgaactttgtcttgcaatgggcaatgaaaattgtgcgcttttcatcgcagcaaatgaatcggagaacacaggctttccagatctttcacagttgctaaaaagatggtgggttaattaaaaaata

SEQ ID NO: 60839 - DNA, 1498 bp, Heterodera glycines
atggaaccaaaatggatttggaaaggaacacatttggcctttgccaatgaattgttgtgtgaccgaaatggacttttaagggaaaacagcacaaaagaaattcttaccctaaattctgaacgaaagaaaatggaaattgacccaacatttgtaggcgatttttctagggccatggtcaaagacaaagatttggaaaagctgaaggcattaatcgaagaattttcagatgtttttagcaaattcaggtacgatcttggacttttcacagccgctgagcatcacatcacaaccacaactgaggaaccaatcgcatctgcgccaagacgaatgccgtacaaatacaaagaggaattgaagaagcacattaatcagcttttagaagcaggagtcatggttgagtctgacaccccatgggtaactccaattgtcattgtacagaagaaggacggtggaattcgtccttgtttagactttcgcaaactcaacgaagttacggtgcccgacaggtaccctctcccacgccttgatagcatcatggaaagggtcggaaattgtcaattttacagctctctcgacttggccagtagctattttcaaattaaattgagtgaagaaacgtcaagaaaatgtggaattataactgaagacaaagtgtaccaaatgattacgatgccatttgggctgaaaaatgcaactgcagcattttcgagggccatggctatcgttttgtctggattggaggatacttcattggcctacgttgatgatgtgctcattttcacaaaaagtccgaacttttcagagcacctaacggcggtaaggaaggttttggagcgttttcggctttacaatctgaagcttagcccgaaaaagtgcatttttgcctcaaatgagatgaattttctcggatttgttttaacagcggaaggttttaagccaagcttaagtcgaatcgaaattctcaaagaaatgccagtacctttaaatgttaaagaggtaaaaagggtgctaggacaggcaggcttttacagacggcacattgagaactttgcaatggtcgtagagccattgctgaagcttacgaggcaatgcaataaattcgaatggggcagggaacaacaaaagtctttcgacaagataaaagaactacttactcaagccccgagtctaatttttccagattacgacaaagcatttcacattttcactgacgcatcatcgactggacaaggaggagttttaatgcaaaaagatgacgtgacgggcacattttctgccatttcctattgcaacagaaccttctctgctgctgagaggaaatggccggcagttcaaattgaaatgagtgccattatttatgctttaagggaattcagaccattcatcttcatgtcggacattgaacttcacacagatcacaaacctctcgcgtttttgctgaaaaaatccgaaccaatcagcaattggcacgatggctcattgaatttacaaatatcag

SEQ ID NO: 60840 - DNA, 612 bp, Heterodera glycines
gatttactaacaattcgtccgggaccaaccgggaattttcccaagagtcgggatttctatttttcaaaaaccgggatcgggacctgaaaaacccgggaattcccgacccggtcccgatcccgctaaactctacattataattaaattgattagcaattttacatttttttttgcaaaatttgtgcttggaacaatagtgatgttattataattttttaaaagtaaattacactttaaattatttttttagtttttcgcactcggatagcaaagtttgtaaagaaaatctaacggatgaagaacatgaaaggtatgctgaatagaagtttttcaatttatacaaattaaaaaaatcattatttaaaatgaatttatatttagggactttttaaaaaatccgggttgaaaattcaaggagaaattgggtggcgcagttgatggagaaaaagaaaaatgtttaatattttttaaatgaagataaaaaagaagaaaaaaaaactaaaaatagtggcaatttcaaaaaaaaggcaaaaccatcgctgagtagtaatctccgacccctcggggaaggaaatggcggagattttcgagaaagatggccatcctaattaa

SEQ ID NO: 60841 - DNA, 696 bp, Heterodera glycines
gcaagaccctttgggattggatcaaaaagccccgggcgcgtttctccgactcaatcgaccggctcaattgccacttcgtgcctttagtcctgctcttcttcgttgccatgatctcagcaaacatgtgagaaacctgcaaaatataaattgaaattaatttaatttataaataaaaaaatacatattttttaaattttgattgctcgattgagaacgggttttatccaaaaaaatgactaatttattttcagcgatttggaaaattttttgaaaaacttaattattggtcataaaattttgaaaaaatcattaaaaaatatttcaaaaattgtttaacggatgcaatttaaaattcatttttcttttatccaaataaacaattcaatttaaatattttattttacccatatttatttctttggtttcttttcagtttcggctttggcggcatggagcccatgcgttgccttgtaaggctatcgatcattaaaaatgattattaaatatttaaaaataatttttaatttaaaattgcccctttcccccacatttcagcgatctcccgaactgaatgaggaggagcgcgagtatgcgctggattattgtacatcaaaaaaccagtactacgtcgcgccggaggagggcatcccgtgggcaaatccggagcggcgggcacggcaactgggatattaccac

SEQ ID NO: 60842 - DNA, 100 bp, Heterodera glycines
ggaagctattcccgaaggattcggtctccccataaatctgggcgcatcggttcggggggactgccccgaaaacaaaaaaaaccatttttttcagtgtccg

SEQ ID NO: 60843 - DNA, 294 bp, Heterodera glycines
atgcatgctatcaatgacataattacacagaatactgtacaaatctggggtactgtatatttaaatttataggcaaagattaaacgtggcttccgcgcaggcgacgccgacgcgttgcttcaattggggctgcagctcgtcaccgatctgaatcagtactgatcagaaaacaaaagtatctcggtgaataagaacatattttaatcgatgaaaaataggcaaaactatgagaaaaactgaaattattggcacgattgttgaatttcatgcaaaaaaaacaggcactgaagtaaa

SEQ ID NO: 60844 - DNA, 289 bp, Heterodera glycines
tccgtgccccccgtgcgactcggaggacgaagttgtgctgaaggtgggccccgagcagttcactgtctccaagcactttctgatgtccgtgtcgcccgtcttccacaaaatgttctccgtcgacatgttggagaaggcacagggcgaagtgagcctggaggaaaccaacggggaggagttcggcgcgtttctggacgcaatctcgcccaaaatggcatcgccaaatcgtaaaaagaaaatgcacacaaatgccaaaaatgttccgctgttcacacagctgccaatgtga

SEQ ID NO: 60845 - DNA, 381 bp, Heterodera glycines
atggaacatgattttggttttggaacttcatgtggaccatcatcattaaatgaggacaaaagcggtaacaataacaacaacagaaatggagatgacgaggaacgaaaaataatctctgtgataattgacgaggatgaggacgaagaggagggggaagaggaagagggggagacgacggaattggcacaccaaactgaggacattggacagtcggcggagttggcaccacaacaagcggaggacaatgggtcagtggcattggcaccggcaccaacttcagcgccagcagaaacattggaatcggcaccacccccggcgccagcaacagaagaagagggcggagcagaagatgctgattgtgagccggacaatttgtcatag

SEQ ID NO: 60846 - DNA, 426 bp, Heterodera glycines
atgcggactgatcccgaagcgaaaaattttgctgaacaacttttagaaattggtaatggtaagagaaacatcccaactaattaatgaccatgctttgcataataattaaacgagggcatatgtattaagagttaattcgaaattcatagttagagttaaaaattctgtcaaagtcgttttaattccaaacaggtgcgccaccaaaaagttaaggcagagtttcgatctcaaaattttgaaaatccttatttcagccataaaaaatcttcatttgtcactaaaatacctgaaatgaaaaatccggcgctagtgtctaaaagaggactgttttgaaaattttgcaccttttttggtcaatttttttttgtttatttaaacacataatgatgaatattaagcataacaaacacaattatggcgaataaa

SEQ ID NO: 60847 - DNA, 2555 bp, Heterodera glycines
tttgagctttttaatccatattccaggaatttttactccatatttatgccatatttgatgttttttagtccatctaatttcgagccctacttattaaaattcactaattataaaaaaacaatcatttttaaattagtttcaatggcgatgagttggtggaatctgcctttgaaaaatgccgcatttttgtgttgccatgccctcgtgcaaaattcactgagtttgaggtggctttatccctttttgaacatccaaaaattttcatagttcgatttaatacggaaattcatacactcgggtggctctgtgcttgtaatgtgtgccgagggtggggagcagcgcaatggcaccaacatcaattttctgttggaagagtttggcattgcatttaattcgggtagcaaatgcgtcgatccctgcccattgtttgtgcctttccgtcagattgcgtcattcggacaatgttccacaaatatttcgatcccaaagaggctttggtgcccaacggagtgattaatcgcgcaatcccttcggccgcgggcgttcaaaaggcaattagccacggaagagaagccgaaaggaacagaaaagggttgccgaaagagcaaatgcaacagcaaaaggcggaaaagaggagcagcgcatttggacaaaagcttagaagggacggaaacgacgacgacgacgaggagacgaacattcggtgcgggagggggcggggaatgttgatcaattaaataattaattgggggggggcaaagcggactaattaaataaattaattaatgtaattgatccaataccactcactcatgcggacttttgccctcctttctcagttcggcattgactttcgtttatcctttcggctgcactttgagcgttgaccgtcgctccgtttgtgtgctgtccacgggcactgtgtgctacccaatttcacgaccaatttgtgcatttcacaaagttcaaaaagtaaactaacaaataaatgatcaagcacaaataattagttgttaattgtttttccatttataggagaatggttgtggcaaattggctgttgtcggtactttttccccgattttccaattgcctttcatttttcactttcccccccttttttctttaggctccgttcaaatgttcaccgaccctttctttggcaaagaagataatgcaaagatatttgtaatattctaaaccgcaaaagcattaacaaaaatataattaggaagtgattgtcaaattcctttccgatggctttgaattgaatcaaatcgatgccgccgaaccgaacatttcggacttccaccaaatccccgacaatttacaactttcgagtaaaaaatatatatttgggaacaatcgaaaaaaacaactcaaaaaaggccaaccgaaaatgtgcctgcaggaaagtgaaatagagcaaacattcactggcgacatcaccaaactgttcgacacttctctcagctcaattagcctagagcattggcctgaagccatacggtaggtgtactgcagggacgaaaaacatgctagcggactgcacccttgtcgaatggtgtgattcatctactgtatcaattcattatttgttaaagtgtccaatttttaagttctctctcaaagtttgttcgataacagtcaaaactgaatgaatttttacagtatgaatcggtttttaccgtattgggcggggctttgctctgtgttcgttctttctctttatctgttgtcaaagtttgtatgacaaaatcggactgaagcatgagcctctgactttggtctctccggcattccaagtgccaatgccgccctttgcgcctgccgtgagttcaccgttcgttggctgacaacgaccttcgctgacctcttcagatttttgcgccggaatttcgtgagttggcaccgcttcaattggaactgttcgatttggacgacgcattcgccacccacgaaattcaattggcacagctaacaaatcgatgtgacggggcgagggaatggccaaaggaccgaactttttgttaaggcgcggaaaatgaattggatttgtacattcgcgaggcgggagagattttggacattaacaaaacacttttgcgaagtgagcgacggacggagggaaaaataacggccaaaaaagtgatggaatacgtaattctgcacattatcgaatggaagaaatccacgggaggaatggttggtagcaattcatcaacagttcaaacaaaagcggcttaaaaaaagaaaaagccaaaaatgggaagggaaatgcccaaatttaagatcttttactagctttaaatgtttccaacaaaggtacttctaattattgggattcgaactttttttttcacttgtaaattgtacaattacataacgttgagtgtttcattaattgactactttaggacgattccgacgaatttccttctgcctttttgaccgatgaaattggcatgccaatcgaagcaaatgacagaaaagcaacggaagacaaagaggaggaagaagacgcattctcaaacatagaccaatatgacgatttg

SEQ ID NO: 60848 - DNA, 1090 bp, Heterodera glycines
atggtgctcaattggaaaaactcgggatttctggcattcgttgcctgacgctattttttagataaaagacattttttaaaaccaaaattatttcccgatttggaagtaataattttaaacaaaagatttttccattattaattataggactcggcagaacgattttttactccaaaaccaagtccgagtgtttccgattggactttttcgagtgaaatggtacggtgataatcaattcaatcatttttcacttttttaaaattattcataaaataattctttaggcaaaaaagaataataaagccggaattaaaggtaaaataaatttgaaaagaaatttaaatcagcgaaacttttgagaggacactgcgcaacagcaaaggtcgatttggggtgatttgaagaaatggatgaaaggtatagtcgtaaactgtaaacatttaccgttaattacatatttaacagtttcagaaaaaaatctaatccaaattaagtgattaaataaaaagaaatgcttttccttttaattttgaaatgaaatttgattgtttttttttaatttagcggacaccgagcaagagcctgtcaatgagcagcaaagctattttgatcaattgagacagctgatttttgatacccccgaattcgctccccatggattggaaacagtgaaagacgaagaacaaacataaagcgcaatgaatacgacgatcatttttaaacattccattttaccgtaagaagtggttacgatagtttcaagagtttatttatttatttgttgagaaaattttaccctaatttggctcttttaaaataataagaaaaacaaagtaatttaattctctctaaatcagtaggacaaagacttttaagcacaaaaatgataagtaaggacttaattagcatcaatattactaaattaagcacaaaaaaacaattaaggaaaaaacgaaaaaacattcttagaaggtatatttttttgaaaatgaaaggttgatccttaagggtgaattttttgttcatttatgttaagaaacactaccaagtctgaaattgtttggacttcggaaattgttaaaaaataata

SEQ ID NO: 60849 - DNA, 223 bp, Heterodera glycines
atgtctctcatgcgtcaactgctgacctttttgtccatcattttgctgctgctttccctcgtcactttgtccgatgctcaattatttggcggatggggtaatttttacataaatattaagatcaaattaaaattttaaccaaaatttattgtcaggatggaactccggcatttacatgcctggcttttactgtgcacatgccaaagtgtgcggataaacaaaa

SEQ ID NO: 60850 - DNA, 1828 bp, Heterodera glycines; identical to SEQ ID NO: 30444
  unsure (1)..(1828): unsure at all n locations

SEQ ID NO: 60851 - DNA, 828 bp, Heterodera glycines
atgagcgctaaaattatcagagtgccgaaaatcgcatgtgatctaagcctagcaaaaaatggtgtaagtaaaaatcgtaattacgctcaaaaagcttctcaaacaattttaacgcttccaattccttctacaatcgcctttatacatcccattatgagcgctaaaattatcagagtgccgaaaatcgcatgtgatctaagcctagaaaaaaatggtctaagtaaaaatcgtaattacgctcaaaaagcttctcaaacaattttagcgcttccaattccttctacaatcgcctttatacatcccattatgagcgctaaaattatcagagtgccgaaaatcgcatgtgatctaagcctagaaaaaaatggtctaagtaaaaatcgtaattacgctcaaaaagcttctcaaacaattttaacgcttccaattccttctacaatcgcctttatacatcccattatgagcgctaaaattatcagagtgccgaaaatcgcatgtgatctaagcctagaaaaaaatggtctaagtaaaaatcgtaattacgctcaaaaagcttctcaaacaattttagcgcttccaattccttctacaatcgcctttatacatcccattatgaacgctaaaattatcagagtgccgaaaatcgcatgtgatctaagcctagaaaaaaatggtgtaagtaaaaatcgtaattacgctcaaaaagcttctcaaacaattttagcgcatccaattccttctacaatcgcctttatacatcccattatgaacgctaaaattatcagagtgccgaaaatcgcatgtgatctaagcctagcaaaaaatggt

SEQ ID NO: 60852 - DNA, 502 bp, Heterodera glycines
caagttttttacaaccacttattgccaatttaatttcttgcagatttaaagccatccattgcctgccggttctcggcacagcaaagcactaatagggtgtttgactcacttcaaaaaataattcattacccaaaagttttttacaaccacttattgccaatctaatttcttgcagatttaaagctatccattgcctgccggttctcggcacagcaaagcactaatacggtgtttgactcacttcaaaaaataattcattacccaaaagttttttacaaccacatattgccaatctaatttcttgcagattgaaagccatccattgcctgcggttctcggcacagcaaagcactaatacggtgtttgactcacttcaaaaaataattcattacccaaaagttttttacaaccagttattgccaatctaatttcttgcagattgaaagccatccattgcctgccggttctcggcactgcaaagcactaatagggtgtttgattc

SEQ ID NO: 60853 - DNA, 338 bp, Heterodera glycines
taggaactttatacaaattttaaaaaagtaatattttgtatatgcatttaatcaaatttctactttctttataaatgttagctaattagtcagcgtctatttattttctgtaaaaatttgcctctttatttaaaattaaattatatataatttcatgaaataagacactaaatgtatagagaatgaattaacgtggtcgattggaataaatggacaaaaaagcaaagtcaaagacaaaaccttaaagcactaggcgattggaataaatggacaaaaaagcaaagtcaaagacaaaaccttaaagcatagtcgattggaataaatggacaaaaaagcaa

SEQ ID NO: 60854 - DNA, 439 bp, Heterodera glycines
gtgctttgcgttggttggttggcgtgggtgagtgtggtggttgggccgtttttgcgatattgtggctggaaaaaagatgcgatttcgctatggggagcgcggccgtctgggttcaagtgcttgcttgcgcttgtgctcggcattgaacggtgatggctgctgctggggtgccacctttgtcgtggcctcagtttctccagcgattggcagctgtcgaaatgaataaaacatgcagctcgtctgtgtgttaaagaaatttggcgagttaattgacttgtgtaaatgtggcctaaggcacaaatgctgtggggaactcagcactggggatgctgaacctaaagttggtggtggtgttggtatacgagtgagtggcgtattgccatggttgacaagccctaagagttcgtggatcggaactccttgcctggggacccagtgt

SEQ ID NO: 60855 - DNA, 897 bp, Heterodera glycines
gaccggaaaatctatcagtacatttttaaaacagttctgtagcattaagtagtgtaaacaaagtaaaattctgtaagaacttcgttgaaattccgaatcccggaaccgaattcgaactaaaagtcgaaagtccaagtttcaattttacccgttttttgttcaaaatcggttgaaaaacacggaaacaaaactgaaaggcaccaatcctgcaataagagattatttacgcattttagaaccaaaaatgggtaaaatttaaatttgtatttcgactttttatttgtgtcaggaattcggaattgacgcattttccgggagctgccgaatattctcacccccccccccccctttttttagctaatgaacaaatgccgccgcgggtcgctgtcattaccttccgtagccgctccgaattggtcgaacagctttttgttctttcaattttattttaattgaatataattggtattttttccttcttccgccttaggtgcaaaaggcattggacgcgttggaggagaaaaagctgatcagcgaagtggaacgcgcaggaggcgcgggctttaaagtgttgcgctgtttggagggggccactgcttttgtttacgccgcggggggcaccaaaaaatgggacattgccgcgcccgaggcattgctaatggctgccggtacactttttagaaattgttgttttttttacaacaaacagttttttgccacttttaggtggcactttatcggatatgtccggccgacagattcgttacgacggaccctccgttcagctggcaaacagcgggggactgcttgcgaccgcctcgggcgtggaccatcaggtgagcgggcggaaaaggaaaggactgcagtagtatagggacagaaatctgggccccccct

SEQ ID NO: 60856 - DNA, 530 bp, Heterodera glycines
atgcgcaccattctcttcatagccatggtttgcttgctgatggctgtcctaatggaaatgggtgggcaaaaatattttattaaaattataaaaaaatttataaatttattttttttagcaaattcaaaggctgtcaaaaaagacaacaaaaaaggtcaaaatgaatttcaatgtattttatataattaaatattcccttaaaggagcagtggcggcatcaccagcaaaaggaaaagcatcgccaaaaggaggcaaaagcccagcaaaaggaaaagcggcaaaaaaattgaaacctaaaaaggatgctaaaggcattaaaggtggggagtgaatttaattttaataattttaaattttgttgacattttgaaacagctaaaaaagcaaagccagcaaagaaaagcaaagcggcaaaagcagtaaagggagcgcctaagacaggcaattaaataattaattaattatgcaattaaatagaaaatgtagtcaaaaaactcgcatttgccaaaacagcagcgcaagtgaaagaa

SEQ ID NO: 60857 - DNA, 1101 bp, Heterodera glycines
gttatccccctccttttggagagcatgagaaagaggagaaggatgatgagaaagaaggaggcgaaaaagaagtcgaagaagctggagatgaagaaggaaaaggggagagggatggagacgaccagcagggcggtgaagagaggcggaagaagaagggcacgatgatgacgaagacgagagggttgattaagaggaagagcaacaagaagaaggagaaaaagtaacaaaaaaattttaacaattccgttgcccaaatgcgtggttttcatacaacgaatcataattcggtcaaatgattttgtaaaaattataataacataaaatcagtgccaacgtccaaacccaggaaatgttgaaaatgaggaaattggcactgggtactgcctgctggggctcaccttttggtatgtttattgctttgtttggggctagttaaagaccacaaacaacttgggttaacacttattttttgtcccgatttattttatttaactctgatttacataaatttttgaagtttgtttgcataattaggtttttggatttggcggcaccacccaatgctaatgacaccgcgacaaatgccgaacagagcaacattgcggtcaaaattaaccttgacgggttcgtcttttaactaattgtctgatctaagctataaatataatttctattttcaatttaaacagaaaagcgcttaagcaattaactgtgccggagttgaaatgtgaaaaagaattgaacgtcgtccataagtagtgaagaaattaattgatttatgagaccctttaaatgccatcctcatattgacttgttcatttttttgttataatttgaattttaaaatacaattcaaatatgcagatttttactttttaatgtaatttaatttctctcaataattgaaacaataacttttattcataattttctgaaatggggattgattcttaaatttagcgattttttgtttcaaaagtataacaaatataattgagatcaataattaaactcattttgaaaaattatttataatcaatcattaacacagaaaaatgattaaattaaagagctttttgttcttgcgcatttgactgaata

SEQ ID NO: 60858 - DNA, 1462 bp, Heterodera glycines
atggatgacgcggaaaaaccgttagaaattatttcactttgtccgaactgtcacgaaaatggtacaaccaaaatgattgttatcaatattccgttttatcaccgtgttattgttatgtctttcagctgcaatcgtaaacatttattaattaactaatttattgttttcttttagactgtggacatcataatagcaatctccaatcaggggaacaagcgcaggttattaataagatgcaatcccgaaaacccgtaaaacaagtttctatgacattaaaattttgggttttttattcgaaaagggcgcggagcgccatcggtagtattacggttaatttattaaggtttttttatttgtctttaattaaggaatttggtactgaaattgttttgaaagtacaaaagctcgaagacctaaacagaacaattgtgcgttcggagtacggaactattcaaattcctgaattggaactgacaatcccagctaaatcacgttctggaggtaaaaacaaatgacattattgttgggaacatgaaaaaatatttgctgcagatttaacaactgttgaaggagtcgtacaatcagtgagagaggacttacaacattttcagcccgagaggaagaaaacggagccaaatacagcggaaaaaattgaccattttattgggcgactgtccaaacttctttccttgcagtcaagttggaccctggtaagaaatagaaaatgaccaaagtgcgggattttaggcaaaggtcacgaattggtgttccgacgaaaaaagtgttaaaaatttcgcagctattttttctgggcttaaaaaatgcgctgatcacgaatctggactcagattttgaaaatcattgatttttatctatgatttttcatcaactagttaatgtttcgcatttttaaaatttattttacaattaatttgggttagaaaaatgcgctgatcactaacccatttttttaaattcgtattttagttgtaaaactgatttaaagaaacaaaaataattagacacaaatcactgcaaaccaaaattttattctatacagattcgaacataaatatgaagtggtaagcgacctaaaaataacctcaaaaactttaagaaacttcgtgatccctctgggaattgtttcatccaaaatcccgacccgttccacgtcgaccctcgctgcatcacaagtcattattatcggcgattggaagaggacaaattactgggactgatcgatgacgatgcatatgaaatacaaagtgcaaagctttcacaagatgaagttgatgaccgggaatggaagtcatatgaagatgtgaaggctgaagtccttcacttctccactcaatgctcggcttgtggcgcttcttgtgacacgaggatgaaatcgactggtaatttttatggttttcacttggtttgccttcacttgaaaagcactaaaggaaatgaatga

SEQ ID NO: 60859 - DNA, 696 bp, Heterodera glycines
atgtctacggattgcgatatctgtggcttcaaatcgaacgaagtcaaaagtggtggtgcaactcaggaaaatggatgtaaattgatattacgcattgcagaggtaaaacgaccgcgttttatgtaaaaattctaactccaatttttaaggctgccgacctttccagggatttgcttaagtcggacacatgtcaaataattatccccgaattggacatcgaaatgggtcaaggagtactgccaagcagattcacaaccgtcgaaggtcttttgattgcaataaaagaacagctggagagacaggcgcctttttttcttggcgatagtgcaacagaggaagaaagaacaaaattccaaaaattattggacagattaagagatgcgattcagattaaggagccgctaacgcttgttttggatgacccagcggggaacagttacctccaggctcgttttcttgcttattcatttatactttttgctttatttcagagcctaactgaccacgtggaagataaacgtcttcaaaaagagttttacaccaggacaaatgaacagaatgaggaattgggattgaatgacatgaaagtggacaattatgaggagttagaaacattgaaggaagatgatgaaatggatgacagatagcatttactcttaaaccgatctttgttttttgttttgatattgatgataa

SEQ ID NO: 60860 - DNA, 404 bp, Heterodera glycines
gtggttaaatttagtcccacctgtggcacaattctgactctctcagacggtaaggattactgcaagcagttcagctgtggttcttgctcctatacattgccaatttccaagaaggttttggcttcatttattccttttatatatatttttagctgacaagcagaatatacagcaaaaagaaagaagatgagaagataattgggggcaccgaaatgtgggaaaacgcccaagtgacaaatggtctgttaggctcaaagcagagaaaatgcgcatttgtgtgttcagagcgatgcccaagttgttctcatgacaaggcctacttccagcagatacagacgaggagtgccgacgaaccgatgaccattttttatcgatgtgccaattgtggacacagatggaaggag

SEQ ID NO: 60861 - DNA, 80 bp, Heterodera glycines; identical to SEQ ID NO: 51817

SEQ ID NO: 60862 - DNA, 54 bp, Heterodera glycines
atgtatatgaaaatggtagccaactatctaaatgggtcaagcccagtgtcagcg

SEQ ID NO: 60863 - DNA, 332 bp, Heterodera glycines
gatttgccggtgataaagactttgtaatgatgacaatcaaaaataaatttccgagaacaattattctagaagggttaaaagcagagaaagatagtggaattgaatggaatgttgaacaattaattaagggattagaagagataataaccatgagggaagaagcaatgagatgtaccaaaataacaagagcaattggtggacaacatgaaaactgggatagtggacaaagacaattcaataggccaagaagcaattggcaaaataatcggtacagaaataataacagagaatatattaaaagagaagaaagaaatcctcaaaataatcaaagg

SEQ ID NO: 60864 - DNA, 388 bp, Heterodera glycines
atgcgcatcacagaagggcatgacaccgtatgggttgaccaggcaaattcgaatggactgattgagaaagaagcgatcagaaagtgatcgaagagtgatcgatcagaatcgattgacacaatgataaagctggacagatggttgaaattgataaatgctaatgaatgaatgatattttgtctattaatccagcgttgggatcgtccaaatcctcttcccaagtacagctatgccaattgacaagtacatcacgggagaaatttgtgaaatccaagtacataatacaaaattttattaacacgttattataaaagggagaagtttattcagacgtccgaaatatatagcaaatatgtataaaaactcccaaatatgtaaacatatgtaa

SEQ ID NO: 60865 - DNA, 1402 bp, Heterodera glycines
cctgttctacccgccaacttcaattgccaaaaatactgacgcggcaattgaagagtttttctttggcgatgatgatttgaatttgcctccagggcaaccaaatcctcgtccacagccaaatacccctccgccacttaacagcgaccaacagaaggtctttgatgctgttttgttggcaatacagtcgaaccctagggattcgactgtcccccgccgtttcttcatatacggcgatggaggcacaggaaagacattcctgtttggccaaattattaggcgcttgcgaaaggccccatacacctacaaagtgcttgctacggcatccactgggtgtgcagccattttgctgccatatgggaaaacagcccattccacgtttcgtctgggtagagaagtgtcattagacaaactcccaagcattccgctggagagcttctttgcccgtcggattcgtgaggcccaactcatcatcattgatgagatcaccatgcttcacaacacggtgattgaggtcatcgaccgagtgtgcaaagagatggcaattcgccagcacaaggatctcctcttcggaggaaaaacggtcattttcagcggtgacttcaaacagtcgctgccggtcgtgcctcatgaaggcttaaccgctcaggtgacagcctgttttcaaacgtctccgttgtttggtcaattcaccacgatgaaattgaccatcaaccagagactgggccaaggtcagcaagcgtacttgcaaatgtgccgccaaatcgggctcggagaaaccggagagcacttctggattcctccgcagttcctcgttaagagcaaggaagagctgatagattatgtctatcctaacttccaacaactccttggcgatgacaaagagctgctcaatcgtttgattctcgctccgcacattgacacgtgtgatgaagtcaacgagatcatgatggcgaatgtgccaggtcaagtgcgggaatacttgtccacggataagccccttgacgaccgcccactggacatcgatgagatcgagtccgaagtggctgcgttgaaccggcgcacagactcgggcatgcccccgcacagtctccggcttaaagtcggatgcgtcgtcgtccttcttatcaataaaagtgataaggaaggactgatcaatggcacacgcatagttctggaagaacttggcgatgatcgcctcattggtcgtgttatcaatagcaatgctattggcggccaagtgagattctttcttgaaagaacacgaaatgtctatgaagacaaatcgcctggcggcataaaatatgagcgtttgcagttcccaataaagcctgcattcgctatgaccattcaaaaaggtcagggccaaacaatccgcactgtcggcattgatctggaaagggaa

SEQ ID NO: 60866 - DNA, 367 bp, Heterodera glycines
atgcaggctgggacaacccagatccctggctttggccagctatacattttggacccagtcgaggctatggaaatgcgtcgaaacaaccccatatttactggggaaaatgttaaaaacgaagatgcgtttgtgcagggtcatgagcttaatgaagcgaccctagagcttttggtagaaatgatcaaaaagtatcaccctgctgcgcaagcatataagcaggcgcgtgagcagctccaggagctcctcaaaaaacacaacccggaagaacttcgcttcttccgtatgactttgttgaatgagcgcagaacccctgcagctctaaaagacccaaagctccacccgcatcaaataatcaccccttcaacgg

SEQ ID NO: 60867 - DNA, 2528 bp, Heterodera glycines
cttccccgcaacaattagtggaaagtgccgccaacaatttgccgcccgcggcgatgaaaaagccaccacattttgtgccgatcaaaccaaatcaccatcatcatcagcagcagcaacagcagcaccctgttgttgaggagaagttcaagcagtacatgccgtcttcatcatcatcgacggcttcctccgccacttcgtcccctgcggcgatgccaccaccagcggtgacgccgaataatgacaacaacaacaacgacggcggcggcggtcggcaccaaacgaacgcgacgacggccacgacggcactggccatggtggcggacgagtacgtggacgtggtgggcgacggagcggagggtcgcagctcgctgatgcgacaccagcgcaaggcgcacatcgaattctacaggtactgtacgggtggtacggtatggtacagggtacagtagaatgtacacgaaggttaagagcagcagaatacaatagaatatgtagaaatgtgcagagtttagtaaagcacctgaaggacacgttacagtagaagaaatagtttgtgcggtaatgaactactgtacattaggctacaggagtacatatgttgaaaaatttttgagttacatttattataaaattgaaaaaaatttccaaaaaaaaactaacctagttttccctctaaatttcctgcgtcgcggatactatatgtggttagaaaacaggaatattatactataagtatgtgattttatgtgatactgtaggtgaagttaatgtcgacctttcccccccccccaaaaaaatatccagaaattttaaattttttttcagaaagctgaaaggccttcgcagtcgaggctccacgctagactgccaacagtgtggccaaacggtggcaaacacggacgcgtgcgcacgctcgcatttgcacgcgcattgcgacgtcgcgcagttcgtgtgcaagctgtgccagcgcgggttcaccgaccagcacttggtgttcgagcacatcaacacggagcatccgaccaaaaaagtgtgtgcttgggaccaggcctggcctggaccaccggaccgtaaactgatggatttccaattacggatgtccatgatccgtaattaaaggcatttttcaattacggaatttcgctgaagccgtaattacggggggcggcaaaaatgccgtaattagagattttgcgtccagcccagcttggggacaagagtcagtcggtttgactcgagaattttcgattagagccccaatactgagatttcagcacgagaatcgagaccaagattctcaaataatctcttcttagcaggccaatttgatcaaaataaatgaccgattgaaaaatcggtctgatcaatcaaaacacaaaagagattgtttgattagcttctgatcaacaaggaacaagaaatcgatcagaaagatgattttggaaaagttctgatcagaggactgatcaattagtcttacaattagtcaaaaaggcctagggattaggcatttaaaaaaataaatatatttttacaatttaaattttaaaaaattttccagaatttaaaaaaatttaaaatttttaaatttaaatttttaacttttccagaatttaaaaatttacaatttatattttgaaattttccagggcacccaatgcattgaggaccggcgcgacatggtccagctgatgcaactgctcacggactgtttcccgcgcattgtgtgcaagaccaaggacgcaatgcaggagcatctagagcgtttgctgagcgccgacacgcagaaacttgctgctgctggtgatgccgtggcatgcacagccgctgcagaaccaacggtgtgcagcaacaacagcagcgatgtaaacagctctactgttggtggcacgtcgtcaatgcagtgctgccatctttgcgtgagttgggcgcgcataaattttttttctacatgaactcattaaacgccttttatagaaagcggacgtgccatcagaacgcacagcactgcatgcacacctgaacgcgcatcccgcattcaggtagcagcgcacactgctgacttgcacaatcacgcacgcatttctcactcttttcagatgcaaaaaatgcaagtttgtctgcatgtcacacgcagagcaaaaagaacaccaacgggttgagcacgggctggacgatgaagtgacagcaaattcgagtaaaaaaaatttttaaaaatatatttttttgaaaatttttcttcaggccaactgccctactgcgtgtccagcgcgcttgaggtgcagtacgacatgctgcgcgcatgctttccgctccaaaaccggcaacagcagcaaagccatagcgcaccaccaccggcgggtgagcatccagcaactgcagatgcttctgttgcggtgtcacctccagcagctggcgcaaagcgcaggcgcaagacgctgaagccggacgactcggcaagtgcggcgtgcggtggcaaacaaaagcggaacaaaaagtgcagcaccgcctcctccatcgaggattaa

SEQ ID NO: 60868 - DNA, 1293 bp, Heterodera glycines
  unsure (1)..(1293): unsure at all n locations
atgcagaggaaaaagtatgagctggaagagttggaacgtgctgctgaacgtcgtgatcaggaaagtccggagaatgagcaaagaaagattagcgattttttccaacatcatcccgaagattataacaaaaaattgaacgagtcaagacttatattcacccaacatctctcggggctgcaagaggtgatgagcaagtacattggtgaaaaagatataaatgaaattcgtcagcttaacaccgaggttggcaaaatacgcacaaaaataaaacacatgcagcacaatttgaccatctttgaaaatgctgcgcttcagcgtgaccaccaacaatctttgtcggaatatgaggagctcagccaccagcagaatagtgcatttgttgaggaattttttcaaaaacatcccaaaaattattggcaaattattcacaacaattataggggtcttacagaacattttcagatgcaagcaaaggcagtagggttaaaggataatgcctctttcgaaaaccaaatagatcgagcaaaacagctgattgagtacagacgaaagagattcgctgcgctggaatttgaggcaaaaaagcgtgatgagcaacaacagtttgttgcagcagcagcaaatacaattactgcaccgactgcgtcggcattgatcggaagggaggcgttaaaaaaacgtacaggcatctctgccagtacggatggtgaagtaggtgataaagcagatgtcggtccacaaacagctaccacaacaacacatggggaggtattaaaagagaaaatactggagcagcaaaaacacacggacaacgatgatacagcagatgccggtccacaagcagctaccacaacgcatggggaggcattacgtgagaaaatattggagcaacaaaagcgcacggacgatgatgataaagcagctgtcggtcagcaaacaatcccaacagcaacaaaaacacatggtgagacgttaaaagaaaaaatatcgcaagagcagaagcacctagttgacgataagtcaaattctgccaatgcaaaacaagatgatggtagcggtactgatgagaaaatcgcgcatggtcaaacgctaattgcccgacttaaacagagcgaggagcagaaaaaagaatggggggacccacccnccagatataatgatgatgatgggcgagcgccgaagcatggagaaatgctgtggaaaactgtgcgatcaacggtgccgactaaccaacagcaaatgggcgatgtcatccaccaccatttngctgatgctgaacaaacccgtggacag

SEQ ID NO: 60869 - DNA, 61 bp, Heterodera glycines
atggccagaagaaaattgctgctgctgctgctgatacacctcacgtatgaggctgttcagg

SEQ ID NO: 60870 - DNA, 436 bp, Heterodera glycines
atgggagccgatccaaaaacactcgggaaatgggtaaaaaagttcagatgaattcgaacaaaagtcgaaagttcaaattctcgaatctcgcatttttcgtctaaaaacggcttaaaataatttttattgcaggaaatgctggctttcagtttgtttccatgtgtttaagccgtctttagacgaaaatgcaaagctcgaaaattttaattttcgactttttgttcgaattagggtccgtggttctaaattgatcgaaaagggtgtcagattggtatttaacgtgcctgaaaatccccatagacaatgctaccatgtacactattaccaaaaacattaattttatagaaactaaccggcaaattctcctgaattgatgatgataattgatccattaaaaaagtgaaagaattgatatgtattctaaaaaatgaataaa

SEQ ID NO: 60871 - DNA, 606 bp, Heterodera glycines
atgttcagctttcgcataaggtcagaccaataaaacttggtctatcaagaaaaagagtatgatgtttttgtcttaaaaattgagggccgaaaaatttcgacaaatcaaattccaatacgtttaaatcttaatactacaaaaaaataatatttttttttccaaaatttcccccaccccctttttaggcatacagttcaaaagaacatatccaattggagccttgggcatcaattgaaattgatggagaaattgataatgaaataaatcgggagattgattggaggaatcaagcagcttcacacactgattgcctcttaaaatatggagtaattaaaaaataataattaaattgatttaaatagcagcagacaaaaattccaagataattataattgaattaattaactaataattaattaaatagcaccacatactaattgccttttaaatatggagcaattaaaaaaattaattagatttatttaaattgcagcagacaaaaacgccaaataactaacatggtttcggaactttactttaatttattattttttttaattttaaaaaaattagtttatattccagttctttttttcctttttttaa

SEQ ID NO: 60872 - DNA, 1418 bp, Heterodera glycines
  unsure (1)..(1418): unsure at all n locations
atgtcaaatttgttttacgttcttttacctagtgactctcctggttatgacaataagcctaataaatntagggttcatttgcctagaactctaacttttggaggtcaatggttgtgtgggttgcacagtataatttatacaaattcttggcccgccattggtaccacagagaaccaatggattaaggtgcatttaaaaaatggtgataaaataaaaattgatattcccgcagggtcataccaaaatgagcaagaattggaaaatgctataaatgagtcgataaaaaatggtataaaacaaccggctacaagagttaaaagacaattggaagatggagtggatttgttttttcattataatccagatgattactgggaaaaaattgaggaagaaaggcaaagatataaagaattgttaaaattgatagtgacaaagtcaagagaacgtgatgatgaaacggacacgcataggaagagaaaaatagaggatgaggaaattgaccctctccaaaatcaatcattgactaagaaagcaagaatagaggcgcttgaagaagcagcaaggcaaagagatgacgggaaggaggaaaaggaggagagaactggtcaagaattcctcgaaatgtatcctgttaactatagggagaaattaaatgaagttcgattagaattaataagagatttattcaacattcaagaccatatgaaaaaataccaaggagtaacagatggtagaacaattcaagaactaaatgaaacaccactaaagatgagaacagcaatgaaacacagaagaaaaaatttgaatgcttttaacaaggctgtattgaaaaaggatttacaaatatcagctgaagaatatgagaggacgagctatgaacaaaataaggattacgttgagccattttttgatagtcatccaacagattactgggaacatattcataaaaaatatgaaggccttcaagacgattacaaaaaaattcgcgaattaagagaacaacaacaatttttgactgatgaacagaaaaaacagtcaattcaggatgaaattgatcaacttcgtcgtcttgtcgattataggaaaaaaagatttgcagcgctagagtatgaagctaaaaagagggacgcactccaacaacaaccaatggctttagccttgactcatggtgaagcactgaaggaacgaataggaaaaattgagggaactaccaccacagcagacggggaagagacaaaaactcatggaaaatctttggttgagttaatagaacaggtacagaaagaaagagatgatagcaaggccaaaactgagggtaagacacgaggagaaattttaggagataaattaaaagccaaaattgatgaacaagacagtagtgcagatggtaggagcatggtgaagcactaaaaaataaa

SEQ ID NO: 60873 - DNA, 623 bp, Heterodera glycines
aagttgatcaatttcatcctgaattgactgttttttctgttcatcagtcaaaaattgttgttgttctcttaattcgcgaatttttttgtaatcgtcttgaaggccttcatattttttatgaatatgttcccagtaatctgttggatgactatcaaaaaatggctcaacgtaatccttattttgttcatagctcgtcctctcatattcttcagctgatatttgtaaatcctttttcaatacagccttgttaaaagcattcaaattttttcttctgtgtttcattgctgttctcatctttagtggtgtttcatttagttcttgaattgttctaccatctgttactccttggtattttttcatatggtcttgaatgttgaataaatctcttattaattctaatcgaacttcatttaatttctccctatagttaacaggatacatttcgaggaattcttgaccagttctctcctccttttcctccttcccgtcatctctttgccttgctgcttcttcaagcgcctctattcttgctttcttagtcaatgattgattttggagagggtcaatttcctcatcctctatttttctcttcctatgcgtgtccgtttcatcatcacgttctc

SEQ ID NO: 60874 - DNA, 316 bp, Heterodera glycines
  unsure (1)..(316): unsure at all n locations
atgtttcactcaacatatgaactttcgtttaaagacgccgccattatcaacaaaatttattgcaacggtagatcgaattaattcatacgatattgngtataattaattgtagaaaattgcaaaaacaccgaaaacaaatgccaaaagggaggatacccaaacccaaagaattgcaatcaatgcctttgcccggtgggttacggcggcgaaaaatgcgaaatggttgaaaatggtaaaaaaattaaaaaaattaaaatgataaaaattattaatatttcagatggaaattgccaaactgacaggggcaatgaattga

SEQ ID NO: 60875 - DNA, 147 bp, Heterodera glycines
atgaacttaccagccgaagagatttgggcggcacacgaaggctacatccagtcagacacaacagtggaagaagtggcgcaaatgttctaccaagaacaagttgcagataacggacgacaaatcacacgagatcagtatttgaccgag

SEQ ID NO: 60876 - DNA, 232 bp, Heterodera glycines
gatcaaacgacgcttttcgcccgaggcggtggacaccattttcgagacggacgagacggggaccatcgattggattccgatgctgatcagtgtccagtgctggcggcgactcgtctttgaactggccgagcagttcccgcactgtctgatgctcaccttcgccatcaaattgatcagtgacgcgggcttccaacacgaaattagcaatgtgaacaccgcggcacagcaagtg

SEQ ID NO: 60877 - DNA, 108 bp, Heterodera glycines
atgtccaacgcttcccgagggcccattcctgacgatgtcgccacggtgcctacacgtgagattcacctcaactcgccattcaacatccggaccatctacaacttccgc

SEQ ID NO: 60878 - DNA, 2940 bp, Heterodera glycines
atgctaaggacggacaaacacttattgcttcagcttatggacactctcaaatctgatccgatgttggactttaccttccttcaggtctcctctcttctctctttcacactttttctcccttatcgtttctctttatctctccacatttttagagacttaattcttcttttaattttcagagcaattctgagctgcgcaataaaagtcgacaacaacttgttgattttcttgtgtatggaattggtcgaaaactctcgggttttgagctgaaacgtcgtcgcaacataagcagtcggaaatcgcccggacttctcaatttggagggcgaagcgagcaaagagtgccctgggaaagaaccttcgtcggctgccactgattgggaagaaataggcacggccaatgtagcagaacaggtaaggcaaaacctaatttacaataatcatatatatttaaggtggatttactggtccaagaggctactgattgggataatttggcattgatgtacgaaggatggaccgcgtgggtgtagcggttggccgatgcactaacaaaccgtatccgacaacacactggtttaccgacccttccagtgcgcttgttgttccagtcaaatgcgatttgcccgttcggatcatataaatcccttgtgaagaataggcatccggcatgttcatttgaaggaactctgattatgaaccgacaacaaagataattaatgtcatcttttgtccgattcgggttcaattttgctcctattcatttactcttttcccaccaattatgatctaataaaagtgatcaatggtttgtgttaaatgaaaaacgcgagttttactagtgctaatgagtttggtttgcaagaataaaaaaccactgaattttttaaattaatagaaaatatttatattttcgtttatttctaagcctccatcaaagacattttggtatcattcgaattggagaatgttttttatgcatgttgctgacaaataagcaattgatgcatacttgaaaatttgagcctttaaaattttcttacgttaaaacgttggccaaaaaccgagttgggtttttaccgaaatagaggctgaatttgaccccccccccccttaaaaaaatccaaaagaattcaaatttaaatttgcgacaataaatgtacattttgcttcaaaaatacttcatgcccatgttttgtagtgatgctcgagaccaaaaatttcccgagactcgagaccgagaccgagactcgaccccgagaccgagactcgaccccgagactcgagaccgagacccaaaaccccgagaccaaaaaaacccgagacccgagacttttttcaaaaattttttcttacacacttaaaaatcgaaaaaaatcaatcttttgagttttctcaaaaatttttgtttttttccttatttaagctaccatacatttttccttttcatatgattgacttttttacaccattttttgtggtgctctttttcaaaaaaatgtttcgtgaacaggggtccggcggtgccgataggcgccgccgggaaaatttttaaaaattttactgcaatttgttaacggatttggtccaaaaaatgaccaaattttgcgtctttgagctacttttttaaaataaaagtaagagttttgggtgccggcggtgccgttaggcgccgccggagaaaattttgaaatttttagtgcactttgttaatagatttagtccaaaaatgacatttttacgattttaattgttaaaattgtgtttgttaattttgaaaaatgagaagaaaaaataatacttggaggggaacgatccaacgcaaaaataagtaacaaaactaagaacacaacccgctggaccacacatatattaaaaaacttgaacaaaaaagaacctaaaatttataaaatagaagtttaccaaaggccaacaatcattaggggtgtaaaaaagtctcggtctcgagtctcgaaaatcgagacctagacttgaaaacccgagaccgagactcgagaccgagaccaaaaaaacccgagatttttctcgaggcgagactcgagaccgagactctcgagcatcactactaattgccacaaaatgaaccgacggtaaaaggacatttagacaaatttttcctttgccctgattagttttcccgcatttcagttggatttgcaacgatgtttggatggacatgttcccattttttgaccatgcccaactcggcctcaaattggcactaatttcgcctcgtttcaatgttttaattgacaaacattttgacggcaaaagcgaattgacaatttggaatgacattagaattgacaagggccgtgtcgcagaagtgccaaaattacgtgtgtttatcgactatcccaattctgttgaattcccattgccggatcgtccgttgcccaacaaaatccgctttaccaaaatttggattgagtaaatcaaaattcaatgaattatagtgtgataaaagtattcctctttcagctacatcgatcatttcgtcctcgcgtttctccgtgccaataagcaaatttttgacaaagacaccgctttgcttttgaatgtgtggaagtataacgacaacgacattgtccagccaatttggaatgttttggtccatgaaatttggccaatttttgcgccaaacatttgtcacttggactttcccgatggtgatgatttgaacaatttgcgtcgtctcatttcgcccacaattctcactgatctcaagcaattgaactcaatcaatcccgacaatattttcccagctgcaattggtgattttgatgatgagccaaatgcaactgctggccaaatgctgtccaaatggctgcacaccccgcgaaaagatggacagtcgaagcggttgttttttatggagaacaaacaacgagacttcgagtgggtcaacactttcaaggtg

SEQ ID NO: 60879 - DNA, 649 bp, Heterodera glycines
atgtattttttaaaattggtgcgtaataggttcgggaggccatgtaaatattttaatataaaaattcactgaatacaaatattaagatataaattttatgttcaaaataaagcattaaatgaatttaataatgaaaatttttttagaaaaaatgaaaattgctatttactaaaaccaagtataagatttaaataagtagcaaaaggaaagaaaaaatttcttattactaataatatattttattaatattcttaaatattgcatttctatcaacaacataaaaatttttaagcttgaagtggcacttaaggaagcaaaagtacaagatgttggacgattagtaatagaataataaatctaaacaatataaaagaaaagcgatacgctcaatcggcttgcttcactttgcagccattgaacatatatcattttaaatttaaccgcgaattatcgccagtttaaatttaatcaaaattataaaatatatcaataatttagaccaaatctgttacctatatttagttaaaagacatagaaaacatttaaattacgttaaaccaattaaatctaaaatcgtttttggtgccgctatccttgtctcagcgtttttgtgggtccgaaagcgtgagtaaattaataattcttgtta

SEQ ID NO: 60880 - DNA, 333 bp, Heterodera glycines
atgattcaaagaacagaaaaagggacagcaattctgatagaagctgtcaaaaaagaggctgaaagggcgtggaaagaagtttcggtattggcagatgaagcggatgagtatgctaaatccgcccatggagcgcttaatcgggcaattaaatcccgagagaaggccccctatgccccgggggttcgagaatggttcgtaaagatgtcagattgtatctgggaaatttacaccattcttgataaaattaatgctgaatctgaaagggttgagacaatatggcgtgaggtcgatctgtgtaaagacctcgatcaagccacaaaactagaggataag

SEQ ID NO: 60881 - DNA, 1336 bp, Heterodera glycines
agaaaaggcaaagaagagagggcggaagagataggagagaaagtgagagacaaagggaaaggagaagaagaggaaaagagggatgaagacataccgacggagttcgaattggacacgagcagaggcctgggcagacatttactggagacactgtccagggagttacagtatcaggaggaggtggacacggagatcagcaagagaagacgaagagttggagcagacggaagggaaattccggaaggagtggaagaggaagagcggacgacagaggaagaaaaggggaggggaagggatgaagggagagggaaagagcagagaatcagagaggaagagaaacgaaggacggaagagcagagaatgagagaggacgtagaacggaggaggcgagaggagatgagaaggacgacaccaattgaagaggaggaagagcacgaactgctcgaaactgaagaaataacgcaacaacagcatgagcaaaaggtgagtgaacatataaaaaagtaaattagaaattaaaagctcatcaatggcagaaagcatttgacatgccattgttcgtgccaatccatcgttccgatgccaaagtgtccctttcgggcgaattgtcactttcgcccgtaagggaggagggcgaagatgaggagaaggagacgagctttgagcagaaagaggtcagtctgtcagtagcttctcctttccgtctttccagctatctttctttgcatttcgttccgtcaacttcgagcagttcaccccccccccccccttcccctcacttctcccattttattgtctgttccgtcctccgttcgtccgtcgatgagtttgtgcatcggaccatgtccgtctcctgttttgcttgtcttccccccttctcccccataaactttgtcatctctccaaagtggccattcacaaacattccctctcacccaccaaatttcgttttatgtgtgtttcttatcggcaatttgtgacgagtgttgagccacaaaattggccgattcgccgccacaatttgccagtgaaagccctccccaaagcgatggaatgtcacacattccctctgatgagcacttaataatctctccaaatagaataattcccccataaagtcgaaagaaagtacgataatcgaacagttaaaagccaaaaaggaccgtcaaaattcacaaacattctgaggaattttacgatggaacagcaaaaacaacaaaagcagcagcagatgaaccacagcacaaaacaacgccaacgctttcaacgcattcaagcggaaaaaccgaacgacgaaacggtggaaatgtccagcgacgggtcaatttcaccggag

SEQ ID NO: 60882 - DNA, 136 bp, Heterodera glycines
tgatcaaaataaacaatcaaaaatggcagtgatcactcgccacttgtaaattttgaattagcgcgcaaaaatttatgccacttacgctatttggtgttatgagcaattttgtctaacactgggcttgacccatagt

SEQ ID NO: 60883 - DNA, 305 bp, Heterodera glycines
atgtctccaagtgaaaactctgaccatccctttcaacaacccgacaatgttcaagctgttcaacagccacatgaagaacaagatgaagaagccgagttgcgtgcacaaattgaagacgcggaggaggatttgctcttgaattggtggcttgaagacccaacaattgtaagttttttttcaatttagcatttttttaaatttcatcacattttcagattcgttttttttggacaccgtcgagcacctgccatcgaagcagcacttcttcagtgcacgcacatgaggccaagatcatgcgccaataa

SEQ ID NO: 60884 - DNA, 1550 bp, Heterodera glycines
atgagacgggaccatctcaggatattgtgggatcccagtcagtaatcaattttttggaaatttgaattgataaactaaccttaacattacattttagtttatgcctacctaaagccgcttttctttctcatggctacaagcgtgactcaattgagcattttgccgacttattaatggagcatttagcaagccttggtaaatagaataatactgcaatataatcgaattaattaatagattacgttaccttgctttgcgcgaacattactttttatggaaatccggaaaatgctgatatttatacttcggagatcgaacggattcttgatcctgtctacaaattcgtgaaccaatggtttgattctttattggatagcacatggccgacctacgagaaccttttaattcgaaacaccatgcaagacatctcgaaaggcatgatcattccggaaacaaatgcaacatatcaacaaattgtcgatgtcgtttacgaaacaatgagatttattggccatccagggtaggagattatatgcatactctcgttacctttttctctggtttcaattgcttcttataagaaaattttttagttttcataaaaccgtaaaatattctaatccttttcgttaatatttctaatttaaaaaggaaatcataacagcatttttggaattatgtagaatttacattttatttattttaagctatcgccggaaatatgtggtaacaagagaccgacgattcgatttgctcagctgggatttttggtttgcatgtcgaccaaattcatgtacaaacacaacaacattgaacgcgcgattcatttcaattcgaacgaaaacagacacaaatgatgtctttgagtcgcttcagaagctcataaatttcaaagtctcaagttggccgatttttttttccgctatggacaggttagttttagaaaaacaaagtaatttcttgatatattaaagaattttgttttttttgcttgtaaatacttctagcttttttctttcaatgagagtagaaatttttattacttttagtctattttgttttgtttggtgaaaataactaagccctataattgatccccagataaaaaaatacttaaaaaattgcaaaatttttattttcgggaattaaaaaatcaaaaaaattcccacatatattaaatgatatttgtcttgcaaaatatcgttttcagtgaactatatagctacacctttattgaaactgctattaaagtattggcgaaaaaatacggattaaatttcaacaactttaccaaccattcatcctatgttgtacttcgccaggatgtttatttatcgggttgtctgaattcgtttgccatgaaatgcaatgaagacttggacaatgcttttctacaagctttacactaccatgaggatggcactgtttttaccaattgtgaagattgggttgttattctgggcatttaaaaacttttctcgtgctctaatgtagtagataattaaatgcacgttcgccttttcttatattttagtccattcgtaaataaa

SEQ ID NO: 60885 - DNA, 113 bp, Heterodera glycines
aatctaatccttttgtcttaggctacaaaataaaaaacgaaaaacatgcaaaattattcgctgctgaacaattttggctaaatctgaaggcttcctgcttataggaacccaaa

SEQ ID NO: 60886 - DNA, 113 bp, Heterodera glycines
aatctaatccttttgtcttaggctacaaaataaaaaacgaaaaacatgcaaaattatttgctgctgaacaattttggctaaatctgaaggcttcctgcttataggaacccaaa

SEQ ID NO: 60887 - DNA, 1728 bp, Heterodera glycines
agtgactcgtctgggccgaatcgcgtgcatttctttctctctgttcggcattccgcttacgctggtcaccattgccgaccttggcaaattcctctccgaacatttggtttggctgtacggcaaatatttgtgctttaaggtgactaatttttattgaccctaccaggccacctaatggccattcaaagagtgatctagttattctgatcaaacttttttcttcctgtagcattttgtggccaataaattgcaacggaaggcattggcacgggacggagatcgcatctgtggaaagtgccgccacagagggctcagcacagtgcgtggtggcggcattcaattggtggaggagcgcaagtgcgtgccgatttgcgacacgggttcaagcctcaaaattgctctcgaattcctttccttttgtcccccttctcgggttaattttgcctttttggattgctttttcctttaaattcgttcgcttgttcttccgatcactccatttttgttcttagaattcctgcgctgcttgtgctcgccattttggtcctctacaccgcactcggcacttttttttttgaattttttgccaatttacgaattccaaatgaatgccattccttccggtttaggtggcgttttgatgtcccaattggagccatgggtaggcacagtttcactatcttacgaatttaatttctcaccacgcacagtcaatgttatgtttagagttttttcacttccttctattggtctttcatcacaatgactacagtaattttttgctaaatctttcattaccgtatctcaccgtaaaattccctctgccaaaggtcggtttcggcgatttaatgccacgtcgagagcattacacggcactgatccttctctatatcgtcctaggtaagattcgcaacgaagtcatcctattcatttgtatttgccttacaccgccaaatgccaaattccatggcacaatttgttgtccttttggcatttccattgcttttcatgcccttccgccataggtttggccatcaccacaatgtgcattgaccttgtcggcatccaatacatccgcaaaattcactattttggccgtaaaatccaagacgcgcgttccgcgttggctgtggtcggcggaaaggtctaaagaagagagctaaacagcttgaacattgtgacttcttgtttttcaggttgttcttgtgtccgaactgtacacaaatctcgtccaaaaaagacaacggaataacacactgagagacgcgtttatcattgaggtgaaattggaggataatggggtgcctaattcaaacataatttgtaaaagaaaaagccaatcccgggcactcatggcggtgagaaggataagtggggctgatcagtgattggacctaagaattttacggagagggaatattgatcagatgaagtggaacaatgtgtgattagttttggggtaaaagtgatttttaggggggggggcggaatggttgataattttaatggccataaaaccgttggtatattttgtcaaatacacagaatttgtacgtgtcaaagcgtcacatcatcccgttcattccgtcggacattcgtctgatcaaatacatcgaccaaatggagccgccgctcactcgtagcaattcgctgctcgcatccgaccacccccactccaactcgtgccgtttttgccattctcatttcggcatggcccatcatattgaa

SEQ ID NO: 60888 - DNA, 851 bp, Heterodera glycines
aagtatgccaaactaattctgccccatgtggcgctggtgttgctcacttgcgcctacacaatctttggtgcctccattttctactcagttgaacacccacacgaaattgcctcaaagcgacgacaggtcagtcccggagaaaggggcaaaagccaattcatcgccatacactcacaaacagactccactcaagttgattaataaatttacattgaatttgttatatttttccaacactcatattgggactgaaaaatacctttacgcgtcgagaaatattctctcaccagtccaactgagtcccaaaatgggtctcgtatacagtcaaatttgttctgccttaatagtaagttagaaaattttaaaattctccgtgcttaattagccttattccgccgtaattgtctcatccccattatgcacacataacttttccaatcgatcacatcagttggatttgatcaaccgtcaacaggacttggttggtatcgcgctcttttgtccaacgccagccatttggtcgccacccttttcagttcgtttccgcgctgcttcgtctcgcgctttccaatgccagcggagtgcgcgtcgaatgggaacatttggcacggagtcatctgcacgaaatgagcgacaatttgttcaacgctttcgaaaagcactttctgaccgccactgaagtgaagcgaaacgtgacaatttcaatttggtaagaaaaaggcaaaaaaaggggaagaggggaaaaacgggggatttgggccttgggcccttgattgcccagcagaaagcgacctgatcagtgatcagagtctgtctgatcagtccgatatttttcatttattcgtttccga

SEQ ID NO: 60889 - DNA, 1410 bp, Heterodera glycines
atgtggggttgtgaatcaatggctgagatgtgtttggcgattaaccgttgcttggaactcgctagtcccaggctgacacgttttctattcgatggcaaacgcattttgctatggatggttagtcaatatttaaaaaaaaatttaataggtcaccctagccccggaagcaaatttacaattttggcatcattagcaactctaaatatcgtagttgcgaaattttatattcttagcgtgaaccgaactcatagattaaaattttatgcctttttcaaaatttaattgaaattcatggtttaaaaaattttatcatgggttaaattttgcccatttctattttatttaaatttaaaaaaagttttcgctttttcagctgtttcccaccttgtacggcttgtactttttcatcttcaccaagccgatcattttcagcggcatgtacatcacttggttctttaacccgcactttgagtacatcaatgattttgaggaaaaggtaaagacaattttttaattataaataaatttttttttttttttacttttcataccttttacaattttttacatttttcgaataaattggcattttaaaaaatttacaagcctcagatttaaatttacccgaaaaatttacagtatcgcaacgatttgcacacagtacacaattacattgtggttatcgtactctcgagtacttatttgacatttgccgcgattctgttctttcaagggcgccaattcaaaacaattcgaaccgacactacacgtgtttcacagaaaaaggtcataattattaataaaggttcttggccgagaatgggaggagaaaagtcgggaattggggagcaagtttgacaaaaaaaaattttttttgtctaggattggacaaattaaaaatgtcggagagcaacaacaccttcatcggggagaacattttcataaaaacaccgaaaacggaaacttttcttaaaaaaccaaagacgagaattggaagaaaatttcccacaaaatttgtcgaggatgattgaacaaataaaaagaaatgtcggggagcaacaacatcttcctcggggaggaaaatttcataaaaactcgagaaaaaaaataacagaaagttttttaaagcaaaaattttcaccaactctaaccctttggagtgcaatcgaggaaattcacaattttcccgaatcagatgtgggaggaaccctaatttatatattctatattattttaataatacattttttacattgtatatatatatttttttcagattttcatccaagtgattctgatcagcattgtaaatggatgtgctgcactcatttatgtgtatatgaactatgtgccgctgagccgatttctgatcattcttggccaatttctttggatcatggcacatggtga

SEQ ID NO: 60890 - DNA, 299 bp, Heterodera glycines
atggctttcactgttttctttgcttatcgtggcaggtaaatatttaaaaaaataatttttattttatttttgttaatttagcttcaatcgcaattttgtcattttgtcgaagtaataattacgaacgccatccgttggttcacacattgagaaatttaagtgatgcccgaaattggcaaacattggccagggaaattgacgacgaagtaagggacgacggcacggggcgacttacaaattgccaaaacaaaaccatttttaggtccgtgctcctttgctcttcactattttgtacaaag

SEQ ID NO: 60891 - DNA, 1280 bp, Heterodera glycines
atgacaactgcgatgctggagggcattcccggattggtaacttcgacttgcgggaaaattcgggaaaatttcccgacccttgaccaacaggtagaagcagtggcaaatagttggagatcattttactaattctttttcgatttaaaaccaaaattttggaatttttgttttgaaagattaacctaagtggaaaatgttaacaaaagggtcaaattccattttttcagcactttgttcgctacttcattttctatggcctttttttcttcatttccattttcaatttggtacagttttttcaaaaaaaaaaagaaattataaatttttatcttccacaggctttcgtcgtaaaattcattttgtttttgggcattcatttcatcatcgatgtctttttgtctgacgccgaacgacaaattgtaaatgtttaagaatttgtttaattatttatttttctgataataattttttttagtctcagtgaattatgaattatttaaattactaaagaccggaattttgaaagtaccaggcccgggacagggtttaaatttacgggctcaattgttttaatgaaatgaaatgaacaaatatatttaataattaagttttgaatttgttttgatatttttaatgtaatttttttaaatccggtgtttagacatcgtacttctatggtaatggttggttcgggctcacttgtgatgtcatcattttcaaacttccagcagtaaaaataattaacaattatcattttaaatttcaagactcaaaacaattaatttgaggtattaaacgctcaaaattctgctcgacttcccactgatcttctacaggtgcttacgtcttgtgattattcataaacaataataattatgcacagtttgtttttgtggcctctttcatgttcaccgcttgttcgctgttcatctttgatctgatcgtttgtcctttttgccaattttctcgctacagtatcccctcctacttgcaccgtatttcagacatttgtcttcacctatcttttgctgatttgtgctcttcaattcgccaaatatgttgtcatcgacatttacaaatgtgtccaaaatcgcacttcgcttccaaaagattgtggacaaatggtccatgtcaaaatggaagaaatttttgccgattttatcaaagaaataaaagcgacgcacgcggaaattggatcgattgaggagattcgtcagggatccaaagccattttttggcacattcacaacaaaattcaaacggacaaggtcatttggaag

SEQ ID NO: 60892 - DNA, 663 bp, Heterodera glycines
atgttagatcaaatccgatcggatttcagccgtgccgacaaatgcgaactgagcagccgaataaatctggaagatgaaggaaaagaagttctaaaatttggccaaatattatatgaaactctggaaaagcattctgaaaatgtgaaatatgacgaaaagaagcaattgctaacattcccattacaaatgggtgaacgcatcattaaacgactcggcaaattaattgaaatgtaattattaattaattctcattcatttttttaaattttattttaaagaaattttaatgaacataaaaaaatcgctaatgacattgattttataaaaacaattcaaacggttgcatcgatggaaaatgaattaattgcagaaaaacggaaagtcacaatttcggaatatgtaaatttgaggttgatcaatttgcttttctcattggcactccgtttactcattcaaactgaacaaaatgaattaattgatcaatatctgccaatttatttattcgctattaaattgagcagagaagaatggtatttaattattatcaaaattaaaaacattaaaaatttatttataatcgaataatacttgtgcaaatattgtataatatattaatttttgttactatccattctatgattatttgtttaaatataaaataaa

SEQ ID NO: 60893 - DNA, 412 bp, Heterodera glycines
atgccattgctcagcttgaaccttttatcaattgaatacattgtatggcccatttgcaatggtctctttgtgatggcatattcaagctgtactccggtgctttttctgtgcaggtagataactaattaatggattaattaattttaatttaaaaaattattaatttttcattttagcactgaatatcgaaaagcattttgcaaatacgtttgcagaaaacaacatggattaactgttgttgtgccattgcagaatatgcctgcttgaaaactttgtttttacattttgcatagtaattcggactcgatgataaggcctcccacaaatcttagcattaagagcctccaatctgcaccaaaaatgttttggtgacgtacgaatttttgaaaaattggcattttttaaaatttga

SEQ ID NO: 60894 - DNA, 174 bp, Heterodera glycines
atgccagaaaaaagcatcactttcctcatccttttatttcttttaattttctctgcatatgaagccgcaatgctgagggaatatgtcaaattgccatatactcctgaacaaacaagttttgtaggagatgtggccaccggagctggttatgggatgatgcttaatgtttcaaaa

SEQ ID NO: 60895 - DNA, 2298 bp, Heterodera glycines
aagggagtaaagcgaaaagctgacacgaccacttcttttgatgaggaaggaccttcgacaaaacagccaattaaaagagaggtgcgaccgattaagaaaggacctgcgcctgtcgactactcacagctcaagccacttctcaaaggcaaattgaatgagaggatgaaattctgtcataaattactcaatgagctcattacctccaaaagatgcaaggtgagactgacaattgaaaacattgctaatcaaatatttccatcttcatccattagacattcaattggccgtttcttgagcccgttgatgccgaggcattgaacctcccagactatttcgacgtcattaaacaaccgatggatttaagcaccataaaaaagaaaatggatgcacgtcagtatatttctcccgatgaatttcggaatgatgttttattgatgtgccggaattgctttacctacaatcctgaggatcagcccgttcacaaaattggaaaacaattgcaggtgagttaagaactttcattaaattgttaacaacgtgtaaagagttgttcaaaattagtgagcggcgttgaccagatatttataaatattccaaaactgaagtttttagtcgtatttcaatgtgaaatggaggcatttgcctgcagaaatgccgcctgatactgcagaaaaggccgtgccaactttagcactcccaccaaaggaggaaaagaaggaaattctgacaaagacttcaatttccaataagccatcgtcggtttcgccgactgcgcttctacaaaaatttaagcctgtggacgacgatgagcaaattgactttcttattttgcaagtccaagctgaacatgcacgggttactgagaaacagacgcaattgcagcagtactcacacgacctcctccaattaaagtgcataaaatgttaaaaatagttacttttctttttatagaattaggcgccgagaagcacgaacacaacaacagataacgccgccattaagtgctgaatcgcatcaggccattaaaaaattgttgaacgcgtgtcttcccatttcctccattccgacatcgctttcgttgcctcacagcactgcttttttgccttctatcaatgcagttcaaacatccgtcgttgggttgcttcaaccaaatgttcagtcgcaacttcctcccgcaatgcctacgatttcaccgccgcagcagatgaagaaaaaggctgggcccgggcgaccgcgtgtgacgaattctggctcttcggcttttatcggtttgttacattttatcacttataagtagttacttattgtttactattttcttttcgatatttcaggacaaacttctgcagaatcgagcattagtgcaccttcacaaagtcacctttctctttttgatctcccacctgaaaattttattcccatttagctcaaagcgtttccgtctcacaaataaaccaagtccctgtgcaacaacagttccctgctgttgatgctccccatcccaatctgttgcctcagcaacccaatgcgaaatcgggtcgagggagaaagcccggctcaaagaacaagccgaagacggagtctcagaaggaggacacgttgacaaaggaatacgaattcaactccgaagacgagcactcctctgagccgatgacttatgacgaaaagcgacaattgtcgatgaatatcaacaatttacctggcgacaaattgaccaggtcactcactcattcccttcctttcattatgtacttcattcatttgtttgtttagtgttgtgaacataatcaaagcacgagaacaaatcaaagatttgaaccccgatgaaattgagattgacttcgaaacgttgaagccagtcacgctcagagaactcgaggcttatgtgaaggcttgttcccaacaaccggacaaaaaaccgaagaagacttcgacgacctcttaccgttcgttttatttactttcacggtaaaatcagtttaatttaacagcgaaatctttgcatcccgaacacccaaaaaagaaggacaccgatccccaagcacaacagttcaacggaagcgcaccgcctaccggaaaatgtaaatttttgctgccttatttaattaattcagcttgattcagtgcccaatggggacagtggtcaactttcggtcacaagtacgaccacggcctttgctggacgtacgacccaaggaatggtcgcgcagaaggaggacgaaaattcctcttccgagtcttcgagtggttcttcttcttctgagtcggattctagtgactcatctgattcagaatcag

SEQ ID NO: 60896 - DNA, 661 bp, Heterodera glycines
attcggggtcttttgctgccagcaaagtgccccctccggtgcctcctcctccgccgtccatttcctctgccgtcattcccccatccgtccccaaagcaccgagttcacacgtgcacagtggcgcggctccactccttcagacgaacaatcccacggaaattagtgcggggatttccggctccgtgctcgaccatttgttgccgagtgtgacaaacggtgaaaaaggcaccggaggagcggctattggtgctgggttgctgaacaaaaactcgtggagttcattagcacaaaaggcgacggagggcgtgggccaaatgggtcatgcggtcaacgccacaaacgcttatgaactgttccgaaagcaagccagggaaaaggaggaacgggtgagtaaggcggcaacaaataaaaatggaatgaaataaatggtttacaattagaagcgacttctgaaggaggaggaggaaaggaaaaagcagcagcgggagagggagagacaaatgcacacgggcggaggcggggaaagtatttcagcaccaccaaacgatggacaacagcagcagcagcaaccgaagatcaacccggaggaggttaaccgacttcgcgaacaggaaaaggtttcactgttgaggggagaaatggggacaattcgcttcatttg

SEQ ID NO: 60897 - DNA, 866 bp, Heterodera glycines
atggcgaaagaattggtgatttcggcaccaaatttaatgaatgaaataaagtcaggaaactttgacgcgaagttggcaattgaatcgcttaacaaacattcttttgccgtgtgttgtggcgggaaacttgaagagaaaatattgatgaaaatttgcaaaatttacgcaaatatttctgtgacaatttgccaaatggaacattaacaaatgtgatgaaaatatacgcaaattaatcacaaaagtccaaattaatgagcaagcaattaacaaaaaggcaattcgtgaaaaagtggtgaaaaattcaattctcagcaatcaaaacatgacaaattttgtggaattttttgacaaattaaacattggaattgaaaaaacggctgccataattaaagctcaatttggatttaaattattaaattaaaggaaaataaattgtggcaaaatgacaaaagggaataggccattaattcaagggttggcatctcaaaatttacaaatcagaatatgcagccataaccttttcttgttggaattaatgcggaaaacttttttaaagtttactcatgggacaaaattttaatttactttttcagcaaaaaatcacccattttgataccagaaaaacaatcgctggttgaaccgaagaacaaagcgtgatgatgatgatccggcaatgggtggctgtgtaattacaacaattctttccattatatgcactggcccgccctttggtttcctatttcattaaatacttgaaggagggcaacgtggacgtttatgatcgttatggtggtcattactattcgcataagcttctctatgatgttatcgtgattgcaatcgtttcgtttgttgtgctaagataa

SEQ ID NO: 60898 - DNA, 656 bp, Heterodera glycines
atgcgcacccgtccgatctggcaagttaagcaacgattgctgactagccaaaaggttcggtgccgtgatgaaacgaaccagcactgcttaccccgcggcacccggcacggtcccccgaaggaatggatttaattaaattctctccttcggggatttttttccattaggtcgtccgttagctgggagaagggagtgggaaacatgatttcaaaatttttgttgaaatatttgtcgtgctctgaagggcgtgggaggggggggtgaaggcccaccacgaggccgcgaagaggccgagtgagtaccttcggtgcaggaaaattattaaattttaaaattttttaattgctttttaaatatgccaaaaaatgtaggcttaacttttttagtgaaaattcgatcactcatattttttgctaattgagcagaagcgtaccaaactttgcagggatactccccggtaaaggactaacttacactgaaatgagcgccgagctagctggctcaaaaaaatttttcgaaaatctgagtctttcgtttttatttatttgcaaaattaattcataaatattttttcagaaagggttctgaacttaccaaattttatttacatgttagtttaggcactctgatgctttttctatcaataatggaggtga

SEQ ID NO: 60899 - DNA, 927 bp, Heterodera glycines
ggtttgcgacccctactcgtggtttaactacccctagattggctaccagtacccgaagtacggattgctattacgtcgacataacatgcgacgcaccgaacaatgggcaaccggtgtacatagaggtaattggattatttgacgacatttcaaaaatgtcaccgttaagttcaacaacaacaaaagcacaatcgtaaccgcaattctgccaccgtacaccaaagttactgtatctctgaaatgcatttatggcgaaaacggtaaaaaggtgtacgttcaaatcggtgtggacggtaacccgaaccaagtggtcgaagtggaaaaggtaggaacggcatttgaaaagcttaattccgattaaatttcaggtgagctgtggaagaaaatgctacgtgccaaccacgccaacaactccaacctcgccaacaactatcacaacgccaacaactcccacgacccctacaactccaaccacgccaacaactcccacgactccaaccacgccaacaactatcacaactccaacaactccaagcacaccaacaactccaaccacgccaacaactcccacaacttcaaccacgccaacgactccaacaacgccaacaactcccacaacgccaacaactcccacgactccaaccacgccgacaactccaacaactcccacaactccaactacgccaaccaaaaaccgttcgaattcaaatgaacttttttggtttaaattttaagtttaaattttaagcgcccaattgttgtgacaaatgcattgccggttcggtaaagccgggtgaacaaggaattgactgcaacggcgccaaattgaatcccgagttcggttacaaaataacgaattacaaatgtgcgtcactgaatgtcacttgttcctcatatctggtcaataacggaattatcgccattaag

SEQ ID NO: 60900 - DNA, 754 bp, Heterodera glycines
atgcacattccaaaaatagaattccccaaagaaattgttccaagtttggccaatttgtcgctaaatcgtcaaccaattgatgtggttttttcttcttttgactttctttttaatatattttttgagtcctcggaaagggtaaaatgatttgattttattgttagtctgattttgtgcccttagccctgggttcaaattaagtaatactttgaaataaaaaagaatttgattttaggaccgtcttttgaagttactcgaacggacgcaaaaggatgtccagcgcctgacgaccgccaaccaacagctcaccaccgccaaccaacaacttactacaacaaaccaacaacagcagaacacaatcaaccaccagcagcaaaacatccaacaactccaaaacttattgggtttgtgcaaaatttattggagatttaaatttcttttctcgagcaattgattgtaatgcctaatttttcaagccggtcagcaaccgcttgttccagcgtttgcccccggggtttttggtgaacaacagcagcatcatcatgcgccagcggactttctcggcgaccagcatgcgctcggcggccagaatccacacgcggcaccttttggccccgactttttcggtggtcagcccgaaaattttggtcagtgccttggttaagtcaggcactttctccattttctttcgtttaggtgttcagcagcagcacatgcaggagcagcagggtccccctcctccgccgccaccgca

SEQ ID NO: 60901 - DNA, 1309 bp, Heterodera glycines
atgccagcgcaaacgattggtggacttgaagatgctcaaccacgacatgaagttcaaattggagagtgcgcagaagaactgattgtgagacgggtcgaattcgatagcgcataatatttattgtccattgtttattgttgtaatattttgccaattactatattatatgtaattcaaagaaacatttgcctaagtccccaaacgcaccacccttttacgcgcacattatattaatttgaaaatttttcgattaaataacttagaaaatatattcaaataaaggaaccggtaatagtaccgatggtagcccccctttttcgaaaaataaaatttttggaatttttttcaagaagaacgtataagaggttctaagggtcggtgaatccgaatctgacataaattcgacccatgtcgaaccccggacccgaattcgaacaaaaagtcgaaaattcaaattttacgtatttccaggggtgccattttgccctggaaaccggcatttgcctggttttgggggtccgtgccgggtttttgggttttttgccgggtttcctgtttccactcatttatttgaattttattaaacatttcgccaaaattaagaagcaaatatagtttttgttaattgttcaggtttattttattcatttttgatcttcattttctagtccgcagaatgtcccaaaaatctttttctgatttcatttccaaagttatatttcaacatcttcaactcaaatttccagcgctgaggaagcaatttcaggttctagttttgttttttcagcaattttacgcggacgcacatgaatatttgggcaattggtcacagcaattctctgagacggatgaaattattggagattgggtcattttcgagtcagagccaacaattcgaaaggcgtataggcatttctgtggggcatcaactgacgaaatggatgctttgtttggtgagatcgctgagttgaaacaaacattgaaggagctcgagggcgaccggttcaacaggaaaaacgtggacgaaaaatgggcggctattttcaaaaatcctaattttgtcctgctcaaatcactagtctctgcaattctgtcgatattcccttctaatgcattttgtgaatcagtcttttctgttctgatgaacatcaaaacggacgagagaaacagtattggcatgcctttgttaaactcgctaatttcaatcaaattcaatgcaaatatttcatgtcccaatgctcacaattactttctttcattgccaaatttgctcaaacaggtgaaaagcggtgataaatatgttgtttaa

SEQ ID NO: 60902 - DNA, 1062 bp, Heterodera glycines
agcaaaaagaaaatggcgaggcaaccgcagaaacgacgacaaaaacagcaataaccccaacaatttctgaacaacaaacaactggttcttcttcaattgctgctgttcaatcaattttggtggtaaaaaatggttaattaattgcaaaattttctgaaaaacacacaacaaaggcaaagaaaaagagaaaaaaatgctggaggcctagagattaggctagaaaattttttggaattgttcgaaatttcatgataaattatatatatacattgaaaatttttggcttaattttcagaccgatgccccaacaattgtgccaacaagttcaagcagttcagcatcaccaccaccaccaccacaaacaacacaatcgcccgtaatttcatttatgacattgatgaacaaagaagaaaacgccaacattaaacatggggaggagaaagtgagaaaattaatttgattaaaaaggagattaaataaattttctttttaaagaatgtattaatttaaattttatttgaaatattaaattaaaataaaagaattttttgtaaatatattttttcaatatatttttcattgacgaaaacttattaaatggaaatgtttttaaatcaaatttatactatttttcaaaatttataattttttacatttcattaattttgcattttttcaataaaattattttaaaactttcaaattctttgttgtatttaataaaatcacttttcatttacactttattattaattctgctctttttttcattatttaataaaataatcgtcaaaattttagggattaaaattagaagaaaatagcggacaaattgcagctgagctaaaggcatttgaagaagcacaaagtcaacttggcaatataagtaaaaaattaaattaatttaaaattattaaaaaaaatttgttttttttcaaaaaaggtccaattggcattgggccagctcggcttcacccaaaacagctgaatgaagaggcgacgcgtcaatatggcgccaaaacaattgtctaattttctgaaatatttgttaaaaataggaaa

SEQ ID NO: 60903 - DNA, 378 bp, Heterodera glycines
atgttgttatttttgctccaaaacgacgttcagacccactttttggagttcgaacaaatttcatttgttattttcgctcacagagcacttgtaagacctcagaaaagagtttaaagacttgtaaattgattgacagctctggattgctgaaaataacgagttcgaacaaaaggtcgaaaagtcgaacattgttcgaactcgttattttcgttcacagagcacttgtaagacctcagaaaagagtttaaagacttgcaaattgattgacagctctggattgctgaaaataacgagttcgaacaaaaggtcgaaaagtcgaacattgttcgaactctacaaaaatgatcaggattaggtctaaaatctgaattaaataaa

SEQ ID NO: 60904 - DNA, 412 bp, Heterodera glycines
atgaatcgttttgaccaaaatgatttcactataacttctgttcatcaaatgcgcaatcgccctcggaacacaattggagaaattgcggaagtgagttttgcgccacttgaagaagtagaacggcccgaccgcgtgcttgagcgtcttgtgcgacggttgtttgatcgagtgcttgatgggcgttcggcacctatgctaatcgggcttcaattacacccaccgacctttgaaaacccatttacaattccgcttcgtcctcccgagcagaacaatcccgccgcaattgccgatttaattcaaagacttaacgatcaatctgccgctggcatagatctaacagctggcacaactgtgacaaaagtacttgcggtatggccaatgcaagcagatcagagcgacgctggaagatcag

SEQ ID NO: 60905 - DNA, 773 bp, Heterodera glycines
atggtcgggatcgggatggcattccttctcgccataatgggatgcatatgcccaattctcggacgattttggtcgggagcagcagctcttggcaaagcaattgcatggggagcaaagtaccccattcgtctcttcaattgggcgaccggaagacaaatttcgccgccaacagcagcacaagtcgagattaagctgaagagaggagcgagaaaagcgcgcacgagagttcgagagctacagcaacagcttcaattgtcacgacgggcccgagcagccgcgcacgcatggagacaaccgaaacggaaccaattgacagtccgaggaacagtcgcggcggggctcctcccgcttcttctcctaattggcaccacattcgcctcaaagccgctctcggtcactgtccgatcggaggactgtgcccgaacggccaaaggacttcaatgtgccggaactgccaccacaatcatcaccttactgccagccgatcaggtcaattcgtttgtgatcagaacgcagcaggacgagctcctggggacggttcgactcaggttggcctcgatcacaatggtttgtgtccccaaaacggagagttggctccgatcatacacaatctcgactgtggcagtgaaaaggtgcccatcagctgggtcgtgccgcgacgacaactgcagcacaatgaacggtcgggtgatggtccccgaactcaacgaactcaatcaccggcctggccattcaatgtgcatgagcagcacaagcttctgggcagtgtgcct

SEQ ID NO: 60906 - DNA, 399 bp, Heterodera glycines
cggtagaacaggcacgaagctgatggatgcccacaggcacactgcccagaagcttgtgctgctcatgcacattgaatggccaggccggtgattgagttcgttgagttcggggaccatcacccgaccgttcattgtgctgcagttgtcgtcgcggcacgacccagctgatgggcaccttttcactgccacagtcgagattgtgtatgatcggagccaactctccgttttggggacacaaaccattgtgatcgaggccaacctgagtcgaaccgtccccaggagctcgtcctgctgcgttctgatcacaaacgaattgacctgatcggctggcagtaaggtgatgattgtggtggcagttccggcacattgaagtcctttggccgttcgggcacagtcctc

SEQ ID NO: 60907 - DNA, 1540 bp, Heterodera glycines
ggaatttctgccgatcctggtttcttcctctcaacattcacaatggaaagttggagtttgagttggacagcggtgcggacgtcacagtgattgacgagatcgactggaaacacattggaaagccaaaattggaaccatcccaaggattggttgcctatggcgggaaatccattgcgggcattttaggaaaggcaaaagtgaaactgacgcacgaaggaagaacgactgagtccaatattcatgtcataaatggtaagcacaaaaatttgtgcggccgcgatttgatcatgggactgaaaatcgatctgaaccgagctttcggaattccgacaattcgtgccgttgaaaacaaaaaggaattggaagcatgtttggcccaatatccggaggttttccaggacggagtcggacgatgcaaaaagatggcgtcattgaaattcaaggagggatgccaaccgaagcgatgcaagccgagaccggtgccattttcacttcggaatgaagttgaaaaagttttggaccaatggcaggcggagaaaatcatcgagccagtggcaaccagtgaatgggccactccgctggtcattatgccaaaggcaaatggcaagctgcggttgtgctttgactataaggtcacggtaaatccttgggttggatgtacaccaataccctcttccacgccccgaggagctgttcagtatcttgaatggtgtcgaaaaattcacgaaaatcgatttgaaagatgcatatctgcaacttttgcttgacgaaaaagccaaaagttgtctcacaatttgcacgcacaaaggacttttccacttcgctcgattgccattcggagttgcttcggcacccgcaatttttcagcaagtaatggaagaagttctgcagggcattgatggcgtggcggtttatctggctgatattctgatcacagcagccactgatcagcaacacgtcaaaagaagcgaccaggttcttaaacggttgtctgagaacggacttagagtcaagcgtgaaaaatgtgagttcctcaaaccggaaatcgaatatttgggacacattgtggacaaaaaaggtctgcatgcgtcacctggcaaaatcgaggcaattttgaaaatgccagagccgaaaaatctgaaagagttgcatttctgggaatggtgaactattatggaaaatttgtgccatccctggcaacgctttcagaaccgctcaatgaattgaggcgaaatgatgccaaatggacatggacaaagagccaacaaaaggcattcgataggatcaaaaatgttttgacatcaaccaaagttttggtccattatgacccgcaaaaaccactttttctggccgctgacgcatccgactatggagttggagcggtcatttttcacaaagatgaaaaaggaaaagttggtgtgattgcgtatgcctcccgaacgctaaattctttggagcgcaattactcgcagattgaaaaagaagcgagggcaatcattttcggagtcgacaaattcaaacaatacttgtacggtcgaaa

SEQ ID NO: 60908 - DNA, 261 bp, Heterodera glycines
atggactctacaaaaccgatcgtgtttttgaaggtcagcctaaaaggaaagccggcaacagttgtagggcgagtcggtgagttgtaagctcttctctatgaatgattaaaaatggcttatcaaaaattctgggtgattgtttgtattttttcagatacgaagacgtccgttttgtcagaagcttttgcctctaaaattggtgacattgattcgaacctgcgtggccgtgaacgaccccaactgccgatgtgcccgttgtag

SEQ ID NO: 60909 - DNA, 606 bp, Heterodera glycines
gatcatcaaatgattatcaaccgaataatggtcaactgattaataactctgaccaaggaaaaattaacgggcaagtgggaaccgttgttggtcacgaccaacaaggagcaggtcattaattaaattaaaattatcattttattaaattaatttaagcatctcttactaatgaccaaattaaccaactaattactcaacttcaagcaaaacaagcagcaggtaattttggtcaaatgttcttttaaattaactgaatttattttcaattttgtttaggcttacccaacactaatgaccaaccatcaatcactggtcagacaaacaaaggtttattcgcatataaatcatttcgaatattcaaatcacattttaaataaaattaaaatttccagggaagggccgtccccgcgttaaaattacaaaaactgtggccgaaattttcctggacgagcaagagacaacgaacgaagcgataatggcaaatccatcaaataaataattgtttttcattgctgtttattgaacaagcattgttgtgagaggaagcggatttgttataaaaaatatccgaaaatatgaaaacatttttattacccgaatcgcaga

SEQ ID NO: 60910 - DNA, 912 bp, Heterodera glycines
atgattgaaattgttataatttttctggcgaagtctatcaaagagctgagcagaagggcaccgatgggaaggtatgcgtcatttcttgctggacttgagccaccgcggaaagctaagaaataccaagcggctgatgagcgcctcttcaatttggtgcagaattacatcccggtgaacccgaacaatgaaaatgatcacaattaccacataaatccaaattttcatattattttagaatttctccgtggaatttcgcgcaattatcatatgaacccataaattgtttccatttcttcattttgttaaatttattatatttaacgaaaaatttcatttttttataatttttacaatttcttcctgcctttttttcatttttggcttggcgccaaaacgtcggcgccaaatcgtcggcgccaaaacgacctggtcccctgtcaaaaatgactggttttttccaccttagtttttgggttcccttatcactagagaccggcgggagtttacgggattcccgctcccggaaaacttcaaactcccgctcccgtaaattttaccgaaaaaacgggagtaaaattacactggtaagaattgaatttttttggcaaaatgaataatttttgatcgaaaaactgttaaatatatagccaaaatatcaaaaaaaaaattttccggcggcgcctatcggcaccacagggcctttaaaatccttaattttcttaaaaaatttgttcaaaaaattgcaaaaattggtcatttttggacaaaatctgacactgtattgtattcaaatatcaattttttcccggcggcgcctaccggcaccgccggcctccttcctcctccctggtcctcaaagttttttttcaaaaaatacggcgcaaaaaattgaaaatttaggacagtaataaa

SEQ ID NO: 60911 - DNA, 1000 bp, Heterodera glycines
atgccaaaaaaagcgaatgaagcggagaaagaagcggatttaaagcctaaaaaagcgaataaagcggagaagggatggacgaatggagtgaaggaaattgcgaatgcgatatttgaaaaaagtaaaaatgttttgtacccaaagaagaaaatttatttcgcatttggcgaaccgttcaatgccacggcatttcatggtgataaagaattgaaaatttacactgaattgaaggcagatcaaaagaatggaaaattttatgtggaagttgacatgacagattttgatcaatttcaaaatcaacccaaagcgatgatcgatttcaaaaatgccaaaggattggtaagtaatataaaaacaactttgattatacctttgttcatatttagtagtgttttctctttattttttaaattgactcaaaaaccgcgaaagtacttagaaatgtcaatttttttggttaaatcaaatctaaaaaatagcaaaaatttgttaggaaaagcctcaaaaattgattttttaatttatagaacttttaaacgatttttaagcgaactagaaaattttgtgaaaaaaagtctcgggtttttgggtaacggtgtcgaattgctcgggaaattttttgttctcgaatggcaagcactatatttagccatcttatttttatttatttgaaggaatttatgtaataaaatttaaactgaaatttttattccagcgattcgcaggaattttactgaaagttttgctttaaaatgataataaaataatcgcagaaattaataaatatacaaatttttatcagatttatggtggagctacagtacaggtgttgcataacgttgcagtcttggatttttcggatgaagttagaaactattttcttaatgggtctggccagctctttttccgtaatgagtcaactggtcaacaatattccgtcgatgccaatggtgattatgacattgtgcataacgaaggacctttccgtggcttcggatga

SEQ ID NO: 60912 - DNA, 80 bp, Heterodera glycines; identical to SEQ ID NO: 51817

SEQ ID NO: 60913 - DNA, 117 bp, Heterodera glycines
atgaatgacctatgggcaaattgcctttgtttcgaatggacaattggtcattttcgccctttggtgagtttggaggtaatgggaaaagcagcagcagaagaatatggaaattgtaaa

SEQ ID NO: 60914 - DNA, 607 bp, Heterodera glycines
atgtttttcactggcattgatcgactgattgcaattgctttttgggaattgtataaaaatcaataattcctatcgctaattacagtaacttttttagtcacgagtatttggcactgttaactgttatttctgtgtcctatgctgtctgcgaatctgttgaggtgtaccaaaaagcaattatgcatggtgatcagatgaccaccggatcatatttagatttcatgaaagtaattatcgtattgggacatttataaattccgccaggggtaaaaatgaaaaataaaattatacataaggtaatatattcaaaatcttggtaatatttacccgaaataaaaaaatcaataaaaaaaaaatcttcaaatatttacaaaatataattaaaaatgaaagaaagaattcactaatttttgaattttattttgaaattatcccatggcggcggcgcaatttatgaaataccctagcatttatattttttacaaaatataattatttatatttttttagattaaatcattttcaaacataataaatgttttgcttatttcaatgacttgcatcatttatgtttttcttggaattgtggtaaattttcaaaagtcag

SEQ ID NO: 60915 - DNA, 1126 bp, Heterodera glycines
atgtttttcactggcattgatcgactgattggaattgctttttcggaattgtataaaaattaataattcctatcattaattacagtaattttcagtcacgataatcttcaaaagcgactgtatttggcattgttaacaattctttctgtggtctatggtttttgcttctctgttccggtgtaccaaaatgcaactagggatggtgatcagatgaccaccggatcatattttgattttttaaaggttcttgtgtgatcctgatccgataataattaaatatttctctgctttttagagcgcacctatttttgacaaattaagttttttgattacttcaattacttgcattatttatctgcttcttggaattgccgtacgtataaaagcttcaggtaaatcagtcgttcattaagcatttctccggaaaatggtcataaaagcagaccaggattttttgtgccattggcaaaaaaatttcggcatcttttttcttaaaatttgataagttttctaatttttgcaatttttgagttaattctctttttaaaacaatgattcacttgtgcaacattgctattaattacctaattaattgatttttataggtttgccgtccgccgattcgttcaatcgtcgcacttttcgcgcacttttttgcatcatttctgttaatattggcggctatttcttttcattaatttgttacattcttttaattcccaaaatttcgtctccgatcactgcgtggttttgcaatgtaattaccgcaattccaatgaacattggtgcagcgtcaggcggactcattttatattttaccaggtatttttaattgaaaaaatatattaaaaaaaattaatttcaattttagtacggaatatcggcaagcattccaaacagcgtttccatttgttttcaaacaaatttcgaatgtaaatcaagtaattccattgcaaaatggggctcaattaggcaccacacaatgttgaatgatgtcactcagcaaatacaattgccctatcaggtccatataaatggcactgaaattgatacagcttttattgatctgtgaccaagaatcacatcaatttttaaattcttgtatttattagactcatttcttgta

SEQ ID NO: 60916 - DNA, 435 bp, Heterodera glycines
atgacttttttattttttatgaataaacaatacaacgctttttctggacaaaatttcattgagtaccgcttggcagcaatgattttattcattcctgtgattggacttggtatttgcacggagcaaattattaaataaacattttaaatacatttaaattcaggggcaattgttccgacgatgtttttcactggcattgatcgactgattggaattgctttttcggaattgtatacaaattaataattcctatcattaattacagtaattttcagtcacgataatcttcaaaagcgactgtatttggcattgttaacaattctttctgtggtctatggtttttgcttctctgttccggtgtaccaaaatgcaactagggatggtgatcagatgaccaccggatcatattttgattttttaaaggttcttgtgtga

SEQ ID NO: 60917 - DNA, 809 bp, Heterodera glycines
atgaataaaatcattgctgccaagcggtactcaatgaaattttgtccagaaaaagcgttgtattgtttattcataaaaaataaaaaagtcatcagaagggcgaaaaccacttactctgacgactattccggtaaatgtgtcgtagagtaagtgacaaaatatatggatgatcacaggaattaaaaaaagacaaaaatatgtgaaaataaataataaataaattgaggtcaaagtcaaatgaggtcgaaataccaaatcacttagaaatttgttacattcttgctttcccggtcttacatattaccctagtgaactttaagttttattttaaattgatttagagaatttgtttttattagttctttatcgagttgattccacaattttgttaccctcccagcaaatggaatgaattttttgcccagtttgtattttgtgttaaatctataaaaggggatgttaaagcgtgctgatggattaaaaatagaaaatagtttcagatctgttcggccataaacaattttatgcgccatgaacagatcaaatagctttcgcctattctcaagtgttggcagttgcaggtattctaatcgattttggtatggaattggcggaaggctacatttaaaaaatactcttttggtgaaatattaaaaagtagcaatgaaaagaaaacgattcgaataatcccaacaatacacctgccaattaattaatgaaattacaccttttcttcaaatcaactaaatgaattataaaaattgaactcaaaaagggcaaacttcaagggattttttgttcaaattaaa

SEQ ID NO: 60918 - DNA, 879 bp, Heterodera glycines
atgaatgacaataacgaagtatgcgattatttgaacatcaccacaaccaccaattccgattcaaataatttaacggcaaaatgtgccgttttggaagcgtcgcaaaatgtgaccattttcgagtggtttttcagctcaatgacgcaccaatttgtggtggcaaaatgcgcttatcaattcaaagtggcgcaagttgcggtaaaattagacatttttaattatacgggtaattaattaattacaaatttcagtcggatttttatcatgacaatgtgctcattttctatgagaaatatccaattatttctccagtgaccgcatggattgtgttgccaaacattttcacaccgatttcgatcattttcaatctttccctcattttggtcacaattacaacaatgtaattaaaatttttaattagttttttcaatatttttcgtttcaggagagatcgaaaagtttgtaattggctgatcgccttcgattcgctgtgccaactcttcgttgtcgcaactttcggcgtcaatttggtcggcgtcattttccagcacagtacgattgactactgtatctgtcttgccactctcatggccgctaccgtagcatcatatgactcaattatggcaatgtttctgatctctgtggagcgattgttgatcgttctgtgtccaatcaggtgactctccttatatatggaatatttattttatatatatatcttttttagaatgaattcgatcaaaaaatcgacagtttgccaatgttcacttctttccgtcattctatgcaccctttttggcttggtaatgaatttggaagtgtttaatatttggacaattattaacatcccttgcgacaggtaattaacatttggtttaa

SEQ ID NO: 60919 - DNA, 1166 bp, Heterodera glycines
  unsure (1)..(1166): unsure at all n locations
atggcatcaaaaacaccgacggaggaagaaattggagaagagacaaaaaagagagaggaaaaacaggaagaagaaaggaggaaaaggaggaggaatatgaggaaaacagcgggaggaatacgatacatgagaaacatcgccatccaagtaaaaaaaaaagagagtaattaaaggaaaaatgggttattagaggtaatgaattaattaccaggtcgagagcgacacaaaagtggccgacaaatacgccgattttacatgccaattcgacaatgacaacaaaggagggacaaagtcggatgagaaggaaaagcagcaaaagacgatgatggacaaatggacacagcacaaaagcagtgaagcgaatttatggcaaaatatttggcaaagtgtggagaaagaaaatggccaaaaaaggaagggaatggcaacagaggaagaagatgaagaagaaggtgaagcagaaaaggaggagaaagtgggcgaagagagcagcagaacagagaaagaaaggagcgaacagacgcaatcggaattcaatttgtatgttcataaattcaaaaattgaaatgatggtcgagattctcgactgtccctccatggctttacattttccaacgccttgcagaaaaagaaaatgcaagcgaagccaaacggaacgtcttttgctggtcagtcgtccggctcagactcaattgtcgagcacatttcgaagaagtgacggggacggaagagaagagggaaaagccgagggagagagtgaggcacaaatcgaaccccattttgagagagaaaaagagagggaggagttgaagagagtgttcggactggagaatgaaaacatcgaggaattgaggcagagagtgatacaaatgaaggaaaagagaagggaagaccgacagagacgcagaagggaagacggacagagacagagcgaagagagtggggggacagagaggaagagaaacacatcatcggaagaggaagatgagctggatgaggaggagaaggagattctaatcaacgagattaagaagatgaagagcaggaggagaagagtggaggagcagagaaaaaaagtggaagagggaaaggtagaaaagggaacggaagaagaggaagaggaggagaaagacgaagaggaggaaaaggnaacgnaagaagaccat

SEQ ID NO: 60920 - DNA, 195 bp, Heterodera glycines
  unsure (1)..(195): unsure at all n locations
ttcaagtgtccgtttgggggtactcaaacnaattatggggagcaaaaatccaacgcagaattaaagtacaggctatagggaagctattccggaaggattcggtctccccataaatctgggcgcatcggttcggggggactgccccgaaaacaaaaaaatcgattttttcaagtgtccgtttggggtactcaaaca

SEQ ID NO: 60921 - DNA, 1496 bp, Heterodera glycines
atgttggaggacgctcagaaaaatggcaccaacatttcgctcaagaaaattgaggaggaacttcgggcaattcagcttgtcaaggagagcgccctttcgctggtcaacccaccaattgccacaaacgccattcgcacaaggccacggcaatggaccgacccagcgcaaagacaaagcggcggctccaatcaaaggcaaactccaaatgccaattcaagcggaaagccaacgcgtggtcaacggacgcatccatgtggatcatgtggcaaaattgaccactggcgctccgattgctcattcaaggacgtcacttgcctcaagtgcaacaaaaaagggcacatttcaacaatttgccggtcaaagaagacaaaggcaccaccgaacagccaccggtcattccacactgtcaaaatcgacgcaaattgcttacatgtcggcacgactcaaggacgatggtggaaattgtgcattttgattaatggaaggcaaacttccatgaatggcgacaccggcgctcaagccacaattatttcattgcaaacatggcgagagttgggagaaccggaactgactccatccgatatcgatgccaaaaactgcaatgatcagccattctccttacttggcaaattccaatgcactgtccaatttgccgacaaaccaccgcaaattctgatcgcttatgtgagcggagaagtcggacataatttattgggattgccgtggatcgaagctttggagatcattccccgccaaattttatttccgaccaacaaatcggatcaggcgacaaaaatgatcgacaatttttcggcagtgaagccgccaaacaaatcgatcaataatgtgtcaacgcttaaagcggtactccaaaaagatttccctgaagtctttgaagaaggactgggacactgctcaaaggcaaaggcgcatctcattttgcggtctgatgcaaagcctgtattttgccgagctcgcccaattccacatggcgccatggaagctgtgaatgccgaattggatcgccttcttcaaattggcgcaattaagccaatcgatttcagtcattgggcagcgcctatcttagcagtaaaaaagaagaacggcaaaacgagagtctgcatcgacttctcaactggcctcaacaacgcactggaattgaaccgccatccattgccaaggccggacgacatttacgcctcactgaatggcgcaaaatttttctcaaatttggatttacgcgatgcgtatttgcaaatggaaatggatgaagaatccaagcaattgtgtgcgatcaacacacatcgagggcttttccaatgccaacgcctgccgttcggagtcaaatcggcaccggcaatatttcagcatctgatggaccaaatttgtgccggaatcccaggagttttcgcgtacctcgacgatggactaatcgccacgaaaaccctggagcagcacatcacggcactttacactctttttgggcgcataaaaga

SEQ ID NO: 60922 - DNA, 960 bp, Heterodera glycines
gcagactctcgttttgccgttcttcttttttactgctaagataggcgctgcccaatgactgaaatcgattggcttaattgcgccaatttgaagaaggcgatccaattcggcattcacagcttccatggcgccatgtggaattgggcgagctcggcaaaatacaggctttgcatcagaccgcaaaatgagatgcgcctttgcctttgagcagtgtcccagtccttcttcaaagacttcagggaaatctttttggagtaccgctttaagcgttgacacattattgatcgatttgtttggcggcttcactgccgaaaaattgtcgatcatttttgtcgcctgatccgatttgttggtcggaaataaaatttggcggggaatgatctccaaagcttcgatccacggcaatcccaataaattatgtccgacttctccgctcacataagcgatcagaatttgcggtggtttgtcggcaaattggacagtgcattggaatttgccaagtaaggagaatggctgatcattgcagtttttggcatcgatatcggatggagtcagttccggttctcccaactctcgccatgtttgcaatgaaataattgtggcttgagcgccggtgtcgccattcatggaagtttgccttccattaatcaaaatgcacaatttccaccatcgtccttgagtcgtgccgacatgtaagcaatttgcgtcgattttgacagtgtggaatgaccggtggctgttcggtggtgcctttgtcttctttgaccggcaaattgttgaaatgtgcccttttttgttgcacttgaggcaagtgacgtccttgaatgagcaatcggagcgccagtggtcaattttgccacatgatccacatggatgcgtccgttgaccacgcgttggctttccgcttgaattggcatttggagtttgcctttgattggagccgccgctttgtctttgcgc

SEQ ID NO: 60923 - DNA, 830 bp, Heterodera glycines
atgcactacaattcaaaagcgttcgcaaaaaatgacaagtaataatttaaaaataaattaaatttattaaaatttcattttttaggcttgaaacaatcgaaacgattgacaaaaactatcagcaaacaatgggatggcgcctgggcctttcatttttggacgccaaagcgattaatcaccgctattgcgaacgtaattaaattaattaatatttgtcaataaggcgtccattttgatttcaaaaatgaaagaaattgacaaaaaatgggaaaataatattaatttggatatcaatagttttgtgcacaaaaatacaaaatactaataataaattatttagttttttaagtagcgagtttgaccatttttgattgaaaattctttaattgatgaaaaattatttagggaaatatatttttgtaatttaaaatattttttagtcgtcttatttttggtgctgttaccacttcgacaagaaaatttaaaaattatcaaagttttctagcaaaagttttatgtatattactaggtccaaattatttttaaaatatttttggtttaattgacccaatttcatatgaaatttcacattatattttacctacaagaaataaacatttaaattatttattaattatttttatttattagatgtttgtgacgactatccatggcattcgccggattgtcgaaataacggctacgcaaacccgaacaaatgtacggaatgtttatgtcctgatggctatgcggcaccgtactgtgacagtgttgagattggccatgtcaatggagaagcgggtaattaattaatttgacaattaattaaa

SEQ ID NO: 60924 - DNA, 146 bp, Heterodera glycines
atggctatctcttttttgaggaaattttctatgcaacaaacgctctcgaacatgaaacgaagtgcggtgcgccatggccattttatttttcaaataatttttatatttaatagatattccagaaaaatggctatctctttttttga

SEQ ID NO: 60925 - DNA, 146 bp, Heterodera glycines; identical to SEQ ID NO: 56264

SEQ ID NO: 60926 - DNA, 146 bp, Heterodera glycines; identical to SEQ ID NO: 56264

SEQ ID NO: 60927 - DNA, 146 bp, Heterodera glycines; identical to SEQ ID NO: 56264

SEQ ID NO: 60928 - DNA, 66 bp, Heterodera glycines; identical to SEQ ID NO: 59916

SEQ ID NO: 60929 - DNA, 657 bp, Heterodera glycines
caggacaaaagcagcaacagtgcttctggttcgtctggtgttcagcagcagggctcaagtggaaatgggagtggtggcaatggtcctggcgggtcgtcatcggcaaaaagtgttgggaatggcgtcgccgccacaccgaacacacaccatggccacgggggacagaggtacggttaattgaacaaatgaaaatagggaaaaatgccgataaacttggggcgtataaattggattggagtttgcttttacaatctgttttcagttcgtcaggaagaccgcaccaccacacaaatcagcagcctcagagttcgtcgagtgtgcaacaggacgccaggtttttttacgcctattatactatttaaacaaaatccttttcatttatgggaacgtttcactttttgcgctgaatggacttacaaaacgctttcctttggtttagggctcagcgtgccaacgcctttctgtccacaattgtgccgcggatgcagcaaatgctcggctcgaccaccggcgggggcagtggcggaagcggtggcacaacgactaccgctgcgctcgacctgaacattgcgggcggagctgccggactcatcgacgccacagcaatgcccaccttccatttctcgcacacgcatggacaccaccagcacgtgtcaa

SEQ ID NO: 60930 - DNA, 855 bp, Heterodera glycines
  unsure (1)..(855): unsure at all n locations
gtgcaaaacgacatttacaatgactggacgcatatttgtcaaaaagtgagcctctgaaaagcctttgctttatccgtcgtntaagctcaaactgaccttctacaattacaagtcgtctattgagaaatacaacagagaaacttttccnggtaattgctttttattttgttatatcaattaattaggtcattaagttctaatttcatttctatttttgacagacatacggcggtgaaaattctatttgcgaactttcaacggcaagcgatggcaactttttggaggttctcaatatttccatgaacagtttcctggcgtaccattctgaccgccgatttgaaaccaccgggcaacaggtaaccaacgaaccaatcgatttgtcgctattatacaatacaccgaccaaattttgaattatttacatgtcgaattaattttaagattattttcttgaccccgggcagcggtgtttttaacgtggacagggaaatggtgaatttgaccaaacaacggatcattgacatgggtaacactttgggttactttctttttttaaattttggttcatttccgtcggttcctttttcagggatttccctggacatcgtatgcctcggggaacagcccctccacgccgttccgttgttcgtcttcaaacacaaatcgccccaacaaagcgacgactatttcataccgtaccaattggatttacttgctttctcctttaatttatcttttttattattaatttcagtcattggatgaactattcctatttcaatatgccccgaaattcgtccatttcgtccaaattcaaaactcgcattaattttccagaagacattgttaaggtgc

SEQ ID NO: 60931 - DNA, 673 bp, Heterodera glycines
atgatcaaagcgggtgagacagttgaattcggcttgtattctctgtgttccattgtgattagaattctcaaaaaacgggaaaaaagtgccgagaagtaatgccaattttatgtttttatttattagtaaaatatgaatgttttttttttttgtttttagtctgtgcccaccgatcagcagtttgccagacgaccaatttaatgttgaaattggtgagaaaaaggtgaaaaaataagtaaaatttaattttaaatgatcaggaaatcttaacaattagattttattaatagggttttacatatgaaacttagatacaaaatttagctgataaatttttttgtcaataatattaacataactttattaaaaaaacaaaaaattgtcgatgttataaaaagaaaattattattttcaaaaataaaagacattattttattaaatgtaacttgtaaaaaagaaaaaaagttttttaaacttttcagatcgatctgtcctcccattttcttatgtccgtttcgccggtgatcaatcgaatgctcagcatggagatgaaggaaaagcagcagcgaacgctcactttggacgagttgggcatcgacatggagcagttcatggaatttgtggaggccatctcaaccacagctatccacaagccaattctaccaaatcgtaa

SEQ ID NO: 60932 - DNA, 144 bp, Heterodera glycines
atggctatctctttttttgagaaattttctatgcaacaaacgctctcgaacatgaacgaagtgcggtgcgccatggccattttattttttcaataatttttatattaatagatattccagaaaaatggctatctctttttttga

SEQ ID NO: 60933 - DNA, 146 bp, Heterodera glycines; identical to SEQ ID NO: 56264

SEQ ID NO: 60934 - DNA, 146 bp, Heterodera glycines; identical to SEQ ID NO: 56264

SEQ ID NO: 60935 - DNA, 146 bp, Heterodera glycines; identical to SEQ ID NO: 56264

SEQ ID NO: 60936 - DNA, 1431 bp, Heterodera glycines
aggtgctccagctggagccagacacaaatgtggaggatgcgcgcaagaagtacaagaagttgtccctgctgatccatccggacaaaaatccgaactgtcgggagagggcggaacgcgcatttgacgcactgaaaaaggtacgcaccaaatccttccatctgacatttctcgcaatcagaaaaatgactcatggagatggattgggttgtttcctggctcccaatactctccaagtaccaccaattaagttgtatgtgggcaaagttcctttcatactttatcagcatttctaagacaattattgatattcaattattactaatttataagtgattggagaattaatggataaaacaaaccaaaaactctaaatcgtattcatttttcttaatctctgttccctttcccaattattcagtcattgcattttgccttatttgttagcaaagtttaattggttaaggatgaaaggagttgtttttctccaatcccctatataatttcaacaaaaaagtaaaaaattcggaaatgattttacaagtttcggtgaaattcttttcgttctataggcaatcgccaccgtcgaagacccggacgaattgtcacgctgccgagacatgtacgaggaggccaaagcgcggctggcagtgcaaatcagcgagaagaagcgcaaaatgcgaaaggtttcccatttttatctcaaaaatcgaaattccatttaaaatgtattcatttttaggatggaaaagctgacgccattgaagaagaaacaccacagggctacgcacgtgcactttggatcaccgtgacaaaggttttttctcatttttaactatattgtgggtcaattgaaatgttcaaaaacccagtatatcgtttgacccaaaaaaggctttgggatgagcaaaaaattgccaaaaaatgaccatttctatcctatcgaaaccacgaatatgacatccatttcggtaaattcgaaccacggtacccgaattcaaacaagaaatcgaagatttaaaattgaaggtttaacttaatgtttgaattcgggcacggggttcgaaatttgtcgaaatgggtgtcgtatcggattgctttgtcaattatttgaaattgcgatatacaaaatgccagaatcagatttcattttttatttgaaaagggatacaccacattttgcaggtgtttgccgaccgggagaagaagcgacggacgctggaggagcgggccaacgaggagaagcggcggttggccgagtcggtgcaggaggcggcggagaagcgcaagttggaggaggagtacaagaagaactatgaggagagccgggacgagcggcgcggctcgtggcgcgactttgtgaagaaaaaggagcgcaaattggagcccttccgtggcgccaacttcaaaccgcccgcccccaggttggagacg

SEQ ID NO: 60937 - DNA, 306 bp, Heterodera glycines
aaaattttatcttttaaattaatgctaataaaattgaatggaaagagacatttattccatccagggattttgctgacgtcctcaaaaatttcggcaatcgggattccaagcctaaaaatgtcggaatctgaaatcggcattctggcatttttttttattcttcgatttggcgcagtttatgaaaaaggttttgatttgatgttcctgctgatttcgacgttggatttgcttcaaaataaaaaagtttttaacacgaatgttttcaaagaaatagtacataaaattgccattagagaaacaaaggaa

SEQ ID NO: 60938 - DNA, 294 bp, Heterodera glycines
  unsure (1)..(294): unsure at all n locations
atgtcggagcacaaaaaatgtgccgccgccaccattttggcacttttcttatttttggcgttttgttcatattcaacgacggcacaacaacagcaacaacatcaaaagcagacaccgccggctgaagccgaagcagcggaagaggaggatgaaaatgccgctgccgcttcctacgacgcgccggtagtgacagtggagcgggaagagtcgctgcccaagccaccaccggtcgcgcacagtaacgacgacggcacgccgngcaccgtacactcactggacggtagagtacagtaa

SEQ ID NO: 60939 - DNA, 3975 bp, Heterodera glycines
atgagtcatgcattccgtgtgccaccgccccatcgcccacagtgagaatttctccccattcattagggaatcattttgaagattttgtttatctttttcagagcaaagaggcatatcttctgtactacaaactgaccaactcaactaactcacaggccaagtgatattaatattattaatttattattattattatcattattattatttgtacctgtgttctgttcccgataccatccgattgtttctttaaaattaattacccatagttttttttaacctttttttagtcgccagtaatatttaaagacagcgccccctaatgatattaaaacaaaattttgttcaaataaccacttcttaaatgaaatgacaaaaatcttctttaaaatgtgatgaatttaattgagtgactcaaaaattgcattatttctttaaaattgcagaaacgaaggccagggcggcaaaaacgacgatgacgacgaagatcaatctgagatggaaatctttaacagacaaatcaccgatatttgccaaatgttgcttgctcatcatcacaatgaagttgagaaagttggccggctttgcgcacaaatgggcgaagcaattcgccaagtattggccatccaacaacaaatcccaaatcccgacgaagttgaacaacaacatggggaggacaatggcagggacaacagaaacaattgttctttcgacgaagatgaaagtgatggcgaaagtgatgaccccacggtggagcatccgttgccagccgctcgtcgtgtgcttcgtcgtctcaaattgcccacaattcttgacattagtgccgcaaccgaagcagatgtgcaagaatatggcacaaaattaagtgacaccattaaacaaatcaccaaattacgcgttcaaaacggcggagcactgacaagcgaattggaattgcggagcaaacagaaacaagcacaaaatctgctgcaacaaattggcaatttaatgccacaattggtcgttgaagaagaggaagtggcggaaatactcaatttggccgaacaaagcgccgatcgcttttccattggatttctgaacaaggaacagaaaaagcaattcgaagaagcaattcgacaagcaaaaaaggtgtgcaacacaggggaatcaacgtcgggagggagcagtttgacccccccccccccccctcttaaatttccttggctcccggacaatccatcaatggtaaatctctcagcgcaataattattttgtctggtaaatcttaagaaatatttaaataaaaaagtattgagtagctaaaaaagatgaaaaaatccttggaagatttttttaataaagtatttccttataatgtcattctaaaatatttttatcaattgtctgaaaaaaaatttttaccgacggattgaccactgagcgattgtccgaatacctttcttccttcaccatcagtcgagttaagcattttgaaaatgtagaaatccattgatcggctgagtcattaagtttaacaaataataatttgtcaaccaccacctgtaggctttcgagattctgttgaagcataatttggacagtttggtggacaaattttatgaggactgttacaaaaaactgcttcatgttggcaatgaaatattaaaacgagcaaaattgacgaaagagtttgaggccaatatgctaagtgcgcggatcattggactaaacatgcggatggagatggtgagttgagaagacatagatatagcttaacaaacaaaaaaatccaatgaatttttgccggtaatttatgaacatttcacttttttgggtgtgggaaattaacaaggcatgtgaaatggtaccttagacatatttaaacaataagccaaatgtgtggttttcaaagacccgggttttcttggaaaagtattaaaattagaagttcaacttttattaatattttttagttttcttttatttttttaaataatgaataaaaatattttttaaaattatttttgttcgctactgttatttttgggcctttaactttgagaaatgcaggacatgaacagctaaattgcctattcatttgacaggcgtcagaaactgcccacgctttgctgcagacactctcccacaaaacacgtgcggtccggcatttggtacatgaagcacagaaacagcttcacgacattatcactaatgaggcggcaaaagccaaagacgcggacgaaaagcccacgcaatcggcagacaccaccaacatggtgcttattatttagagaccggtgtaataaaaatttattttcgtggaaaaaattatactaaaatggcattattttttaaaaaatttaattttgcaatttacaggagaattccctggcaaaaattcaaccaccatatgcagaaaatgaggacttggcagcactttttgactttgattctcatgtcaaaaatgcatttttgggttttggattgtttaaatgtttggaattggataagtccgagttacgaaatgcctatgaatggctaacagaaaacagaaacaaaatcggaagtcgtcagcacattttgacgttgcaaaatgagtttgaagcaaaaatgttgaagtttcgtatgaacaaattgttgtggaaaatgaaaaggtgggtgatggaagaaagaattgttaaataatttgcaaaatttaaattcctttaaaaatttaaatgtaagaatttaaaatttcacatttttatggcttactttgccctacaatttttcttaacgaatttttcgtcggtttctatccacttttgattagtgattttcggattgtcatttttcgaaagtttgatttgaaaatttattaagatagaatttaaaaaatgataactaatttgaaaaatttaaaaaaaatgaattgaagtttgtctattcttttacgcttaaattgttgggaaaacattacaaaatactaaattaataatttgtacagggttgaaaatggtgaacatgacttttgcaagttggcagaaaaactggcgaatgatcggattcagacggaaaggaatttgaaagtcgaagcagaattgacaaagaaagcagcgatctctgcgcagaatttgggtctgccggttgttgaacacataaacggatatatcgacgcaattaatcgttcacaacaggtgaaaaaaagaaccgaaaaatgttgtgttcatgtactgtatgtattatgatgtacatacagtatgataacacaagagaactcaagaaaactcctgccttaacgatacaatttattagcgaacattagtggttttctttcatttgcgtttaaagaacctgaaaaattctggaaaaccctgtttctatttaaaaaacaggacagggctaaaaaactgctgattaattgaattgatcactaataaaactgtgcccccccccctctcctctctagagcttcgagcgtttgatgggaaaagaagtggtcagtgatgctgatcagttatcatttgaacaactcgtggacaaaatcatgaacgacggcggtttctatgccaccaccgaatgcatgggtaaaacaaatgatgatcaaaaagccaaattaattttaaaataattaatcgaattaaagggggatttttagcacataaaaaatattttttttttgaattttcgccataattttgtgtgttgccaaaattgttaagaaaaatgtataagcgtaaaaatgaaaaatttagtcggacataaaaaatcttttcttcgcgagatcacacaaatttttaatatttttacaattttttactttcaaaaatttatcgcaaaattatataaataattaaaaaaattttaaattttattctaaaaaatttacttttagaaatgtatgaaatttggctcttaaattaaacaaataccaaataattaattattttttaatcattctttatcgtttaaattattttaaatcccaacatttaatttaagaaagggaaaagctga

SEQ ID NO: 60940 - DNA, 244 bp, Heterodera glycines
atgcgcggtttgatgttgcaagtgtcgaccggcgaaggcaaatcatggattgtcgcgatgttagcagtgattctgcatacgtttggcaagaaggagccactggctgatcagcaggaaggggctcagagtgatcaggaaaaggaaaagcatggtcatggtgaaacaagcactgatcagacggagaaggaacctgcccatggtgcatcagacattgataaaacgaaggcggaagagtcccctcatg

SEQ ID NO: 60941 - DNA, 984 bp, Heterodera glycines
tcaattcacttttgtgcatcagcaatttggaggcacatttgtgcaaattttcactggtcatcgactcaatgcttttgctcagaattctcatgcacaaattgtcctggtcggcttttcactttgtgccctttctctgctttccgctgttaattcgttgtttgccccagggacctttgtttggtgccaaaaaaacggctgctcggctccggcttggccgtcaccggtgcccccgggggtccgtcgaccgaccccagccgaagggcccattcgagctgttctttgggcagttcgttcaagtgaatagcccggaggggagagagagagctcagcattgtttgctttcagaagggatggccaaaacagtacgaagaatagcagcagcaaacactttcttcgcgttgactacggcggctcttcgcgactgtccaaaagagtgcacatccgtcgctcgaggcacgaattggctaataaaggctggcttactcactgggccgttgattgatcgctcctctgatcagtcgaacgaatgcttttcctttgtttagctcagttgaaataccgcggccgaaacgatttagcagcggcgcgaaggaattgaggaaagaacggaacagaaaaaggtacgaaagtcatcggttgggcaatggcatttcgccgcttcagactcggcactgacacgagcagtgggtcctccaagtcgaagaagaccaactcctcctccacgtccagcgtccagaaacacttgcccaaatacatcaccaatcttttccgcgggcgcatgggcaccggtaggaggagaaatacgcttttctaccaaaagcactcattaacgatccgtgcaaacgacacgcccgaggcagtcgcgagtcgagcccagaaagtccgaccagcgggtcggaggcggttttggaattcacaaagaaattacaaaatgcgccgccaacgcgtcgcgaaacaatgcgaatggcgtacaaacagtcgggc

SEQ ID NO: 60942 - DNA, 660 bp, Heterodera glycines
atggccttaaatctgacctatcttttaaccctgagcttgtactgctccaactccatgcatgaagttggagctgtacaggtttgttgagaacccagagaccaaatctaaagccatattcggactcagcgtggtcaatttatttagtttaattaaattcggaatttccaaaaccacttttaaaacattttgttatttgatggtcttgaaaaatgccgtttttggagaccatttttagactcggccctccaataattcatttttgaagtaataaaatttttttacaatcatttattgcctaactttgctaatttcttgcagatttaaagctatccattgcctgccggttctcggcacagcaaagcactaatagggtgtttgattcacttcaaaaaataattcattacccaaaagttttttacaaccacttattgccaatctaatttcttgcagatttaaagccatccattgcctgccggttctcggcacagcaaagcactaatacggtgtttgactcacttcaaaaaataattcattacccaaaagttttttacaaccacatattgccaatctaatttcttgcagattgaaagccatccattgcataccggttctcggcacagcaaagcactaatagggtgtttgattcacttcaaaaaataa

SEQ ID NO: 60943 - DNA, 392 bp, Heterodera glycines
atggccataaaatatggaccaaaaatcgcaaaatatggacataaaatggcaaaaatcgcgaaatatggacataaatggcaaaaatgtcaaaatatggacataaatttttcaaaattgaatgtaaaatttcttcaaatttattggttgaaattgcatatgagatacatttccaaattttttgactcggtaaggcgctttgacaaagacggctttcgttttgcaattagtcggtcaacattcggaaattggtctcgaattttttcggcaattacgtgcaatcattttaaaagaaaaaaaacataaaagctaaaatttattaatttttttagcgcaaaatcaacaacaaaagcgaaattttcgcttttttgcttatttttgacataatttattaa

SEQ ID NO: 60944 - DNA, 155 bp, Heterodera glycines; identical to SEQ ID NO: 51421

SEQ ID NO: 60945 - DNA, 268 bp, Heterodera glycines
tatacatcccattatgagcgctaaaattatcagagtgccgaaaatcgcatgtgatctaagcctagcaaaaaatggtgtaagtaaaatcgtaattacgctcaaaaagctcctcaaacaattttagcgcttccaattccttctacaatcgcctttatacatcccattatgagcgctagaattatcagagtgccgaaaatcgcatgtgatctaagcctagcaaaaaatggtgtaagtaaaaatcgtaattacgctcaaaaagcttctcaaa

SEQ ID NO: 60946 - DNA, 105 bp, Heterodera glycines
gaaaaccgcaaattttggcttttttgtggataaatctgttaacaaattgcattaaaaaagcaaaaattgtccgggcggcgcctatcggcaccgccggcccccctt

SEQ ID NO: 60947 - DNA, 85 bp, Heterodera glycines
atttctagtgacgaaaaatgacgcccaaatgaaaaaattttaacgcagaaatgcgtttttagagctcctttcttcaaaacaattg

SEQ ID NO: 60948 - DNA, 278 bp, Heterodera glycines
atggagccagtcggagaacgggcaccaacagagccgcagcagttgtcgtcactcatgatgaaaacagcacaaaatgaagaaaaaattgtcaatgaggtaaggaaacaaaaactgctaaaaatggcaatatttcagattatagagtacaaacaaaaattccgccctcaaaaacatggactcaataaagtatgctttgaaaagaaaaatgctatgtatagtatgcacatttaatggctgctctgtcttttgcttgaatcggtcgctacgcgacgaataaa

SEQ ID NO: 60949 - DNA, 1946 bp, Heterodera glycines
atggccatcaagaaacgtcgtcacttgctcgaggacaagcagcgcgactaccaacgggagctgctccactcgcacctcatccagaacttgtgtaagttcctcggtgaaggtcgagcgcgagtgaggcgacaccgccgcagttcatcgcggcgtaagttggtgagacgtcgtcgttgggacgacgacacgagtggaaacggtgacgagaggggccagcaagtggtccctgacgatagccgatcgccttcctcttcccccaatccatcggggattgtgtttgagtcgacggttcagagcgatgccaattttggtggtgatggtggaggccggggcccacggtggctcaacaaacgctcttctcactctgacgacgatggacctccgatgaaacgaaaccgggcggactcttccgaggatgggctcacgttcattgatctcaaccaaccttgtgaggttgggaagttcgatggtgagttaattcattttccttttgcatattttttctcattgttttcctttctttttaggagaatttgcagatggtggacggatattctgatcggaatggcatggtcgtcatgatatgattacagtttctttccttttttctacgtgtatttttttttaccgcagataaataatttatagatcacagcgagcaaaataatcactggaaggtcttttgtgtgtagagcatttatgcgttctctcatactggcaagttgaacgtataatttaaacgatcaatggtgatttgtcatttatccaacgttactttttctagttttaattgcagaaaatcgcaactttgcgcggagttttaagtaatgagtagtttctatcaaatctgtttatatcatttctttgaatagttttgtaaacgaattggtgtctcatcgttaagaaatgctcaaacattgcacccaaattcgttcatttgccacccaccaaagcattttctacgacgtggtcattgtcggtggtgggttggtcgggagtgcgatggcctgctccatcggtttgtgcttggcattgcaaaaagcattgggggcggcttttcaggcacaaattcggctttgggtccatccacgagggtgctcctgttggagagtggacgactgcacagcgtcaagcagtcaaaagaagccgaaaccaaacacacttatagcaaccgcgtttccgcggtcagcccatcctccgttgaaatgttcaaaagtaatcctgagtctctcaaccaagtgctttatccgagaatatccaaattcttacctatattgttgattctgccaatccaattccatcctcttcccttaaaattagccattccttttttattcagaattcggtgtttgggatgagatttgctcgaagcgagttcatccaatttctgcgctttacgttcgtattatttttctggttcaacccattaaaattagtgaagaaaagaaacgaaaaatcaggttgaggatggctgtgccaaatccaaaatccatttcaaacaattggataagcgttcaccgattgctcacatcgtcgagaatgagctcatcgtcgccgcactgcagcaatgcattcgggaccgatgtgccaatgtggaagtgcgccaaggcgcggttgttgaccaaaatttgaggtttgaccctcaacgaattgcggcatcaaagtttcattttatgtcttaaattggtttatggatgcatcaaaattatttttgactcggtggttattaagagcttttaaatcgaaacccaaagactgttgtgctttcgaacgttgaataacaatttgtgtcgggtcggatagtttcatttctcgcattttttcttctatgttcacttgcatttctgtgtttttaaggacattcattcatattttcagtgttcctgacaatctcggccaaaatgtcaccattcagttcgaagatggcacaattgaagcttcattga

SEQ ID NO: 60950 - DNA, 704 bp, Heterodera glycines
gttttcggggcagtccccccgaaccgatgcgcccagatttatggggagaccgaatccttcgggagtagcttccctatagcctgtactttaattctgcgttggatttttgctccccataattgtttgagtaccccaaacggacacttgaaaaaatcgatttttttgttttcggggcagtccccccgaaccgatgcgcccagatttatggggagaccgaatccttcgggagtagcttccctatagcctgtactttaattctgcgttggatttttgctccccataaatgtttgagtaccccaaacggacacttgaaaaaatcgattttttttgttttcggggcagtccccccgaaccgatgcgcccagatttatggggagaccgaatccttcgggaatagcttccctatagcctgtactttaattctgcgttggatttttgctccccataattgtttgagtaccccaaacggacacttgaaaaaatcgatttttttgttttcggggcagtccccccgaaccgatgcgcccagatttatggggagaccgaatccttccggaatagcttccctatagcctgtactttaattctgcgttggatttttgctccccataaatgtttgagtaccccaaacggacacttgaaaaaatcgatttttttgtttcataaatatttttttcagaaagtgctctaaagcgcaccaaatt

SEQ ID NO: 60951 - DNA, 501 bp, Heterodera glycines
atgcgccagcacccggacaaactccgccaagttgtgggcgccaactttgaattcctcaacaatgtccaaaagctgttggcaattcaggtaagcaatgggaaaagtgcatcaaagtgaccgagacattacttcgctaccagttttttcgaaattttgtccaattaatcatggaacggctaattgtcttaaaaacccaatatttttatattttattactgttttccagccgtcaaacatcagctcgaacacctacttggcgctgctaaaatcgctgcgctacatttgctcgcagtatttttttttgaaattcactccaaaacaaaaccgaacgtggatttgatgctgcggccgccgcaacagttgcgcgagatcatcagcctggttgagtaaggacagcgaagagagacaaaacagagcaaaaatggacaaaagacacgaaatcaaaacctataacattttccggctatgaattgggctcgagtattccttcctcccaataaa

SEQ ID NO: 60952 - DNA, 780 bp, Heterodera glycines
atgggccaatatttgaagaccgagctgagctcggaccagttggagttgcacttggccgacggcacggccagtgtccaaggcgtcatgctcaacacggagtacatcaatgagacgttggaagcatcgggtgggtgtgggggagaaaaatggacaaatttttacgcatttttgccaattttttgtgccatttttgcaacatttccctgcttttttttagaaaccatccccaaaaaatatgtgaatgcaatcattagagttgattggaaccgggtttggtatcaaaaattggcgttttcttcgaccctatcgcaaatttttcaaccagttcgacctgacttttctaaatggcacatttatgggcccaactcaactccaaatctaaagttaactgctttttaacccacttttttaggtgttcgaatcctttcactgaaggatggatatgtggaggaactgaccgtttgtgtgccatggaaacggctgttgctcgactcgacaattgtcaaaagtatgatttgccaactcagttttttcatacaaattaggcgttggaatggaaatatttattaaatgtaagcctctgggaccttgaaaaaatgtcgttaaattttcaaaaattttgatcgacgcacccctccatttttcattgaaattttcaaaatttgcacttgctttctcccttgagaggagggcctaattatctgtaaattccaaacatttaaagctattatgcttgttttatttaacagttgagagggaaaaaagttttatggcaataaa

SEQ ID NO: 60953 - DNA, 142 bp, Heterodera glycines
attgtcttcgaagatcttttcaccaaagggtcgacgcgtcgcactgcggcacagaaattctacgcacttttggagctgaaaaaatggcaagccattgaagtggaacagcgcgatgctttcgacaccattgaaatttcggccg

SEQ ID NO: 60954 - DNA, 917 bp, Heterodera glycines
atggcctttttcagctccgtttgcgctgcctatttgttcttcacccatttggcgtatcacaagtcgtggatgttcgactggtcaccgaaacgccttcaaatggcgtggacaattagtgggttaattgttaattaggaaagaaagtgccatttacgcaggagaaattacaaaatccatccaatgaataatttataaaattgccctaaggcaatagaaatttaataattgttatattaatcgctccctcattcgctgatcagatttggtcctttgtgtgctcacttttgtcggcatggccatttgtttgcttttggccgccctttggggccaatctttgacccgcgaagggctccaaggcgaaaatctttggatcggcgccgtttggttttggatgacttcgaaggcacggacaatcacaaagaatagaaagttaattttctcactgttttagtggactttggcttcatgcatttacacgagacattacgccaaagaggtgaaactgacggagcctttgctcgccttctcctccgaatatggcacaaaatttggcaccaaatttgaccgggggaatgggaagatggtggagaagggcacacagacggagtagcggaagaagacggcgaatactttgccaaaaaaacaaacaaacaatgatttaaaattgacctttagcgaccgatggtttctctgtccctccgatcattttccttttttagttttaccattcatttgatttttttttgttatttttatttattttatttttttgtaaaaacggcaaacactttcagatcaacaaacaaagcgtcgatttgcctgcccaccagcaaaggcaataaaggaaggaaggaagaagaaaatgaggagaaggagcagaggacggggagaaaaaggaagcaaaaaataaaattaaa

SEQ ID NO: 60955 - DNA, 876 bp, Heterodera glycines
  unsure (1)..(876): unsure at all n locations
atggaacnaaaagatgaagcgatagcattcactgagaaagtaataaaacaaatgttttaaatatatttattagtttttattgtttgagtacgaacattttattgtcatcgaatgcaaaggctcaagtcacaacgtggacaaattctgcgattttgtcggaaaaaggctgcgctacgaactgcttgaatttgtggagaaccccttggccatttgggtggacttttgccacgtccgcccaaaaatgatcggcccaacggaatgcccttctgccgacttggagaaaaatgggtaaaaaaagactaatttaaattcgaaattcaaatttggacagaaactcaattggcctgaggcattggctggtgggcattcaaatggcggcagaacaaaaggcaaacagcgcatttaagcgcaaattgagggacaatctgaggaagaagttggacgtgaagatcaaggaggactttgagaagggcagctttcacaatgtgcagctgaaatcggaatttgcagagagagaaaatctgcgaaaatggtaaaaatcaaaacgaaaattgaaaaataattaaaataattttaaatgtttaggcattttcattctcaaaaattaaaatgaaaattaaaataatttaaatgtttaggcacttccacactcaaatttaaacgcagaagcgaaagacaaaagttaacgacaaatgtttacatttattctttctttattttatctcattttatgaacttcgatcacattattaaatttatgacagacaattaattcaattcaactctgacttttgactttacagttgttcgaattgaaatgtcttttgttgcgaaaacggatttaattctttaaattgggccctctcggccaataaa

SEQ ID NO: 60956 - DNA, 835 bp, Heterodera glycines
atgtatcaaataaagttgggaaatttgttttttagagatttttggctgatgtcacagaataaattatccgaattgccaaaaacatttggattggactgcactccaaaattatatttcccacacaaatataactcagaaaaaaattatggtaaaaaaataattattaattaaatatttttatgttttaaaggtaaaataaacccaacactaccccccatggaagattattacccggactcaatgaaaaaagatgaattcgaaaaatttcaaaaatggtataaagaaaataacgatacgccttttttattaggtaaaaaagttttattattttttaaataaacaatttcagaggagcaattgaaaatttattgtggtcaggataccgaaattttgctaaaggcagtcttagcaatgcgtaaaatttttatagaaataacaagggatgaacttagtcctaatggtttcgacgtgtttaaggttagaaaacaaatttcatttttaaaatagaatttagacttcgaccacaattgcgggggcggccataaaaatttatcgggcgaaatttttaaaggcgaaacacatagcaatagtccctgaggggggggtttgaaaaaaagaacaatcaaagttttattgccataaaatatttcgagtggtttatgtttaaaaatggggttaacgcgagacatgcgggaaacgggggagaagtaaatatcggaggttaattaattttaaaaaaacttattcattatatttttaaggatttaatgtcgattttatatgtgggaaatacaaaacgattatagaatttcaggtactaaaaaattaaaataaa

SEQ ID NO: 60957 - DNA, 825 bp, Heterodera glycines
atggcaaataaaaaaatttcttacgacctttactgtgaggcattaaccgacccattaattatccccccaagggatttggtccagaataatgtggatgtggtgctggaatcattttacctcattcaacaaagctttagtgaggtcgatcttttaaatgagcaaatatcaataataataaccacatacgcaatcccgagtggcacaagtaattaaaaaaaaattaattttttatttatgtttttagggaatcaattaaattcaacgaattattttaaaataaaagaaaatgtgagaatttcagttgcaaatgacgataattattgtctcttttacgcgatcatactaagcagattttatcaaataatcggagccaatgagtctttcgagatctcatatgatcagtttcggagaatttacaaaaacaaaaaacgacaaaaaaaccatgttttgcaactaatccaagagacaagaattgatccaaatagaacaaactatggcatagatgatcttttgactgtccaagagtattacgaccaagaatttccagggaaatttcttattgtggcgttttcaaaggttaaaaaagaaaaatcttaactttatatgtatgatttaggaatggagtttaaaacccatgtttaagggtcagggaccaaaaaaatatataatttgtatttttctcgaaaacggacattgggacggtaaatttcttcaatataatttcagttccaaaaattttttaggtttaaaaagtgttaaacagttttttgatataaaacattattactgcgtttattgtgaacaaacatttcgtgaaaaaataaa

SEQ ID NO: 60958 - DNA, 716 bp, Heterodera glycines
atggtaagggttatcaatagcactgggacgtcaatgcagcgccaccatatcacaacgaatttcagtattatctgcagcactgagacttcaacgatacgcggcggtatcacaatgactttgagtagagccaacgggaaggggttatccgcagcactggggtgtcaatgctacgcggcggtttcacaactgctttcagtagagctaaagggaaggcgtcatctgcatcactaggatgtcaatgctgagcggcgatgtcaaacgactttcagtagaactaaagggaaagagttatcatatttcagcccaatcatcaatttcaaggaccatttggtcctccgccgttgccgccgccaccaccagcattgatcggaccccaagtggccccacctttgaacccgccgccaagagggaatggcgatcgaatgccacgcaacggcggtcgttaccgtccacccacacccggaggtataaaattttttgaaatcggccaaataaaaataattatttgaattgctttacgtgaccctaggctacaaaaacgaagacgtcagcttttggaaattgatcccgaagaatttggtcaaaattcatttttcatatttataataaaaaaataaatctcagttgcccgactgcctccgccacctgtgccacccgttttacgacgatggcacgatcgtcatgatgatccacccccgccgggtgttggtgcataa

SEQ ID NO: 60959 - DNA, 1271 bp, Heterodera glycines
  unsure (1)..(1271): unsure at all n locations
atggcctcaaagacgacaactactcctgacncacacttcaatcccaatgaccgtgcctttgtctctacctgcacccatcttgagttaaacgcagcattggaggccggctacaccgtccgcaaagtcttccatgtcctacaatacgaccaatggagcgacaacatcttcaaatcttacgttagcgaaatgatggccctgaaaatccatgccaccggcttcccttcatggtgcagcagcgaagaggagaagaaggaatacattgaggagaaccgtcagcgatttgggattctgttggacaaggaaaagatgaaagctgaaccagggaagcggtacatcgccaaactttgcctcaactcactctggggccgcttctccatgcggaacctcctctccaaagcaataatcaacaacgacgaaagcctgattcgccaatataccgacgacaagaaaatcgaattagtggacttggaaatgatggatgaggacaacgatgtttttatgctgacttaccgaccaaaagaagaatttgtcgacgaaaataaatactccaatgtcgtcatctccctcttcacgacatctgcagctcgcctctacctctacgaagctcttaaaaaagtagccgacacccccgactgcgaaatcctttattacgacaccgatagcgttatttacgtgcaccccgaggaaaacgacccactaccaacaggaaagggacaccttggagaactaacagacgaaaaccccgaccacgatatcctggagttcattagtgctggctgcaagaattatgggatgaagctgcaacgcaaggacaccggtgaaatagaacatgatttgaaaataagagggttcacccttgatgcacaaactgttcaaaaaattcattacgatactgttaaggaccaaatcttacgttatgggtccgatgaccccgctgaccctatcattgtaacttacccccattttattcgccctaatctaatccaaggtaaagtgtatactcattccctcacaaaacattatcaacccatattcacaaaaggtattattaatgattcattccaagtcctcgaatttggttatcgcaaatgataagtatgcattctcaattaaattttctgtatattagttttcttattgttcccttcttttctttctctctgtttatatcactcatgtgggacggaatgacccctggttgatcctctccaacactccaggccatccatctgagatgaaggtggacgagctgttcattattgtaacttata

SEQ ID NO: 60960 - DNA, 80 bp, Heterodera glycines; identical to SEQ ID NO: 51817

SEQ ID NO: 60961 - DNA, 328 bp, Heterodera glycines
atgaaagaaaaaggaagatggacgaacgacagaagtagaaaaatggtggaggagaggggggggggagtacgaattgccaatttacgtagtcgatgtgagaaaagcgaacaaaatgataagcgaaaattgaagcaatgccccgaagggccaattcgaagcaaagagaagtgtccgatgatcaaagacaatcgttcaaatacagtgaaccacggagcggagaattgtgagaatagagcaaacgccgaaaagagcgatgactcatcattcggtgatcaaagagtgccgacaaagggcaattagctggtcaatttaaccacgacaaattaaa

SEQ ID NO: 60962 - DNA, 386 bp, Heterodera glycines
  unsure (1)..(386): unsure at all n locations
ctccgcctccgccgtctgcgccgcttgccgagtgcacccggcaacagccctggcgacgaaccgtccggcaaaaagccgccaaggccaagccccgtgggcagaccgaacccaccaagtccaccagttccaagtccaccagctccaagtcctccagttccaagtccacccaaagtgctcagtcccccgccaagtccaccgagtccacctgaaagaattgtaaaaatgaaaacccattggtaaaagcataggaaaagcattgatatgtaccaaggccaaaaccgccgccagtggccaatccgggcgggcaaagacccccaaggncgccgagtccgccgccaaggccaccgacacccaacccctgntgggcataagcctccaactgctgc

SEQ ID NO: 60963 - DNA, 621 bp, Heterodera glycines
atggcaactttcactttctggcctatctcagagctgacgaacatcgacgttgtttttaaggtctaccacgactgtgacgatgggattaaggtgaaaacattgctttttgagttaattttttattatttaattaaatttaaatatattatttaaataatattttaatattgctgaaaatttttaatatattctacatagctttgttttagaataatattcgcaattgttaaataaaaatttgaagtacttaatgccagttattagttttaaatattaacttcttaataaatctcaaatgccgaagaaataattggatttttttaagcccggctcgcgcaagttgaagttcaaaattccgaattcctatgtcacggacagtgcgacgccaaagaaaacgtttgacatcggtgtgctcaacttggagactgtgttcaaggacgaggaacgcgagctgatcgtgaccatgaagaagaagcggagaagccaccgttaccaagactttttggacattttgccatgaaaaagtttcgagaaaatgacaaattgccaagaaaattattttcaatttaaaatggaagcggtatttaaaatggaaatattgattattaaagttagaataaa

SEQ ID NO: 60964 - DNA, 610 bp, Heterodera glycines
  unsure (1)..(610): unsure at all n locations
atggagaaatatccggcccgcaacaatctcgagcaccttgcgatgctcaagtgtacggaggaaccgcacattgtgcgcaagacgggaatcatttgcacgataggtaaagccagaaaatggattaatctcttcgataaggcatgcctctgaactgttttccctgttcagggcccgtttgtcgttcggtggaaatgttggttcaaatgatcgaaaatgggatggacgtcgcccggatgaacttcagtcacggggaccacgaagtgagttttatcactaaattttgagaatttgaactttttattttaaagagtcgtgaaaatagttttcctggagtctagcgtcgctgatcataaatatggcatttatttttgcccatttcgaatcccaaattcgagcgagaagtcgaaaattaatttttttttaaatttcgacttcttgttcgagtccgggattcagaataggccaaaaattaatttctacgaaattgcagtatcacggcggtaccatcaaaaatgtgcgtgaagcagctgccaaatgcaccaagaaacgcaacgtggcgattgcactggacacaaaagggcccgagattaggacgggacttttggcaggn

SEQ ID NO: 60965 - DNA, 1049 bp, Heterodera glycines
atgacaacagcaacaacatcattaccaagcccaggagatgaggaggaacacacagaagaggcaaatgaagtgccagaaattacgacggatgtgccgagaccaatttcggcatcatcgtcggggggacgacgagtgccaacctcgaataggtaatattaaacaattttaaatggcattaataatcataaagtgccaagcaacacaaatatttcaaaattttctatacatacttctattccttaagaaatttcagtttattttttattttaaaatttatctgaaaaatattcggcacttttattaaaagaaattaaaattttcactcttttattgattgtagttttttatggaaaggtttgtttggttttttataaaaaaatatttattttttttagattaaaaaaggctttttattttatcgttaaaatttcttagatgtttagcttgtttttattcttcaaaaatttataagtttttttttaaatcgcttttattaaaaaaattagataaaaaacttgttatatttattaactctaataaagacaaaattaaacaaagaaaattgaaagattttgaattaaaaaaagtgaaaattatttattttttgacacgaatttcagaaggcgccaaaaactcgcaaaggcacatcaaccccaacatggtgaagagcaacattacgcgccaccgcgtcgcgtttttcccttacgacgtggccaagtgccatcattagcaattggacaagtaggcggtttattgccagatgaggagaccgatgcttcaccatttgacgctgaaagagcggaacatttgtggcatccgaaacaggcaaaaattgcattaaaaaatactatttttatttgaatcttgaaaattacgaagatttaaataagattttgtcctaaaaagtagatgaaaaataattggacgacaggcagcgccgtcaggaaaaaactattgaaaatatttatgaaattttaataagaaaaaaaattcattttttggaatttttctatgagggcagacaaattttaataatttataaaaataaa

SEQ ID NO: 60966 - DNA, 837 bp, Heterodera glycines
atggcagtcaactcgggtttgactgaaacttgtaattataataaaaaaaacccaaaaaataaattatcatattttttcagtcccaccaaccccactcagctctcatgggcaaaacagtgctccattgcgtcagagtgcgtttaaaacaaattaagtgagagaaatctgtttaatttaattttcagatgccgctggtgctggtcccagcacgggaattgcagatgggggcgctgaaagcggcggtaagaacatttttctttctttaagtcattataatggaaatatattttaggtcagtggttcaggcccacgattgaaaaccacatgaaccgatcacgacttcgacttgtgcgcgaggaaatggcacaccgaacgatgcagcaacaggtggaacatcagcatcagcaattgcttgaacgggcggaaagagtgcgacaggccaatgttgaacaacagatggaggaagcagacgttctacaagaacagctgcagccgcaggacgaagaaaacgacgagaaccgcgacccagaaatggagcagcgacgactagttcaggtcgctcgacaggcacaatacgagcgacttgtccgcttgcaattgcgggaagctcgccgttttcacaacggagtcgcttcttcggttgtggtccctcctcccttgttttgggaggaggaatgcgttatttgcaccaacgcccgtgcaaatttttataatcgtcagtgcgggcatgtttgcctttgcgcggagtgcgcagtcactgcggtaatccaaaaactcactgtctgtatgatgtgccgtgccccagttaacggatatacccatatgttcgttaactga

SEQ ID NO: 60967 - DNA, 3030 bp, Heterodera glycines
caaaggaaacagttcacagatttgccatttgatcagcaggagaaggctttgttcgaagattttctgtccgtttgtcgcgtgggtccatttgccattggcaaaacaatcgtttaatttttgtttctttttagggcatcaatgggccattcattcaatgcgaacaattagacaataacgaaatcatttgggtatggacggcggagaattggaaacagaggacggataatcagaacattgagcggtggatgaacgtctgtttcagcaaggcaccactctttttgacttgcttttgtgcatcggacgtacgcctttttccggggggggggacgtttatttgggtacttttttgggcttacacctcaaaatttaaaaaaagtttcacattcaataatttaaacgcaaaactcctttatcgctactttaatttatgctatgttaatggtacgcaattgtcccttaagcgtgccctttttgacattttttaaaattttgaggtgtaggcccaaaacggaaaaataccattaattatttgttgggtgttcttgaaaattataaatgtttcgcttgacactttgtccttgtctaaatttggttttaattcattttaattgcctcctcttcttgccttttcccctttcgttttagaacttcgtgccgactccacccgtggccccacagtttacgctttttgttcgcttgtgctgaagcatttggagcggaaagtgtacgctgaactgcacgagttggacaaattggaggtgccaacttttggaattttgagggaaaaccgcccatttaaggtaaaaaatctgatgacattgcgaaatgtgtccaacgaactgagacatcgccatttgctccctttgctgacaattgcccgggaaattttgctggtgggaaaacgaatttttaattggccattttgatcggttgcttcccatacaatcaatccgactgttcccccaaaaattttaaaccaattctaaaaggcggatggtttgtcttgaaaatgggcctctttttagttaatttttcattttgtttctcctcaaatttcggttgtcttttcccttctcatttcgctgtttctttaggctgacaaagttggcggtgaactgatcaattttctgttcgaccaaaaggagcggacggaatgttatcacatcgtttcccttttggacgagatcatttccgtcactttgctccgctacaatcagaccgttttcgaatggatttcgcagtgttcgctgagcctggacatgggccatgaggtgggacagacaaagccatttcggtgccaaatgatttcattttgtggcacacgatgactaattaattgacttttcgtcattttcctttcttttaatgcccccccccccccaattctcagttttttatttgggacttgcgcaaacaaagcgtagtcaaacgatccgatttcaattcgccggccctggacaatttcggctttgaccacacttacgtgtccattcctgaactgcttcccaaagtgtatgagtcggtggccgacgaactgctcaatttgggccgctttttgttcacaatgaaaaatcaaaatgccggtgagtgcgctttttggtgagacaatcaaatttttattctttttcagacattgagcatctgtccactcattacgaattggaccaaaaccttttcaaaaacaaaacattgcgcgagttttgtgccgcgattcacagtttctacggaaaatgctccaccaacattctcgatctcttcaaaaagcgattcaacattttgcaatttgcgaggttcgctgtgcccattagtcagaatcggctgggcgaccaaatattatctatttttaaaaattaaattttgctttttattttggcaggcatttgccccatttctttgtcggcctcaattcagcatggatttacgaattcgttgtgctgctcgaaactaccggattaaatggccctattttggacaacgatttcgaaatggacgacaacgatcgattcattgtgaacacgcaactgcaacttttgttgcaggaggcgttccgcgtcagttggcttcagaacagcccattccatgacaaaattgggtaagttttggccataaaaatgctgtttttttcaattttggctttttcagcgtctcactgatgcgtctttctcccacgagtgacgaccgactggcggaacacgagaaaagacttgaacaccgacttaagaacccaccgaagctggagctgaacatcgtcgtccccaaggataatgcgtcgaacaagaacaaggatttggcactgagtttggcatttcccccagtcgtcgtttggtcgtaccgccaaatgttttaccatttgttgttgctgaaccgggccaaacattggatgtaccggtgagagaagcaaaggatttaataagcaaaatgggaatatatttggtcctaaacgacttttgaattatttgagtaaaagcaaacttttcggggtttggatttgctaaatttgtctctgcaaatttcagaaaatattttgcgctgaaagggacgaattgccgccgcgaagaatttgccactgtccatcagtttctgcgcgtgctcaacgtgtacattgagtacctttgcggcatcgcatcggccgcttatcccaatttctccaagcaattggattccgtaacatttttatgttttaatctcataaataacgaattgtttgtttgttttgggtttgcactttggaccaactcgtcgatgctcagatgaaatacactcaccaactgatgggacagatgatgttggaccaaggctttaagcagctcaaggaattgctggtccaattggccaccaaattctgcgaatacgcccgggattcaattgtgagtcattttgtcagtttttaaatttaaaaagtaaaacaattgttgttgttgtttttcaggatttccacactttgaacagagaggcgtctcccctcgtcggagaaatcaaaaaaattctgctccaaaatcgggacggaggccccaccggcctcagagacat

SEQ ID NO: 60968 - DNA, 991 bp, Heterodera glycines
atgaatcacagaactcggttggattggctcttcttttggaatgcattgtggagaatgggtagtagtcaaagttttaggttatgaaaccgaaataaataaatatttacaattagacccttggctgttgactactgaaaaaatttcaccaaagagtacgctgatgtttatccccggcgcaggtttcggttatttattttctttactttttaaattgtaaggatgggctatggccaccaatgcttttcttttcctcaaccggaatttcgccttcgatcggtctcgcattgaccgaatgatcagttactattctcaaacctcacggaattaccaagtgacagatcgaattgaacccttttaactgttttgttccattttcagttgctccttttccctgaaggaactgtaagttgcactttttaccattttttttcttctttggtcactaacgatttaattaaaggacaaatgcccaatagccacaaaacgaagtgagcaatttgcagaaaagaacggattggtcaaatacaaatatttgcttcatccgcgcaccgttggatttgtccacattttgaagagaatgcgcaaaggtaatttgcatatactaatggattaaaactgaaaaaacatcatcaaaataggatataaaaccctgaatcggattaaacttttgttctaacaataagcttaatttaataagctttactataatatatgcacaattaattcatcgttccattcagaaaaatatgtcgactttatctacgatgtctctgtggcgtacggtggccgtattattcagtcggaattcgatttggtaatcaccattcttttttcctcgcaaattactctttttgagcttctccttggccttacgcctgcccatgtgcattttttggtacagaaaattccaatttcattaattccggaggaagacgaacaattggagcaatggctgaacaacaaatgggcggaaaagggtgctcatttttaa

SEQ ID NO: 60969 - DNA, 737 bp, Heterodera glycines
atggaaaggttagcgaagaataatcatgaatttatctttttatccctttttatcatttgcatatattttatcggtgtaaccacggcacaaaaaatgaaatattttatgtaaatattttcaaaaaactttcctttccctcaaaaacggacaaatccttatcattttttgccattgcatctgttttatctgagtcatcgctgctcaaaaaataaaacatttttacgtaaaataatattaaaaattttcatatttcttaacgaaataaataaataattaattattcgataaagttttagctgggcaattgagttctctgactgtccgttttttctaagtgttgtcaagatttgtcctattttatggagcctgcgtggagtggggtgcggtaactgtgccaatgccaatttgaaaccatggatttcatttaaattttattctgacgttggagaaaaggcgtattttcggggagggactttgggatttgctggggtttgggttgagattctggggtcaaggaaagatttacttaattttcaacaccactttactgacaaggaattagagaataagggaaattgcaattaggaactcaaacaacagtaccaattaagcctttgggcgtttgttgttgctgaatgaaagtccacggggaaaagcaccaaattttgtagttttattacaataattcaaaagcacaaaatatataaaaaaaaacttgagagaacacgaagacaaca

SEQ ID NO: 60970 - DNA, 286 bp, Heterodera glycines
atggacgcggcggaaccaatcaaacaaaaaaggatttacaaaaagcaaccaaaaacaccaaaaaaatgtttaatttgtggacgaggtgcagcgttcaaatattacaatgtgcaaagttgcaatggtaagaataaaaatgaactttcaagcatttcactaaaatataattattaattaatgagtaaacaatttgttgcttaaggatgtaaacaattttttcgccgtatagtaaatagtcagcgaacgttcacttgcacagaaacaaattcgtgtattttaagtgatg

SEQ ID NO: 60971 - DNA, 462 bp, Heterodera glycines
atggctcttgaactcctggcaaaactccaatcatttgccgtcgctgatttgctttctgctgatcaaatcgccgatttccgcgccaccgctgaccaattccgtgtccacatgttggagcactttcgccgccactgttcaactacaaaattccatcacctggtccatcatgcacccgaatttgctgaaaaacatggattttggggccttctcagtgagcagcccgtggagaaatttcacgcgttgttcaatgacgatctcgcgcgcaaagcaaacaccaaagatctccacgatattttaatgttctgcgctagagaatctgccattcgaaacgccatttttgatgccaatgaactctgatcactcttttgtagttttttgatgtgtttattatgttttttgttcttattatatgcaattttctcaattttttatatttaatagataatttgctgtcaaattata

SEQ ID NO: 60972 - DNA, 703 bp, Heterodera glycines
atgagcaaggtccgtgtagcagatgtggcattagaacgagaacaactggcattttttaccaaattcggcatcagcacatccgacagtgtgcagcaagagaaatcatgcgatttaagtaaaaattttgttttttttcattaatttatttaaatattttttaatttttgagtaaaatgaattaatttaatgattttgtttttcaggcaatgctacaaaagtttttgcctgggatggcctatcaaaatgggaattttttcgtgacaaatttgtgttggagccgagccgggattactattaccgatggcttggcattgttacgttggcatactgttacaatttgcttgtacgtttttttaattggattttccttcttaattttttttgttttgtttggatttagttaattgtttaccgttgcgttttcattgacagccaatcagtgtcattcgcatgcctgatgatttttatttttcttgatataatatttgacataatttatgtcattgattcattcgttcgtgcaagaacaggcaataatcagaagattaattaaatatagtaaattcgtaatattaattcaataattattttttttagaaccaagtatagaaagaaatttttgtttcaaattgttcttattaaattttaattcgaagtttatttatttattaattgatctttctaagttaagattttgaataaa

SEQ ID NO: 60973 - DNA, 430 bp, Heterodera glycines
atggtgctgaccaggcccagccgcttctccgtaggcccctgctcttcttcctcctcccccggaccttccaacagttcgttggatttcggcgtcaaagtcgtgggcgggcgcagtccgttgacgggtcgcttcggtgcttttgtgtcgcgggtacggcccggctcagtggccgaatcggtgggccaactgaagacgggtgacgaagtgttggagtggaacggacactcgctgcaaaacgttacgcccgaggtcggtcggccgcttctccgtccgtccgatcacttccccccccctccgcctcaggccgtttacaaaatcgtccaggcaaccaaaggcgacgttcgccttgaactgatcgtttcccgttctttgatcagcgggggcgatgattttctgaatcttggccaaattcacgagcagtatggcctcg

SEQ ID NO: 60974 - DNA, 968 bp, Heterodera glycines
atgaacgggactcaacccactaccattctaatcactgggactcaattcatcagcattgcaatgaacgggactcaacccactaccattctaatcactgggactcaattcattagcattgaaatgaacgggactcaacccactaccattctaatcactgggactcaattcatcagcattgcaatgaacgggactcaacccactaccattctaatcactgggactcaattcatcagcattgcaatgaacgggactcaacccactaccattctaatcactgggactcaattcatcagcattgcattgaacgggactcaaccctccggtgtgccgatcaccgggacttaacctcaacaatttttcggcatcccaatcactggaactcagtcctcaagcattcgaatcaccgacactcaatttcaccaattcttgggcatcccaatcactgggactaatttagcaaatactcaacattttctttttgggtgtcaggattttcaccgggcgggggaaggctcggccgcttcgcggcctcacacccggcacaacatttattagcattttactcttctttttggcattttcttatggccaaccagcggcactcattctccatttttagcatttccatctttgtaggcttaatcacaataatcttcggcataccaatcactgggactcgattctccggcattccaaaacaaaatcaaaaacacaccactctttaactaactaattcttttctctttaacaataacaaatcttagtaaaataacaaattttttttctaaaacaaaaattattaaaaaaagaaagtttttttgtaacaaaaaatgaatacgaattagtaaaaaaaaaattcacgaaaatgaaaaacgcgtataaaaaatcaaatctaaaaaagataaatttcaaagtgcactaaatgattcaaaacaatcatttcctttcttttaaaaatttttaaacaa

SEQ ID NO: 60975 - DNA, 548 bp, Heterodera glycines
atgctgctatggtgggcctttttacttttcttccatcgtgttatctttcgcccagtcgattgtgggagtgagttgaagatttcggtttgtagttcatgtaaaaatttttagagtttgaagacgccaaggatattctgagcagctttaagtcggttgtggatgtgcccttatcaaatgacttcaaaaaaagccaccaattcattgcattaagcatgagcttaatgaaaagaaccgttccatttgcagagctgtttgcaacggctttgaaagttggtcttgaggtaattttattcaggtcatgccaagtcttctaaacatcatacaaaaccgaatcatacatacttaactcataaatatcaactcatacacatactcaattcctccgtgttcaactcatccactgcacgatgcagatcgtattcgtggcatttctagcgttgtggtgtttcccgcaccaggggcactctagcatttattgcatttgcaatctgcattttgacctctcttatgcgtggatgaatttgattacgggtatggatgctggatga

SEQ ID NO: 60976 - DNA, 1737 bp, Heterodera glycines
atggtacaggaagatgaattgggcgcccttttaactcttacaaaaggcatcgatgccaaagtccgtgacatcgccagtcaacaaaaatacatagcgtcatctaatgtttatcgtgaccttttgcttgagtacgaagaggtaggttcttaatcaacatcatcattgtggtacgattattgaggctttgatatttgataattcccacttggagaccgacatccgaggattaccaaaaacgtgggtccgaaatttgtggacccaatctttcataacatgcagaacccacaaaaaatgaactacttttttcatcagaataaagaaagaatgcctttcccaatggcaaaagtcaggatggcattcggaggcccgaaaaattttcgaaaatcggaattccgactccaaaaaggtcgaataatcgggtcggaaatttttgaaaaaatagaaaagtactaaaattttttaaaatattttaataggatacattttaaaattcgtaaacaaaaaaatgtgaattcaaaaatattttgtatatttatctatctgcttgaaaaattattcaatgatttaatcaaagtctttttatatcattttacaatttagaacatttttggaaagggactgacaatttacaccttttttgcgacgctcttttccaaaaaaatgccttctctggtgtgactgattatcgaaaatttttatttggaatctaagtctcccatttttcaaaattattgtgcatgacgcggtatagcaaagtttgagacgaacaagaattccataatcataatttgggttctcaatctcgtaaaaaccttcaactacatttcgtatagacaaatatttatctgaatatttttcgttatcgaattcttttcatttctttgggtccaactcccattttcccagaagaattggacctttatgaatgtctttaattgccaagctctttttatttggagagaaaacttagtttcacttgtttaggaattgttttatcctaaaggtcgggtccacaaatgttggtcaatcctcaaacctcggtcataaaggtcgggtttaaattgccgagtccttaaaagtaaaaatcctcaaaagtaaagatagatagatatattaatacctaatttagaaggtggatgaaaaaatcacttctttgatccgacaaattcggatcatgtcaagaatgcgatttaaagttgagaaatcggtaatagatgcgtttgtttatgattgcaacggcggagcaaattctcccggaagtgttgcagatgtgagtatataaaatctcttaagaataaataaattacgtaattcctaagtcctgccttaacacccaccggcactttatttggcacttttttattaattacatgtcattatttttttagaaatttttagatcctggaattttaaattaccgagatcagagccatgactggaaaatggacctgggcggaacccctggatcggaactctcattttaccgggtcccaattattgggctaaggtcatgcaacgaactttttccccaccaactttttccgcgatttcctttagaaattaataaaccgaaattttatttattgatcaacagttatcttaacatataagtattgttcgaattttataaaccagattttttgggttttcataaaaattaattttatgcagtgcctgaaatcccgggaaattttcgttttcgtatttttagacctaaaatgaatatttagaaattta

SEQ ID NO: 60977 - DNA, 305 bp, Heterodera glycines
agttatcactgttctgaagaaagaagagcgaatcgcagccgataagctgcggcagtatgagttggacccaactcaagggataagaattcgagaacggaagaaaacataccgtgaaaacgatttggctatcagaaatttggttgaaggctttgatgccattgagaacccaaacgaagatgagattcttgctcatctcaaatcgttgcaatacagacttatgcgcaatgattttgagaattgggacgacccaaatggtgattaattctgttttcacatcccgttggcccttgggaaaggcacgttaa

SEQ ID NO: 60978 - DNA, 1227 bp, Heterodera glycines
atgaaaccaaacccacggaatcaacagaacacatcttcctctccttttccatatacttctgcatttacaacgaaatcaaactcagtacgcctggcacagtttaaatcaaatccaacacaaactagaacccaaaataaaatattttgtcgcttttgcgaaagagaaaaccatgcaagtaaagaatgcaaaatttattcaactcccgagaaacgaaatgaacgtgtacgtgaactcaaactttgtctaaattgtctaaataagggacatatggccaatgaatgcaaatccacctatttatgttttaattgcaaatacaaacataatactctcctttgtacccgcaaacaaactcagtacaaaccgaaagagcaaaaaaccagagtgaatatggctaaaaattacgaaaatcatgaagagacacaaacattcatgacaatggattatgataaaaatttatctaattatgaggaagaagaattacttatgactgctgaagtaaactgcataaatcccgacaaacataaagtaaaaaaggaaataattttatttgataatgggtcacaaaaaagctatataaccgaagaatgtgctcaaactcttcaattaagcacaattgaggaaaaattattagcaatttccactttcaatcaaaataagccaaaaataattaaatcaagactagtcaaagttggcattaaaacattaaaaggtgaaatagagtacataacactacaaacagtggaaaaaattacagatgttacaaaaatggttaataaagaaactgttgatgtacttggaataaaaatctcgatcgctaatgcacgtcctcaaattctaattggaatcgactattactggcacttcatgttaccaaattcacaaattcaattacttccatcaggattttactcaataaatacaaaattaggaaaaatattatctggaaaaggaactattgaggacaccaattgtaactcagtgaccgaaaaaagaaaaaaggatgaaacaaaccaaatacttcagaaattttgggaattagaaaacattggaattatcgactcaccacatatgacggatgaagatgcagcaatgatacactttgataaaaatgttacatttaaaaataacagataccatgttcgatggccttataaaagaggaacccaaatttaccaacaaattttggattatgcatgggaagactaagaaatgttgttaaacaactaa

SEQ ID NO: 60979 - DNA, 663 bp, Heterodera glycines
atgcctgtcattaaggtactcaaatacccggaggagctaaacccattcgggtcggaggacgaagcggacgacgacgatggaaagaatcccttcggggacagtgcctcgtcatcgggcgaatccgaactggtgctcccaggggaagagaagaagcagcagaggaaaagcagcaatgccgaaaatgaggaggaggaggagccggaggaagtgcaaaatccgcaggaccgcgtacagacgtgcagcagtgccgcggacgaggaaagctccgcgtgtccgtcgcctgctcgtgcgccgccgatggtccaaattgtcactgccggcggcacttcgcccgccgaaacggaggaaaaaccatcgtctgccgaaggaaaacaaacggcaaatacttcgactgaaggaaatgacacaatgccaaagataacggaaaccccggaaaacaaaacgccaaacaaaacgcagcagagaaaactgagcacatgcgaacagcaggacaatcagtaccaatacgacgtcagtgggcgatcggagaagcggatgtttaaaatggtgatcagtccatttcagtacattcctccgctggcgccgatgcttttccgtgggggcggcgttcagcttcgcaaggttttgccattgcgcgtgccgtcgccttctccttgtctctga

SEQ ID NO: 60980 - DNA, 223 bp, Heterodera glycines
atgatccttaaatcccccatagtaggtcttgcaacagaggtaattgaacattttgagtacatttaatatattgaaaaataaaattttcagaaaattattcttgcaataatattaatttataaataaagctatatacatttttgcgccgattcaaagaccattcataaaattatttacgaaatgatgaagagtttagttgattagccatcatttttggaataaa

SEQ ID NO: 60981 - DNA, 351 bp, Heterodera glycines; identical to SEQ ID NO: 53910

SEQ ID NO: 60982 - DNA, 522 bp, Heterodera glycines
atggaggaccaggtaaattcgcaatttacgcaaaaatttatttacgtatatttttacccagaattttttcgttggaaaacccgaattgaaattgaccttcagacatatttaggaaattggtattattagggtccaatacacgcattcatccaagataacaaatacacacatttatttaaaaaattcaatacaaatttcccattggagcgtgtccctcgtgagaaaactgacccagttttgatggaccagttgctcaaattcaactctatgaaaccggatgagcgcatgcgacgcatttgggacagtgctcgtgcgctcgaattgttcaacgaccagaaccttgtgcttaaagcatttgggatctctgtggatcaaaagtcgaacctggtcagtatggtgctttgtgcacgcaaccgttttgacactgcccaacagtttgctgcggatcgtttgggtcgcatgggcaacgaaaagggcattccgattgcggagccggagattgtggctttcaacagcccggat

SEQ ID NO: 60983 - DNA, 745 bp, Heterodera glycines
atggaacggaaaactgtttcgaatgacaacaaccatggcttaaaatatgaagttattaaccaaaggcaggggtttgttgagaagtgtgacggctgcgattttaatgtttttcattctaatgtgcaggtttggatttttcaaacagttttatttattttggtttttatgttattaattttaaaatccagattggtgaaaatttaaatacacaaaaatccattatttttgtcttctaaggaattttatttatattttctatgttcagtttccaccgattgtgtggccaccacctgaaaatgcttctgaagatgttgtaagccaacatttgaaaccttttcatgacgtgctgcgcttcatttctgctaattgccttacaattgttcaacatcctgaattgtatgatcaagcgaaaaagactcttgatgcggttaacctgctcaatggtgtgttggatcagcatcgacgacagcaacaggggcaggggcaacagcagcagtacaccggaatgactgtgttgaaaaacagtcacaataaccgccgacaaactaataatggtgatgaagaaatctacatttctgatgctgatgacgatgatgatggcattccatttcttgtgcgtcgcttcttgaacgctaacattgctgatgaacaaactgtaacagcagcagagcaacctgattatgctgatggtgaaacatcaatgttttgtgatgacgttgcggaaatggagtgtcagcagaactag

SEQ ID NO: 60984 - DNA, 54 bp, Heterodera glycines; identical to SEQ ID NO: 55479

SEQ ID NO: 60985 - DNA, 67 bp, Heterodera glycines
atggctgcaaaggctgaccaaaattacccttttatacgagcagaaaatggcggagtcggcgcaggag

SEQ ID NO: 60986 - DNA, 659 bp, Heterodera glycines
atgcgcacccgtccgatctggcaagttaagcaacgattgctgactagccaaaaggttcggtgccgtgatgaaacgaaccagcactgcttaccccgcggcacccggcacggtcccccgaaggaatggatttaattaaattctctccttcggggatttttttccattaggtcgtccgttagcgttcgattgctctagtcaatttttcaaaatttttgttgaaatatttgtcgtgctctgaagggcgtgggaggggggggggcgaaggccaccacgaggccgcgaagaggccgagtgagtaccttcggtgcaggaaaattattaaattttaaaattttttaattgctttttaaatatgccaaaaaatgtaggcttaacttttttagtgaaaattcgatcactcatattttttgctaattgagcagaagcgtaccaaactttgcagggatactccccggtaaaggactaacttacactgaaatgagcgccgagctagctggctcaaaaaaatttttcgaaaatctgagtctttcgtttttatttatttgcaaaattaattcataaatattttttcagaaagggttctgaaacgcaccaaattttatttacatgttagtttaggcactctgatgctttttctatcaataatggaggtgaataaa

SEQ ID NO: 60987 - DNA, 932 bp, Heterodera glycines
atgccgaccattttgagtaccgttaccagttggaatgttgtctcaagaaatacggtgttttaattttttttttaagtttaaaatttttttttaattcaattgcattctatttgcccaactgtgattctctgattgtgttccattttttcagccgtccattgtgtgggaagaaaaaacgccagtgggtattactgtattgtgcttgaaaaactatttttaccatttactatttacatttgtgtttgtccccattttttaggtcgaatatctgtccgcttattttttcaaaacgcccgaatgcgacggtaaaatcttttgcgcctgccggcagccgtaccttgtaagcccgaaacgattcgttggaagatgctgcgacagcagcccaagttgtaaatgttgcctgaaggtaaatgtcaatctcttacatgttcggactggctcagttgggcccccccggcacgtttgggccccagcggttttttggttataacttttttctttgtcaaccaaatccaaaactgttggtatcactcaaaagctctaagttcatgaatctttcattgtttgatcagaattacactggcattgactgacataccataatcaaatacaaaacgaatatctagggatttttgaacaattaatttgattaaaaaaataaaaattggataataagaaataagttttgcaacataataatatgtatctaaatgttgaaacgggattttgataaaaatataaattcattttaggacccatcagtgctgaagccaacattggtatggaaatgctttttcaaaaatataaattaaaaatataataatttttatttatttagctaagcccaatacgaaacacggatgagtgtcttaagatgattgacggaatgccccactgttcatgcccgcttgaatttgaatgtgtatattgtg

SEQ ID NO: 60988 - DNA, 470 bp, Heterodera glycines
ttacatactagccattttttattttattgtgaccaagcatatctttcctcgtatttctgggatttttttcagaatgtggtcatagaataggtgggttgaattatttgtattttttatgagtattatgtaaggatattttcgactaaacataaccaattccgagtttcatgaggcatcaacttcattcttttcttgtcctgcccaattgtctcaaatgtatacctaaaaatgcgctaaaaatgatcaaacccgtttttagccgaatatcctgtcaatatttccctattagaaacgatactgtgaattctttcgcctctttaattcattcgtgctttgcttcggattagtctaaaaatttctggacgccaattttacatattagccattttttattttatttgtgaccgcaaatttttacatactagccattttttattttattgtgaccaagcatatctttcctcgtattt

SEQ ID NO: 60989 - DNA, 275 bp, Heterodera glycines
gctcccgacaaaccccgccaccgagtcgtcagccgcccctttcaggctttcgaccattcatcactcctttctgccgccagccgaccctttaggctcccggcaactcaacccttcgctgtccgctgaccatcttaggcctccggcactcatcactcaactcaagtcgccagccgcccttttaggctcccgacaaaccctcaccgagtcgtcagccgcccatttcaggctttcgaccattcatcactcttctcccagccgccagccgccctttcagg

SEQ ID NO: 60990 - DNA, 473 bp, Heterodera glycines
  unsure (1)..(473): unsure at all n locations
atgcacttaaataaaaaggaaatggaaatatttatatntaagtgtatccgttcacntcaatcaagattgctttggcttaagcctatgcttaggctttatnttctaaaatttgtaggcgccattgaaacttcaaattttaaaaaattcaaagtaacctggctaatgattttatttaatatgtagtaaattttaattattcttttattcgaaatacagcataccttttagaagaatgtgtatttaagcaccaatttattaaaattttaatatatttataattaaaaaattgataaaaaatcataggaaaaatcagattttgaaatttttgatctagcaccgctagagatgactcacgcttcaattgtttaataatgggtttgaccttttaaaacgccaagtatgagtcactatttttaatttttcacttttcttatagaaaattcttcatttatagatattgaatattaaataaa

SEQ ID NO: 60991 - DNA, 393 bp, Heterodera glycines
ggcactttgttcatctccgacggtggcattgcgcagccatttaagggcaaagaacggcgggtgtttctgttcgagcagtcggtgataatcgccgagtgcattccgccgaggaaggagtacggcaacccgacgtacaacttcaaaaaccaaatcatggtaatccctcagaaccggcactttctttattcgtctttccaaaaaccaaattgcaattcattcgcttttcaggttaacaaaatgatgttggacgaaaaagtgcctgacgaaccgttgcgttttgtgctccaaagcagcgacccaaatcagcaggccacttacgtggcacaggcggcgtctgtcgacgacaaagagcaatggctggccaaattgtcggcacaattagaccagcaaaag

SEQ ID NO: 60992 - DNA, 1104 bp, Heterodera glycines
atgcaagagaaacggcaacgaccaagagacgaatggccagaggaaaacgaaacgctgctcagctacgttcaacgcatttacggaccggagaattggacgtcagcatggcaaagaggacgtgttctccgagaactccatgaactggaagatcaagggcgatggatgattcatcacaaatccgatcgcctactactcagcgtctcgcgaatgtatagaggaaaacgaccatttgccgagttccgcttcgtggaaggcagatactactcacacatggtgccagaagatgttgatcttcctccaagcagtaccaaccaaagaacagccggagatcataacaatcgacgacacaacggcaccggcaacaaatacggaacaaacgaagcacccaacaaaaccgcaacgaccacaatcgccaaaactcgaagaataccgcatggccgactccaaaccgaacacgcacagccaattcaacctgttcgagccatgcgacaacacgcacacaacttgcgccaaaacagcgacttacggttccaccgcgggcaaccgatttcaaatggaagaattccaaaacttccgtgccaacaatttcttcgaggcattgctcttcaactggttaacacgcaacatgaacttgccagccgaagagatttgggcggcacacgaaggctacattcagtcagacacaacagtggaagaagtggcgcaaatgttctaccaacaacaagttgcagacaacggacgacaaatcgcacgagaccagcatttgaccgaggtcatcaatgtctggcgtaactcctgtgaccgatttggcgaactttacaatcaaccggcacacaagcaagtgaagtttcggccaatcacgacggaaaacgaacaacaaagcaactatggagaatggatcgaacggctcaacaatcgtacggcggaaatcttctccaaagctcggaccaaggcacaacatccaacgtacctgaactacaactgcacaacaattctgatcggagacaacgttgcagaagtattcaaaccgctcttctacgacgccaaatggttcacacatttcccggcggacgaattccgactcatccccggaccgaaggttaa

SEQ ID NO: 60993 - DNA, 173 bp, Heterodera glycines
ccagtgcaaatccgttcgacatggaggacatgctgatcgccccattggaggacggtggtgagacggacttgctctaccccgacatggcctcggcagcggggtccgaccatctgcacgtggttgcaccaccggccgacctgaacgatttggacgagtacccaccgcttgcttga

SEQ ID NO: 60994 - DNA, 846 bp, Heterodera glycines
atgacacccattggagcattgggaataattctttttgcctacgggcttactatcctgctcggacattgctcaggtaatcaacaaaacattatcttatttaataagcataaatttaattttaaattgaaaggattgaagtgcaaatccggcgaggatatggacgagacggactattcaccatacataaatgccacaactaaagagtgcatatttgatcagcgatattgtttgactgtctactgttttactggtgaatgaatgactcgggatatgcacagtagagatcggataaagggccggagacccatccatttatacgggttttcatgggcttgtaacccgtcgtttttagccaataggctttttaggaggtatggcttttttcgcccgtaacccttggtgtcaaacgaaaaaccctcttatccgtggcattttttatgcggtcttggtcgtggcatttttgcattgagcggtctgcttcgtgccattttttgtgcatggatgagtatggtatatggataagttgggtataaatgagttgggtttacgtccacttaccccttactcatccataaaaattccgatctctattgcacagtgtgtttatattggaataaggaccccccaccttccattttttgtgtgacttttatcagagtttgccatgagccgacctagctaaaattttggctcccggaaaatgtttcagtaatacagtatttctaaaataagtactgtaacattaagtattgaattacaaaaggtcgttctgaattttttttttcttttttttttgtattaacattttaaagaggttttaaaataattttatccaaatacccaaaa

SEQ ID NO: 60995 - DNA, 509 bp, Heterodera glycines
atggatatggcttggttaagaatggcacatgcaataaggaggacagttttgctttgtcgcacgttgtgcatcggtctccaactgtacaggtaaaacaatggtttacggtaaaatgccgaacatactactgtatgtgtattcaattgtatcttgtaagcaattttatttccctgtcacggcattcggtaccaccgctaatttcatcagtcggcaatcttaaactaattacaaaaatttctttatataattactttttccctcctaaaaatactttcaacagacatttcgttctttcaacattctaattacctaactagctaaataacaactccatattcttctagcaagaaaagtatgatggtttggagttgcgcgagaagcattcccggcgataaatacttgtgccaatgccaatttggtgagcagggcgtcaactttggcaacgaaaagcggcgcctgcccttagcgatgtataatatgtacaaataattaaaataactttataatta

SEQ ID NO: 60996 - DNA, 606 bp, Heterodera glycines
acaaatgttcgacgaggacgaaaccgacaggtatttttgcgaaccccggacccgaattcgaactattaccgtaataatttcccgctcacatttaaggtgttcaagctgaaaggcaatgttgaaatgaatgaagctgatcgaacagccaacgaagtgggttttattgaaatttttaaaaattcaaaattaaaatttttttttaaggaattggacaatgagatcaacaacagtgtcaatgccaatgccaacaatgggacaaatgccgaaacggtaagcaattgtaattaaattttcaaattttaatcatttccccattttgatttaaggtggcggcagcggggatgagcgacagcggtgccaatgccaacaatgggacaaatgccgaaacggtaagcaattgtaaataaaattttaaaatttaatcattttcccattttgatctaaggcggcgacgatgaccgagcccggcggaacaaacggtgccaatgccaacaatgcccatcagcagctgagaaagagggtcagttttggacaaatgatgttgaagtgtgggcccatgttggcccaccattggtttttggggtcctgattgggctcacccctgag

SEQ ID NO: 60997 - DNA, 982 bp, Heterodera glycines
atgccaacggactttcagcaatccgagaagctgaaacgcattttggctctttgggaccgtggcgagggagtgatttcgcaacaattgttctgcaacattcactcggctgaggcgcatgtgcgcgaaggtgcaattatcgacgccatcggtggtaaaaataggagggctaattaactaatcaaacaaacgcgttttaggggttttaaaatgcaaatcgacacccatttagacaatccaaattacgagattgtccccgaatatcggggacggaaatgtcgggtaccaaatccctggcatggcatgtatttttaaaaatcaattacaattctgaaattgccattattgatgtcgccccgtaaaaggtgttgccaatctgaccaacgtggtgcgtggctcgtttcctgggctcgcctcgcgctggtcgcgcaaacaaatctccgagttcggtgcctttctggtgcgcgaggcgctctccattttccaacacgagcgctgccggcccatccgcgagacggacttggaggactgagccagcggaaggatggagacgaacactcaaaacgattttgacgacaattaattattaattaatgactctttttgatatttgttttttgcatttcgctttttaagattattatcgcttatgtttatttgtttgtgtttaatgtgctaaaaatgcatttcattttaatgcaacgacaaaaccttcacaggacaatcaattcccattcattcttttgtttctgcgtctgtctttttttgttactgccatttaatgtttctttttttaaatctcacgctgacaacaaataaatttaatcatttgtttttgtaaatttatgctttattaaagtcaataaaattttaacaaatctcctttaattgcattcaaccaattttaataaattttcaggtgttaaatgagtggcttttattaattttttagtcttactatcctaataatttttcaggtattaaa

SEQ ID NO: 60998 - DNA, 733 bp, Heterodera glycines
gtttgttcctaattcatggcacaaatgtctccatatcactcaaaataaaatttcaagtcgagttttcgctagcacctgcttaggtttatccaattggcaggggtttgatagtagtaatcggcacatttaaaccatttgacaaagaattaaatggttagtgaaggggcatactccttcaataaagattatcagaaagttctcaaagtttaagcttcagtttgataattattgattcattgcaaatatttgtttaggtcggtatgcgaaactttcatgtgcgaaagaaccattactactctccaagcatcaatttggacaaactgtggactctgtgcacagaacggacgcgcaaacaatatgcagaagtgaaggacaaagcgccggtgatcgacgtggtccgggccggctatcacaaagtgttgggcaaagggttgttgccgaaacagccgctgattgtaaaggtaagtgcaaatatggcagcattggagaaaattttgaaaaatggacaaacaaaacatttacacatatttgagggttgacctggaaaactgtttttactgcacttagaagggcttgactaagaacgaaggagggttgggggatgcgttctatattggaaaagctgtgatttcttacgaatattctattcctccctaacttcaaggccaaatgcttctcgcactctgccgaggaaaagattcggaaagtgggcggcgcatgtgttctggtcaca

SEQ ID NO: 60999 - DNA, 70 bp, Heterodera glycines
gttttcagcgcgcaaatctaaaaatggcatctacccaggaattggcggtcatttacgctattttggcact

SEQ ID NO: 61000 - DNA, 702 bp, Heterodera glycines
atgaaatttgcaaagaaaatgttaatgattcccgaggcggaatatttggctctgaggagtgcgataaatagtggtgattctctccaaaatgaaaaagcgagtttagacgcaaaaatatctcagaatttacaaggacccggcataatcgatgacctcaaggcgaagagacacgattggctctataaagaaagacgtacagtaaaggggatacttgaaaatagaccacagaaggtggtgattgagaatcatgtacccggtccgaatgttgcaccatatctgggcatcaataaccaattcaatccacaagagaccgaagaaccacggaaaataattattcctaggaaaagacttaaagagcaaactccggattcagattcagataatgatacacttgaggagataacaccggaatcccaaactgtgggatcctcaccaacattaaaaacacccgttccgaacaaaacatctattatacacccaacccttttaaacggtctttttaggtatgtaaaagaaaacaaagatttatttaaaattactgcggctggaaaggttcagtcgaatatgaatttgccgattgaaaacagtaattatagagatgttttgttgtatctcgcggggaagaaagatgaaacgccgcgcggtgcaaaatttctcaaagatcggttactgaaggatccaacagtaaaagatatgggttaa

SEQ ID NO: 61001 - DNA, 287 bp, Heterodera glycines
atggagagcgtctctctcgatcctggtgaggagttccaggaggaattgacggaagaattagaagaggagttgctaggaaaagaagagaagtgggtcacggcccaaaattctgaaaatgaggtggaaggagaggaaaaggagaaggatgagggtgaagaagttgagttaaatgaggacgctgagaagaagaaaaaggagtgggctacggcccagaactctacgaacaatgaaaaggaagttgagaagagtggagagatagaggttgaaaagagtgaaaagaaaatgaa

SEQ ID NO: 61002 - DNA, 1102 bp, Heterodera glycines
atggaaaagtacaccaacacattcaatttggacatggccactgatcagcattcattttgctctacggcccaccaagccgtggtggaaataaaaaacgaactaatcaatccaacaatgccggattgtgaaagtccagcgggtggtggcactaaaatggtgcaacaaattgacacacatttgtatgctagtaatcgaaaaggtaaattaattaattttaaaaaattcttaaactatcaataattgggctgcgaattttatagtcaaatgacttttttttttacttttttggactacgcttttttctttttgggatttttttttgacttttgtgcatttttttttgcgttttatggatttttatggtctttttggctaatttacattacttttttgcatttatttatgccttttatcttttttttttcaatttttgtcgatttttatttacttttaaaataaggataaaaaagatttaatgaatttgggaccaaaaaataaatattaaaatcaattttgataaatttaaattcttcgctttatttgattttgaagccaatgatgaagagtgcgcgtacagtgtcggctttattagtgccatgttcgaatttgcctctgcagcttcggcccatgctgatcaatcaatatctgatttgaaggagctaactttgaaatttgatcagcaaattggcatcattggcgaactgtgcaattgccttaataccgacattggcattgtgctcttccgaatgccacgccagggcaaaacagacggtttgaaaattactaaaaaacagagggggagaaccagggctgcacgcaattacggattacgggaatcctgaggtttcccagaaatgacgggttacaaattattgggacatgtagggttcgaatcccacccccgcacccggggacaggacaggttttttggcctcacccccgcccccgtgacttagacccccgcaatcccgcccccgcgaccttcatccccgcgggggcgcggggatgaaaacgcacccctaagaatggcattttctgggaaaaatgcaaaaaatttgtacaattttgaatttttttaaccattttgacaaatttttatgga

SEQ ID NO: 61003 - DNA, 1879 bp, Heterodera glycines
atgacaaattctacccattttgtggttaaaatttcaaaaattaaggtaaaatgaaggtccggcgttgccgataagcgccgccggaaaattttttggaattgtaataaaatatggtaggaaaagttgcaaaattttcaaaaaaattactgtttttttaaaaaaataaatcgcaaaaaaggcaaaaaaatgcaccaaaaagttcaagataaaagcttcaaactaagttaaaaactcgttttcgtgcatattaggctatagcaagttagcaaaaaggtaattattagagttgcacgggaccgggaattttgacaaaaaccgggaccgggacttaccgggaccagaaaagtcgggaccgggacctcgattttcgtccgggactgggaccaaccgggataatttttgaaaaaaaatttgaaaatttgagtgcactttgttacgaaaaattgcctatattcaaaaatgtacccataaaattttttaattctcgtttgtggggagaaattcgaagaatttttccattatgcaattttgagtgtaatatgttaacagaaaataataaactgaagcattcgttttaaaaattaaattttcaaatatattcatttcttaggggtggaaatttcgcatttcgcgccaaaaagcgaaatgcgaaaagcgaaacctcggccatccctggtatttaccatttctttttaatcttttgtaaaactttctgctccgttttttatctttgtcttttctcttctgacttttttatttcaatgcgttttcattttgctttcatttatctctgaagaaatttgagccgttccgtcggtggccggcgggcgacaaatacaaattggaccggcaaaatggaaaatggggggggggcaattaaaatttaatcaacaaatatatttttgtaaaaagcaaattgaccattttgtttgaatttggcaggtgtcaatctgtgatgccgaaggtgtcccgaaagcagcgaacaaaaacagaaataaaaataacaacaacgacagggaggaggaggaggaggaacagaagttggaggaggacggaaatgagaagttgggcagcgaactgttcaacgatgaggacattgtgaacaacaacaacaacagccaaaagaacacggcaaatttagggggtatttgaaaaaggaaaattggtaaaatttgggggaaaataattaaatttaagtcaccgaagcggaggacgacggaatgctgacggagcaggacaaacagttgcgcaaggtgttgtccgacatggaccgaaagcaactgacgttggcacaacgccgtcaaagcaacatggacgtaaggggaaagcgaaattgtgtaattaggcattagcggcatttttagtgctattgtgaaatgttttgcattaattaatttatcacggagcgaaagagtcattaaaatgtttaaatttgcattaatttaaataccgttaattgccctcacgtcatcgtcattctctgtgcttatgccctcttttcacaggttgtccatcaggcgagcggtcgtcgcacttcgacaacgctaattccgttgaccagcgcccaaatccatctgatcagatcactgtggagacaagtaaaaaatggggaaaataattaaatgctaattaattagttttaatgatttcaaaattgaaaaatgctttccgtttgtttttgtcaggtgtatctgagcaaaggcccaacggtgatcggctcacagatcagtcatcggctgttcttcaaggaacccgagatgcgcgagatgttccgacgctgcgcattgccacaacagttcgccaaccatgacagtttttccaaggtacaaacagcaaaaataagttaattatgccgtgaattgactatttagtgctctaa

SEQ ID NO: 61004 - DNA, 802 bp, Heterodera glycines
atgccgtcctcattaatggcgggcgattcgccgcgcgaaaatggggcggaggaacacgcggacatctacgcgacctcgtccaatttgatgaaaagtcaacgccaactgttgttcatcacccgtaatagccacccatttaattaatgttttttcatttatttaatcactcgtaatagccaattaattgctttttaattaattttcagcggctattggcttcgcctccgccctttgcattttgttgtcgttgtgcgtcttcctgctgtacattcagcgtcgtccggacggtgtctacaaaacgcatgagcacaacgcttttgtgccggttggaagcggtacggtaagcgacggtgacgaccaccacaagcagcagcagtacggtaacggcgacgaattcggcaccgcccgcggcaatgtccgtttcgcgggcgtaccaacgctaatgcacacgcgactgcttagtgctgcagcaggtggtgatcagcaacaacaacaacaacagcaggagaaacggcattatcggcacgtgcctgatgatgagacaactaaacgcgagtacttttgctgatcagtggacatagaaaatggccaaattcgattgcatgaattaggaaatggataaatgccatggcatcgccaaaattcaattattcccgctgaaaggcatggcaataagaaactctcacttctgctatctctgattatagtgattgatatctgctgatagtatttgatcattccgatcaactcaaacatttctcttctcatttatgcctttatttttttaaataatgaaaataaa

SEQ ID NO: 61005 - DNA, 436 bp, Heterodera glycines
atgaaaatgcaggatggagatgaagaagatgcatacattttgtaccaccgagccatggccatttaccgtttgataagcgactcaatgactgatgcgttcaaacggagccgggtaattatatttttgttttcctaaacagaccacgaaaccttttgttgcaggatggtcgtattttctacgagacttctggtcgcctgctttcggatcttgaaaaggttgccgagagtttgaagcaacggttcggacagcgtcaaataactgggtccacacttgggagttctaaatcgttttctgatgagacgaaagttgaaggctcattgtcatctcaatcaagtccgtttcaaattttctttaaatttaagcttggaattaggattgaccaaaaaaaaccataatgttcagcatctttgataatctactggttatacagtatgga

SEQ ID NO: 61006 - DNA, 54 bp, Heterodera glycines
atggacaaaaaagagaaagggatttcgatccctttcaacgttcctctttggaac

SEQ ID NO: 61007 - DNA, 812 bp, Heterodera glycines
atgctaagtaaactaaatttactgttcgacattttattcattggcatttcttttggccttgcgacagatcaaaatgccgggaatgatttgaagcaacttggacagtcgaccattaatgttttagcgagtgctgcaaatttgggcatcagagcagtgacaacattagccccagttgtacggtatggattacgatagattaatagacgttaagacttttttttttgtaaactaccaaagcgaaaagatcttgactagttgtattagccttttttatccatttattaatttttttgtttatgacgaaaattctttaaataaagcaaaaaacttgaatttttctataaaaatttttgaatttttccagaaatataaaatttgtcatccgctaaaattattttaaaacaaaaatttaaaataattaaaataatctttttttaacattttaaattctatttttaagtgaccaagtgattcctggtgcagtgaactgtacaaagacagttgtcagtgcgcttcctacggttgccaacgctaccaaaaacatggtcaataattatgccgcacctgccgccacaaatgccgcgcctgtaattgctggcgctgcggttgccgtaaaagaaaatgtggtcaagccgatctacaatcatggagtacgtccaacatttgggatggctggtattgcaatggccaatttgccggaatggcaaaatcagcgaaaggcgggggaaaattcatcaagacggaacagtaccggaagcagcgggaagaaaagtggttgcatgttggcatgctttggcaaaggagacccatag

SEQ ID NO: 61008 - DNA, 354 bp, Heterodera glycines
atgaaaaggaaaggaaaggccaaggaaaaggaaaggaaaagccaaggaaaaggaaaggaaaaaccaaggaaaaggaaaggaaaggccaaggaaaaggaaaggaaaagccaaggaaaaggaaaggaaaagccaaggaaaaggaaaggaaaggccaaggaaaaggaaaggaaaaaccaaggaaaaggaaaggaaaaaccaaggaaaaggaaaggaaaagccaaggaaaaggaaaggaaaaggaaaggaatgatttgggaaaacaaacagaaaagagatggtaaagaatggaagggaaagagaaatggaaaggaaaaggaggcgaaattggggggggggggagaagaagagcagtga

SEQ ID NO: 61009 - DNA, 693 bp, Heterodera glycines
atgtacaatgtgagcaaaatatcgaataatgtcaaaaaatctcttaattagtttcaagcttcaaaccaaattcatgaaaaataataaaaagtacgtttgcttttttctttgtcaattataatacttaaattctttttaaaaataaaaaacattttcatttttggatggagggaatcctaaaatttttttttagtaatttaaataattttgggaaaatttctaaataaattattaataaaaattcaagtggcggataaattgagacatcgtttgaccagtgtcttctttttatacagcaatctttgccggtgattgtcgcgtcaatgttgccctgctattggctctaccgcgaagtggccaaatggatgttggcagaacgccaaaaagccggcggcacaaacaccgtaacacagtaccacgaatggattgacatgtactgtagtgaagagtatgccgaggcggtggacgaaatgttggcacttgcggatgaattagcgcaagaagcggatcagcggacacgcgcgaaaatggccaccgtttttgagcgcggcttccaactggaatggatgttctggaagtccgcctatcaaatgtgccaatgggaaatttgattttcactaatagctggcaaaaatggctaatgcctaattactgttgggtttaatttgtgtgattagagcatggaaaaacaaa

SEQ ID NO: 61010 - DNA, 1693 bp, Heterodera glycines
atgattaggctagcccaggagtatatgataggaatattttcagtaatcattttaaaatataaaataaattattatcggcagggaagtagggtaattaggggggcgggggcggggtagtttaatcgaatttatacaatatcaacaataaaatattttgcattaagttgcgcttgagtcggaagtgcacaaatatttcggcgatttactcacatcaatcaaaagtgggcacaacaattacagcttggagctggccaacaaagtgtacatcaaggacggctttaaagtgttggatgcgttcaaagcgcaaattatggaacattacgggggacagtttgaggcggtggactttggggacaaagaagggactgcgaaggtcggaaaatatttgaagaattcttgagcaattcttgacagattctgtacaatttaccaacgaattttcagcaatatttcgatgggcaaaagttttgtcaaaattaaatttgaagagtttaaatttcttgtaaaccatcaacctccattaatttactcaaaatgtgaaaaaacaagagataaaatgtaaaaataaaacacaaaatttcggagttaaagattttttggtttattagcagctgcattttttttatgaaacgtgtaaaaatccttcagaaaatgatttagcagaaaaacccccaataattgataccccccattatttaattgcagaaaatcaacgactttgtggaagaagctacacacgggaagatctatgatctgatcgagccgaaccttcttggcgaaatgactcggtgtgctctttttttcttgataatctattgattattttccgattttccataaaaataaaattgaaaatttgtatttattgacactatcaataagttaattaatgttttaatttcagtttggtgttgatcaacgcagtttactttaagggcaactgggcgaacaagttcaacccgaaccttaccaaaaagaaaacatttcatgtggacgaaataaacaccaaagaggtggggaggaaaaaaataatttttttttatagtaattaaaaaatattttaaatttattttttataccattgagaaggtattttcgtatctaaatttattggccaaataatctatttttaaacattatgaaaattgtagtaaaattcaggcttatagagaatataatttaaatgtacaaatttagtaattttggcaactttctgtatgaataagtagggccacaaaattatacttttttcgttacagcatgtttgtgttttatgaatttaatgttatgtcaaaattttatttaaattcaaaaagttttcaaaaaaaatcgaatatcaatgactaattttccattgatttattttcatgccgggctcttaaaaattgtctctttattagctggacatgatgcacaagaaagccgatttcatttatttcgaagatgaacaggtgccatatttttaataattttttacttaaaattaaaaaaaaatgtttttcttattttttttatttgaatttgtgcatagctccaactgctcggcatgccttaccaaggtggtgaagtattcatgtttgtgctgttgccgaaggaccgctttgggttggccaaattgttggccgatttggacggcaaaaagttgctggaattaaccaaagaacggcgcaaaagcgaagtgcaagtaaataca

SEQ ID NO: 61011 - DNA, 306 bp, Heterodera glycines
caaaagttttttacaaccacatattgccaatctaatttcttgcagattgaaagccatccattgcctgccggttctcggcacagcaaagcactaatacggtgtttgactaacttcaaaaaataattcattacccaaaagttttttacaaccacttattgccaatataatttcttgcagatttaaagctatccattgcctgccggtctcggcacagcaaagcactaatagggtgtttgactcacttcaaaaaataattccatacccaaaagttttttacaaccacatattgccaatctaatttcttgc

SEQ ID NO: 61012 - DNA, 1007 bp, Heterodera glycines
atggcctacaactttgccagcaaaagttttttgatcagaccaaaggcctggtctggaaaaatggcagatcgaggcctactcattttggacacttcagtaccagctgaatgccgcgccagggtttgctcggaacgggtagtcgccagcggactttttgtagagctttcaaagggctatcgaaccatgtttaaaaatttcgaaaattttcaaaaattttcgagctaggcctaaaaaacgattttttggtttttgaattttatgattttttaacgaattttcccagaaaaacggagaccactttcaagcaaccgtttttcgagctctatcgattggtgacatttttagaaaattttcgatttttttccggaaatagaaaaaatttttggcctgagcgggacatttgagtcccgggcccataactcgtcgggggttgattttagcgaaaaattgtcttagaacttttttgtagagcattttaaatgctatcgaatggtatactatatgaagggaaattttcaaaaattttcgagctaggccccctagaaattttcaaattttttttggtgggccaaaatgggggtgaaaaatttttttctggggtattttgaggtgctgagcacgaatatgatatttgttgtttgtttcagattttttggaattttttaaaaattctttattttttgggaaatttttggccctcaggattttgtataatattggaaaattcataactcagtgatggtttcatcgatttaactataataatgctttaaaaatagagaaaattcaggagaattttataggatttatttggaatttctatctctaaaaataaaaaagatattccagaatatctggaaaaattcgaaatttcagaaaaaaattcagaactcggttctgaaaagtcactcgtgaaaagtaaaatactacaaaaatccgcaatgtttttctctataggataaattttatttcaagtttttagaaggttttttaaaaaagatacaaaa

SEQ ID NO: 61013 - DNA, 359 bp, Heterodera glycines
atgcacattgcgccattggagttacatccattggcacgcctggttcagggtcgttaccataaaatgcactgcttgtgcgttgcttcgtgggatcatgtacttgtacgtgttcttacgttacttgctcggctcggctgtggaggttttggtgtgcaggcgcgaacttgtggttctaattcgcgttttacggaccgtaactcgggcgcaccaatgcttcgcatgctgtggcggagtgcctggattactggcattcctgctttgatttttcgacctgaactcagacgtgaacacccgctgaacttaagcatatcagtaagcggaggaaaagaaactaacgaggattcccgtagtaacggcga

SEQ ID NO: 61014 - DNA, 365 bp, Heterodera glycines
atgttgggcagcgtccacaagtcatctcgaacgacctgtgcccatcagcggacgggggcatttggtggtgccaacgctagcccaacaggacagcaggtaggtggtgaataggaatcacttgggtaatgatccagcagcaggttcacctacagctaccttgttacgacttttgcccggttcaagccactgcgattaaatcggttccagtctgcataccgaccgaagccggaacactaaccgtccccgaatttctcgaaatggctcagtcccgggcagcgacgggcggtgtgtacaaagggcagggacgtattcagagcgagttgatgactcgcccctacaaggaattcctcgttcacggacaataa

SEQ ID NO: 61015 - DNA, 267 bp, Heterodera glycines
  unsure (1)..(267): unsure at all n locations
tccctagatgtntagaagatatttataagctatttctcagtgattaatcagctctcaaaaaagttgtcagtntaaaaccgcaaaaaaggcagaattttcaaattttttatttctatctttttttatagttcgaaattttctgtaatttttagtaggctaatagagcctgtgaagagctttcgaatgatatcaagattgtttgattcggtcaataacttcaagagttatattgactcaagttggctcagacggagttggcccgttccg

SEQ ID NO: 61016 - DNA, 519 bp, Heterodera glycines
atgcagaaaatgatggaaaacctttttatgtttcaccgtttgtatgccaacatgaaaagtcttagaaaaggggtaagccaacctggtggattttttaaaactcaattagaaaaattcacaaaagttttgagcaaaaaggcattcaaaactttaaattttagaaaagtacaaaatctatcgtcccaacaaaaattactattgtttttactaaaattagttgtaatttatgaaagtttttcgcataaaaagcttttagctaaaaaactgcacaaaatttttagccttctattgaacaaactctataaaaatatttattttattgcattcttatgtgagcctatttaattctttttacaccaaaaagttgagaggttttaataatttttaaagatttatccaacttcttatctgccctcattttacatcaaccaattatgtgcgattgaatgccatatggtcaccattgcaactggatttggcttccctctcaatgaaatttttgcaaattattcactttga

SEQ ID NO: 61017 - DNA, 243 bp, Heterodera glycines
atgcctgctgttgattgtttgaatggatatcgcagttacattaatgatcgcaatgcagagttaattatgggagatccgttggacccaaacatggaaacggatttcgattttgctggaaatttggcgctttttgacaaggctgttagtaattacaatagtaataggatacttatgcagttttaagattaaagctaacctttaaaaaataattttaagtgcaattattacgctgtcattgcatga

SEQ ID NO: 61018 - DNA, 258 bp, Heterodera glycines
atgaatttacatgaaatggtcacttcaacaccaacaccaaattatgtgccaattttggaaaaatcattttccaaaaatgagacggagacggcaacaattattgaaaaaacttattccgatgaaaacacaaacagtggtataaaatattattttgtctttcataaaaagtgattttttagacaataacagctgttctgcatttggtttcggaatgccaatgataatttgtacaattttgttttttttcaattaaataaa

SEQ ID NO: 61019 - DNA, 1606 bp, Heterodera glycines
atgcgaaaagcgaaatgcgaaacgccaaaaaatgcgaataatgcgaaaggcgaaatgcgaaaagcgaaacctcagcccatccctggtatggaacatgtgacttaattactattaaatacagagcctacaactctgttcatcattatactatactgaaaaatttatacaatttgacattcgaacccgtatcagttaatatgtatataaaattaggattattctctccggtcttaggggcaaaaatgccgggattccaggaacaaatcccttagactaaattttttttaggatgattcgacaattttgtggatggcatttttagctcgtcataattcactttatcaaatattttaaggaaatgaatggcttacgcattatgggtgtgccaaaagcccggagaaaggtgcatgtagcgacaatgttgagaaggagatgaaagatttgtatggccttgctgtgagctgttcattttgtacaattggacgcaaaatggacgacatgagcaacaagaatttcccgctgtacaatacaaccaatgttgtaatgccgccatcaggaggaggtgaaacatttaattaattaatatagttagtagagcctggaaatttctaatttgcggatcgagttgcgggatttgaactaaaaatcttttgtctggaggggatcctgcgggattaattccgcatttcgcaaatccactatgctctacacggtaaaggttgttttaatctgatttggcagacaccgttcgggatatcccttgtaagctatcggggcgcattacccatctctgtaaaggattttttgggtgctaggtcgttttgtaaaactgccaaacttacacatttttcgttactttttttaaacacaaccaaattaaaaatctacatattacgatagctctgggcttgctctattagcataaaatttcagaaaatttcattgagttttcagaaagtactaaccaaaaagcaatctatgcgctagcgtgtgataccaagagtatttaattggttgtttttatgaaaagttgacggatttatctcgaaaaatctgtaaattgtcaaatgtattacattagtccatttaacatttaatttagtcaaaaaaaaatctgaaaagaagcaaaactcagtgattcataattattagtgaatttgaaagggcgtataatcaagaatcaattataattatatgtattttgactaattttttgagttctgccaataaaaaagtatttaaaccaaacattttagcagatggagacgatttttcatttatgtcgacaacccaacaactaacaacatcatataatttatctgaaatcgctacgattgtgccaaaaaaaatgaatttacatgaaatggtcacttcaacaccaacaccaaattatgtgccaattttggaaaaatcattttccaaaaatgagacggagacggcaacaattattgaaaaaacttattccgatgaaaacacaaacagtggtataaaatattattttgtctttcataaaaagtgattttttagacaataacagctgttctgcatttggtttcggaatgccaatgataatttgtacaattttgttttttttcaattaaataaa

SEQ ID NO: 61020 - DNA, 324 bp, Heterodera glycines
caggcatggaccaaattgaaaaataaaaagcgaaatgcgacaagcgaaatttgcgaaactgaaaaatgcgaaatgaaaaaaaagcgaaatgcgaaaagccaaaatatgcgaaaatgcgaaaagcgaaatgcgaaaagcgaaattttttctacaactttttaatagttaaaatcataaagcaaaaatcattttttaaaattttattccaactttaaaaatcaataaaacgcttttttgaggcgcgctttttccaaaaaaactttttgggaagagggagggggcaggcggcaccggcaggcgtcgccggcaggcgccgccgggaaa

SEQ ID NO: 61021 - DNA, 364 bp, Heterodera glycines
atgcagaagggatacggtagggacaataaacggtgttggcttgaagatgaacttttccgaagaagaatgcgagtcaacatatttctggcaatcggcatacaaatattgttatgcttcgcattgtttaagaggtatgactttggttaaataagaccaattaaacgaattgaaaagggtaattataatgatgaatgttaattaattttaaagtttgacggttccctggagcacgactcaatttaaaacccaaatatgggtcaaggagtttaattactacttaaatactgagttcacaactctgttcttatttatatcccacaaatatggatttaaagttcaacctaatgcttcaagtcttatctaa

SEQ ID NO: 61022 - DNA, 341 bp, Heterodera glycines
atgaaaaaagaaatgaatttaaataaaaataaaatgatgaaaaagagtttttatgaacagaaaaagaaagaattcattgaaagatttgatgaatttaaaagtttatattgccaaggaaaacagaaagaatttgtgaaggtattgggcatttctgagttgacatttagaaaacggaaaaaagaattagcgccaaaatatcacaaaattaagacgattttaatagttattttgtttaattttcattttaaggacggtattccaatgaggacaattgagaaagatgaagcaatatttcaaaattaaagaaaacaatcccaaaactagtgacaaaataattgcca

SEQ ID NO: 61023 - DNA, 672 bp, Heterodera glycines
atgcatttcatatttttaataattttcattgcttttaaaattgaatccggaaaaatccaaccaaattttggcgaaatattcggcaacgcatgggacaataataaaagagaagaaaaagcgatcaaaattgaacaaaatgagcaaaatgataactcagcgacagttgatcaaatgggtgagggaaatggaacgtacccaaatgatcaaaagaaaagtgaaatcattagcaaatttgatgcaattaaacaaaagttaagagaaaaagaaaattttcacgaaaagaacagaaataaaattgagaagaaaattgctagattattaggcgcaaatcgccataaaatatataaatggaaaaaagaattatatttaaataaaaataaaattttttatgagaagaaaaagagagaattcattgaacgatttgatgaatttaaaagtttatatggccaaggaaaacagaaagaatttgtgaaggaattgggcatttcttatgacacatttcgcaaatggaaaaaagaattggtgccaaaatacaataaaagtaagataatttgtttttctttttttagagaaatttgagtgaatttattattctccaccttgcgcagcgggtttcaaaatttaatcgacttttgccgggttcaattttaaaatcaatgaaaattactaaaa

SEQ ID NO: 61024 - DNA, 497 bp, Heterodera glycines
atgacccagggacggtcccacaatttcggctccggcagtgtgcaaataggcgatgctgggaaaattttcgaaaattttctcattggtttaggattttacgaataattatttttaatgaaaaatttgggagagggaaacttgtaaaggaaagaaaccaatatggaaaatcaaaaaaaaattcacaaattttagcaaagagctaaaagtcatctaaaataaattataattagttggtgaaccttcaaaactcgaataaaattcttaaattattcaatttttctgaagttttagcctaattatccataaatggcataataatgccctttcccacacattttttgattggcgagaatttcgaggcggagaatttctcgggcttttgctactaggctcttagtaggtttttttttgaaatttctcaggtactactttcacggggctcatttatcgaatgtgattctcgataaaaaagcttctttttttgcaaccccatatga

SEQ ID NO: 61025 - DNA, 374 bp, Heterodera glycines
atggcaccacgacgcaaaagaaaggcggctcaattggtcgggcaggacgaagcggtggtgaacggaccgagcgcacaggtgaattgtgttcaccatcaaattttcacatttaaatttcatatgctttttattttcacagttgccaacgaatgacggacaacaattggcgtcagcagcaccagtgacaaacaatggcaccgtccaacaagcggagaacgacggaactgatgcggtggcggcagcagcagcaattgatgacaccggcggacaagtacaatttttgtattttcgttagctaagggcgggcgcttttggtttaaaaattcaccggatggtataattgaggatgtaaggcacacaaatgcaccttttta

SEQ ID NO: 61026 - DNA, 411 bp, Heterodera glycines
atgaaaagacgcattgctcctcttactactgctactgctcctgctgagcaacataaaataattggtcccgagtcgcccaagccacatgaagagacggccaaaaatgttgagccgaaggatgagttggcaacgaagaaacgcaaagtggacgaccgagagttgtggaaattggcaaaaggcaaatttttgctgaccacctatttgtgccatggtaataattaataacaatttcatcaaattttaatttgaatccataaattttgagatgattggaatcgtctgtacaacaaccagcagaaagtgaagcgcctggagggggaccgttttgccttcggctttgagatgtgtgaggaatgcgtgtgggccaactgccgcgcaaccgaccttttggcgccaatgaagaaaaagtga

SEQ ID NO: 61027 - DNA, 1781 bp, Heterodera glycines
atgaatttatggaatttaaatatatattatatatttttttttataattgaatccgacaaaatacgaccaaattttgataaaatatttggagatggatatgacaaaatgtaattgaagtaaaagtgataaacacggaacaaaatgacgaaaatgaaaatgcactgatagatcaaatagatggagaaaatgaatcggtccaaatgatcaccaaaaaaagagaaaggattttaaaatttagagcaattcaagaaaaattaaaaaaaaatatccatggcaattcagttccaaaattgatacaaaaattgcaaaattcttaggcgcaactcggaaattaataccaaaatggaaaaatcaattaaatttaaattaaaacaaaattaaaaagcgattttatgagcacaaaaagcgcaaatttattgaacgatttgatgaattaaaacattttttagcaaacagaaagaatttgtgaaagaattgggcatttctgaagcaacattttggaaatggaaaaaagaattggttcaaaagcaccaaaaaagtgagttgatatttttttaataaaaactaattttaaacacaataataccaatgaagatatttagaaaaggtgaagcaatattttgaaattaaggaaaaaacgcaaaaattagcgacaaaaaaattgcagagaaattgggaattggattggcaactctgaaaaggtgaaaaaggatttttcttcaatttcaattttgaaaaatgaaatgcataaaatcaattcaagttatgtgatttatataggttaatgtattattcccattgtgattaagcctgaaaaatcattgcgtacataaagtaaaattcatatgaacattctgaatgctgaagttcggacccgaattcgaggaaaaatcaaaattccaaattttcgaaattaatgtttttgattaaaaatcggtttaaatacacggaaacaaactgaaatccatcaatccttcaataagagatcattcacgccgttttaattccaatcaatcaatcattgaaacgcaaaagcgtgacgccgaaaataaagaaacaatatcaaataaaaattacgtcactttttgagatggggtggcaaggaaatcaacaaatttaaatcagattttacaagaaacttgacgaattcatttgaatttaataattacgtctctttaggaaaatggctacatgtatagatgagaggttcgaataaagaacgaattttggaaaaacaaaaaggattcgttgtttgtttttgtaaatatattttaatttaaaataatttcggggaaaagttttaagtctattttaacctacaactcacaagcgattcttgattataaattattaacaattcagcataattagattgtgacaaatgaatgattgttaattttttaattgaataaaatttgaaacataaatttttttcagcagatcacacgggacaattaaatccagtaatttcgtcaatccattctttgtccagcggagtgtataaggatacaatgcctgttgagaaaaaaataaattaaatttttaaaatgaaaaacgaaaattgtctaatttgtaacaaactttggtttgaattggtgttgcatatcccagaagaaagcaccccaatttggacaaaagctgtgccattggaagccaaaagtgcgctgccactgtcaccctattaaatttgaaaaaacatcataattattggaaaaaaatttttataaattgaaaacaaaatttaaaaagtggcaatttttagttatttgttttttttgcaa

SEQ ID NO: 61028 - DNA, 299 bp, Heterodera glycines
  unsure (1)..(299): unsure at all n locations
gaatttgaatgcancggatgcaaagcagagaatcactgaacatcgacaagacagacnaaatgtattcattcatccaaattataattacaaaacatttgaatccgatttggctntaattaaggtttgttttntaataaaatttaattttttaatttttatttttttaaagttgagccgtcctttgatagctccgctatttcaaccaatttgcatccattgcggtgcagctaacaaattcctaaatggaactgtatttgttgcgggatggggataattagagggtaatttcaaggaataaa

SEQ ID NO: 61029 - DNA, 1172 bp, Heterodera glycines
atgactaaacgccgcaagtgtcagcgccaaaatgtctccgccgcaagtgtcggcgccgtaagtttcgccttgactgggcgccgcaagtgtcagccaatcaaaaagtcatgaaaaaaagtttaattttaatttatttttattatttagcttgaccatcagcgtttgaaaagatgttaaaggcctgtcggttcttttcattttcgtcactttcgcccgcaaaacttttcccatttaaagttgattatcaaaatcaaatatattactttcatattcgagtattaaaaaaaagctaaatatttaaattattatcataaatagtaaaacaaaaattttataataaaataaaaatgaaataatatttacatgggaaatgttacgtatgcatagaaaatctataattgattggaagcaaataaaattatgcatctctattaactaatctaatgatgtaaatggcatttggcaataaaaggtaaataaaatgggtaaattcgggaataaatttaggaatttcggtcttttcctttcggtccggcacattcccaatatttcttgaaaaataatgtgattcttttcaatccttcattttcggctgcaaaaattttcccatttaaagttgtgattatcaaaattaaatatattactttcattttcgtcgggccaggccgttttcgtacgaatatatgtttttggactttaatttttttatttgtaaaccaaacccaacattgttggtattgtttgatagcccttctgatactctattagcctgcagaattccaaaaaatttcgttcggtttaaaaaaaagtttgagccaaaaaagttggaaaatttggttttttgaatttttctggccataacttttttgaactatttttcgcaattttgcaggctaatagaggacacatagagctatcgaatgataccaaaagtgttggatttggttaataaagaaaaaagttatagccaaaaacttgggctcgtacgaaaacggcccgtacgaaaacgaccctgaccgcattttcgtgtattaaaaactaaatattgaatttattagattagatcgtaaaaaacgcgattaaattgcttttccatcggctcgtttctgatcaaagggctgagtttttgctcgcagcaaatccaatgttgttcgagattttcgaagaataaa

SEQ ID NO: 61030 - DNA, 1038 bp, Heterodera glycines
  unsure (1)..(1038): unsure at all n locations
tccctaagtanatcccttgaatgataaaaaaacctttgaccattggtgccattatgcttcaaattgataattggatcaattaatttggatattttcaaaaacaatttactaaaattaaaaaaaaataaaagttgagtttaaatttaaattacaatattaagttttaataatctcaatatttttcttcttttatattttaaataaattattctcattaagaaattccataatttactaaatttatttttttttattttgaaaaatacctcttttcttcccatccattaacaatttttgctccggtaatgagaataacaaataatgaaaaataatatttggacttcattttattgaaaagtattgggaatttgacaaaatgaatgaatttgtttagcacttttcatttttcagaatgaataatttgttatcgaacgaatgaatcaccctgagaaatttataatttttcaatgtgtgctgaatgcgaataagtataaattttcattttatcattaaaaaaggataaatttatttttgcggagccgacacttgaggaccctccaaattacttagcagaactaaatgccggaaactgttgtcaccgataatggcacacagtttagctccaacggtttcaaataattcgttaaagaaaatggaataaaccacctcttctcagcgccatacaatctcgagtcaaaaggacaagcggagcgctttgtcgacacctttaagtgaacatgtcggaaacagaagaaggagggtgcacaaaatgtagtgaatacatttttgacatcgtgtcgaacgtcgccggatgattccttgcacgacggaaaaaatcctaccgaactttttattcttcgaaaatctcgaacaacattggatttgctgcgagcaaaaactcagccctttgatcagaaacgagccgatggaaaagcaatttaatcgcgttttttacgatctaatctaataaattcaatatttagtttttaatacacgaaaatgcggtcagggtcgttttcgtacgggccgttttcgtac

SEQ ID NO: 61031 - DNA, 980 bp, Heterodera glycines
atgccgaagaaggggtggaaccgggccgggttccgtcgctttgctaggctggaattccgcggtttccacagttttttttgggcctccggagtcacgcagcggtacgcacccgcacacaaagttcgtgcgtccggaggtcgggcgtccgccagacggggaaagtgccggtgaaccatccgtccaacagagtgccgttgcccaagtgccgcgcgtgtttcacatacgcattctcacgcaccttatttgttaggcattatttgtaaaatacgagttgccatttgtacgagttgccattgctctgctcaaaaaaggaaaagtgtcttgggccgccgtggagtttcttcggtacgtaaatttaatggatggatagagagatataatcctttggtcctcaagaattccctttttacaaagtgagagaaaatgccaagtttttaatgtagtagaaaataatactttggcattttttcacggcatttggtctcactttatgcaaaaaaaggggaagcgcttcttaagaatcaaaggatgctttctctatccagccacaaaaaaattttagtaacagcttaaaaatatttggagctttggaacaatgccgacctatggttgttgttgtcttttggccagcagttttccccgtcatcaattaattgccctcggggcccttgtcctcaaacatttcaccaaatgcatttaaaactgtttttttatcgttccacaaccattcaatcattcaatcattcattattcattcacttggtagtcgatgaacacagtgacgggcaacgcaacggcggaccattgctcgtccaatctgatcagataacgaacagcttcacggtttttcatcctttaaaaatggtggttttgtaaaagagattaagccttgtttttttaacttcacacgcaattggaggagtcgttgaagccaagagagttcactggaaaaagggaaaaaagaaaaataattcaataaa

SEQ ID NO: 61032 - DNA, 303 bp, Heterodera glycines
aaaattccctcagaaataaaatgactattgtgcaccgccctccctctcatactcgagagcatttgtatgtgtataaaatttatcaaaaaaagagatagccatttttctgggataacctctaaatataaaaatcctctgtgaaataaaatggcgattgtgcacagccctccgtctctacgcaagcgcttttgtgaggtataaaatttctcaaaaaaagagatagacatttttctgggatagagtataaatttaaaaattccctcaaaaataaaaggtctattgcgcaccgccctccctatcatg

SEQ ID NO: 61033 - DNA, 304 bp, Heterodera glycines; identical to SEQ ID NO: 51570

SEQ ID NO: 61034 - DNA, 767 bp, Heterodera glycines
atgctggacaagctgggcggcgtttttgcgcctcgtccaatgtgcggtccgcacaaattgcgcgagtcgttgccgctcattctcttcctgcgcaaccgtctcaaatacgcccagtcgtacaacgaggcgcgcatgatttgcaaacaacggctgatcaaggtggacggcaaagtgcgcactgaaatgcgcttcccatgcggaatcatgggtatgtgtgtcaatggaatgaaatttgaaaaattgggatggatcaaattggcaataacgaaaacggatcaacattggtataattgccttgaatagcttgttcatccagtagaaaaatgcgggagtttgattcatacaaatggtttataatacaaagtctaccaagcattttcgaaaaatgagttggggtaaatcacggaagatttagaaaattggccgggatcgaaacctattttgtattgggatttacatttccggtttaacatttacaaaatttccccctctgatttacccattgcaaatgtgccgtttatattcagtaccatacatacatacattatttttcctcatgttcagatgttatctcaattgaaaagaccaacgaaacttttcgtttgttgtacgatgtgaagggacgatttgtcatccaccgaatccaaagtcgtgaaggccagtacaaactgtgcaaggtgaagaagcaggcggtcggtgacaagcaagtgccgtacattgtcacgcacgacgcacgcaccattcgctacccggacccgcacatcaag

SEQ ID NO: 61035 - DNA, 642 bp, Heterodera glycines
ttgatttcttaattcaggtgatccccgaggccgatcgacaggaatgggccccgagcaacacttaccgcggcattttccaattttgcttttggcgctttggccgttgggtcgacgtaatcatcgacgaccttttgcccaccaaaaacggacaattgctcttcgcccgttcaaaaacgcccaacgaattttggagcgctcttttggagaaagcttttgccaagtgagcgcagagacaaaacggcacttcagaaaataaacggaaaatgaaacgatttctgctaattatccatttcgaaaatttgatctttttcaaaaggcatttcacaaatttgaaataccctcacaattagagagtttttaagcattcctcctgaaagggctgtttgtttttcttacgccttcttaagattgtacggctgttacgagacgcttgtcggtggccaattagcggacgcactcatcgaactgtcgggaggcgtggcggagacactaaacgtgcgaaagtttttgcacatccataagcaacaaatccaacaacaacagcagccgatgttttccgcgtcgttcaatgcctgcggaataccgtacttggcatgggacttttctcagtctgccagatacgtagcggagtcgaatggcgcc

SEQ ID NO: 61036 - DNA, 929 bp, Heterodera glycines
atgtatcagattaccccgacaatcaaccgaacaaatatagggtacgtcttccaaaacctctacattttagtgggtcgtgggtttgtgggctgcatagcatcagctatccctactcatggcactctacaattggtacattggatgaccaatggattgacattcatttcaccaatctccattccgttgatgaggaccgacagcgtgtcatcagagtacctgtcccacaggcgtcgcacaaaaaagttgagcaactcagggattttttacaagcaacattgaagagtcaagaaaaagttagacttaagccgcttgcgcatgaagaagggtacttcgataaaccggtagtgctcggctcgcctccacacgccaagcgcctcaagagatcaacaattgatgatctctcttcactgccctctcccccgagatatgatgagacagatgagcaacaatcacagcagcagcagcctcagtctccccccagattcgatgagacaaagaaagaggatgacaaagtcaaagaaacaacccctccttctgccgctaagcaaccgataccgccggctccaacacttgctcctccttcacatcctccaactgaagcgccaaaggcaccaaaacaggcagctccaaaatctgctacagtacctccccaaaagccaagtgtgacatctactattactgctgccaaaacaaccccgcctcccgctcccattccacccattaagcaagctccatcggccccgaagccttctccgtccaaaacagcggctgtgccgaagccaactccaacacccactccagcatctaaatcaactattccgactcctgcttcatcgaccaaggcgcagaatatccctaaaataccaccacctctggcagctaaaccaaaggagccaaatgtcgcaaagaagtccactgtaccaactacc

SEQ ID NO: 61037 - DNA, 694 bp, Heterodera glycines
atgggagatgaaaaggtgaataaagttagcaataaattcaaaattatctataccagaaaacttatgattgcaactgtgttggatcccaattacaaaatggatttttttgaccgggaaatgcgcgatatgtataaacggtggattattgatgagctatcacaggacctcgatctcagccaaaattttgacaattctcagcttgtgaacgaaattgctgaatgttcaagccaagactcgaacccagtaaaaagtctattggatgaatttgttcaggtccaaaaaaaaaataaaatcacaatcttttacatatttaggaaaattctttcgggaataatgaaaatttgtatttggatgtaaacgagacagaattgatcaaacacgaagtgaatgcgtatctgaacaagcctcgcatcaactcaaatattttcaattattggtcgataaattccgaaaaatggccaagactgacaaacttatttaggttacaaataaagtaaacccatataaaattcattaattaaggcgcttcaactcggctcctgttggttctcaggaatctgaacgacttttttcaattgccggaataacacttactgatttaagaaatcggttaactgcagaaaatttggagaagcttctttttttgcatcggaatttaccaatttataatttttcttattgatttttaaacaaa

SEQ ID NO: 61038 - DNA, 596 bp, Heterodera glycines
cgcttttccagttcttttgttatgtgataaataggtttgagttggtcaacaagtgtacgaatcaattcccaatcagtttcttaaaaaaatgtgtgaaaaaataaaatgacaaacaacccgaaaacggctcaatattaatattagaatttccaataaacagtccaatagccgtcttgttttcataaaatctctcacacatttgataaacagagttccatctttaaaatgaatttaagaatttttatcaaagacatttaactgacctcacttcagttgatttaattaaaacatgatttggtaaatccatttcctgttgcagtttttgaaaatattctctttgaactgatgatttccttattttcctaatgacttttttgattttttcagaaagcggtaaaaaatccgagtaaattttaataccatcaccgattgacttaatttttcatttttaactagaagaaaacacagacttacaagttgcattttatgtaaaaaacaatcctgggaatcacatccaaggatgtttgtgccaagcttcatcgccgactgagcatcacgtaaaacaagatgtattttgaaatgtcaatgccaaattt

SEQ ID NO: 61039 - DNA, 1091 bp, Heterodera glycines
atggcttcagcaaaattgagttggaagaacgaaaaagcatcgttttttcaaatacaggttaaaaataataattttatgtaaaaaaaaagtaattattcattcattttgctcatttgtcagttcgaagtatgtacgagcttatacaaataatgaatgaattgagcatacgatttaatgactcagcgctggaggtaattattattattatatccaattaatttattattcttatttttaattgttaaattattttatgatatttatttatttggatttaataatttttaaacatcgaactttaatccaattaaatatttttttttcattgtgaatagtcaaattatactatgacattttcaactattaatttattttatttttaaacattcttaatataacaaccaactattattgaattaatatttatttattcattttaatttaatatttttaaaccatttataatttagcgattattaaaagattcaaatatattttattgatagattaaagctatcacatttagatgttaaaaaaatctatttatcttctattaattgttatattaaaattaaaaaaatccttgagtttgtaaaataaaaggctggggatgcatcacattaaaattaattagttaattaattaattatttttaaatataatttttaattaaataaagaatgaagtcaatatcatacggttacatgtcgagaatggtcttgaatacactgagatcacgtcatcagtgaaattggcaatccaaaggctatggaaagattcggcaatcattgcggcagcgactcacaaaacaaattatcatgtcattgatagcgcatcatagtaattaatttgctaattaccgacagataaataaatattaattttttaattggggtcaattaatatatttttatattacagctttttcgaaaacattgaaagattaacagaaaagaactatttgccaacaaatcaggacattttgatgaccagaatgccaacaaccggagttgtaaagcttgtatttacgctcaaaaacatcgaatttaagtaataaaaaattgcgtaaaaattcaatacgaatttttgaa

SEQ ID NO: 61040 - DNA, 1580 bp, Heterodera glycines
atggatatgacaaatgtaagggtggatggagtgcccgaatctgacaatttcgtcctgtttacaactcaatcaaaaaaagtgagcttgatcaccccaaaaagtggagagcaaaagccagaacatggtgaataccaagtggaaattgggattaaaaaagcaacaaaaattagattgcttgtcaattttaatgttgacacatttggcaacgcaatgacattgattcttgagaaaatcaacaaacaacgccaagaggcgaaaaggaatttggtgataattacggacatgggggtggatgatcaagttgcactggcgatgatcagcgcaacagaattggccggtaatgtgttggccattgggacgacggagcaaggaaaagaagcagcattggcacaatcactgggatttgagaaagtgccagtgtatgtgagaagaagtaatgaagaactagagaaaatgttttttatgaatcccaatcatagtaggttcagtttgcaagttgaaacgtatgtcggcattttaccctgaaaatttttaattttagagaatcaaaaaagagaggaaaacgaatttcaacattttttgaaaaatttgttggatgaaagattgaaatttatgggcgtaaaggttaattttttggtactggcacctccgactgatttaactgcagtactattgaggaataaaaaattggcagaagcggttggggaaatactcatcacgggcgaatgtaaaaattgccaagatttacaaccaccgacaccgcttagcctgaacaaatttttgtgggaattaccaagggaacacaccaagccaacaacctacaatgttagaatggacgcattggcagctctgtatcttttcgaaatggcctcaaatggtgaagtgaatgtcctactagtttcttcacgtttacttgctgaaaagttcggtgctggggataattttgacaaaagatttccaaaactgaaattgataagcaaaaagacaatgggtgctaaaattattgtaaatcgagaagaagaatttgaacaaaagccacacattgaccagcaattcagtgctgccggtccaatagctgtgcttgcaattatggatataacaaatgtaagggtggatggagttcccgaatctgacaatttcgtcctgtttacaactcgatcaaaaaaagtgagcttgatcaccccaaaaagtggagaggaaaagccaaagcatggtggataccaagtggaaatagggattaaacaagcaacaaaaattagattgcttgtcaattttaatgttgatacatttggaaacgcaatgacatttattcttgataaaagcaacaaacaatggaattacaaaatttcgtccgaaaaacaaaaggtataggacaaattagaaaaaaattgttctcagatatgactcatattattcaataaccaatttaattatcctaattaggggaaagagaaaaaccaagatccaaatgatgagaaaaatactgcctccagctcaagtgtgccaagcgaaaaggaaaatcccaaaaacgaagaggcgaaaaagaatttggtgataattacggacatgggggtggatga

SEQ ID NO: 61041 - DNA, 1381 bp, Heterodera glycines
atgccttcaaaacaagaagttaaaagaaagaaggaacaagagcggtaccaacggcagatggagaaatctgtcagccctggtcgctcacccgtcccagacgggggtgcagatgagaatggggtggcatcgccccggggcttcaacaccccaaatttaagtgctttgcaattaagcaccccggcttcttcaattggaagtaaaagaaggggaagacccccgaaagccggagcggagtcaatcacgccttcgcaaaataatgtgtcttcagttgacacacaatttacatcggccactcaaaatgttgagtcgccgcctagcaaaatatggaaggtcgacgaagttgaccgacccatgtctgctattgaagcaattgcttcaacgcctatttccacgcaaagaagccgtggagggcggccggccaaaaaaagaggcggtccaggcaggagcaaagcaaatgattccatgagcgagcgctcgttaatggaccatagctctgaagctaccacatcagtggcccttttgccaactgtgcctgaaaagataaacttcagcacagtgcaaattaatttcgctacatcgcgaaattttgcctgtaaaatttggaaatgggcagcaatcggcctttacgaacgtgatggcgaaacaccgattgccccaagatctggcccaagatacattgagacctgttggaatgatatgacccagtttctcaatgacggctttgctgccacatacttggcatacttggcaaccatatcacaacgaaaagtggtcgttgttgacccaatggtatggagcaatggcctggacagagtcatgccttacaaaaatatgacatttgggtacgaccctaatgttccggcagaagttatacttttgccagtacatttccctggacattggactctcattgtccatgatgtgcaatttggcactcattttgccgattctttgcctaccacatatggcaggttggatccgcaactgacggataaaattaaaaatatcatttcggatattttgccgtcaacagtgttgaccggtattgttaatgccataaatctgacggtccaacacgatggaaatagctgcgggtactttgtgtgcctgtatgccgaatcctggcttatgaacaatcgcacatttgttctgcctgatttatccatcaattatgaaaaaaagcgcattttatggcacattaacgagctgtatggctctgataatgtgccatatcatccaagggaaggggtgccaactccttgcccaattgtctatcggcatacggatgaagcgcagtcgacatccaaggccgctgagctaatggaagttgatgaacatgatgatataatgatcatcgaaccacagacaagtggacagggca

SEQ ID NO: 61042 - DNA, 303 bp, Heterodera glycines
atgtctgagatttggaagtttttcaacaaaaatttgaccgatggagcaatttgtaagctatgtggaaaaagaacggcacgaaccgatgggtcgacaaaaggaatgtggaagcatttggagtttaagcataaacatgaattttctcaactcaaaaacaaggaaaatctgagccaaaaggacgtggtaaaggtttaattaatcacaaatatttttaaaaatttattttaggatcaaaagcaaattgacaattttatggtgatcaaaaaaaacgcattggaagaggccgaagaatgtattacatga

SEQ ID NO: 61043 - DNA, 58 bp, Heterodera glycines; identical to SEQ ID NO: 51629

SEQ ID NO: 61044 - DNA, 897 bp, Heterodera glycines
  unsure (1)..(897): unsure at all n locations
atgtcaaacgctctttcgaccgccaatggaataccgtcgtcacaatttgtgcaaaatccaagcatcatgcaacaaatggcgatgaacaaccatccgattaacaacaaatttgacattggcaccaattcacttggaggtaatggcaaaaatggcggaatatatttttttgaatttttttaaatttcaaatttagtaaatcagcatcaatcagtagcagaagcaccagaagcagcacatcagcagaaaaagtgagaaaacaaattgttaaaaagaaaattaaaattaaaaacttataatttgatttagaaacaaccgaaaaaataatcgacatggaaaagggggaggtcaacataaaatgtaagttattgcatttattgaaaaaccttcccccctccccccccccctgctgaattagcctgaaaagcccactttttgaaaggggttgaaatataaagcccctggggcgggggctcaatttcaagaaaaacggcaattaaattatgtctttaaagcccctggtgagggggctcaatttcaagaaaaacagcaattaaaattatatttttaaattgaaaaaactgaattaagacatgtttcacaaaatggacacaaaacaacaaacaaagggataaagctgaaggaaaagcgaaaactcagaattaagagtagcaaagatatgggaggaatgagaagcaaagttaaaaaattgatcatgtaagttggcgcgggggagcaatggtgggtgagcactgatcaggagaaattttgatcagttctcgtttgagccatgatttttttanaacaaaaagtaaaacaaattattttttcnaattattaaaaaatttttttttgcactttatttaaattttatgttgaaaaaaagcatagaaaaataaa

SEQ ID NO: 61045 - DNA, 209 bp, Heterodera glycines
atgtgtgattgtgtgatgatgacctgctcgaagatgacgagtaagtcatggtccaaaatttgttgcagacactcctcaaaaatggacaaaacgcgtgccaatccgcacgcgcggaaagcggcttccaaataggcgaaaaagcacagcgtttcactcttcaacgcctccacattgccttttaattggttaattaattaattaataattaa

SEQ ID NO: 61046 - DNA, 1107 bp, Heterodera glycines
atgtgcgcgtttcatgtgaagcaagcgataaatcgccgacctcaatcaatgggatttatgcaaatgtacagctcaaaagaaccaaatggacttcagtttcagcgccttgttcgcaaaattggggctctacaattctgtcctcccaactatttagcccgttcgcttcaactcatgcgccatctcatcacacactctccattggaaactttacaacagggcgcattgagtgaacttctcgattactgcgtaaataaatgtaaaactacttagacaacaccaaatatacagaacaacacatggatcaacaacagaatagggctgcacttttttgcactttttgacgttgttcggcatcgaaccatcaaccatgctgagtcttaccacggacgacagcaacgcttttaccagcctggtttcttgctcggccggtggatagcgagttttcaggtacttgtttgtctctaacttttgtatcgtaaatgataggaactaagtcatgctgaagaagaaaccgcagtggccgttgatgaaggaagacaattgccagctcgcccgcttgaattaactcttgaattggacagaggaattgcctcagcgaaggcggacattttggcttctttgaacacggattacggcaatgatgaatttgttgaagccatgtctaattattatggaagaattggacatttggttggcttcaatccgccgtcaaaccgtaatgaagctgaagaaatgataattgaagaagatgcaaagcttttgcttgaacaaagtttggatgaaaatgggctgcttgttgatcaatactttgaagaaatgggtttgaatgaagtgcaagatgaaaactcgcatgatgttaattcagaggatggagaagtggatatcatgaattaattcatatgaatttttatatttttatttaacttttatatttgaagatgcttaaattttacattgttattaaaatacatgaaaattgggtcagaatcatttagactgcaattcattagcgctgagtcttgttttattaagcggtagcgtgtaatacataaaaattttcattgaaaatgaagtttttaaacaaaaaaaacgaatcgggataataaa

SEQ ID NO: 61047 - DNA, 1147 bp, Heterodera glycines
aattcggccacagtgcaatggcacaataaaacggagacattggaattggaagcggaggaggggggagagggggaggacagcgacgaggaaatgtgaggagaaaatgggcaaaaaatacaaaagcattgctttcacttaagcatcgcccagcacagcgcacttgtgcccctgcgcaagtccaagtcggcttttgccgactttctccgtccgtcccaaattggcaattccaaacaatcggccgccttcgcctgcccaataatcattaagaaattgggccccgaaaaagaggacgaacagcaacaaaaggagcatagcgaagggatcgaagaactgatcgatttggcccgtggcgatgtcctccgttttcgaatgtcccatcacttgaaaagctgcgcctcgccaagtcgaagctgctgctcctcctccgcttcttcgctgtctttggacggacgcacaatcagtcgatggtcggcacccgcggcaaactcagagaaagagacggagacggacgatgaaatgtgcgagtgggaggaaggagaagcggaagcggaggaagaaggtgcggatgaaaaggaaataatattgaaaaagggaaattcaggacgaaaaagatcgagttttgggatgtacggaaaaaggagcggtggaagttggtcagcaccaagcggactaagcaaagggagaggaggaaatggaggacaaaaaagggaaaggaggaagagagaggcggagagggaagaaggaaatgagagaaaggagaaaaaggaaaaacggagggaaaaagagaaatggaagaatgagaagaaaaaggaagaggaggaagaagcacagagaaacaggaaaagggaggaagaagagaaatggaaggaagaggagaacagagaagtgactgaggaaaagcataaagaaccaagggaagaggaagaggagaaagaagaagatgaacagggacaatccgacggagaagcggaagagaacgcaagcgaatgggacaaaattggaggacaacaccaaaacatgaagcatttggaaatcgatgcgaatggatggcatttgcatggaaaagcggacggagcggaggaaatgatgtcgacatcgacggatgaagaagaatataacgacgacgaagagaatgaaaaaaggattg

SEQ ID NO: 61048 - DNA, 1032 bp, Heterodera glycines
atggaaagccccgtttactacgcgagcagtccatccaagcaaatcactgtgatcgatgtgtacgacttggccgagtcgataaaccgcgactttgaaaaactggtggaacagtttggaaacgaaccgtttgattcggtcgtgagaaaggttcgaaattaatttggtctttttattttgtaaaaattctcttttccataggtaatttctgcgcttgaaactttggaagctctggccaaatacaatgacaaggaaagttccgaattggtggacctgcagaagaccattgaacggtttgaacaggaaaagcagcaacgacttcgggacaaagacaatttggagaaagtggggagaaaatgggaaaacattttccaattttgtttaaggatttcatggatttggaggagaattacaagcaagaaattgacgaattgtgcaaaattgtaagtttcgcttttttatatagagaaagcctgaacaaataaaagaaatccaaaattaaatttacattttcagaaaaataaattcttcctatcgctttttggtttttcacccccctcaaatctaaaatattacccaaattcagcgccatcaaattaaatagaatttgtctaaaaatttacaaaatttttagcctatctttaaagcaatgttttgggtccagaggtgccgccttggaaattctgaaaattcttgccctattttattaacagattcatcaaaaaatgacaatttttgagattttatgttcctttaatcaaaatgggtgtgatttcagttcggtgttgccatgagtaaaaagcgttttaaaagagtttcccattatttttataacttttttaggtacaaaagttgaaggcggaaaacaaaagaatgcatgagcaaatctcgacctcgccaagtgcaatttgcggcgattgctccgacccaatgggctgccaccaaagcgcggcggacgagcaaatccaagcgttggtggaactgcgaaaaatgacacaaagccaaaaggaacgaatcaaagaattgcaaagggac

SEQ ID NO: 61049 - DNA, 904 bp, Heterodera glycines
atgtcggggtcgggccggggaatgtcgtgggtcggggtagggggctcggcgttggggcttttacccaaaataatatacaaaaaacccaaaaaatcataaaattctggaagggaactgaacatgggttgaagttttacaggaaaaaatatatctaaattcccctgctataatttacaatttattatttttttaggtaaacgatttatgcaaagatctagataaacctaatggttggcaattattgaaaaagtataaccatcgagaagtgccggatgagtataatgtggaattccccaaatggaaagacagctacaaaagcattaaaaagtttataaaatattgcaactatcttcagaaaaacgaaaaacccgtccaagaaaacggtaattattcatatacagtaaaattggcaaactgttgcaccttggctaagatgagcggggaatatagggcattaaattttatatttttaaacatttatagaaatttagaaaaacaaaaacacattagcttggagagagcggattaacaagtacaaatttgacctcaaattataatttatttcaagccattagccgttgcaagatttttggaatttatttaaactcaaatctttcggttgttattggagtatattttttggaaatatcaaaaaatcgattgtttttattgcaacaagatttttggaatttatttaaactgaaatctttcgatttttggagtaaatttttttggaaatatcaaaaagtcgattgttttttatttattttactataaaaatttatgcaaaattatgccctcttataatttataaccctaaatttgctcgtttatataggatcaattgtcgcctcatgctctattaatcggtgctatgaatttactcaaaaatgagcaaaataaa

SEQ ID NO: 61050 - DNA, 2373 bp, Heterodera glycines
atgtctacatcagggggctcgtcaaatgagttcccatttggtacatcccaagccttcgggcaggaaacaaagatgtttttgagtggaaaggatgatgagtcctcgatttcggctattgataggaaactttggcaaggaaagaccacgataaaaatctctgatttagaaaaagctcaaaatgatatggggaaattagaagatggagtgaacagagcttttcgctacctgaatcgttccttgaaccaaaaagtcaattgggtgaaagatgtcgtggccaatacaaatgccaactttgagactctgaaagtccaattcgagaccttaaccgaaagagttgatatgttggaacaagacagtgatgggacgaattcaggtgggactgttagtattactaatctgaatagagcgtcgcgggcgccgtttgtgacgccaatgggcaatgcacagcccaaccaagttgtaccgaaccaagtgccaattcatcaattatcaagcgaagacgaagatgacgggccgactctttttggcctgaacatgctctcgagcggacccacagtggggtcaggtttggaaatgttttgtgaggagtctgtttttgcatttgacgattgggctgaacgtttcaaggattacctgtccgtgtcaggcaaggcttacactgaacaagaaaaagtcaccagactcaaattggctctgagggacactcctcgggcactgtttaaggaattattgccagcacaaaccgacactcttgactcagcattgagtgaacttcgacagaaattggactcccctcagcgtcgggaaattgcgaaacgaactttatcgctgtgcaaacaaagggaggatgagacagtggcgcaatttctgagacgcctaactcctttggtggatgcgacaaattcgtcattaaccggtgacattcgtatagagaaaatttgcgaggaattcttggacagattaaagccaaacataagctttcttattcgtctggtgggactgtcacgggcaaaagatttggacttggtaagagcacaggcagaggagctggaagctttactgctgatgaacaaaggtgatgaagcatcacgcctctctcaggcagtccatgcgctgagcaatcagtcaccacagtcgaattggtctacagaagcaaacccgaacaatgaccgtgctggacgatggtcgtcaggcaacaatgtacgtgggtttagacctttttctggatcaaatgcgacgagacaacaacaaagaggaagaggaggacgagaccgctctcgcaattggggaggaggccgccaggagcaatttagccaaagaaactggtcaagcaaccctcgatgccattattgtgaccgtgctggacattttgcgtacaattgccatcaacgccgtgccaatttcagaggaaattccaaccaatcgttccgtcaaggaagatggtcaaatcagcaacctcgccaatctcagggacaatggcaaaatcggcagaatcctgtcaacatgatggatgtgccaaactcttccaacacttcaccaggatttttcgagaacttggcccagtcgttactagacctcaaaattcaggacaatcgcaattacaaaaatgaggaaccaagatctggggcaatgaatgcgctcacacacatcaaacccaaaacaacaacaatggattgtcaggtcgaaaatgaattagcaaaaggatcctctagtgaatccccagcctgtgggcaggaaacaaagacaaacattcccaaaacgtcaaattgggaacggccaagcgtacgatcgaaagtcgcttctttaatgttcattacattaatgcttgttggaatgattttaccctttactactgctaatatgccccatctgccaatgcatccccttgtctgtcaaacccaaaacggaggaaaaatttggcaattgccggcagttactggctgttcaaagctgtcaattgatcattcaaaagcacctgttgttcgaactttcgatgtcttttcgccaaatttatttgagcactcggctgatgcttgggcttgccgaaaagtgagaaaatccgtgcgcaagtacacttcaatcactaatgttccgatccaagagactcttgaaccacttatgttgcaaatgactccgagtgaatgcaatcaaatggccgaaaatggaaagtgcagcttaggcttgctaattaatgactcgggactcttgcatatagacaataaattggatttctcaccccatatgtggctaattggctcttttagttggtcgactgtctcaactgaaaattgttatcattttaaaactaaaattatgtcaaaatacggaagctcggttatgcaaagtcccctcgggtcagtgaacaattgctaa

SEQ ID NO: 61051 - DNA, 127 bp, Heterodera glycines
atgtctccttacatttttttcgtgggctacgttgttttggcgactcttttgctcgacgccacaaaaacctgttttcatcaattccgtcttctttgcgcgaagaaattggaaacatacttctgcgtgg

SEQ ID NO: 61052 - DNA, 180 bp, Heterodera glycines
atgcgaaaagcaaaatgcgaaacgccaaaaaatgcgaataatgcgaaaggcgaaatgcgaaacctcggcccatccctgttatgtacgacatattatatgattaataattacgaagttggcgaccgaaaagacggcgcacaaactcaaacaaatacgttccttggaagcccgggcttgttg

SEQ ID NO: 61053 - DNA, 64 bp, Heterodera glycines; identical to SEQ ID NO: 51065

SEQ ID NO: 61054 - DNA, 1266 bp, Heterodera glycines
atggtttgcgattttcgaattctgataaaggagcatgcagatttacatcttggcactcaaacgcggcatttttagcagattttcgcacacaattcgagaaccttatctaagaaatttgttgtgtttttttgactacagtccagcaggaatatttgtatagatgaattaaaatcgaaaaatcttttgacaaaagaatcatacaagtcttatttattattttatttaattcggaatttattattcaagttgtatattaatattaattcatacatatgtacaataatgcatatatgtagaaattaatttaaaagtactgtcgaaatcaactactgtcgaatccaatccctgtcgaaaatacctggtacggttttaccatggctaccgatccctgttttttcccacataaaatcgagccggattatcccgttaaaatcccgaagggccccgttccgtccacttttaagtaataatttttttcattattctacaggctcaacaatttcaaccccaacaagcacaaaatgggttcacatttgcgccacccatcaacggtggcagcgacggtggaggcaatggcggcataacgccagtcccatcgccaaatgcggcacagtttggcacaccgattcagccccaacagccgcaacaatattttggccaatacaacttgcaaccacaacaacaacagcagaacaataacaacaattttaatggacaattcaatggcaatggcaatggcaacaacaataataataatcagcatgaaacatttgtaaggataccaacaaatttatggcattaaatttttggcataaattcttggatcgaggcttttgtgtgacttaggaccagccatttttaagaaattctaataccctagcatataaacaaaataaaatttgataattttatatataaatatcaaaatttgttgtgttaggaaccgccaacgccagtgctccatgccgtgccaaatgttgccgatccgctacaacgaccacgtcaaatttatccaggagttcagcaagggccatcaggtccaggaaaattgatttgaatgatttttatattatacagattttttaataacattttaaatttttgtgatttttaatattttctaaattcattgggtaatcaatttttgtatttgaaattcaaaatttttgaaatacttatatttatttttatcttttttcatttcgttattaaaaaataatattttaacttgatttaggattttatataaaataatccttaaataaa

SEQ ID NO: 61055 - DNA, 1031 bp, Heterodera glycines
atgccaaagttaatttcaatgttagaagcattgaaatttattgtaaatccactttttcacaaaaaataacactttcatcctctaaaagaacaccaagattaaataaatcatctgttctgtattaaccaaaatcgatcacttttcagcgagttggccaattgggcggtggaaaaagaatgcgaaacaattcaaagtttggacaaatatttacaaaatgacaaaattgatgaatactctgaggaaatgaaaaagtttggccaaattgttttgcaaatttgtaaacaaaaggaagtgacaaatgcccaactgattcgaatgacagagacacttggcccaaaaattttggcacaattggccatgttagagcagaaaattcagcaactaacaaattcaacaaattttccacaaaaagcggcaccccttgataattttggcaccgaaatgatggaattagccaaagaaatgccggatcaaatgcccatcaaacaattgaaagcattgaaaacccatttaccgttgccaagtgatttcttccaacttctgctcaccagcctgagtttggtgaacagtgaaaattccatcaagcatgaaaatgccaaagaaagtttggcgctttctgattatttaattaatacaaatgcccctgttttggcacagcgccgacacagacgtggaattccatcaaaactcgtcaaattaggactgattttagcgctgtttgcaattggcacgaagaccgaaagtccgaaaatagtaatgcttgcttgctatcttggatgcatttactcactatattttttgtatggcatttggaagtggtataaggaagtgatggaaaaaattgattagaaaggatggaagaaattgatgtttttcaaaaattagactagatgtgattgataaaaatttgatcttgttctgatttattatttgtaatgttgatttgtaaacaatatttgtacaaaaaaattaattaattaatttgttggcataagacattccgctaaactatttcaggggaggtgaataaa

SEQ ID NO: 61056 - DNA, 86 bp, Heterodera glycines
atgaataaatcacgaatcattcggatgaaaggcgacggttcgccaacgccgccgcgcaaatgcccccgggcgttgtcagccgaatg

SEQ ID NO: 61057 - DNA, 804 bp, Heterodera glycines
cagagaccaccgacaagcagaggtggagagattcgttttgagccaagacaaataacagcagcagcagaagaagaccaagaggaacagcccggaacatcgggcacaataaaaatgggcaccaatgggcggcacagttcaatgaccacgaggtgtgtgtggtgtttagtcgtgttaaacacattctcaaaatggatccaaaagcatgccaattcctgcttaataataaaccaaatagaaagggtgtactcaattttttcagctgcggcgcctatttatactgccggcccctaaaaaccttatttctataaaaaaaattggctcaaattcgcaaaaacaggtcatttttggacaaaatttactaacaaattgcattaaaaattaaaaaatcgcggcagcgtctatcgacaccgcagctaaatctttttttttttgttgaaaatgcgcgccgcaaaaaagcggtttcaaaaagcaaaaaaaggccttgatttacatggccggaccccttaataaattgaatggaattttttggtgtgactcaccgaaatcaattaggtatttatggatttttgtggtaaatgagctttttaagggtccgatttgtttcatttccaaaagttgtaacttctctcaaaatgtatgaaaaaagtgtggaattgtgcagaaaatataaaatcagataacatataaaatatttaagatgcaaaaatgacacagaaaaaagttcaacaaagagtttcacaggccaagacaagaaatggaaaacaattatctgataacacaatgattaattaattacctaataaa

SEQ ID NO: 61058 - DNA, 915 bp, Heterodera glycines
atgtatgagatgaaggtacgcaagcagaagaggcgcaacccgaacatcgtcttccgtgactcattcaatttgatgccgtgtgcgctggcggcactcatcccctcctacggtctggacgtcgaggacaagcccttcttcccccatttggccaaccgacccgagaactacggccgtgagattcacccgacgcccgaagactacttggctagtggaatgatgcccagcaaaagacagaaatttgacgagtgttacgccgcgcatcgccatgagccctttaaattggatgaggcgttagcgaggtactgcaaaaatattttgctgtaacaataattttgttctcgattttcagttattgcaccaacgatgtggaaatattgatggcagctctggtcgcctttcgccgggaattcttcgaaattacacggcgccaagactacgttgatggtattgataacaaggagaaccacgacgggattgatgtgctgcgtgagtgcatgaccatcgcgggggcatgcatgcggcacttccgcaccaaccacctgcccgacgagcacttggccattgtgcccgagcgcggctatgacaacgcgcagaaccaaagcctgctcgccttacgcttcttccactggtacgccaaggagcatggagtgcaagtgcagacagcccacgcggctggaggagagaaacgcattgggccctactccttggatgggtggattgaggcggaacgacgcgcaattgaagtcaatggtaattgagttaattatttttcatcattattataaaatgggcaattttaaggctgcacgtggcacgggtgcaaaaggtgttaccccaacgacaacatgctgctccccaatgggaagactgcgggacaagtgcgcgaacgggatgccaagcggatggaatttctga

SEQ ID NO: 61059 - DNA, 1302 bp, Heterodera glycines
atgtatggatttcggctcggaataaatgagaccatttgcaagaaacagcttaatcttaaggagaaacagcttaatcttaaattaaatataggtaggtacatttgttagttcatcagatacatatactaaaaaaattgcctccggcaattctcgagcttctacgtagttttctgaaggaaaaaataagggcgagagcggaaacaatgtacatatcgatttcattaagatggagaaaaaatgagagaagcgatacatacaaatttgttattgaagtgaatagggagagagaaagagagggagaaaaggaagaaaattataaaatacctaaaaaagaaaagaatgaaaaaaggaggtcgaagaaaggcattatccataaaaattcagccacgtcttcttatgacatggaaaaggtgcccaaatgccttcataaaaatgtaatcatccgtcaaaatgcctttaaattttattcatttttaatcgaccattctctacagctgcagcgatgataatctttctatctgtatttgtacaacttctcatatttgcagtaagcgacaaagaagaattgcaccacgaaagggaaacttttgagcagaaacatatgaatatgggcaaacacaacatggaaatggaccacaaagccattttaggtaagttattttattagtaagaaatattttttttattattaattaattaggatcagaaaagaacacccacgaatttgatgaactccctacggaagaatctaagaaaaggctgagagtcttggcaaagagaatggacacggataaggtgaaaaaaggagagaatacaataatagtgattgatgtttgtcacccccatttttcgaaaatatttttggtttacaaaagtcgtgaaaacctatttacgaggctaaacaattcttactgttagaccaaaacgcgaaattcgaaaattgaaatttacattgttctaatttgggctccgggttcagaatctttttcgaaagatgagtacaaatagcagtatcgaaaatactatggctaattattataggacggctttatcacattggaggagctgactgattgggtcaaaaactcgctgatgacattggaccaagaagagacaaaggaacgatttgacgaaatagatgaaggttggatgctgaaggaatagcaaatgaaccacgtgaatttttaagacaaagatggggtcatcacctgggccgagtacactcaagaagcatttggcgttagcgactcggagggcgacccgcaaaaactgttgacggacccggacgatatgaaagtctga

SEQ ID NO: 61060 - DNA, 405 bp, Heterodera glycines
atgcgaaaggaattctttcgcgaacaacagcagcatcagtttcagtttgtcagatggccccaacctccaaggaaaaaacaaacggatatttctcaatttgtatgttttgttattagagaaaaacaaattaggtaatttaaatatcagcggaccacatttttcggttcgcttaatttgaatgatctgtcacccatttttggtttggatgcagtttaaacctcactttttaagttgttgccattcggaagtgtgcttggaacactatttttcattttcgtcgttgggtacttccttaaccatatgaatgtttcggagcaatcgaagagacggagacagccacaaaaccgcgcagaagaagctaatgaaatgggaggaggagacacgaatacagaggacaatgaaaaa

SEQ ID NO: 61061 - DNA, 1054 bp, Heterodera glycines
atggctcatgagcagtcgcagtccgagtggtatcagacagaaaagacgcgcttcggggaggagtacgacaaggacggggacggctttttggatggcgacgaactgagggcgtggttggtccccgacttgagtcagacggcaaaacaggaggccgaacacctaaccgaaaatgctgacaccgacaaggtgaattcactacattcaactttagtttaagccgttgttcaaccgctagttaaaaaagacattttaatttctcatgaataaattgtttctttggacataaattttgtcccttgggattgacctacattttcatattattattttaggatgggaagttgagcatagatgaggtggtagaagcgtacaaaatcttcgttggatcagaagccaccaactacggagagcatttgaccagcattcgccatgacgaactctgattcttattcaatcgatggggaaaatccgattatgtaaagcgtagaagagacttcggattaagggtaaaggtaaagcatttgtgcagctcttccattccttcacttggaacaaatttttgagttacaaaaaaaaaatagtcataattaaattcaacagtttctgatttaaagaccaaattattttttcttcgaatatccattcagttccgtcttcaaattccttgtattgctaccccttttgtttccttgattaattttatcgctggcattgaatatattttcgtggaattttcttaagaagagatttttctattttttgaatctcgcgtttacgggtaagcgttaaatcattattctttacagtaatgccatattcatgattaaggaccctgtaaaccattggggacatgttttcgtgaccttttaaaaccgacaaaaaataagcgaattattccaataatgaaaaagtatcgaaaattccatatggcggcgatatgacacacatttctcagctttttctttgtttatttattccctattccatcaatttttaaaatgatttttaatggtattattcccacttcgatagctttatttatttggattaaaaa

SEQ ID NO: 61062 - DNA, 936 bp, Heterodera glycines
atggacccggtggcagcggacagtacactttcaaaatctatcacatcggcaacagaataccgcgtatgtcttggaccaatgggaaaaatgctagcacaccaacaaattgtcagtttggatccgaaatgtgttgccatcgtctgccttggaagcgcatgaagaggcgtggaatgcttacccggcaagtcgggctattactaattgtaaggatgactgtcgatgagtcagtcctattgaaaatttaaagttaatgtttaaagtgagtgattcctgcggttggttttggaactagcaataagccaaatgagtctccaaataccgtagctttaatgtttgaattctcgtttttaatagggaacaaaaacaaaatcgttaaaatgttctgaagtaaatgagttgaaatatgttccccgcaatccaaaaactgccataataccataaatgatttttcaacttaataaattggaagatgaagggcacgctgaattttacaaatactttctcatttatccattcatttgcctaatttaattttcaacaaaaattttcagtacacacgaactcgctattcatgtccgttgatttcacacttcaatgttgaggttttaatgtacattattaaatatttccgaacacttttttctgttattcaggtggacacgaaatatttggacgatgccggaacatcggaaaatgtattcgaattgtctaatagcgaattgaaaaataggacagttggtaagccgttcgaatgaattccatcggaaattggagaaaatttcgcagatgtgctcgattttgttagtgatccaataccatcgcatgactatcttccggaggaggacccgaaattgttcagaagcacaaaaacacagcgggggcccttaagcgacaattgggtggccaattttgtgcgcgaagggaaaccgattatgt

SEQ ID NO: 61063 - DNA, 1954 bp, Heterodera glycines
atggataccgttgagttggacaagtcaccgcccatcacacccaaagtgtcatcctcccgctccctgctcatcctcgtgttccatggcgatcttttccccaaagtattcgcctcttttcatcagttaatcatcggttgactcatttcagacttcggccgactccaaaattacggacataaacaccttccgttccactctcgacactttgatagccatgcattgtccccaacttcgaggccaaatacacgtccaggtgtttttatgagccgtccatttggtccttatgcgttcctcttggaaatcctaaataatggggggggggttctaatttatttggttattaagccaaaactggtatcttgaggtttccattgtttcgatttatgagcacgaattttgaaaatcatttttttcaaattttaaaatttgtgattggagataaacgacaaacgacctattttacgacaaattgtctgtcgttatcgttcgtaattgtgattggccctgataccaatttaagtcaagttggaactaacattgtcttcctttttaagtgtgtgacctgtggggctgaactgctccaaacttcgcaagttctcagcggcgttttccccagcggattgggcacatttcacccaagttttgtgcctctgatggcagccgatgcgttgctcttcaatgatgttcgttccctttcctttggtccgtcgctaatcgattggctattttgaggctgtccaaaatgccactctgaatgctaatcgagtggtcaacagtttcatcgcttctcaagttgggaaatctgatgcctccgacttggaaatatttgtcgttggcgactttattggcggcattttgatgtacgaatcactggcaagaacggcactgacaatggccgaccagcagcagagagacggggacggctgtgccagtttgacttcaccggttgcggtcgaccagcaaaagtcgcccattccatcgctttccaaatcgcctgcatccacactttcttctccgttcatcactcagcgaccaaacaaagacaaagtaatgtcagtggagaaaactcattggggctgagttggccgagggcaatgcccccttaaataatgaaaaattgggtagttttgaaattgcgtgtaggctgtgtccggaaaataattaaaattctgtctttaaacttattacttttcaaaaatttataaaattcgaaagacttccgacaatgtagtgccgatttgtccccttttatccacttaataatttgttcgcttctcagaatccctcgcgctctctccagtcgctccctgccggcgttgaagttcccaaattcttcagcttcgatgaccagaaaaattcatttgctcattcggagtcgccctctccaatgccatcgtccgacttcaccaaaaacaagtgaatttctttttttctcgctcgtctttgggttgcttttcatttgccacattttcctctttccccctctcttccacacacttttccctttctcttgccaggtccgctcctccatgcgcatgtcgccaattgtccaattcttcggtacaatgagtgtttcccaatacatctaattttctgacttccaggattcctccctttctgccatcagaacaaatcgttctgcaaccgctgaatcgctttcattcaaaccgtccgctgcttttttgctcggatgtccactcgcgttgttgctaatgcaacgcaaattgaacgaaggtttattaaacattttagcaacaatctttttaattactcgctttgcttgcttgcttttcacacacttttctccccccccccttcagttgagcaacaactgtcgctgttctgtgggcagttgttcaatctgttctaccccctcgacctctgtgctgcccgtttggagcctgttctgaatccctctctaagtgctctccccgccctcaaagttccccggtga

SEQ ID NO: 61064 - DNA, 56 bp, Heterodera glycines; identical to SEQ ID NO: 52733

SEQ ID NO: 61065 - DNA, 440 bp, Heterodera glycines
atgaacaaaatgtaaagcaattataattttaataattccgaattcatttaatttatttaacaaaaaatagtttccacatttttagttggatttgcaacgacgtttggatggacattctcccatcttttgaccatgctcaactcggcctcaaaatggcactgatttctccacgttttgatgcgttggtggacaaacatttcgatggcaaaagcgaattgacaatttggagaccaatcacaatttgcaaagatgctgttgcagcagtgccgaacttagctgtgcttatcgaccaaggcattcagacaatttcgtgccatttccgttgccaaccattcgctgcccaaaaaattcgctttaacaaccttggattggagaatacaaacacaataaaaagcaattcttttgtcacttccttttcgggaacttggccctttctgtga

SEQ ID NO: 61066 - DNA, 872 bp, Heterodera glycines
atgctcagacagaaaaaatacagagaaattgtatactcaaaaaagacacgcgttcgccggctgatcaaccactttgccaagcacgcgcggcgcaaagacggggtgaattgtgtttgttatgaaggcagagtgcatatgcatttcaattatcccacttgagaattttaaaaattggatcacttaaatacataactgtgcatgggggtctcttacaattagtcgatcgtaagaagttggtgggggggggggagtgaaaggaaaaaagtcagcgaaaatgtcgatcgtaaatatgaaaatatgtgaaatgtatacaaaaaattttccttagttcttaacaaaattccaaactttctacgatggactaatcctgatttgtgagaaaaaaattcgtcggtcgtaagaggagagaggtaaagaaaactccgaaattgtctttttcaaaaaagccaaaattaaaaattccaatcctgcgatcgacaccacactccgcctcttttttacagatcctgctttttcggttcatcgaaggtcattctggacccattgtcgcaagagagctgatgggcgaattgttcgaaacatacaaaaaggacatggtaataaataattaaaatctaaaattactgttgtttttctttttcattttttccatttattttgttttttgttcagcatgaagaggatgacgagcagccaagtgaagcggtcttggtcaacaaaaaggacggctcattggacaatgacccaaaaaaccgttaacaaattgcactttaaaaaattacaaattttttagtgttttcgcttaaaaaacttaaaaaaaatttactttttgctgaaaaatttggatttctgagttgttaaaaaataataaa

SEQ ID NO: 61067 - DNA, 511 bp, Heterodera glycines
atgaatgaatgcgggagaaacgtgccaatgtcgtgtcgtccatgttgccctcccatttgggcactcgcagcacattctccgggttcagctggaatgcctgcgggtcccagtcgatgtaaatcactttggacaggtcgcggttaagtcgggaaagatcctaaaaattagagggcgggggaggttaaagattagaaaaatttaaaaaaaaattaaaagacatgagggcaggacaggacaggatctcccattgtcctggcacaggaaggggtgcacttcatttccccccgcatcgttcccccccccaccgagaaatttttttttaaaaaaaattgctaacttggaaaattttcaagaaaaaaaatcttagaaagttttttcataggaaaattctaagaaaaaaaattttttgagaaattttcagcgattttttggaaattttattgaaaaatctaaaatccgaacattttcagtgatgaccaagtatattgaagaaaaggcgaaaaaacggtga

SEQ ID NO: 61068 - DNA, 701 bp, Heterodera glycines
atgggacatcgaagaaatgggacgaagaaaatgcaaattgtcaaatccgatgaaaatccattgccaatcccgcaaaatccgttgcccaacaaagtcatcggattcagacgcattcaaattttgtagaaattgattaacttggaatttttcgtctaaattttttgattttcagttacatcgatcaaaatgtcatcgcatttctccaccattttcaccgttttttcgccttttcttcaatatacttggtcatcactgaaaatgttcggattttagatttttcaataaaatttccaaaaaatcgctgaaaatttctcaaaaaattttttttcttagaattttcctatgaaaaaactttctaagattttttttcttgaaaattttccaagttagcaattttttttaaaaaaaaatttctcggtgggggggggaacgatgcggggggaaatgaagtgcaccccttcctgtgccaggacaatgggagatcctgtcctgtcctgccctcatgtcttttaatttttttttaaatttttctaatctttaacctcccccgccctctaatttttaggatctttcccgacttaaccgcgacctgtccaaagtgatttacatcgactgggacccgcaggcattccagctgaacccggagaatgtgctgcgagtgcccaaatgggagggcaacatggacgacacgacattggcac

SEQ ID NO: 61069 - DNA, 1425 bp, Heterodera glycines; identical to SEQ ID NO: 6299
  unsure (1)..(1425): unsure at all n locations

SEQ ID NO: 61070 - DNA, 2001 bp, Heterodera glycines
  unsure (1)..(2001): unsure at all n locations
atgtgtgaaaaaacattgaacgatgagggtgaggacggctgtgatgagagcacaaaggcacatgcggcaaaaatgctggaggtatttaaaaaactatttaaataattaaaagtatacagaaatgcacctaagtgagtaacataattcgtaatttagataacgagaaaaaaaattcatgtacttattttttaggtttttgtgctccaatgtcaaggacgtgcaagtcatttcatcccggacatattgcgtttggttttcaatcaattgcagaaagagtcggccgatttaaaattgggccaactgaagccacaactattaattgtaatatatatataattacttattattgtaattgcttttgtccctttatcagattttgatcgctgctttgtattccgattttcaattatgctccaatttgtttggtcagctgcaattcaaaacggagattggcactttcgaatggcttattcgtgagctctattcaaatcggaaggactttgagggtgtgcacgaccgcaaaatgctcatttggttgctctgtcgcattttggctgatggaaatttgcccgctttgttcattaatcagcctgaaaaggtggttttattctaaatgctgaagagataccaaattaatttggtttagtttatggaatggcttctgactctttttgaggaactccaacggtgcatcaaagaaatagccgaacggagggaggacgactcggactcagaggacgaggagtccagcgaggaggacgacgatcggatgaacggagagttgaaagactcagacgacgatgtggacgaaggtgagcacattgaggaaacccttagcaaaagaggaaacgtcaaatttcaagagaactcgcaatatctgatggcattggagcacgaacgaaatgagcgaaaagaacggaggacgcgaaggaagtcgagcaccaacaaaagcatggacgatcagacagagggcgcaccgggcgacatcctttcccttgcatcggaaaccaccgactcggaagagcaccaccattttngaggtgtgtttattcaacgcaaaaaaagcacagaaatatccttttcaattaattcggcattttaggaagagactgaccttgaggcattttctacaccactggacgaccaaggcgacaataagccatgtctgaatgtgtttgttttgttcaaacacacattggaaggtcctttgtcattctttgactgattgaaaactttaattaacaatttcagaaatgaatacccgcaattcgcctcttttggtcagcatttctgatcagcaacgaattggcgaggcacgagttgcaaagcttaaccatttgatggaaatttgcactagagaggaaaatttggagaggtcaaagcgcttggcgcaggccggcggctattcttttgacgccaatgcgccggtgccgacaacattcagcttcagctgatcgaagagagagaaagaattctaatccattcattcgtttgtctttgatcactttgggtgtaaaataattccattatgccttttacaccgcaccacttttgaataccgctcaatgttccaattatttttatttttcgatgaatggttcgactgttgaaatttgattatattgttgacaatgagtggggttttttccatcaattcgagtatcgtattaataccttaatgacaattaagccatgttaatttgtaataagcaaatcacccgagaatgaattatgctaacttcagatgcttttcctcgcctatagggcaacattatgtaggaatttacgcagaagtgtcgtttcgaaagcagcaaataatgttgcggaacaggggacttcttcagtttcgggaaataaggagaatctgttaaatgcctatttacaggtcagtgagaaacaattggggggggggggaggaagaagccgttgggagcagttcaatattttttcaacttctgcggatatttgacccggaatttttaatgtacgattttttattta

SEQ ID NO: 61071 - DNA, 807 bp, Heterodera glycines
  unsure (1)..(807): unsure at all n locations
taaaaataattggaacattgagcggtattcaaaagtggtgcggtgtaaaaggcataatggaattattttacacccaaagtgatcaaagacaaacgaatgaatggattagaattctttctctctcttcgatcagctgaagctgaatgttgtcggcaccggcgcattggcgtcaaaagaatagccgccggcctgcgccaagcgctttgacctctccaaattttcctctctagtgcaaatttccatcaaatggttaagctttgcaactcgtgcctcgccaattcgttgctgatcagaaatgctgaccaaaagaggcgaattgcgggtattcatttctgaaattgttaattaaagttttcaatcagtcaaagaatgacaaaggaccttccaatgtgtgtttgaacaaaacaaacacattcagacatggcttattgtcgccttggtcgtccagtggtgtagaaaatgcctcaaggtcagtctcttcctaaaatgccgaattaattgaaaaggatatttctgtgctttttttgcgttgaataaacacacctcnaaaatggtggtgctcttccgagtcggtggtttccgatgcaagggaaaggatgtcgcccggtgcgccctctgtctgatcgtccatgcttttgttggtgctcgacttccttcgcgtcctccgttcttttcgctcatttcgttcgtgctccaatgccatcagatattgcgagttctcttgaaatttgacgtttcctcttttgctaagggtttcctcaatgtgctcaccttcgtccacatcgtcgtctgagtctttcaactctc

SEQ ID NO: 61072 - DNA, 987 bp, Heterodera glycines
tttaacttttttttaattttaaggttgtaatcacctcacctccgcccttggcttcgtaaatctcgcgctttacgccggtgcctatacgccgatgaaacgaatccatcccaggtggtcgtcttcttcctctacacctaaataattcccaacgaatgtgttttccgactttcagctgcacttggatcggtgccattgtgggtgccatcccgccactcatgggttattcagctgccaccggtcagtgtttattgttagtagggttagcgggtttaaaacatcgacctttggtgtttaactgtttacatggtcggaccccttcgcaaaaatttctgtttactcccacttcatcctatgccaggtcatctcgattcggccgcttttgtgctcggcgcactgcttttctcctggcaatttccccatttcaatgcccttagttggaatttacgtgccgattattcggcagcgggatacaaaatgatgtgcgtgacgaacgaaggattgtgcaaacggacaacattgaggtgagaggaacttcactcactccctgccctccctttccaaccaaaacaacgaaattgggtctatttcagttttacccgacaataatggataatccttaagcttgggtttttacttctctgactatatgttagggttttcttctgttaattaaggcactctgtggcgctgctttgtctctgctcttttgctgctcctttcacacatttgaccacttggaccttcgctttcacttcactccctctaaacctttcaatgctttacttggcgattcgattctatttaaatacagataaaaagtgataatattctcaattttcaatgacatttatttcttcgcaggaatgccaccaatctgttccgcttcacacttctctacctccctattttaatggccttgctgtacgcatcgaaagatggatgccaaggcattgtcgttacaaagaaatcgcaaaaactattagagtt

SEQ ID NO: 61073 - DNA, 563 bp, Heterodera glycines
ggctctcaaaccgttgtgtcacttccgtctacttggaagaaaccaagaaagaaaaccaaaaaagccatcaaatttgcgcctgaagatgtgatggacaaagggttaggctacgatttggaggacgatttcattgacgacgaacaagcggtgagttgtgggttattttatgttttttttttaaagttaaaccgaaggaaagtgtgatttttatgattattaacaaatttaaaaagattatttttatcctccacattaaatgttcttgatttccctttaaatttagtacgatgaatgggtgcctacgacaatggacacggccaagcgaggtcattacgtgaacaaaggaccgttggagttccgacaaatcgactttgaccagacgacctcggaggaagacgaagagaaggacggggaggaggagagcaatgggacgagacgagagacgagcattttggaagcagacgaagaggaagcgatgaatatggaatgatcaaatttctataatttacattaatttattctgtattttcatctttgtgattatttaattgctaaatattaca

SEQ ID NO: 61074 - DNA, 1260 bp, Heterodera glycines
  unsure (1)..(1260): unsure at all n locations
tctgttcggtgtgccaatgtttgtcggctgttgcgccattctttggatttattgggacatcttcaaaaaaccaccaaaaccacgaggacctcacaaaaagaaaatgtaaaaaaaaacccaaaaattaaaattttttcaatttaatttttcagtttcatctccggcaacagttggctggcggtgttcaatttgcttgcaccttctcaagttggacagggaatagcaatgatcagccaccgatttgacaacatcgtcgacaaacacttcgagacgcggcgctggacactgaaatccatggggattgggcgcaaaattgaaaagaatggcacaaagaaactgaaaattgtcaattccgttggattaccattggcaattccgcaaattcaattgccacacaatgtcagcggcttcaaacgcatcacaatctcgtaaaattgacgattatgcaagaaattcaagcagtccttcccatccattttcagtttcatcgacggcaaggccatcgcttttctccaacgttttcgcccacttttcgcctcctgtccgcttaatttgttcatcgatacgacgagtgaccgaattttggagtccattttgcacaacatttggccattgctcagcaaaaacatcgatggcattggattatccgccacaatttaccgccgtttgcgccaattcgtgccgtcaattctcaacgaatgtccatctcttcgcattgtctcctatgttgacgatcttttcgccgaatttccggccgatgacaatgccatggcgtcggatggacaagcgatggccaaatggcttttcactccccgcatggacgatgtgccaaaagtgttgcgatgctggttgaacaaggatgacggggatttggcgtcaaagattgaagccttcaaagcggtgagttcggtcgaattgatttatttggctcttttatcatttcgtatttctcaaccaatttctccatgctttaggcatttgccaatgcttcttctcccgccaattccatcgtttacctttcgtttccttcgccttttgcttccgttgtgccctttgatctgaccaatgaatcgactcgggaacaattgacgttgaaaaggactgacttcagctgccgttttctgttggtccgttgtccaattgcgcgagacgaaagcaaatggacaaaatgggaaaaggaagcgattggaagaatattctttgatcagtggaacagaattgacattcgccgggggtggaganggatgaaatcggggaagg

SEQ ID NO: 61075 - DNA, 726 bp, Heterodera glycines
atgccaaacccggcatatggaatgccaaatccgtcacatggaatgccaaatccggcaccgtcgtcgatggccgtcaacaatggtccaatcaactgttcgccttccaagtgcaacccatgcaattgtagtcctccgtgttttgtgcagcaaacagcggcgaccggtgaaggccccggaggcggtcccgcaatttcgttggtactggcggtgagttttcgcaagaagtttgtaaaaaaaattttcatcagtgagtgaaaaattctcgaaaataaatgcgataggcccccgcccggagaaaattaaattttcaaatccattgatgaccaaattggttgtcaaaaatgtatgcattaatcattttttttaatcctaaaaattatagttccaggattttttcggcaaggttgtttgtcccaaatattaaattcgttttgaataaatcagaacagtaaccagcattcgatcaaaaattcaaattttaaatgtgtttttttcgagaaactgacaatggcactaaacaaaaagtaaaaattcaaatttgaattatgtttttgtgaaaagctgacaatggcacttattaatgagttaatgacactgaacccatttaaaaatttttttccagtattatgctcttaatctcccgaaaatatgaaaacaaaaatatttcaggctgttactctttctcttcttggcctgctgactgttcatggcatgatggttttgccc

SEQ ID NO: 61076 - DNA, 1031 bp, Heterodera glycines
ggttcgtgaacggcgctcttctgactccttccgactccatgtcctttatctgatcaatgattgggctcactattggttcgtgtttttgttttttcgtttttattccatattttttagtcagcgtaaaaagttggacagcattcgtcaaatgctttcgcgctacgtgcccaaattgtacgcttacgcgtgcagcagtccaatggcggcctcgaataacacattcgtggacaaattggagaaattggtcggtgtttgggaggggcacaaatatttcgacgacggatgctacaaacaattgcgaaatccctccgcgacaatgttggcggaacagaccgccaccgtcgcggaacaacaccaattggctgcggaagtggacaaagaaattgcagacacactcggcgcatacaccaaacagcacaaagaatatgagcagcacgtgcttacgaaagtcgcagaacgggagaaagcgttgagagagtgccgaggttggaaaatgagggctaaggcgtaaatttactcaatattcttcgaaaaaagaaatatttaagggactaaaacaccaattttccatgtaaattatatatatacatctaggtatatatgtgttttgagtacagaattttatttcgtgcaaagtgcctaaatctgatcattgaagaaaagcggaaaatgaacgaaaacgcttggctgccgagcgggagaacgttgaacagatgcgtcgtcgctcaacgcgcttcgaccagacaattcctcttccatccacaaattcgccgcacaaaatcccatcactgcttgagattaaccctccaccacacagtccggctgtgcatcaacagccgtgccttggcaatgggccttcgtcgatgggtacgccttttccccctcttccgcccactggcgcggcgcctcccccaatggctcatttcgctcctccacaacagcgtccaccggtcgacctcattccgaaggctccgtattatgagctgcccgctggcatgatggtccccctgatcggaatcgaagacatcaca

SEQ ID NO: 61077 - DNA, 830 bp, Heterodera glycines
atggacaacaagacggacttggtccatactttgttctcttatctcagtgaaaaatacaccgttttcgacagagtacgttttcattccccactatgttttgttctttctactctttgtttaggaccgaaatgttggtcttatgaaagtgttaattaacgtgtgccgcgaaaatgccattaaacgccttggcaatgtttgtccacccatcccttcgtttcctttcactcatttttcactatgcatagatttttgtttctctccaactcgacgatgtgaatcggatggcacatttgggccaatcgctaccagcaaataacgacgaaatggagaacgctgagcaaatcattatgcgtcttcgtcataaatctccctattttgtggccagaatcgacggacgcactcaaacagtgttttttgaggaggaggctaaaagcagcaagcaacaaatggcagcacagctgcaaagcaaagtggacacagcaatggccgatgtgattactcttgccagcattgtccactcttatgaagatgccgttcgacttaacaccaattagtaagccgtggaagcttcgccactgggtcggtcattcattcacacaaattttagtgtggaaaaatgcgctgcacaaaaggagaaattgcgtggcgcgggtggcaatgggggaggaagttcgtcgtcaatgactttcgacgacgagggactctttggtggtgggtcgccctgatgtgaaataatggatttccaaaatgatcggattttaagataatcgaaattgttttttttaatttgttttgtgtaatatttggaaacacaatggacaaaaaagaaa

SEQ ID NO: 61078 - DNA, 716 bp, Heterodera glycines
atgtctcgttacttaaaagggaacccacccgaactgtaagtcggaaaatgcatatgtgtgatataccattggatagagcagggtcgacttctattgtgaatttttaatattacgtccccatagaaagaaattttactgtggaaagtccaagtaccttattggacaactacgtgtcaatgagcacagtcgcctttggccagttgtggaacggaaaaatgggaatatcagatggggtgcgctcttttctaaaaattcctcttttcgtctaaccatccctcccttttgtgcactatttcgtttcaaaattgaatcattttttttgtcttttgaaataaattgtgaaaaatatacgaaaattattttagcttttaattatgctgtacaatgcttttaagccccgccgtgcggcggctcccattttgtgcactattttagtttttaaaattggttccggactttttggctttttgaaataaattgtgaaaaatatacgaaaattattttagcttttaattattcagtacaatgcttttaagccccgcagtgaggcgggacagttccaaaattttgtaccacattttactgtggaaagtccaagtaccttattggacaactacgtgtcaatgagcacagtcgcctttggccagttgtggaacggaaaaatgggaatatcagatggggagcgctcttttctaaaaattcctcttttcgtctaa

SEQ ID NO: 61079 - DNA, 383 bp, Heterodera glycines
atgccaaaacaaaacgaaatcgttttaaaatattcctttctggacttgacttggtttcttgatatcgaagctgttttctacgctatttctaaaacggttataccaaaccccagatttttgaatccggttttcagaaaaaatgccttgtggtgaaaacaatatttcacatttcactccataactttgtgagttcggcacggatcgagaccgggataagaccattggaaagagcagctcgagctctacaagaaggtatggaaagaaaaaatagttatttctgggactttttcagaaatcagaaataattctccaatgtggcccaaattttaggcccccagccacagccccttgcttctcccagttttaagtcttggatttgtcaa

SEQ ID NO: 61080 - DNA, 1018 bp, Heterodera glycines
ggcgattttgcggttgtgtgcagcgtggacaattccggagacggcaacgtgtcagcattgggcagtgaagtgatcccgttggaccaatgccgtcatccggcaatgtgtatgctaattgatgccagctcagtgaaacagtgcgccatttcggtgccggacgatttggtcaactattttgtgcatggcgaagacacatttaaaatgttgttggaggctgtgtccaaggtttacatattttttccatttgcgatgtaaaaatggacgggggcttttacgtttttatgcgccaaaaaaattaaaaaatatgtcaacaaagacctaaatggatagaaaattattgaaatttcaatgaaaccaaaaaaaattgtaatactattttttgtgaaattttttttattaaactatatttcttaaaaaaatattttgtaatgctgctgacttaaggttctcatcaaattcgaccaggaaaacaagcagattgttgtcaaggttactatatatatatatattttttacgtaaatttgccaaaattgttttgggttttccagtgctaaaatagcctagtatgcttttttacacaaccaaatgggtattgggcgcaggtgtttttatggaaaaaccaaacacgtgcctacttttagggtccgtgacggtttttgagttttggccatgacattcatgctcacttgccatatttttaacttatttttagtcatccaattgtaatacattttaaatgcttccggtccctgtattttttggcggtgtgtgtaaaatttgcacttttttcatgggtcaaacattttaaaaaatggattctccattcagagttttttcgccggtgcgctcaagaaagtgcagattctgaaggacactttcctgctgcacagcagacagaagatgctgttgctgaaccgtcatgaggagaccatgaaaatgttggccgcccaggagccgcccgacgagttcttcgaggagtttgaagtgcagaccgcgatgatgggacttggttggtag

SEQ ID NO: 61081 - DNA, 2317 bp, Heterodera glycines
atgaaaagagcaaaggatgatgatgcggaggaaggaagagtaggggaagagagcaatgtgtgggcgcacaatgtgtgaacaatgaggggaatttgactgatttttggcgccgaatttggacaccttttgttttatttctataatggtttcgtccctttctttctcttcttttgtgcgtaaattatgatgcaaaaaaaaaaattgttttgtttcctttgcttttcaaatttttaattaatgcattgttctatatatgttctctaattttttttctctctttttttgtgtttgtgttgccatttttgacattaaaaaaccgagaaaaatttttttatgttttactttttgtgatggaaccgcgccatcgacgaagcatccgtgaagcgaacaacattggctggacaatcaggttctgttcttgctttttttcttagcattcaatgttggctggattatggccgtcgttataggcatcgtttggaattcccatatgtcagttgcattcagtttttatcggaaaattggcaaatagtcttttttattaagcgaaaaacgcatacaaatccctataaaacgcctaattcgggatttttgatgaggagaaaaatatccctgcaaattgaatgtttgaattcagccgcccaccccaaatccaggggtcggattttgaaatttgttacaattctattctctgaccctgaaaacctataacataaaaattatttccggatatctcgactcagttcgaacaaaattacattcggaatttgtttaattctcactaaatgattcacatttttcaattgtcagtgaccacccagaagatcatgatgccaccgctgctgattgtgagcagcagcatttgctgctgaccagcaatgggaccttgtcagcagcgtcttcgtcatttggtgttgtcgatggttgcggcggaggtggtggtcgtatttatcctggactgtttgctgaggacgatgctgctgaacacaagggcaacaccagacggagtgcccaaaatggggctggtggtccagcagggcgcagcaataacattggcccaaaaggcagtggttggcctccaattaaaaggtttgtgcgtatggttgagtagtgcttgctaattagaggggattcggcacggccaagaaaaatcggggaaaattgatgccatgatcaattagtggttatgcgccggattctaaattggttgttgtcaaacgatcaaaatagcaacctttttgcgcgccggttttgaagtgtttgaaatgggacacggaaaataccacaagaatttaaaaattttcagtgtaacaatggaagaacaggccgaagatgatgatgatgtcaacggtgaccataagactgacgatgatgaggaggaggaggaaaatgaagtcgctgaagaagagccgctgtatccaacccgtggtggtaccatgaggaataataatgccaattccgtgcctgctgttgcgcaaaaaattgtcagccgtcgctctttgccaggtgaaaaagcattctaatacttacttactgtttttgtgggccaagttaaatttggtatatacatttatttttagtatattggggtgtgctaatattgaaacgaaattttgaattaaaaatcgtattttttttatacttttttttcatctggacatgtaagacaccaaattctaaacaaacatagcaaatctggacattggctagtagaaattgggtagcttgggccctgttttttttttttttgctcgtttggccaattttttggtcctagaaccggggtttcgttcttgaattttcccaaattctcatcccaactaaatatttacacgaaaataccaaggaccttgttgtctcgctcctaatacacttgtaatgtaattttttttagcttcatttcaacatcaaccacagctgcaaaagcgatggtctccccaacaacagcagcaagccgtacagcaaccatggcaacgccgtcgacaccaagccgttgttgatgatgacgaggaggacgatcaaggtggaaaaagtgccaccgatggtggaactagtgccggtttctggcagttcttcgactcaaattttgagcaatttgttgctcgaggtcacggtcaccggcggcccaccaatggtggtaaatgggaaattatttaattagaaaaattcaatttaaatttgaaaattttatttatttatttttttttgaaatcctatccgtatctgtttttaatttttggaaatttgttcagcgatgttaaaaaagaaattttttgggctaaaataataatatttctgattttctgtttcaaatgca

SEQ ID NO: 61082 - DNA, 438 bp, Heterodera glycines
aaaatggtgtaagtaaaaatcgtaattacgctcaaaaagcttctcaaacaattttaacgcttccaattccttctacaatcgcctttatacatcccattatgagcgctaaaattatcagagtgccgaaaatcgcatgtgatctaagcctagcaaaaaatggtctaagtaaaaatcgtaattacgctcaaaaagcttctcaaacaattttagcgcttccaattccttctacaatcgcctttatacatcccattatgagcgctaaaattatcagagtgccgaaaatcgcatgtgatctaagcctagaaaaaatggtctaagtaaaaatcgtaattacgctcaaaaagcttctcaaacaattttagcgcttccaattccttctacaatcgcctttatacatcccattatgagcgctaaaattatcagagtgccgaaaatcgc

SEQ ID NO: 61083 - DNA, 264 bp, Heterodera glycines
atgggttcggcccaattccatgccgcccaattgcacaaactgttcatggacacggctgggatcagtgaggaggacgaggcgagtcccgtgccgtcgcttcacaaccagccccagcaacaacagcatattcatcaccaaattttgccgcatcatcgctttgttgacgctattaaccgctcgccaccattgccgacggcgcatgcgctgccggcaatgcaacggcgcaggatggcaacaatggcgacgacgacagggctggcatcg

SEQ ID NO: 61084 - DNA, 531 bp, Heterodera glycines
atggccccaagtcacaagctgttcttccaattggtcatcctgcttgtcgtggcatcgcatgacatctcgaatggtaagtgagaaaaaaattcaataggtcaagacttattgacacgaaataattttttttggaattcatattttaattgattaaaaattaatctgagttttgttgtagtcaaaaagaaatatgcacttttttaggtttaagcctaggaattcttgaattggttttatggtttgtatgtgttggttgatttggcatgaatgtctccaggccaaagctaaccccggaccagccgaacctagcatctcggaaatcaacggcaaaacgcggaaagagaatggaatcgaggccgactgatcgaaagcacggtctggcgaccaacggacaaagcgcacacaaaaccatagccaggggtgaggtctgaggcgactaatgtaccccgcctcaccgaaatcaaaaaatttcaacgaaaaaaattttttttaaataattgttttaatttgttggttttgtgcaaatttata

SEQ ID NO: 61085 - DNA, 181 bp, Heterodera glycines
aaagcatcagagtgcctaaactaacatgtaaataaaatttggtgcgtttcagagcattttctgaaaaaatatttatgaaataaaaaaatcgattttttcaagtgtccgtttggggtactcaaacaattatggggagcaaaaatccaacgcagaattaaagtacagactatagggaagctat

SEQ ID NO: 61086 - DNA, 623 bp, Heterodera glycines
aatgtttgtgccgattcatttgaccgatggccgtgtcatttcactgccaatcgttcgttttccttttcagtttaaaattcatttaatccgttttttattatcggactcgcaatcgaccccctttgaattgtgcgaaatgttgtgccaacaaatttgtctcaaagatgcgtttggcttcggcctttttcttgccgttggtcgccgttttatccgttctttgggcgttggctccgaatgcgtggtaaaattcgataaaactaaatccaaaaaagcaatttatcttttacagattgacgcaattgcatcgcttgagacgaaaagcgaaaaaaattggcgaattttctttaagaaagaattgtttagagcccaccaaaggtgcgttgccatcatttcctgacaaatgaagccttccttttacgactgactttccgtttaagtgaatccgacgaccctttggccattgaattggcttttcggcaaattttgggcggcattcactcaaaggaataccaatgcgaaaaggtgcgctaaaatgggcaagtgaattgctgcaacttttctcatcgcttcacaggaagatgacctcgtcactttggcggcgcaacaacatttcattgacatta

SEQ ID NO: 61087 - DNA, 773 bp, Heterodera glycines
atggctggaagaggtacaaccatagttagaaaaggtataagctggctggaagaggtacaaccacgtaccacgggtggaagaggtgcaacaatgattcgaaaaggtacaaccttggctgaaaaaggtaacacttggatctgcagaggaacaacatgattataagaggtacaaccacgagtggaaggttcgaaagatacaaccttggctggaaaaagtaatactttggtctgcaaatgcacaaccatgaggaagaattacaaccatggctggaagagatacaacaatggtaagaagaggtacaacctcgggttgaagaggtgctaccgtggtacaaagaggcacaaccatggttagaagaggtacaaccacgggtggaagaggtgcaacatgattagaagaggtagaacaatggctgtaagaagtacaacaatggttcgaaaaggtacaacattggctgtaaaaggtaacactttggtctgcagagacaccaccatgattatagaggtacaaccacggaaggttctaaaaggtacaacattgactggaaagataacacattggtctgcaaatgcacaaccatggctagaaaaggtacaatcgcgggcggaacaagtataaccatggctgtaacaggtacaacaatggtaagaaaagaacctcgggtggaagacttgctaccgtggtataaagaggcacaaccatggttagaagagctaaaaccatggatggatgaggtgcgacaatggttcgagaaggtaacaccttggatgtga

SEQ ID NO: 61088 - DNA, 367 bp, Heterodera glycines
atgtttgcaggaccggatccggccggattaatcctgcaaatcctgttttttccaaaaaatgcaggattgcggactgggattctgcaaaatcctgcgcaggatccggtcctgcgcgcatttcagttggcgatccttgctacacaaagtcactatttctttttggacggagaaaatgaaatcaaagaaaagaaaattaatgtgatcgttgttcggtgtgaaaacgaccgttttggaagggctatccaagcggggcagtggtttacccaaacagttgaaaaccaaatgaaatacatgataaagtaatttttatttaaatagctattagtagggtcgctacttttagtgacgaaaatctcaaaatagttaa

SEQ ID NO: 61089 - DNA, 658 bp, Heterodera glycines
gccaacattcaagcagaattcgcgggttttcttcgtcaaaaacaattttatgaccgtggcattgggcaaatcggcacaggacgaacagatggagagggaaatttgaaaaacattggctttaaaagacatggcaaaacgcccaattataacgtggaccattgcagaaaaattataaaatttttgatttgtaccctcccaatttgggtgaatttatgcagccagcatagtttttatgattggcagaatcttttaaatatgagactgcagactgggacctctgaaattggagacattaaattctcaaccggagacataccagaaaaaatgtgcatttggccgttttccatcactcaaaaatgccgaaatatgggaaaattttcaaatttaatttgccaagacaattccgcccttttttaccattaattttgtctaaagggccattttcatattaggcaataaattaaaatgctaataataagatagtttttgaaggaatattcagaaatttcctccccccccccttcggaagtaaatttaaatttaaaaaaaataacgcactccccaatttaggcaaacgaattgcacaaagtgagcgcacttttgcggggccaaagtggactgatgttcaccaatgcgaaggcaaacgaagtccaaaggt

SEQ ID NO: 61090 - DNA, 430 bp, Heterodera glycines
atggaaatatttgacgaatttattattgtttatgaacaagtgatcggtaaattctctgatcagttcactggaaagtgttcgtttgaggaaattacccaatttgctgcactgtaatttcattttttaaaaatttattattacaaaattatttttttcattaaaaagcaaccaaattgatagcatataattaagcaaacatgagtttttttttctatattaatcacttacatattttagtgaatttttgacaaccgattatcccgcattgaaaatcacggacattggcaatgcttcttcttccaatccgtcgaatgaggagccattggcacaaattgtccgttgggattgggaccaaaatggggcacaacaaatcattcaagtaataaaatataaagaaatattcaaataaaaaatgaattaaccaattaaa

SEQ ID NO: 61091 - DNA, 1438 bp, Heterodera glycines
atggctaatttcctaaaagcaaattgtgtgattgaatttaccgttgcacgcagaaaaaagtcaatgaccgaaaggtatgtaaatattcagcggctttaatgcaatatcaatgaaaaatgggcccaaatcgcgtggtgataaatgtttcagcccaattccaatagggcaataattggtgcaattcgacgggtcctttggtacacactttggccagcacgggggcatcaccgaatcgaagttcggatcaacgacaatggacaggtaagagagcagttcgcggtgtttagcgcccgagttgaaaacgaattcgatcagtgccattagttccacgtaccgtcgggcaccgccctcgccaccgtaattagtccgaacggaacggaaaagaatttagagacgaaagccatgggaattggaattgaaagtttggaaaaaatgaattcaatttaaacatttgttttttcttgatcattttttgaatacccatgtgatttatttctattcacctgcaaaatgctcattaaaagtgcagcaaatttctccgcttcggtggataacattttttgtgctttatcactaagtcctggcgaaactgtaaaaataatatttttgtttttaattaaatttaaattttttcacttgcccatatgagcaaaaataattgtccgcagaacaacaaattcaacagtgttcattttttaagttgaaattagagttgagcggtaatcggtaattgtaaaaaaaccggtaccggtactgaccggtactgcaaaaaccggtaccggtaccggtaccataattttccaacgtaaaaatttttggacaaaattttccaaatacaaaatttttattcagttttcgcgcgagtgcctgttttttagcattagaattgttcagaagtatatgtatattgagggtgaccaagtttttttttcaaattcaggataaagaacactaaaattcagatgtagacctcaaaattcagattattgcaaaacaagggatcagcggccaattttccaattttgcgaaggggtctccggccatgtaaattaatgtaaatcaatgacctttttttgctttcaacaccgctttttacgcggcacgtttttctcaagacttttgggggacaaggagggccggcggtgccgataggcgccgccgggaaaaattttgtaatttttaatgcgatttgttaacagaatttgtaaaaaaatgaccaattgattaagttttgggtttttaggatgcttaacatgaaagaaaaaagttggaatattttttaaaattaatattttaattaaaataatggtaaagaaaatgtgaggaatattctatccaagtggggaaattgaccccaggcgaaaaattatgaaaggtagaaagttaaaccactacaccacatgtgcatgtgtgtaaatccatgactaaatgaaataaa

SEQ ID NO: 61092 - DNA, 963 bp, Heterodera glycines
atgagtggcgccggtggcgaagggcaggcggacggagtgacgcaaaatgcgtttgcgcacatttttgaccacatcgccaaatgccaccaggacaaacggtcagtcagtttttaagtttgttataattattttactaaaattggctgtctattttatttttttctgcctcattggcattaattattggccataaatgcccagaagaagacatattttggcaattgtttagattaggggtcgacaaaaagtcaatttgagggtcaaagaaattgaagtttttcgttgataaagagaggaaggaccctttaattttgcaaagaagaaagttttttgagaaaaacaaaaatgaccaaaagtaattgcatattcatgaccaaaacaaccttatcattatcttcaatcactcccccctttaattatcaccaaaaaacttgtctgccagatttttcattgattaaatcctcttgtcattttttgttagcttcttggtccgcatctcctacatggagatttacaacgaggaggtgcgcgatttgttggccaagcaaagcgccgcaggcgcacaacggctggacatcaaagagagggccgacattggcgtttatgtgcgcgatttgctgaacgtgacggtggccagcgcggagcagtgcctacgcatcatgcaactcggcaacgccaacagtcagaatattcaaaaataattatatttttggacatctttttgggcaaatgttttagttttttgggttatttcactcgaatcaattggcaatttaatgcatatacaaatttttatttattttttaaataggtacgtatttttgtaaaaggttttgataaagtgtcatctgcgcccatgtcctaaatatagtttctaattaatctaaatagcttgaaaaacttaagaaataacatcttttgacacattagtgaaattaatttaaaaaattcattaaaaataaa

SEQ ID NO: 61093 - DNA, 660 bp, Heterodera glycines
aaacaaaaaaatcgattttttcaagtgtccgtttggggtactcaaacaattatggggagcaaaaatccaacgcagaattaaagtacaggctatagggaagctattccggaaggattcggtctccccataaatctgggcgcatcggctcggggggactgccccgaaaacaaaaaaatcgattttttcaagtgtccgtttggggtactcaaacaattatggggagcaaaaatccaacgcagaattaaagtacaggctatagggaagctattccggaaggattcggtctccccataaatctgggcgcatcggctcggggggactgccccgaaaacaaaaaaatcgattttttcaagtgtccgtttggggtactcaaacaattatggggagcaaaaatccaacgcagaattaaagtacaggctatagggaagctattcccgaaggattcggtctccccataaatctgggcgcatcggttcggggggactgccccgaaaacaaaaaaatcgattttttcaagtgtccgtttggggtactcaaacaattatggggagcaaaaatccaacgcagaattaaagtacaggctatagggaagctattcccgaaggattcggtctccccataaatctgggcgcatcggttcggggggactgccccgaaaac

SEQ ID NO: 61094 - DNA, 766 bp, Heterodera glycines
atggtaaatttcaattacgagtggctaaatcctcctcttggcgttcttggtctacctcttccaatacttccgatttcctatttgtcttttatttcgttcactcttattcattttggtattttcataattaattataacaaaccaaaaaaagaattattttttagcatcttcgcaacgcaaagaaattgagaaacatcttgaacaaggaaaacattggctgtctaagggacaattccaagaagcacttcaggtgttttttagacgatatgttattttaaacttccttttctagcattatcatcaagcagttgctttggatccaaccgattatcaaatttattatcgcagggcgaccgtttttttggcaagtgggaaagtgaacgcggctttgcccgacttggacaaagttgttgaactcaagcctgattttgtagcggtaattgaaaaaaggaataattaatctttttttcttattaagggtcgaattcagagagcaaatttattgttcaagaaaggaaatctaaaagaggctcaagcggattttgaaattgctgtgaatttcctttttttctgtttatttagttttcattgactaactttctttaagcttggacatgagcctgacaatgctgaaactcatgaacggctgcaaaaaatcaatcacatacagacattgatcgaccatgggctacgccactttgacagcagagactatgtctcggcagagcaaatgttcaacgacgcaattgaggtctcgaaaatataa

SEQ ID NO: 61095 - DNA, 332 bp, Heterodera glycines
atggctgtggggcggcagctgctactgctgcgtctgcgcccgctcaggtgaattttttcgaaaacaaaccaaaaatctaagcaaattatgtatttttgaggcggctgcagcgattggagcggcggtgggggcgccaactgaagtcgaaacaaaaatcatttccaaaaaattaactccccaatattttaaggcaattggcgccgttgccgccggagttgcaacggcaagtgccgttggtgcagttgtggatgaggtaaaaaaatccatgggttccgtgtgaatttaaaattgaaaaatattttttattatataaattttgatttttcaggtag

SEQ ID NO: 61096 - DNA, 906 bp, Heterodera glycines
  unsure (1)..(906): unsure at all n locations
atggtcgctgcgaggttccgagtttcaacagggaaatttacaaacggcagagccaaacggtaagatttgacaaagcaataaaaatatggacttttgtttcctgagaatcttaaaaatcaattagtcacctaaagttcaagtacncattattacccccccccccctcccacctcatctttacagtgccatttcatttccagggagtcatccgtcgtttctatgcgcggcattggctgacaagcccaacttgtatataatcccactaattcctccgtcgaagaaagagaacgcctcatctccccgctgtgcgcctatccgttcaactttggcaagcaaagcgcgtttcatccaaacgcacccctgcggtgatttcatttttatcggcgccgaaaacaaattgctaatttgggaggtattttaacccaagcgaaattgattttcatttttcacttatttcattttcagatccattctggccaattgctttcccaggtcgaggcacatttgcgagatataagcgcaatgcgaatttcttcgtgtggccatttcttggtgaccgcctcattggacggagatgcgaaggtcttcatgacggccaagtaggaatttatacatttttttcatatgttaatatttctctccagggatttataaatccccgagaaactaatctttcatttgatgtcaaaaatgtatggttcgactaaataagaaaaaattatgacctaagaaactgaagatgcgtctaaaatcgattttacagagaaaaaaattcttcgtaaaattttctgggttttccttggaattttaaaaagattgcgaaacaaaagggtgcccccttttgtttttgaaattcaaaatcggccacttttcatatagcgccaaaaaaccttcgagaattagaaa

SEQ ID NO: 61097 - DNA, 439 bp, Heterodera glycines
cgcaaaacgtactttgtgtttatgacttatggatttgaatcgcccggagaacgtctcgtatggattctgcttgagaatgtttaggatttttcattttctccgcttaatcgcttccatgacagaatgaacgcagtgttagcgcgacggacgaagtgccgagtttggaattggcagttgccaccaaatatgtgcatggtgggcacttcatttggcacatacgcctcatcggatttttcaggaaaaaatcaaaactcggacaccttgttgcagttgcgctcgcttattgccaacagacggcggacgcctcacgcgggcgttggtttttggcgttgggccatcacaatgattgcgggtgtgtctgagattgtcatacatttcttctaattgccaattgtcttgccaaatactgatgcgcattactggatctaattcgcgactt

SEQ ID NO: 61098 - DNA, 2292 bp, Heterodera glycines
atggtcgacattttggaagtgttggcacactcggaaaagcctttggaaaatgacattctgttcctcttcaatgctggtgagtttttggtataaaattttgaatcagcaaaatgggaaaaagttctccttgtaaggaatttacattttcagctgaagaaaatttcctgcaggcgtcgcatggttttataacggaccacccttggcgccactcaattcgggcattcattaacctcgagggctgcggggcaggtggccgagaattggtgtttcaggttcagaaataccacccgaggacagccggatgggaaagaccattttattactccaaataaaaacatcgtaatatttcccccctcccccttcagactggtcccggtgaatcttggttgatcaaaacttatcttgacaacgctccgtacccgcactgcagtgtgatgggccaagaaatatttcagcttggagtgattccatctgacacggactttcgcgtttttcgtgactatggccgaatatcgggttttttctcaggaatttgtaatttattttttattttttagggttcgacatcgcttacattcgaaacgggtgggtgtaccacactgagttcgaccaaccacagcggatcgaaccgggcgccattcaacgttctggcgacaatgtgttggccctggccaaggcactgatacgctcaccctatctcaaacagcccgccgacttcaacgagggcagcaattgggtgttcttcgacgtggtcggcctgttcaccgtatttttcagcatgcatataggtaggattcgaccaagcaaaacggacttaccgcagttatccatctgttttagctgtttttctgcactattccgtctgtttggtcgtcgcttttttggtctggcgtcgtcttcagcacggcacttacacaattggtggacttatggttgctttctttgccactttctccctccacttacgctttcctgctgcattgtcaggctgctttttggcaccagcttctcgcccttttcgctatggttgccgtcggtgctttcgttgtttgtgtgctcagcgtgttcaatctgaccatgtcttggtacgcgttgcccgagttggttttccccctttatattctgcccatgctgaccgcgtccattgctgtgcacaacgcaatggcacaacgtgcgaggcgcaaagtgcgttttttattgcccaattcaaaattgcctttccattgctcgtccccttaagggtgctcacatggcttcgttggagagggtccattacgacttcaccgtcatccaatgggcattggtgctgctgcttctcacctggctgggcaccgccagctccttcctgttcttcatccatgtctttttccctcttcttcgggaccctctcgtctctttgatgacatcggttggccttttcaaaggtctctttcaactttttttttcatttttgctttatctcttttttaaagccttttccccacgcgctcttctgactgctcaaattgtatgtttgactccgatcattgccatgtgcagtagtcacacacaaatgctgttcaactttttcgtcccaacaatgggccgacttgggaacggaattaaccccgaacttgtgattttaaagggccatgaatagggaaatgtaattggaattcaggttatgatggccttttctttgctcgtcgctttcacttttgttttgtttacggttggtctttgtttttagcattaaatttgtttgtctcttcttcatgggatacccaacaatttgccctcgtttcagaacaatttggtttacatgagtcgccgattgaatttcatgatcaaatgcatgaccgctgtttttgcattcgcttttctggtcgttgccactacgagtgttggagtaccttataaattttcggaagatgagccacgcattcgccgactaattgctttggtctgtgtcggatttggtcaattaaatgccattgttctcatttagcatgccacaagacgaatttataattttgacaaaaaaattgttgaaaatcgaatttcatcgttaaattctaccgattctggtctttttgttcaaactcttgactatcgtggtccggacgatcttccagaacatacgtttttgcaaggtaaaagtgcataaaattgaaaaaaagttacgccgttcatttttaaggtgctggtcagccggactgctcacacacttcggatgagtattgtcagctcccttactacaccgctatccacgaactattccctccagagtatgtcgaggagtactttttgtaa

SEQ ID NO: 61099 - DNA, 863 bp, Heterodera glycines
atggatcttcccaatggacagcaagacttgcaagcatccacaagcaaaagcagcgaacatttgctggaaaaatttactatcagcgcaattatcgaggctcatcagccaaacgatgccaaatgtgtcgcggaaatgccggatggcaatttggtcactggcggaagggacggactaatgaaaatttggagaaaacggttctttttaattttgccatgttaatattaatatgcaattatttttacccaaatttcataattgggattggtcacttttacaacttatccaactttttgaatccctaatctaaatttgaaaatcgaactcgaaaaaagaatttcgactttttgtttaaatacgagtttgggattgatcgaaattgatatcagattctgatcagcgattctgaaaacaacagggaacaagttttcatctattactacaaaaaattaaaaagcctaaaggtccctctttggtttttttgggaatcccaactgtaagcatcgggggtcttaaatctgtaaatgccggaaattaatttgacttcgatatttttttaattgtttcccatccctaattcagtgacatttacgagaattgcgaaacgattccccaaaaggattgcctctcgataaattctgtcgctgttgccgccaaatccgtcaaaggttttctcgtatttgtcggtcggaaggatggctcaattgcaattttttcgccatcaaacgcattcaaagaaccgctgaaagtgctgcagggacacaaatcgaatggtaattacttttccaatttcctattgactttatttttcagtctgtacacttctttatgacgaaaacacgggccttctcatgagcggttcatgg

SEQ ID NO: 61100 - DNA, 905 bp, Heterodera glycines
atgacttcacgaattttggttattggttcaacaaacattgatgatgctgaggcgcataatatggtttttgacatgtctatttttggcaaatgtgttgaaaccaatcttcccatattctcggaacgtgttcaattagtcaggtaattggcattttgagtttggcatttattttttctacctctacaggaagtacgcattggtaaaggagatctacctcacggaaaatgatgagaaagaacttgctcacgacacaaattctctttctggattaagtaagcaatcctttttattaaaatctgcttctattattcagtttataccgcaaaaaatatattttgaactttatcgaaattaacatttataactctaaatcgtcaaaatggtttatttgttagatttttcgagtaaaattttatggatttagtagcttttttaaatcctgttttgaaacttgaaattgattctgattcgtaatgcaatattctgaatacgtgaactttatatgaaaaaatattttttgccttttactgcatatgagcattaatttgaagagctcgagactacttgtgcgcgttaatattggttccagatttccctcaaatttaggtttgcacgaggcatgccactctgcagtttcaatttgttcatcttcacaacttacatacgtttcagcgcttccttcattagggagattaggacacgtacgctataaatgtttatgtttttgttaattttattgccttcttaggtaatggcgttgccggacattgaaaagaagactgtgaggaaaattgatgtcttgaatgaaattgactatctattagcggggtatattggagaagaattgtttcttgaaaataaggaacgagtaacaaccggttgcagcaatgacctccagagggcga

SEQ ID NO: 61101 - DNA, 873 bp, Heterodera glycines
atggaccccaatcagcttaaactgattttggaggctgttttgaaggcatcagcggaacaaaacaacagttctgctgcattggcgacatcaatcgatgcgcgcctttcgacatttgagtatgaccctgagttagggcatacatacgacgtttggctcaagcgctatgggcagaccatcgcccaggatggacaagcactcagcggccagtcaaaagtccaactattgattggcaaattgggcgaagcggagtacaagcggtactgcgacagcatcgcaccaaagacgcagaacgacttcaattgggatgagacgaccgcaaaattaaaaaaattgtttggagaaacccgatcattgtttctccgtcgttttgattgtttccaaattcgtcaagaagcgcaacaggacgttccaagtttgattgcacaaatcaactcgtcctgcgaaaacgcagatctttcgctgagcaaagaggagctcaaatgcatgattctcatcattgcattgcgcgacgaattcaccgatctgaggcaaaaatgccttcagcgtttggaagacagtcgaacgagcggacggtcaacctcactgcaagagctaggagaagagtgccgcaaataccaaattctaaaggaaagcgcgctctccctcggctcaaatccctgcagcaccagtgccatccgagccaaaccgcagcagatcaaggacaagcagaagcccaaaacgaagccgcagcaaagccacaaaggccaaaatttcctgccgaaaaattcaacggcacctaaaggaaaagtggaccaacgtgatcagccctgctattcatgcggaggcaaaagtcactggcaaaaagactggtggtttcaaaaactcgacgtgtga

SEQ ID NO: 61102 - DNA, 742 bp, Heterodera glycines
caaattcagaccgcttcttgcactgtgctcaatccggcgatggcccgttgcaacatcccgaaaatttacgactggggcaccaaaactgtgtatttccaaccgcaaagtcagggcgcaaatgacgaaagagcattcgttggatacatttatttcggcatgcgaatttaatttaaatttaattgaaatttcaatatttcgtacagtgcctccaacgttggacccaatgcgattggacatcggcaacatttacgactggtacaaaaacccgatgccataccaggtaggctatactgttggtcaagggaaacgataaaatcagtcgtataccgtataaaaaacaaaactcatccatatactgtactggatttaacaaccaactcttattctaataccatatcgagtagacaaaatagcgtaataaaacttaacaccgccgactcagtctgataccgtactaacaactaacttcattctattaccgtataaacttgacaaatccttgtcaaaataccgtataaaacttatgtaatactctcagtctgataccgtatttcactgcactgaatgaatttaatggcaatgtttttgaggtgatgccgatcacttggtacccgcgcaacttcaccaaccccgacctgaactacatggaccagacatggcacatcagtgacgacgcgctctacggagtgcagcttggactgtacgtgatcggctacaaggaggccaaagatgaccaggtgtt

SEQ ID NO: 61103 - DNA, 89 bp, Heterodera glycines
aactttttggcctgtttaaaaaggaattaaaaatttttaaaaattttattcatctccctttttgatagaaaaagcatcagagtgcctaa

SEQ ID NO: 61104 - DNA, 348 bp, Heterodera glycines
atggcccttaagaaatgggccgcaaatgtccaggacgcaaatgtcgggacgcaaatgtcgggccgcaaatgtccgaatttggctggagccgcaaatgtccgagccgcaaaagcaggggtaaccgctggggatgcatatttgattgaattaagaatttaatggctcaaattttcagattctcgtgagtacatcgactgcgaaagcggcgatctgaagacactcgaaggcgcatttcaccaacttaggacggagatggaaaacgttgcgttcatcgactttgatacaccgaaatgaacgaattcccattcgtgtgggcgtataagtgtgatcagttgcagcagaagacaa

SEQ ID NO: 61105 - DNA, 336 bp, Heterodera glycines
atggacacttttatggatattgaaaaagtgtcggaatttgcgagggaaattattattaatgaacgtgtaaatgaatctgtcacttatataaagggattgccatggaaaatatgggcacaaataaataagaaaatgaaagcactgacaataatgagaaatgtttggccattttcctttattgtgcggctccaaaagagggtgcaaattaatgttaattgataatatttaataatattatttttagatataaattggaattgcaaatgttcggcaactcttcgaattgtgtcgcaaaagagcgaagtggcggatttcaagaaagaattcagggaagaa

SEQ ID NO: 61106 - DNA, 1446 bp, Heterodera glycines
atggagactggtagattattttgcaacctcctcagaaaggggtacataattggagaccggcagtttaatggagactggcacataaaaagagcaaatacggtaagtcaatgacttttttttctgctgattcgaaatgccataaattatttaaaaatctacactttgtttaaagcttctaactattatgcatttttttttctacttttaagaatttttttgcaactttttgattttttcgtaaatttttagttgacttttgatgttttttcgcatttaaatttctatccctacttttcgttccggcctaaaaatacacagcacagttaccagaattggtcgtccaaatttgaccttttttccgagttcgggttacgcatggggtcaaaatgggtctaaatggatgacggatttatgatcagtggccttgaaaacctatgcatttttaatttaaattaaaatgaaaaattgttttgagttaaactgcataagagctgccaaatcgaaaaaagagagtgaagaaatgagaatgaataaattggtactttactgttatgtgactaaagccaaatttcaaaaaatcaacaaaagggcgcgcaaaattcacacgataagctgatccatttgataaactttatcagcgatttttacattttttcctcccaagtgatgctgctgtctgctgtgcgattttcgcgcccttttgttgattttttaatttcgagttgtgaaagtccgggctttttgtttatgatggaaaatctctttgctgatgaaatgctataaggaatcactcggaaaaacaaagtcaattatataaaaaagcttagaatttgcggatattataaagcaaaattatattaaatttacgcctaattcctcccttttaccttttgggaaaacgagcaaaatttcaaaaagaatgaaaattaaattctatttatacctacttcgatggattatttttttaaatgacaggtctatgaccacgatgttaaccggcaaagggtcagccgtgcgcaattgcccgcggtgattgacgagatcatgaacgaagcaaatgaaggcgccagggcattcattttggcgaatttagagaatgtccgaaaggttaatatggggttaaacggtcgggaaggctcggtcaaaaagaattagtaactgtatcagccacgggtcgcagtcgcagtctttctgagaatttttactaaagttttttattttttgaattggcaatttgcgtccaggtcgacgctgttggtatcaactagagtagagcgggaccgggaccgggccgggaattcccggtcctcagaggtcccggtcccagattttgaaaagctcaggttccggtcccggtagggcaaccgggaaccgggaaaaacaagcactggtaagaatggggtctgagtgaaaaattagtgaagaaaattggagtcaacgggaaaa

SEQ ID NO: 61107 - DNA, 603 bp, Heterodera glycines
atgctcgaaaagttgttcaaagaccaagacaaggggacggtgttcatctcccagaaaaacactgtccaaacggcgtaagttttcatattttattttgtttttaaataaatgttttgccagcaaaacatttgtcgacttttacaagcagtcaatgcgaaatggggaagagggaattgtggtcaaagcgttcaattcgctctatcgcccgggaagccgagcagaacgaaacggttggaagggaaggggtgggggaagtgagtattcggtttattattttgcatttttaaaggatggttcaaaataaaacccgactacggcgttcagtcggccctcgacttggcccttgtcggaattcgctatgagaacaacgtgttcagtcatatcaaatcgtttttggtcgccgctcgtctgcccggcccatccacaaatttccacttgaaaattgttgccggcataacttcacggctcaaagcattggactttaaacgactgaccgaattgctgggccccaaaaaggcgctgctgcacaaaatgccgacatggcttgagaggaacaacggtgccggaaagtatgacctatttgtgccaaaacataacatccaa

SEQ ID NO: 61108 - DNA, 756 bp, Heterodera glycines
atgcttttttcgttttttctattccaattttattctgttgtctactcaatagcgtcaaagagaagtcctgaaccatggggggatacactgaaatcgattgacgacaatgccagagatttcaaatggcctgaccgacacgaaaagggtacatgggcagcagtcgccgcaaccggggaaggctccagggctagagctgaaaccggtgtcaaccgagaggaaggcagtggtatggaggaggaggaggaggaggacagccatattgtaagagcggaagcgttgagtgaacgtgaaggcggtgttgcagttgctgcagccaacaaagggcaaacccaaaagacgagtgatgataataatgatgatcgtgatggcgcgcaccagcaagtcgtcgtaatggcacgtggaggtgaagacgcccgtgcaaaagctgaagcaagcggaggtccaagaagtgtcgttgaaacacgaattagtgataaccaacgagggggagaaagattagctttgggttcggccattattcatagacaaggaagaagaagaggaggaggaggaggagtaggaggtcgaaacagaaaccgtcagagaggcaaagaagaacagggcgaggacgaagacctattgccaacgataatttcacccccgccccccgcatatatggagctaaacaatcgtcagaaaggaaatgagcaagtcacactccacaacaatgtgcacacaatgagccctgtcagttacccatatttgttgaggaatcaa

SEQ ID NO: 61109 - DNA, 1609 bp, Heterodera glycines
catggtccgggaacttcgatttaacgatttcctataagcgaagttatacacagaatgagttccgcttcttcacctgtgccttcacttatccttaactcgggcttcccaatgtctcaaattgggtttggcacttggatgtgcaaaccaacagaggtcaacgaaattgttaaaagtgccattcgtaatggatatcggcatttggattgtgcattcatttatcaaaatcaatcggagattggcgcagctctcaaagacatgctccaacacggagagattaaggtgggggggggagacaaattcaaatctaattctcgcgaatttactaaaaacgcgtttagcgcgaggatttgttcatcaccagcaaagtttggaacacttttcacagctttgacgccgcattggcaaatgtccacaaaagcttagaacagctcgggcttgagtcagtgtgctgttgttcaactgctgatccgttctgttttgttccttcgtttttagttatttggacctttgtcttatccattggcccatgggttacaaagaggggaccgaactcttcccaaaggacgcggagggacagaaagtgtttttgtcggacgtggactttttggacacgtggcgggcgttggaaaaggcggtggcccttggcagagttcggtccatcggcgtgtccaatttcaactctgcccaaattcaacggatcatcgacaattgcaacatcagaccaagcgttttacaggcaaaataaaaaagaaacagccaaagacagactttgttggaaaatgttggcacatttcagacggaatgtcacgtgttcttccagcagaaaaagttgcgcactttctgcaaaaacaatggcattcatttcgtcgcttcgtgccccctgggctcgagtgccgacaatgctttccgcaagtcggaatacccttctgtttttgaacatccgaccatttctgagattgcttctctccttcaaaaggtaggcacagacagaaaatgaaaaactgtcaaattgtttattgttagttgactttagagcccggaattttgcaattgccgggaagagaattggaaaaagaaaggggtgagatccccggaactttaatgaaatttgttaagaaaattgaggaaagatttcaactattgtaagattcatgacagaatggttttgaattatgccatgctgcaatattttttagtcccggtccaaattgccggtaccgagacttgaaaaatgggcctggacggggccccgggactcccggccctgtgttttgtccaaagaccgggaccgggagttccggcgggatcccggttctatccgggctctatttaatttttagccattaacaaataaatgcacttatttccaagatttttgtaagacaaaaacgcaatattacattacttttcaaataaagagctgttttagtcaaatgcccaagttgcgctgcgtttcttaacccaatttggcgtcgttgtcgtgccgcgttcgtccgatgcgcagagacaacgccaaaatttggacattttcggattttcgctaaacgaccaacaaatggcgcaaattgaggcgttagacacgggcaaacgcattttgtattgactgtca

SEQ ID NO: 61110 - DNA, 728 bp, Heterodera glycines
atgaaacttgattatttatctcaaagcaaaaaaaggatggtgcttaattttttgttttccttgaccgggttattgtttcaattgtctagagtttttaaggtattcctgcaattaagagttttttttatttaaaatgcatatcattatgtatttattaacttttattttttctctgttttatatcaatccaacttcatttattatattagttttattttatggcaaccaatccaatgtaatttgtatactttggcaggctatggaataatttcttatttagcgttttcaaatattaaactataagtcaattgctctgatgtccgtgcactcgacaaatgcttaataacttttatggaattgaattaattgattgatttttcatttttggtttcatttttatttttatagtttaaaatatttaattaattatatagaatgttttattgctttaatatcaaggctaaaattgtttaacttatttgtatattctcatacgttggtttaaaattccaaattccgagcttaacaaaattgttttaataatttatcaatttatattagagaccggacgactggggtcggagggatccgagtcgggatcccgactgaatccaaattaaatttttgtttttatgcgattttaggttaacatcacagtattaaatcaaattgaatgaagtatgttaatagtcttaaatagaatagtaaattataaaccaattactaaa

SEQ ID NO: 61111 - DNA, 929 bp, Heterodera glycines
atgttatttgtgcgatttcgctctgttttcggaccttatcgtgcgttttctgaattcctttctgcaaagtaagttttaatctctgagctgccgtttccaaccatatttggagtacatatttaaatttgaggttattttttttattgtagtcggacttgtctttatgacttccatgtgaaaaatggtgccaaaatggttgagttcgcagggttttcgatgcccattcagtacgatctttcggtcagtgcttcgggtgagttggcgacctccccatttcatttccccgtactccccattcagtgcttcacacgcgatcgaatgtgagccttttcggttggtttactgtttctttagttgcttgtttctaatgaatttctttagatgtctctcatatgttacaggttggttggtttttgttgttattttttgatcttatttcccaatttttaagactgaaatcaccggtgcccataggtgattttgctttctttgaatgttttgatcacaaaaaaaatagggtgcaattcattgaatcactgacgccaactgatgtgacgaatttgccggagaacagtggagctttgagtgtttttacaaattcagagggagggataattgacgacctggtaatagaaattaattcaaagacaaagaaagtaactttcagataatttcaaaaacggcccacgaatcactttatttggtgacgaacgccggaaggattggaattgatttgccatatttggaagtgaaattcgccgccttttgctaattgaagtgttattaattaagcaaaaagcctccgaatggcgtggcaatgggaaggaaatccaagtgaatgtgttacaaaaaaaagcattggtcgcaattcaaggttattgcccgttctaacactaaaccccctcaaaactcaaaaggtcctgagacga

SEQ ID NO: 61112 - DNA, 168 bp, Heterodera glycines
atgggctacgggtcgcaagcagttcgcctcctgctcaacttttacggacggaggccgcggcatgtttcaacgacaacggcggcggcacaatgccaaaatggggaggacaaaaatggtggaaatgataaggaggaggatgaagagatgtcgagggtccaacttgtggat

SEQ ID NO: 61113 - DNA, 64 bp, Heterodera glycines
gaagtttgggtggacagcgacgcggacaatgcgcgcaccgcacagagttgggaattcgtcgtcc

SEQ ID NO: 61114 - DNA, 1263 bp, Heterodera glycines
atgatctccgcgggacaaaatttatgcccgctcacagcaatgatcatagaaaacgaagaaaaagaaccagaaaaatattgggatttggaaatgattggggttaaagataatcccgtagaaaaagatgatgatgtgacactaaaaatgttccaagactcagtataccgaaaagatggacggtatgtggtaagttggccttggaaaggcccaaaagacgaattaccgactaattttgcattagcctatcgaagaatgatcggcataatcgaaaaattaaaaaagaccaacgaatttttaaaacattatgatgaaatatttaaagaacagataaaagaagcatagtcgaagaaaccgaaataaaaggatatgacgaacatttcttaccacatcactgtgtgctagttgcaggaaaaaagccacgagttgtatatgatgcgtcagcaagaataaaaggtcaaaaatcacttaatgacatgttattcagaggaccaatctatatgccagaattgcctggtaaaaaccaatttcaaagacaaatctttgcgcattcagatttaaacgagtaccatttggggtaatttcttccccgtttttactgggggcaacagttcgatatcatttagaaaatgaacaatcagagttggcaagagaagttaaacgaaacacatttgtggacaatatatttgtaggttgtcatgattttgatgaatcaatcgaaaaatataaaaatctaaaagtgttatttgaaaaggcacgaatgaacattagagaattcatctcaaattctgaaagagtaaataatgagatcccagaaaaggatcgtttagtaaaggaaaacccaaaagtacttggtataaattgggacattaaaaccgacacttaccaaattaaatttccaaatgttcatgaaacagaaaggataagcaggagaagtgttttaaaagagttaaactctgtttttgatccatgtggatggctatcaccttgtttattaccagctaaattattcttccaaagtctatgggaagaagacaggaaatgggatgataaaataggagaagaaaaacagaaagaatggaaatacattacaagtttatgggaaaataaatcaattaaatgcatacggagaatagtccctgacaaatttaacagagcagaattacatgtttttgtagacgcatcaaaagatgcatatgctgcttgtgtatatctaagaatcgaatcagaaaaaacacaaatcaatttattatatgcaagaagcag

SEQ ID NO: 61115 - DNA, 2589 bp, Heterodera glycines
atgattgagaacgctttggatcaacagctgctctgctttgtggaaatgtgttttaatgtgttgaagggtcgtgttccgttagggaagcgacaaattcaacggttgggtgaactgaagcaccagttgaggagcttagcacgcgcgcgttgcgctaaaacagctcgcagggtgctattgctgaatcatcaacaacaacaacaacaacaacaaaccggtgctgggttcccaatggtagccagtatgttggccagtgttctcttaccagtgttgatggacaaatttttgccaaaaaaaaactaattgacggggaaataaataaataaatatataaaagcgaaacaacaggaacactcatatatttgaggagagcgcaaaaaaaatgcgtcacgcaatgcgaatgtttctcgtcccggaggacgtctttcagtcggtatttgttcaaccccaagcagcagcagcagcagcagcagcagcagacggtgccgacggcacaccaattgggcttttgcgctcgcgcatccaacaaattgagcgcagcagggagctgaacgaagagcagaaggccgcacaataccatcaggaattcaaacggctcaacaaactggtgcgcgagcaggaggagcagccgatcaatgttcgacttcagcacgaaaaggagagagaaaaaaatgcagcaacgccgccgccgccgccgccgccgcaaacgatcgatcattcaacgccaaaaagattggagaaaaacattgtaccatcagcgtttgggttgaggaggcaaagacaccactacacacaaaaggcgggggcattatcaaatcgcagacctgcccaaaaacaacaaagaaaagcagcagcagcagcagcagaaacaccaaacagcagtggaaatggagaaacggaaaaagaagagggtgatgtagatgatggggaacagtgggacgacgcacaatcatcatcgtccacggcgtcaacaggtggtgccgcagcaaaaagagtgctcagagcaagagatggggaagcaggaaaaggaggaggaggaggaggaggagaaacggctgatcgccttcaaccaaaacacaactaccagatgaccaaaaatgcactgatcacacacattcgaaaaaaggggcacagtctgggagtcagtgatcagggaaaggttttgcgcgcagatgggtccgagtttaaaacgagcaacgtggaggcaattgtcagccatttgttgaacagggacaaacgaagcgaattcaaagggccgcctgtgggctacaaggaatttgctgaaaaggcaagagaggatccgttgctaaaaaagtatttgtttccggaacagcctctacaatttggcaaaggcctgactgactttaggcatggaaaaggacataaaaagaagtgcgaagggggaggagggaaaagtgtcttcaggttcaaaccgacactatggtgatagaccgaaagaaagaacagctgttggaccagctgtacaaagatgttaactcatcggtcagctttaccagcgttgagccgcttttgcgcgaggcgaaaaaggtgaacaatcaaatgagtagaaaggatgtagtggactatttggccacccaacgcacatacaccattcatagacaagcgaagaggcgctacaaacaactaccaacactcgcttctggactgcacaccgaatggcaagcagacctgtctgtctttgacaaattgtcgcgagagaatcacggctacaagtaccttcttgtctgcatcgacacactgagcagacagctctttgttgagccggtgaaaagcaaaaagagctccgacatggttgctgcttttgaacgcttgtttaaacgctccaaatacataccatggacattgttgaccgaccaagggctcgaatttaaggcaaaagaggttcaggaatatttcaaaaataagaacgtgaaaaacttttttatgtacacctcgccgcgaattcacgcagggatggcagagcgggccaaccgaaccatcaaagaacgcctttatcgctatttcacggaacggggtacccaaaaatgggttgatgtgatacagcaaattgtgcatggaataaaccactcgtacaactcaagcataaaaatgcgcccagttgatgtgaattttgagaatgccgaaaagctcaggaaaaaactcaagcagaacgctattggtgggacagcggaattaaagcggaaacaaccactaccacgtttccaggtgggtgaccgtgtgcgcattgagaagtacaaacacgtgttccaaaagggctacaccggacgcttcaccaacgaagtgttcactgttgccgaagtgcacactgaccgctttcccgtcacgtaccgaatacgtgatgacgatggttcactgattaagggtcgtttctatgccaacgatctctgtcgtgtgctagtgcgcaaaaatgatgatgatgatgatgatgatgataccctatatgacattgaaaaggtcgtccgaaagaggaaaaagcaaggtgttgaatacgttttggtgaaatggaaaggctacagtcaacggcacaacagctggattcctgcaagctcgatgacatggaaaaatatataa

SEQ ID NO: 61116 - DNA, 821 bp, Heterodera glycines
atggacgcaattcttgcaaccgattggctccacaatgcgttcccagagcgaaagacaacaacaacaacaacaacaacaacaacaatttctagtgtgggagaagaattagacgatgccgtcaaagcagtgagttttacacaaaaataaatttaaaaaaataaaataaaaaaataaatgaataaataaaatcaaggacgagcaaatcagttggcttaaaattatcgaagaggaggaggagcgaggaaatgaattgcaaactggtgaaatggaagtggaacgagcgaaaggtttggttgtttacaagaaaaaaaatgaaaaaaaaatttagagattgagccgccaaagcgacaacacttacagtccaagtgtagctgtaacgaaaagcaaaagagtgtcccgctgattgactttctctgccaacactacaaatgttctgttaaagagcttcacgttctgcttcagacgctgaacaaacgtcgcgaaatttcggaaatgttgcgctctcagcttcagttacgcaccaatcatctgcgtcctgcctggaaaaattttcgcgtccattgcaacgaactgacaattcatcctgctcaaactgcatatgccatgcgcggttatcttggcattacggttttttaatttaaatttatcagctcctcaattgtatagatgatatacattgtttttaggtccgtatttactactatgtgaagcatggcgtaaagctcgtttatcctcagcttccctgtgttcatcaatttggcggtggtgaccattgttctctgtttccgcttgagtgtctgagcgtcataaaagatgcttga

SEQ ID NO: 61117 - DNA, 2234 bp, Heterodera glycines
atggcacccgtaaatcaaagacatgaacaaaaggggcaaaaagaaggcgaaaatggaggagccgaacatgtaagtggggctgtaaatgccgcagtggtgctcctccaacagatagcgttcagtgtccgcgttgaagccaaacacaagcggaagagacagacacaagctgaacagccagcagaaggcgatcgccaggtacactcttcgaaggtgcgaagatcatcaattagcagcaggagaagggaggacatacctccgcctgtgtttgtgcgttttgtaatccgctggctttgtggccgccaccaatctgtgagttatggggggaagtgcactctgaccaaatcgaacagagcgatcaatcgccgaacctatccatgctgatcagcagcaaatgcacaatagaggacgtggaggcgagaacgtccaacacgcagtaaatgtagcaagtaaaaacgggcaaatgccaatgcagcgaatttatctgaagcccaaagagggggggggggggggggatgagtttgtgcctaaattgctcaccgtcatgtaaatatggaaaggggtgaccaaagtgccaaccatcaaatcggcacatgccaaactgagcaacaaataattggtcggtgtctgcagacttttgttggagaggacagccgccaccaccaaagtgttgccaataatgcacgaaattggcattgtgacaagcagcagccagaccctgaggcgagaaatggacatggttttcggcaaagccgtgggacattaatcgaccattgcggcttcagttcggcgtcaatgtcagcgaactgtgaggaatcaatgcgacggacgtgccgttgcagctgatgtacgggggaaaatgccatttggtgatccaacggatgagaaaaaggcgaaaaaaacaaactgacaaacatcgcagcatcactatgggaaatggcacgcataagagaggaggaagggacgatttgtggtggttaatgagccttaaaaggtttaataaagggataggacaggtgtcattttagcattaggaaacaattgtaagcacaacaaatgattgaatgatttaaatttaattggatcatcgcactaaaagatgttccctcgagagtcaattcaatgaaaaatgtgaaatttttacatttttagaccaatttggatgtgtgggaagaatgaatgggcaacaaacagtcaggggctaagaaggaaaagcctcccccctccccccggggtgaagacgaacaaatttacattgcccgtccgtccgcctcaaccaattccaatgcgttgagagttgggaatggcctttttgggtacgccaaattcaattgaatttcgatgggatttgccacaatgcgaaagtcggccggaaatgttgaggaatttccgccttttgctgcagctaatgagttacaaaagattgaaccataccaaaggacgaccaaagaacatcaaaatgggagtagataatattcccaatcaaattatcgattgattttcgatcgataatttgagtgtgtctactttttttctctgacatccccttccacaaacccaaacctattggatggtctcctcgagagagagagagagagagtacattgacccccccccccccccatacctattggatgatctttgatcccttcaacccaaacctattggatggacttgtgcgcgagaatttaattaatttaaattttaattaataatttaaatgagcgagagctgcgcgactatttccgaaaaattgtgaaaaatcaaaaacatggtagtggactcgaaccgttgagagtggaagcgaggagcttaaccacttggccacaggggcagttgaaaggtatgggataattgttgactttatgatgaaaattccgaaaaatcgtgaaaaatcaaaaacatggtagtggactcgaaccgttgagagtggaagcgaggagcttaaccacttggccacagggtgagttgaaaggaactggataattgttgactaaatggtgaaaaattttcccctttgcttcaccacaagcgctgcggaggcgggcgtgtggcggtgagagagtgatggtggacgcctctgtttcgatttttcaattaattgattatatgcgcagccctttaccgttgattaaggatatttaagctccttaacattgcctttttctctttttctcattttttcaattttgttaaattttcatcagcaacaaacatccttctcattttataataaa

SEQ ID NO: 61118 - DNA, 769 bp, Heterodera glycines
ggtctggctgctgcttgtcacaatgccaatttcgtgcattattggcaacactttggtggtggcggctgtcctctccaacaaaagtctgcagacaccgaccaattatttgttgctcagtttggcatgtgccgatttgatggttggcactttggtcacccctttccatatttacatgacggtgagcaatttaggcacaaactcatccccccccccccccccctctttgggcttcagataaattcgctgcattggcatttgcccgtttttacttgctacatttactgcgtgttggacgttctcgcctccacgtcctctattgtgcatttgctgctgatcagcatggataggttcggcgattgatcgctctgttcgatttggtcagagtgcacttccccccataactcacagattggtggcggccacaaagccagcggattacaaaacgcacaaacacaggcggaggtatgtcctcccttctcctgctgctaattgatgatcttcgcaccttcgaagagtgtacctggcgatcgccttctgctggctgttcagcttgtgtctgtctcttccgcttgtgtttggcttcaacgcggacactgaacgctatctgttggaggagcaccactgcggcatttacagccccacttacatgttcggctcctccattttcgccttctttttgccccttttgttcatgtctttgatttacgggtgccattattccaactcaataatccttctgatcagctcacttttagttacatttttttca

SEQ ID NO: 61119 - DNA, 486 bp, Heterodera glycines
tatgtacgacagtccttcttacggtagcggatattcgccctcatattatggtactaactttttgtgacgaaattaacaacacggagtttaggtggctattatgggaggaatggtggcctagggtatggtggaatgtacccgggctacggtggctattcgactgcgtcctactacggcggttggccctatacggctgggtacggtgctcagaacggatacagtaagacaatgccaattttggtgaattaaaagcacaacccccactggtgcagcagctaattgtaagaaataagttgggaaaggaagaaactgagcacaaataatgggatggacaaaggcaaacgcgggactgatcagcgaaattaagcatcgccgtggagataagcagaagaattgcgagggatttgcgaagggaccgatcagaaaggacggaaatggcaaactctctcataacaatggcataaatgataaaaaaaatatgaagca

SEQ ID NO: 61120 - DNA, 2991 bp, Heterodera glycines
ccggagggcaatttctcgggtttggggccgatttgggtaacatcgccacctcagcgatggagacagtgatcggcaagtggcggtcgctggtcaagcaaaccaatcgaagattgttttagggatcgatcagaaaaaccgtaatatgatcacatgggagaaaccgctgttgaagaaaatcgaggagacggctgccgaacacgcgagttcgcttaacgaaagcgagcgggagcaagtccgttccaacgcaatttatgggacagggggggggggatccaatcacttcaccgaatcatttgatcaattcgattaccactttctgatcacatatcatttttcattccgttttggttttttcatctgatcatccgataattcttcgcttttttgcttggtcatctcactgcccccgccccatccgttcagcttcaaaacattctccaagtcacgagttcgtccgcagcttctcagacaagcgtttacgaatgcttcgatgacaaattaaagcggcgattgtgtgtttcgaattgggcagaaaaagcatatgtcagcagcgacattctgttagaggagagggaggagatcagtcaggccccgccctcctcggtgattttggacgccgtcacgactttggacccaagtttcggcaaggactcggccataagtggtaaggccggaaaaaagctcccgtaagcctcttagcatttagtgcttttctcataaatgggcatttaattccgcggcattttcctttttaattgactattttgataacgaacagcaaatgttgccaatcaaaagcccaatcagcaacaaaagatgatgggcatgaacatgttggaagtgcccaaaatgaacgcagcggcgagacgaaggcattccgaaaacggacaaagacgggtctcagtgatcagtggcagtgccaatttggtggtggacgcgcgggaaagggagaagcaacaccgacgcttttcactacaaccgcccagggacaacgaaaacgaagagaatttgttgaaagtgccgaacagaattgtaagggaaagggagagaaaaaaatagggagggggtagggagagagagacaaggggagagagacagagagggggaaaagagagaccggggagagagagagagagagaaaggagagatgccacagagggaggaagaaaaagggatagagataatccggcgatttggaatcccttctcttcaaaaatgcagttaaaaatattaagcaaaaaggtattttcaacaattagcttccctcccgccattccttaccaaaagcgatcagattccatttttaattccttcgcggggagcgcaacaaaactttggagtgaattgacaaatgaatattcataaaatcattttaaacaaaacaaaactttaaaataatgaatggattaagcagtgattcctcccttttgtggactttttctttaacaataataaatgatcaaataataatgctttttggcaggggagtaaaaagtccatgcggagactgtccgagctgatctccggctgggaacggccctcgcgctcttcccttggccaactgctcacttttgctcgcagagactccgtttatatagcgcggaaaaagttggcagggctcaaagattgggcattgggtgagttcggtttggtcggaagcgatcgatcggaagggaatttggacagaatttccactgataaaactttgtttcttaagacctgattgccaagctaaagtctaaacaggtaggcaatgagcccaaattctttcgatcgctctccttccctttttagggattggccattcgaagagaggcgagggctaccaaattggtcgctaccgtaatgggtagacactgtgcattttgtcgtgctctaacattccgttaagccgtttttcttatctgctgggccccctatttttcgatgaacttgtacaaaatttacaaattgtacaacgaccaatggtcgcatcagtccgaattcactttccattggctcagtgcgttgggttacctcaattcgtccctcaatttcttcatttattccgcaattaacaaggtgatggatgggtgggtgcctcggcgactctttcggcaatttttcgactttaagaaatttcgtatcactttttggcgattgctcggcctcaggcgaagccaacgcaagaaaaaggcatggcttcttccgccagcacagcacaaaaagaaacgaccaaagaagacggacagagacaaagagcaacaacagaaccaaacggagcagaaccaaaaaatgcagcaaaacaacggaaaaagtggcgaagagagcgacggaaaggaaaacggacgaaagtcagggaatggaaggaagaatgaaacggaggaggagaaggaggggaagggaacggcacagaaagagcagcgaaagtgccatcagaagaagcagacgaagggttcagaggagaaaagggcaaacagcgggggaaggacggacggagagagcgggagggggaggagggcaaagcgcaaaaacaatgccggggccgaagagcgacagcaaaatcggaagaaacgattcgtgtcactaatgtgagtcattagatacttaatgggctaattgtaggaaatggatgcgtattaagtccactgagccgacatttgtccattcggaagccccaaattgtggtcgaagatttggcaaacccaatccaaacttcgatgaccatttccgctggaggggagacaacgtacaggtggtgggcatgggattggcacttaatggccgaatggccaaaatttggaaagcaattccagacgatcgtcggacgattgcatccaacgctcatgctcagaagtgtttggcggtggcattgtctttccgagcggagcccatcacaacagccgcagggggtcggacatgagcaattcgtcggcatcacttcagctgcacgacatccaccaaattgaagcacagagtgccgaagaaatggcccaagcggaggtgaagccg

SEQ ID NO: 61121 - DNA, 513 bp, Heterodera glycines
atgaaagtgaaattaattagcgggaataaggcacggtggtgtagttggttatcacgcgagtctcacacactcgaggtcgccggttcgaacccggctcgtgtcaatcgttcttttttaattttattgatcataaaattgaaatattttaagataatttaattcattttttaattttaatttttttttttgctttatattcgttttatggggccaaaatgctttatgattttttttttgcgaaatttcaacaaaatatattttttaattgttgttttctgcacattttctcaaaatttttaccataaaaatcacttgggtatgtaattatatgcacatgcattgtttcctggtttatgggaggcctcgaacgtatgaaaatatgttttggttcgttttgaagcttcaaggacgtatttccatatgcatattttgcatctttgtgcattttagcgcctttttatgtttttcttaaaaatgattttcatatttagtattttcgatattttagcttaa

SEQ ID NO: 61122 - DNA, 562 bp, Heterodera glycines
ccgattggcccaccgattcgaagccgtccctccgaagtgatcgttcatctccgtgccaattcctacaacatcagcgcatttgtgccaaaccacccgggcggagaatccgttcttcggctggtcaatggtcaagacattgagcaatacattgagggacgaaagtgcgttttgggcatttgccatcggcatcgatacgcttatcaggtggccaatttggcaaaattaatttatacattggataaattacactcaaatttgttgaacaaatgccaaagccgattattgttagcgaatctttgcttttttcgagattgacccaccggaacttcaaaaatgaaattcatttggtacaaaacaaaacctaattagcaaatgtctttgattattaattgccttgatttgaggtgctcagacaattcgaaatgccttcggatgttatcgttggggtgaagggcaaattttacaacatcagcgcatttgtaccggaccatccgggcgggtcttttgtgctcagagcgatcaacggtcagcagaacgtggagcagtacctggaggggcgaaa

SEQ ID NO: 61123 - DNA, 420 bp, Heterodera glycines
atgccgatggcaaatgcccaaaacgcactttcgtccctcaatgtattgctcaatgtcttgaccattgaccagccgaagaacggattctccgcccgggtggtttggcacaaatgcgctgatgttgtaggaattggcacggagatgaacgatcacttcggagggacggcttcgaatcggtgggccaatcggctgaacagaaaaaaggcaattccaataatttaggattattttattcacttttttacctcttcattttcctttgattttattttcagaaaattcagcgaaaaaacaatgaaaatttgatggaagtgaaaatggcgcattaattaagcttttctcaattaaaatttcaattctttccttaaaataacgaaaaaatgcaaaacggaaattgtttaaaaaaaacaaaaaaataaa

SEQ ID NO: 61124 - DNA, 268 bp, Heterodera glycines
gttttttcctgttttgcctggacctggacctggatttttttcacatttgacctggacctggatttcctggacaaaaatccaggaaaatccaggtccaggaaaaatccaggttgtcaaaaaatgcctggacctggatccaggaaaaatccaggcctggatccaggtccaggtcgaactctacaaaggagcagccgaaagcttgtaaattcatatccaatttggaaattgtacagaaacgcaaaaaacaattacacttttatttgtacaa

SEQ ID NO: 61125 - DNA, 158 bp, Heterodera glycines
atgcgtttcgcttccattcgtttcgctttgtttttatttctctttttggcacattttggcgccaacgaaacgacggaaaatggcgaaggacaattggaatcagaggaggagaaccgaaacgaactgcgcaaaatgccatttgaggagcaggaaaaagc

SEQ ID NO: 61126 - DNA, 293 bp, Heterodera glycines
atttgcttctctcttcgtccatttctctgctctttcatccccatggtcctccgtacccccaatccgaactgctccaactccatttgcgcttgcaacggacgcaccgccgcgcgatgcgttgggcgcggcttaacactttcgaggcgggcgccggcttcaaatcgctgaaagattggggggggggcacaattagggcgaggaaaaggtaatcaattaattagtctactaattaataacgggaaaagggaagacttctgctaacaaaatgagtgactgactcttgggaaaaaaga

SEQ ID NO: 61127 - DNA, 1017 bp, Heterodera glycines
atgaaccttcgctacaattttgccctttttttgctgttcattttggcatttgccgctttttctgacggactttcggtggacgaaggcattgacgaggaaggactgtgagaaaacgaacatactctgcattttgtcgtttgaatttgccattaaaaatccaaaatcccttaatttacggattatttattacatttttgagtctgtttagttttttgcttttgccttgctaattgattcaatcgttttgattggcaattcgaatttgtcttttttcccaagagtcagtcactcattttgttagcagaagtcttcccttttcccgttattaattagtagactaattaattgattaccttttcctcgccctaattgtgccccccccccaatctttcagcgatttgaagccggcgcccgcctcgaaagtgttaagccgcgcccaacgcatcgcgcggcggtgcgtccgttgcaagcgcaaatggagttggagcagttcggattgggggtacggaggaccatggggatgaaagagcagagaaatggacgaagagagaagcaaattgaggacaaatggtgaaggaaagagcgaacgaaagatgcacagaatcattcattcattttacaattgtaaagcgataattaaacgattaatcacaaaattgggacttaataatcaatcgtctgatacttttgattagtaatttatgcaaaattatattttaattgcacttttttaagtcatatggacaatccgtcagaaaatttatcaaaaacatttgggtggcttataattagagctcgcattttgagacatgccttttttgcgcactagtttcgataattaagcataaataacacattttccacttgatttgagacttctacgttgacttttattatgccttttttttttttgcctttttcgggattttcgtgccttaaatgccttttttgccatttttccattttggtgccttttttggcgttttttccgaaaaattccataaaaaatgcaataaa

SEQ ID NO: 61128 - DNA, 934 bp, Heterodera glycines
atgtatttgccatttccactgatttgtccctttttaattggtcttattgttagtcttgtgatgtgtgccgcttcggaggtcactcagcaagaggcggcctttgtttccttttattcaactttaattctgaactgtgtgtcgcctgctgtgtattgcgttttggcaatttgcttatacgtccgaaggccaagtcagttcaaaaaatataacaaataatttaaataagatttaaaaaattttcgcccgacaaaaaataatttaatttctgattctgttttattttaaatgcgaattacgcatttgatggattcaaatattcaagcctaaaatcagtctgacaatgagattctgttttttcgactcttaagtcgacgagaattcttatggcattttttcccgctttttggccggggattcgatggcatttccttctttttttggcatcctctcccttttcattgcagaaaacaacaacactcaaagtttgtctctcagtcagctgagtctgttccgctccatcttcgtgctgatgctcctccaactcctcggctggacttccaattccctttcgttgtttttcttccagaatttgttcgccatcgcttcgctctccgatctgacaaaatgggcaattaattgtgtgttcagttacattttgatcatcgcaaccgcaaccaatgggcccattttgtatttttgcaggtgaaaattgaaaaaaacagtcacaattaaaaaataattagggcaaattaattaggtaattaaataatgagagcacggaacatttatttacgttccccacttgctaatttaattcaataaatctcccccaattttagttttgaatacaaaaaagccattcaaaagcaattccgtgcattttgtcgaagtattggcaacaccaaaagaagcaaaaactcgcgggtggtggtga

SEQ ID NO: 61129 - DNA, 451 bp, Heterodera glycines
atgacaaatttaagtcggtccaatccgatggccaccatcaaagcggaggaaacattcttagaaaaaacggggagaagcattggccaaaagcactggtccaagcgaatcagattttggccagtcaaaacgatgaaaaacatagggaaaaagccgaattggtaaatggcaagcgaaagagagtcaatggcaatcaaaacattggtggagccgtgcaattgcttaaaaatggggaaaataaattaaaatattttgaaatttataattataatttagcaaagacacggaccgatttgaaattgtgacaaaaaccaaaagtaaattcaacacaatgccaacggaagcgatcaaagtacgaacagtgatcagaatgaccagcaaaggcacaaagccggaagaggagagaaacgagtaaaactgaacaaaggcaaaaagcaattagcagtggaaatta

SEQ ID NO: 61130 - DNA, 829 bp, Heterodera glycines
tccgtcggtgccgaagtggtggacaatgcctttctcggcctaaactcttgcgtttttgcttatggacagacgggtcagtcatgttgagattggctaatcgcatatgctatattgaatttgcgaataggttctggcaagtcgtacacaatgatgggcacttcggaggaaccgggtaataatgagggattaattaggataaagcggataataatgagggataattgtgataaatcgggcaataatgaaagattaattaggctaaaccggataataatgagggattaattggataattatgagggattaattgggataatttatggcagcacatcaatcgtaattggactaattcccctccccccctccccaagggattgtcccccgtttatgcaccgaattgttcgaacggttggcccgcgaaacgagtgaagatgggataaagaagttcaagttggaagtgtcctttttcgaggtgtacaacgaacgtattagggatttgcttgggtcggtttcccttttttaataattcgaattctctccccaaaattaggccgtcctccgctaagagttgcgtttcgacaccgaaacgtattccgtcgctgaaagtgcgcgaacattcgctgttgggtccgatggtggagggactgtcggtgtacaaagtgaccaattacgaccaaattgagaggtgaacaaacaccgaatgaaaggagcattccaaaataggaccaaaaaagttatttaggttaatcaacgcgggcaatggggcgagaacgaccgccgagacactaatgaacgagaggagcagccgaagtcacaggtggggccaaca

SEQ ID NO: 61131 - DNA, 49 bp, Heterodera glycines; identical to SEQ ID NO: 51181

SEQ ID NO: 61132 - DNA, 284 bp, Heterodera glycines
ctttgcttttttgtccatttattccaatcgcctattgctttaaggttttgtctttgactttgcttttttgtccatttattccaatcgaccacgttaattcattctctatacatttagtgtcttatttcatgaaattatatataatttaattttaaataaagaggcaaatttttacagaaaataaatagacgctgactaattagctaacatttataaagaaagtagaaatttgattaaatgcatatacaaaatattacttttttaaaatttgtataaagttccta

SEQ ID NO: 61133 - DNA, 340 bp, Heterodera glycines
atgtacctattttatcaaaatttgttttttgtttttagtcgtattgatgtgctcaattcactgaccactgaagatcgcaagttgttggtccgtcttcatagtcttgaaattcttgtaatttcttcatatatatatatattttcatatttgcacatctttttcccaattttagggcgtttcgaaagttttcgatggaatcaaaaccgcatacttggcactcaaacacaggaagaatcgcaaccatcggcagcgcattgtcgtattcgtgggcagtccattggacccattgttggcagaaaaagaaatggtaaacacttattgggcgctatatgaaaagtga

SEQ ID NO: 61134 - DNA, 1652 bp, Heterodera glycines
atgtgccgacttcgcatggcactgccaccatcaccagcaccaccagtggaggcagcacattcctacgcacggcaaccacaaattatttggcccatctcaacaacattttccgccgtatgtcgcgtgaaaattacaattttataaacaatttttgccggaagaaaacggcaggaattggtgggggataaaggaggaaattcaaatgaaaattttccatatttccgttcccaaattgtcaggccgagcagcgccaccgtcagctgccgacacttcggctgttctgcaagccgacggcactgaccacaacagacgggggacagcagacccatcggtagagaaacaattttataaatttttgcaaaaaggatagggttgctcactaaacgggtctatttcttcctcaccaaattctattacccattatttctctcgaaagcggacttctgatgcccaaaatctccgtaaaattctttttttttaatcgaaaaattgccttttatacacgactttgttttgtattcaaaatgctactttgtccattttgcagagcaccgctgcccaactgttgttgtcttccgccgcattggacgacgcattcgcaaccagccgaagtgtcggcgatgttcagcaccaaccgttgcctacgaccaccgccacttccgcttcaaatgccgtgcctgcccagccgctgcaccaattggtccgctcccgttgggccggcatgcgcgccacgttggcaaacatggtaagcacataattagctaatctacattagtcaaaggcaaatgccgtacaccaaacatgaaagcgtcatcggaacagaagtgcgggtacacagctataacttattatttgtcaagcaaattttgtaatgccaagaactattagcctaaaaacccaaaaaatatatttttttttccgctgccccacggcttaacaattttttacgcctgaatgaatcgtggtcgtcttgataaggaaaaacttatacaaatatgttaatatttctggcgccgaaacgtccccgagggtcgcaaaagtcgggacacgactcaaatcatccgggtacaccccaaaacgtcgccgccgtaacgtcgccgtcgaaacgtcaccgccgaaacgtcgccgcaaaaaaaatttaaaatttttcaaaattttaagaaaatttaaaattattttaccttttctgaaaatctaagtgttaataaaaactaaatttgttgatttctaagaaaaaaatcgaaaaaaacttgaaaaaaaaaattttttcccctgaatttcttaataaaaattttttttcgaatttttctagaattttttccgaaccaggctaggtaactaaaaaatttttgataaatttttagataaaattttaaaaaattttgcggcgacgttacgtcccggcgacgtttcggctggcgacgttttgtccggcgacgtttcggcggcgacgttttgtcctgctcccgtcccatccatcatcaacaattgttttgaattttcagttggccgacaaatatttgtgcattcgtttgttggaccatcttctgcagagtgggaaggcgagccgtttcatcaccgggcacactttacgtctgtttttgccgcttgtgctcagtgtgccgaccgttggcgacggcggtggactatcg

SEQ ID NO: 61135 - DNA, 729 bp, Heterodera glycines
atgtgcagaagcagcagcacgggacgacactgtccgggacggatcagcgccgaccgcaattggcaccgactttcgatgcctcgattgccgagcagtcaacgttccaatgggcaacggaaggtcaatcatcgtctacgagtcaatgggcaacggaaaaacaggacgttggacagtacaaagaattgcccaagtttgggcacggcggtgggggcggccaccgccctttctgaatttcgccacgtgataagacaatgccatgaatttgcgctttaccttttaaacttcaattaacttatctcattttctgcgtattttaatttcattttattctttattctcatttttttgcttgttcgcttatgttttccttgtgtcttatggataaacttaattcttttcttttttactcaattacgtaatttattgcctaggctaaaacaaatttagatcgaaaaaatattttttagtcacttaaatccgggtgttcccaaaattttaagtctgtccttcaaaaaacacaaaatgaaattattgtaaaagcaaaattaaattttccgaccatggaaatggatgttcacggcaagtctcagaaccaaagaattgggactttgacctgcattttctggacaaaaatccaggacaagcaaacattattgtttatcccatggctcattctgacaatatgtagctgactcagttttttttggttaagagatagacaaaaataaa

SEQ ID NO: 61136 - DNA, 440 bp, Heterodera glycines
atggtgaagcttggtctgggggggggtgggggggggggtttgtgcccacacagaaatctaaaatttaaaaaaagtaacttttaaatttaaattaaatattttattttatccttttaagatgttcattcgaaagaacaaaaaatgagcaaaatgattgattattataaattgaagaaagcaaatccgtcgttctgtgataaagaaattgctggatttttaaaaatctcatcagcaactctaaaaagatggaacaaattgatgctaaggtataatgatgatttattttgtgctctatcaatttcatgcttttcaaagaatttatcagccaaaaatgtaataaaataaatttcatgttattattttggtttttataattttataatgggttggtactctatttgctatctcttttttgcatttaggccatctcttataataaa

SEQ ID NO: 61137 - DNA, 1154 bp, Heterodera glycines
atgaagaaattggcagccacgacggaatggaaaagtttattcatacggacaaatttcgttctctgaacatcggttttgcgcttgacgaagggttggccagcgaaacggacactcactcagttttttatggggaacgatgcgcgtggtgtgagttatgacaattggacaattttacaattctattcctattcagggctgcaaatcacttgtcctggcggttggtatttttgtattgtttttgcgtgcactacgccatcctcaaatttttattgttggaaaatataaaacattttgattatcattttcgttatttgtctttttagcccctgggcatggttcgcgattcgttgaaaacacagctggtccaaagttggtatgtgtgggatgggtggcaaaatattggttttatttgtggtttttctttgcgaataaatttccccattcaattattttctaatttaattttttagacttccattttggccaatttcaatgcttttcgtgaacgtcagcgtcatttgcttctcgccgacccgaatttgcgtctcggcgatgtcacaagcgtaaatctgacaaaaatcgagggtggagtgcagaccaatgtgatccctgcccaattcgtggcatgtacgtttttccgcacaaacagttctatttgtatgatcactgaccgtgtggatttagtctatgaaattcacgaagtttgtaaatgctggtagttgttagaatgactttgaattttgtttgagaccttttatataacgtaatcgaaaatgttttcgactgttggcatttaattttggtatttgtctgtctaccaaatttcaagtcattctaactactgttcattgtcgtcggggcttttttggattgtttcatgaaattaattatgttcttaattattccattagattttgacatgcgcgtgacgccaaccgacgactttcaggtgagtcaatggggaaatgttctttctgttttttggactttctgtcattggttcagcaaatggaagcaatgatcgccaattggtgcaaagaggcgggcccggacgtcacttttgagttcgtccaaaagggaatgtgcaaatcgctgacccccaccgacgcctcctccccgtggtggcacgcgttttcgtcggcgcttagcgaaga

SEQ ID NO: 61138 - DNA, 1031 bp, Heterodera glycines
atggaaaaagaggggaatggaaaaagaggggaatggaaaaagaggggaatggaaaaagaggggaatggaaaaagaggggaatggaaaaagaggggaatggaaaaagaggggaatggaaaaagaggggaatggaaaaagaggggaatggaaaaagaggggaatggaaaaagaggggaatggaaaaagaggggaatggaaaaagaggggaatggaaaaagaggggaatggaaaaaaatatttcaattctttggggtgtattttcagaaatttttctgttcatttcttaggggtgtgtataacatttaataaattttacgttgtcaacgcactcataacaatgtcagttattgtttaatacatctgctaaatgggaatgtagaagtaaacacacaatactttatcttcagctgctttaataagcattgggcaattaattatctggtcaaaattttgacaaagaaaacaacacaatcgaacataatttgtaaaagtttccatttggcagttggttggcattttatcactttgccaaaatcaaattcccacccaaaaaaaatatttaaataaatccacattaattaaggaatacataagttaaattttcacaaattgtcgttaataatcccatggaattgttgctgtttcgtcagggcgaatttgacaaattgtatggatgtgagggatttaatgcgggcaaaatcccaattgaagaaagaacaaacattatgaacggatgcattttgatgatactttttttcatttttgaggtcttttttcgctgggtgatggaattatagggctcttgatttgaatttttctactcttgaccgagacgcaaaaattcaaagaaaatcccaaaagtttaaaaataaatcgatataatttaagctactgtatattccgtgtatggtatcaatttacaaaaacatgaaaaacaatgcctgctacaaattgatgttcttcattggcatattggacatggtcatcttttaacagaataaattcttcaagaatatttatttatttttaaa

SEQ ID NO: 61139 - DNA, 439 bp, Heterodera glycines
aaaatggtataagtaacaatcgtaattacgctcaaaaagcttctcaaacaattttagcgcttccaattccttctacaatcgcctttatacatcccattatgagcgctaaaattatcagagtgccgaaaatcgcatgtgatctaagcctagaaaaaaatggtctaagtaaaaatcgtaattacgctcaaaaagcttctcaaacaattttagcgcttccaattccttctacaatcgcctttatacatcccattatgagcgctaaaattatcagagtgccgaaaatcgcatgtgatctaagcctagaaaaaaatggtctaagtaaaaatcgtaattacgctcaaaaagcttctcaaacaattttagcgcttccaattccttctacaatcgcctttatacatcccattatgagcgctaaaattatcagagtgccgaaaatcgc

SEQ ID NO: 61140 - DNA, 452 bp, Heterodera glycines
attttttactggagcgtgataaccttggtgttcctgaatactgtttgtgtggccagtgagcatcatggacaggtgaaatttagtttaaaattttttaaataataattttttttagcccgaatggttcacggaatttttaagtaattttttatttgttatttatttaaattttattacaaatccgaaactttttgtagaatatgccgagttcacatttcttgccattttcatcagtgaaatgcttatcaaaatttttgcaatgggttaccgtacttattttacatcgaagtactgtattgatacttttaaatttattgattttttctttattttatttgtttgtattttgtcagatttaatcgttttgattgcattgtgattgttggaagtgccattgaagttatttattcggaacttaaaggcggatcatttggaaacaaagaaatattaaa

SEQ ID NO: 61141 - DNA, 390 bp, Heterodera glycines
tgagaaaaaagagatagccattttttggtcaagaattttttttgtttgcgtttcaaatatcgtaagattgtttgatagggccagacaagagaaggcaactgttggtaccaattttgcggtaaaaaaatgagaaaaaagagataaccatttttggtcaagaattttttttgtttgcgtttcaaatatcgtaagattgtttgatagggccagacaagagaaggcaactgttggtaccaagtttgcggtaaaaaaatgcgaaaaaagagatagccattttttggtcaagaattttttttgtttgcgtttcaaatatcgtaagattgtttgatagggccagacaagagaaggcaactgttggtaccaattttgcgttaaaaaaatgagaaaaaa

SEQ ID NO: 61142 - DNA, 90 bp, Heterodera glycines
atgtcttctctctctctctctctctctctctctctttctctctctctctctctgtgttctctcgtctgtctgcttctctctctgttctct

SEQ ID NO: 61143 - DNA, 419 bp, Heterodera glycines
atggggtcagaagagtttgtgaagggaacaccacgagtccgcgaagaggccgagtgagtaccttcggtgcaggaaaattattaaattttaaaaattttttaattgctttttaaatatgccaaaaaatgtaggcttaacttttttagtgaaaattcgatcactcatattttttgataattgagcagaagcgtaccaaactttgcagggatactccccggtaaaggactaacttacactgaaatgagcgccgagctagctggctcaaaaaaattttcgaaaatctgagtctttcgtttttatttattttttgcaaaattaattcttaaatattttttcagaaagggttatgaaacgcaccaaattttatttacatgttagtttaggcactctgatgctttttctatcaaaaagggagatga

SEQ ID NO: 61144 - DNA, 769 bp, Heterodera glycines
taattaaatccattccttcgggggaccgtgccgggtgccgcggggtaagcagtgctggttcgtttcatcacggcaccgaaccttttggctagtcagcaatcgttgcttaacttgccagatcggacgggtgcgcatgattccactgttccaagcaccccaccaaaagcaaaacgatataaccaaaatataaggaaaaattttttaaaaaattttttctccatcttcctttttgatactaaagcatcagagtgctaaattaagttgtaaataaaatttggtgcgctttagagcattttctgggaaaaaatatttatgaaacaaaaaaatcgattttttcaagtgtccgtttggggtactcaaacaattatggggagcaaaaatccaacgcagaattaaagtacaggctatagggaagctattcccgaaggattcggtctccccataaatctgggcgcatcggttcggggggactgccccgaaaacaaaaaaatcgattttttcaagtgtccgtttggggtactcaaacaattatggggagcaaaaatccaacgcagaattaaagtacaggctatagggaagctattcccgaaggattcggtctccccataaatctgggcgcatcggttcggggggactgccccgaaaacaaaaataaatcgattttttcaagtgtccgtttggggtactcaaacaattatggggagcaaaaatccaacgcagaattaaagtataggatatagtgaagctattccggaaggattcggtctcc

SEQ ID NO: 61145 - DNA, 1105 bp, Heterodera glycines; identical to SEQ ID NO: 30751

SEQ ID NO: 61146 - DNA, 866 bp, Heterodera glycines
atgcgtcggaatagtgtccaacaattgcaacaaaatgagcaaaagtcgccgctgcacagcccaatggcaaagtgagcgcaaattcaaaagcgaagcaaagcaaacattttgccaaggtttcgccgtttgagtgccatttttggcggttggtcggcacgggtggaggccaatgtgtcgccaccgccgcctttttgctcttccggcgcgccaatggccgtccgccgagtgccgttctcaaactctcctcatgtggcatttagcaaatgccgaccatttttatgctttttcattgttttgacttagcttcgcccgcaacgccccgcgctcacccgccaattttccattcattcgtccaatggttactcattttgaaatgtttctcaattttaattcatttgtttgcttttcccgacatggcattttcgtcccatttatttgcccaaattgccgcggaaaacgcggccaacaaaaattgtttcagtaaatccgtcccattttatgaatgtcttccgccacaacgggaaaaggtattgcgtgaaaaacaacaaattgcattaattaattatgctgcttttgatcgggccgtcttctgattcgcttcgccctccccaaaggcaaaggcctccgtccgccgcgccgccttccgtactcaatttgaccgctctctctcggcttccccagccaaatgcgagcggtctgtccccgccccctttcgttaattaattgttaattaattgtctctcactgattttatgattttccgtcgcctcttcttcgacccgtcgtccgctcagccggaggctcgacacctaatcgcctacaaaggtaaaaagtgtaaatgaaaaagaatattcccaaacaataaa

SEQ ID NO: 61147 - DNA, 394 bp, Heterodera glycines
cgtccatttgtcccttagtgttcactctgtcctgacactttggtatcactcctccaaaactgtcctgcattatttattgtttgggaatattctttttcatttacactttttacctttgtaggcgattaggtgtcgagcctccggctgagcggacgacgggtcgaagaagaggcgacggaaaatcataaaatcagtgagagacaattaattaacaattaattaacgaaagggggcggggacagaccgctcgcatttggctggggaagccgagagagagcggtcaaattgagtacggaaggcggcgcggcggacggaggcctttgcctttggggagggcgaagcgaatcagaagacggcccgatcaaaagcagcataattaattaatgcaatttgt

SEQ ID NO: 61148 - DNA, 1040 bp, Heterodera glycines
atgaaattgccaaaggtgaacacacttttcgcgaaggttggtttagacttggctggcccgattcccaatcacgaagaagggcgaccggcacgattctttgtattatttgctggttcacaaggtttgtgattgccgtgcctgttcctgatgccaaggcagttactttggtaaaggcatttttatctaactgttatttaaagttcggcggatgcacagaactcatcactgacaatgctacggcattcacttccgaattctttcgagaattctgctccatgctctacataagcaaacgatatgcgacgccacactggtcgcagggtaatgctacgactgagagaagcttccggactttccacaacatcatgtcaaaatatgtgtcttcggaccagcccgactttgatgaacacctcgacatgacaaccttttgctataacaccgcgattcattaatcaaccggtgaatcacctttctttttaatgtatgggcgtgatccgatcttctgcattgatcagattttagacccaaaatcttctcgctcgtctttagtgagtgatttgtctgaattcaagcaaaagcttgtcaattccttgagaacagcttgggaggctgctgccggtgaatctaaacaggcacagcagcgggctaaggcccaatatgacaaactcattcggtgtctggaaatcaaagttggagacagggttttactccgaaattacgctggaaaagttggcacgtcaaagaagttccaccttccatggaagggtgtgtttcgagtaattaagattgaagaggtgatggtaacgattgtcagttgtaatgccccgcaggctaaccctaaagttgtgcatattaatcagcttaaaaagtgcgtagaaatcttaggacccgcttgcaccgcaccaaatgtctccgatgaggagaaactttctttggaaaaagcagatgctgttgaagtatttgacatgcccggttttaatcatctgaactcagacaatccaaacaaatccgaaacagaccctaacactgagtccacataa

SEQ ID NO: 61149 - DNA, 1153 bp, Heterodera glycines
atgtcggaaaagtcagacgtttggtcgttgggtgtcattctgtaccaaatggtgtacggtcattcaccgtactccgcccttttgcaccaattcgatgctgtggaggacgaaacggaacggatggaacgcgcggacgcggcactccgtccagcgattttgcacggcactgagcccattcatttcggacagtacgaagacgaagcgatgcttaacatacttaaggtgtgatggaaaaaggtcatcgaattatagggatttagtctgtacagtaatccgaggttacagtagttataaaagtaaattaataaattcattaaaaattaattttataatacaataaataccccaaaagaaatgcctcgagcgatgccccgaaaaacggccgaacattgaccaattgttggcactgatgaagcagcaattcggaatgggcacagaagaacagcgaataaaatttccagggaataaatttcgcattcacttcaaagacattgtgatgcgatgagaaacggcagagagaaagacggacggaaggaaagggggaaaagagagagcggaagagagggagagagaaagaaagagaggggagagggagagtgagaagggagaagagagagaaacagaaagggagagtgtgtgagaaaaaggataaatatagagagaaagagaagggtggtgatagaggggaagagagagtgtgagagaaaaaagagaaagggagagtgtgaaagaaaaaggagaaatatagagggaaagatacagaggggggagagagagagtgagaagagagagaaagagaaagggagagtgtgtgagaaaagggagaaatatagagagaaagagagggggcagggaaaagaggagagaaagagagtggtgagagagggaaagagagaatgagtgtgagagaaaaaggggaaacatagagagctgaatagagagagagatagagagagagaggagagagaaagtgaggaaagcgagagatagtgaaatgtgatttaatgattatccaatccaaatttctagctattcaacaagattaatttatttttcgcacttttctctttcgctttttcataaattagccgacaaaaaatgaatcattgggaaatgcgttcgattggtccgtcatttgctaatacataataaa

SEQ ID NO: 61150 - DNA, 407 bp, Heterodera glycines
atgtttaattgcctcattaatttgctcagcaatttgattgccactcatttgtcaccaaatggcgcctatggcctcgtgtttggcattaacagttttgttgcacttctgctccaatcagtcgtcacactgcttattgtcgatgtaaatggtgcttttgcattgtcacttgaagcacaagtggggcaaataattaattaatactataaatacattatttcaatcatttttaattaataattaaattatccataagaactagaaacatttatataatttaaattaaaataaaataaaattaataaattaattttaaagataattaaaaatgcatttctttatcacagtttaaatgttcattttaatttgatttgttttttcagttcgtcacctatagcatatgcatgttg

SEQ ID NO: 61151 - DNA, 125 bp, Heterodera glycines
aagcgtcctaatttccctacaaagtttgaaaacgggcgcgaagcgcccgtcctgaggccgcgaagcggccgaatatcccccaaaaaaattaaaaaacggggcgcgaagcgcccgacatgaggccg

SEQ ID NO: 61152 - DNA, 280 bp, Heterodera glycines
atgtttgcattttttttggcttaccaaaacttcatcgaacctggttctttctattctctttcaaatcgccccaaattttttttacagccacgaggccgcgaagcggccgagtgagtaccttgggcgcaggaaaattattaaggaggagggttcattatttatttatttttgcaaaattaattcataaattttttttcagaaactgctctgaaacgcaccaaaatttatttacaagttgaataaggcactctgactcttatattatcaaaaagggagatga

SEQ ID NO: 61153 - DNA, 434 bp, Heterodera glycines
atggcggatagcgaaatggaggtgagaaaagtctgaaaaaggagaaaaattttatttgaaagaagcaaatcggacacataaaaaaggatgcaaactatttaaaaaagcgatcgatcattttttgatcgaattgatcattttgatcaatgataatttcaattgggaaaaaacagctggatgatcaggagggatttattggaaaaggcattgatttggtcccagcaaatgatcatgtaatcgccgcttaccacgctgcagcacagcaacacaaccatgaacgcctccaaaatgccggcggtgccgacaatccacggcaaacggatgaagaagagaacgccgaaaatgttttgcaggcatggaatgtagctgaacagcagggaggacaatatttagattatcctccacagagaataccaccaaatgaatttggctga

SEQ ID NO: 61154 - DNA, 437 bp, Heterodera glycines
ttgtcctccctgctgttcagctacattccatgcctgcaaaacattttcggcgttctcttcttcatccgtttgccgtggattgtcggcaccgccggcattttggaggcgttcatggttgtgttgctgtgctgcagcgtggtaagcggcgattacatgatcatttgctgggaccaaatcaatgccttttccaataaatccctcctgatcatccagctgttttttcccaattgaaattatcattgatcaaaatgatcaattcgatcaaaaaatgatcgatcgcttttttaaatagtttgcatccttttttatgtgtccgatttgcttctttcaaataaaatttttctcctttttcagacttttctcacctccatttcgctatccgccattgccaccaatggcgtcgtttcgggcggtggaccttattatatggtcggtcg

SEQ ID NO: 61155 - DNA, 810 bp, Heterodera glycines
  unsure (1)..(810): unsure at all n locations
atgacttcgccggcacggcgacgggtgccaacaacgaaatgcncgtacaacaacaagcacaaaaacaacagcagcaaccatcggcaccagcacaacggaagctcggctaagacgccgacggcaccgccgccgacggcgacgcgactcgccacggagacgacggagaaggagccgttgtgcgccaagcagcaacaacagcagcacaacatggcattgtacgaggtcagttgagtatcgggacgtggagttatcgagtgataacaaaattacctgctgatcactccgactaaaccattaatgcctcgggattcgactttggaacccattcacggcatcatttccactgattgtgagactgatcagtacgaaactctcgattagagtcaatgggtgagactgatcaaagccaataatttaccctggacactgatcaaagtcaatagtttttatcttgacactgatcagagtcagtgaattgctgatcaaatcacctctcgacactgatcagagtcgtttaattcaccgaaacttaccgcggcagatcaatctagcagaagcagtagcgaatcaatttgtggcccttttaaggacgactgctccaagggcggacaaaacattggccaaatgttgcgttcgctgtccctttacaacgccattctgccgacagcggtggacgaggaggacaaagagtcgacagccaaaggggcgacaaacggaggcgtcaaaaacggagaaaaggagcgcaacggcggcacaaaaggggcgcccaagcgacaaaccgccaaattgggcacaattatgggagtgtaa

SEQ ID NO: 61156 - DNA, 56 bp, Heterodera glycines
gtcccggttcccggtcccgggttttgaaaatctcaggtcccggtcccggtagggca

SEQ ID NO: 61157 - DNA, 2814 bp, Heterodera glycines
atggataaccaaaagttgctactttttattgtatttttggtaaattatcacttttgttttgcattgtctgcggaaccccaaaacaaacgcaacaaccatcatcaaattgccaatgaatttgttgctctgaagcaaataagtgaagcattgtcgcaacaaagtaacggtgaaaatagaaaattaataattaaatacccattaattaaatatcattttatttaccatacaaatacagaggaactgacgaatggcgaaaagattgacaatgcgaagtaaatttggatttttatataataaaatgccgaaaaagttggcaccataaatttggcactaaaaccatgccaaaattaatacaaagaattgaaaaaaaattaagtaattcggaaattttgatattcaatttttttaattgatttatagctaaagaaatagtgcatatttgcatccttaaaagcggggcacccgaattttaacgtatcgctaacttctcttcttatttcaattgatcgtttaagcaaatctttggaattggtacttgagttgttgaaaacggaatgccaattagccaaaattgctagcaaaaattcatcctcaagttacccgaccaacggttatttggcaaaattttgtgacaaaaagacaggtcaaaatttggacacaattgaaaaactaacggaacatttaacggatttcattgaaaaagatttgccaaaaattgtggaagcaatgaaaaaaacagaaacgacggaaataatttctaccggtagagtatacggtacaatggctgagattttaccacgagcaaaacagtacccgaatgatgcatctctgcttctatatgcgcaagcgatgaaagcattgagccgaattagccaagaaattgagcctggaacaaccatagatgcactgacgaaaacgttgaaaaagcatacggtagcttcggacgatggtgatacagtaaccttaatgccaagtgaattgacacaaatcatcatggagctttggacaaatacaattttgaaaggaattgctaatgccggccaagaaaaatacaattatctgcaggtaaattaaaagattttgggtggtaatttcatgaaaattactttgatttgaaatttataaatgtacctaataatttatcataaaatttacgcccgaataacccaaatgatactcatataaattgatttattttttaatattatttatacatacaattaaggaactaaattgcccataattaagaatagtgaaaataccattaaacctttatttgtcagccccaactcaatggcaccggcgccgaccgttcacaagaccgtcgtcatagacgcgcacctccagtatttcatattcattccaatataattatgatgattttgctgattgtgcaaatgtctttaatcgccgtagttggcatcgatgcctctcgaagcgatgcaaattgggtcacagtgtttaccgctttttttaccatgtttttcatttggcgtgttcaaattccgggccaaccgccaccgccaagtatacatttttcactgaatttcaatttaattttgcccgtggttcaaacgcggattggtgctggcatgccatttggcggagcagcacagcgaccaactgcggcgggggatgatgaccgggcacaacatttgcatgcgatgctgcgaatgttcaacgcaatgaatggtcgtgccaacaccgcggcgccgtcggcaggttgggaaaagcacgaaagaaatcaaatgaatagcaaatgtcggtgaaatatgaataaaatggcaataggataattttatcatggattatttgccagtgatactgtatttaaggaaagatatactgtgattgaaatattagtggatcaatcagaagatttatagcgtgttctgcataaagcatataattacagtatcaactaattcgtctttttttaaattttcgttttttaaaatgacagaacaataaattaataaattttttaggctcgaatagagataggagccagaatatcacaacaacaacaactccggcaccaccgacgggggacaatggaaatgatgaccgtaaacaagttgaacactatgacccagtttcggacacatttgttggtgcggaagagacatttgtgaccactacgacagaaagtccgatcaattgggaaggagaagggacagaagacagtaatggcgacactgatgactcattagcaagagagtacggtaggccaaattgagcaaacaaaacggaagccgaagatggcagaattatgagaggaacgaatgaaaagagaagaaagaggagcaaatttttatggtatataaccctcatttgttaccaaaagaatgtcagacaaatttacatttccatggcattaaaatttggccaaaaaaccatttatttcccatttataaatgttttttgcttttatcggattgactttttccattgtttgcctattaaccataaaattcgtagaattatataagttttcgttgaacggacaatcactaaaaattagtaaagaggatgagattctgagctaaagacggaaaaaccaaatttcctttggagattggtaaatgtttttgcgtgacctgctaatctaagctcacatgggggataaggagatttcaaaaaattaaaatttaaattaaaaaaaattattataaaaaactattaacaaatgcaaacattacaaaaaaaagcgtttgatcatctttaaaattaagaatatttgtaaaaaaatttgatttaaaggaccataaaaaattgtaaaaatttccaactattttattgatattgaataaa

SEQ ID NO: 61158 - DNA, 287 bp, Heterodera glycines
atgatcactgatctttcccttttctctcatggatggccaacaaatggcacgaacacatggataagtgatgaagcattgttggccaaaaatggactcggacttaatttttgccaacggcgggcggctgttcttcgacttgcaaacttttcgactgttttggcactgcatcaactgcccaagcttgcaagcactggacttcgtccacccgaatgatttctttggtctccggcttactgtagccccaaaagcttacggtaccaccttcggccttctgtaaaagcagtcaa

SEQ ID NO: 61159 - DNA, 513 bp, Heterodera glycines
atggcgctggaagcaatgggcttggactcgtcaactgacggcaacgacagcgagccatcactggccggtgattttgattttaaaaaattaacaaaaaaagtttgaaatgggacagaagaaagacacacatcagccaatcattggccatcctgacaatgagtggcgaaataaatagatttgctcataaattgtcataaataaatatttttttaagatttaaaacggcctgaaaatatggacatttctttaaaaatcctctattagaacggccccatttcaaagagaaaattgaaaattttagctttatttagtatttttttagcatcaattaagtcattttgacagtattttgcggtttgtaaacatagttattataattatgttttagctcgtttgttcaaaggtgttgacaccaaagctacacaacaggtcccagcgacaactattgtttagtgcaagcaacacagtacggcatctaacgaacgtaaatacattcgaatttaaatcatttca

SEQ ID NO: 61160 - DNA, 253 bp, Heterodera glycines
  unsure (1)..(253): unsure at all n locations
atggagaagaacctacagcaaatgaagaagggccaaaagaagatcattggaagtaaattaaaaattatttatttcaattactaaacttactcanaaatgggtactgtaaattacagtgccatttaatatcctttcaaatttttgtgtaaaaaagtccttccgtatttaaggttttgccgttcaaattgaagacctgcagaacggacaaaaggcacttgtggaaaaaccaccacctgaagtggagactgaatag

SEQ ID NO: 61161 - DNA, 304 bp, Heterodera glycines; identical to SEQ ID NO: 53844

SEQ ID NO: 61162 - DNA, 914 bp, Heterodera glycines; identical to SEQ ID NO: 30771

SEQ ID NO: 61163 - DNA, 1640 bp, Heterodera glycines
gacgaatcgttgacatttggctgagttgacgaatcgtcgcattttggctgagttgacgaatcgttgagttgacgaatcgttgacatttggctgagttgacgaatcgtcgcattttcgctgagttgacgaatcgtcgagttgacgaatcgttggcgcgcccaagcccagtgttagacaaaattgctcataacgccaaatagcgtaattggcgtaaattattgcgcgctaattcaaaattacactggaaaatgccttttttgtattttttattttgatcagccataactcgcttcattcccaactaaagtgaacaaatttggtatctaaaataagaatttgaaaaggggaatctttttctaagcgaatgctaagcaatttaagtcatatgaaaaaagttgtgagagtttcaaattttttatcacgttataactcaagtcctaaactgctgatttcaaccaaaatgcgaaaactaatcattttctattgattctaagtgttcaaagtgattttgtagcctataaaccaaaattgttagaattagcgaatttgatgttttttcatgtgttagagacatgaaaatagtacgccaaaattagaggaaaagaaatgcaaaattttcatcatcccttaactttaaaataggatagaaattcattaaaaccttatagaacattcgattcaaaaattttttctctatcgatgtgcaaaatttggtgtgaatttaaaaagcagaaaaaaaagttaaacagcatgaagtaaatgttgttttttacataattaaaatgaagagatagtacgccaaagaaagagaaattataaagaaaaagagaaacgacgagatagtactaggcttttctctgcacagtggagttgacccatagtgtattgacacatgtctcgttttttgactcggtgtgttaacaacgcccaaaaaaactcggttttcgtgcgtcaaattaattactttctttaattaatctactaggtattttaatttaattttaaattttttgtatacgaaagatggagacacaaaattcatccaagagctttgatgattctgacgtaaaaatggaggaagttaaagaacagttggatgaaaaggtttgcttggattgaggattgtttcagcaataaataatttagacgaagcctgagttcgacaaattcctaaatgagatcgaaaatgaagttcaaaagcaagtttttcaagaaaaggtaatttgttaatttctttttgctatttcaaattagagaaattaaaggcggcaccgacagcaaaacgtgaaggggccttggtaaagtcggctgcgttaggggaccaccgccacagaatgaccgaaaaagaggaagacgagcaactgctgcaacagagcgttcgaagcgacgacagtccgttcatcttcgagaattccccacctttcatcaaaaacggggaaatgcgcgactaccaagtccgtggactgaattggttgattcaattggaacacaaccgaatcaacggcattttggcggacgaaatggggtaaaatgttacttggttacttaattttatgacctttccaatgcgttaagtcttggcaaaacccttcagacgatcgccgttcttggatttttgaagttttacagggactctagag

SEQ ID NO: 61164 - DNA, 429 bp, Heterodera glycines
atgtgcaaaatatgtgccaaaccccgaaatatgtgcgatatgtttttatgggtcgggggcgtttgggccccagtttttgggcccccgcgtttgggcccccgtttttgggccccagggtcgtttgggccccaagcgcctcccctcgattcgtcaactcaacgattcggcaagccaacgattcgtcaactcgacgattcgtcaactcagccaaaatgcgacgattcgtcaactcagccaaatgtcaacgattcgtcaactcaacgattcgtcaactcgacgattcgtcaacccagccaaaatgtgacgattcgtcaactcagccaaatgtcaacgattcgtcaactcaacgattcgtcaactcagccaaaatgcgacgattcgtcaactcatccaaaaatagttttaaaaagcagtttcaagagcttttaa

SEQ ID NO: 61165 - DNA, 1861 bp, Heterodera glycines
atgaaatcgattcgtaaacaaattgaacaacaacatcgacgaaaaacaccaaagcggttcggagagccgtctgctgattacgacgacagcaacatttttcctacccaacgcgaggacgcagagcagattgaacaagccgaatacaccgcatcagatgaagatgatgaggaaaacagacctctaatcgaatttcaacaaggaaaaacggagaggggatcattatgcatttggcatcaaggtcgggtggttaaatttttcaatggcttcgattttttgcagggttccgtttcactcgcatcagagggcggtggtaccgctgttccaaccgggactgtgaggcaactgcagcattgagtaaagaaggcggaactaatggtgtgctcggaagaaagagcacaaccatctgccggacccagcgtgcttccacgcggaggtaaaacgcaacggaattaagacgacaacgatggaaaacccgcgcaaaagccatcaaaagtattggcagaagtccgtgcaaacaccaaggatgaaacatttgtgtccatgggcactgacctcgcactggcggcagtaatgagaaggttattctcttttgatacttgtattcctctttcactcttatttccagttttttaggcagaaaagaaagatttacggcaacatggaccgtgtcaaccctctgaatgttgtcctacccgatgccctgcttatgaaggatggcgaaagcacattgttgtatgacagccgagtgcgtcgccaaggagaatcggatgtggtcttggtctttgcacacccgaagttaagttcattaatttctatgttcaatttttcgcttttattttcagctgttggacgttttgaagcgggcgaggaaaatttcggttgatggaacattcaaagtggcaccagttttgcgatcatagtaaatcatgcacccgatggtttggctgcatttttcggttactttgcgagggtatatgttggactgaccgcacacgaacaagaagccggcgccgtcgcgtttgttccgggcactgatcaaagccgacgcagttcaatcagcaccaatgccactggggatgccgaatacagtcgccggaattcatttagtagtggtgagtatttttgttttttgaattcgttcttattttctttattttagtaaatttggaccatatttatggaaacaatttcatccaattcggcgtcccttcacctgttccatcaacgccaacaacccagtcgtcaacaacagtttccgtcgtgccgcgctgggagctgccaattgtgcgtccaccactgtaccccgtgcacttctggaatgtccacgaccgtgcgaggtcagcagtggagaagacgaacaatgctatggaggcgtcacacctccaattttcggtagtgtgattttttgcgatttttttcatcacttttcacatttaagcgaggtttagtccatcacccgtctttgtcagacttcctagcagctattctggattctgtcgacaaacagatggacatcgcaagatctgcccgggtgttcccacacaagcgtcgcatcaaatatattttgaaggagcaattgatcggagatgcactggacgaagcggagtacaacaccgacgaagacgtcttgaacatcctttctctgctgagtttgcagatgcagggatatgtgggcgggctgcgtgcacgaggggcacaagaacatgaggactatgcagaagcggaagattgaaccaattgcaattgattgaaatttttaaaccttcattcaccctataatatcagttgaaatttgtttaacctcaatccctgataatcatcattttgattcgtttttttctttgaatttttgtttaataaa

SEQ ID NO: 61166 - DNA, 388 bp, Heterodera glycines
atggagaaggcctgcaaaatttggagagattatatcgattttagtgcgctaggttcgatgaaactttttaaaatataagcctaaactttttggcctgtttaaaaaggaattaaaaatttttaaaaattttattcatctcccttttgatagaaaaagcatcagagagccttatttaacttttaattaacatttggtgcgtttcagagcagtttctgaaaaaatatttatgaattaattttgctaaaaaaataaaatagtgaagctttaaaaattaataaaaaattttaaattcagaattactggagttagcatcatagcagtgcttttccttgtctttttgatgctctcgcaaaatctggttcgcttctgatcagtttataaaaataaa

SEQ ID NO: 61167 - DNA, 107 bp, Heterodera glycines
  unsure (1)..(107): unsure at all n locations
ggttcgatgaaactttttaaaatataagcctaaactttttggcctgtttaaaaaggaatttaaaattttaaaatatttattcatcntccctttgatagaaaagcatc

SEQ ID NO: 61168 - DNA, 129 bp, Heterodera glycines
  unsure (1)..(129): unsure at all n locations
ccctttttgatagaaaaagcatcagagtgcctaaactancctgtaaataaagttttgtgtgtttcagagcactttctgaaaaaatacttatgaattattttgcaaaaaataaataattaatgaaaaagt

SEQ ID NO: 61169 - DNA, 182 bp, Heterodera glycines
aaaatctataaaaaatttaaaaatgagaattcatgcgagattttctggaaataagcttaatagggactagttaagctgtaaaaaaaaatttggggcgatttgaaagagaaatagaagaaccaaggttcgatgaagttttggtaagccaaaaaaatccaacattttaaaaaatctataaaaaa

SEQ ID NO: 61170 - DNA, 438 bp, Heterodera glycines
aaaatctataaaaaatttaaaaatgagaattcatgcgagattttctggaaataagcttaatagggcctagttaagctgtaaaaaaaatttggggcgatttgaaagagaatagaaagaaccaggttcgatgaagttttggtaagccaaaaaaaatccaaacatttaaaaatctataaaaaatttaaaaatgagaattcatgcgagattttctggaaataagcttaatagggcctagttaagctgtaaaaaaaatttggggcgatttgaaagagaatagaaagaaccaggttcgatgaagttttggtaagccaaaaaaaatccaaacatttaaaaatctataaaaaatttaaaaatgagaattcatgcgagattttctggaaataagcttaatagggcctagttaagctgtaaaaaaaatttggggcgatttgaaagaga

SEQ ID NO: 61171 - DNA, 749 bp, Heterodera glycines
atgaccaaacaaattgagcagggtaaatgccaaaataaaaatgaattgaacttcctatttagatcaaaaattgtacaacgaaatgtcaaattttacgaaaacagaagaccaaattttaggaaattttggaatatctttgcatttgcaagaaattaaattatttactgggcgaacaaatttggttgaaaatcataacgcaacaataaacatggttgatgataaatagttttttgtttctaaatttaattaaatttaaatttagttgacagaatttttttcaaaaaatggttttggaatggttgaaaatgaaagaaaattgaaaattgacctggcaattgaaagaattgaacgagtggtgaaagaatgggtaaattaattaaaaaataataatttatcaaatatggcaaaactattaaaaataataatttatcaaatatagcaaaactattaaaaaataataatttatcaaatatggcaaaactattaaaaataataatttatcaaatatggcaaaactattaaaaataataatttggtaaattatgccaaaattattaaaaataataattttgtaaattatgccataaaaataataatttagcaaattatgccaaaattattaaaaataataattttgtaaattatgccataaaaataataatttagcaaattatgccaaaattattaaaaataataatttggtaaattatgccaaaattttaaaaataataactttgtaaataaggcaa

SEQ ID NO: 61172 - DNA, 146 bp, Heterodera glycines
gtccaggcctggattcagtttgaaggacctggattttttctggacttgggttttcctgggtttcggccaggaaatccaggtccaacatggagtctaggtctaggcttttttcaaaatgtcgagctctaagaattaccaaaaataaa

SEQ ID NO: 61173 - DNA, 93 bp, Heterodera glycines
ggattatctttcaaaacacctcgtagactgggggataattggagactgcgggattaatagagactgggctataattagagcatatacggtatt

SEQ ID NO: 61174 - DNA, 1478 bp, Heterodera glycines; identical to SEQ ID NO: 30786
  unsure (1)..(1478): unsure at all n locations

SEQ ID NO: 61175 - DNA, 329 bp, Heterodera glycines
atgactcactttgtgccatggattacgcaacggtaagcgcacggaacgggggaacatacggtcgaatgacatggccgagatatggtactggataagtgcgataccgtagtcatctgaccgattcgctgatcttacaaattagcacagtaatttcttttcagtttcgcgcatggcgtcgtggaaggtgagcaaaaactgtgcaataatctgatcatcgcaatgcttttgaccggattcattttgtaatttggcattgctttttctctccagtgttttagaattccatgaaatttttgatcaattaataacattgggagaaattcattaaa

SEQ ID NO: 61176 - DNA, 1214 bp, Heterodera glycines
atgccagcgcctcgacgtccgcttccgactcgccttgtccgaccaattcgtccggaacaccgctgccatccgaggccggcgaaggtgagagaaccgttggcctactcccaccccccccccccctctcgaatttggacaaaagtcgacaacttttcgagacagacattcgactttttcttcgaactcgtcaccgtaattggacgaaattgacacattcacttttatttgctttctttttctacccattttgcccgattgagatgacaaattggatgcccaagaactgtttgatcggagctttgctgttgaggacgaggaggaagatgaagaggaggaagaagaagaccatgaagaaggggaagaatgggcggatggaggaggagaaatggaatatttggagagagaagaagaggaggagtgtgaaaataacgaacagcgaaaaagagtgtggattaattaatactaatgaatgatggttgaaaaggcaagggtacgagagaggggtactttcctttttatggccaagttttggattttaacaaattgaattgtaagattctttaaaaaatcattgccacatttggaccaaaaatttttatacggcttttctacaagatttaaactcttctgcctaatcaactcgtacaaacggactcgcctcccagtctcggtcgattttgtgctggtactcatccgcattatcttcacctcaaagcatatgaattcaacagtctttgcattcttccctatttttcattttattttaaaaatatttttgattaattttaaataattttgacacataaaactttctaaattatccaattcactttccaagtacaagattgcaattacccaagttcgtaacggggaaaatttgtgaaatccaagtgaacatgaaaacttaatcaaaaccgtaagccgaatgcaaaaaattttaaacttttaccataaaatggacattttttatattcagatgcaaaaccatttccaagtacaatcttggaaattcttcgccgtttttttaaatttcttacgttggatataaaaaatttcaaaatttatccaagttctctctttaaaatttattttaaaataatgcgacaagaaaaacaataactttttcccaatttattattatttcatttacctactatttcatcatttaatgagtttggcttttcgttggattactccaaaatttactcatttta

SEQ ID NO: 61177 - DNA, 871 bp, Heterodera glycines
atgtcagacaatcgaaaagaagcggaggaaaagatggcaaaagcaatgtaaaatttaaaattaaaatgccaattttcaatttcaattttaaattttgtttcctttttcttcagcttcatctccggcgacggttggctttgtgtgtttgatttgctctctccgcgtcaacttggccttggaattgcgctgatcagccaccgctttgacttttatgtggacgaacatttcaaaacgcgcaaaagggcattggcatttattcgaattcgacgcaaaaatggagtgaatggcaccaaggaaatggaaattggcaaatattacgattggaaaccattgccaattccgcaaattcaattgccacgcaaagtcagcggattcggactgatcagcatagcgtaaaactggcgattatggcaaattaatgcaacatttcccatttcttttcagtttcattgaccaaaatgtcatcgcttttctccgccgttttcgccaacttttcgccaaatgtccaattaatttgtccatccgcaccaacactagtgattatcgcattttgaagtccattttgaacaacatttggccaatgctcaacaaaaacattcatggcttgcgattgtccgccacatttttccaccgtttgcgacaatttgtgccgtcaattctcaacgattgtccatcacttcgagttttctccatcgattatgacaatctcttcaccgaatttccatgcgatgacagtgccatggcatcggatggacaggcggtggccaaatggcttttcactccacgtccggacgatgtgccaaagttgttcaaatgcttgttgctttgtgatcgcgggcatttggcgtcgagaatcgaagccttcaaagcg

SEQ ID NO: 61178 - DNA, 1262 bp, Heterodera glycines
atgaagcggaggaaaagatgcggcgacgaacatttcaaaacgcgcaaatggacattggattttgttcgaatttggcgcaaatttgaagcggatggcacacaggaaatgaaaattgtcaattgcctttggaaatcgatgcaaattccgcaaaatccgttgccaaagaaagtcgtcggatttgaagccatcacaataaggtgaagcgaatgattttttggtgtttcctctgtgtaaaacgattccttcctcttttttacagatacatcaatgacaatgtgatcacttttcttcactgttttcgtccaatttttgccgcttttccaatcaatttttccatcgtcgatacctttgtgtcgcaaaattgaaagagtgccggaaactgtcttaacaagtgaaagagtgccggaaatgtcttatgcctcgacgaaatgtcatcagacaaccaaaatgaagcggaggaaaagatggcaaacgcgatgtaaaattaaaaatgccaatttaattttcatttttaaattttgttttcccattttttcagctttatctccgccgattgttggctttgtgtcttcgatttgcttgagccgtcacaacttggccacggaattgcgatgatcagccaccgttttgacttttacgtcgacgaacacttcaaaactcccaaagaaagtcgtcggattcgaagccatcacaataaggtgaagcgaatgattttttggtgtttcctctgtgtaaaacgattccttcctcttttttacagatacatcaatgacaatgtgatcacttttcttcactgttttcgtccaatttttgccgcttttccaatcaatttttccatcgtcgatacctttgtgatcattaacagcactttggattccgttttgcgcaacatttggccaatgattgcgacaaacatttgtgccatccaattgtccgccgaagttttccgccgtttgcgacttctcgtgccgtcaattctcgacgactgtccatcgcttcgcgttttcaatgcgtataatgatggtttcttcgtcgaatttccatgcgatgacagtgccgcggcatcggatggacaaacggtagccaaatggcttttcactccccgtccggacaatgtgccgaaggtgttcaaatgctggttgcaatgggatgatgggcatttggcgtcgagcattgaagacttcaaaagggtgattattgtttgactgatttggcacttttacgggctttgagggtcgctgacaaaaatattttggatggca

SEQ ID NO: 61179 - DNA, 343 bp, Heterodera glycines
atgaaagcaaatgggcaaaatgggaaaagaaagcgcttggatgggaaatttatgatcagtggaacaaaattggcattcaaattaataatgaggaccaaatcggagatgggtaagcgaatgctttttctaaattcaaatttattaagtatttttatttttaggcttcttgacgcaactcccggcccaagtgatcagaagaagtgaatgattttgttgaaaagtgatcgatcaatttagaattatggaattattgacatgctcataaaaattgttctttttactgttattggactgatcaacttgtgtttttgcaaaaaaaaaaaaaccgattttgaaaaataaa

SEQ ID NO: 61180 - DNA, 643 bp, Heterodera glycines
atgtttacgcaacatttcttctcgtatttcaattcaaacatcgatatcaatttttatgagtaagtattagctagctagaaacttaaaaaatgaatgaatatatgtaaaaaaataataaacaagtgtaaattattttaaatattatcatcaacgaattttgcttcaaaaaattacatttattcttttcttaaattgcaaaatcattatttatttatgtgacataaaatgagtatgtaattgaaattgcttattacataatataattttataagatttagtcactttataacatttaaattaattatttttattataactgatacttttttaggttcgtctcagcacgaagaaaaacattgagtgagtcattgactaagggggacagatttaagtagagtagagcgggactggggcctggtactgaaaaaacgggacaactgagtacctaagccccggttttgaccgtgaccttggaccagtcccggttcctggttttcccagccaaaaatttccaattttgaacccgaaaaggtcccggtcgcggttttgcccaaaattcccttcccgctctactctatatttagaattggacgaaagcattccaacgggacggattctctttttggggagtttgaattggaaa

SEQ ID NO: 61181 - DNA, 1027 bp, Heterodera glycines
atggatattgtcaattgttatggaataccaataccaattcctcaaattcaaatgccactcaaaggtcatcggattcgacgggatcaacatcaagtaaaattggccaatgtcaaaattttttgccaacagttcccatccattttttcagtttcatcgaccaaaatgtcatcgcctttctccaccgttttcgccaacttttcgccgtctgtccaattaatttggccatcgaaacgaccaatgatcgcatttcgaagttcattttgcacaacatttggccattgctcggaaaaaacattcttgtcttggaattgtccgttggaattttcccccgtttgcgacaaatcgccccgtcaattctcaacgactgtccatcgcttcgctttgtgtcgctaatttttgataatctcttcgccgaattccctgccgatgacagtgccgcggcatccgatggacaagcattggccaaatggcttttcactccgcttcaaaacaatgtgccgaaaatgttcaactgttggttgcgatgggatgacgggaatttggcgtcgagcattgaacacttcaaagcggtgcttattatttatttagtactcattctgtggttgtcatttactacttaaccaatttttccacattttaggcatttaccaatgcttcatctcctgccaatttcattgccatcatttcgtgtccgttgccttttgctgattccgttgtgccatttgcgctgaccaacgaattaactcgcgaacaattggcattgaaagtgattgacaatagccatcgttttctgttcgtccgttgtccaatttcgcgagacgaaagcaaatggacaaaatgggagaaggaagcgattggctggagaatttcttatctatggaacagaattgacattgaaattaataaggatgacatcggagatgggtaaggcgaatgctttttcaaaaacccaattttattatgtattttttgttttaggcttctcaacgcaactcccggcccaagtgatcagcagcagagtgaatga

SEQ ID NO: 61182 - DNA, 427 bp, Heterodera glycines
atgaaaaaattagaaaaatcgtatatttatagtctgatgggggtgataaagtaattttcaatttttctgttttttgggtaatttggtaaacataaattaagggagaaaataatcaattgaactacataccataaacttaatctaataataatatgtaatttgaccagtacaaaaaaataatttaattgttttaaaatgcaaatttactattagcaaatttggcataaaaacggtttgaaaaaatattttatttgtttaaaaatataaattcaatttcagtttttataggaatttacatatttaccattggatttaattttaattgccttcggttgactcattaaacaaatgaaaaaattaaaatttaatttacctatgaaatttgttctttgataatcgtcattagttgaatcattaagcaaataaa

SEQ ID NO: 61183 - DNA, 64 bp, Heterodera glycines
aattactggagttagcatcatagcagtgcttttccttatgtttttgatgccctcgcaaaatctg

SEQ ID NO: 61184 - DNA, 821 bp, Heterodera glycines
atggaggcgaaaaagaaaaaattggaacaaaaaacattggaagaaatatttggagaaaaatgggaagaaaaagaaaatgaacagaaaaagagagaaattgttcaaaaattcaacaaaattaaagagaaaattaagcaaaaagagagaaaatattcaacaaaagaatggcataaaattgaattgaaaatagcgaaaaaattgggaacaaatcgaacaaaaatttatcaatggatcaaagaattaggaatatacaaaggccacaacaaatcaaaaacggatgtacaaaaaattgaaattgttcaaaaatttattacaatgaaaaatgaatataaacaaaaaggaagaaaatattcgagaaaagaatggaagagaaattatgccgtaattgggaaaaaaattggagtctgccatgatgcaattaaaaaatggaagaaacaatttggaatgaatggaagaagaataactgaaaaagaaaaaatggaaaaaatgaaaatgtattggcaaatgaaaggagaaaatccaaaaatgagtgacgagaaaatttcaaaaatgttgaaatttaatcgacggaccattttcaattggaggaaacaatttgagaagaattaaatgaggattaaaatattattgagataaaattgcattttccatttcttagagcctatttttggggatttttaagacataaagcctaaagctacctttcgagttattagtgtctatcctaagcttttattattagacctaaaagcctaaagaatttgtgaaagaacctatttttgcctattggcgttttgtcgaaatttgttaacaaaaatgca

SEQ ID NO: 61185 - DNA, 815 bp, Heterodera glycines
  unsure (1)..(815): unsure at all n locations
tgtacccgcnccagtcaaactcnccgcctgacactgtcatcggtgcgggtcgccgggccaccgggtggcccgacttaacaccaaaatggacacccttgcgggcgcactcccgtttacgannttaagtaaggaatcgatgaaagtagtggtatttcactggcgccttgcggctcccacttatgctacacctctcatgattcttcacanagtcagactagagtcaagctcaacagggtcttctttccccgctaaatttgccaagcccgttcccttggctgtggtttcgctagatagtagatagggacagtgggaatctcgttgatccattcgtgcgcgtcggtagttagccgacgaggcatttggctaccttaagagagtcatagttactcccgccgtttacccgcgcttaatcaagtttccttggcttaacattcagagcactgggcagaaatcagacacggtcaacgtccacaaggaccatccgtctcctctgttttaattagacagtcggattccccgagttcgtgccagttctaaactggtcgttcagcgccaaccgaagtgcataccctgacgagcatacacgcagctgaagcgctccacaagcagctctcaccactagtccacgcaccatccccgaaggaacagcaagcagccacgggcaaaagccgcctgtttcacgcaacagcccggctgacccgacctttagagccaattcttttcccgaagttacgaatctaatttgccgacttcccttacctacattattctatcgactagaggctgttcaccttggagacctgctgcggatatcg

SEQ ID NO: 61186 - DNA, 64 bp, Heterodera glycines
aattactggagttagcatcatagcggtgcttttccttgtctttttgatgccctcgataaatctg

SEQ ID NO: 61187 - DNA, 1190 bp, Heterodera glycines
atgcttgcgttttgcgctcgagctatttatcatcgggcttgtcaatccaaagcgaaacaacaaagatgctgttttgaacgaataaagggcataggttattttgaagaagtgtcaaagaacatgcagcaataagcctgcaaaatctaataagtggaaaatacatgagtatagaatttattttcagaaagtgtccacagacttttggaaaaatatatttgcaatttatcaacaattttgagaagtgagttagaaatgataaacttcacgattcaaaccaattttcgttgctctaattaaccgcgatacaaacattcgaatcaattaaatagcttctgagataataaggtttatcataaaatttcatttaaaaataaaccctcaattattggtatgaacgatactttccaaacatgcacgcgttttgcgctcgagctatttatcatcgggcttgtcaatccaaagcgaaacaacaaagatgctgttttgaacgaataaagggcataggttattttgaagaagtgtcaaagaacatgcagcaataagcctgcaaaatctaataagtggaaaatacatgagtatagaatttattttcagaaagtgtcaacagacttttggaaaaatatatttgcaatttatcaacaattttgagaagtgagttagaaatgataaacttcacgattcaaaccaattttcgttgctctaattaaccgcgataaaaacatccgaatcaattaaatagcttctgagataataaggtttatcataaaatttcatttaaaaataaacactcaattattggtatgaacgatactttccaaacatgcacgcgttttgcgctcgagctatttatcatcgggcttgtcaatccaaagcgaaacaacaaagatgctgttttgaacgaataaagggcataggttattttgaagaagtgtcaaagaacatgcagcaataagcctgcaaaatctaataagtggaaaatacatgagtatagaatttattttcagaaagtgtctacagacttttggaaaaatttatttgcaatttatcaacaattttgagaagtgagttagaaatgataaacttcacgattcaaaccagttttcggtgctctaattaaccgcgataaaaacattcgaatcaattaaatagcttctgagataataaggtttatcataaaatttcatttaaaa

SEQ ID NO: 61188 - DNA, 811 bp, Heterodera glycines
atgaaattgtgcgcacttttgagaccattcgccgagaagttcgatcgggaaaattggacagaaagtgagtttttagaaatagacaaatttttgaaaaaagaaaataaataatttttctaggtttgaaaaaattaaaacaaaattcagtgggggacgaacttcttccctgtgaaattgctgcatttattgttttgccatttaatttgtttgtttttctcagtgccattgacgtcgatttgctgtccgcccgcatggacacgcgcttttgtcgtccgctcgacctgttcatacggaccagcgaatgtcggctcagcgattttctaatttggcaggcaatcaaaaaaacagaaaattcaaattttcgtccctttttaaatttaatttttcataatttctgcttcagctccaatgctccccccgctgtgtgctaaaattcgacaccgacgtgctttggcccgaatattcgctgttccatctcttccgtgccgtcctccattatcaaatggcatttgtgcgcttcggatggtggacaatttgggaccattgaaacatttgattatttttgttgtttgaagaattgccaaagggaacttaaaagttttattatttattctctcattgccttttcgattacttttttatcattgtttttccctttgtttgtttttttactcatttcttccaatttgaaaagccttttttctttgttccgtttgacacgggagtaatcccgaaaaatcacaacgataatcgccttcagaggaaactttgaaggtttggcaggtttcgtcaacagattttgtcaattaaa

SEQ ID NO: 61189 - DNA, 457 bp, Heterodera glycines
cggacaatgcaaaaaatgcggcggtgttcagaaccggaccattgcttcaagttacggcactgtccagaaggaacttacgaattttaccattttaaggaaggaattgagaaagttcgaagtctcttcgcacaacaaaaacgccttcgcgtttcggaccgcggattgatttggaattccgacctaattgaaacgttggaactgcaaaatctgctcattaatgccctccaaacaatcgtcgctgctgagaacagaagagagtcgcgcggtgctcacgcccgggaagactttccggtgcttttcattttgcagaatttaaatgttttaccatttcatttttgcttaggttcgggtcgatgagttcgattacacgaagccaacagaaggacaatcgaagaagaaattggaggagcattggcggaagcacagcataatttaccaaaatgtggagaacggagcg

SEQ ID NO: 61190 - DNA, 795 bp, Heterodera glycines
atgccaatttcattggcattattatttataagcggattggaattgtttatttggcctcatgtaaagacattgaaaattttaatgattcaaccgagttatgcgatgatccagagtcacttcacatttggattaaatttggcaaaattgttggtcaaaaatcatggacatgaaattgtatgtttaaaaacattaaaaataaataataaatttaaatgattaagcatctgctggtaccaattagagatgaaaatgacaaattgccggatcgaaatgatgaaaagctccttaatgttcgatattttatagagaaaaacgattacaataaaacaacgcccatagaaaggagcagaaaaattgggacaccgccaaatgacacgacttattttggtaaaaaataattatagtataaaattaacggtgtaaaatgctgaaaaatatttaaaccacaacacactcaatccttaattatatcattaattcttctgcaattttttaaaataatgtaaattataaaattttcaacaaaaatatttgaaatctggtaaaaaaaaattccctacagcaatagccaacaattcatcacttatggacgatttgtgtgctgaacagtttgatgttggaattgcggaggcatttatgatgacggaatattcaatgacaattttccattttttacgaattccagtcacaattgcgaccagcgcaatgccaatatcgccacaccaattttatttgcttggcattttgagcaaaatggccgcaggaaatgtgccgggtatgaaaacaattcattaa

SEQ ID NO: 61191 - DNA, 539 bp, Heterodera glycines
atgaacacatggccaaatttggttgggcatttgggacacgcacggcatgcccgggcgacaaatgccatcgatgaatatctctaattggaggaattatcttttctattctttaagtctaccccaacaaattttacgttttctttttggcgctttgtgacacaaaattcgccaaaaatgaaaaaaaaaacatttgaaaattagacacgcattatttcatttttttgttgatgccctaaatttgccaaaaaagtgtctgcccctaaaagatcaatcaataattttttctctgtcttccctgttgccggtttttgcgtgtctgtcccaattcaatcaatatttctgtcatttatttctctctctgttcagattgaggatgccatagcgtcggcgatcaatggcggtggaagtgcgaaggtgggcgaaggtggcggacattgcgctgctacgcaacgggcgactgagcggcgcgtcgtcgccgcgggcgccaacgacgactttgtgcggcgactggtggacgtggtccgacgcgagccggcact

SEQ ID NO: 61192 - DNA, 1371 bp, Heterodera glycines
atgcgtctgtacgactttttggccgacgatttgttctgcgtctcccccaacaattcgctactttcacccgcttcgtccattgtccgtcgtacgcacactgtgctcacactgatgcacacgctcaagcagttctattgggtggtgaggccgacaacggcgccaaattcggcacaaatggcaatggaaccaatggatcggctgaccgttgtgcacattcgcggatgcattttgcaaattgtcaaccgactgatgttcaacaccgtcccggcggatatcagcgagaaggaagtgagccgggacgaagagttccaatgcatgttgaactttgtgaacactgtgcaggaggtgaggcaatttgaatggcaattaagccatttgtagggggttgaaatttgattatggtgatatggcacatccgactggttttttagtaccattgttaatgcctaaaacggaacgcgaattgccctttccccccttttcaggtgccagcttttgatcgtaagaaggcgctttgtgtgattttcaaaatgatcagctccggcaatgagttgatcaggattccgacgctgaaaatgctcagttattttttgtgtcgttcgacccaaaagtaattaatattcatttccacaatttttccttttaaaatgtgcacttttttaggcgcaaaaatgaggcaatcaatcagaagaatttgttccatttgctcaccgaaaatctgttgctcaattgtcgttcgctcagtctggccacgtacaacgcactgtttgaaatgcttgtcgagccgatttgagaaccaaagctgctcaaccttgaacaagaaaaaaaaaattttttttttttgatgtcatctgtttgtcccggcacttgcggccccagacaaatgcatttttgaaaaaagtaaatagcaattaatgtcccttcgggccgtaaatgtcggggccccgtcatctgcaagttgttgaatctttaaatacataggatgagagtatatatcctattattttcttaatcgtgtatatgccgttatatcgttatacttatccatgcgtgaggtcacatcaaaatgggacctaaatcagtttcgtttagtcaaatcatcaacttgtgcatttcaaattcctttttgtcgtcttcgtactttgggccggatttcaaattcctttttgtcgtctgcgcaaatttctgggacggacttcaaatacaaatgttggttattatttgtcttatttcttcgttttgttacgttttggtaatccaaacgtgttttcaagactagaacagaaagaaaaaattaccaaaaagggggcagggcaaaatttactattaccatttgattctgtgaccattaaaaccccagggtgaaataaa

SEQ ID NO: 61193 - DNA, 1828 bp, Heterodera glycines
atggcaaattcgaaagcagtggcattttataattgcctaaatctaatcggctttaagttcgggcacaccgattgcggaccatctgaacaacgcggacaaccaggtgttcatcgccaacaccatccatctgctcagccaactcggcgacagtctgacaatggcatgcggtggactgcttccactgttggccgccgcaacggcaccgaatgtaaagttgaaattcatttttaactaatatttacaattacaattggtgtctcttttctctgatagcaatgtttgtttcagagcgaattggaaatcaacgacaccacccagcaagagttggacattgaggacgccgcccgttttattgccacttttgccgaactttccgatgtttttgtgttcgcctcgggcgtcagtctaaacgaagtgcggccaaatttcattcattttgattttcttttaatcactggcaaaatcaaaaaaaacctttccattttcagttggagcaggagaaaaacatgccatcgggtggcattttgcgccaatcgctgagacttggtactgattttttaatgttttttactccaatttctttcacgcagtttccactgtaaccgttcgtaacattttggcgtgttcaatgcacaaagatggactgtacaacaccgacaattcgccaaaatttgttgcaattcgaaaatttgtaagtttagggggttgcaccccaaaatctcaccacccgtaatctcgccaaggcaaaacttctagccgaaatcttaaaaaaaattaaaattttatgtagagattcttcaagaaaaaatgaaaaatttttctagcgttttttcttaaaattattcttgaaatcaaaaaaactttccaagatagtttgaaaatttctttaatggcgtcgttttgtcccgtccccgtttaaagagattatgggtttaaaacttttgctcatttagtgcgagtcgtcgaagccaatctccgactttgaccgactgttacaaaatgttgacttgcaaaggctgaaaggtgtcatttacagggacatggtaatccagggaaaaaacaaataaatatttcaataattccattttcaaggaggagactaaacaggcccaattcctcgcgttggccgtcgtttactttctgtccgttttgatggtcagccgttaccgggacattcttgagccaccgctacccccgccggcttcacaagcgatcagtcctccgttggtcactgcgttgctttatttgggagtttcctatcagagtcagttcaaacacgaggccgagtcgaatttgccggacacatatcggaaggtaaagctaatcagtatgaaaaattgattaattaataaataatttttaattttcataaaattaacaatttttgttccgatttgttccaaataaactggatttactgttttagttctattttgaatcattttttctgttcccattggtccacccttttcacattttttcagcaattgttcgatgggcgtcttcacgactctctcgttttcgcttactgtcccaagaattgccatgaccaactttgtctgttccaacaacaaacgcccaaagggggccaactgcacagttccgccgcctcctattttgtccaagtgccacatgccgtcatgaaaaatgtcgagtgtccaacgatcggaatgccaatgactcatcaaatatcttttcagggagtcaaattggtcaaaacgcattccgtccactgctcgttgcattccatcggcggcatccaagtgttggtgccgctcttctctcaaattgatgccaaacagcacgaacccgtggacaatgacatttg

SEQ ID NO: 61194 - DNA, 544 bp, Heterodera glycines
atgggcgacgccgcacaaaagcagaagaagcaattggacgcgttggtcgccgacatggcgcccgtcattgtcgacatggtcatcgcttgggcctcccgcacggcgtgggtccatcgcgcgttgggcgcctttgtgttgtgtcgtttcgccaaatggcttaactacggacattttgaaccaattttgaaggtcggtggtcaaatacagtcatcagcctgcaatttcaaaaaatttattaaatttcttggtaaagattttgaattttgactattaattatgcattttcctccgcgtttaggcctttgttgataaagatgccgaactgttgaaagaagagggggaggaggaggaagaagatgatgagaatgaggaagaagacgaaagtgaggacgacaaagaggaagaggacgaaggagtggaagaggaggagacgcccgacgtggaccccaaattggtggccgatgtgcgccgagcgatgggcaaagcggcgactccgaagaacgccacggaggtgccatccgatgaggacaactgggtaatctga

SEQ ID NO: 61195 - DNA, 563 bp, Heterodera glycines
ctcaaaagcttccagctcgttcacaatttttttattgatggcggacgaaaatttgtcagcaattgatggtaatgttttctttacattttcaatggtatatttgttttctcagaagggtgtctgcgcattgacaccaattcgccaaatggagaagtgcccgcaccaccgctaccaacgatgatggcccgctgtttgcccggggccaatgcggaggacacatttgtcgtcgacgtcgaaagtatgaaacttcaaatttattattagaaaaaaagaaaaatttttgcagatatatcacactcaattaatctggtgaattattcggacaccagcagcaacgagacaacttttacctggtaagaatggggggggggtaaaattttcattgaaaattataaaagctgttttgcatttcagcacaactgatcgtccaaaaagaaaagcggctgaaaaagccatgatgcttttgataaaaccgtaatggttttatcactcctttaattcgccttaatgtttttcctttcaggaaacgccaacgaaaaaacacatcagcggaagaaaaagaa

SEQ ID NO: 61196 - DNA, 181 bp, Heterodera glycines
ggagccaaacgaagtggacgaactttgggattacgacatgcgtttggtgtactttgtggccaaaaaacgtgtgctaaaggaccaaattgaacaggcgaaaaagggcggccacggaacagttgatttggaaaccgatctcatcaacattgaggcaagcaggggcacagaaaatgccagataa

SEQ ID NO: 61197 - DNA, 78 bp, Heterodera glycines
cgcttccaattccttctacaatcgcctttatacatcccattatgagcgctaaaattatcagagtgccgaaaatcgcat

SEQ ID NO: 61198 - DNA, 572 bp, Heterodera glycines
tcactgtgcgcctgcagcccggcattctctgcccgtgttcagctgctcctccgccgggccctcccccgcaaatggcgccgccgccccctccgcctccgatgtcgcagccaatttgcatttgcacaccgcgtaccaactaaaaagtacattcgtccattgtatcattgcttcagttcaacaggacccgtgctgttttccgccgcccccgcaaatggcgccgccgccccctccgcctccgatgtctcaaccaatttgcatttgcacaccgcgtaagtgccggggagagggctttttgagggggtaagacgctatcttctattcaacaatgcagggcagcaggaccagtgctgtgccgggacgggccaagcgccgccccctccgccgcaaatggcgccgcccgtccctccccctccggcgccgatgtgttgcactccgatgtgctgctcgcccctgtgttgccctcctccgccccaaatggaaccgccgctccctttggcccctccgccgatggcaatccaagtcagtcagtggtgatgggcacaaattcgagagtggagttgaatgaatgctaa

SEQ ID NO: 61199 - DNA, 423 bp, Heterodera glycines
atgtttgatgagcctcggggagcaaaagtcgaaatggcacgacgagggggaaaaggtgaacagaaacagaggaacacagaacgaaccatcccctcgccactcatctatcagattgaggctggttccattgtttacgagtgccgtggggcgaaaatggtgccaatcggatgtttggacgaatttgggtgggacggggcggggagggcaaattaaatcataaatttaccatctatttgcaaaccaaaaatgcttattattagccaacaaattcgacttaatgagacgaccgtggcgaagggccttctgatgcgatgctcactttcgcgttgggcgaccgatttgcaattgaaaatcattggctgtgtgccgaagggaaaagcgaacgaaaccattttggtaggagagaaatggacagagaaagag

SEQ ID NO: 61200 - DNA, 1770 bp, Heterodera glycines
atgagaaacacactgagaaacacgagaggggaagtgtgtgaaatcaggttcttgcctttggaggacaatgagcgtcccgaccttgtgatggagatcctcattcaacaccttctcgaccgtgtcttagatgggcacccgagtccaatcctagttggactgcagctccaaccgccggggtttgatcgaccctacgtgatccgacttcggccacctgaacaaaacaacgcggcagcacttgctgcagctatcgaaagactcaatgagcaatcggccgctggaatagacttgctttctggaacgaccgtcaccaaagttctcgctgtgtggcctttggaatccgttcgtgtcgatgctcagcgagggggttgataaaaaatttaaaattttgataaaataaaatataggtgcgtgcgatttggataacgaacatcacttatcacacaacgtgcagtcaatagttcgtgttgtgaaccccaacgatcgttactgcctcgcgcgtgctgttcttcttggactttgtgatcgtgagacacaaatgccaaatggaggtggtcgtggagcgttcaacacatacgcaagtcgtcaataccaacatgggactcaggccgttcatttgcttacaagagccggtgtttctgttgacaaacacatgtacacactggaggatgttgcgcaactccaacaatatatcaataatgagaatggggtaggacaaattcgccttgtaatcttcgaaaaggagcaagaataccgtattgtcttcaagggagaggggtaatatttttttgtttatctaaattaaaaaaaaaacatttgaagaactgcagcgcaattcaatttatgtatcctgctagaacgaggacacttcaactatattggacgaattgcacagctcttcaaggttcctggatactgcattgactgtgaacggagagcagatgcgcgttaccatgcgattggttgcaaggcggcatgtcgtctttgttttcgattcgggggtggatacccgtgtcaacgagaacgggttttaatttgagcttatttttttcagttataaaatttttttagttgtctgatggtcagatcagttcacgaaaatgtaccgaatgtggtttcattttcccaaatgacaactgttatgaatatcatttggcgaatgatgcccctgctccaattgatgggcgcggacatagacaacggcgttcactttgtcaatggcgacgtttttgtcccacatgcggtcgtgttgcctattttggaatccatcaatgcccctcgatacgtcgtgctattgggccagttgattgctttcgttgcaaaggtccacatatgttggatgaaccttgctacatccaaccgattggtgttgcaccacctttaccaatgcttggtcctgttcacaacaacgacgacgacaacaacaacaacaacaacaacaacaacaacaatgaggatgaaaatgatattgatttcataatcaacaatctgggaggagaaggtgatgaagatgaagatgatgttgaaaacggggatgatattaatgatgatgatgatgatgagcgagatgaactgctaccacttcgtctttgcttcttcgatgccgaaacatcccaggagcgcccactacagctcaacaaccaagtcgcccataaacatgtacctttgctaatagttgctgaattcatttgtgaaccttgcattcgagctggaatcaacatcaacgatgggcaaggtcagcgcgcacccggttgcgtttgcctatgtggaaga

SEQ ID NO: 61201 - DNA, 1815 bp, Heterodera glycines
  unsure (1)..(1815): unsure at all n locations
aaggacgatgcggcgactctttgaactcgacactaacccattggatggagcttcacgtcgtatgggggtgtgagtggaaagaacggctccgancgcganttggagctcaagcagcgtttcgaagcagtatttgtcccgtgtccattggatccacgaaacgatgccactccgtggtggtcgtacggagcccttcaaacttcatcatgtgtgctcagacgatgaagagatattgtgcattgatatagttagcctatatccctacgtcatggtgctttttctcaataaatttgaatttgaatttgaatttagaaggtgaatcctttcccagtggggaatccacgtgttctcacgcgtgaggtattgcttcatccaaccacggccccacttccctggacatgttcgtcaaataacatgttccggggacttttacttgtacgagtgctcgcaccgcgcctaattcgtgtcccgttgctgggctatcgcaccaaagatggacgtttcacctttccactctgtgcttggtgtgcggacagacgccagcaacgtccatgtcaacatggtgacgaaaagcgttcttgggtgtgcgcatacacgcacatggaattgaacaaggcacttcaactcggctatattgtcgttgatctctttgaggtacattaaaaataacgaaaaaaaaaatataaaaaaaaggtttggaactatgacgagtgggacgacgacttgttcagcaaatatgtcaatacattcgttggtctcaaagtccaagcgactgggtggccggaagggtgtgagacagatgaacaacgtaaagaattcgtggataatttcatgcgcacggaaggcatccaattagactcaacgaaaatgacacccaacccagggctccgcctcattgccaaaacattggcaaattctctgtggtatacgtttttaaacttctatttgaacaaaaaaaaaatgtttaggggaaaaatggcacagcgcgtgggtttcacgcagataaagtacacgcgcactccagcggaattccatcaactcttggacgatccaacattagacaaactggactttgtccacgtctccgagcatatggaccgagttgttgtcaggaagcgtcccgagtttgcaaaggcacccctcacaaactgtcttccagtcgcaatatacgtcacatcgtacgcgagacttcatctctattcatacatggaaaaagtgattgcactggaaggggctgagcttctttattgtggtttgcgaatacaatagaaaaaaaaatgttagataattttagacactgactcaatctactacgtgaacaagatgggtgggcggtgtgttccggaaggcgaggcacttggacaaatgaagcgtgagcatgttgatcgtcgaattgtggaatttgtagctggtggtccaaaaaattatggaattcggcacacagcacgagacggaactgatgagcgggccaacctaaaaatacgaagcttcagattatcgtacgccactcaacaattactgaattttgaagcaatgaaggatctgacactggctacatataacattgacggacctatgtcagtttttttttaattttcacaactaataattttaaattttagtgatgacgtcatcgacaacgatgatctctacgtgtacggaggaggtggagcccatcgttgcatccgagtaactttcccgcaaattgaccgaaatgtccgttctgacgtatacacctgcgaggcccacaaagactacagacctttctacgccaagggccgtgttcgaccgggaatgcaaacacgaccatttggatat

SEQ ID NO: 61202 - DNA, 705 bp, Heterodera glycines
atggatttaattctcgccactgattggatgaataacgcttacccggaaatggaacaggacaaggctaacatgtcaccaaaggaagaccctagttggattagtctcattgatgaagaggaaaagcgggagcctatagctattgtgcaaatcgatgaggaagaggagaaacaaagaaaaagtttgtcttttagtgttattttttttaattaaaatttagatcctcccggaaattgcgactgtcgagagaagcgtcgttgctttattccgcttgttgaccacttgtgcaagaaatttgagtgttccgcccacgagttacacgtactcttcaaagacttggggaagcgtcgcgccatcgttgaacacctacgctcttctcaattgtgcacctcccacctgcgtccatcgatacggaatttcccagttcgctgcaacgatctctccattttggatgctcactcagtccctgcataccgtggttacctcggaatcacggtgtttattctttttattttttttatttctcaaaatattttaggttcgaatgcactattacatcaaacacggtattcgattgcgtcattcaaatttgccttgtgttgttgaatttggcggtggagatcataagactttcttcccattagaagctttgaatattgttatttagatgttttctgtatcaaattgtactgttgtttttaaaataaa

SEQ ID NO: 61203 - DNA, 1649 bp, Heterodera glycines
atgccatccaattctttttacattgttcttccttcaaatacaaatgttgaaggtaacaagacaaattcattccgggttcgtttaccacgaaaactacaattcaactccgaatgggaagttggactcgctgttattgtatatcctcatacttggccttcgattggtactgttgaacagcaatttgtagaagttgaatggcaaacaggaaatacggtgcgtattgaagtaccaccatcgaatgtcacaaatccaattgacttgggtaaaactctgtataggctcttgggcgaaggaagtgaaccgttagcaaaaaaggtacgaaccgcacagaattctttttcgcatgctacaaactctgctcgtcgtggggctagagaagaatacataaaacgaaaaacgagagagaaacgaagtattcgagatgaagaaaaacttctagaagccttattgacggacattgaaacaatggttgacctttttggtgtgactcaaggtcttttagcgcgtgagaagcgcgcggagacgagcaaaattccgttgagaatgtctgctgatgacaatgaatcataccaacataaattggatgaatatttttcaaatttaagtggtcccgatttggacatactcgaagaaatgatcagagcaaaattgaacgaagaaattaaaaatatggtagaggaggaccgtacaattcttgatgcaacgaaagaaatgggaatggaagcgtgggttcaagcgtaccgtaaagttaggctcgtttgccgatttatttttgatatcaacaaaaatcgtttcgagttaatatttgatcagcgatatgtaaggagggttaaaatttcttcacaacttgcgtatatcttaggctttgacagtacagattttacgacatcggaaaatgaagcaaaatttatgccagatatgaatggtggcgtatcatcttttcaagtttatactcccgatctcattgaaccaatgatgattggtgatgtcacagcaccagtgttacgcatcgtcacaattcgaggaaaacctgatgaaatagttgaagaacaatttttagcaatacaatatcacaaaattttaattaaggaaatttctgaactcctgatcgaaattcgtacaaatagcgggagcctaatgccattccaatatggaatatgtacattaactttacatttccgaaaactgtcctacttctgaagatgaataccttggaaattgataaaattttatcgacaagcccactcacaaaacagacttatatcggctgttttgcggctgaccagataccaaatatggaaatggtaaaatttccaaattgtctggtaatgaatattgacccaatcacctctaaaggatcacattgggtttgtgcttacagtccttctccgtcacacattgaatactatgactcgttgggcatttggccaccacctagcatacacattgcaaattatttgtcaagattcaaacaaattcgttatagtataattctacttcaatctcccaattcaagtgtgtgtggtcgtcatgtgctcttctttttgtttaatagatgtctgggaactccctttgaaaagattgtaagatttttgcattttggaaaaacaacacctgacacacttgtcagttcttttgttacaagaata

SEQ ID NO: 61204 - DNA, 557 bp, Heterodera glycines
  unsure (1)..(557): unsure at all n locations
atgaaaaccccaaatttcctcgccatttccattttcatttccatcggatttggaattgcaactccatctaatgaagatgaatgtaagattaatcatataaattaataaatttatataaattaatcccgttataaatatataattcatataaatttatataaattaatcccattataaatatatataaacttaataaatttatataaattaatcccattataaatatatataaacttaataaatttatataaattaagccgcgatgatgacaatcagcagcagaagcaatattgtgtgtccgacattgagcaggacccccaaattttgcatgagcaatgcttggatgccaaagagtggtccttgtccaacggattggtcaaatttattcaacaaaaaatgtgaaggatttcaaaagaaaactaaaaaagtagcaaaaatgcattaaaaaatatgtatacaatccggaaatactatattgtttcttttttgtcacatgttcttctctttttctgtctctttttcaaatgttttccaaaagattanatcacaaatagaga

SEQ ID NO: 61205 - DNA, 230 bp, Heterodera glycines
atgctttttaaacagacagaaatttttatttttaagggtatttttgagaaactattaatcccgatttttatctcacagattgacgcaaatttataatagaattaaatataaataatttttaggaataatatgctttttaaacagacagaaatttttatttttaagggtatttttgagaaactattaatcccgatttttatctcacagattgacgcaaatttataatagaa

SEQ ID NO: 61206 - DNA, 661 bp, Heterodera glycines
atgccaatgaaagtgttggtgccaccagcgacaaaagcgttgccgataaccgttccattagccacaaaaaaggtggtctgtttggctgttttggtggtcaaaatggtaatgatagtcattatcatcatggcactgctggtagagaccgttcccgtgaaagggatgaacacaatgcagctttgtacggtgccgcaattgttggctacggtattggcgcagctggttgtggcggtgccggatgtggtggcggttgtggcgctcgttgatgccaattttttttttacaacaatttgtgcagaattaagaaaattgcaaaagaaaaacgaaaaaaatgaatttttttattaataaatttttagtttgcacaataaagattaaaaaggaaattttatttacaaataatgtttatttgtgtctcgtatgcgtcaatcatacagttattgtttttgtaaagtcggatacggtaatgggatggtatgaaaaactgagcatgtatttggctaggattgttcgtggattaatgagtgtaggcaattttctgaattttatcatcctcatgaatagagaccggatttgtttgaacaccaatatctatccgtaaatataattaaatatttttggctttttttcaatattttaaaatctgtgctttacaaataaa

SEQ ID NO: 61207 - DNA, 2636 bp, Heterodera glycines
atgatcccagggcagcaaaatgttggcaccccattccaatacactaatccaaattgtcaaaacggtggtcagcagtttcaggcaatttattttgttttattttacttaagtaaaaccaaaaatttgtgtatttaaatttctttaattttatttagccaatgatcccgaccgcacttgggattcaccccatgtcttcagtgatccatggcactccttcagcgggcacatttcagccaactttttcaacagtgccacaggcaattcaaattcattaattaaaaaaattctttaaaaagtcagatttaattattcaaatgggtatttagcattttgtttctcatccttttgggatgggtcaattgaatggcgcctatcaaatgcccgggggttaccaaaactcatcgtctgcttcacaggcaataaattattcaagtcttttttctttaaatacataatttttaaattatttagcaaattgttgtacctccgagtcaaatgcctccgaatcaaatgcctcccccttatcaaaacgcctctcttgtgcatcaacaacatcaggcatttgaataatttttatttaaatttattatcttttgtttgttaatagtttgtgtccccagcaactaaccaaatgccgggaaatttccaaaatgcctctttcgctcaggcaatcaaataatataaatctaaccaatttttattagtctatttagctttttattccgtcagctcaagtctcgaataatttaccacacgctcaacacaataaccaatcatttgcacaggtttaaaaatcagattttaatgatattatcaaatctattataacatggattatttttgagttttaaaattaaaaaaataaaaataaagtttttctgcatttaaaaaaaatgatattgagatgcgaaaaatactttatttggtgctatattaattgagaaatttttaaagaagcgataaaaaaaatatcttgctaaagttgttgatctttgaacaaaaaaaaaattgtataattttaaaattctttagaagtttaagtcatttttagtcaaatttacttattaatgtttttatggaattttcgggattttttttgtaattacagaatctacggcaaatcaaaaaattaaagaaattttcagttggcgccggcattgcgtgccaacaacaatcaaatgatcacacatgccatggttggcccacaaaatgccgataattcgcagaatttgcaggcaaataattcaaaaaaaattgtttttataaaacatttattttttttgtttcttttagcccacgaattggtcaaatcatttgcctggtacccaacaaaatgtcgggccccatctttcaaacaatttccaatcacaacaacaacaaaattgccagaatcttcaggtagtgtattcttttttcaaatttaaattatcaaatacactttgtttttattaaaacatttttttgtttctttcagcccacgaatttgtcaaatttgcctggcatccatcaaaatgtcgggactcatctttcaaccaatttccaaccacaacaacaacaaaattgccagaatcttgaggcaaataatttcaaaattttcacaatttttgtttgaatttcaattttttcagcaatctcgccaattatcagaacaaatggtagtcccaggacttagcgaaaatggcacgacttcgtttgattttatggttaaatcggtctccaatttcaatcagattttaccgtaagaaatttacaaaaaattcagttctattaatttttttgtaggccaatacaattattcgtttcctctttggatttccgtgaggctcaattaacaccgaatggtccaatgcgtgtttgtaatgctatcctaatcaacggggagggaaagaccgttgaggtctcagcttggcgcttacaagcggatgtgttagcatcagccatgagaggctatttgtacattttcgtaaactgccgtgccaaaccaccgcgagaacggaccaattgctggttcagactgaacattgatgccatgagttcatacatggtacaggtccaggttcgagcgttgagcgtagcaaaaaaaaaatacgagattattttagccacatattgcagtgccacaaaatacaattgctcccgctcaaagccaaccgttcggttcaattatgcctaatgaaccgccggttaaacctttcttcagatttttaaattaaagtctattttcacccccagagatcacaaattgtcaattccggggcaaatttagtggctattcaaagccaacaaaatgaaaattccgtgcctatcacgcaatctgccccggtaaaaagtgttgtatttcagacaatttgatttttgaatttaatttatttcagtctaatcccttagctcatgatcaaattttggtgcccagtggggcgaactcgcatcacactgatgagatagtggaggtgttttttatacaaataataataataataataataataataataataatggcttttaagaccattttggattaaaaacttttttttaatttttaaataacaaaatattcttgacttttcattttttttattgaaaatatattcaaaaaaagtaattccttatgaagttgttttgaaatatagaaa

SEQ ID NO: 61208 - DNA, 445 bp, Heterodera glycines
atggcgcgtcaaaatctaaacgaatgctttgtccttgaaagaacgacaccaatgagaaatgttatgcgcaacacgaggggagaaatttgtgaattgcgatttatgccgcttgaggaagcgcaccgtcccgatctcgtacttgaagcactcatccagcatttgcttgatagagttctagctggccatcctcgtccactcatggtcggattacaacttcatccgccaggattcgacagaccatatgtcatccgactccgtccaccggaacaaaataatgcagcggcgctcgcagctgccattgaacggctcaatgagcagtccgcggccgggattgatctactttctggcacaacgatcacaaaagtgctcgctgtgtggccactcgatcccattcgtggcgatccgcagagaggcggtttttaaacaaattttattctaaagatta

SEQ ID NO: 61209 - DNA, 4205 bp, Heterodera glycines
atgccaaatggaggtggccgtgacgcactccgtgcgtacgttagacatcaaaatcaacatggacctgaagcggtggctttgctgaggcgctctggaattccacaccacaaggacatgtacacgctgcaggacgttgggcaactgcaacggtggttgaacaatgcttatggcattgggcagattcggctcgttgtatttgagaaagagcatgaataccggatcgtgttcaagggagaggggtaagccttggttattaaaagtataaaattttcttgtccaaagaagtgcggcacaattcaatctgtgtctcttattggagcgaggccacttcaattatattggccgtattgagcaaatttttgacgtgccaaactactgcattgattgtgagcgcagagctgacgcgcgttatcattcgtcagggtgcaaaattgtgtgccgtctttgtttgcgatttggacctggttttccatgcaaaacagaaaatgtgaaattgtttttaaaatttaacaataaaatatatatttcagcttccaaacggcgtgacgagcgcgagacaatgcgcagagtgtctcttcatttttccgaacgacgactgtttcaactatcatctcgtcaatcgtggtcctgatcaaattgatggacgtggtaatcaacaacggatgccaatttgtcagtggcgtgaagtatgccgtttatgtggacgtgtctcctatattggaaagcatcgctgtcctcaagttcaacttggtgatgtttgtcgacactgcagaggccaacacaacgctgatctaccatgttttatccagccactcatggatagacctcaaccaatcaacatcatcgacgatcaagaggcgcatgacaatgaccttgtcattgatgatgatgaaaatgacgacgaattgccgcttcgtttgtgcttcttcgatgccgagacttcgcaggaacggccgctgcaattgaacaaccaagtggctcagaagcacgtcccattgctcatcgtcgcagaagtcatctgtgatccgtgcattaaggccggaatcagtgtcaatgacggtttcgaaagaagagcgcctggttgtgtttgtctatgtggaagagtgagggggcagcaaatgcgtcagtggtcttctccgccgtttgcaaacgcacatggagacaacacaccaactccagatggggcgccgaccttcaatcaacggcgcttctatttccattcttttgacaacggagaagctgaagaccctgtggagcaattcttggtttttttgatgaaccatgggtcaaggaaggcgcacactgtatgcattgcgcataacggcgggaagtatgattttcatctcgtactcgaggctctccatcgccgaagttacccgcctaaacggctctgcaccactggactaaaaatttattcaatgaagctttgtggccggaatcaacgccgcattacgttcaaggattccattaattacttcttctgtgagcttgatggactcgtgaaaagtttcgatctaccagctcacttggcaacgacaaagccatttttcccgtatctgtatatccaacggcaaaatctggttaatcgtctccaaggacttccgggtatagaattttattcaccgaatacaatgaaggaggagaagcgacagaaatttttgcgatggcacgccgataacaatgagggagcccaattccaattacgagaacagctcattatgtattgcgtaaacgacgtggcaattctacgggagtctgttctacgctttcgacaactcatcggagaacacacacagggattggatccctttttggtgtcgacaacggctgctgggttagctctggccacactccgtcgctgttttttgccgccgaatcggcttgtgcactcgccagagggtggatatctacgtggacgacgggcctctgccgaatcgagacgttacatccgcttctttgagatggaacaccccggagctcaagtgcagtgcgcggattggtcggtgggcgaagcacatgtggatgattccggataccgactcgacggactttggcgtcgagacccaccccttcgtccacttgccatcgaatggatgggatgctattaccacggtagttggttgttgtctgtttggtagaaaatagaaattataagggtgcccaaagtgtttcccgaaccggtggcagaagcttgccgcggggcgaaccgctgaggacttgttcgagaggacgacgcgaaggctttgggagttggaacatcagcatggattcgaactacacgtcgtctggggctgtgcgtggaaggagcagctccgccacgatccggcgctgaagcaaaggttcgagcaagtgttcgtcccatacccactggatccacggagcgatgggttgcgcggaggacggacggagcccttcaagctccaccatgtgtgcgcagatgacgaggagatcatctgcatcgatattgtcagcttatatccatatgtcatggtgaatttctctttaatgctcttctcaatttcgtttttcacttttagaaggtgaatcccttccccgtggggaacccgcaagtcatcacgcgcgaagtgctcctccaacccccgactgttccactcccttggaattgtgcggaaaacaacaccttccgtggtttgctgctgattcgggtcctccctccgcgacacatccgtgtgccattgctgggctaccgcaccaaagatggccgcttcacctttcctctttgcgcttggtgtgctgaccgccgacaacaaaggccatgtcagcacggagacgacaagcgttcgtgggtgtgcgcgtacacccacgatgagctgaacaaagctctggggctcggatacatcgtcactgacctctttgaggtaaatttaagatttaaatttgtttttttagctaaagaatcaaataggtctgggactacgaggagtgggacaacacgctcttcagctcctacatgaacacctttgtggggctgaaggtgcaggcgagtgggtggccggaggggtgtgagacggatgagcagcgccgagcgtttgtggatgacttcatgcacacggagggcatcgccatcgacccgaccaaaatggcattcaatccgggacttcgactcatcgccaagaccttggcgaactctctttggtaattatttttattttttcttttaaaaataactttaattaaaaggggaaagatggcacagcgcgtcggctacactgagatcaaatacacgcgcactccagcggagtttcacaagctcctggaggacccgacctacgacaaaatggactttgtccatgtctctgacaacatggaccgagtcgtcgtcaggaagcgccccgagtttggcaaggccccggcaaccaactgcctcccagtggccatttacgtcacatcgtacgcccggctccacttgtacaactacatggagcaggttctggccctgggcaatgctgagctcctctactgtggtaatttttcaaatttgtaattaaattacgtaataaaatttagatacggactccatctactacgtcaacaagattggagcaccgttcgtccaggagggggaagcattagggcaaatgaagcgtgagcttgtggaccgccgaattgtggaattcattgccggaggaccgaaaaactacggcatccggcacactgccagagacggaactgatgaacgtgcgaacatcaaaattaggagttttcgattgtcgtacgccactcaacaattgctaaattttgctgctgtgaaggaactgacgttggctacgtataatatcgacggacccatgtgagttgcattatatttgtaaaaatgaaaaaaataaaaatcaagtgatgatgttttggacaacgaagacttgtatgtctatggaggcgctgaacaccgcgccatccccatcagctttcctcaaattggtcgcaatgtttacgccgacctctacactcacgaggctcgcaaggattatcggccctactacgccaaagggcgcgtgcgtcccgggatgcaaacccgcccctttggctatgtagaggaggaagcccgactcattcgccaaacacaaatggtgcaccaacaactgccacccgcatcttctccaccacaaccgaggcccgaacgaagaaagaggcggctaattgagcccgatcccacccaggctggccattctgggtggttttcataa

SEQ ID NO: 61210 - DNA, 1187 bp, Heterodera glycines
atggacttaattcttgctactgattggctgaacaatgcgtacccagaaatggagcaggacaaagaaccgccaaaagaggacccgagttggattagcctcattgacgaggaggaaaagagagaaccactcggggcaattggagaggagccaataacaagtttgaataaattttcttattaaaaaaaaaatgcaagtttagacacgccaaaaaagtgttcttgcaatgagcatcgccaacgcccaatccctcttgtggaccacttgtgcaaaaaatttgaatgctccgccaacgaattgcacgtgctcttcaaggatttgacaaagcgccgcaaaattgttgaacatttgcgctctgctcaattgcgaacctcccaccttcgacccacaatccggaacttccccgttcgatgcaatgatctctcgattctggatgcccactcggctccagcttaccgagggtacctcggaatcacggtaatttgatgcaaaatttttatttatttggaaatatttaggtgagaatgcattactacatcaaacatgggatcagattgcgtcatcccaacttgccatgtgttgtagaatttggaggcggagatcacaaaacattttttccaattgaagttttgtctattattatttagatgatttccatatctaattgtactgctgtttttaaaataaatgttcgtccgtttactcctgaacagtttttaacaattgctcaacgtggaataaatactgagtataaccctcgccgttttcatgccattatcatgcgtgttcgcacttctgccaaaactgtcgcagctcttatttttcaatcagctcgggttgtcctcaccggtgtttcccacccagacagagccaattactttgctcgaaaaattttaagaagaatacaacacactcaaaacaacacattgaaaattcatcagctgcgggtggtcaacattgttggtgtgaaaacttttgctcaacgaattagagtcgaaagacttttgacaactttgggtggcatttacgacccatcaatttttccggccttacgatgtaaaatggaaaatggaactacttgtttaatttacatatcgggaaaagtgattgtcaccggcgccaagaatattgaagaattgagtgatgcgtttaaatttttgtcaaatattattccaaactattttcgttaa

SEQ ID NO: 61211 - DNA, 1058 bp, Heterodera glycines
gcaaattgcggaccgtctgaagataggccaaaccgtggagcccgagcagttcgatacagtcaccgtattcttctcggacattgtccaattcgcggcactgtccaaccaaatgcggccgctgcaggtggttaatctgatgaacgaactgtacactacgctggacgccatcattggcgagcatgacgtgtacaaagtggagtccatcggtgagaaaacacaccaaaaattatttggtttaattccccttaattacaggcgatggctatttgtgcgtgtcaggactgccaaagcgaaatggcaatttgcacgccaaagagtgcgcggatatgtgagcagcaattactaattgaattaattgttaatagtcatcaatttgctcaggtcattggactttttgaaagcgtttcacactttccgaattcccgaccttccaaatgagcgcgtccgtctccgaattgggctgcacagcggcccatgcgttgcgggagttgtcggtatattctatgaaaatggtataaaaacagctgacgatttaataaaaggcctggccatgccccgctactgtctgtttggtgatacggtaaacaccgcctcgcgaatggaaagctcttcaagccgtcagttttgtttgtcaaatattctcattgggccatttaagctaacaaaattcacatctccaaagcgacgcacactttgttgagcacaaatttcaacggttatcttttggagagcagaggcgaagtgatcattaaggtcgatcagaccgataaactgttaattaccgatgactaatgagaaattttacgagtaaatgcattcagggaaagggcgtcatggagactttttggctgcttggccatgccgaaagcggcacgttgccggcacataattcgcatgaagggcaatcgatggcacaaagaaatgccgaagaagacgagagggaaatgtacagaacttatagaaagacaatgacaggacaggacaaagatggggaacaaaaaaatggagatgaacagcagaaaaagcagcagcagaacggaggaggagtgatttattga

SEQ ID NO: 61212 - DNA, 840 bp, Heterodera glycines
atgcgcgggtcaatcagagatgtgatcttgtccgaaaatgccatggtcaaagatgtgatgttcatccaatcggccgtcaaggagctttgcgaagtgagagatggatttattttgttattgagggtaattaaataaattggcaatttcttaatttaaaattggttttattccaaggaactcacgaaaattaaaattattaatttcaaaattataaaagtaaaaaagcgttttttccccctttccagggccttcagttcttgcacaattcgcccctccaattccatggtcggctgaaatcctccgcttgtttgatcaacgaacgatggcaagtgaaaatctcatactttgggctccgatggctgaaaagtccacaaaaaatgcaagcaaaaggtgaaaaatttacaataattaatcaattaattaattcttttatagatcttttatggctgtctcccgaacaattgcgaaaagcgacggacggtgccgaaataaatgtggccgtgggctcaaaacagtcggacatttacacaatggcattaattttcacggaagtacacaaaatggacattaactcattgtctaaatttgcacatttatttgccatttccgatggtgaacatggccccgtgttgggaggagggccgcgactcggaggaggacttcggcgcggcgcgcgacttggaagagatggggcggagcagaagcaccgcgacgcggcacaccgcaggcgcaacgctcggacgcaacgcggacgaaattgcctatttggtgaagcggggcggattggtgccattgagaccgatgatacggcccgcgttggacaatttgcacccggaattg

SEQ ID NO: 61213 - DNA, 1324 bp, Heterodera glycines
atgaacagacggtaatgaattcttttgaaaaattaaattttcattttccatgcaatttttcccatgtttcagttggatttgtgcggatgtttggatggacattctgccatcttttgaccatgcccaactcggactcaaaatggcattgctttcctatcgttttgatgttttggtggacacgcattttgatggaaaaagcgaattgacaatttggagaacaatcagaattgtaaaggacgaaggaccaaatgcaaacgataatggaccaaaaccgaaagtgtctgtacggatcgatggcagttttgtggattttccgttgtcggatcgtcaactgcccaacaaaatttgctttaagaaccttcatattcagtcagtcttaacttttgtgtacgctaaagcattgttctcttgctttagctacattgaccattccgtgatcaaatttttccgctccaagaagcgattctttgacaaaagtggcaccaaattggaagtgtttgtgcattcaattgatacggatgtccaaccgatttgggatgtttttacccgcgaaatttggcctatttttgcgaaaagcattcgtcattttggctttcacgatggcgatgatttggacaatttgcgcagtcgcatttcaccgacacttctcactgatcttgatcaattgatttcaatcgattccggttatctgtgccccgatggaattgctgacgatgggccaaatggaaatgctggtcaagcgttgaccaaatggcttcacactccgacaaaaaatggacaaccaaagcaattacgtttccgtgcttatgtgagtccaccaaatttcgaatgggtcaacaacttcaaagaggtcgtctcgccagaattttcgtcaaattgtttttattttaccaattttgtttagacatttcgccgtgccaccacttctgtcagttaccaaattcaactttattttcgtgtggaaacaatgccaattgcgccatttgaattgatgaacgaagtgacgaaagaaaagctgacactgaaacaggagatcgacgaattcgacttaaatgtgtataattggctgttgcaacggtgcccaattggggagacggcgacggcgccagttaagtgggaaaaccgcgaaaatccgagtgccaatttgaacaatgtcagatttgatctgtggagtttcgataaatccattgggtgagcagcagcaatagcatttgaattttatcgaaaaataaaatatttaattaattttaggccattgtcgccaccagcggaagaaaaagaaggagaagaagaagcggatcaaagcaacaaaaatgtcgtctga

SEQ ID NO: 61214 - DNA, 2064 bp, Heterodera glycines
atgaaccgacggtaaggaaatttttgaaaaattaaaattttcgtttccaatttttcagttggatttgtgcggatgtttggatggacattctgccatcttttgaccgtccccaactcggactcaaaatggcactgatttccgaccgtttcgacattttagtggacaaacattttgatggaaaaggcgaattgacaatttggaatgacattacaattcgaaagggcatggaggacgaggaaaaaattggagcaaaagcgaaactatttatgcaaatcaaggacaacaaggacaaatttgtggaatttccgatgcaggaccatccgttgccaaacaaaatccgatttatggaccttatgattatgtaattcaaaaatttctgtacagaagcgaccaatttgcaatcatttgtgttattgtatcatttcccccttttcaggtacattgaccattctgtgcttgcatttatccgtgtcaacaaacaaatttgggacagaatgggcaccaatttggagttggaagtgtattcatacgaaacggatcaaatttgggatgtttttgtccgtgaaatttggcccatttttgcgacaaacattcggcatttggcctttcacggtgccgatgctttggacaatttgcgtcgccgcatttcaccgacacttctcactgatcttgatcaattgtattcaatcacttcctatggactgtgccccgatggaatttctgacgatgggccaaatgcaactgctggccaagcgttgtccaaatggttgcacacgccgagcaaaaatggaaaagcgaagcgattgcgttgcaatgttttttcaaattccgaatgtgtcatccgatcgatcaacaatttcagagaggtgatctgtcatattttcttttattattattatttttatttactaattttgtttagacatttctccgtgccactgcttcggtcggctacaaaattcgtattgtcattcgctctgtcagttaccatattcaactttttattcatgtggaaacaacgccaattgaaccatttgaattggtgaacgaacggaccaatgagaagctgacactgacgaaggatgaaaatggcactggtgaattcaattggctgttggagagatgcccaattattggggagacggcggcggttcagaaacaacagcagaagaaggacgaaaattcggatgccaatttgaacaaagtcttcttccgcctttacgatgacattgggtgagcagaaaggaggccttttttgtataaaacacggatagtggacggtaattggggtgccaatgccaatttgaaccatatccgatttgatctgtggagtttcagtcaatccattgggtgagcagcaaaaacagcaatttttgatttgtctaaaaataaaaaaacttaattaattttaggccattgtcaccaccagcggaagaggaagaagaagaagcggatcaaagcaacggagattaattgcttttaagaaatgatgagaaacgacagatctcaatttgatgctttttccctgtcacaaatgcttttgttgattcgttcgttccaattatataaaacatacttttgcctcaaaatggcattgaagaccaattttgtttggatttttgctgaaaatttctgatgtaacgtcgcgcatgaagtttttcctgtcagttagtgttttgtcgtctaagttcatttgaaaaatgatttcatgcccagtaatacgaaaacgcgaatacattaaacaattttaaaatttttcacattcgaaaaaaacttgttttgagtgacaaatgcgctcactcgaaaaaagtgccattgtaaaaaccaattgttggtcttttgccatcgggtccactgcgtttcggcgctcccgtttcggcgccagcatgtttttggctataacttttttctttgtaaaccaaatccaacattgttggtgtcgttcgaaagctaatcaatttagaagctttttctaagctattgctttgcgattagacaattatcaaaaaagttatgcatgaaaattgcgaaaagtcaaaatttttgaagttttttcttaataaa

SEQ ID NO: 61215 - DNA, 1341 bp, Heterodera glycines
atgtttttagcttggtttgaagcttctaggaaggatttctatatccatattttccatatttttccatatttcgcgatttatgtccatatttccatatttttccatattttggcattttggtccatattttatgtccatattttggcatttttcaaaaaaacctctattagaacggcccccagcagctaaatttagcttttttgagcccaaacccgaaaaaattttcaaaaaatcattttttcgccaaaatttctcgagaatattgaataaatttaaattttcttaaaattaataaattatgtcaaaaataagcaaaaaagcgaaaatttcgcttttgttgttgattttgcgctaaaaaaattaataaattttagcttttatgttttttttcttttaaaatgattgcacgtaattgccgaaaaaattcgagaccaatttccgaatgttgaccgactaattgcaaaacgaaagccgtctttgtcaaagcgccttaccgagtcaaaaaatttggaaatgtatctcatatgcaatttcaaccaataaatttgaagaaattttgcactcaattttgaaaaatttatgtccatattttgcgatttttggtccatattttatggccatatttcgcgattttagatccatatttttggactccctagtaatttcaattacatatttatttgtttatattaaagcatttttatttattttttcagctacattgaccattccgtcattaaatttctccgtgccaacaagcaaatttgggacagcaaaggcaccaaattggaacttgttgtgtacgtagacgaatttgaaaatgatgaacagccagtttggcattgtttttcctatgaaatttggcccatttttgcgacaaacattcgccatttgagcatttataatgccgatgctttggacaatttgcgtcgtcgtatttcactgacaattctcactgatcttgatcaattggattcaatcaattctggtgatctgttccccgatgcaattgctgacgatgggccgaatgcaaattcttctggccaagcattgcacaaatggttgcacacgccgagaaaagatggacagccaaagcgattgagttcctggagttgctcgtgttttagtctcacaagaataaacacatggttctacaatcataaacaggtcgatgattgatcatggaattttttctttcaatttctttttttactgtgctaaaaatgactaaaccctcaagaaactgcgcggctaagcatttaaaccgctttttgggaaggtttaaaactcgaaaaatggacaaaacaccaaaattaattggaaatcctaaaaaaaaaaaaa

SEQ ID NO: 61216 - DNA, 848 bp, Heterodera glycines
atgttaacaacgcaagttgagccatttgaattggtgaatgaatggaccaacgagaagctgacactgatgaagaaaggaccatatcattcgctgttgaagcgatgcccaattattggggagacggcggcggttaaatgggaagacgacgaaaattcggaccatttgaatgcatttttcatccgtcttggtgaaaattgcattgggtgagcagaaaggaggccttacttttgtatagagcacagacaggatttgagacagtattctctgtacagtactttctccaaatcttggcagggccataggagtccctgttaaaacgggtgcccccaaaatcacgccgccgaaatgacgccgctagaaaattaaaaaaatatttttaaatttagaaaaaatttttataagaaaatttcaagaaaaattaaattttttggaaaatttttcgaaaactgtaatttatataaaattttaaaaaaaacactgaaaatttttcaaatttttttttctttaaatttttcttattcgcttcgctctttggtttgtctgtcctattataatggtccatcttgggaaaactctggtcctaaaccagggcttcgatatctgaggatttttcctcattttgtggtcttttagagggtcaaagaggattttttttgaaactgacgatttgcggatttttgtggtattttgagaaatttgaggatttttgtggtcttatgattttttgaaaaattaggtatatttggcaaaatgttcgaattttttcgtcaaatcttatttctttacgaaaaatcttcattttgcaataaattttaattaatttcctttagatgattttacaaaaaaaa

SEQ ID NO: 61217 - DNA, 351 bp, Heterodera glycines
atgaatcgacggtaaggaattttttttaaattacaaaattttcatttacccatacatttttttacgaatctcagttggatttgtgcggatgtttggatggacattctgccatcttttgaccatgctcaacttggcctcaaaatggcattgctttccgaccgtttcgatgttttggtggacaaacatttcgatggcaaaagcgaattcacaatttggagaacaatcagaattgaaaagggcgaaggcccaaaagcgaaactgtctgttctgatcgatgacaaatgcgtggcatttccattgccggaccatccgttgcccaacaaaatccgttttaaggaccttcagatttag

SEQ ID NO: 61218 - DNA, 59 bp, Heterodera glycines
tggactgtgccccgatggaatttctgacgatgggccaaatgcaactgccggccaagcgt

SEQ ID NO: 61219 - DNA, 946 bp, Heterodera glycines
atgaacagacggtaagcaatttcttttaaaaaattgcaaattttcatttacccaattttcttatgtttcagttggatttgtggtgacgtttggatggacattctgccatcttttgaccatgctcaacttggactcaaaatggcattgctttccgaccgtttcgatgttttggtggacaaacatttcgatgcaaaaagcgaattgacaatttggagaagaatcgcaattcgcaaggacaaaggcccaaaagcgaaactgtctgttctgatcgatgacaaatgcgtggcatttccattgccggaccatccgttgcccaacaaaatccgttttaaggaccttcagatttagtaaatcaaaaaatatacagaaaaccaatcttcatttttccccttttcagttacgttgaccattctgtgctcgcatttcttcgttccaacaagcaaatttgggacagaagtggcactattttggatttgaatgtgtatgcatttgatacggatgtccaaccaatttgggatgtttttacccgcgaaattttgcctatttttgcgacaaacgttcgccatttgtgctttcctaatgccaatcatttttacaatttgcgtcgtcacacttcaccgacacttctcactgatcttgatcaattgaatttcattaattctggtggtcttttacccgatggaatttctgacgatgggccaaaagcaactgccggccaagcgttgtccaaatggttgcacacgccgagcaaaaatggaaaagcgaatgaattgtattgctgtgcttatttttgtgaaataacatggatcaacactttcaaggaggtgatcgagctacttaattgttcattaaacgattgactaattattgattgattgcatttgattcgtgaccggaaaatcggtcagtggaaaatgcgtcagtgatacaaatattttaaaataaa

SEQ ID NO: 61220 - DNA, 1921 bp, Heterodera glycines
atggaatatttcagctctttcgttgactcttcagcaatggaaatgcaaattttgagcaaacaaagagagaattatgaagattttttctatttcctggcaaaagttttgagcaaatttggtggaaaattgacaaaaaatgagaatagggaacaaatcgaaattggcatcgatggggccaacaaaatattggaaagtttgaaaaattatgccgagaaaatgttgataaaaaaggctagagaatggcacccgtactacgagtgccaagcgaagaaaaaattggagcagcaaaatttacaaatggcagccgtcgaaattatgtgcccaaattttgtggacagtgccgaaatatttgaaattttaaacgggcaaaatgaattgtttaaatctgtgccaaaaagtgaaggaaatgatgaaaaagttgaccctaaattggtcaacaattcgcaactgttcaatttgttgtattcatttgtgacacgaattgaggcgataatttacggcaaaaatgccgatgggacaattattagagaggaaaaagcggcaaaaaaaagagaaaaaaatggaagcagaaaaacatggtgaaacgcccgtgaagagaatccatgcgtttattgctaccacaaaatgttttcaccttccatatcagcaaagatataagaaacttaggtcaaatatttcatccaattgagcgaatattaatacaatgtttaagctattaagggatgcattgaatttttatattaactcttttattaaagaatgttgattagttattttaattaaaaaattatttatacaatttaaattttagtacgtttgactcttcgattgaaatgcatcaaattaattcaaaaaaattggtagttgcaataaagaaggaacaaaaagatgttaacaacatcaaccaaagtaataatttgtaataaaaaaaagaatcaaattcatttaaatgtatcattttataagttgaaaatcaaattaaaataattcgataaaaaataaattttcatttgaaaatagagaaaattaattttaaacgatgagaattttagatacttttattttgctgaaagagctaaatgcgcaacaattttcaatttatgaatcacaaaaattgatcagaaaactttattgtcgggcccagcagaattgcgcaacaaaatatttcactgatttaaaaatgctttcaattcttcaaaatttattcgaccaaattcacaatgagcacaaaggtctcaaattcaaagtcaatttttgggaatgcttgtttgcacgatttgccaaaagaatttcctcaaaacttgccaaaatgctccacgaaaatgggattaagccggaagagcatttgctatcgaaagctttggagaatcaaaaagaaatatttgaaaatacttttgttgccgaccattgcaaagcattgcaagagttttattttctataaataaatttaaaaataaatattatatttaaaatctgagaattctaagttttgaatttaagaaagaactcagaagacgaaataatcggtcaattgaataccattcgatatgatttggttattaattttgaatacaatgcgcgaaaaggtggttaatgtaaaatattaattgatattttaaacagtgagtaattaaattcgtttatttaattaattacgattaaataagtttttaaaaaatattattttttattaagatttatatgaaagagcagacgatttgttaaaactattgtccgagattaacataaatgaaaatgatgatgagaaaaatgccgatggaacaacaattatttttggaactgttaaacaaattaattcttttggacaacgcaaatggccaaatgctaagggaaagaaaaagcgaattggacaaattgctggtcgttagccggctaattgagaagacgaaaaaggatttaa

SEQ ID NO: 61221 - DNA, 2044 bp, Heterodera glycines
atgcgaaacagctatgatcggtacgggtgagagctttgttcaattgtttccattttaaaagttcagaggtgggaacagaagtggcgggggatttggcggaggtggtggagcttatggacgaggtgccagtggtggtggttacggagcgcgcggaggcagcggcggttatggaggaggaggaggagcacctcgtggtggatatggcgccggcgggggaggttttgggcctccgccttctggctacggagcgcctgaaccatattatggaggatatggtgcacctccgccctttggcagcggcgggggagggtacggaggcggaggtcgcggaggaggcgggcctggtaagtgataactgaagtttaccgtttgctgatacaaacaatcatggcgaacttattcttaggtggcagacgtttggacgacgcaggctcaaaattaagacctgtcgactgggcgaggcaaaatctgaacccaatcaagaagagtctataccacgaacatgcttcaatttcgcgtcgaaaccaagccgagattgacatgtggcttactgaaaatgagtgtaccctacagggcaccaatattccgcgtccaattttccatttcaacgagagcggatttccaggtttggaattgcattttctagctttgcctaaccttcattcgctttaagacccgattgtccatcttctttctgtgcattatcacattccgactaccatccaaagcatttcgtggcccgtcgcactcagtggacgcgatttgatctcaattgctaagacaggctcaggcaaaacccttggatttattctacctgccatcgttcacactatggcccagcctccacgtcgaccaaatgatgggcctggagtgcttgtgctgcttcctactcgcgaattggctgtgcaggtggagcaagtggcacgagaatactgcaagctgatgaaattggatgtgacttgttgttacggtggagcaccgaaagcaggacaggcaaacgatttgcgaagaggttttccgaaaaagccatgacaacacccatcgttatctagtttaggcgtcgatatttgcgttgccactccggggcgcattctcgactttatggaggccaataccaccaatatgcgtcgctgcacttttttggttttggacgaagctgaccgtatgctcgatatgggatttgaacctcaaattcgcaagattgttggccaaattcgggttcgtaattttcaatacggcatacaaattgacgttactgaggagtttttagccggatcgtcagtctctgatgttctcggccacttggccaaaggaggtgcgctctctcgctgccgatttccaagtgaatccggtccatttgaacgtcggttcgttagagttggcggccaaccacaacatccaacaacacgtggaagtgattgacgagtactccaaacagggccgtctcttcgagttgcttgatcacattatgcgccaggtaaatggggttaatggttgttgatcggtgaggagacggcgcttttctcttttcttctcactcctaccattggtgagagggtttagcaaagcgcaaaaacaaaagggccaaattgcaaccgttgttagctttttttctgaagctttcacgtacttatttctggccacattctttttatgcaaatggcattttcttaattcctgatgtttagcgcgaatgcaaaacgctgatttttgttgaaacgaagcgtaaagccgatgacataacgcggaatatgcgacgcgatggttggccggcgttatgtatccacggggacaaagaacagaaagagcgcgaatgggtgctcagcggttcggattttttaattggtttatagaaactaaatgtgatttattattgttaactctttaaaaatatgaaagaattaaaaagaatttttgcctaattcagaattcaaagaaagcaaaacgcccattttgcttgcaactgatgtggcggctcgtggcttgggtattattttacggtgtataaaacgaaaattccctttgtaattttatatagtttgga

SEQ ID NO: 61222 - DNA, 1152 bp, Heterodera glycines
atggtgatgtgcctgctctcctacggtgccggccttgacgagcaggcggacagtggcaaaatgacggcactgcattttgcggtgtccaagcgcaacctgcagatcacacgcttgctgctctgcctgggcgccgacccgaacgtggccaatgcgcacggggacacgccacggcatttggccgccaaattgaacgagtaattattatttttttttggagttatttattcattttggggctacaatgttcattatttttcacccataattggggacgcgacttttgagcttgccctttcgccccgttgaaaaattaaacagttctataaattattcaaatggcaccaattaaaaatttcacctaatcaatgtcataactctctttttatccgcttaaacttgtcaatttttttagggttgatttgctgaaaagtctgatcatatgcgatgctcggcgttgtccactcaccaaggtacaaaaactataaattttgtaccatttaattttaaaaaaaaatacaaaaattcgtttttttccccgtattttaggttggctgtgtgtccggttgtgtcaacgagaagcagttgaacaagctgaagaggccgtccaccagttccatgccatcatccgccaccggcaacaccacttcaacatcgacgagtgcatcgtcaacggcgtcgttgtcgtcaagcagtagttcaacaacattggcagcgtcggccgcagctgctgctgctacggcaccgccaacccaaccagcaaactcctcacaaccaacggctggagcatcaacaacggcaccaaagccggccagctacacgtcggtgatggtggaggattttgagaaccgggcatttgacaaggaacagttccgcttcaacaaactgttggacattcagcacaatgtaaaaatcagtgtcattattttgcatgttattattattttttgctttcctatatgccgggagcagtttaaccttgtgatttttttttcaattttttaggaaattttcaaaaaacttattgttcgaaagtttttataagaaagtttaaagaaaaaagtagaaagaattttcaagcgttttttttaattatcataaattacttaaaaaaatttatccccgtttgaaaaatttttcatgaagtttttttta

SEQ ID NO: 61223 - DNA, 369 bp, Heterodera glycines
atgagttatcagcaaagggaacagggaggttatgatcgccgaagaggaggcggtggcggtgattatggcaacagaaggggtaaatttatattattatttttatattatttatttgaaatgtaaacataagatgatcgcaatggaggtggtagctacgggcgaaattctggagggtatggccgagacggaggagggggacagggaagggatggcggaggaggatatggacgggaaggtggaggagggtatggccgtgatggtggaggaggctatggacggggcggtggcggtggttatggccgtgatggtggaggaggtggcggaggatacggacgagacaggggaggcggcggcggtggaggtttttga

SEQ ID NO: 61224 - DNA, 2017 bp, Heterodera glycines
  unsure (1)..(2017): unsure at all n locations
tcctccacctccacccttcaaaaacctccaccgccgccgcctcccctgtctcgtccgtatcctccgccacctcctccaccatcacggccataaccaccgccaccgccccgtccatagcctcctccaccatcacggccataccctcctccaccttcccgtccatatcctcctccgccatcccttccctgtccccctcctccgtctcggccataccctccagaatttcgcccgtagctaccacctccattgcgatcatcttatgtttacatttcaaataaataatataaaaataataatataaatttaccccttctgttgccataatcaccgccaccgcctcctcttcggcgatcataacctccctgttccctttgctgataactcattttaaaattcaaaatttttaactaaataagtaaaaaaatttaaaaaaacgcggaagtgcattaagcattatgcactaaaatttagatctaagaaatgaacaaatccaaattacgaatatgcaaatggttgaaaaagaaaacagattaataatttgtttgggtgaaaggaaggaaaatggtcaaaatggggaagcaaaaatttgcctccccaaaaaaaaaaagaaacaaaaccctaaagggaaagggcgaatttggaaaggggaaaaagggaaaaaaaaaaaataaaaattgggggggggggggccccccttttgtttttttttttttttttaggcccaaaacccaaaacccacaaaaaaacaaccccggaaagggggattttttcccccggttttggataaaaaagggggggggggcttttgagaagggggggtaaaaaaaaaaaaaaaaaaggggggggaaaaacaaaaagaagaaaaactctttttttttaaaaaaaaaaaaaaaaatattttttgttttttttaaaaaaaaaaaaaaaaaaaaaaaaaaaaaaaaaaaaaaaaaaaaaaaaaaaaaaaaaaaaagggggggggggggggggggaaaaaaaaaaaaaaaaaaaaattttttttttttttaaaaactttttttaaaaaaaaaaaaaaatttttttttaaaaaaaaaaaaaaaagttttttttttaaaataaaaaaaaaaaaaattattttttttcggcccccggtttttaacccccttttttattaaaaaaaaaaaaaaaaaccctttttttttttttttttgaaaaaaaaattccttttcttgttttttttttttttttccccccggggaaattttttcttttttttaaaaaaaaacggggggggggtttttttgggcgggaaaaaacccccccaaaaaaagtttccgggaggggcccaaaaaaaaaacccgggaaaaggcccccgaaagggcccccccccccaaaaagccccgggaaggggcccaaaaacaaattccccttcaaaggacccctgcaggggggccccccccacccaaagcccccggcagggggccccaaagcaaaagtcccggagaaggtcccacaaatataaatatatacccaaatttttatcatattatacctgataaattgatcaaattaaaaagactttcgttcagttcggtaaacgacgtgaccatcttattttgattagtgtttatttgaatgactattcataaattaacagggtttctacatatagccaaactcaaacccgacnagagttaanncnnggaaaattttaannttgtacagttttaaatggtttttacacccaaaaagtgacaaaattaaatattttatttattttttttattaattatttgattaattttgtcggtcctttgtccgtgtgtcttttgtctttgtgagtcatctgtccgtaggtcctttgagagtgcacttctaattcaagggtgggacctattcagtaaatactttaaatgaaattcgaaaaattaaaattaaatcaaaaaaaaatattttaaattttttggaacctttcaaaaagctatcgccatattgtaagaccaaaagcattcgataaaaattttcccgncgttgatgg

SEQ ID NO: 61225 - DNA, 826 bp, Heterodera glycines
tgcttcatctcgtgtcaatttcatcattgtcatttttcgtttgagtgactccgttgtgccgttcgatttggtcaatgaattgactggggagcaattgacgttgaaaagtgccaataacgatggtgcttttttgctgattcgttgtccaatttcccgagatgagaaaaatggataaattgggagaaggaagcgattgagttgaagtttagggaccatttgaacacaattcacattgcaattaatgaggaaggaatcggagacgagtcagtaaattaacacaattaattatgatttataaatttccattctttcgttttagtctaatcgatggcacttccgaccaaagtgatcatcagcgcaaatgtattgttgagaagtgattgatcctttgaattattaataggaaaaaagttttagtttattttgtttccttaatatttgtggtattttaaatgatttctttgaattacatgtttttcttgtatacatatgtttatttaataattctctgccgccactatttgcaaatttggcaatggtgtgaaattgtggtcccgacggaaaaaaatactaaaatttcaaaaagcattttttctggggctaaagtgcgctgatcacaaacctgaactcagattttgaaaagcattgattttgtctatgatttttccatcaagtactagattttttgaaaatttttaatcttctttaagtattttctttccaatgagtttagggtaaaaaatgtgctgatcacgaatctgaagtcagatttgcaaaatccatcattttgtctatgattttccagcaattagcataaaaaaataaa

SEQ ID NO: 61226 - DNA, 504 bp, Heterodera glycines
atgccacatgtccacatctgcctaattctggactgggaggcaatgcgcgtcggaggaaagactcgaacaccagaggactacatcgacgagtacatctgtgctgagattccaccaaaacctgatgaaagttcaagggacgagcatcaacaacggaatctttacacaaccgtgacaacaaaaaacatccacacttgtgctcaaaatcgttgcctggtagatggaaaatgcatcaaacattttcctgtaaatttctttattgaaaaacaaataaaaaaaagcaattaaaatatagaagccgtatgagtatgacaatgtctactcggagaatgcttatccgcgctatcgtcgacgtcctcctcctccaagtgccgaagaagctcaacaaaatccagagcaatttggccgagtgttcgagtataaagaccgctatggaaaactgattaagaaggacaatgcacatgtcgtcgcattcaacccatttttgtccgccaaatacaaatctca

SEQ ID NO: 61227 - DNA, 960 bp, Heterodera glycines
atgaaaaatgatctttttttctttttgcttaccattcctgttttgacctggagctgttatggtaatttagtggtaattattaattatgaacatgaatatttaaaataaatttaaagcgttttaattacttaaattaaacaaattcaacaaggtttgatctgcaagagcggctactcattcattcgtaatgactatggattcagggaccaaattggaaatagaacgtgcccagatacggtcgattactgtgcagctataatctgtaccaaaggtcgaattatttattttacaattaaaacttaactttgcctaacatttttggattggttttttattattgtaacaaatagcatacaatttatgctcgggagttcattatgagtgctgcaaaaaaattcggaaattttgggagtgctttatgaaattttcaagcctaaaacaaacaaaatgaaaaaaaaattcaaaatccttgcgatggcttctttcgctaatgaatatttttctaatgacttctctcgtgaattaatcactcattggctggaaaaaactatcgttaattttatcaaaagtcttaccgaattttggtataattatttcagccggtcttaacggtttgtcggcaattttttgggcttgtgcctcaatggatatgaaagaaagcaaagaaaaatggttcgaagattattatgagaaaaatttgagtgtgccaaatgtgcattgccatgccgaatttggggaaaaggacaaagactttggcaatacgcacttcaaacgtccgcgcgtgcccgatgggctgttgtgcttcgcgggggaggagttcattaaattggatttttgtgaggacgatgaccatttttgttacttggccaaatgcaccaaaggttggtgttattaaatagattataagaaaaagtttttaaatcgaattaataagttttttttggaattttagtgaataaa

SEQ ID NO: 61228 - DNA, 263 bp, Heterodera glycines
atgccatcatttgagccatgtacaacagtggaaacgcacaaggaattgttcgggattgtactgatgtaagcaaaatcgcgccctttgccctggataaattcatccgtgtcgtactctctttcagtacagccccattccgtgatgatttcagattgatggctatccttattgactgaaagtcggatcaaaatttagattggacgacaaatattccgaaccgtaaggatttccatgaaaaattgtcaaaactaattctacgaaaa

SEQ ID NO: 61229 - DNA, 766 bp, Heterodera glycines
atgaaaattaacgaaatcattatgtcgaaaattggtattattatttaaatgttaccgagagtctcgttctcgagtatcactcgaaaaaagtctcggcttttttgggtctaggtctcgatgtttcgttctcagtctcgggtctcggggccgagtctcggtcttgagcatcactaatgtaatatataatgaatttattaaaaaataatcaattattttggttttgaagctgcaaataaatcattcgatttggaatttggcttgttgactaaatggggctgcaccgacaaacaatccaatgaaagtcctctgactgatcccaaagaattgatcgaccaaaatgatacaatcaaaatcatggaccatttttgcgcgcacaattatagtgaagcggatgtgtcaatgtccaacgctgcaatggctgtgccaattccaggcaaattaatttaaacaaaaatttgtttataattatgaattgttttagccaaagagtgcaaaaaggcatacttttcaaagatgcttggtcataatgaaagcagcgacaacaaatgtgaccaatttaagcacttttgctacatgttgaattgttccacaggcaaatgacttttaaacgcacttttttttattttaattaattggagtccatcttggactaaatttttcaccccctcccccctcgggtgaattctaattcagggagaggattgaattcaagaaaaactttctctatttttatggtaaattaggcacaaatttctctataaataaa

SEQ ID NO: 61230 - DNA, 470 bp, Heterodera glycines
atggccacctttgcaccaatgggtggtaattgcttaaaatggcaaaaaaaacttccaacatttcttaacaaatttgttaaaattgtacaggcattgaagattggcacttccttgttaaggtttgacatgtctttgttctttttgccaacaaaataattgcaggtggacttgaaggacgggctttcgagccaattgttccgttttttaaaatcatcataaaatgattccttcttcacactgcatccccactctgttttgaatccgacatagccttgatatgacgaagaaactaaaattttgtaggaaaaacattagcataagtgctgcaagcttgtaatattaaaaaaaaaatttttaatcatgtattaattattaaaatacattattattgtaaaatcctgcaaattttattaacttaaattaccatttttttgaaaagtaaagatcattattttgtaccaaatttttga

SEQ ID NO: 61231 - DNA, 1481 bp, Heterodera glycines
atggtccacggctctcgacattttgcccccgaggggttggagagcaaccctaatttaatcatttgacaaaattgagccattaattttaaaatgaatttttatttaattttagaaattgtcatcctggaaaaattatttgtgttctactggaagaggaaggagatgatgaatgttgttccccaaactatgaaacaatatgttaccaaaactacaattttgtaagattttaattagtaggaatggaaaattgagctcaatacacttttctcgatcataaaaatttacacgaccattaagaacttgacaatttaactctttgtttcatttaaatgatccaaattaaaattcatttggctttaaaaattaggatcaattaattttaaaacccttatatggctataagtttttgaatttatttctgtttaatttaaaacattgctaaattattattttaatttttgtaatccctcataagtagggctgtcaattttatgtatgtaaatacatatttgttaaagaattctccatgctctaaatagtaggaagaacactttcttttttgtgttttctaacaaaagttgggacttttatttacatttttttacattttttttttacaaattttgggattttcttacatatttggtattattttggattttttcatatattattttttttacatattttgaggattttttacgaaatttttgcaaatccgttcggtttgtacatattttcaattttttttacatattttacaatttgggatttttttgtacatatttcgtgatttttcttacatatttatgtacatatttttactactttttatatatttttgacagcccccctactgataagtaagtgttgaattttataaaaaatttaaatttctaataatcgcattatgcactattttgaattttgtcgattttttccaatttcatatattttttcaatttttaggtgcatactatactttctgaccgtttcccggaatacaaattggtacaatattgtattcaataaaaaaaatagtgatttgtcattcttacaattagataaataaatttaaattaatttttgttttgtttactataaaaaatttaaaacataaacatatttagaaatatgaattgtacaaaaattccgaaaaaatggtgccacatgtggaaggtgcattcaaaattgtggatgaacaaagcaagaatagagaagtgaaggaaggatgcaatccggaacgagactgcaagcagtgcggcggtctctattcatgcattccaattccggaagtatggatgacgtattccggctgctgtgggcctgggtacgaaatgaaatgttgtgttacggtacggtttatcagttgcaatactgtagtttagttagtctgatagaaatcactcaaatttatggtcaatatctcaaatacagtaaaggtttaaatttttgctaaaaaacaaaatacaaaaaataaa

SEQ ID NO: 61232 - DNA, 290 bp, Heterodera glycines
atgcttgtaaaatgtaagcctttcattttcggcattctttttgcttgtttgattcccagcattatcaaaactgaaagtgaatatgtgaaagctgcattcaaatttaaaaatgatgatgacggcaagttatttgaaggagcagaattgggtgcttcgattggtggcgcaattggttcattagcaggacctgttggcactttttttggagttgtgattggaattgctgcgggggctgttgatgcagcagtgcaaagcgataaacgctacgaaagttgccttgcaaaattgaa

SEQ ID NO: 61233 - DNA, 981 bp, Heterodera glycines
atgatttcaattgtgtgtgataatgcggagacgggcagagaatgcattgcttatctgcgcgaacagcactatccgcccgagacattccttccgctttctgagcttcgcatggaacagatcaaagagcatttgcgcgacattcgcgaccccccgggtgtcaaattggtgtttgacgtcattaatgtccttggcaacgcgcaacacgtgcgaaaggcattgcaagtgagtttcattcttttaatccaacaatattacataatgaaatatcttaatgaaagattaatgttgtgatttggctttagtttgtttgcggaaattcacttgtctgtgaaacgccagaccacgctcgtcagcttgcttacggaaccgatggtcgttcagaacgatttcgagcagttgctttggacgggactcaatttcaggtgctgactttttcaaaatttcttttattttgtattttagccaaatggtgttataagcggcggaggtgccgacttaaaggcaaaagcgaaaaaatgggatgaaaatgcaatcagaaagttgaaagaccgtcgaacggcgttgcaggaagaattgcaaaaactgcaccgaaccgggaaaagggagttggatgttgagatgaaacgggaacagatcacttcactggaggcacgtctacgcttcacacagcaagaattgaagaagagcgaaaatgaaacgctgcgccggttggagcaggacgcggaggtcgaaagtgcggagccggagacaatcgaagtaattaaagccaaattttacaatttaagggaaaagcagcatcaataaacattcatttattataaatatttaacattaaaaatttagacgcgaattgaaagccgtcgaattgaaattgaggagcgtaaaatcgaaatcgaacgcttggaacaaaacaagaatgcaattgccgacgaaatctttacagaattctgtgcaaaaataggcatcaaacacattcggtag

SEQ ID NO: 61234 - DNA, 864 bp, Heterodera glycines
atggatgatgatattgaatatggcaccgagcagaaaatattgaggccgaaccctcacaaagaaagggtaaacaaaaatatatacatagtaagtgctccaaaaaagtcttaattcaaagaggcaaaatttggaatattaagttttctagctgaaggataaaataaattctctttaatttacttttttctatagctcttttcatgctctatcagatgctgctttttcttaaaaaataaaaaaagcgtttcttagggttacatttttaatttttattgctttaaaaactgtttagtagatggaaaaataatgaaaatcaattttcatgtgtatattcgttgcttagctaataaatgagtagctaaaaatcaataaattggctaaacccactatcttattgatcattttatacaatttattggcactaaaaaatttgttttagaaaaacgaaaaattttttccaataaaatcattattttgaaaaaatgatttattataattaacatttttttaataatataatttataaatttttgcatctaatttcaatttcaatgccactttctaaactaacagaattttaccagaaaaatctttgttcatttttataaattagcaaatttagataatttttgactttgagtacttttctcacctattacaatcacttattgtgaaatttaattcttttttagataatgcagaagttattctttccactagtgaatctttataaggataattgcattaaactgatgcacgaaaagctgaaaaaccaacaattggacacttgggaacaactgcaaaatgccattttgaaagaaaaggaagcgaggtaaaaaatgaagaaaaattattattattaaa

SEQ ID NO: 61235 - DNA, 778 bp, Heterodera glycines
atgcacacgttttgcgctcgagctatttatcatcgggcttgtcaatccaaagcgaaacaaaaaagatgctgttttgaacgaataaagggcataggttattttgaagaagtgtcaaagaacatgcagcaataagcctgcaaaatctaataagtggaaaatacatgagtatagaatttattttcagaaagtgtcaacagacttttggaaaaatatatttgcaatttatcaacaattttgagaagtgagttagaaatgataaacttcacgattcaaaccaattttcggtgctctaattaaccgcgataaaaacatccgaatcaattaaatagcttctgagataataaggtttatcataaaatttcatttaaaaataaaccctcaattattggtatgaacgatactttccaaacatgcacgcgttttgcgctcgagctatttatcatcgggcttgtcaatccaaagcgaaacaacaaagatgctgttttgaacgaataaagggcataggttattttgaagaagtgtcaaaaaacatgcagcaataagcctgcaaaatctaataagtggaaaatacatgagtatagaatttattttcagaaagtgtcaacagacttttggaaaaatatatttgcaatttatcaacaattttgagaagtgagttagaaatgataaacttcacgattcaaaccaatttttggtgctctaattaaccgcgataaaacattcgaatcattaaatagcttctgagataataaggtttatcataaaatttcttttaaaa

SEQ ID NO: 61236 - DNA, 593 bp, Heterodera glycines
atgcgcacccgtccgatctggcaagttaagcaacgattgctgactagccaaaaggttcggtgccgtgatgaaacgaaccagcactgcttaccccgcggcacccggcacggtcccccgaaggaatggatttaattaaattctctccttcggggatttttttccattaggtcgtccgttagcgttcgattgctctagtcaatttttcaaaatttttgttgaaatatttgtcgtgctctgaagggcgtgggaggggggggggggcgaaggcccaccacgaggccgcgaagaggccgagtgagtaccttcggtgcaggaaaattattaaattttaaaattttttaattgctttttaaatatgccaaaaaatgtaggcttaacttttttagtgaaaattcgatcactcatattttttgctaattgagcagaagcgtaccaaactttgcagggatactccccggtaaaggactaacttacactgaaatgagcgccgagctagctggctcaaaaaaatttttcgaaaatctgagtctttcgtttttatttatttgcaaaattaattcataaatattttaaccggttcagaattcaataaa

SEQ ID NO: 61237 - DNA, 3494 bp, Heterodera glycines
atggaaaatcagagcaacgcatcggtccatagcagatcagagcgcgaagaaaatggagcggacgcagagagaaatgcggaaaacggcggaaatggaggtttggatggtggcaatgagcatgcaccgattttgggacagaatttgaatcgaggtgctgatccgcgtcacccacagccgggacgtcaccgatacaatctccgaccccgccaaaacaatttgttttatggcctcaatcccaatgagtctgccgacagttttcagccacacggcgaaaaccgccaaccaaatcgaagacagcaagcacccattcaaaatccgggttttttcgaaaatgttgaaatgggaaatcccctttttgctcagaaccaaatcgtagaacaagtcgttgagaattcacattccggcattagaaatgaaatacagcatccaattggactcgaaattgagcggtacggacgcccgatcgctaattcctctccaatcaccagaatgggaagttcgcataacgagccacacaattcttttgaaaacgtggagtttgaagagataaggcaatttcgggccaggcaactttacgaaaatccacgcggatttcgtgaacaaaattttgtcggggaacaacgagaaaggatgaatgaatttgagcaaaaccatgctccggtcccaaattttgaaagaagaaatgtatttgttggtgatccgcacggaaatcagctaatttttgggaattttggaaggaacatggaacggaattttggacattttgaaaattttcccggactcgcacgaggcggaaaccaaaatttgaatgttgggggaccaagaatggaacaaattcgagacccacacagagaaagaaatcagtacgaggaacggcaattcatgccaattcccgaaccaaatatgaggcaaattgatggacaaaaccaaaatttggcttttcgacaagtgcagagccaaaattttcaagaaaacatggcgagagtgatgccatacaccgaaggaattcctgatattattcttgaacttcacaaagtcacactttcaaatcagtacgcaaatgtccttagagaaattcctactctttttggcactgaagggagggacaaaatcaacgattttttcaccactcttgaattgtgtacaggagattggagacccgagaaaaagttggaaattttgagagcgaaattaaaggggaaggcatccaaagcattgaatttgtccctacgaaaatttggtcaccaagtgccattcgaagtcattaaaagggagattaagaccattttacgggaaacggattataaagaggcaagcgcatttacggaattgacgcagtttggaaagcagaaagtcggtgaggatattgtgaaatttggtgagcggattcagcagctggtcagctgcgcgtactatgggatcgaagaagaacagttggacgaaatttcgaaaaaatttttcatttcgaatgttagtgatcccaatatgtcacgttttttggaatgccaaaccaaacaatcccagacattcgacgaattgttgatggtggcaaaccgattgagtttaattgagtcaaaacgaaacgtaaaccaatccctgaaccaaaattatagagaaaacaattcacagttttctcatccgcgaaatcagttcaaccaaaaccgttttttccaaaaccaaagttttgaaccaaggcctcaaaataatcaagttagattttttgctgatcgaaatttcacccgacaaaatttcacggataggcagcagccaaacacaaatgagaacagaaactccggctggaaccgaggcggctaccaaaattcaaatttccaaaaccggcaaaatttcccaaatactgataaccgaacccaaaatgtgccgaatccacagcagattcaatcatcttctggcacacgaaccaacacgaatacgattacagtcacggaaaagaaccaaaacgagcagaacgaattggttttttgcaataatatttctcaaaaagaagttcaggattttgaaattttttttaattgcctaactactaaagcatacgattttccatctaaaaatcccgcccaaccaaaaacatatgaatgtcttaaattggtaatgaaagtggaaggtcaaaatgcgaaaactttgggagactctggtgccgaaacgaatattgtcaaccccgaatttctttataatttggcgaaaaaattgaaattggatttgataaattggggttttaatccgaataaagggctaacgagaattccatttgatgttgcttcgttttctggttcaaggatttccattataggcgtaataaatatcccaatcgaaacatctggttttaaaacaaatgttccgtgtttgatttcaaaagaaagatttaattttgatttggttttgggcactggtgcgatggaaacactcggattttaccttgcaaactcatttacaaatgaaataacttatttcacttcaaaagagcaacaagaaatgtcaattcctctcataaattctgttaaagtcgcatcttttacggtcataccccctatgtcctcgtgttttgtcgattctagaattgaaaaccattctaatctacccaaaaattcccattttcttatagaaaactcggaaaaatcaattttattaaaaatgcaaagcgacgaagaccttatggactacgacgaaacagacaaagtcgaaatggaacggctgagaaaattggacaaagtggcggagcaaaaggaattggaaaaactgggaataattgtgccggagaccaacattggacaaaaatggaatggaaaaagagggcacagtgaaccgcccattcattgcactgatgcgaaaatcccagtgcatgaacttccgattatcgaaatggcgttggcaacgtcggagccaggttcatttaaaattttggttcataacaaaaatttaacgccaatattcctcaaaagtggcattgaaattgcaaaagcagaaattgttgaagaaatttatgacccccatatcgaacttcttcctgaaaggttctggaaatcccaaagattcattagaaactttggtgttcagaaaaatggagagcgaatttcgcaacttttgtctgtcattaaaccaaattttgggcctttaaataatgaagaaaaaagtctgttggaggaaattttggttgaattttctgatgttctagcactcgaagaatccgaattaactcaaacaaacttaaccgaacataaaatcgatactggaaacacacaagcaattaaaataccaccgcgccctatgccttttggagttagagcaaaagttaacgaaatgttggacgattatctgaaccgtggcataataagaccctcaaatagcccatgggcatccccgattgttttggcggtcaaaaaggacaaatcgataaggctgtgtatcgattatcggaaactgaattcggtcacaaaaagagactcgtatccccttccaaacattgacggaattttaat

SEQ ID NO: 61238 - DNA, 118 bp, Heterodera glycines
atgctttttatattggttcttctattaattgaaaaattgttattagcaaatggagctcctctttcgacaaaaaatgatggcatcgaagcaaaacaaaataaattcaaagaaatgacag

SEQ ID NO: 61239 - DNA, 1571 bp, Heterodera glycines
atgagtttgttgagcagcacaacaaagtacaaagtgagcattggtgagattcaacgtcgtatcaacccgcctgaatgtttgaatgcatcattaattggcggtattttgagaaagtcagtaattttgggggtgacaaattttgtgaatataataccaccttctaaatttagtgtaagacaaatttagtaaataattgtatttttagagaaaatttaattaattttgtaaaaatttattaaaaatttttatattatcaagaaatgaaaatatttttgtgctaaataataaaatcccacatcataaaaaagaaaattatagaatgtgagtaaatattttggaatttcgttttactcaaataaaagcccccccccacccctcaattagaagctccccccctatatgccaaccttcgaggggggttgaaaaatagaaaatactctgaggcttagtttcagtaaattttgttgttcatctttttttttttggtttaatgagataaaacctttaaaaaaaactaaataattgatcattattttattcattttaattaattgccattaaattttttccctaaaattagggctaaatccaaggacggcggcaaagcattgagggaatcgttgaagcgaattggcctttcattgccggccggacgccgaaagtcggcttgtgtaaccgcattcactgcattagttgaggaagaagccctccatatggtcggcattaattaaaatttgtgccattaaaaaacaagcatttttaattttcaaatttatttgtccaaatcaattttaaaaaatgccaaattttatatgatttattaaaatgacaataaaatttttaatttaagcttttttaattttatagacattaaaaggagaatatttttttacgccatttaaattaatttctttagcagtttattaatttcaattattttttaaataattttattattttatttaaaatttgaatttactaatttttgattacatagtatttttgacactttaaatttttaacatttaaggccaatgattttaatgctgttctccaacacgatttcccggccaaggacatcggttttttcctcaatgcgcaattcctcagatatgttggccaatcgccgatggattccgaattggtggccagacgtcgtacaattttaaattgttcaaggtttttattgcaaaatccgaaccttatgattagtggatttagctgtccttggctttcataaatacatacatctcccgtatttaaaaaggctaatttgtaaggaatattatcagaggttttgaaattgagtttttattatttgtactaatttcttcatctcttattaatgcgttacccatattttcgtaaaaaaaataaataaagaaattacaaaaattgcattttttaggatttttatcaaggagatcaccagccttttggctgcggaccgaagcccaatttgcgatcgtcgacctgaattgatgttggacccgagcatacaaaagcaactcacgcatttttcaatggcaatttttatgggttttttgtaaaatttttgaatcaaaatctta

SEQ ID NO: 61240 - DNA, 555 bp, Heterodera glycines
gttggcatttcaaccaacggttggaccttggttctttccgtttctcatttctcctattatttgtcacttccgactcagtttggaaaactgctgatcaacagctggctaatggttcaattctttttagtgtttgggttatgtgttcaattcatttatcgttttttggtgctgaacaggtaaaagcgcataagtctttcttttgacctacgggagccatttaccattaattaatgtcattgcgtttttttatatttgctaagattcatctttatattaatataaatatttaatttttctcttaaatgagattttttaataattttatgatgcttaattattttatttaggggcttaaaaataacaatgaaaaaatatgttgcaatgctttcatttgcattttccatcgctattttgacttggacatatgattttattgtttcaaatgaccatataaatctttccttgcttaaagccgaagaaatatttcaaattgaacaacttttgggtggcaatctcaacgactttgtgacatattgtcaacgaaatgtgagctga

SEQ ID NO: 61241 - DNA, 1121 bp, Heterodera glycines
atggctgttctacgccctgttgatgctgttgttgctcttttccggctacacattgtacggcgatcgacgccttcgtttggccggcaacaaaacgcaacagcaacaatcggtggaggaaattgtgccacaaatccatggaaaaccggaccgggagcagttgttgaaactgaaacgtaaggcaaaaaattaagggtatagaaaatgtttttaactgctatccttaaaagttgcctatttccctaaaatttacctaatttatcccccccccctctctcctcacctcccggtttaatggcaaaacgtataaaaacgcatagcatgtttgtttaaccagttactaccaagccacaaaaatttgaaaatgaaatttctgggactttcaccccctcctccctattccatccccggcaaaaaaacaatcaaaggggcaaacaagaaattttgtagaaaatcagcggttctttccatttatcccatatttgtcctttagcatccgatgaacttcatcagacgcatttggcccagcccggcacaccaaaaaaggacattgtgatggaccaaccggagctccatttgacgcaatcgcttcatccttcaccgccgccgccgccgcgtggcgaagtgccaattgtcgacgaaatatcggcacaaccgcaattcatctacaacacgacaacaccgtacagcttctacgaacatttgaccagagctggccaatccgtctgggaattgatcggtataacattttaatgttttcccaaaaaaaaaattttttttaataattttttctcgacttataatatttttcttttttcagttgacacatttattggcacatacgaattgttgaagcgcatttttttcgtcatcggtatcggtatttgtcattgtttattaggtcaaacaacaaaaacaaaaaaaattggtgtgtctcaaatttgtgactaaaattttacaatttttctttgggattgttcaatactcataaagggatttaatttaatttcatcatttccagtcagtatgccgatcaaatttgcaaaaatgttcgcccattttatgagggcggtggtttcttctgtttggctttcgctcaaatggttggcggaacaaattggtga

SEQ ID NO: 61242 - DNA, 297 bp, Heterodera glycines
atggaacctgttacggtatccaaatccaatgctgaacctgtcactgtatcgaaatccaaagctgaacctgttacggtatcgaaatccaaagctgaacctgttacggtatcgaaatccaaagctgaacaagaacggtatcgaaatccaaagctgaacctgttacggtatcgaaatccaaagctgaacctgttacggtatcgaaatccaaagctgagcaagaaactgtatcgaaatccaaagcggaacgatagtggaggcggtcgaacaattgaatccaccttctccaatgaaaaatga

SEQ ID NO: 61243 - DNA, 186 bp, Heterodera glycines
atgggcactgataaacaaaacgaaaagaaagccatcgatgtgcaaaatgacaaagctagtactgataaacagattcacaaagttggcacagatagacaaaatgacaaaatttctgatggaaaagatgccaaggttgacactgatacacaaagtgccaaatcgggaattaatggactaaatgccaag

SEQ ID NO: 61244 - DNA, 500 bp, Heterodera glycines
atgagggatcgtaagttttccagtgctttttcttttttacagtacacttttaccgtatttttggttatttactgcttacagtatcattcgactgtaatttgccattactattatgacaaagaaataattttccatattttcagacatcgcctcttacttccgtctcgacaactcttttggcttgacagaagtccaatttcgcggggaacttactccggagattttcgaaattcaatttgacgccatttttgcgactattgaccgcaacaatctccaggacatttcctgggcacaacaatgtaaaaaaatgccaattaatgagcgataatgtggataattaagtcatccaaacgcttgccaatatctttgagggctatgtggacgaatatttggcggcaaatcagtagcaaatttaagatggtttgatgtgaccttgttgacatgaaaatgctaaaaaacgatttttttaaaattttcagtgttgttattttaaaattaaa

SEQ ID NO: 61245 - DNA, 1294 bp, Heterodera glycines
attttccttatcttccccaattaccgtcgcaatgtttgctttcgcattttgttcacaaatggcgtcaccgactgtcttcagttggccccgttactcatcttcgccgtgcttaatctgatcaccgatcaaattcccatttggttccaaatggttgcttttcattttaattttgtttaatttcaatttttttttaatttggcaatttgttcttcagtttggcagcagcattgtgctcaatgcgtggaaccttctcgtcatgcagcactttttgctggccatcaaccgacttattgtgattttgcgtgcccgataccttggctcgaaattcattccggacgaggacaccgaagcgatgtgtttcaatgtgaggggcattttgaaaaaggcattcaatcacatgatcggattccatcccatttttttgtgtcttgtcactctgtactgatcagtagggctgtgaattttagtgactaaaaacttgcacaaatcgccaagcggaattttctaacacagctcattgttttcgaaagagtttaaaattttgcatgaaaatactttggtataaggcctagcatcttgccaaattctagaattttttatgcactcagagatttttaaaaaaatccgctttttccagcctgaatgccaagtttgtggtcaagttttgaaaacaggtggttttttgtaaaaaagttttaacaatatgaaaaattctgaaattttgcagggtgttaggtctcatgccaaagtattttcatgcaaaatttcaagctattctgataactctgaaccgaattacaaaaatcaacttgagcaaaatttaaacttttattcactaaaattcacagccctactgatcagtccccctctgatcactttgctgatcgtactctgtcatcttttttccatcttctgatcgcactgctgatccttctttcagattgcgcatgtgttctgctggacggtgtacttcgtcattgtcggtctccaccaaaccaatttgatgggtgggcttttccattccggcaccagccaattcgtcttcgacattggaaagccgtggactcagacgatgcgcgaagtgttcaaatatttgaccatcgcaatgccaatcatttgcctggtcatttacattgtgatcattgcatttgccaaactggtaaatcgttttaatttaaatgcctttttaaaatttgttcagagtcgcgctggcacccgccgaggcgacgactttaccaaagccaaaacgacggcgccgcttttgaacgattacgaacagcgactgctcatccaa

SEQ ID NO: 61246 - DNA, 90 bp, Heterodera glycines
aattgttctcaattttgaatagcaattataatataaccaagtgcatttggcccattttgttaattaagatttttattatgtcattaaact

SEQ ID NO: 61247 - DNA, 1331 bp, Heterodera glycines
attaatttgcatatgacgtacaaaggatgtcaaaccggagatcattcctttcatcccgtcctttgaaagggctgtaaattcacttgaattggttggaattcaaaattcgtccttcaccgtttctttcgctctctcccgccacgcaaaccccgaaaatgcgcaaattcatccggttttatgttttgtcccccccccctcaccccttaaaaggctttgctattgccaatcacaagtcacttattcctcgtcttcaaattcaaattttaaatgggtttaaaagttgcggctgccacttgcgcggcgttgggcattttctgcactttgagttgtctaattggcgggccaatgctttaccaaaagatgagccaaatccgcacggaattagccgaagagatgctgctatttagagtaactttctattttaatggttgttcattaaaataactgccaatttgtcaggtccaatcggatgaaatttgggccacggtaatcgaagtgaatgggcaacggcgaatgcgacgagacgcagctgaaaattcgggtgaaaaaagcgccggagtggagggagaaaagaaagaaaaggcggccgaccaaaaggaaactgggagcacaacttctgctgaagggacagaccgaagtgccacgcaacaatcgccgatggccaagtgcaattgcgccgaacgaaaatgtcccgccgggccgaaaggcccccgcggggcacccggagagaaaggcgaagccggcgcagcaggacaggtcccccttgttaatcattgggcatggattcacgcgattatttttattttcaggatggggtcgctggtgtctctgctgaagacgttctggcacaagtccagcagctggaaaagtgtttccactgtccaatgggtcctccggggcccctgggtttgccgggtcggcctggcccacggggaatgcgcggagggaagggccaaccgggcggtaatgactcattttcgcattttcaccgtgttattaatgatcttttaagtacctggacgagatggacagcccggattccccggaggggtaaaaactgccgaccgattgttgcctcttccaagtatttgttttagttgggtcctcaaggaaaagcggggtccattgggacggtcggagaacagggaataccaggagaggacgcaaagctcgttcatggaaggcccggactgaagggaccgccgggcgcagtcggagaccaaggggacgcgggaccgcaggggccgcagggcggggtcggtgcgcaggcaagcagccgagtctgaagcttggatcaacattcattttaaggggccggaaggggaaaaggg

SEQ ID NO: 61248 - DNA, 353 bp, Heterodera glycines
atggacctccaaattgataaaaatgagtactccgggattatttctctaaaatacgacaattattgggtattttatttggttagccgacatttgcggaccgacatttgcggaccgacatttgcggaccgacttttgcggaccgacatttgcggaccgacttttgcggaccgacatttgcggaccgacatttgcggaccgacatttgcggaccgacatttgcggaccgacttttgcggaccgacatttgcggaccgacatttgcggaccgacttttgcggaccgacttttgcggaccactatttctcgatagaactgtctaaataaagaaaaaaataataagaaattttaataaa

SEQ ID NO: 61249 - DNA, 78 bp, Heterodera glycines
atgaacgattggctgctctcctcagctgcccttcatgaaaacgttgttcaaaacggcgacaccgctgaaaatggaacg

SEQ ID NO: 61250 - DNA, 583 bp, Heterodera glycines
atggccaccgaaacaatgagtgcccaaataaggactcaaaatgccgaaagtgcggcaatgttggacactgggctgcgatttgtaagacaaagcagggcccaattggccaaaaagcaagggaagccagtaaaccaggtcaacgctgaaagccaaaaagcatacgacattgggacactggtcaagtctgaagagatcaaatatatttcagtgccaccagcaatgataaccaaaaatgcttaatttgattgataatgaacaaagttatggttcaaaaagtcttccgacgacgtttcggccgacaacgttttagagtgcaccggttcagcgatgctcaccaacactcaaccaaccaaatgttcagcaattctcatcggtttattgcactttccaagcgacgccatcgaacacataaagaaaagcggagtcagagaaagagagaaaaattgttgaaagtaatgagaaaaaaagagtgaaagagaaagagagataagaaaaattgagagcgagcgagagtagaggaggaaaataatatttcctagttatttgcactaaattaacattaacgcacgataattataataaa

SEQ ID NO: 61251 - DNA, 477 bp, Heterodera glycines
atgtggccgaccgatggtcaatgcgtttgttgtctcgttatgatggtggtgcgggtgaaaattttgtacaacataatgccaaaaaaagggaaaatgggcttgaaatttttttacgaattttccaattcattcccttaaatttacttttttaaaaatatttttaaattgacattaacttttttttattgtcaatggaagagttttcacattttttggggcgggaaattaatttttgagttctaagcctttttcgactgaattttaagcaatatttaaatttaccaattttttaggtttatcaagctttaaccctggtttttaaggtgcttttagaatggggcctatgcttatcttaaatttatttttaattactttttaattttttctataaattttttaaaattattttttaaattgagtactttttaatgctaatgaaagaattttcacagtttttgagattttttgggactgtaa

SEQ ID NO: 61252 - DNA, 1468 bp, Heterodera glycines
atggtggcgttgtgcattactcctcaaattattgctgtggtgtttatggtgttgtttttgagtggattttttaacggtatctaaagaattttttgtaaaaaaaatatattttacaaatttgtcatattaatactcattgtaaaaagggggacatgaaattgtggagatttcaatgtcaacagtttcgtcggaacgaatctggcaaagttgggcgattttttcaattgcctttttgccgatagacccaccccccccccccttttcggcattttctccgctgaaattcaaattttgcctttaattaatttttaaaatttcaaaagaaaaagtgattattttaaggatttaaaaaaatttaattctgtgcaaaaaaaattttgttttttaaatttttttttgcctaaaattaaattggcattttttgctgcaaattttgccagctttgggaattaacaaacatgaaaatgtgatcattcatcgcttaactcaaattaggtggcgtaaattcgtcaagtggaaaaagtgtcttcctctcaaatgttcaacatccgccggcaaacattccgaagaattcaaatgccaatttgctgcagcaaattggcgtgactaattatcaacagcagcagcagaatgccaacaaaacattgaagggtaattaatgaaaataaattatattttttggtagctttcatttcagggaaaaactcgcttaaattttttattaaaattttcttattaaaaatttttttaaattttttgtgaaaaatttcgtttttaaaattttcaaagaaatttcggggtggaacaatacgggggcgcggaaaatgagcttctcctatgctcgagaacatttggtctcgatagggtaaaaaatttctcggaatatttgagtctcggtcttgaacttgggggtaagtgctcggcatttgtctggtgggttcaattcttcaaaattaaaaaatactcttctttcaaaaggttaagatgtttttgactgtctgacaaaattttgtttttactttaatatttcttaaaatttctcaaattaaaaaaatatatatatttccaatgaaagtttttttatgggaaattttgcataaaaatatatttttttcaaataaaacatgaccaaaaaccatttatgtatgacttgattcaatctaatttattaatatttttggtgatttttcatgaattcaaaaagaaatccgcgacatttattgtttttaattttaaaaaataataaaaaataaaaataaatttaccttttagagagtgatcgagaacaaaaaacaacgtaagcaaaaaaaaattgatactcatggccagcaggcccctaaccagaaaaaaaactttggaggcttttgcctctaaaatttttcccaatgtaatttttaatttttcaacttttcttggcccgcggaattaaactcgtatttttgaagatattttttcgcgaaatttgcta

SEQ ID NO: 61253 - DNA, 599 bp, Heterodera glycines
atggcgaggacaacgtatgcaaaaactgcaaaagctgcacactgttgtaacaaagtgttcacgagtccgtacgttcagtgtcaaattccgggatggcgtgccaaagggtacaaaggcaatgtgccggtcattatcggagtgccaaagaagcgtgacgttggtatgccaatttcaaaaagcaggatgtaaaaatgtcattttaaatgcctatgaattcttttttttcattcttcctctccacttttgtaacattaaatgggattctcattaaagggccatttccttttttagctcaatttgtattttccagcacatgcttaaattacctttcaaaacgggattctggttcacaatttaaaacaaatttatttgttttcgttgcaaagatatggaaatattggaaaaacatttagtaaaattaactaaaaattctaaaatatttattaatttaattttaaggctgttccaatagcaatccgtgcgcaggaaatggctacaaatgtgtggcctataagaagggggacgacaaacttctgctggagggtccgtatcgttttggcgccgacgttttggcgccagcacgagttttcggactataa

SEQ ID NO: 61254 - DNA, 411 bp, Heterodera glycines
atgccttttgccccatgctttagtttactgtatcttttgtcgagcaaggaacactgtccccgctacatcaaatggcttgacgaggaaaagcgttcgtctgtttcgttggggaccggacctgacgaaaaatggcagaaaaatattttttccccaaaaatttcaggcattttcaagctgatcgactccaaaatagtgagtgtatggaggatacacatatgcaaaaccattttagatttcttgaaataaatttttggtatattttcagcgatttttaggaaaaatttgaaaaaacagcattcatcataagatttcgaaaaacgttagtttggacgactggcaaaaaaattgctttcgaataatttgtacactaattgactaattagcgaacattctcactcatcgatgattaaa

SEQ ID NO: 61255 - DNA, 1297 bp, Heterodera glycines
atggctaatacaattttacaaacacttgcaattgaacatcaaaaacatttacaacttcaacaacaacagcaaatgcaacaggaagatgatggggaattcggtgcacaacagagaaaacgcaagaccagttgtcgggcgagtattgcattgaatatggagcagaaaatgcgactgatcggtgagtcaataaattttgtttaaattttcaaccgattgattttactgtattccattttactgttttgcctttgacattcaccatttttttcaatccttcactgattgtgataatgcctctatagttgagttatataaagattacatccacgaaaggccacaaatttgggactgcaatgttgagggattccgcagcaatcagtcgcgtcagtccgccttcaatgaggtcgccgtacttctttcggatgacattgaaacattttcgagtagggataattgaatttgggtaaaagaaaaaaacattttttagggatacaaatccaagaggaatggggcaaattgcgctactgtttcacgcgcattatgaagaaattgttggaggaaggaggcgggagaacggtcgacgaggggcagctgaacaccatttcatggccttattggaagcgaatggagtttttgctgcccggcgttcgggcacaactcgcgcaccaaccgacatcgacggagagtgaatgtggcaatcaagagcaggggtaagaccgaaaagcacaaaatggcaatgtaccgtaagaacatttgaatcacagttcaccaggaaaagaatcgaatgtgtccgtcacggcgttgccgaaagtccgtaggaagcgcagtgtccggaagaatagcgtagcaatggctgagagacaggagtgagactttgtgtcattgtttatttgtaagttatttttgaagagttcaaacgaacggtcccaccactgctacccgtgcaaaaacaccgccccaaccgtttaccactcaagactttttaatggccaattttgctgcactgaaaacttcacagaatttgctcggccaattccaacaacaacaacagatgttgaataattgtcacgcatcgaccgctattcagcgtcaaagatccattgattatgacacggagcgggagaagaacagcgaaatgggaccaatgacgggcggagttgggacagcgatgtcaactgccgatttggtcaccgcacttgggacaatcaaagcgcagaacaacagcagcaatatcggaacggacaaatgtgaggataatgaaaaaacaagaaggaatttgaggaatttcgttaagtaa

SEQ ID NO: 61256 - DNA, 570 bp, Heterodera glycines
atggttaagcaattgcaaaatttgactttcactgctggtgcctttgaaggaaattctgccaacaaatggcttcaaaagagtgccattgaatttttgtgcaatacaaaaattgaaaagaatttacaaaaattggaaagtgataacaaaacatatggcaaatttgtcgtgaaaatggaaaattttaaggcaattttttgccaccaattggaaaatggtaaaagttttgaggaaatttcacagaatttggtgcagccaatcataaaagaattgcaaaatttgaacatttttgacccaaatttaattggaagcctcagaagaattgccgattttcaagcttttaacgatgaaaacagagaacaaatggccaaattgatggaccattttatggctggacttcgctcactttggcacatcataaaaagtcgggaatagatttgattttatgaagaaaagtgggtgggtattcattgaccctgaaatgagaaattaaaaatttttgttccaatccaatttagcgtatttcctaaaatatatccctgctccctaaattagagccgcactggaaataaa

SEQ ID NO: 61257 - DNA, 220 bp, Heterodera glycines
tatcaaaaaggaagatggagaaaaaatttttccttatattttggttatatcgttttgcttttggtggggtgcttggaacagtggaatcatgcgcacccgtccgatctggcaagttaagcaacgattgctgactagccaaaaggttcggtgccgtgatgaaacgaaccagcactgcttaccccgcggcacccggcacggtcccccgaaggaatggatttaa

SEQ ID NO: 61258 - DNA, 767 bp, Heterodera glycines
atgaagtaccgcgccttccctgtgggtctgccgcgggtgctcagcgcagagcagcttgaccgcgacgcgggggtgcggttgccgtggacgagcgcggagcagaaccccttccgcggtttcctccactgccgcgtgctgccgcccttgcccgccgagctgggcgaccgccacgccctgttgccctaccggacgcgcacggggcggctgacttttccgctgtgcgccgcgtgcgccgagtgggccaacgcggacaagaaggtgcagcgccaccatcggacggtgccccgctgtcgacaccgggcggcgcaacgtgcctggacgcacgcctacaccgatgtggagctgaacgcggcgctacagctcggctacagggtgctggcgctgtacgaagtgtggcactacgaccgctgggcgagcctggaggcgggcaaaagcctgttcgccggctacgtcgacacaatgctccggctgaaggtggaggcgagcgggtggccggccgactgccagacggtggagcagcgcgcgcgctacgttgcgcgctacgcggaccgggagggcatccgactcgaggcgggccgcgtgcagccgaacccggggctgcgcgcggtcgccaaggcattgctgaactccctgtggggcaagctggcccagcgcgcggagcgggacgacgtgtgctacacgggcagcgcgcgcgagttccacgagctgttgggcgacccgcgccaagatgtggtcgactttgtccacctcaacgagcagctggaccg

SEQ ID NO: 61259 - DNA, 1298 bp, Heterodera glycines
atgttggaatcggacactttggcccaaaatcagtcggcaagcgtttcgcccggatggaatgacccgccgccgttggccaacccggcgacaacgacagctgcggcacatgccggcctcaccaacggagtggctaacggcgcaggtcggctgcatttgcagcgacagcgaaggcccgtggacccgtccgtccaggtttttggggaccaattctggtattttttggcactgtaggactaattttggattttcatccatgaaattaaaaactcggaaatttttgccaaaaaatttttgttttatggcgttttgcttttctatggccccttaggcgtcaaaaaacccaaaattgtcggatgaattaatgctcattctccaaattggctttagagtgcggaaaactttgtccaattgagaggcaatacgtcgtccgcagcaaatttgcagcccgcccaaccgcaacaacaacagcaaaaccatgtaaaacactatttgaaagaatgcgggaggaaaaaatggcatttttagcccaatttacgacggattttgcacaaaaaatttatcccttctttttcttttgcctttcattttcggcattttctcaattttttcatttttaatttaccatgattaaaaacgatgaaatcaactatcgaatatcatatttaactttggttttcatattattcttggtattttatatttgcaagtaaaaaatttgaccaattttcgaagaaattatggactcaaaacattttgggatactcagtttttctaaattttgttcaatttcttttaaattttgggcgctatttaaaaagagtaaccttttgaattctatcaaaaacaaaaggggggacccttttgttttgcaaaatttttttgagataaaaatccatgaaaatttgttatccgagggttttagaggtcgctgatcacgaatctgacatctaattcgaggtcttggacccaaagaaccccagggaataatttttcatgactaaatattaaaaaattttgcaaacaaaagggtcccccctttttttgtgtttgctttttgataatttcaaaaaggccctctttgcaagtagcgccgaaatttttactagggtcaaaaaaattttcctctggtcagattttcttaaaattttgcataggcccatattttgaccccctctatcgaatcacagtttattttttagctgtctagtttttaactcgagatcggctcttgtgtttttacaagggaaaatcccctaaaaaatttaagtatcgcaaagttttggcgttctgattacaaa

SEQ ID NO: 61260 - DNA, 65 bp, Heterodera glycines
atgaaactcgtaggcctcgactcacactgtttgttccgaaaaacgagcaaagaaagtttgaaatt

SEQ ID NO: 61261 - DNA, 595 bp, Heterodera glycines
atggaaagcccaattgggcttgaccagtaagaaaatttgtatttaaaaaatgtaattaattaaactaaagaaagataaaacgctaattaatttattttaaaccagaaaaaaaacactgatgaaaacagacgcaaaattgtaaacaaatatatgaaactaaaaaaagtcatcgctggtaaacggagaagcaaatagtgcgcaaaaggggggaaaaatttcaaaagaattggcaattcataagagaccgattaaaaaatggaaagcaaaatttggactaaatgataatgattaaaaatacataaaaataataaattaattaatcaattgaaaagaaaaaacattttgcagagaaccgtcgttacaatgtacacaccagggatgggccaaattgaaaaataaaaagcgaaatgcgaaaagcgaaatttgcgaaactgaaaaatgcgaaatgaaaaaaaaagcgaaatgcgaaaagccaaaatatgcgaaaatgcgaaaagcgaaatgcgaaaagcgaaattttttctacaaatttttaatagttaaaatcataaagcaaaaatcatttttttaaattttattccaaatttaaaaatca

SEQ ID NO: 61262 - DNA, 506 bp, Heterodera glycines
atgtgcttctcgagttcatggacttctatgactacggtattgaagaacaacagggacgaagaggaggaggccaagggcgtagccagacccttggcacttacttagaatccatgtgcagaaaaatgcaattgatgggatggaggaatggggggattcggggatggcaccactcggggaaggggatgacaccactaggggaaggggatggcaccactcggggacggggatggcaccactcggggaaggggaacttatccccgaaaaatgccaaaatgtcagcaaatggagcaaacctaacatattttaaaattgcaataataaacacctcacaaatcgttacagtaccttgtcccactaactgcagttgtggctcaacaactagagtatttagcccgggaacaaacagtagcggagcagagagcagcccaagcgtaacacggccggcatttgcccaccttttggtagtgcggttcatcatgtcacactcaatctttaacaaaattaaa

SEQ ID NO: 61263 - DNA, 1408 bp, Heterodera glycines
atgcttcttcttctgttgctgcttctgctgttgttgttcgtgctgttgttggagtgtgtgtgtgttacatggcaataagccttggacagacaacggcggacggggacgcgacgacgcaaaagaaaaagcatccattcattcattccgaaattccaatcacccgggggcatctctatctatctcatccacccgccacattcacccactgtccatgattgaagaaatggaagggatatatcgatatcgatgttcattcgtcctccggctgatcggatggggggggaatacggacacaactcagcagtctttcccggctcgaccctactgtctgcgttcccatccaaggaattttcaattttatgcttttacattattatatcggagattgagattcattaatcaggcattgattttgattttttagaacctaaaaattgcaaaaaacggcgtgtaatagaattacactccaaaaaatccaaaattttgtttattctgtattattgttgcacaacaattcacaattggaatatttgtagaattctgactttttcggaaatataaatttcgacaattgtcgattgtttcattttaaaaaaaagttaatttttaatggatatatttttcaaaaatttggtcgtttattgtggaggatatattttatttttatttgagtaaatcagtaaaaaaaaatctaatcccaagtcatgaaaggatcatctttttagtctttatactgtatcacaaaatatcctattaaagttcacaaacccacaataactactgtataccgtacatattgtcgttgttcattgttttcctatctctagaaaagggttagtgaatggatttgtttgcaatttggagacaattaaatagaaattgataagcaatgttaaagtaatccatgtgctttttcctgggatgaattgtcctatggccaattccgatcaatcgatttaaacacattttcgtttctcttctgtcatttgtttggccaatgttatgtgtatttatctatttgtttatctatctatattcatccattaagccaatcacttttccctccagcagcagcagcagaggcaagggaaaagctgccgtccttaaaccacacaatttcaaagccaaaaaacaaaaacaacaaagtagcaaattgacaaactgagacaagcaacaaagcaatttaaaaaattaattcataaatggcccagcaacagcaacaacaacaacaaccggcggcacaacaaccggcggcagagcaacaagaacaaggattttggtcagaaactaaaaaaaacaaaattttttttttgaaacgattaaatccgtgctgagccgaaccttaaaaaagcatcaatgacattaatatttatatttaattaaaattttatttgaactctgttttcaa

SEQ ID NO: 61264 - DNA, 740 bp, Heterodera glycines
atgataaaacttcagctgagtaaaaaggcgacagatttcgaattggactgtggcgcagatgtcacactcatcaccaagaatgattggatgtccatcggaaggccgaaacttggacaaacttcaggattgatggcatatggaaaaaagccgatcaaagtccttggatcgttcaaaacggatgtggtgtacaacggcaaagaagtgaatgccgaaatttatgtcgttgacggcgaaggaaaaaatttgtgtgggagagatttgattggtgaattgcaaatcgatctcaacaaagcgttcggaatccgatcgatcaatgaagtcaagtgcaaggcagtggatcgagagctggaagcggtgcttctaaagtacggtgaggtcttcaatgacggactcggccgatgcacaaggcaaatttcgctgaaatttaagccggaagtgcaatcgaagaagtgcaaaccgcgtcccgtgccttttgcattgagacccgaagtggagaaagtcatcgacaagtgggtcaaagatggagtgttggagcaggtgacaacttccgattgggcaacatcgttgtgattataccaaaagccgggaacaaaattcgcttgtgttgcgactacaaagtcactgtgaaccaatggcttgacatccatcaatacccgttgccgcgcccggaagaattgttcagcgtattgaatggaggcgaaaagttttcaaagctggatttgaaggaggcgtatctttaa

SEQ ID NO: 61265 - DNA, 1030 bp, Heterodera glycines
ttgcccgactttcttcaggctgcttgcaccactccctttttctgctctcctccctggccgaccacctcggccgctccaatatggcacacatccaaagctcttctttggccgggggaatagcaattggtgccgttgccaatgtgatcctttacccgcaccatgccattatcgttggtgcagctgccgctttaacttctgtgcttggccatgtttatgtgacggtacggtacggtatattactgtcagggtggtcattttgtcattaataatggcaagacaatgaagcaaaatgaccacatagaacaaacaacattcagccaaaaatcctggaaaagcgcctctccatcaacgacacttgcggcgcccactctctccatggccttccttcgcttctcgccggggtaagagttaatggcaattcgtataacatttttaaatgttttttaattaaaaatcttatacgagttacgatatgtacgaattgtcatgccaccggcgtcccaaatggccaattttttactccactcgcttttcttgaccatttttccttcttcccattctcagttccttagtgcactttttgtacttctctatgaaccggaagagtacggagagaactttgtggagcagtacagtgccatttaccccaaatggcaaggaaatgccaatgcattgaggccaatatctcacaatttaggaagggagctgcggctcccggtgccacccgcgatttgcgcacgcagggtgagaaaatgggagaggaggggaggggggcaagcggatccggcacaatccccgtcaattggcacccctcccctctgcagcattcttccaacttgccgggttggcactgacttttctgatggccgtcatgggcggtctcttctccggttgggtgatgaattggtcaatgcttaaccaagtgcagccgcggccttcttatgaggacaccaattactatttgcacgccgaaatgaatctctttgccaaagcaagtcattgtcaaatgaacaaaatgaatgaggagaaa

SEQ ID NO: 61266 - DNA, 291 bp, Heterodera glycines
agcaacaaagcactttgatctgtgccggtttgcctctgttcaaaagttcggacgacgcgagcgatttgcgcattcaaatggcactcatccaattcattctttcgctgggttcaatttacagggattgaacggccaccaaacaatacgaagggattgggagttccctcccaagcacatttttaataaattggatgaattattcaatcgtttcttcaatagatattatttattgtagtatttgaggagccacacttttgtttaaattgacgtgataaatatttcgatgccaat

SEQ ID NO: 61267 - DNA, 548 bp, Heterodera glycines
atgacaagaaacaaaaagatcagtaaaatgttaaaattttgtgccaaagaaattgccaagagacgggtgcgaggccgcgaagcggccaagccataatagtcatttttatcattcataatacaacacaatcgtactgcctagcgggggatgcgccgaaggcgctaccccgctagttgagacaaaaattcaaatctttttggaacttggaggcaaaaactgaaacggtgtgtaaattaagtaattagaaaataatttgaatctttaaattcttaaaaataaataattagaactaatttgaatctgaatttaaaaacaaataaaaattcagtccgccgagagtgccacatcatattcaatgattgaggacattggcattgccactgtcacattgggaccatgggacaaagacattttggaaatgtttttgcaagagcatttttttaacaaattaattttcgacacgcaaaaaggcaagtttcactgttgtagaatggattatttgttcttattaatttaatttaataatatgggcaaacaaaaaaaaatga

SEQ ID NO: 61268 - DNA, 522 bp, Heterodera glycines
atgcgactctctcaaactaataaagagagctttctttcccctaaagatgtgattgaaagaactgcaagtgggttccctgtgtagctcagtggttatagcatccccgatgggttcgaatcccaccgcaggctgtctcatgtttccaaaaacatttgaaatataattctgtttttggacaaccttaattaaatgtttattcaataaattttggcttcaccaattgaggcaattgtttcgataccttcggattatatataaatataatgtatttatatattattgtataaattcaatcttataggggccgttcatggaaatatggatataaatcgcgaaatatggaaaaatatggaaaatatggatatagaaacccatcctaggagcttcaaaccaagctaaaaacatgtttttcgtgcgtttcaggcctcccaaagtccaggaaaaaaaatatggatttccatataatttcatgccatagtcatcatattcttcttccaaatgtcttttgacccaatccaatta

SEQ ID NO: 61269 - DNA, 1950 bp, Heterodera glycines
atgtcaattaatgaaacaattttgcaattggcaattgacacagcgaatgaatatccgaaaaaggaaactttagacggaataattcgacataaatttgaaaagaaattgaaggatttgtttaaaaaggcagaagaaaaggcaaaaaaagataatccacggagagccaatgagataaatgatgacataaataaaatacttttgggttcaaaattcaatgactcatatacatgggtaagcaaaaattatattattatttttaattaaaattaaatttagttatctgacgccttactttcggtctttgtgaaaggaaatgtgacgaagtttaacaaattccttaagcgactaaaacactaccaagcggcagcattttaccaagatgaaagtgatctttgcattgggtatgagaattggcaatgtgacaaaatcggggagaaatttgaaggatatgaacagacagaaacccaaaaatataataaatatttggacataatattcgaatatttattcagacttaatgtccaaggtttgacaaaattattagggtttgaaattttattttaagaaaaagagtaaaatatgtacacaataaatttgtaaaagaaacaacaacagaattctcgaaatatagaagaaacatgtattcaaaaaggcctaatttgcatattttatgctatttattttttaaaaagatagcaattatttaagattatataaaaaaaaatttgttgaatttctcaaaaaccataaaatatattagaaaaatggaaacatatacgaatcgtttagaaaccagtcaaaaagtccctaattattagaaatttttgattttgaataataaagatttgctttttgaaggtaaaaacgctgaattggcatatcatttgccagcagtgaagccaatatttatgacagatgatggaaacgtttctttaattcaatttatccgaagccttaatgagaagttgaagtataaaagtgtagacaaattggatttggattatcaccctcgggtgaatatttatttgttaaatgaattggatttgaattatgcaattaaagaggatgaaaaaaagaaagaaaagccattaaaaaatgcattggacacaaaaattgccaaaatccgtgaagaatttgaaggaaaaatgaaaaatctttgtgataatgtcaaggaaagaacatcagaagaaagggaaaaatttgtagaagcattctattttggcactttcgattcgtcgccattttcataaaaattctctttttcattcaatgtttttcttatactttcctattcttttcccactctttatgcttctgtcttttttcttttttcaactattttatgtgggctaatttttgagtaagtaaaattttcattgctaacaaaagtagtgagtgatttgtcgaaaattataaaaagccacatggacaacaatttagttgaattccaaatccaaaaaaaagatagaacatctttgccccgttgtaaaagctcgcgtaatttcttcagttcatcccagttatttcccttcaaaaacattggcactagcatctcccgggccatttggtcccttctacaaacgcaaattgattttctcggatcggcagacttttcaagtgcttcgatttgcaaataagtgatcgattgatgatacagaatgtctctcgcagagacaataatcaaaatcgaaaaatgcttttcaaaattccacaaagtgctgacaattaacggttttaatgcgtttttgaatggatttttttcacattggaagtgttgaaatttccatcttttcccctcttctcgctcacgaaaattttccgtttttgttaaactctgagaaatttcctatcgctttttttctttttgtctccaacgactttgttccataaaatgaattaactgatcaggaagaatgaaagatttcgataataataatgagaagaaatgaa

SEQ ID NO: 61270 - DNA, 876 bp, Heterodera glycines
atgtacaaaaaagcggaagaaagggcaaaagaatacggttattggagtgccaaaataaatgatgacaagcataggataattgtgggatcgaaattcgatgatcaattgacatgggtgagaattaacattcaatgaaaatttaataaattcaaaatttagactgaagatgctttcttttcggaatttgtcaaaggattaacgacaaattcaaagaaattttttaaaatggcaaaagaatattcgaattatttacgtctaaagaaagagaaaggatattatattttctctgatgaaaacacaatgatatcttttgggttatacgaaattgagaaaatgaaaatgcatttgacacaaaaatataaagcccatcttggcattatgtatcagatgaaagagaattggcattgtgataaaattgggaaggaatttgaagaagaatgccaaaaatatcgaaaatatttggacattttgtacgaatatttattccgattgtatgctgaaggtttgtttggatttattaaaatggtaataataataataataatttattaagctaaagatccgaaggtgtcgaaacaattgtcaccattggtgaagccaatatttatgtatggaaatagtagtccttattgtttaatcgatattgtgagatggctgaatgcaatttcaaaatatttttgggaaaaagaggaaaaagtctatatttggagtatcaatttggtaaatgaagaggaattgaattacgaaattaaagaggagaaaaattggttcgataaaaataaacaattgaacggaccaacggacattcaaagtatttgggaacaatttgagcaaaaaatgggtgaaattgccgaaaatgcaaaagaaaatgcctaa

SEQ ID NO: 61271 - DNA, 425 bp, Heterodera glycines
atgcatttttgtacctcttctgccatttgttgtacctacttctctcttttaatcactgttgtacctcttctaatcactgttgcacctcttataatcactgttgtacctcttataatcactgttgtacctcttataatcactgttgaacctcttctaatcactcttctaatcgctgttgtacctcttctatttactgttgtacctcttctaatcacggctgaacctgttctaaacactcttctaatcgctgttgaacctcttctaataactgttgtacctcttctatttactgttgtacatcttttaatcactgttgtacctcttctaatcactcttctaatcactgttgaacctcttctaatcactcttctaatcgctgttgtacctcttctatttactgttgtacctcttctaatcacaaaggg

SEQ ID NO: 61272 - DNA, 287 bp, Heterodera glycines
atgtcgcatgaagaagcaataatctacggcaaaattgatcgctacctaagaatcggactctacgacaacgcctgccgtgatttgccaacggtatttaatgttatataaattataaaaatgcattataagtagggttgggaattatatgcatagagcccggcgggatcgggacttaaaaaagttaaatttttaattaatattttcgaaaaaccaaaaattcaattttttgaaatatttttcagtccttagaggtcaaaaaggccgttttaaagggggggccgttttaa

SEQ ID NO: 61273 - DNA, 503 bp, Heterodera glycines
caagttttttacaaccacttattgccaatttaatttcttgcagattgaaagccatccattgcctgccggttctcggcacagcaaagcactaatagggtgtttgactcacttcaaaaaataattcattacccaaaagttttttacaaccacttattgccaatctaatttcttgcagatttaaagctatccattgcctgccggttctcggcacagcaaagcactaatagggtgtttgactcacttcaaaaaataattccatacccaaaagttttttacaaccacatattgccaatctaatttcttgcagattgaaagccatccattgcctgccggttctcggcacagcaaagcactaatagggtgtttgactcacttcaaaaaataattcattacccaaaagttttttacaaccacttattgccaatctaatttcttgcagatttaaagctatccattgcctgccggttctcggcacagcaaagcactaatacggtgtttgactc

SEQ ID NO: 61274 - DNA, 78 bp, Heterodera glycines
atgcagtccccactggttatatcaattatatcaatcgaattgaggaacgaattcccgttctcggctcatcaggccgaa

SEQ ID NO: 61275 - DNA, 2014 bp, Heterodera glycines
atggctctactccgattcgcagagaccaaaacaaatcgtgggaaaattcttctatctcgtagcggatatgactacactttcgaggttaaaaggctaatttaatttcgtgaaaatgttaaacgaaaaattctaaggctgtttcgaaaactgaagacggaatggagtattggtgttgcccaaaccgtccaccttattgcccagggcgtgcttgtgtacaaggccgttgggaagtcgatgccgatgggtcgcgatataaaattggacgcactaccggacagcataaccatccacccgttttggggggtcatatggtagaaatttaaaatgtaacgggtgttaagtagctaattaggtgagacaagcatctgaacgtctccgacaagaggcgcaaagcgaattcccgaccacaagccgtaacatcatcagagaagttcggtcgaaccttagtgatgagattcgggcaatcagtgcaccctctgcagctgatatgaggcgaacatataattatcagaaacggaatcatcaggaagaggcaaatgataattagataattaaaaatataaatttaataagcaaaaataattttaaaaataaatggttaggtcggcgatgttggattggatatcttacccgcatctcaaatcatcataccggacagattgcgtgatcgtacgatttatgatcaaactgttaatggagaaaaaatgatcattttttgttcttgttttggccttgatcttttggcgaattatcagaatgaagtggcaatcgatggcacttttgaggtgaataactaaagggcacttttagctgatagtggcgagaggcatataaaatgtgccgctaccaatataccacaaaataagtaaaattgtttttatcttagacatgcccaaggggatttactcaagtctacacactggcagttgtcatcgatcattgtgcagttccggcagtttatggtttactgcccagcaaaactctcgccacatacacaagattcttcgaaacaattcgtcagtctgttggcaataattggttcccgtaccgtattatgagcgatttcgaatcgggagcgatcactgcagctggcaacgtctttccaaattccataagaaccggatgcttgtttcactttggacaagcaatttggcgaagaattcagcgattgccaaatttgctcacgcgatatcgtgacgatgaagttgtcagaacatccttgcggtctctacaagcgctggcttttgtccccgtcgactttgtctacaactatttttgcattgccatgtcaattcttgagccgactcctgagcttcaagagctgatcatctatttcattaacacgtggatcgggcctcgccgaatcatgcaaaatgaagaagttttggttcacgatgcaggcggagtagctgataattggattcgagggagaattgaggcgcttaatttggcacagactgacgctctttttccaattgaattgtggaatgtggtggacagagtagcagaagggcttggaagaacaaacaattcgcttgaagtgtggtgggatgtgaccattttttcatgtcttttcttcagggttggcattcaacttggaatgtgcaccttagggggaaccaacgaccgagttcatttgctcggaaaatgatcgaggaagatgaactgtggagaattcgggttgcagattatcagattgcaccggctgacggcattaaagggcctcatgaaacgagaaaggccaaatacattcgtcaagaccaaaacttggaagcacttgtgcaggattttttcaatcgtgatccgatccaatttcttcgcgcttgcgcttatcatctgcacttttaaacatttataggattttagcattgtcgttttacacaattttgtcgttattttcgatatcaatttgaagttttcaaatgttagaattggcaaagttaaaattttgttcattgtcgaaatcggtcactgtcgtaatcagccactgtcggaaatgtcggaaaacagtaaa

SEQ ID NO: 61276 - DNA, 663 bp, Heterodera glycines
cgtccagaaatttttagactaatccgaagcaaagcacgaatgaattaaagaggcgaaagaattcacagtatcgtttctaatagggaaatattgacaggatattccgctaaaaacgggtttgatcatttttagcgcatttttaggtatacatttgagacaattgggcaggacaagaaaagaatgaagttgatgcctcatgaaactcggaattggttatgttttgtcgaaaatatccttacataatactcataaaaaaatacaaataattcaacccatctattctatgaccacattctgaaaaaaatcccagaaatacgaggaaagatatgcttggtcacaacaaaataaaaaatggctagtatgtaaaaatttgcggtcacaaataaaataaaaaatggctaatatgtaaaattggcgtccagaaatttttagactaatccgaagcaaagcacgaatgaattaaagaggcgaaagaattcacagtatcgtttctaatagggaaatattgacaggatattcggctaaaaacgggtttgatcatttttagcgcatttttaggtatacatttgagacaattgggcaggacaagaaaagaatgaagttgatgcctcatgaaactcggaattggttatgttttgtcgaaaatatccttacataatactc

SEQ ID NO: 61277 - DNA, 319 bp, Heterodera glycines
gagcaaaggggacgccgacttcgaggagtgccttttctccacttccatcgaacggattgaaaggctatcgcgcgaagaggtgcgccaaaaccaaggggaaaaggattaattcaggggggggggagataaattgacaacgatgacatttgtcggcaataatctaattgttcaggttaatcgggagttgctgctcgcagaccgtgacaaccgaatgctgaagcaacgagttacgctgctaagagacagctaccagcaagtccaagaagaaaatcgaaaattgaagagccttttgaacgacaacggaatgaattctctatga

SEQ ID NO: 61278 - DNA, 716 bp, Heterodera glycines
gagttcaatcactgggactttattctcctgcgtttcaatcactgggactcaaccctccagcatttcaatcactgggactcaaccctccagcattccagtcactgggactcaacacaccagcatttcaatcaccgggactcaattctccaggacttcaatcactgggactctattctcctgcgtttcaatcacccggactcagtttttatgcattccaatcaccgggactcattctcctgcatttcaatcactgggactcaaccctccagcatttcaatcactgggactcaattctcttgcatttcaatcactgggactcaaccctccagcatttcaatcactgggactcaattctcttgcattccaatcactgggacctaacctcaccggtccttcggcattccaatcactgggactcaattctcctgcatttcaatcactgggactcaaccctccagcatttcaatcaccgggactcaattctccaggacttcaatcacggggactcagtttttatgcatttcaatcacagggactcaacacaccagcatttcaatcaccgggactcaattctccaggacttcaatcacggggactctattctcctgcgtttcaatcacccggactcagtttttatgcattccaatcaccgggactcattctcctgcatttcaatcactggtcaattctcttgcattccaatcactgggacctaa

SEQ ID NO: 61279 - DNA, 701 bp, Heterodera glycines
atgtttttgttcgccatttcaaggagaattttgagtgggaccatgactaatggcattttctatttacaattcgtaatcattctttaattactgagaaattaaaaccttaaagattggcatttcaaataaacgcaattcggcaacgctgtctcaatataatttgaaattcattaaattggcaaatgcatttgtcatttcgaatgctttttgtgtagcaattagagtttaattaaagttgaaaaccgttcttacttggtgtttcatttaaatataataatatttttaattaaagaaattctttaaaaattcaacaagtactatcgcaacgcattccgcacaaagtttccatttcattatatttagtaatttccattttaattattatgttattacatacactctgactaaacttgccataagctaaatagcaaatcagccaaaaaaaaaagtcaaaatggggttttgtgaatcaaaatgtggcaaaaagatacatgcattcaagtaatgaaatcttcagatattgtatttttcagttcgttttaaagatggaacaaatccgagtctggaagcacgaactctcagcatctgaatcagctaaactagaaaatcaccttttatagaaaaaaatacagcattttcaaaaacacatgctaatgaggctttggcggcagcgccgactgaaaattatattccgatttgta

SEQ ID NO: 61280 - DNA, 804 bp, Heterodera glycines
atgcagttgtcgcaggcgcttcgcctcgtcaatgaacggacgcttgtcagcttcgtccaacagcttccactcgtggcccaactgtttggagatggtcgaattgtgcattttcggattgtccgccgccattcgctttcgcttcccgcgcgaccacaccataaaggcactgacaaatgggcacacttttcaatgattaattcaggtgaaataaaaaatcaattattttattgtaaaattcaagaaaaacccaacaaaaattataaattttgttacttcatcggccttttcacgtgctcatccgcttcttcgctgcagcgatggcttacaacagcagcagttgctggtggtaagcaattcgcttaaaaaaccgtaatatggacattttctcccactgttaaatgtcgaacattccataaactccgcttccttgggtctttttttgacctcatctagaatagtatttggtggcaaaaaatcgcctaaaaggtactaaaattaaaaaaagatgaaagggcaccaaaatggaaaaaatgcataaaaaactgaaaatagccaaaaggcaaaaattcttttggaaaagggaaaaattttaacatttaaaaaatgatacggaatgtttttttaatttgattaatattattgtttcataaaatgttcactttgagcattgtccggttctttgattactttttccattgccaaactgtacagttgtgccgcgactgatcgaagacaatggaatttgtttttgatgttgtgtaatgagtggtagcattaaaatgacaattaataatcttaaataaa

SEQ ID NO: 61281 - DNA, 346 bp, Heterodera glycines
ccagcaactgctgctgttgtaagccatcgctgcagcgaagaagcggatgagcacgtgaaaaggccgatgaagtaacaaaatttataatttttgttgggtttttcttgaattttacaataaaataattgattttttatttcacctgaattaatcattgaaaagtgtgcccatttgtcagtgcctttatggtgtggtcgcgcgggaagcgaaagcgaatggcggcggacaatccgaaaatgcacaattcgaccatctccaaacagttgggccacgagtggaagctgttggacgaagctgacaagcgtccgttcattgacgaggcgaagcgcctgcgacaactgcatat

SEQ ID NO: 61282 - DNA, 578 bp, Heterodera glycines
aaaatttcccattttcatggcgtcgcatttgaccatgttgagctgcacttctacaagggtggcgtgccgatttggactggtccgatcaaagcgtccgctgttggacttgttttctacccgtgtttgtgcattgatgagaattgtgttttggatatctgcttcagtgcggctaaatttagcccaaaagcgccattgggctatcaggagataatgtctgaacagacattgctttaatttttttggggcaaggacgatcccgggggcgggggaaaattcttaagaaaaaaaagcaaaaaatgatgaaagattttttttcctacgtttacctctccccaagccccaaaaactaaaccctagaaccatctctgtctgtggacaaaataaccagacaagttgccacaccgcctagcttaaaatgagaattaaagggaatttgtgggttaagttcgtttaaaaaatgccaaacttcatgcaaattgatttttttttaactcctttcattttttcaaaatggatttatatatattttataacaaaatagcataaggcttcttaaaaatttcagtatttttaatcaa

SEQ ID NO: 61283 - DNA, 1184 bp, Heterodera glycines
atgaactttcatttgtcttttttatttgcttgctttaagtatttggctgctctttgctacttaataattgctgtgttgccaaagtttggcatcacaaatttgaaatggatggagctttgctttgttggcattactgctagtctcgtacttagtctgatcggagctgcaaaatgcactcaaattgttaggctttcataattaatatcaaataaaattctaattttcatttttttaactcagaatttaattatttgtttttttcatcaggtcgcgtgccaatttgcccatgtgattttttctttacaatattttttgacaagtaccatattcctgtatgtttttttttatgttttatcaatgtctaatttaattttaatgttttttagaatcatcccgtttggtatcagttgggcagcgccaaacaacactgtagatgaagtagcgttttttctaataaaaaaatagtttaaaaaaatgggtttgtgccgtgatgataagcgcaaacctgagaatttgaaagttttatcccaatctatcgaattttttttgttacaaaatggcaccaattttggtcaaatttagattgtttttttagcattttttttttcatccgtgacgaaagcgctgcctgggaaattttaaaagttttggttctatctatagacaaactttttttttgttacaaaaaaaggctatttttggattaatttttttatacaaatttcttcacaatttcaaaatccatttcccaaatcgaggtggaacataggaaactaattaaatcaaacaaatttaaaggaagtttattaaatcaaataaatttaaaggaaactaattaaatcaaataaatttaaaggaaactaattaaatcaaataaatttaaatgctttttttaaatttcagtggtcttcaatctttaaatattccgcagtgtctcttgttgtcggagcaactgtgttcaatttgacattacgagttgagcctcgaccttggactgaaatggatttcaaaaaagaatcaaaaagcgatgttaaaaactcaaaaaatgaacccattgacgaagagatgaaagaattccttagctaattttctattgatgattttgtgtacttttgagaatacgggattttatttttaattattttaaaattagtgtgaatttgattatattttgtgtaaataaa

SEQ ID NO: 61284 - DNA, 452 bp, Heterodera glycines
  unsure (1)..(452): unsure at all n locations
atggcaccagagacaagcacgaaaacaatggaagtggttaccacggctaagatggaaaatgattcaattggtgagtgtaggacaaatagtacagaatagggagcttccgcaagtcaaaacaatttgctggaaatgcataattccggtgccaaaaagtgccgtaatctgtccctcctcattgaggaagctcgggaacttcggccccttttcaccgagaaatttcatgggttttttgcgttcttggcattcctttaaaaatagtcaattttgctaattttcgttcagatgacgatgaaatcagtanattaattatttttaattgtttttatattacattattaaatgaaaatcttacaaacattctgtgtgaagctctcaaaaatatttcgcaaattaagaaaatggtattgtgcgcccagccatctcgaacttatccattgttgtcatgctga

SEQ ID NO: 61285 - DNA, 261 bp, Heterodera glycines
atgtatggatttatcactatgagagtagttcgccaccctgttcataacgtcctttttgcacggttcgcattgcgaattgcaactcgcaatgcgacacatttttattggcgttctttggcatccgacacaaaaaattcgatggtcccacccgaaagtacaaaaacaccagcaatgccgtccgaaaacctgatcaaaatgcttcgaaaagacttggaggaacagttgaagctacagaaaaaagagcgggaacgacttcaattg

SEQ ID NO: 61286 - DNA, 739 bp, Heterodera glycines
atggtaaggtttacaggggggaaaattatggtaagactcggacgggttcgggtaccactcgggcatttaccgggccggtcgagcacgggctaggcaaattttaatttaaaaaaatgctaattgtaagatttttccatgttttttttaacaattttccagaaaattgctgtccttgttgcactgttttggagaattgcaagcatctttttgttctgcaaactcttcgcaacggcccaagtccaagcaacacttcctaaattttcctcccataaaagcgaatttgcaggtgtttattacttgaagaggggggggggggggggttacatattagtaatctgactttaatggcaaaaaacctcaaatttgtcttggggcaaataattccgttttatgccaccaaaaaactccgtgatcttttttatacgtttttgtggggtgtatgcataaaaccaaaaaatacctaaatttttttttacagaaaaatacagctatatcgaaccagaagatgttgaaatggcgcgtgaccaggcacgggaaatgtttttcttcggatacaataactatatgaagtttttgtcgaatttatacaaaaaaaaatttaaaaaaattttttttacttaggcatgcttttccaatggacgagttggacccaattcattgcataggacgggggcctgattatgagaatccggcaaattggaacatcaacgatgtgctgggtgactattcactaacttta

SEQ ID NO: 61287 - DNA, 93 bp, Heterodera glycines
gccttaaacggccaaaatttggtcatttttagtgaaaaagtccagttggtacccagcagtggaaaaaaagttattggttaaatagcaaaaaaa

SEQ ID NO: 61288 - DNA, 936 bp, Heterodera glycines
atgacaaatttaattgaaatgacacataattttgaatggaaaaaattgctacatgaacaaaataatgggtttatagaaaaggcacgaagaaaacacaaatatttattatttaataattacttgataaaaaaatgttcaaaattaaaaaaaataattaatatttttaataattaatttagtatacatattttgtgctgatcaattgtgtggctgagcaacaaacgcaaatttttgacaaattttgtcagttcgttgacgggcgaatccgtcggcaaattttatacgatttggacccaaaaaatgggccaaacattggcacacatttgtaccccgacatttaccagcacaactgcgaaatggcaaatgaatttttggcattggcatttaagtaaacaattttataaattggataataataaattattaattaaatttatttattaatttttaaattatttaataaatttaaggcccaatttttgcaaagtttggcttattggcataagttcgaacgtaaacagtgcacaaatgaacccattgttggcacaatttgacgccacaatcagaaaagattttttgaaattcaatccattggaaaatgccgaggagaatggaggcaaaaataaaagtaacaaaaaattcaaaatgccaaaaatggaagaaataagcgctaaatttgacgaattcaaattggcattcaaatccattctggtcaacaaatggaaaatgtttgaagcgatgtaaaattaatttacataaaaccttttttttttgcgaatttttaatgcaaaaattttagagagcccaatgaataagaaaaagccgatgtaaaaatgtgaaagaatcttatttattacaatcattttcactataaaaaattgtaatattttatttttttgtgtataaaaattttaatggatattttaacaaattaaa

SEQ ID NO: 61289 - DNA, 395 bp, Heterodera glycines
atggtcagcaaaattgtgcttctctatccaaatgcttcacttccatttttaatccaaaaattcttccttttttattcgacaaggtaaaaatgtataaatttttgtcatttaatgggccaaaaaaattccataaattttcgggagtgtggagtcgagaatttatttttcaattttaaatttttagaccaaattttatgccagttcaactcagtgaattggacaaatccaacattgtcaacccattttttgtacaaaatccagaggaacaggaaatgcctgtgtatacgccaatttttcctgaattaaatgtggcaagtttggtcacaaactgcagtgccaaagtgatacaaaatgaaatgatcaaaggcaaaaaaaatttttacaaaattttttaa

SEQ ID NO: 61290 - DNA, 725 bp, Heterodera glycines
atggcaaatgaatttttggcattggcatttaagtaaacaattttataaattggataataataaattattaattaaatttatttattaatttttaaattatttaataaatttaaggcccaatttttgcaaagtttggcttattggcataagttcgaacgtaaatagtgcacaaatgaacccattgttggcacaatttgatgccgcaatcagcaaagattttttgaatttcaactcgattaatggaaataagcaaactcagagtgaaaaaatgccagaaacatttgaaattgttggcaaatttgagaattttaaattgcaactcaagtctattctcgtgaacaaatggaagttgcttgattttcaatttttatgtggttaaattctgaaaaaagttttccaattattcgcaaaaattttgtttattgttttgtggtgttttttaagttttgtttgtgattaattttttataaataattatttcatttttcttttattaagctagtatttataaaataatttttaatgtttactgatattattaattaaacagttaaatttgaaaaacaaaacaaacaaaaaactggaaaatacagaaaaaatggtgctgattcattacattaaaacattaaattagaaattttggaaaaaaaattattcatcactttaactcaacaaactaggttatctagacattaattggtcataattttttaaaatcaaataaa

SEQ ID NO: 61291 - DNA, 4180 bp, Heterodera glycines
atgatggttttttggccttttgaaaaccttggaaaatcagggtccggccgttcagtcaggtagctgttttttatttgttgaaattgcagcgaaatttgaaaaaattgcatagcttcaaaatgtatcgtttttttcttaccccatgcacaaaaaaccacgcggtgaagatgagggtactccttaagtttgggtcccatagttaagcattcgcatttatgccgcacgaataattgacatttttaccaaaacccatcaaattattaaatggaatgacaacagtggtggagaagaatttgaggatttaaaggcgctcattcattttgcatggcgccgtggcatcgtcagcactaatgccaatgaatgttggcaaaatgccaactttgacgaagcattggcacccgtccggtggcgatggctgcgactgatcattttgtataaacaaattaaagatttgtccgaaaatcatccaatttgggttgactcggtggatgacaatgtgcgcaatgcaggcgatcaattggtggaagattatgcgaataaaatgattaggtgtgataaattaaataaatttggccaccaccgaaaaaatggcttaaatgggatggccaaatttttgtttttttttcgacaaaacatggcataactttgctgaaaagcaatcaattttacattcttgacatcttctgaaagcccaggtttttctctattagcctgtaaaattgcaaaaaatttagtcaaattttcgaaaaagttgtatgaaaataagtattattttctgccataatttatatttaataatttgattattttatttgaaaatttgcgggcaaatagagaaaaatcgttactactaaagcgataccaagaatgtgtaaaatttgttacttttaagcaaaattatgccatattttatcgaaaaattgctaaactggcggattttacgaaacgacccatcaatttcaaagaaaactttttgcttcttcttttagcagatttgattaatgagcctttgatcatttttcaaaactaaattgttaaaattggtatataaataaattatttaccaaaattataaaattgaaatccaaaaaaatggttaccatattttgagattagctttcctttccttttctctttaattctctttaaaattttgtgcgcttatggttccaaattattattttttatatatgacaaaaaataaaaaataaacaaaaattaaatatttggtttttagaattatccctttttttgttttaaagtttgtgcgagacggaaaatgttttcagtaattatctgaaaaatgcattcacccgcgaaaatggtgctgaaggaattcgatcattttttaagtcaaagtttaatgaaaatccaattttttacgaaggatttgtggaaaaatttcctgagattggcccagtcaaattacgacagacttttgaaaatggtaaaataaatttaaaaattaataaatttaaacaaattcaaatgagaaatttttttagcaaagatacaaatgaatttgacaccacacttttttcaaggtgaaataaatttataataaaaaataaataataataataataaaattgttttttatagaaaaaattacttttttaaaataataataattctttaattggaaaaacatttcaattatttgccacttataaacatttctattagcatttttggatgactcatttttatatggaaaatatgctgaatttttatcctcaccttgggctgattaccaaattgtactgctcgacatcggtgcctatgtgaatgaaattgaaaaacgcattcaaatgtgggaacaattgcaaaaaatggaaagaaaaattttcccaaaatttgacacttttgatcagtcaaattcgttgattttgatcaaaattgaatggacaaattcacttacattacaggtacctagtaaattttaaaatatacaaaagcagaacatagccagccgcccttcccgaaataaaaattttaaaaatttcaagaaaaaataggtttgccataccccaatttcaacttattattttttgaaaaattgaccacaaaatgccaaaaattggtgattttttagcaaaaaacggctaaaattcctgctttttctgcccggcgctgataatttctgaaattcctgtgaaaatttttttgctttaatatcaaaaaaaggtcttcgaatcccccccccccccgaaatttttattttaggcctgtacaaaagtaacaagaaattaattttaccatcaataatctgttcaaatttcagcctatatatgtggaggaactgcataattttcgaaaaaacttgcacaaaattttgtgcaaaattttacaatttacggaaaatgtaaaatttggcagtgaagaagcatttgattattcataccaattaattaggacgaaaattcatgagagaaaaattttgtcggcattttttgccaacgacaaatgccaaattggtaatgaatggacaaaaattggatacaatttgcgcgaaatgttttgtcaaaagttatttctaaagaactatttaaaattttcaacattaccaaagaaaatggacacacaaattgcacttggcaagtttcgattaaaaattttaatttttttcgtaatttttaaacatttttcgaaattcctattttttagatattgaaattttcaataaaacgatacctgaaacagaacaaaacaattttttgcatccaacttttccgaaaatatcacaacaattgcattttaacgaagtaaataattcggattcttttgggataattttaaaaagaaatttttatttaaaattcattaattttttagcaaaaaaattatttgacggaaattgagcatgagactatggcggaatataacattaaaataaaaaattctctcaaaatcatttacacaattgtcaaaagttgggtaagtaaacttttttatccaataaaaaaatatttattttgctttaataaatatataaatatttaattttatatttatatttataaatttattgtagtctaaaagaaaagccaggcttttgatttccggctcatattttcttaattcccattcaattgactcgggcattgaccttttgtgcattgtgccagaaaaaacaattcgaatgaacgcattttttggcaacgagaaaactaaatgccaaaaaaatgtctgctcttcaacagccaataaaacgtcactttattcgcttctttttgaagtaaaatttttaatgaatttattacatttattttaatttaaatttgcaaaataccataatcaaaatttgttaattttcgattttggttcgagttcgggggattaggaatttgtcaaaatagatgtcagattcgtgattagagattccgcaaatctccctgaacaagattttatcagctattatcacaaaaaaaatttgcaaccaaaaagatctgtccaccctcctccttttggttttttttaaaaatttaatcgctctattatttatttattttgaataaattaaaatcacttttttccagaacaatgaagtgacaaatttgcgaaaaatcattaatggcacaatttttttgatcactttcaacttgaatggcattaattttgatttgtcttttgcggcaatttcggacaatagcgaattaccgttagtcattaatcatcaaattttggataattttattcaaatattatggccattcactgatgaaacgcaccaaaaaatgattcgcgcattgtcaagtaggtgtccttcaaccaatttattaacttggggcctattagcattaattagtcggcccattagcattaataagtcccgcgaaagcatgacttgttgggcgccgccgttttggtcccaaggctaattaaaataaaatttatttctcaaattttggcaggatgaaaactttataaattacactgattggttgggcccagccaatttgggtcctagggctaattttaaaattttttcaaattttggccgtgacgaaaaatttaattaattaattatttcagtttattaaaagggattcattaatttttttttattattttaggccatcgttcgttattttttattgtcagtgaattgcttgaggacaaaaataatggaaattgggggaaaatttttgataattcattctccgtttctcgaaataaa

SEQ ID NO: 61292 - DNA, 2052 bp, Heterodera glycines
atgtccgtcgctgctggccatgaattgctgcacgcgctcggctttgatcatgagcaaagccgaagtgatgcccggaattacgtcattttacgggaagatgacggagtaattaacaaatattttcactaatttttcatatactcattataaaagcaatcgaaaattaatccaaacacgcaaaactttgacttcgcttacgatttcgggtcggtgatgcattattatccatctgggggcgaccatgaaaagtaagaaacagttggattttaatgatcaaaaattggatttaaaggggcttatacgatcggatcactttgccacggttttaccaacaaacgattggccaaaccgaacgaatctctttcaaagacgcggccataattaaccgaatttattgcgaaggcaaaaatggtcgaaaatttcaggaaattttcatttgtttagactcatgcaaagaccatgataacaagtgccaaaacgggggctatttgaatccgaatgattgcacaaaatgtcattgtccggacggatacggtggcgaatactgtaaagaactcgaagagagtgagcaattaattgattcaattaagatgggattaaattttataatttcaagatttgaattgcgaggatttgagtggaattccgagagaattggtggccaatcagtcagcagtgttattgaagacgaaggccaaatgtggggggaatttgccgtgccgatgccattggcgaattaaggcaataaataatatttttgaatttttaggttttttaattaatgcaaattttaattgtttttagcctgaagtggggaaaaaggcgcgaattcagttcaaaagtttgagcaatttgtttgaatgcacacacaactgctcatcggcgtatgtcgaggtcaaataccgagccgacaaaagggcccaagaaaaaagacaaataattaattttaattaattattaattagcataatgatggctcattaaggtgccaaactttgttgtgccgcatcactcactgatctgaaagcaaatgaatacaaaaattggattgaggcggaaaagccggacatggacattgtcatttctgcgcacctttcaccaaaatggaccgtaccatccaccgtattcgaactgacgtatgaatcaggcaaggaaaatttttaaattaattttatttgttttttaaatttttttttaaatatttattatttttaattggctttatttaaatgtttttccaaccattacaaaatggaaaattaattgttcaaaaatctgttaaggcaacgccaaacccataaattcgagcaaatgcgtaaataccgataatttgtttgccgagaaaaggaaccccggcaccagcggtttgaagtgttatgacggggtcaaacaccaattttatgactgctcctgtcacggtgataagaaatgcctcgctgaagaaaaatgggcacacgacgcctttctttgtccaataataaaggtaattaattaattatttatttatttattccaaaagacaccgccacacaaacctttcatataatataggcaatttaatttttaggcactaaaaattaccattttttgtatcaaaaaagcggaaataaggataaatctggcaaattataaaaactctatttgattaattaatttgtaaattcaaggtaaatggaattcaaatccaaggaagccgacaacgagtgtttactgacccaaaggattttcgatacgattggactcggattgaggttaattgttatgtgagttgggtcttctaatttcaaaaatttgtttaattgactaattttacagaaggccgaagcaggtaccgtaagcttttggggctacagtaagccggagacaaacgaaatcattcgggtggacgaaatccactgtttgacttataaagctgctggagtgccaaaacggttcaagagtttgcaagtcgaagaacagccaccgatgaaaaaactgagtccaagtccattcttggccaataatgcttcatcacttatccatgtgttcgtgccatttgttggccatccatga

SEQ ID NO: 61293 - DNA, 449 bp, Heterodera glycines
tccattgcgtcatttaaacggaccaacgaattgactggagatcaattgacattggcaccgattcatgaaggagcaaatgtttttaagctcatccgttgtccaattgcagcagaaggaagtgaggaaacattggaaaaggcgatgaatgacgcaatgctctgtactgctcgacaaaacgcaattgatattttcatcgcggacgacggagtcgacgatgggtgtgaagaaaaacttcaaaaatccaaatgataattttttttaattgtttttcagtcttctcgacggtttgccagggccgagtggtgatcactgatcagaaacagtaaaagtgaatcgattgattgattattgatgtgattaggtacatatgtgatccaaatgttcaacttattgttagccatttaaatgtttgtgttgttgtattgatttttgtttacaaattcattaaa

SEQ ID NO: 61294 - DNA, 1890 bp, Heterodera glycines
atgagtctgttcaagtttggagatgggagtatcaaaatgaaaatggtgatatcacgccattctatatggatccaggaaaacgcgtaaggtttgttattgttttttggtatagcaatgatttgaatttttctatattttcccgcgtgtgctaggcattcattttttcccggcccgtctattagctccgccgggaccctcccccaccccttctcccggtctcaaattttaagaaattatccaatgctttaaaaaaaatcagctgaaaaattagtaaaaactttaaagaatttttttttaagtttttctaggttaaaaaatccatttagatttttttttaatctaaaaattaagttttagttgaaagttcttagaaatttttttttgtacgagttgccattgacccgtattttctgtgctttttcggctagttttgaattatttaatggggtagtaaagactcatttattgacaattcttttacaagctagaaacgagtcaagaatttgttaccgcttttctacatttatacattctcccatgcagttttctcaattaaacattcaggtcaatggacgtcctttggagtttattcagccagaaattctgcgcatcaaacttcaagagccaattctaattgcgatatgccctaccttaaattgacttttcttttgctgtcgcttccgttcggttgcccattaagctttgtcaatcatcgtcttgaccaaccgcagtcagcagtcacttcgggtagtccccctgttgtcccaattgcctcacttctcttgtgccgctttaagctgatcgcacatgtcacttaaatatgttcctttgtcgtgcaacgcagcgttgcatccctcgttcgtgggtgtgcgaccaggagaacgattgttcggatgggcaggacgagaagaactgcggtgcattttatacctaatggtttcgttggacttttctttttatttgtgcagagactcctcaaaaacgatgctctgaaagtgaatacgaatgcaaaaacacacaatcaatgcaacggaatgcaaatgacaactcttggctcaaccacttggcccgcaccggtttcacacacacgtgcatccaaagaaatgggtttgcgacggggaggccgactgtgtggagaaggatgacgagttgaactgcgaaggaagtgagtaactgacgaaaattcgtcgatcacaattcttttttggttattcttttctctgatcggcctttctgcacatgactttttcaaatttgtcaggtttctgtttttgatatttcagagcttaaatgtgacgagaaacactttgagtgcaaaggcttttgacttgcattctgtgacttcgtgcattccaatcgaatgggtatgcgatgggcaggtaattctcgactaatattagaggaatagggtcaattgttctgctttcatttaggctgattgtttggacatgaaggacgaagcaaactgtacagctaaagaaacgaagcctgaatgtgaaaaggactgagtttcggtgaatcactcattaatcaattcttttactccaattgattctcaaggtgcgattctggtcaatgcatttacaaaagttggcgctgtgatggggacagtgactgtatggatggaagtgacgaaaacaactgcaaggtggacacgtgcggttctgttgacaagttcaaggtcatcacgcgaagagtccacctgaaaatgcaaactgacagttttagtgcaaatcatcgactttctgcattcccaacaaatggaaatgcgatggcgaaccggtaatttaatgttggaatttagaaatttgtttatcaaacctaatttcaatttttatgtgttttgatagctaagtaatgcaaaaaattctttgacaggtaaaagtcgaa

SEQ ID NO: 61295 - DNA, 1409 bp, Heterodera glycines
atgccgaaaagttggggcaatgccaatattggcggcggtgccgccccaacaccgattccatcgcccaaaaatcagaagcaaaaacagcaaaagttggtcaaagtttactaaagatggaagttttttgagggtttgataccaatgacattcgttttttgggtcagatttttgaattcaaaaattcgaattttgtttcattttaagatctttgtggtcaatgtttcataattcttcgttaaattcttttattaaaatagacaaccttcaaaaactggacaaaagaatgcaccaaaagctgatcagaagaaagtggcaccaaaaaatcagcaaaatgggaagccgaaaagtgaccaaaacggtgggccgtcgccgatgtccaaaaaagaaaagaagaagcaacagaaacgtgagaaaaaggagaagatcaaacagaaacatcaacagcagaaacaaacggttgacaaaaggaattgtaaattcatcataataatattgtttatttagggtcaaccgaatgaggaaaatttgaataaaaacggtatagaaaagttggaggagggggaatttgtaactttttgaattttagaaaagaaaaatcacatgaaattggcgcgagagtcagcggagcgactggaagaagcggtcaaaatgatacaggcgagaaaggagggcagtgaaaaggcgacgggggaagaaaacgtcaaaaaggacaaagacgcggtgtacaacatggtaagaaatggggttggacattgcatataccacctatctatttgtctaattgtacagtttatcaagtccaccataaaagggggaagtccatacaatcggaaccgactttttccgctcacgccaaaactttttcgattacccctataataagtttaaaatatcatctatatagagtaaactttaatgttttggggccctgatttgaaattaaaaaaacagcataaaaacaacgaaaagacataaaaaatgttcgcacaaagttcaattgatttggaatggttaatttgttttaaacagcccaataaacgtaatttcatgctataaatagtagtgaacagttccaaatttaacttctttgtcaccttcatttcctttttaacagtttaaatgctattttcccctttttaggtggcttcttccctggaaactttgctgcccgtccgcttcgtttttggccgacttcgctcctccgctcggctggttgccaagcagcacagcagcaacattgtgcaggcagccacactgttggagccaaagaagttcaagcagttcgtccagctgttggacagcagcaatgtcgccaaaaagggtggtgttgccgaagcgacggaggacgacgaagaaaaagcagagcgaaaggaggcgggggaggaggacgaacaacgcgttttggcact

SEQ ID NO: 61296 - DNA, 2552 bp, Heterodera glycines
tttaaaactttggtacccttttagcggttgacgttggcattaccattcacgtgacttcgatcagtgccgtttctgaagtggacatggacatcacattggatttttatttgcgccagacttggtccaggccctataaaaaaaccccgaaaaattttcctaaatttttttttaggtacgacccgaggctggcattccagcagttggacccggagttggcacggcgtatcaaaaaactgacagttggcgtcgattatttggaaaggctgtggaaaccggacacttttgtaatcattggaaatccattacccaattaacacattaataaattaatttataaagtaatttttttaatttcccaaaaatgtcgaggagaggggagtaaaaccctatttgaactgaccataactgtaatttacagttgaatgaccgctaatcttaatcaatttatgattaaatataattatccatcattcccctagggatttaatcgctaattactccattttaattagcccagccccaaccttccaaattgaaattaaacagcatcatttaatttgtcctcacatttttcagtttcccaatgagaaaaccgccgtctttcacttggccaccactcacaattcatttctccgaattgagccggatggccgagtaaataaaatttaattttttataataattttaaattttttatttttcacagatttacacgtcccaacggctgacagtgaaagcgatgtgccaaatggagctgcaggtgatttttcgtcacattctcataaaatgcaaacattttttaattaatattttggcaattaataatttttttaaattggtttcaattttaattttagctgttcccaatggattcgcagacttggtaaagccatttttacaccaaaattcatagattaattaatttagcaaacttggcctagaaagctatggctacgacgtggaggacattggtaggagaaacttacattttaataataaaaaatgaattaattatagctaaaataatttaaatttcaaaatattttaattgaataaattttttatagttataaatgatttatttttgaatatttaaaatgatcaaaagccttcagattattattggggcgaacggcgttcggacgggcgacggcccgaagacgcagtggcattcgacgtattctttttgccacagtttcgacgcacgggttaccgcgtgaccggcacacatatcaccacagcatcgggtccgaaatttcgtgtttttaaatgctttttaaaatttgaaaatgttctggtgcctgctgggaactgagactgggattgatcagggcaaatacatttggtattcgcggaatccgggaattcatcagtgatcaggacagatcagtgcctgacacaaatttttttcatttctcaaaaaaaaggatttttttctatagaaaaagttataaaaaattttgctaattttctgctaattttttcaaggcaactttatttcagattttttgagaaaaagttcatgttttaattgaaaatttaatttaaaaaaactttacgaactgcaatgacaccctaatcaacagtttgtccgattaagattaatttccctataaaaataatcattattgtttttgtcaggtaaatatgctcgcctctattttgaagtgattttgtcacgtaatctcggcttctatctgatgaacattgtcattccggtagggaatttgtttgaattttaataatattaattgattaattagtctttaatccctttcaaagtccatgctaattgttgccatttcgtgggtgtccttttggctgagccgcgaggcgtcgcccgcccgtgtcggtttaggcgtcacaacggtgcgtttgcaaattgagcaaggccgaaagcgatttattaacggcacaaacccgtgactatttttttaaatgttgggccaagtttttacacgaaaaatgaccttttgtgagatatttgtcccaaaatcccccaaaaaattgtaacaaccctttctagacaaaacaacgaactttctgcccatggaaaagttaagccgtgaacggggagtgggttattagctgtccattaaattatttgtttgttcgaaatgttggcatttacgcaaaattaattttattcgttaagcttttactccgtcctcgggtctcaactcgagaaattctcgaaaatctggttaaacacgccttttcggaatttggcaggtgctcacaatgacaacaccgatcaccaccaccaacaacacaatggccaaaggtcagctacatcaaagggttggacgtgttcctcaacttttgctttcatcacggtctttggtgagtctaattttgggggaaatttaattaaattaaaaatttatttttaatttgtttaggccgctttgggtggaattcgcaattgtcagctattggaataagaggcaaagcaggcgaaggcaaaataaattcaattttttggaaaaacattggttaattaataaacataaaaacaaaaatcagtcatttaataatgcaaaataaaataa

SEQ ID NO: 61297 - DNA, 1136 bp, Heterodera glycines
gacaaaaattggcggaatgttgcgccacaaatacaacaattcttcttcatcattttccattgtgcttttgttcatcctcgtcagaagcgaatttggaggtgttttaaaatactattaattatatattattttaagtttttaaataattttattaaaaaatatttagaaaaaataattttttttataaatgaatgaaattttcaatttttaattaaattgaaaatattatataatttagttttaaaattattatataaaagaattcaaaaataaaaatttattttcaaattaatttatttttaataataaatattttaatttatttaaaatatttttaaaatttttaataataatttatttaatatttttccttaaaaatatttatatttttgaaaattaattttttaaggtgtgacgggcacacttttgagtaccgaaaatgagcagacaaatggcgttggcgaatcgcagcagcagcaacaacaacagccgatggtccaatggtcggacgcgtatcagaaccaaccgcaacacaaccagcagcagtacgacaacaacgggttcaacaccacttacatttcacaggtggaggaccaaaataaatgaatgaatttgggaaacgaaacgatggatttttattttttattttttggtattatgtataatttttaattcttaaaataatattatttgaaattaattgggaataaaataattaaatttgagaattttaattttatttggcatattataattttaaataattaggaatttattaaattatttgatcatttaaatttgttttattggtaataataggaattatttgaaatttgaatgctgaatataattattttttttaattttgaaaataataattatttgaaattaactggaaataaaaaatttatatataaaaagataactcgcccgctcgacgaggcgttataattttaataattaaattattatgaaattatttttcatttaatttattttattgttagtaacagtaattacttgaaatatgattgtttaaaaatataatattatttctccattttctcagattctcaatcggctgaccgattctaaaaagtatgacaagcggttaaggcctcggtatggcgaaggag

SEQ ID NO: 61298 - DNA, 1449 bp, Heterodera glycines
  unsure (1)..(1449): unsure at all n locations
ggcgagtggggagaaatcgcaataataattntgagggggcgtttgggcttaaaagaatgggccggcatgggatgaaagcacgcagcatttccaattcgcagcaggaggagaagcgacgtgagcagtgcccgcattgtgctgaccttgcgaatggccaacgttgtccttttgctgctcgtcaatttgctcattttctcgggaattggccattatcaggacaaaaatggcaaccgcatttctcttctcctcacaatggacaaatggtcaaatgcctttccctctgataagcgttctctcttaatgaccttttcttaggacttttcggccgggatttgcttttgacgaacttccggcgactttctccgagattagactttcgtaagtccccccccacttttcgctttcacttccctttccctcaaaatcagtgcccaattttgtgcgtccgccttaagcgtggcgatgcttctcacttccatttcggtaaaataagccgaataaatgagcccaaagaatgccccccccccctttgtcagttgcaaatcattcattgtctccgcttaaaacattccaaatttttggtaattattttattaattattaaatgcctccttttctcctccttttcttttttcttcagtgcgtttgccattcttttggctgtgtgccaatttctctttttgtttttgggctcgaaatgcattacaggtgagcaaagcaaatcaaagcagcgatcggtgatttggcatttgcatttgcagtgcttgcccttggctggacgattttctgaacagacaaataatgcggcgaaattttgcaactatggagaaatatttcgacacacaatgtgggataaacggatgggcattagccggggtaagtggaaaatggccaattttaatttgagaaattcgaacattttaattttataaggttttaaaaacaaaaatatttaattttcatcattttttcttttcatactattcattaatagggataatatttatagtcaaaaaattaaaaaattacaatgaaaaaaaattaaagttgaatgtcttttttgaaggagttgatgataatgtggttcttttatctgtgagtcttctgtgtgcctccgctaaaatatgtttggtttttaccaaaaataagccgaaaaatgaaaaaatttccaaaatatggctgatcacattttatgatctaaaaaaatatgatttaaaaagttggaaattaggaaaaatatgactgatcataaaatatgattcctaatgatcactcactcactgtgatcagaatgtgtcttttggcagggaaaggaagagcaattaaataagcgcaaattgacagatcttttccctgctctcttgcggtttgttcatcagcgacggactgatcgtcactttcttcaaatccgacgaatctcacagcactgagccggagaaacagcagcag

SEQ ID NO: 61299 - DNA, 960 bp, Heterodera glycines
atggcggaggatgaagcggacaacgacgtgctgttggaagcggctgagacaaaggacaagcggcacgctaagctggaccatttcttccgcgaggcgtattcgcgggtgcgtctactaattccgttaaaggaatttatgcctcaaaaatttttaaaatttatttttgaattgcatattgccagtattatacctggtacggcttaaaaaacatttgcggacggtataaatttcgcagagcgggccttaattatcatgcatttaaattgcaaaaaaaattctatttcagtccctttccgaaaacacctcaataaaactcaaaataaatgtgtttataagaaagactctgcctttactttatatggacttaaaaatcaaagctaaactttaactttaatgagcgtcaaaatgattcattttttaatgttttgttaaaaattaaacttaaattttaatttttaatttttctcatcacggaaaatcacaaaatttctcataaatcaaccattcttggtgtcatccaattgcttcaattgttctcctctattggccttaaaaattcaaaaaaaaaattatagaaagtcacagcccaaattcaaagacatttttaaggcttttaacatgccgcagttgagcgatcacacgaccgacttcaacacttatgcttctgcacaggtaaactggattttcgaggatcgaattttgatacttttggtcaagtctcgatatttctctcaattctcgaggctaaatttcgagcacttagtcttgggaaatttcactgttttattgccaaggtgatgaacatgacgctgaccaaggcggagtttgctgaagcgctcggcatgcgtgccaacgaccttttcgtgcagcggatgttcgcctgcatggcgcacgacgcacaaaacgacacgacagtcacattccaagaatttttggaggtgctacgaaagttcacacagg

SEQ ID NO: 61300 - DNA, 1731 bp, Heterodera glycines
atgggagcaggtgagtgagtccattcgcagcaaaatgtttgggaattgggaacaaattggcaaaatcgtcctgtctataatgataatcattgtttttacagactttttgatccggtttggattaatgattagagatgaatacgttggcagaggaacaacacgacgcatgacttttggtggaaacaaaacgcaaaaaattgtgaaatctccagcacgcctcaacatgatggatctgaatgcatctgtagaagttggtaacgaaattgagctcagtctcgttaagctcattgaacccgcccaaacccaggcacacaaaatcgcaggaaaacgaaagagaccggtaaaaagggctcgcttcagttttcgggcgccaaaagtactcattgggtttttagtagtttttcttcccaatgcttttgcaaatcccgatgtgaataatcaaatctcaattcaattcacttctccttcaatgatttatctgcttatcattcccatttctgatttttatcactatttcagtactgctccgctcaaaacggaattcagaccttccaatgctcccaaatctgaatgcaatttctccacatcacgccgtggtgcagacattgattaactccacacacgtccgctgtttaatggacactggtgcaagtttgactgttgcaccacgatcagttgcagatgagctcaattgtcagacatattcatccgatttggaggcaatgagtgcctcaggacatgtcattcgcctcaaagaatatgctcaggtgaatttaaacattgctgggtacacagtccgttcattaatctattttgtggatgattccgaatttactgtggcccgggattacagtgtaattgtcggttgggatgtctttgagaaattgcccccaataaaattcgatcatttaaacgggaaattttttgttggggagaacgaagccaatttatgctatcgttcggtcctcttacttaacgatttgcgcgtgtcggcagagaaaaacacgctcattccggccgactcccaaatattggtcgatgcttcaatcgaatcatccccaaacccaaaaaattcattttgcattgatcgccctgacataagtcttattaaaaagggactgtcagtcattaatagcgtctcgcctgcgggccagaaacaaataaaagtggcagtagtcaacccaaccatggaaccaaaatggatttggaaaggaacacatttggcatttgccaacgaactgttatgtgaccgaaatgggcttttaaaggaaaatagcacaaaagaaatccttgcccttatttctgaacgaaagaaaatggaaattgacccaacatttgtagtcgacttttctaaggcaatggttgaaggcaaagatttagaacagcttaaagcattaattgaagaattttctgaggtttttagcaaatttaggtatgatctcggacttttcactgccgctgaacatcacataacaaccacaactgaggaaccaattgcatctgcgccaagacgaatgccatacaaatacaaagaggaattgaagaagcacattaatcagcttttagaagctggagtcatggttgagtctgacaccccatgggtaaccccaattgtcattgtgcaaaagaaggacggtggaattcgtccctgtttagactttcgcaaacttaacgaagttacggtgcccgacaagtaccctctcccacgccttgacagcatcatggaaaagg

SEQ ID NO: 61301 - DNA, 471 bp, Heterodera glycines
atgccaatttgcaaatttgactctgttggtgtgtcaggtgagcgcctcccgccgccacccgtcgcttcagctccctttttctcgaatcaacgccaaaatttgtgtgcccaacagcagccccagcaaatttatgtccaaatgaattacacggcaaattgaggcaaccaaaattttgtgccaaattgccgagaagcgaaaaacaacggacgaacgaaccattaaactgaagaggagagaaaaggaaaagcaagcacaacgagaggacgaagaaaagagcagcagacggagcagaagaagcagcaaatggtgcgaccgacgacgggaggaggagacgaagacgaagcagaaacaacagcaggaggaggaggagagaaaacagcagcaggtgaggagagtaaagagatggagatgagccagggatgggaggagggagctggagcagtaatagaaccaatggaaggtcaaaaatga

SEQ ID NO: 61302 - DNA, 156 bp, Heterodera glycines
atctgctgctgcgtcgaggatgacaaggtttctacggactggctcgaggaacagatcacaggtaaacaatccaacttcattccctgtaaaaccatcttttaagacttcgaagacctggtccagtcagtcgatgtggtggcgtttaacaaggtttaa

SEQ ID NO: 61303 - DNA, 259 bp, Heterodera glycines
aattgaacgctaacggacgacctaatggaaaaaaatccccgaaggagagaatttaattaaatccattccttcgggggaccgtgccgggtgccgcggggtaagcagtgctggttcgtttcatcacggcaccgaaccttttggctagtcagcaatcgttgcttaacttgccagatcggacgggtgcacatgattccactgttccaagcaccccaccaaaagcaaaagaaaggtaaccaaaatataaggaaaaattttttaa

SEQ ID NO: 61304 - DNA, 1977 bp, Heterodera glycines
agaagcgatgggccgttgaaaaccaaatcaagggaaattctgcaccaaattgtcactcgctgttacaaccgcgcggttgacaatgaaaaggcactgaataagcattacgaggcattctcatcacaaacgtatggcgagacgagctttgagcggatgaggatgatcatcgacgagttgaggccaacggaggtgggccaaggctttaaatttgattgcttatctcaccacagagggacgttttcgttgatttgggcagtggcgttggtcaattggtcgtccaagtggcgggcggatcgcaagtgcagaaagcagtcggaatagaaattgccaaactcccagctgattttgcgagaaaattggagtccgagttcaaaaggtattttattttttccatttaatataaatttgaattcttttatataattcagattgatgaattggtttggacgtcaatttcgcccttttgagttgaaacatggcgattttttaaatgaacaacacagaagcctgatcactgaagaagcaaccatcattttcatcaacaattttgcattccaatccgatttggagatgcgtattaaacgcgaattgctcagtgacctcaaacaaggaacaagaattatttccaccaaaccgtacgttccgctgaacaaacagggcgcaatcactgatagacaactaaatggtgagcaatactttttggcatcatttcgaagtgtttttagatatttctgtgatcaccgatgtcgttgaaatgaaagcatgccctaacccttgctcgtggacttcagcttatgttccctactatctgcacacaatcaaccggaagaagttggaaatgtatttcacccaaaagaactcttcgcgctgcaaatcgtccgactttggcagccgccgttcgtccactcccaattcgaaggcttcaaattctcgggaatcgagtttggatctcagagacaaatcagagaacggaaggacgaacggagaagatatttggtaagttatacaaaagtgctccatctttaatatgatttatttttgtagttttggtccaacgactcggagaaaatggcatgaatacgtaagtgatctcgaacagcaaaagaagcggaagggcggcgctgggagttcgacgacgcctgacgagcggagtgtcaccaactcttcttccggcacccctacgcccgtcagcgcctcttctgcccctccttttgtgtccacggcacttccaaacaatgccaatgctaacacgccgcttcctcaaaagaccatctgcgttaacaacttaagaagaccttcttcgatcccggaattgataaattctgtaaaggaggaaccgctcgtggagagttcaccggtggtggacatttcagtcggaccagcgaatgcattagttgtgaatcccatccatcagcagcaaaaccatttaataaatgaagtttcaaaatttggtgaatatttttgaatttgaaacaatgggaattctacctcgaatttagagccaataacgccagtcgcaaatcgaaaaaacgacgagggcgatggcaagaaaaacgtggcgaaacggagcaatgaacgcaaggaaaaagttcagccgacggttggcggaaaacgtggaaggcccagcaaagcggacaaaatgcttgggacgcatgcgagtccgaagatgccacggttgtcggacgacgcaaaggatggcatggaagtgatgcaccaaatgactctctcagtacaagcggtaataatccttgacaatgtgagcgtcatgatgtccggttcagggaaagcccattgaccctgcttcaattttggctgacatggcggaggcaaaacgccgttcagtaccaatggacactatcaacatggctctgccctttcccaatttgagcaaaccgttcaccgaccaaactcaatccggaggagacattcaaagccatcattacaccgagagatacccgggcctatcgaaatttttag

SEQ ID NO: 61305 - DNA, 739 bp, Heterodera glycines
atgtacaacacggttccgtgccttcatggaatatgcgggcccggacggcggcttttgcatacggtaataattggatacacggtagattgtggacaaaaaaactgtacactaaataatgcatatggaaatatcgattgtgatagttagtgtacggtagacaaactgacaaaaaaagtggcatatactgtaggaaagaatacgatcgacggtgacaaaaaatgatataatgtagagaaaaacggtagacagtgcccgaaaatgatatactgtatgaaataatacggtagacggttcacagaaatttaaaaaaaaaattcaggctcaataacaacgcggacaaggatttgagtgaggatgagggcatcgatttggaggaggacacgcggagccgaatcagccgatcaaggcacgacggcattcggccagaaattcaaaaaaaaaaaattgccattttaagcctctctgaaatcccggacacgcagtcggcactggtggtgatcggcaaacaaggcatgccattgttggtggaccagcaaacggtggcaaaacggcacgaaaaggtggcacgatgggcgaatggcacattttaatgtcctaaaaatacgagtgtaaaactgcgattttctgaggggggagggggaacaatgacaattcgtacaataatttgtttaaaactgggaaaaaatgcgagcttttttcttaagaattttcaaaaataattgtttgatgaaaaattaaa

SEQ ID NO: 61306 - DNA, 745 bp, Heterodera glycines
  unsure (1)..(745): unsure at all n locations
atggaatcgtatgtgcaagtgnaagatcaagattcgagggactccggcattcgtttggctcaatccaccacctcgcagcaaagctgtttgnccaaaatttattttccaactttgttcgacttcgggttcaaggttcgggaattggtgtgtcatccgttaagaactaactttttttatcaaaacaaattctaatccccttgagtcctattcttcaaccattcagcagtattcgcttgacaccgttgaacggccccaagttccgcacaaagccttccgcagcattaacgccgatacgatggccaaccttttggggtcactaacagaagaacagttccaacggcggttcattctgatcgattgtcgctatccttacgaatacgatgcgggccacatttgggtctgtttctgttgtttctccgcacttaccaacatttggcgcttaagtactcactgaatttgtgggagaccacttccattgagaagctcttctacccagaagaggaagaacggttcggcgaaattattgtgcgaactcccatcttctactgcgagtactcgcagaaaaggggacccaaaatgttcgacactccattcctaattttaatccgattcgttttgcagggctcttgcactgcgagaatttgaccgggtccggaacgagtcgcgttacccatacgtggactacaaggagatttaccttctggaccggggctaccgatacttcttcaaggaacgcaaatttggc

SEQ ID NO: 61307 - DNA, 1296 bp, Heterodera glycines
atgccaatggaaacagtgtgccgaaggaaaagggggaagcgacgtggagaagacatggccagaaacacatcagacggagaagtgaccagcgatggtgggatgccactggtaaagaagcgcatggtgacgaggcgacaagccatgaaagaggccacgacaaccgctgctcgtccccatcggatgaagcgattttcatcgccgacttcccccgttgcatttgtttcttctaatgatttgcttcaccagctcgatttcggcattgttagcattcagccgccacttttcagtttaaacgatgccgcaactttttccgttctgaaacgaatcggagaagagcaaaagctgtctttggaggaaaggaggttaatctcgggtgattagtgatgaataagcattaagcttcaatttagcggttctttcctcttcagcagaacgccaaaagggaatggtctccgtcatcatggcgatttgctgacacttacacacagaccggatcatattcaagtgagagttaattggggaaaaatatggaatcggaatttgcattgtgattgcactttttaagattgatggatttcgtaatgggaatttgattgaagagacaacggagcgatggcccaggacaattgagacgttgccattgtttatcaaacatttggactgcaaagtgcggcacttttttacttgattctgtgaatttgtgttcttgttgccttgtcccttttgattcacttattttgcaaattttacataaagttcttcatataacatcttcacttaaaaaattaaggaatttttaaactttcgatctttaaagtcgtcaaggtccccccattttttcaaatgctttcccactcaaattgttttagatattcatagggattacaaaccaatatttaaagaatttgttgttcacttacataataagaaaaaaagaaactgaaaaaccgtaaaacgaaggttatttgaccacagccaaattcttattctagcaaaaatataaataacttgctcttttctcttaattacaggcaagggttttttctgatatcgtaattatttcatacagtctccattttcgagaaaattggtatttttgccacctgtcacttgtctcaaaacttgcatatgactgtattaacatttttaaacaaatttatttttctaattattattttataaattacggtatattttttaaactaaataggtaagttaaattaatctaaattatttttaattgattagcagggcttcttttattatgtaagaaaaatcgcgaaatatgtaaataaa

SEQ ID NO: 61308 - DNA, 180 bp, Heterodera glycines
cacagaaatttacggaaacgcttggaaaaataaaaattggtagtttgagttggtccgtgtacgggcgaccgcctcacacacagtgatattgcccctcattagatttcgacaacttaagcctcacacccgagcttaatcgttatgtggttggtgttgtttcatgccgccaccaaactttct

SEQ ID NO: 61309 - DNA, 1923 bp, Heterodera glycines
atgtcaaacagtttctttgtgtttttacccagtaatgtgagtgattacccggacaatcagcccaacaaatttcgtgtccgactcccaaaacctttgcattttaatggaacgtgggtgtgcgggttgcacagtatcagttacccctactcgtggtcaaccattggcacattggatgagcaatggattgacattcacttcaccgaccgcagcgctattgatgaggaccgacaaagaattatcagggtgccggtgcccaaggcatcgcatagtagggttgaacagctgcgagactttttgactgctacattgcggaatcatagtggtgcaaaaatgttgccactccctcgtgagttggaagagaatcgaaatcggacaaagcctctcaactcaccaccaccggcgaagagaaacaaaagagatgagtcaccaccagtttttgatgagaacgggaacgagcttggctctcccccgtcttacaatggagataaagaggatgaggaggaggaagggataatttctgagtcaccgcctcattatgaaggaaacgagactgtaacaattgactttccctcatcatacaatgaagattatgaaggtgtgattgcggattcaccgcctcgttatgtagaaacgcaaaacgaaactgtaaaaacatcaaaagcgacctctcctcagccgccgcctaccccaagcactgctaagccggctccccctcctccaccaccaccgtctacaaattcgactcctatttcaataaagacaccggctgtccaaccaccaaaacctacagtatccacccctccaccacaaacaacaataacaaaggcaccaccgccaccgccgcctactaagtcggctccaatagttaacccatcaattacaacaactacaaaaacaatacctacccctccggtaacaaaacctactacaccaacccctccggtagcaaaacctacgacatcaaccccttcggtaacaaagccaacgacaccaacccctccggtaacaaagccaacgacaccaacggcagctcctaaaccgataaagccggcatcgcctgcacctcaaccacccaagccgtcaacgcctgctcctctcactacaacaacaaaaccaccagtcccaagcccatctgttaaaccgacaatttcagcaccaccggctcaacaaccaaaaagcccgacaccatccaccaaaccaatagtgccaaaaaccgacgcgccacctaaacccccacccccggtttctctttccgctaaattgatccctagtgcaccgactccgccattagactctccacctcgttttgaaggagaggaaaataaaaacgtcaaatcatttgcaaagccaccaccaccgccgacatcagcagctcaaattgacccatcgcgtttgattcacacgctcgacccaccaagaatatattttaagactcctccagctaaccaaaaccctttgaactatgtgccgaattcggtgatagttctctttaacaatgatgtggaacgattcaaggttgtgttcaacgaggaaatcatcagtcatttgtccttctcaccgcaattgggctatgtccttgggttcgaaaacccccagcatgtggtgtcaaatgaagttgccaaatacggacatgatttgcgaggtggcatctcaagctttgctgtctactcaaaaggactgaccgagaatatgatcatcgggaacacattgagctctttgctccgggttgtgtctatcagcggtgccacccctggggactacactgagaagatttacgactcaccgatatttgcgcgagtgttaccacgggaaataaacgaaattgagattgaactgcgcacaatggacaaaggtcgattagtgccgttcgcctatgggacgacgatggttgtgttgatatttaagaaagtgataaatttctga

SEQ ID NO: 61310 - DNA, 81 bp, Heterodera glycines; identical to SEQ ID NO: 58971

SEQ ID NO: 61311 - DNA, 1130 bp, Heterodera glycines
ctaagggcatcacagacctgttattgctcaatttcgtgcttttgaacaccgaaaatccctctaagaagttgtgcccacagatgcaatgagccaactatttagtaggctagagtctcgctcgttatcggaataaaccagacaaatcgctccacgaactaagaacggccatgcaccaccatccaccgaatcatgaaaaagctatcaatctgtcaatccttacggtgtccgggccgggtgagtttccccgtgttgagtcaaattaagccgcaggctccactcctggtggtgcccttccgtcaattcctttaagtttcagctttgcaaccatacttcccccggaaccggaagactttcgtttccgggaagctccccaccagggcgaataaatccgccggcggatcgctagttggcatcgtttacggtcagaactagggcggtatctgatcgccttcgaacctctgactttcgttcttgattaatgaagacattcttgccaaatgctttcgctgtagtccgtcttgctacggtccaagaatttcacctctcacgtagcaatacgaatggccccgtttgtctctgttaaccattatctcggtcagcaaaaccaataaaatcggaccgaaatcctcttctattattccatgcacgaacattcaagcgaaacgcctgtttgaagcactctgatttgttcaaagtaaactcgccagcccaccgacgccgaccggtaaaggccaacgccggggaaagaccggcagaaaagccaaccgaaccagtaacacacaaagtgtgcaccggacggctagcacagatccaactacgagctttttaaccgcagcaataattctatgcattttgagagctggaattaccgcggctgctggcaccagacttgccctctcatagatactcgttaaagggtttaaattgtacccattccgatgaccggcctcataagagatcggtctcgttatttctcgtcactacctcctcgcgttgagagtgggtaatttgcgcgcctgctgccatccttagacgtagtggccatttctcaggccccttctccggagtcgaacccttatcctccgttacccgtcatcaccatggtagtcagatacactaccatcgaaagt

SEQ ID NO: 61312 - DNA, 333 bp, Heterodera glycines
atgatggatgatttgtacacagtttttgagcggcggccagatgaaaaaatttttaaattcaatttaactttcgttaaatttgcgtcggaaattgccagtttacgagtgatcaatggcaaccctgacaccaacttcaatgaccatgtaatcggattagttacctaatattttggggttcgtatcaacaaaacttagaatacatttcctgacctaattgcctgggattttaagtttttcttaatttaaataaaaccttcaagtatcaaaattttttaatttcagatgcttcatcacaatttagcgaggaacgcagccactgattttgatggatga

SEQ ID NO: 61313 - DNA, 304 bp, Heterodera glycines; identical to SEQ ID NO: 51570

SEQ ID NO: 61314 - DNA, 1211 bp, Heterodera glycines
atggcttcatccaaatcacccattttccttctcaccgtgctgctgatcatgctgctgatttgtccatgcttcaacaacaatgtcaacaacagtctctttaatcccgcttgttcgtttatttagaaattaaatccttaatggtcattaattaatttttattatttttcagcggatgattgtgttgtggccgttcgtaatcggtctgagattccagatggtgtcagtctgtatagttttgtgccattttagggcctctgttttggaaatatttgttcccgtaattatttcttcggttctttcgcttggcaaaattccaatacgtgctaaaaaccaaaaattcttcgaatacattgtgccaaaaccacagggcacggatttatatatatttttacatgtttttagtttggactttttggggtttttagcgaaaatttcgaggcttttctagcaaatataaatccgggccctggccataactattttgttgaaacacttggcaaatttttacattgcagctttatgagtacgtgtatggcactttgcgtacacctgaactgcgggaagcagccaaaaaggcggacattttccgcaacacatttacaacggattgcgtgccatatggcgaatttggcacaatttggggcggattttggggttgcctgacatatacctgcaaagatagtcagcaaattagtttctgttcatatgttattaaaagttttctttaaatcttgagtgtttggcaaagacattttccgcgtgaatggatgcttcccaaaaagtgacaaaaagtgcccggcaattttccacgattattgttggttagctactggggatttgtggaaatgtcgtcattgtgatgagttggtcgacggcaaagtgtgcaacagctttgatcagttgatcaaacttgatcagcctgctgacgacttgaagtcgaacagtaacagttacagcaccagcaaagccgagaagcttggcccggcgccataaagttaaaaaaaagagtaggggtcgtttcggcaccagcctaagaatttttaatttattttgttaataatcattttaatttatatttagtgacgatgttcattttatggcattaaactggcgaagaatgaaggtgatatgatgatgtaacgaattgaaaaaaatccaatgcgccaaaaatgaatcatttcgatccaataattgatcaaagccaaaataaa

SEQ ID NO: 61315 - DNA, 691 bp, Heterodera glycines
ctttatgagtacgtgtatggcactttgcgtacacctgaactgcgggaagcagccaaaaaggcggacattttccgcaacacatttacaacggattgcgtgccgtatggtgaaattggcacaatttggggcggcttttggggttgcctgacgtttacctgcaaagatggtcagcaattcgggaataaatacctgattttaaaaaactggggattataattcaacaaaaacggtaaatataggatcaattttgggaggcgcgtcaaacagattttagtgattaaatatcgtggttttaccaaaaattctttttcatttattttccctgctaaaatataattcaattataaaagttaaaaaatgccatattttccaattgcttggactgtgtcggtgctgaaaaacaatgtaaaattaaatttcttaatctttttaagagcatggtaaagacattttccgcatgaatggatgcgccccagaaagtggcaaaaagtgcccgaaatttttcaacacattctgttgggaagccggtgggacttcgtcaaactgtcgccattgtgacgagttggtcgacggcaaagtgtgcaacagttttgatcagttgatcaaacttgatcagcctgctgacgacttgaagtcgaacagtaacagttacagcaccagcaaagccgagaagcttggccctgcgccataa

SEQ ID NO: 61316 - DNA, 387 bp, Heterodera glycines
atggcattaaactggcgaagaatgaaggtgatatgatgatgtaacgaattgaaaaaaatccaatgcgccaaaaatgaatcatttcgatccaataatcgatcaaagccaaaataattttaaaaattattattattatattaatatatgtatgccaaaaattgaaatgattaaagtatatttgttgttgaatgattctaagtatattaacgaaattttaattacatgtcttttttgcagtcaataagtcatttgtataaagggattttattttgcaagattcaattttatccatgtaaaattcgcttgttaggccttaagcaagccgtataaactgtaatttattcaattctataatttcatggttcaagaatagccctgctgaagtaa

SEQ ID NO: 61317 - DNA, 237 bp, Heterodera glycines
atggacggagagcacacgggatcaacggattgggcaggcggaacatggatatccaaaagcaaggaacaggcgctaacgtttagcaaagaggcgaaaatgaaaacagcatgcaacggaaaaccgattcgcttgtcggaccaatcgtttggaatcctggaggatgattacctgaagatcgtcaacgattgtggattgggaaaaagagccatccaggaggagcaactcgcgcacaattaa

SEQ ID NO: 61318 - DNA, 571 bp, Heterodera glycines
atgttttattttttctctgtaatttcttttacaattattgttcatccttgtttaattcgaattttaaatgcgagtccatcggtgagtaattatttgggcaatttaattttactaatccattttaattaattaggtcgatgacaaaatgctaacggcatttatgaaaggtcatcaagaaacgcaaattagtgaatattcaatgcagaagtatgaggcacaccttggcattatgtattatatgagaaataattggcactgtgacaaaatagcaaatgaatttgcagaatttgaacggacagaatgccaaaaatatcgcaaatatttggacattttgtacgaatatttgttcagagaatacatcggtattcacacagtgaagccaaaatttgtgtttaaaaagaaacattttgaaattgaagggccaataatttatgcgataaattgtttggccacaatttcacagttttattgctggaaatatgtatctaaattatattattcctcattaaagcgtttcttcaatttgtattttgcaccaaaattattgaatgaggagggattaaactatgaa

SEQ ID NO: 61319 - DNA, 410 bp, Heterodera glycines
atgaattggcttattggacctggatggtcatcagaccgtcatatgagagaaatcttattggggctgagcacactgttggaagagccgaattttgagagcccattcaacgaagacgcaagggtataaacggaaataagttctttaaaaattaattttatatagacacaacacacattggaccaaaatgcgtatttcgaaagcgttagaagaactgcagaaaaagcaaggacgaaaaatatggtaaaaagattttatttctttgtaaatttgaaaaatcaaattcctttagtcgcttactgatggctgattatgaagattgtaagcccctggcgctgtaatgaatataagggtgatgtcaaatttttttcgtcgcatcgagataatgttataaatccgttaatgtaaataaa

SEQ ID NO: 61320 - DNA, 865 bp, Heterodera glycines
  unsure (1)..(865): unsure at all n locations
atgagccaccatttggcaaatcggtctttttttcgcattaaagaagattcagncgattgcttggagtgtaagtaaaaaaacgttattaattttcatcttcatcattttttggtttaaaaatatatttgaatacttttttatactttgaaagacttttttattaatacagaattttttcaaaatttccaaaaatccgcaatcctgcgcaggatcctgcagattttaaatgcaggattgcaggattaatcctgccggatcctgtcctgtaaaaaattttgaactccaatcctgcaacaggatccgcaaatttgaaatttccggtctctaatgcaaatgccaatttaatgtgccaatagcaattcagtggcatggtgcccacgccaaacccaacgtggcattaatttctctcgccacgtacagaaaaatggcatattattttttgatccattgtttaattttcacccataaatcaggctttagcattgcgtggcaaattgattattagcttttttaatttacgattgaaaaaagcaaaagcataaattaataattatcaaatacctaatctcagtttgtaaatttatatggagcagctcgtttcgccctactcgaaaaaattaaaaaaaaaattaaaagttttaaattttagaaattgatggctttttcaagaaaaaaatcacctttcattacaattctttaatcaatttttctaaatttttatattttccaagaaaaattaaattcaagtattcaaaaaatcaaattttttttgtttttagatctttttatcccgaatcttgatttcgactttcaaaaatccgctctttattcaaatgcatatttaattgcttaaataaaaaatgaa

SEQ ID NO: 61321 - DNA, 230 bp, Heterodera glycines
atgtggaaggtattcatgcactcgcttcgggtggattatttaggaaattgtgatcggaatgaaacgaacgcaatgatcaaaatcaccaaaactggcaccaatgaaacggttggtttgttctgtatgtgccagggaaggcattccgaggggcaaaaaattttcggaaattggaattccgaatcccccgaacatttcggaggtaccaaaatcggacttccgtgccattcctg

SEQ ID NO: 61322 - DNA, 1005 bp, Heterodera glycines
tgaaaagaaaatcaactgaagagccaaaacccgacacggacacgaaacagtccaaacctgagcaacaaccagcacaacagaaggaaggaaaatcagaagaaggtcaaaaaccgaaaactggtaaaaaaccagaatttttgttgaaaaaagcaaaacatcccagtagcatttctgtatctgaaagaaaagaggccagagtttactttaccaaaatttttgagcattctgaattgttcaaacgttcagacacttctgattctgaataaattttaattttgtagacacatcatccttgtcaaaggagactcaatttgtcttacaaaaactcagacaacaagaagcaatcgcacaggcaaaagaattgtcaaaagtaataagagaagttcaagcaacaatcaatttcaacaggaacactgaccttattagttattcacgagctttacagaaagcaagccaaattcctgagcaggacgaagccaccgacaatttgaacttccattcgaatttctctccagaaattaacaacaaatttttggaagaacttaactctcttgaatcaacacacgacgatatctacaatcgtgccgtggccgattgtgagagagcagaacaaaagcgtataaactctgttaccaaacaaacgcaaaatatttttgaagccgtgggaaaggctatcaaagctgaaaatttcaacaagggactactcaccgagttggcaaaagccatcaacagtccttcatacaacagtcgcgctggaaaggacaaagcattaatcattgtgaataaactgcaggacaaccttacacatcaccaccgttttttgattggacaacaaaaaacagctgaattcctccgaaagacattcaaaatcccgctagaagacgaaccgtccactagtgcgaacaatttggagaaaaaagattttttttttaacattatttgaggcgatcagataccaagatttttgatcactattgttgatactgtgatcgtattgttaataaa

SEQ ID NO: 61323 - DNA, 853 bp, Heterodera glycines
atgaagaagttattacataaatttaggaaaaattcgttttttgagaaaaaaaaatttataacgctgttctgaaaaggtttttttgaaaaacacgaaattcttcctctataagcttctgtttattctatatttttataagacttttgaaaaaaagtacaaaaataaactgattttggaattcgggatcataggtgggagcaaatggtttttttggaccatgggttcagatccacttgcctgtaaaaatgtttttttagggtttttgggaccactaatcaagaacttggcatccattttgcccaattccaaagctttgatccaaactcgaaaccccaaaaataatttttaaaaaatgttgcaggcatgtggatttgaacccatggccaaaaacccatttttaacaaaacaaaaaatatatttggtataatatttctatatttgcttgaaaattttttagtgattttcatcaaaatcttttccagtgcaatttattaacagaaattttttctaagctattgcttcgctattagacaatttccaaaaaagttatacataaaattgcgaaaagtcgaaatttttgaagttttttcttttccaggcttgaaaatcttttcgcttttggtaaggctaatagagcatatgttaagagctttcgaatgataccaacaatgttggatttggatgtcaaagaaaaaagctatcgtggaaaaacgagctggcgccgaaacgcgagcaccgaaacgcgtgggtcccgtttgtacaattagtctttctaaaatattttacgaatttaaaaaaaatactaattttttcagaaaatttttgtctgttttaaaagtatttaaaatagcaa

SEQ ID NO: 61324 - DNA, 88 bp, Heterodera glycines
tcattcagcgactttggtttcctggtgcctggccgtgtcgcccgttacatcggcgttcagggcgacttggacccgctgttgaccggca

SEQ ID NO: 61325 - DNA, 198 bp, Heterodera glycines
atgccgtcgccgtcctactccaattttggcagatttggtggaggcggaagaggaggagcatatgggggaggagggagggaagagtcaccggaagagtgggaggatgaattgtcggaggaggaggaagagagacggaaatgggacaaatcgaaagggtcggcggaatgccattttggatgggtggcacaatggcggcag

SEQ ID NO: 61326 - DNA, 683 bp, Heterodera glycines
atggcttttgctcagttttttgttaattgcaagcttaagtctattgaaagcaccgaaagcacgattaccattgcgtggaaaagccaaagcattaccgatgttgaaatcgagtgctatgaagtgcagtacaagaatgtcaatgaagtttggaagacgataaagtgtccgcaagttagtaaacaaaacagggagtgcaagcaaaaaggaaggcattgcatagcaaaaaaaaactgggctaagcatcaccacacaaaaaatgactgaaaaattcggtatgaagaaaggagggggggagggggggggttggggtggtcgagcccgagccgccctccccatttcggcgcggaaggccaaaaaataaaaacaattgcaaaaatatcctcggtttaaatggatcgacccatttggcacatccacggacaaacttttttaaatcgcgaaatgccgcgtttttcagcacgcgtttgtcccgaaaaaatcttacaccgcagtcgtaaagaatctgaagccggcgaccctttacgcgttgacagttgtggcgctaaataagcatggaaatactgtcgatgttttaacaatgagccccgtcgcaactaagcctcggtttacgtgatttgcttgttttctaaatcctaatttatatctttgaattggtttgttgtcttttgactctcatcaataaa

SEQ ID NO: 61327 - DNA, 72 bp, Heterodera glycines
atgtcccctccggatttcctggtcagcgtcgtcctcctcggcgcttcttccctcctttgtttgggtcccgcg

SEQ ID NO: 61328 - DNA, 595 bp, Heterodera glycines
ccgaggaggacgacgctgaccaggaaatccggaggggacattcccggataagggccattgccatgttaagcgatccattttctatattcgtcaacattttcacccctctttatttaaactttccatttctcttcattttttctcatttacataatgttttcttcaactccaccatttgcccttttcttttcaatttttctgccattcacatctgcctccgaatttttgtctctttgttcacactttctcagatcacatttttccatttggccattctttcatctcatttttccctttgtttggcattttttctccccgccgatttttgtacccttcggcgtcgctcttttgcatcttaatctttgcccccccccagggggaaaatgttttggttccattccattccattccattccatttggacacacattcacctctggctcttcactcgttctcactcctcaccattttctttctttttgctgaatcattcccaatttttgaccccctcaataatccttatcgcccttcccttcctccaattttcaccatataatccatcaacatctcgcatataatcatccaccaatttttg

SEQ ID NO: 61329 - DNA, 931 bp, Heterodera glycines
  unsure (1)..(931): unsure at all n locations
atagagaatgaattaacgtggtcgattggaataaatggaaaaaaaagcaaagtcaaaacacaaaaccttaaagcactagccgattgaaataaatggaaaaaaaagcaaagtcaaagacaaaaccttaaagcactagccgattgaaataaatggaaaaaaaagcaaagtcaaagacaaaaccttaaagcactagccgattgaaataaatggaaaaaaaagcaaagtcaaaacacaaaaccttaaagcactagccgattgaaataaatggaaaaaaaagcaaagtcaaaacacaaaaccctaaagcactagccgattgaaataaatggaaaaaaaagcaaagtcaagaacttattctacctaatttcatggtgactgacgaggcatttgactcccttaagagagccttcccttctcatgtacttgtacctaaaatgttgttggcacaaaaagtaaagggggaaaaagaagacaaatcatccgatcaagggctaagtctcaacagatcgcagtgtaaaagctgctctactgctaacaaccccctgaccagtagtcaagtcgtatacaagtgattttgcgccccgacgttccaccatggcacacgagtgctacggctttggcaatgtgcgagcaattaagcacgcacatcgggccagatgctggggcatttgtgctgcaccgcaagcggcgcataagtagtgcctcccgacaccggggagcaagaatattgctatcttgcctaggcgggattctgacttagaggcgttcagtcataatccctcagatggtagcttcgcaccattggtctatcgaccaagcacatgaaccanatgtctgaacctgcggttcctctcgtactaagcaggattactatcatagcaacaggtctttagtagggtaaactaacctgtctcacgancgtctaaacccagct

SEQ ID NO: 61330 - DNA, 3750 bp, Heterodera glycines
atggctgcatttatgcaaaggacaaaaaacacagaatatggtggtgacagagtaaacgaaaaaacaattcgaaaacttgattttattattcgaaaatatcatccacttgcaaaagagctaatgaacttccatacacagtaccaaaaaactttggacgagctaggcccagaagctgttctcaattttcgtttgacattggtcgaatctcgtgaagcaccattaaatataagggacccttctctccatccaagacaagccaacttacccgacgagggcaattctttatttgctatctgggctgaaagcgatcagccaccattattaaaaggcatttggatcactaccgatgaaggaaagcttcaaaaatttcaaccacatcacccacaaaccgattctctttgttaccccacattatttccacatggcgatgacggttttcataccaaaattccttacaactacaaaaataaaaagcgcgatgacgaagcaatggaagttaatgtcgaatctgatgaaaatgcttttgattcggatgaaaatggacccgatgacgatttatcggtcacaagttcacttgattcagttgataaaagtggaacacgacagtttttatctgttagaacttatattcgctaccgtatggcgctgcgaaaagacaacaattttcaccatatttggagcgcgggtggaggcctcagtcagaaatttattttagattattcagctcgcattgatacaaacgttgcaaattatttgcgaaaaccagaattaaatttacggagtactttaccagaaaatgcgcttcgctggctttcccgtaatgcggggcttaactcaaccgaagaattaggtagcgttgttatgtttcgcagatctgagcctgggacacgggcatactttcaacataaattttacgatgcgactactattatgtcaaggtttaagaggccaggatttgcatcattctttttaacatttacgacaaatcccagatggccagaaatttctcgaaattttcttcaccaaggtcagaggactgttgatagacccgatttaatttgtcgcatttatgaggacaaactacgacaccttcattatttattggataagaaaaatattttgggaaaaatgattggccaggaatgcagagagtttcagaaaaaatacggcggtccgcatgcccatcgagtttatcataccgatctgctcgcaataccagaaaatgttgacggattgatatgggcacatattcctcccgagccaaataagaatgacaaatctgattgggctatttttatttgtaaagtgcgtgaattattgccaaaatatcagttccatgactgcgggcgccattgcttaaaccataaagggaaatgtaaaaaaggttttccaaagccgtttagtaaattcacaattttacatgatgatcgaccagctatttatttccgtccgagtaccgaagatggtgggcaaacattgactgttaaaagaggaaaaacacaaataacttatgataattcacgagtgtccgcgtacaatccttatattttggttcactttgaaactcaccataatttggaatatgcatatgggcaaagcacaaatttgaaatatttatacaaatatccattcaaaggtcccagtttttcgtacgtaaagactaatgaagaaaatggaaaaacaggtattgatgagcctgcttattatgctagaatgttatatcgttcatcccctgaggcctattgccggatcatgtcgctcaaatatgctaaattatctcataccgttattgcgttgtcactccatttgcccggtcagcaaaagatttactacaaaccaagtgaaaaagcgtccgtcgctcagcaggttcaggcaggcattttgcccgaaacacctttaacagcatattggaaaatgtgtgaaacggatcctgatgttagaaaaattgtttttgagcgtatgcccgaacagtattcattcaacaaatctggtaaattttggaaaaaacgtactttttcagcacgtccagataatataaaaaacagaaaaccaattattggccgaatttacccggtttcaccacgaaatcctgagttatttgcattatatttactgacaaaacatttccccggaaacccgcaacaattaaaaatggtaaaccccacgcatatctgtcaaacatttctggagacagcccgactcaaggggcttattgatgacaatgatgtgtgggttcggacaatggaagagggtgctgcctcgctcaccccagcacaaatgcgtcaattgtttgctaatatactaatttttggagccactgaaaaatgtctcattgatggagccctgctctgggaaaaatttaaatcacaaatgtatgacacacgctgcacagatgctgagcgtactgctcgtattgaccatgctcttgctcttttagaaaaattattagttgcgcaaaacaaacaatgtaaagattatggactgccaaccccagtgatttcaattatgaatgatccacaacgtgggcttaacgagtttttcttcccccagcagttaaatgatgatgatgatgatgacccagttgacacaacagcatttgaacgtggaaagttgaatgctgaacaacaaaaattttttgatatggtaaaaaatgcttttttgaaaacgtcgaattctcgtctattttatttatgtggtgatggcggaactggaaagacctttttgcttaattatattttatttcaactgcgaaaaatcggcgcaaaaatcattcccactgcatcgaccggaatggcttccacccgcttttatgtaggtggcaccacggtccattcggcgtttaaatttggaattaatgttgagcctggaaaattacctgcaattccttttgatagtttctttggcaggcgtataatagaaagtgacattataataattgatgaaatgactatgctggagaggacagtttttgaaaatattgatttactctgtcgccagttgtgcatgcaaaaacggcacttacctttcggtggaaaatgtgttataatctccggtgattggaagcaatcacttccagtcgtaataaattcttatggtagtgcagctcaagttgcagcatgcatccagtcctcaccgctttacccaatattttcaaaatacaaattgacgcaaagcatgcgagttaatccaaacgaaatagagttccttaaatggcttgatgatattggaagaggattaaatggagacacggtcgcaatcccaaaaggcatgctcgtcgattcacgtgaagatcttattgcatgggtgtttgatcaagggcttaatatgccaagtagcgaaatgcttaagcggcttcttttggctacaacaaacagaattgttgatttgaacaattctcaaatttcgcaatcaatgcttggtaactttattgaatatttttcagttgacaaggcaacagatgaaaacccgtttgccgtaaatgcggctgactttgatgtagcacaactaaatcagctgaatccgatgggaatgcccacccatttgctgcggcttaaaattggatcaattgtcgtcttactcgtaaatttaaacacttcaaaaggtctttgtaatggcacccgacttcttattaaaaaattaactgacaatttaattgaatgtgaaaccattggtagcggatcgtctggaaatggtataattattgggattccccgaaaccggcatacatttaaagataaacgtcctgacggt

SEQ ID NO: 61331 - DNA, 609 bp, Heterodera glycines
  unsure (1)..(609): unsure at all n locations
atgccactcaatttcccagggcattggactttgcttatttatgacataaattatggcacttttttcatggattcgttgcaaataagtgagttaaattttgctcgtgtattgcgtgtcaaagatataattggtgaattgtgtcaaatcaattctgaagatataataatacaaaaacttcctccttccaaactgactcttcaacatgacggatgcagttgtggatattttgtttgcttatatgctgaggcatggctgatgaacaatcaatcgcttattttaccaaacattgatataaatttggaaaaaaggagaattctttggcatataaacagtctttataatcgtgataacgtagtatatcacccgtgctcattgtttgttgccggcgaaaatgacaatttgggttctttacatcattcgcgcgattcatctatgtccattgattcaaacataaatcaaactccagtcaaaagaagaggacgaccagctaagaatcgttctgggtcaggacggccaaaaaagacagaaaataaccaaatattaatgcctgttttttcgcacgaatcttttcatttcaccgaattanattattcangctgctctgattct

SEQ ID NO: 61332 - DNA, 208 bp, Heterodera glycines
cgatgcaaactttggcgaataccaccgaaaagcgtcgaccaatgagcggcaaaaggaagaagcggctgaaggggcggcggacgaagcggaccaatgttcacacattagcatcccggttcagtaccgcaaacattcgtccacctcggaaacgtcgtcactgtacgaccaaattgtggaagcggaaggcaaagcattaattaacaaataa

SEQ ID NO: 61333 - DNA, 1121 bp, Heterodera glycines
atgattttggaattggcaattgatacagcgaatgaatgccaaacaaatgaaagtttagacggaataattcgacaaaattatgacaaaaatttggaggaaatgtttaaaaaagcggagaaaaaggcaaaaaaagacagtccatggaaagcctataaatacaaacataaaataattattagatcgaaattcaatgatgaaagtacatgggtgagatttaacattccatgataattagaaatattcaaattttagactgatgaagctctattttcggaatttgttaagggattagcgacaaattttgagaatttttttaagatggctaaagaatatgcaaattatttatggcgaataaatgagaaaggatgtatttatgggtataatagacaaatgatcaattttgggttatacaaaattaagaacatgaaaatgtatttgatgcaaaaatatgaagcctatcttggccttatgtatttgatgagagagaattggcactgtgataaaattggggaagaatttaatgaatataaacggaatatatgccaaaagtatcgaaaatatttgcatattttatatgaatatttattccggttgtatgctgaaggtttgttagatttttgattattttgaatttttttgtttattaaataataacgataatattttattaagctaaaaacccgaagatgtcgaaacaattgccaccatttgtgaatccaatatttattggacgaagttatttatattgtttaatttttgttatcaatacactgaatgattattcgaaatttttttggcgaaatgatgatttatgggatgatgaaaacgttgaaatttgggggagttttttggtgaatgaggaggaattaaatgacgaaattaaacttcaaattgctgaaaaggcacgaaaaaataaaattaaaaaaaatatctccaaacttcgaaagcaatttgaacgaaaaatgaaaagattatccgaaaaagccacggaaaaagccaaggtagcaaaggagaaattggaaaaagcaatatcaaaagcaacagatgatgaagcaaaaaaaaatctggaagaagaatatgattacatatttggctcattaaattcgtcgccattttcataa

SEQ ID NO: 61334 - DNA, 49 bp, Heterodera glycines; identical to SEQ ID NO: 51181

SEQ ID NO: 61335 - DNA, 519 bp, Heterodera glycines
atggagaaggcctgcaaaatttggagagattatatcgattttagtgcgctaggttcgatgaaactttttaaaatataagcctaaactttttggcctgtttaaaaaggaattaaaaatttttaaaaattttattcatctcccttttgatagaaaaagcatcagagagccttatttaacttttaattaacatttggtgcgtttcagagcactttctgaaaaaatacttatgaattgattttgctaaaaaaataaaaagtaatgaaactttaaaaattaataaaaaattttaaataactactggagttggcatcttttcagtaagcttttcctttacatttttgatgctctcgcaaaatctggttcgcttctgaccagtttataaaaaaaaatcgatgaaactttttaaaatataagcctaaaatttttcgcatatttaaaaagcaattaaaaatttttagattttttattcatctccctttttgatagtgaaagcatctgagtgcctaaaataacttgcaa

SEQ ID NO: 61336 - DNA, 95 bp, Heterodera glycines
  unsure (1)..(95): unsure at all n locations
ctccctntttgatagaaaaagcatcagagagccttatttaacttttaattaacatttggtgcgtttcagagcacgttctaaaaaatatttatgaa

SEQ ID NO: 61337 - DNA, 100 bp, Heterodera glycines
ctttttgacggctgattagccgatatgtgaagttgatcggaatacaatggcctcacattgccatctgatccacgaaaactaaaaaaataataattttaaa

SEQ ID NO: 61338 - DNA, 758 bp, Heterodera glycines
atggaaggaaaacttttggtatttttttattttctaaagacagggcaccgattaggacacactcaatcagttcacgctattgttcaatgggtcttgaccctacaagagtctcgagtttcttggaattggtcgtctcggctttgaattctccggaaattcacattcgagcaggaacggaatttctgaaaatttataagctaaaagtcaattaaatgttttttgacaacgaccctaaattgattgatcactctgatcagaggaaggaaattattttgctgatatttttaaggtgatcgccgtttgtttgtttctgcattcatttgtgccaaaagaatattaccagcatttgcgcaatgcttcatcatctcaaaatgctaacagtttcgtggataaacaattgccatcacaacagcattcggtgcttacaaatacggcacggaatacggtaaaatgaatttaaaattgttttatattttaatttaaatatttttaaaacaattttcgagtttctgccctgaattcatgatatacggctttttaaattaaattatcatttcatatttttcaggaagcctcagtcctggcaaaaaattctaattgacaggcagcaaaaaattttcaaaatttttttcaaagaagccatttttttatacaagacatattccaatgagcaaatctttataataattaaataattaatcaattaatcattgttgaccaaacaaattattacaaaatatgaataatgtgaacaacaa

SEQ ID NO: 61339 - DNA, 2140 bp, Heterodera glycines
atggaaatttttaatttctttttattatttttttttgttggtcaaaatttgatcatagctgaagaagaagtgaagccgtgcaagaaaaagaggtaaaccaatttagttaattgactgtgtggcttttaattagtcaattcattaatgattaattgattaatttaactaattagctttggccatgactcatttgtgtgcgtttgttcgtccgattattgcgactcgcccgaaccattgggcgatgtcagtgggaacaaaatggtgtattatgtgagcgacaaattggcccatcgattggccaaatttaaaaatgccgaaaataaaaatggtaaaataatttaaaaatgccaacaaaaattataaataaattttggagaaggtgcaagtgatgacactgaattcgaagtgcgcgtggacgcgtcaaagaaacggcagcgcattttgggctttggcggagcgttcaccgacgcggcaggcgtaaatttaaacgcattgagcgaacggagccgcgaggcactgctgaagacgtattttgacaaggaaattggtacaaatggaatattgacagaatcacagtcctgacaatttaaaaaaattaaattatactcttctaacattgccaaattcaaaaatggcactaatgaccctgtttgggttacggtacctctcttaccatatgccaaatcacttcaattttccgtttttcctgttttaggcatcggttactcagttggccgtgttccaattgccagctctgacttttccacccgtgaatattcgtatttggacacgccggacgatttcaatctgaccacatttgcattggccagggaggactttgaagagaaagtaaggcattggcattggcacaaatagtcggagagtcaattcccaagaaattcttgagaatttcgggcaaatggtctcgagtcttgaagaattcctaattttggatttaaaatttacaaaaaggagaaatttctgaattaactgccaacattttcagatcccacacattttgaaggccattcagctgaccggaggggacctccgtttgtatgcgtcgccatggtaaaaaattttcataaaaagtacaaataatatttttatttgatgtttatttaaatctttcccttggcatggcatttttaatttcaattttatgcttttcaaaggtctccgcccggttggatgaaaacgagcggacgaatgcgagggtccgccaaaatgaagggcactttggatgggccctacttccatacctacgcacagtatttcaagaggtcggctaaaattgagaaaattcatttatttatgttcgaattataaaaaaatcgaataattattttattattttaggttttttgaagaatatgccaaacaaaatgtgactttttggggcctaactctccaaaatgagccatgtcagtgaattaattaattgtcgtttttaaattttaataaatatatatattttttagttattgtttataacggtaatctcagctggcaagcgcattggtttgacagcaaatcgcaatggtaaaattgaaaaaattaggcaaaattgaaattttattttaaatttttaataattttaaatttttagcgattttgcttctcaattgcttctgccagcccttaaaagctcggaagcatcaaaaaatttggtaattatggcccatgatgaccaacggcataccatcgaagcggagtctaaagatgtaaccaaaaaactgaattttttttttgaaatttttcgattttttagcttttttacgacccgcaaaaaactgcaattgatgggctggctgtccattggtaaacaaaaaaattttaaatgattttgttcgaatttgtttttcaaaggtatgcccattcgacgtacgatccgttgagcctcatgcacaaattataccccgacaaatttttgttggccagcgaagtgccaaaaattgaaaattttaaaaaattcaaaaaatttttctaggcttgtgcaggctttttcgattgggagcacacgccgttgttgggcgattggattcgcggttggtcctatgggcatgacattctgaaccaattgcgcaattgggtggtcggatggacggattggaatttatgtgagggaaaacattcgtaa

SEQ ID NO: 61340 - DNA, 615 bp, Heterodera glycines
tttggaaattttcccacatccggattgggcgatgaccaacagaaccaattgtcattcgtggagttgggcacttagccatggggaaagagttaatttaagacaattaggattaatagcacttgttttttttcgaaggtttggccttaactcgcatttttcaacggaatttcctagcgctctgacaggaaaattggcaccggaagagtttgacgacacattgcgacgtgtgaattacgttcttcagaggaatgtgagcagaaacttgcgctggttgatctgcggattgcttttttgctgctgcagcttcggtatttcgttatggccggtggtctgtctgaacagaagggtaagcggagaaaagtttcatttcaattttttgtaaaaaccaaaattcaagactatttccgctctcgagaaaactctggaccatgaaaatcaacaattgtacgacaagctcggcttgcattggtagcgcacctttaacttttcaatttgtttgctacaaatggcgatttcaggaagttggccaggctgcccgttgagccgtccaatcgcctgacagaatatgtccttctgcttgaaacgctgccacgaattcccctttccatgccggat

SEQ ID NO: 61341 - DNA, 175 bp, Heterodera glycines
cacacacagtgccgagccgaacaatgacagccatttgttgtagaaacgaaagccgggccggaagccgggcgatttggcggccgacgcatcgaaacaggcaaaattggtgatggcaaaagcggccaaaaagaagttggaaatcaaatcagcgatcgagttcagctccccaatcatg

SEQ ID NO: 61342 - DNA, 1442 bp, Heterodera glycines
  unsure (1)..(1442): unsure at all n locations
tgcagacccgaatactgtagtaacgttaattacagtaacacaaatactgtgaaatgtttaaattgccttacattaatttcttttcttgaatttttttccaggtgatctcaaagacccgtctaaatccagtaaatttttacacgaatttaaaatttaattgaaaaaatgcaccatttagtccctcgcggcactttttgggctatcgctatcacaacactcacttatctatggtatgtttgggcatttttcttcgacaataattcagcacttttaccataaaaggtgtatggtgatcacggcattgactactgtacgcgatgcaaccggcttttccgagcctgaacttcatcccacccacccaccngctacaccgtcccgtcgtgccgtgccaatgacacgtgccggtttgggttggcaaatgattatgatgtacggccaatttaactgcttgcgctctatatataattgaatccatggttactatgatcagattctgatttagctagagctcgacattttgaaaaaaccatggacctgggttttctggacaaaaacccaggaaaatgtagtctttttcatgtttgactaaaactggatttctggaaaaaaatccagggaaatccatgtccgggaaaaatccaggttgccgaagaatgcctggactttgacccggatccttcgagaaacccaggcttggatccagatccaggtcgagctctagatttaacccttgttttctgagtatattatcccgaccacatttctcgtctaggttatgaccctgcagggtgcttgggcaccactgatcactgtcggcattttttccaccacgctaagctcggccagcggctgtctgatcggtgcgccacgaattttgcaagtatttataaaagaagcattttaccagtcggatttgtctgacaaaaatttttcaggcattatgtgccgacaaaatgttcccctatatgcacccatttgcgaaaggctatcggaaaaccaacgacccgttcagagcctattttctcactcttctgatcgcaatttcggtgttgtttttgttagcattatttccattagggcatgcttacattaatgaaaaaataagttgaaacctggcttgtcgagaattttggtttttcaagtttttcgaacctttatcttcaattacagttaatgcaagattttcaattttcaataatgccatatccaagacctaatcacaaggaaatatgagaatggctaagcccgctcatttttaggcgatcatgattggggagctgaactcgatcgctgatttgatttccaacttctttttggccgcttttgccatcaccaattttgcctgtttcgatgcgtcggccgccaaatcgcccggcttccggcccggctttcgtttctacaacaaatggctgtcattgttcggctcggcactgtgtgtgctt

SEQ ID NO: 61343 - DNA, 388 bp, Heterodera glycines; identical to SEQ ID NO: 51536

SEQ ID NO: 61344 - DNA, 729 bp, Heterodera glycines
atgttggaacaacaaatggaagaggcgaagaaagtgaagactttggtgaacatgcttaatgtgagaagaaagccgataaaaacggtgaaaaaattggagggaattcccaacgaaatgaaggcgaaatcgaccaatttggaagtgataatgaagacaaatgaacagcagaaaatgaggggacaaggacaatccaaggacgaaaaaaaggaaaagccgaaaaagaacaaggaaaagaaggaaaagggcaaggagaagaagaagaagaagaagtcggacaaaaaggagcaaggagaagcggaagtgcgaagagcaaaaaggaaaagcgacgacccctggggggaagaagggggcaactcggtgctggaggagccactgacactgccggacaacgaaagagacggcacaacgacgggccgatgcaacagcgaacggattagaaagtgacatttggggaggcacttataagcaagattactaatttttaattcaggatcattacgagggtgagtgacggatcgtgcccaattaattaactaacgaactctaaataattaattatatttaaccaaatgatttgctcaaaggcaaaaggaagagacgcatccgcgatcaaacggaacattcaaacggtggcggaacgccaatttgaagccaaattcaacgtgatttgtgccaacgctgacttttcatacatttcgaacaccgacgtacccagaaaaaagcattgaa

SEQ ID NO: 61345 - DNA, 732 bp, Heterodera glycines
atggtagaggaagcggtccaagagcaggaacgccggcggagtatcgtcgtcatgggattggccgagtcggccgagccaaagccgtcggatcgcgttgctcccgacagcaccgctgtctcaagtatactcgatgagcttggcatcgagtgctccatttcaaactatcgaatggccccccccccaccaagcggggtcaggtcatggacggccgcgttccatttttaaatacctacaaaaatactatgttaatccctttgaaataccgaatttagtctttgaaaacaaatgctatcatgatggtgatgaaaaatgtgaattatttgccagcttatttgcaaattcatttaacatttctgatgttgacccaggctattatagcttgggaaacaattatgcaatcaatgctttatatagaggaattagattaaaaaaactaaaaaaatcaatggtatagatttttagttagtaaggccctatccaaatttaaaaaattttgagttattattgcgcgtttgtgcaaaaactaaatatctttaagtgttgtctaccagaataataatgttaatttattacaaaagtataaaaaaaattataaaatcaatgtcagaggaatttcattaaaactaattaacatagtacaaatatttatgtcaaaatttgaaattcttcgaagtttttgatttaaaaggaaatttgactaaattacgattcaaaaaatattttcaaaataaa

SEQ ID NO: 61346 - DNA, 1563 bp, Heterodera glycines
cctcggcgacacgagctcgggaaattgccgtgtcaaaggacacacaagatgaacgagcgctggaggtggagcagtgcgagtgtccccccggctacgtcggcacttcctgcgaagagtgtgccgagggctacgaacggtcgggccaagggccctacctgggccattgcgtggcggcacggcagccaccggaacggccattgtgtgactcggccggcgcattgtccgcccatccccaacacgacagacgatgcgattgcaagccgaatgtagtcggtgagaaggacaaaaagtcaaattctaggaaatgaaagtgtaattggagcggaagaacggaaaaaatatgacaggaaaagtgccggggggacaaaagtctaatggaggaaaagcggatttaggagaaagagcggattttgtgattatgatgcacatattagaaaaatggagagggaaagagtctggacagagaacttcacttagctttatgcaaagcttagacaaaatgccttttgattgtccttggaaaacgctgcagggattatttatgcgccacaaatgctaaagcgctaaatgcgtttatttggccttgggattaagccaactcggccaaatccctttttgctgatttatccaagtgttgtgtcgcaaatttgttgctaaattttatgtttcggcgttttgcttttcaattttgctttttgctttgtccccaacaatatctttgaaggcgtcacttgcgaccgatgtgcgcccgaggcgttcaatttgtcgccccaaaacccccaggggtgcttgcgctgcttctgctcaggcgtcacgcgcgtgtgcgaaagttcgcattggcgccgcaaccgagtcgagctcgattatgcgcgcgtagaccgcgaccaattggaggcgaccacgtcggacgcgcacagtccgtacaaccgccgacgcaaccgcaggttcgccgagcaaagcgaaagcaaatcgcaaaacgaacgcattgtgcatacggtaccatcccctcaggtgtacgatggatccatcagtttccacgggttttatgaggcacgcggtcaaacactatactggagcttaccgcaaaagtttctgggcgacaaagtgaccgcctacggtggcaaactccgctacactttccgcttctccggcgccgggccgctcaacccggacgcggacgcgatcatccgcggcaacaacattcagctggaatatgtgagcaggcagcaagtgcacgcggaccggcccaatttggtggaggtaaagtcggcacaaagagaaggggcggcaaacattggaaaatgccctcctccgcctcaggttccgatcactgagctcggctggcgccactccaacggcgtctccgcctcgcgcgagcagctcatgatggtgctggccgacctggacgcgcttctgatcaaaatgagttacatgcgcgagtgctcgcaagcgtcgcttgtctccgcctctttggacacggcggacgcttacggcacgggcgaaggtgcgttggacgtggaacagtgccaatgcccagctggatacattggcagttcatgcgag

SEQ ID NO: 61347 - DNA, 573 bp, Heterodera glycines
atgtgcggttcgatgtgtcccccggcgctggccaaacttttgggatggcatcgtgccaaagggggccaacgcggccaacggcccgagtcgtttttgacagcctacgaaatggagcaactgccggtgatgctgaacgaattggaaaaggccaaccgacacttttggcaaatggtctgctggcgatggagtcaaaatgagcagaaagcagcggccgaacgaagtgcgaaaaaggcgagacatcagcagcaaatgcaacagcagcagcagcagcaggagacgacgagcggagaaccgagtccaaaggacaaaagaaaaggtttggcattgtgtcttttccgccaaattaagttttaatccaactgttttaggctgtcccgacgattcgtacgtgaacggatgcgctctgcgcgagttggtccgtttgatggcgaagacaatgtgcgagaagggcacttttgacgcgcggacagaaacgatgctgacggagttccgcgcgcgcattttgggccaacggaacgcgtcgatgagagaaacgatgggcaaagagagcaaagcggagaggcggcggaaaga

SEQ ID NO: 61348 - DNA, 1345 bp, Heterodera glycines
tttatgaatataattaattttaagtttgccaaaagcccaatcattacgggtgctttttcactttgtaaactcaatctttaggggtgtatttttcccgaatcttcggggaaaataccgatagctgaagcaggaagttcgaagctcaaaaaacccgaagttttcgaagccgaagtttcgcctagccctgcctataatgttcaatttgcccatatactctcttagaaaatgcatgcacctgtcaattcgataatgcattcgtccgaatttctcaataataattcataaaattgtttgccgaagaattttctattgaagagtagcaaaattcatgataaccttttcatgacaaagaccgtcataaattaggtatataatattaaacccctcgattacggctagaacatacctatggttaattttccataataatataatcccgaagcaaaaattaattggtaccgcacccgtttcttttcaatctttttcttgtctttcttgctcattcataagcgcatctcgtatacaatgctattttgaaagttacatgcgcgcgccacattttcaagtttctcctagcgaggttcccttgtaaggttgtgggatttttttgaaattgactgtttttaagagacggataatttttaccgaaattttgtcagtgtatttgaccaaccagtcaagaaatgtttggttatttccgcgttttcaataaaatccaaattttgctcctttttaccccgtcttgttaagattggtttattcttcgaaaattttttggggggtttgattcgctaagttcaaaagggcaccaatttatgtcacttcccattatcggacctaaattcgaacagacaaccgaatttttttatattttgaaaactatactggtcccattaaaaaagagaaaaatgtttttttttcaattttgctattgattgtgagcaaaaaaatgacgacaccaaataaatctatatttttgtcattttgccttccatttgcaggtgcctgacttcaacaaaatgtacgagttgtacgacccggtcaccgcgatgttcttcttcaggtttttctcagaatttagggaaaaaaaacattttctgcatttcctatgactgttttttgaattcgaaataaatttcccaattgtttgttccttaaattgtcctccatttttaggaacaagcatatcatgatcgacttgggcaccggcaacaacaacaaaatcaattggccaatgcacgacggccaagaactgatcgacatcatcgagacggtgtaccgaggcgcacgcaaaggccgggggtaagcggtggggcaacttaaggaccgatagaaaaacccccgg

SEQ ID NO: 61349 - DNA, 293 bp, Heterodera glycines
atgactgtcatcggcgatctgagcacccagaaacaactgaaaaatgccgtgggcaatggcgccgccgaattcacccaacggcggaagaaaggcaaatacagccccaactcgacggagtgcgaaggtgcggcacggcagccgcagaaagaggagggcattttgcagagtctccgctcgtacccaacgggcgtctttttcatgttgggcaacgaattttgcgagcgcttctccttctacggcatgcgtgccattctgatcatttatttggtggtggaccacaaactgtcggacaa

SEQ ID NO: 61350 - DNA, 417 bp, Heterodera glycines
atggttcacatgcatcgtttggtgggcaatcagccacacagcggagggtcggcattcttcacttccgaaaatgtggaattggtgagtgcgcgggcatattgaattttgccattttcttcataatgttaggtaaatcaatcgatgggtaccaacggccattgctccgtgggagtggcgccgcataattttggctcctttggacaaccaaccaatgtgatggcattctcttctggccaggccatggcttccggcatggacaatcccattgtcctaatgggacagaatttctcagctgaccaaatggaagttgggccgggtcggacggcggaaaccaacgaggaaacgaccggtgcatttcggatgctgttcaaatgcccggagtgtggcctcgtgaaaaactccaacggagagttggaa

SEQ ID NO: 61351 - DNA, 192 bp, Heterodera glycines
atggccaacttcacaattcgatcatcaattgaaatcgaacgaacgcgaaagtcaactccgatggtggctgccatgtccgggtcaaatttatcatctacaaatcgcgcgattaggctggatttcccgaccccactttcgcctaaagaaaaatataagaaaacatggacaatggaattgttccacgaaccgatg

SEQ ID NO: 61352 - DNA, 478 bp, Heterodera glycines
atggcagccaccatcggagttgactttcgcgttcgttcgatttcaattgatgatcgaattgtgaagttggccatttgggacacggcgggccaagaacgctttcggacgcttacaccgagttattaccgcggaggtgcagcgattttgagaatttaagagcgtctctctgttcaggccaaggagtgattttggtgtacgatgtgtccaatcggccgtctttcgagaatctcgaccattggctgttggaggtggacacttactgcaccaaaagtgacaccgtcaaaatgttggtcggcaacaaaatcgacgcggtgagagcaaacttcgcaacgaaacaattgaccaacttaaggagcgaagaatggtctcgcgggaggagggccttcaatttgcgaagaaacaccgaatgctttttatcgaggcgagcgcaaagacgcgcgaaggagttcaatgcgcatttgaggaactcgtggaaaag

SEQ ID NO: 61353 - DNA, 1062 bp, Heterodera glycines
  unsure (1)..(1062): unsure at all n locations
atgcagtacaatgcttntaagccccgccgtgaggcgggacagttccaaaattttgtaccacattttactgtggaaagtccaagtaccttattggacaactacgtgtcaatgagcacagtcgcctttggccagttgtggaacggaaaaatgggaatatcagatggggtgcgctcttttctaaaaattcctcttttcgtctaaccatccctcccttttgtgcactatttcgtttcaaaattgaatcattttttttggctttttgaaataaattgtgaaaaatatacgaaaattattttcggttttaattatgctgtacaatgcttttaagccccgccgtgcggcggctccccttttgtgcactattttagtttttaaaattggttccggactttttggctttttgaaataaattgtgaaaaatatacgaaaattattttagcttttaattatgcagtacaatgcttttaagccccgccgtgaggcgggacagttccaaaattttgtaccacattttactgtggaaagtccaagtaccttattggacaactacgtgtcaatgagcacagtcgcctttggccagttgtggaacggaaaaatgggaatatcagatggggtgcgctcttttctaaaaattcctcttttcgtctaaccatccctcccttttgtgcactatttcgtttcaaaattgaatcatttttttttgtctttttgaaataaattgtgaaaaatatacgaaaattattttcggttttaattatgctgtacaatgcttttaagccccgccgtgcggcggctccccttttgtgcactattttagtttttaaaattggttccggactttttggctttttgaaataaattgtgaaaaatatacgaaaattattttagcttttaattatgcagtacaatgcttttaagccccgccgtgaggcgggacagttccaaaattttgtaccacattttactgtggaaagtccaagtaccttattggacaactacgtgtcaatgagcacagtcgcctttggccagttgtggaacggaaaaatggaaatatcagatggg

SEQ ID NO: 61354 - DNA, 442 bp, Heterodera glycines
aattttgaaacgaaatagtgcacaaaagggagggatggttagacgaaaagaggaatttttagaaaagagcgcaccccatctgatattcccatttttccgttccacaactggccaaaggcgactgtgctcattgacacgtagttgtccaataaggtacttggactttccacagtaaaatgtggtacaaaattttggaactgtcccgcctcacggcggggcttaaaagcattgtactgcataattaaaagctaaaataattttcgtatatttttcacaatttatttcaaaaagccaaaaagtccggaaccaattttaaaaactaaaatagtgcacaaaaggggagccgccgcacggcggggcttaaaagcattgtacagcataattaaaaccgaaaataattttcgtatatttttcacaatttatttcaaaaagccaaaaaaaa

SEQ ID NO: 61355 - DNA, 1339 bp, Heterodera glycines
atggaagattattcaccagggtctatgaataaagagaaatttataaaattcgaaaaatggtaggaaaataatttaaaaaaaaacaataaaatcttatttttcaggtataacgaaaacaaggagacacccttttatttggatgaagaattgaaaaattattgccgaaacgacacggagattttattgctgtcaattattgagtttaggagaattttgatcaacgacattacgaagggatttgacccgttgccgaggagttgtacgaatgcgggggtcgcgatgaatatttttaaggcactgtttttgttgacggagcagttatcgattgtgccggagaagggatatgagcggtgtgatagagcgagtgtgatggccattaaatatttggagtggcggagcaaacgggatggaattgagatacggcacgcggggaatggacgagaggtcaaagttggaaattacaaattggatggatttattgcgaatgaaggaggtagggacaaatgcattgaggtgatgggatgttacatacacggatgtttgaattgttatgacccggcggcggaactgattggtggaaggacggcccaggaattgaacgatgagacgcaggagagattgatggagctgcgtaagactttggacgtcgaagaagtttgggtaagtttatctgacatttacatttttattgtgagtttttaggggtgccaaattgaaaaggaactgaaaaaggatgaggagatgcgggacttcttcgacgacagagggaatgagaaggggccgattgatccgcggatggcttatgcaggagggaggacgggaccgatgaaattgtttgcaaaatcggacgagaagaaaaaaattagcgtttacgatattgtgagtctgtatccgtctgtgaattacggtacagcttacccgattggattgccagagattattataccgaagagcgatgagattgatgttaattggacgagaccggaggatttgaagtataagggattgtataaagtgagggtcaacccgccgcgggggttacgggttccggttctgcagttgaagtgcgatgataggttattgttcccgttgtgttggagatgtgcgtcaaaatttaagaaggagactacgagatgtaattacaattgcccccatgatgagacacagcggagatacgtggcgacatataccagcgttgaattggtaagaaatttaaaatttgaaatttagataattttgacattttcaggcaaaggcgttggagtgcggatattctgtggacagattttatagagcgtggcattacgaagaagaggcggatgacttatttaaaggatat

SEQ ID NO: 61356 - DNA, 1099 bp, Heterodera glycines
atggattatgaaacggtgccaaaatggggcgacggcgacgacggatcaatgggaaggcgaaaatttggacgatttgaacactgtcgcctttatgtttttccctgccaaggaatgcgttgggtgagcaacaaaaaaaagcattttattttgtttaaaaattgtgccgaatttttaggcgtttgtctccacgtcgaaaatggtgtcaaattatgtgaaagtgatttatgcatttgagaaaaggtcgatcattttggattataatgatgaataggagtgatttgatcatttttaatgttcgtttttatatcttcgtttaaatatattttattttatctcgtctcgacgcatccctttgatatgtgtactaggttgcgtccccgaccgtcggggttggaaaagtcggggttggaagcgtcggggtcgaccacatcgttcggggtcgtggtttttcaatttttgccttatgccatatagtcaaaaaacttacattatttttgcttaaaatttttttattattcattaatacttttatgtacttttttatttggtaaaaatcagttaaaaaattgcattttaattctttaattttcaaaaatttttcgagccggcgcttactgacaccgccggacccttgttcccgaaaagttttttgtttttcaaattggcgatcactcttgaaatgacacgcagacccggagcgacgtttgatgaattcattgcacaagcagtacgagcggaagcaacgcaatcggttgccagaaactcgtttaggtcaaaccaaacttttcaacggaaaatgcagaatttttcatattcatccaataatgtgctatcaaaaatccataccagtaattggtcccgaccagaaatgaacacgaacaggccaactgtgttgggacgacccacaattcaaataattgtttatcattgggtccgttctttgaccgaccaatattgatttgttcccctctcccatccaattccttccactcatttccccaattcattccttcccaatttgccttcgcattgttttccctcctatttttactccattcctccgaccaaatatttgtattttatttttccattttcttca

SEQ ID NO: 61357 - DNA, 322 bp, Heterodera glycines
tttggtagtgaagtgtacattttctctgggaattagttgtcccagtgcttagatggcattggttcgagtttataccttgttttttagacttagctcatcaagagctttcgaatgataccaaatttgtccgaatttgagcgttttaaaaggtcaggagccctctttttcattcaaattttcgagttttaaaccggttcaaaaaccggtttaaatgcttttccgagcccaattttaagcttttctatcgttctcagcacctaagaaaacctataaaagtgtttttgtgcgattttgagccgataccgtattcggcaattttacc

SEQ ID NO: 61358 - DNA, 1980 bp, Heterodera glycines
atgaacccgtaaggaataatttaacccatttaccctcagttatttttccctaatttagctggatatgcaacgacgttttgatggatattctcccattctttgaacgtgttgaactcggcctcaaaatggcacttctttcgccacgttttgatgggctggtggacaaacatttcgatggcaaatcagaattgacaatttggagaccaatcttaattcacaagtataatgtagcggtattatctgtgtctatcgacaataccaattctatgccatttccgttgcccaaccattcgctacacaacaaaatccgctttaacaaccttctgattaagtaaatgcgtaattatctgtgcgtaatatgttgttcccttttaaggtacattgaccattccgtcattgcatttctccgtgccaacaagcaaatttggaacaaaggcaccaatttgtggttgagtgttccttttgcacgagatgatcagccaatttggggtgtttttgtccgtgaaatttggccaatttttgcgccttatattcgccacttgaacatttacaatgatggcctccttttggacaatttgcgtcgtttcatttcgccgacaattctcactgatctcaacattaattcaatcagttccgcttttttgcccgatgcgactgatgattttgacgagccaaatgcaattccaactgctggccaaatgttgtcaaaatggttgcacattccgcgaaaagatggacaaccgaagcgattgtgttgcatgcttgcttctgctggtgatgtcaacaatttcaaagaggtatggcaatgtttttgttaatcaactgattttattgcatttacactccattttttaattgtttaggaatttctcaatgccaccacttccgttagctacaaaattaaatttattgttaatccaccgtcaccgcaaattgtgccatttgaattagctaacgaacggaccatggaaaagctgacactgatcaaaaaaagcggacatcctcaggaggaccgatggattatgaaacggtgccaaaatggggcgacggcgacgacggatcaatgggaagacggagatttggacgatttgaacactgtctcctttgtgtttttccctgtcaagggatgcattgggtgagcaacaaaaaaaaaatcattttattttgtttaaaaattgtgccgaatttttaggcctttgtctccacgtcgaaaatggtgtcaaattatgtgaaagtgatttatgcatttgagaaaaggtcgatcattttggattataatgataaataggagtgatttgatcattttaatgttcatttttattatcttcgtttaaatatattttattttatctcgtctcgacgcatcacttggaacacggacaactgagtaccaaggtcccggttttgaccgggacctggatattcccggcttttttcccggttttcccagccaaaaattcccggtttttcaacccaaaaagtcccggtcgtgcccaaatttcccggccccgctgcactctagtttttataaaatcatatatgtaggtggttttcgaggtcgctgcagattattcttaggggtgtatttttcgtttttattgcatttttcataacaaatttttattcacaagcaaaaatggttgaagtttttttcaattatataaaagactagaaaatagttgctaataactcgataagtagcttaacgaaaaataatatgttcttagtacgttttaagccatagaagagagctcaggaaaaaatagtgaaaaaaaaattggagccctaatgacaattgaaaatcaaaaaaactttaaatattttagtcggaaagaattacatatcaacaataatgagcaaagaacagcaacaaaattatgtatcagaccaatttgtccattcaataatatccaaatccgccgatcatttctcaattatttttcacttccgaacatttcgacggttgagagaatggcctaa

SEQ ID NO: 61359 - DNA, 1037 bp, Heterodera glycines
ggttccacagggccaccaaaagcggtggggttgacgcattatcagctgatcaatgggtgccgaattgcggcacaagccattgacatcaagcgggaggtgaacgcgtttttcgaacaaattggcaaatatttaaataaatatttgaaaaaaaaattaattttttaaaataaattttttttttaataaattatttaaaaaagaataaaaagtgtaaaaatttattaaagaaatgttcaaatataatatagtttaaagttgtgaaatttatttcggtaaattttacattttaaaagataaaaatatttgtaaaaataattttttatttttatcgactcaatttgttcaataaattttaaaggctaattatttttttaaataccaaaatgattaattaattttcattaattatccattcatttattaacctaattttatttatataaattaatagactgttctttgctgtgcccttccactttttcggataccggtttttgcattggccattttcacgccatttttaattgaatcgcggtaataatttaaatttaaaaaaatttaatccatttatttttaaataattttaagttcaatttttcctgagccttctccattgcctcgtttactatttcaatccatcaacaaaaatcagttaaactattttaattaaattttatcatttattaatttattatttataaaaaaaataattaaaattacctaattatttttcaataatttaaatgttttaaatgcaacagatgctcaactttgttgacaaatgccacggcacttcgccttctgctcaaaacttcgccgcttacacaaggccaaaagttttctttgccaagcattgacaccgtcattttgttgggcgatagggtaaaattttgcatttttttattttaaaatttaaatataaaatattattgaggtatccaccgatttgttgacagccattgagtcggtgatgccaaatgcaaaaggaatagcggtaattttaattgaaattacttaaatttttaggtcaaaaaata

SEQ ID NO: 61360 - DNA, 193 bp, Heterodera glycines
tttataattaagtgagtttataaactaaattaaggttctttcaattatataatatggaccagcagcaaaaaattaaaacaaaaagaaacaaagttaagttagaacatgacggcgcactctatgttttcgaccaattgagcgcagattgacttaagaaattttggcgatgtgagtttcatggcccgtcagacaa

SEQ ID NO: 61361 - DNA, 235 bp, Heterodera glycines
aaataaatgtgagttatgaattctcttttatatgcaaccacgcgaaaacagccacgcgaaaacggccacgcgaaaacggccacgcgaaaacggccacgcgaaaacggccacgcgaaaatggccacgcgaaaacggccacgcgaaaacggccacgcgaaaacggccacgcgaaaacggccacgcgaaaatggccacgcgaaaacggccacgcgaaaacgtcctggcccgaaataaa

SEQ ID NO: 61362 - DNA, 361 bp, Heterodera glycines
atgcgcaaatatcaaattctgtgcaaatttactgatgtcatttggccccagggaatgtctgacgaggccaaaaagcaaatggccaaagattacggcgagaaaaactccgaaactgccaaaaatccttgttcaaaaccacggaggtgaacaaaaattacaccaaaattgatatgaaaaaatattaaattgaattaaattagtcagaatgggccgaatgtttgagatgcgcgtctatggccgagtgggaaaccctcacaccgcaaagccgcgcagggaacacacgtggagatacagcccctataaagcgcactacgattacgcggattactattccgatggatccgttgatttctattattaa

SEQ ID NO: 61363 - DNA, 185 bp, Heterodera glycines
cgcttttcgcttgaggcgcgtgcccaccaattgttggccattgctcggcttcactgttacgaattctcaaatttttatgccaattgcgtccccaatttgctcagcgaattcggacgagagaacggtttgggcgagcagagccgcacaaaacttgagaaagcattggcccattcgctgttcaaagt

SEQ ID NO: 61364 - DNA, 834 bp, Heterodera glycines
atgtctgagaatgatttggcccgagacggagatgatggagttggcctggtgggtcgcgtacagcggctagtacaacacggtgtagggaaagtggggcaaattgtccgtcatgaacacccgctcctcacggtggaccttatgaaattttaaattgtagacattttaaaggatgctttttacaaaataaaaaatacaaatatattagaaaagtggtactttgaagtagattggtcccgtgtgatattttcagaatcatatcatcattcctgtacggtgtcgccaaagaaaatcgatatagagaaaaacataaaaatttttgaaaatctgcccacagataacacacaagtacccaaaattgttacaccgccagatttttattttattttttatttttcagtttcgtcatttgagtcctaatgactatgaaatttcagttccgtctcgaagattggcttatttttcggaattttcatcacaaaaagtcaaattttgccttaaaaagtgtaaataagttcctgtttgattacgcgtatttagccggtttcaaactaaaaatgcaaagttcgaaaaatttgaattttcgaacttttgttcgaattcatgtccggggttcgaaattggtcaaaatagatgccggatcgtgatcagcggccccaaaccctaggaaacatgctttcatgttttttgaaaacaaaaaaaacctttatttgatttgagtcatttatgcattattcgaattgcctttgattgttcagggcaaaacggtgacccaaaaagacaggcacaaactgctgcaggcgaaagagttgggaaaacggcaaaaatgagataaaa

SEQ ID NO: 61365 - DNA, 697 bp, Heterodera glycines
atgggttgtaaaatgtgtgttttgaccttatttctcgggaaccgtaagagctacgcttttgcggtaagcgaacaatttgtagagctcgtcgagaggaagggtgagaaaaaaatttcgtagctctacgacaaattcgaacaaagttataccccggcaaaggtcgaaaaaagccgattttttttgtgttttcgccttccggtttacaatccgtttacaattgcaaattcatccggaatgtccggaatttcacggattttgatgtttttcacgtgttttcttcacgtttacgtgtgtttttgacgtgcgttctttaaaccggttccggtttttcacgtgttttcttaacatttacgtgtattttcgacacgtttgcatgcgttttcaacatttcacgtgtgttttcgttacattaacgtgtgtttcaatatgttagcatgtgttttcgagtattttcacattttttgctttgtgttttactttgtgtttttgcatgcaatttttacagtttaaacaccagaacaattctgattgttccggaatgcttcaaaatagttctgataattctgttacagaccagaacagttctgaaaattctggtaagcgtccgaatagttctgataattctgaaacacaccagaacagttctgaaaattctggaaaacgtcagaattgttctgaaaatataaaattaaattaa

SEQ ID NO: 61366 - DNA, 4104 bp, Heterodera glycines
atggcaatgcgtgatgaacggactaaaaattttcgaatttgcgtccaatatagccgaaagcattcaatgctcatatggcgtgactcctgtctgattatgccgatagcgctcgccgaattaaaaaaaacttttaatcttgactgcgaggacaaaccgttcttcccttatgcatttaacagaagggagaacgacgccataagactggaaaatcttccggacgaaagcgagtatgagcccggcacgatgaaggctgacaagtacgaaaagtttaaaaaatggtacaacgacaacaaagagacgccattcttcttgcccgatgagctaagggcatactgtctgaatgacaccgaaattctgctcaaagctttggttaaattccgccagattttgatggatgaaattacggacggatttgacgtgctgccaattagctgtaccatagcgaggtttaaaacataaattgctcttttatcattttcattttacagcgcttgcatgaacatcttcaaggttcaatttatgcaagaagatcagattgcaatggtctccgagctgggctatgaacgaaacgacagagccagcgtcatcgcaatcaaatatttggactggcgggcaaaaagtgaaggcattgaaatccagcatgcgggcaatggacgcgaaaaacgatggaaacaattcaaacttgatggatggattgagagacaacaacggtgcatcgaagtgttaggatgttattggcatggatgtgagaaatgtttcaaacctaatgaggagctcgtcgatggaaagacgtgtcgtgagctgaatgaaacaacacatgaccgtcttcgccaacttcgcgagcctgacgataatgggatctgtttacaagttgaagaagtctgggagtgtgaaataaatgaccagctaaagaaaaacgacgagatgaaagagttttttgatgacttggggaatgaacgtggacctctggaccctagacttgcatattgcggcagacgaactggcccattgcgactttttgctgaaacagcagaggacgagaagatctccgtcttcgacattgtctcactatatccatgggtcaactatgacaccgattatcccgttggcgttcctaccgttgttcatcctagcgcggaggagatgattgtcaattggacaaaacctgagcatttaagctaccgaggtctttaccgtgttcgcgtcatccctcctcgtggactacaaataccagtacttccgatgaagattgacgaaagattactattcagctgctgccatcgatgtgcagctttgttccgtaaaagtgtgacacggtgttcgcacaagtgcaaccacacagatcagcagagggccttcactggcaacttcactcacattgaactcgaaaaagcgttagagatgggttatattgtcgaccgattttggagggcctggcattacgcagaatggagtgatcagattttcaaaggatatgtgcggcaatttatcaggctcaaggtagtataattaaaaaaaagtttttatccaactttttttcataggtggaatcaagcggctttccggaggggatcgaaacattggaacaaaaacaggagtacatcgatgaatatcgacgaatttatggagttgacttggattttgggcatatcaaaaaaaatccaggactccgattcatcgcggagtgcaacgagagctgtaagccatgcgactaccatttcgtcgaaagtatggacggagagcacacgggatcaacggattgggcaggcggaacatggatatccaaaagcaaggaacaggcgctaacgtttagcaaagaggcgaaaatggaaacagcatgcaacggaaaaccaattcgcttgtcggaccaatcgtttggaatcctggaggatgagtacctgaagatcgtcaacgatcgtggattgggaaaaagagccatccaggaggagcaactcgcagtacaattaactgcaggacaactcgccacaagccgatcaatcgcgcagcttttttccaaggaatgccgcagaagttccagaggaggaaatccgaccattcaggccagacgacttttacgacgcaaggatgttatggccaggtggctaaacgaagacacgatgcaaatcttctcgtgcgctgagttttcaatgcaaaatgtggactatcaggcagtcaacaactgttaccgctacattccggtccaaatccgcattgacaagaagacgctcaacgcattcctggatccggagcttcacatcctcacagcgtcatcaccattcgcagattgtggaaatttccgctaccattatctgcaactgagccagagcaattggatcaaaatcgacacacgcaccgctacgatccagaaaatcgactccagcagcatctctgagatccacgaagcctctggagacaaatcgttgttggaaatcacgccgctagtttttcatcgatggacgatcgacaacgaaacaggcgaagggctatttgcgcacttggatgaatggctgcgtttggatcaatggaagtcgaaggagaaggagcacaaaacggcgcgtgcgctcacactgggagctctcccgaacggagtgattggcctcaccgaagaatggtttatggaaaaacttcggctgctcgtctcctactggacaacggcatgctgcatttacgtcacattcatttttgggcgcgatgtcctgatacccttggtatgggtctacttaatggggcccgtcatcgttaccatccgcaatttggtgacgggaaatcagtggacgcagcggaacagagctactcgaggcacacggcgagcaccggcaatttcaaggattgaagcaattgagctggtaccgcctccaatgccccaggaaatgagagcgaatgaaacggcaagttcgcaacaagaggaccccgagccgtccccgctggtgatggatctgaaacgacaaatggtcgcgttccgctcaaaacgacgttttcaaagtcgtgggaatgtcgcgactgaacgtcagccgcgaatgtccgtcgagcggacaaatggggaggacggggaggaatgaacgaagtagcgaacgaggagtgattgatggatgaaatgatgagaaaattagggcaaacgggaaacgatgaaggaaagaaaggggtgaagggaggggtcggctgacggcgggcacgtgaattaggggaaagaaagcgataaaaagcggatgtggcgccttacccgcgtgaaggtcgcccgaggcagcgcaaaaacgccgatcggaccatcggcggagcgacggcctcctctttatatttctcgcacatttattgtaagtgtagggtttaattacccaagtttgagtttgagataaatttgcggagtatttttggtgcgaatttttgggcggcaaattgggcaattggcgacggctaaatcggaacaaacggcgcagaccctcccccaactgcgtcaattaattaatttaaattgaaggctttccggcaacattatgcgccacatttttattgtaaagcatagatggaaaatgggcagaagtcgacccccctcaccttcgcccgcaaaatgccccaaaataggtggggggggggggggtcggaagcggggaaagaggaaaattgaacaaacttttttagcttaattcattaatagcaaaagttttttaattgtcgccaaattgtaaaaaaaattaatatttttgggctagcttttttgaaaatttaaaatatcaatccttagggaataatttctgttttattttaattatttcataattggccaaatatgcatttaaatgcactaaaaattttaatcaaaaagaaaattaaaaaaaaaattactgtttataagcccctttcttcaaggaacatgcccataaaacatatatattttaattatttttgattgttttttaaattaatattttctatccagtatatttaatctaatatgaaaattttcatattaaaatacttacataaaattattacaaaaatgtatagcatgaagttcattagcatttttagcagaaaaaaataataatctaaaaattgggttttttttataatcaacaagtggacaattttggttgaagttccaataaa

SEQ ID NO: 61367 - DNA, 167 bp, Heterodera glycines
ccgacccctcccttcacccctttctttccttcatcgtttcccgtttgccctaattttctcatcatttcatccatcaatcactcctcgttcgctacttcgttcattcctccccgtcctccccatttgtccgctcgacggacattcgcggctgacgttcagtcgcgaca

SEQ ID NO: 61368 - DNA, 56 bp, Heterodera glycines; identical to SEQ ID NO: 57643

SEQ ID NO: 61369 - DNA, 933 bp, Heterodera glycines
ctggttcgctgcgccaatgtgggatgcacgctcgtggggcgacctaacggctgtgctggcgtctgtgcgtcgttgagcggttgttgtgccaggcacataacacactgactggggatggtggttccgttcccggtcttacgtgccgtaactagcggtgtgtttgtgcttgctgctacgtccgtggccgtgatgagacgacgcggtagggcccgtgcttggcctagcacgtggcttaagactcaatgagtgtcagctcgggcaccgccagctttttctttttttttcattatttttttttacacttctgttgaagaatgaattctagtcttatcggtggatcactcggctcgtggatcgatgaagaacgcagccaactgcgataattagtgcgaactgcagaaaccttgaacacaaaacattcgaatgcacattgcgccattggagttacatccattggcacgcctggttcagggtcgttaccataaaatgcactgcttgtgcgttgcttcgtgggatcatgtacttgtacgtgttcttacgttacttgctcagctcggctgtggggttttggtgtgctggcgcgaacttgtggttctaattcgcgttttacggaccgtaactcaagcgcaccaatgctttgcatgctgtggcggagtgcctggattactggcattcctgctttgatttttcgacctgaactcagacgtgaacacccgctgaacttaagcatatcagtaagcggaggaaaagaaactaacgaggattcccgtagtaacggcgagtgaactgggaagagtccagcgctgaatcgcagctcctctggggttgcgaggtgtagcgtatagaccgtgagcttgggttggcccgcttgttcaagtttcccttaacggggctccagagaaggtgcaagacctgtccaactggcggtgccta

SEQ ID NO: 61370 - DNA, 951 bp, Heterodera glycines
ccccattttcttcacccaggaaaacattgccttcttcggcggtgaccccgaaaatgtgacactttttggccaaagtgcgggcgccgcgtgcattgacttgctgagcctgtcgcctctggccaagggtgtgtatgtacaatatttgtcataaaatttttaaaaataaaaattttttgagttttccttttcaggccttttcaaacgtatcattctgatgggcggaaacgcgtgcaccgattggtcaatgacgacgccggaacgcactcaacaggcggcgatcagaatggcacggaaagggggatggaagggtcggattttaaaggccaataaaattttaaatttattaaaaatttgtttttccattttcccggctttacagttaaattttattttttttaaaaaaaaaaacttaaaaaaaaaagaaaaagtaaaaaaacaccctctaaattcttagttttccagtgaaaaattgtaaaaaaaaaaattagaaaaaacttactttttgaagaaattttaattttttacaatagaaaaacattcattactaaaagatttcgacatttttttaaaatttctaccaataattatcgatttaaacaaaaatacacaccaaaaatgaatgccattttataccccacactctgattgattgaacactcaggtgccgacactgatctggactcattgctcacatttatgcgctcagttcccgcctacaaaatttcggcaccgctcatcggcaaatcggcgttcaaccggcacaaaaaagtgtgcaatttacgggaaaaattaaaaaaagatttttccattgattggatttatagggactcgacttttgcccagtgatcgacggggagctgatcaccaaatcgcctgagcaaatgcggcgtgagcttgactggcccttggaagtgattgttggcggcacagagtccgaggcattgcttttcg

SEQ ID NO: 61371 - DNA, 478 bp, Heterodera glycines
  unsure (1)..(478): unsure at all n locations
atgaaaaaaataattaaaaaaaataatgctggtgtggtaagtgtgaagaactgtgttcctccaggcaaaaaattctaagaaaatttataagcattgnaagagttctcagcagtttccctgcaaaatttggtgagcttctgatcagtctagaacgttgggtgataaaatgaaaaaaataattaaaaaaaaataatgctggtgtggtaagtgtgaagaactgtgttcctccaggcaaaaaattctaagaaaatttataagcatttgtagggttctcagcagtttccctgcaaaatttggtgagcatctgatcagtctagaacgttgggtgataaatgaaaaaaataattaaaaaaaaataatacttgtgtggtattaattcataaatattttttttcagaaaatgctctgaaacgcaccaaattttatttacatgttagtttaggcactctgatgctttttctatcaaaaagggagatga

SEQ ID NO: 61372 - DNA, 629 bp, Heterodera glycines
aaacaaaaaaatcgattttttcaagtgtccgtttggggtactcaaacaattatggggagcaaaaatccaacgcagaattaaagtacaggctatagggaagctattcccgaaggattcggtctccccataaatctgggcgcatcggttcggggggactgccccgaaaacaaaaataaatcgattttttcaagtgtccgtttggggtactcaaacaattatggggagcaaaaatccaacgcagaattaaagtacaggctatagggaagctattcccgaaggattcggtctccccataaatctgggcgcatcggttcagggtactgccccgaaatccaaaaaaaaattttttttggataaaaattatttaaatgaactgactagataatatttaaaataggttatttctcttcctttcagtatccctgctaagtttggtgcgcttctgatcagtttctgaaaaaaaagttaagcctaaactttttggcctgtttaaaaaggaattaaaaattttttaaaatttattcatctccctttttgatagaaaaagcatcagagtgcctaaactaacatgtaaataaaatttggtgcgtttcagagcattttctgaaaaaaaatatttatgaattaat

SEQ ID NO: 61373 - DNA, 206 bp, Heterodera glycines
tgtggtaagtgtgaagaactgtgttcctccaggcaaaaaattctaagaaaatttataagcatttgaagggttctcagcagtttccctgcaaaatttggtgagcttctgatcagtctagaacgttgggtgataaaatgaaaaaaataattaaaaaaaaataatgctggtgtggtaagtgtgaagaactgtgttcctccaggcaaaaa

SEQ ID NO: 61374 - DNA, 741 bp, Heterodera glycines
atgatcgcttataatttaagttcgaagacaaaacgccaatcaggtttacaccattttgattttttcttagatcacggtcaatatggacgatcaaaaaatggagcagcagcattgcgcgtcacatgattaatgaggctaaatgaagggattcattaacataattaaatttgaaaaataaatgaattattcccaaaaatgtagagaaattatactgaaatataataaaacaaataaaaaatcactttaaaatataataaaacaaataaaattcacttttgaacggggataataattaataataacttttccattctttaaatttagaatttgtcaaaatttattatttactattatttttctaaagaattttacaaatataaataatgaaatgatttctttgaatttacaataaaaaatattttaaattgttttgtaatctattttcgtcataatttgctcaaatatgattaaatattcatttcattgaatatatcttaatttaatgcaaaatttcaattaaaaaaaatagttaaaatttttttaaaaagtaatttccagacaaaaatagtagagaagttttaggtttcggaaaattacaaatttttctgaactgtttcgagtatggaaaaagttagcaattatatcatctttgcagaagaacaagattgcgtgaatatcaggcacatccaactacgtcggtcaatctcttgcatctttagaattattcctcaagagttttga

SEQ ID NO: 61375 - DNA, 593 bp, Heterodera glycines
atgcttttgttcgaattcgggttcgttgagttcgaaacttgtcgaaattgtgtgagattcatgatccaagtgtaagcattttaaggatttttccatcaaatgtttgcgttacatttgtcaaaatgcggctgacttgttcggatcagatgaatttttgcaaattgatcagaaaatattgtgcaatcttctcgagagtgatcgtttgttactcagcgatgaatttgaaatttggaaatctgtaatttcaatttaattttttattttcattttttaatttcgatatttttttctatttaggcactccgttgggccgatgaaaaatgtcgtcagaatggcattgaatgctcctcgggaaatcgtcgttcagtacttggaccggcactgttcaaaattcgttttccaaatatccatgaggaggattttgcaaaatgcgtcggtaaaaattttgaaatcggaaattaaatagaaattgttttggtcgataaggtattttacctttaatgcttgaatttcatacatggacaaggagggtcagaaatttttcaaatttatgtgaaattggccgaaaaaaactgatgcctaagaataataaa

SEQ ID NO: 61376 - DNA, 478 bp, Heterodera glycines
atgttaaaacaggaatttttgtccgtggccttgtcaggatccacatcagaatcaggatatgatccgatccaggtaaatttgatcaggataaccctgaccctgattattatttttcacaattttttttggcattacttaaaataaattatgttaaaaaacaataattcaaattattaatagcacatgagcagaaacaaagcaaattcattcaaaattaaacaaaatatttcaccctttgaacatttaaacgaacattttaatttagggtttcgacaaaatatgcataattttgcttaaaaataacaaaatttcatattcttcggaagatagcccaggtttttctctattagactgcaaaaaaatgccagtgattagagctcggaggcatcgggatcaagtagggattttcctgagatctggtcccaatcacgtcttttttaaacggatcaggatgccgaccaaataatatatttaaaca

SEQ ID NO: 61377 - DNA, 902 bp, Heterodera glycines
atggaggggcttgagaagattgaaaagtcagaagacctttggctggaagcgattcgtcttcatcctcccaacgtgggaaaaaacattggtactataaattacggtaaacaatttaaaaatattctttttgaattcagttgcgaatgctgtacgggctttgccccattctgttaaaatttggttaaaagctgctgatttggaggccgatcttaaagggcggaagattgtgttgctcaaagcactagaaaacaacccaagttcggttcgattatggaaggccgccgttgacctacaagggccggaagatgcccgatcactgctcacgcgggcggtcgaatgctgcccattgagcacggaactttggctggcattggcaaaacttgaaacctacgaaaatgctcaaaaagtttctttattgtaatgatcaaacataaagtaagctttaggttttgaacaaagcacgtgaaaatattcctaccgaacgaatgatttggatcgcagctgccaggttggaagagactcgaggtcaagcaaagcgtgtgccacttttgattgatcgtgcgcttatttcactgcgctcggcgcaagtcgaaatcaacaaaaaacaatggcttgaagacgccgtcgaatgtgaacgggcggattgtcctctgaccagcaaagcaatcatgtaattaacgaaatccaattgtcttcagaagcattagctttttattctcttaagccaaaatgtgcttgcggttggtgtggaggacgaagacagaaagcacacgtggatggaagacggagaatggtttatcacccagggggcactgcaatgtgcacgtgccgtattctcattttacgctgaacacatttcccgaaaaagaaaggaatctggacgaaagcagcgttctttgaac

SEQ ID NO: 61378 - DNA, 1300 bp, Heterodera glycines
atggacgaggacaaattggcactgaaaaatggacaaaaggacgacacggggggaagggaaagcgaaaacagtgacaaacagggggagcaatttgcagaagacaatttcgacacgaatccgttgggtggggctttttatttattttcatttgcactttaaatcattcaaaaatttaaaaagcaaaaagcgaccccctaattaaaatagttcaaatgaaaagaaattaaagtcatttgaaatcaaaatataaaaaatgcccaaatacatctaattttgcaatttcattgttttttagttgagaaaggcgttatgcaaaagtcgctcattgacaatgccttcgatgtgttcgaatgcgcctcccaaaatttgaattgtcttttggccaatgccgagatgagtgccatcaaattcgaccagttcatcaaagttgttgagttggcggaaaggtcccatattttatcatttttattttgaatttgtaaatttactatcaataattattcaattaattcctcctcatttccatttgctcagattccggaccttcggtcgccaatattttggcaatccgtgccaactcatccgacacactttgatggaccaatcgcgcaaatatattgagcgataccatgccgagaaaatggaggaggttaaaatgtttttggagagcgaaacgttcactctttgcccggtgcccgtccaattcacactgtttgaccttccggtgagaaagaattggtcgtttttaagtcaatgattgacacttttgacggggttttccctaggttttcccaatggattgcattttaaaaaatgcttttcaaatttaggaatttttcttcctcaaagagttgcaacagaaacagcaaaatgatgaacaaacggaggaagagactgaacagaactcagtggagacatttgtccacggcaaatccatccgtttttcggtgtttcgacattcttcggaaatggacacggaaatattcccttattcacctgaacaattcgacgaaagtgtgaggagaaaggcacaaaaaatggacatgaaaaacttttttgcgaagagaaagcattaaaaaattattttgaaataaacaaaaaatatggaaaaacaaattcagccccgacgaattggtgacagacgacggatgatctgcaaaaatggcgaagtctctcagtgttcgtcgtccgatgacggcactcgaaattccattgaagacgaatcactggcgccgtcgccgcacaacgcaatgccaaatttatgcaattccgcgctgaatcttttacgtgtgattggcaa

SEQ ID NO: 61379 - DNA, 393 bp, Heterodera glycines
tcccttgcggcggtgttcgatttgggcgacgcttcgtttggctgtgtggcggccaaaattatactctttcagtcaattctgaagcaaatttcggcgaccgattggacaaccggggaaatccattcgcaacattcgccttatgtggacacaattgtccaagtgaatggagaaaaagaggggggggggggggtgaatattggccaaaagcaaaggaaaaaatggccaaaataacaattatcagccttttccataaggttttactggtgttcctttttaggaatgttcgcaattcaaacaaaagttcgtccgccttttcccctacgttcacatttccgacgaattgtacgccgccatttggtccatgcttttgctgtgcattttccgtattttggt

SEQ ID NO: 61380 - DNA, 608 bp, Heterodera glycines
agtgcagcattgagggaagagcactgcaactgttggatgtcgagcaattatgtggggaattggaggagatcaccggactgaggcaatttcacaatcatccctttattttattgtaaattcccgaaattaggcctcttccccaccgaccgttcgtcgaaaatttcgtcaaagcattttatttgccgtttggagagcttcaaaattggatggtgaatcatacagtgagtggagaaaaaatagggattttaattgggattcttaacaaattcaaggagtacagcctaagccaaacgagcgcaattttaaatgcagcggctggggcggcggcgatcagctcgtcctccgtcgctacgaactccagaaaagcgaccatgtcgcgcatcatggccaatctgttggacgcgggcggaattggggaaggcggcaactctcttttccaatgaataattccaattttttgtttaattttacgttatttccatccgttcatcttttgaatttataattacgcaaaagaacactcacattttgtaattctaacaatcccagttttgtttgtatatattgaatgttgttaattgtgataaaaaaaaaggcttggatttaaa

SEQ ID NO: 61381 - DNA, 675 bp, Heterodera glycines
aataagctgttcgtcaacggacacttcaccaaggacctgagcgaggatgagcaggaggaattgaagcagtaccaggagcagctggatcagttcaaggcatgaacaactgggagggagtggaaattttcataagaaaaatactgaaatttccaaaaaaaaattcagtccgaagtcaagacctacttggaggagcgccagaaacagttccgcaaccaggtggcgcgccagggcggcgccgaggccaaggagggcggaactcagctgaagaagccggagccgccaaagaaggtgggcctcgttgcctagcgatggtgttcgagaatgccgagaatctcgacttatgaaaattttactctgttttttggacctgatcccggggcttggccgatttttttgaaattttggtccacattttcagcccagcttctgctcggacaaagccaccacacagtacgtgttcgacggctgcagcgttcaaggcgacaacgtgtacattggggatacttttgtacggaattttcaaaattttttaaaatttttcacccccccccctcataggtgcgcaagctgagcccggacgagcagaaggaattggcccagtttgaccagaaattcaccgcctaccagaaggcagtgacggccggcttccgcaaggtggaaaattgttttggcaaa

SEQ ID NO: 61382 - DNA, 2101 bp, Heterodera glycines
atgcccccaaaacgtaaaaatatctatttggagagctacgaaaaggaattccggcacataaagaaaagccgaaaaggcgaagaatttgccctctgtgtcgtctgcaacgatgatatcaatctgctgtccatcgggaaaagtgcaatttcgttgcaccaaaaaactggaaaacatcagaaagcggcaaaagcagcaaacagatcaattccattgcaggaatttatgccaaacacttccgccccatcaactgaagaccgtaaagttctggcggccgaaggttaacaggcttttttctgatcaaaattttataattaataggcactatcgcttatcacactgcacaacattgccaatcttttcgctcggtggattgtttgtcctcggacggcttgttgcgcacaatttttcccgattcaaatattgcgaaaaaaataagttgcggacaaacaaaaacggcaaaaattctaactggtatcgcataaatacaaaaacttttttcaattattgttaaggcgtgttggctccttattccgtgaaaaaaatcgttgaacgactggctgacaaaccattctctttatcgatcgatgcgtcaaactttgggaatcaaaaactttttcctcttgttgttcggttttttacaaaagacaatggtattgaaacccgtttgattgacttggagtcacttccgggcgaaacatcatttgaagtgagatcaattttttgcatttttaattgcaataaaaggtgcaccaatggatcaacaaaataatggaaaaatacgatttgaatgtatcaaatttaacggcactttcggcggacaacacaaaagccaatttcggtggagaagagcgcgcaggagaaaacaatttatttttccgtctaagacaacaaaatgaacgattgattggtgtggggtgtgtgtgccatgttttgcacaatgcggcgaaaaaggcaacggacaatttgagaattgaaggaagagcaatggacattgaggcagtgatttttaaaatggcagggcattttaaaaattcaaccaaacgaattgaggagctaaaaggattttgtgaggaattggaggtgcggaataaggaatgataaattctaagctataaatttaggttgagtttgaacgcttgaatcgtcatgggccaacaagatggacatcgatgcataatgtgttgggcaaaatgattcggctggaatctgtgttaatcgcctacttttcaaaaccagaaaagtgtccggcacttctttatgacttttttttcgttttttctgaacaatcgtttgcgatcattcattttttacaccacattcttggcttatttaataagacaattgacttttttcaggttgttttacaaatcttaaatgaaaaaattttataaatttagaaagaaaaagtcattttgcccgaacttttgctggaaatggacaaatttagagggaaaattgaacaacgaaaaagtgaaaggttttatggtgcagatttggcaatgggaaaagtcgatgagagcacacgcgaagcgttggaggaacaatttcaagtaaaaattgtcggttgcatattttcaaaaattttcagtcgttttacacttcggttctggcgtatttggacaaatggcatcgcattgaccgatttcctgaaaagttgcaatgggttgcgctggcataccgcaaaattccccacgacgatgcattggctctggctcgacaaattgcgcccgagttaacaaatgatttgtttgacgatgttagcgaagcaaaccaaatattgaattctttcccaaatgatgaatttcaaaaattaacccccgaacagaagtggaagaagctgtttgaagcagatttgcctaatctgctcaagctggtcagcgtcgtactttccgtgcctgtctcgaatgcatttgtggagagggtattctctttgtgcggatcgcaatggactgataaacgaaatcttttgcaagtcgaaacagtcaaggcgttggtccaaaccaaagtcaattatgatctttcttgcccacaaatgtaccaaatgctcatttccaatcacaaattgtcagagaaaataggcggatgggaaaaatacttttga

SEQ ID NO: 61383 - DNA, 3172 bp, Heterodera glycines
atgactatatcagcttggaaattttcaaatatttcgatcactagaaaatttcaaaaaatcctcctttgtataattttatttgtaaatgtttcacgtttaggcactgatcgtgaggtgcgcagcagttcgtccggacgcattttccaggtgcgtggaagcggtgccacgtcgctggtgcagtcgcctaccgcgcgggtaggcggtggcgcatgcaccatgctgacgcgccttcaacaacaacagcagcaaatgcgtcgttgcgtcggaggcgcgaccagtgcagcatcacctacgacagttgcaactgctgcagtgcgacaggattccgcggacgaggcaagcatgggcagtgtcagtacggtggcgagtggcggcgcggtggtgggtggtgtcgcaacgcaacacacaccgcaaatgcagcgtcgcgctgcgaccattgcgtcacagcagcaccaggtgggtgttgaaatttaaaaaattaaatttaaatttagagtttcatcaataaattccattaggtatatttggacactaattgatttttttaaatggattaattagttaaaagtgtttcgaagtaatttttttaataatttttagtaaaaaatcaaaatttcgttcatttttaattttttttttatattttaattaatgaaaaattaaaaagtgctgcaacaaaaaagatttcatttaaataaataaatattatttttaaatattttctaaaaatttaaaaaaaaaaatttaactattttttcaattttatttgaaatttaatttttctccttttatttctgcagcagcagcaacgcttcaaaatgcgtaggcccaaatccactggtcaaatcatcatccaacagcagcaacaaatggtggaggcacagaatcatcatcagaggaaaaaaatgtccgaaaatcatcagcaacacgctgttgtgatgcaggtgggaaaattgaattttcaaatatttatttatttttttaatttaaaatttatttttattaaattttttatttccggtttttggatacaaatgattgttccaaaaattcttcttttttttgtcaacaaagagggtaatatttttgattgaaaaattctcgaaaaaattttaaaattaaaaattgatttttcggtcttttttttttgttaattaaatctgttaattttttacttaattaatatttaaattttctttttctttttttgcttttttaaatattgcggttttgtaaaatgaaaaatttttactctgatgaaataaaacggagctcccgcggattttcgggctcgtggattacgaatttgacatacaaatctaccaattttgaattcctttacgaaatttgaatcaaaagtctaaaattccaaatatttatttttgaccatttgttcgaattcgggttcaaattgggatttttcaacacccttattcaattaacgatccctgaaaacccctttttcatgatataatatcactaccagggatggggaattccgaggcaccaaaaattttcggaagtcggaattccgaggcccaaaaatttttcttaagtctgaagcggaattccgaccccaaaaaatcggaacttggaagtcgaaattccgtaccatccctgatctctactatacatatggcaaataattaatttaatcaattaattatctttcaggatcgcggttcggttggcacggcaggcaccggacaatccggcggttccggctcgctatcgttggcaccggtcattgctggcgccggtgccgtacgtggcggcgcacacgcgcagcacaaccaccaatgcaacagcaacaacaataacaataatagcaacagcgtgtccgcgtacaacacggtgaacaccgcgtacgacccgtcgtacaccagcgcaaccgtttactcggactcaatcacgtgcctgcacgcgcctggcgtcctgcagtcgggtggcggcgtcattggggctggcggtggggcgagcagttgcgcggacggcatcacggaccagcggcgcgggtgagtggtgacggatgagtggattaagcaatcaattagattgataggcttaatggctttattggtttaattagatgcttgtgcgtttcttgaaatttgccattccccctcacttccgacatttttttaaaatcaattttataaaaagaattaaccaaaaattttatttttttttgaattttttaaaaaataagtttttttttttaaatttttaaaatcttttcttgaaattcttgttctcgaacaacatttaaacattcttgaaatttctgttaaaattatataaaaactttgaaaaatatagaaattaattaaagaaaagtttttgtttattcaaaaccctacaggcgaatttctttaaattttcaatatgaagtcaatgtttttttttcaaagttatttcattaaaaaaacagatgttaattaaaacaaagaaaaaaaattaaatttagaaaagcacaaaaaatttatcaaagcgaaatgaataaaaagaatcccaaaaaattagggtagagtcaactccgtctggccaactccgtctcagcaatgttcaaaaagctataacttttttctttgttggccaaacttcacaatcatggtatcattcgaaagccctagatgtttagaagatatttataagctatttctcagtgattaatcggctctcaaaaaaacttgtcagtttaaaaccgcaaaaaaggcagaattttcaaagttttttatttctatctttttttatagttcgaaattttctgtaatttttagtaggctaatagagcctgtgaagagctttcgaatgatatcaagattgtttgattcggtcaataacttcaagagttatattgactcaaagttggctcagacggagttggcccgttccgtagagcggccatcggtaattgtaaaaaaaatcggtaccggtaatttttgcagttgataaaccggtactttttggctgggaaaaccgggataaaaccgggacttttccctggtcaaaaccaggatttaggtactcagttgtacgcttttttcaacaccagatgccggtcccgtacaactctaattttgaccaattccaaaatactaaaaacaaattataaattaaatatgggattatagttacttttacatattggtggatcaatcattatttttta

SEQ ID NO: 61384 - DNA, 727 bp, Heterodera glycines
  unsure (1)..(727): unsure at all n locations
atgattgatgatgatatcagtgagatggagttagtaaatgaggaggaattgaattacgaattaaaagaggagaaaagtgaagaaaatggagaaaaattaatgataaaaacgaaaaaacaaaaaataaaacatttcaatgatccgttggaaattaccaaattacgtatagaatttgaagaaaaaatggaaaaattgtgccaaaaaataaaagaaaatgccaaaaaagaaaaggcaaaattggaaaaagcattgaaaaatgcagcaaacaatgaagatgaaaaacgccatttgaacaacgaatatgatgacaaatttggcactttcaattcatcgccattttctcaaaaaatttctggcactttttaaaaagttaccgagaggtttttagggtcgttgaccacgaatctggcatctattttgaccatctcagacttcctaactgatttttgttcgagttaggcttagattaaaaatcgctaactttttaaatagcgccaaatttccctttttgtgtcaaaaatttcttattttttccttgttcggttttctttcttcacctatatatcacacaatgcttctgtcttttttctttccattttcatttttttttaatttttgctttgataaatttttgagaaagtttatgctttttgtaaatataaattntcttttcatttttatgttttaatttaaaatcttttttttttattcaaataagttaaataaa

SEQ ID NO: 61385 - DNA, 1502 bp, Heterodera glycines
atgttcatggctttgccggacgatttgctctcgcggtttcccgtccccgccgcatttcgcaaattgtcgccggcacagcaaagacgcgtccaccaaatttattacagtaagcgcattggttttgacgagaaaatgcgcgaattggggcgactgatcaatcagttgtcaactgatcagcagcggcgactgatgccaatccgtcccgtggaagaagaacaaaaaccgaagaaggtgagaaacgaaaaaggcactgattagagaaaaaaaacaaagaccaatgctaattaatgcctgtttttctaattagcatatgccaactttggtcgaatttgaagtgcctgttctgttacaattcagcggacatttggtacactcggtggtctaagagacaaaatgcttaccaatataaattcataccaggaaacgcatctgctcaaagcttatttggactctaagaattttgagtttttggaatggcttattggcacgaaaggcatcgatgaaacggtcggaccattgaataatttaaatttaacacttacaggaattttctttatttgcaaaaaatataaacgcttttttaaaattttacatgtctattttcgcctttttttctccttttttgtcagtttttcctcactgttctcgtccatttttgccattttcctcccttttttcattttggcaagaatttttgaaaaattattttttttaaatttctctaaaataatttttagttttaacatttacttttttataatttcagagtcgcgcccgattggtcggtgttttcttgaaacagtcttatcagttggacccggacaattttccattgccactcaatggggacagtcacgaaattgaggatgacataagaaatttaggggtaataataaaaaatgaatttagaaaatttattttaaaaatatttacaggttcgacttatgtttggacaaagtccctttgatcggacggacatttttaaagtgaaattggacaaattaaagcacgcattttcaaaaagaacacaaaaagaagacaaacagacgaaaggtgaagaaaatatacaattttaaatttattttaatatttattttatttttttaatatttattggattaagccaccaatgaagcggcattagactgcgtcgaagaagcagaaaatgcatggattgaccggctggaaatgttccctgaggcaaaactgttcgaattccggcacaatgataacagtgctttgacggcacaaaagtcaggctcattgtttggcaatttggagaaattgtttgctgctatcaatggcactgttcacatggattggaattccaacgatttttcatcatgaaaactttttaaaaattcttaaaaaaacaacacatgctgttgtattctccacattaaaaattaaattttattttttttataaattatttttttaaatatttttatcgattccaattgacaaaaaaaaataataatttaaattagacaattaataaa

SEQ ID NO: 61386 - DNA, 1337 bp, Heterodera glycines
atgttttgtccatgtaaattgctttgaatcggttgaatatttctggtggcatcgcttttcgatattcactgagtgtcgtgtgaagtgaacgtttacttgtgacaacaataatttgcaaaaataataatagtaatattttaaataattgcatttttatgaatgggtgggaaattgacactaattggcccattttctttataaatggtcaaaaatcggaataaatattcattgacaaaattcaatgtttgcacaaatgaccacaaaaatggttaatggtcgaaatacagccaaccaagctgcataaaattgctgctatataaaaaaaagtggacaaaaatgcgaaagtaaaaacattttatgataaaatgtttttaattcatataacaaattttgttatcactttaggggacgtactaacaatgtaaaaatgaagtgcagtgaacagaaaatcccgtctttttaagtattcggcaaatttggccaaatggacaatattttatcggctttcgctgatcagcaccgaaacggaaggtggccgagcacaatgggtggggaaaggttgtggagaagcggcaattattggaccaaaggcagataattcataccatttataccatatgggaaggaagcagacactgctacggtattccccttacagtaacgctgtcaacgcaaagagaacccagcgattgttggcaacaaaggttggttggcactttgcaatccattttccatcaactgagtttgtgccatttccagtttaaagcctttcaccgccaaggagctcctgaagatgaacggaggtcagttttccgagctgttgagcgagtctcggcacatgggctgggctcagctgcacaacaccgacttggccgcattttcggcactcacttttctcatcgttctccgatattttgccaaatttacattggctttaatattttgtccaaaaaaggcttttgaaaaattacaaaagtaaaaaggaaaagccgtgttgcgacttttgcgccgcggacatttgcgcctcaacacttgcgccgaccaacaaaaatggacatttgcgcctcaacacttgcgccgaccaacaaaaatggacatttgcgccgctcagtcaaatatatatttaaatatttttactaattttcaacgaattttattccaattaccatgccaacaacaagaagcatttaaaagaaatacaaaaaaataatcacaacgatagacacccaatttttgttttgttttttgtacatcagcagcaaaggcaaatttgttgccaaggaaacaaaaaatgaagatttaataagtcaaattaatgtatgtaggttttagtttaa

SEQ ID NO: 61387 - DNA, 1213 bp, Heterodera glycines
atgtcccaattaaacatttggtgctcaatggctgctgttttttatcgacagataaattggattacttcttttcttcttacggatcgatcagtgaaaggaaaaagtgcgtataaatacgaattaaaaataaatttaaaaaatggagggttaggaacagaaaaagtttttaaaataaatataaaacataattctcattttatgttcgaacattaaaaggtatgggctcgaatgccttgccagtttcggagtgatcgtgtcacatttaaagccgctaaatttgtccgaacttgagctgagcgcattgaatggaattcagctatggaattgcagtaagtccgcaaaaattggcattttgccaactttaatttaatattgttttttactttgtatttttgcgacaatattatccttcttctattagttgagcgttttgtgccattgtctgatcagcaaaaagcgcatcggaatgcattttttgttgaattaaacgcaatggccgcacaaaacaacggcaaaatagccgagattggcatcagattcggcttattgatgaaccttttgttcgacactttggtgacaaattaattagtttaatttaaacataattaaataataatgaaaatcaaatttaatttattccaatctgcgttttcgcattcagaatgctgcttctcaactgcttgaagcattcgcaatggctgatatttttttcccagctcaccattctttttgcttccccgatgctattgtcggcgctttgttggtacaataaccaaaattagggaaacaattattgtttaataaacaattaaaatttaggatcaacagtgaaattataaatggccgaaaaagagagtgatcaaaagagagagacagacgcaaaaagacagcagagagtgtgtgagaaggagagagagagaaagaggagagagagagagagagttcaatcggattttaatgtcatctaacaattttttttctcattttttaattttttttctgccgtccccaaatgccatcatctgacaacaaattatacaattttatgacaatatctgttaaaattgattcaaaagtttaaaattccagctgcgtttgacggcaccgccgagcttatgtcgtcccatgaagttttttggccaaaatagttaataatcagaagatttcaaaatgaaattccgatattcctttgtcgcaaaattacaaaaaaaaa

SEQ ID NO: 61388 - DNA, 1244 bp, Heterodera glycines
atgacaataatgattagcatcgggcaatggatgatgcacattatttggcatcaaattgatcggcttcgccacattgccaattttttgattaattattggattgagttccgtttgactgattatccattggcactatcacattatcagtgctgtgtacatgattatgttccactgggtgatagcttgaaaaattcgggtaactatggtgataaagaccatgcccaaatgaatgaaccgaagaatcatttatattattaacattatttgagctaatcagtggcatcgaatttgaatacaatgccatgccattgtgatcatattcattagccaaatggtaattagttggcacatcataaacagtatgataattagatggaacattaatctgatcagtttgagacaaaaatgaccatcttggccattattaaatgtttgaatgtgattattatccattgcagtgagaatatgccaaagtgagcaaaaaaattgcaacaaaaataatgaaaacattttttgtatatatctaaaagtggtttttgttattaattctgcctgcaccaatgccctggctttcataaatccgccaaaagaaacaccagaaactttttataacttagaaattaaatttaatatagaatacctcaaattttgcgagatttcttcgtctctattttttgcttatacgaatatttttatttttaaattttaaattttataaacaatttattaaaaagtaatcagttctgagtaaagttagtgacctagaatattattatttaatataaaatatacaattatagaaatatttatacgaataaagtttctttattaatagagctcgcaaaaaaaggcaccaaaaatcgcgaaaaaggcactataataggcaccaaaaaaattgaaaaaaaggcatgaaaaggcacgaaaatcccgaaaaaggcatgaaaaaaggcatttaaaatttttttaattaactgctttttagggagaaaaacacgtaaaaattaaccaaaaaacttaatttttgtcttttaaatgattattaaatattttgtaatgtttttcgaataaggaaattttaagcctaaaatttctttaaaaaaaaattaaattattttttgagaaaatttttaaattcttaggggtgtatttttccaattttattgcattttaatgggatttttcggtaaaaaacgctgccaaaaaaggcatttaagacacaaaaatcccgaaaaaggcataataaa

SEQ ID NO: 61389 - DNA, 648 bp, Heterodera glycines
catatgctgaatacgtcgttaaagctcaaattttggccggaggaaggggaaaagggcattttatcggctgtccaaagaacggagggggaattcgaatcaccaaatcgtgagtttgcatgtcaatttttgttgatttaaaaagccaaatttcagcgtggaaaaagcgaaaagttatactgaaggaatgctcgggaaaagactcgtcacaaaacagacgggagacgagggagtggtcgtaaaaaaggcattcattcgttttcctcgatttgtctttgtttcgttactgattttctttgctcaggttatggttgcagaatcaattacgatcagacgagagacttacctttctgttctgatggaccccacttcggccggacctgtcattcgtttttgaatttattcaaattctctctctctcttttcaggtggtcgttgcgtgtcctttgggtggcgtggacattgaagaagttgctgctacacagcccgtcttaatactcaaagtgggctaataataacagaaacaatcctttcctcttcgaatttgatttttaatttcaggaaagaatttcagtctttgacggaataaccgagggacaatgccaaaaaattgcacaatttttgggcttttctggcaagacagctgctaaa

SEQ ID NO: 61390 - DNA, 73 bp, Heterodera glycines
cgctttcttctgttgtattcatttattttgccgctcttttgaccatttacctgcgttttcccgaattgaggcc

SEQ ID NO: 61391 - DNA, 915 bp, Heterodera glycines
atgccaaaaacagaaacaataacaaaaccatgtgcaacagcaaagatgaacaaatcagcagtaaatactcgcttccagatttttgccgattttaatggaaataaaacggaaaaattcccaatttttccaatattggcaatttttatttttcgttggaaaaatttatttgcatattcttacttttacgcggattttttttaataaattaagaaccgcattgactttttaaatttttaaaaattcgagatattttttataattgttatttcaatttttatatgataattctgtttaatgaattaaaagttttaccactttcttcatgtctgctttaaattattttctcgcgcttcattcacttttttttgccattaaaatttgtgtccttttaattgggtatgtaacacgcgtttttgtcacgatatttgctgttgtgtaacaactgttactccaaaatatgatatttctttttcttaaacaaaaaaattattatgattcataatttttatgttccctaaaaaaataataattttttattttttaataaataaaaaaaattcatcccgatggaattgttgctgtttcgtcatgacgaatttgacaaattgtacggctgtgagggatttaatgcggacaaaatcccacttgaagaaagaacaaacattgtgaacggatgcattttgatcacactttttttcgtttttgaggtctttttcagggggtgattgaattagggctgctctagtataaatattcagatttttatccaagtgattatcataagtttgttcaattcaattgcctgcgtaatttatgtctcaatgcaatttgtcagaatcagcaaaatttacatcatcgttggcacttacgcatgggtttttacgagtggttagcatatttattttaaaaaataaa

SEQ ID NO: 61392 - DNA, 662 bp, Heterodera glycines
  unsure (1)..(662): unsure at all n locations
atgtgccaacagaaacagaagcactgccgcttaatgggccttttagcaatggtaattaattcggcaaacattgcaatgggacaatttatgccaaattatcaacaacagcaacaaatacaacaatcacctctatttcctcagcgatcccattgggtataaaaagtgatcaaaattttgtaaaataaaaataactcttttcgattgagaaaaatcgaatttgaaattttaaaaccaaaaaaatttaacattcgtacagacagtatccagttttgttctgtatattgtaattaaaatatggcttgaaagacaaaatttatataaaaataaaatggaatttcatttaaaaaaaattgaaattgctaataaagcaattaaaaatcgatttttgattagataaaataattttattttagaattatgatgatggacaacaacagcaacaacttttagagcaaaagtcagaaaacaattttgatcttcatcggcaatggcatcaacagcagcagcaacaatatcaacaacaacagcaggtggttaattaaacgattaagcaagcttatccgaattattattttttatttcttaattattgataatttatataattgtttcgtagtttctatttanatatgtgttatgtattttttttttttttgaataaa

SEQ ID NO: 61393 - DNA, 402 bp, Heterodera glycines
atgtccttcgattcaaaatttgagtcatgcgcaatcgcctgttcagcttttgatccccatctcgcctggactaagacttgtcacccagccccagtgggacagccagcatgtctgattgagtttcgcaatggcaaattaattgttgatggtgcttgcccctcactatatgcgggattgcagacttccctaaatacgccgaatgatgttagctcgttgaatggatccgtgagttgtcttttgtgccatggaattatgagtgtcgttgagctgttgcggaatgaaagtgttgcgataatcaaggaagaaattggtcattattgcgattatcttcttgcattacgctccgtgtgcaaaggaataatcagcgacttcattttagacaatttggttcaatcacattga

SEQ ID NO: 61394 - DNA, 597 bp, Heterodera glycines
atggtcagtggaaatggcaaacttagtcttgattcatttttaactaagaattgtactggttgttgtaggtaccttaactacggggacccggcatggaaagaagcgactcgcaaatgtttggcttcgcttaacactttttcggatgaagtgcggcgcaactttgagcacaccatcgaatggctgcatgaatacgcttgttctcgctcgtttggacttggtaaaacaattaacgccaattattcacaatttctattatattttttcggtttcttaggcactaaacttccatgggacccacaatatttgatcgagtcgctttccgacagtaccatttacaacgcttattacactgtttcgcatttgctgcaaaatgatatttacggtgctgaaacgggtgaactcggcattttaccacctcaactgactgacgctgtttgggattacatattcatgggtaatttgtttgttttttattatttaattcgatttaatgtatttttgaaggtattccatatgattcgactaaaatgccaattgaagaagcaaaactgaagagaatgaggcacgagtttgagtattggtaccccgtcgatatga

SEQ ID NO: 61395 - DNA, 804 bp, Heterodera glycines
ttggggcggtcggatgatggaccctaacggacttcctagtgagtgggcgaccaatccgaggctaatccgtcgccctaaaggtgcccctccaaaatccgctacggcctcggccccgtccccgactcgtttttcgtcgacccttcccaagcaatgcccgactatgaccagttgaccaccgtctacgcgggcgacaaacacctgattgagctgaaagtgaaggcgaacacgcgcattgggtgagaacgcgggggggaagtgccggaaagagagagtgaaagggaaggagaatagagagagggagagaaagacgaagagagaaaagggagagagtgaggagagaaacagagagagcccagagaaagagagagacgagaggtttagagagagagagaaacatgactgattcagttggcaatacctcaccgaggaggaggacatcggttttgcggtgtacttcgacccctcgggcaatgccaacaatctgacggagatggactgcgtttttccgtaagattccccctcctttttttccgtttttccacgggattgccccccttttttttctttccctccgatgcgcttttcccacgcctccccaattttcttcagttacattcgattggaatgttcccaagtgcccatttcgggttccctcctttgtgagcagtcgggccgatgtaagcgatgagaaatcggaagaattggctttttgtgtctgtcccttcagacataatcgaattcgacaactattactcgtggttctctgctaaacaattgcggtataacatcgaaatcgatgacagg

SEQ ID NO: 61396 - DNA, 488 bp, Heterodera glycines
atgatttcggtgagtgaaaaaattatagaaaaaaacaatgattggatcggaaatgccaattagagaggacattcatgtttagatcttgattctttcacaataaatgaaaaaaatttaaatttttaaggttgacgaaaagggttgtgaggctggtgccgcaacaatcgtatcgatgccaaccggcttcgcttataatccgccccctccgcccgttttccgtgccgaccatccgttcgcctttttccttatcagaagcaaaaaggaagtgctattcaacggagcatttgttgggggaaaatgaaaatgcaaagaaaaaggaagaaggaattgaattgctgaaaaatatgatggaacacatttaattgataaaaatgtccactcctccaaaaatctaattatattagggctggtcgggaccgggaatttttggctccagccctaaattatatgcataaaaatatcaaaatacaaatattacaagtaataaa

SEQ ID NO: 61397 - DNA, 602 bp, Heterodera glycines
atggaattggagaaaacgttcaatttgagcattgccaacaaaatatttctaaacgaaagttttaccattttggaagagtttaatcagacattgagcaaatattaccagggaaattttgaacagattgattttggcaaaagggaagaagcagcaaacgtataaacaaaaacaaaaaacgaattcgaaattaatgctttttataggaaattaatgcatttgttgagaatgcgacgaatggaaaaattccaaaaatgattaatcccgaatttcttgatggtcgaccagtgtaatacacataaaatttaattttttacattatcaattcattagacttcttctgatcaatgcgatttatttcaatggaaattggtcatatcctttcaatgaacgcgacacacaaaaagaaatattttttctcgcaaatggcaaagaaatcaaagtatgtcttcgcaaggcatgtaattaggaagtccaattttcgatagcaaattattgtcaaaatagatatttaaaattgttaatttgaaatattctttttagttggatatgatgcaacaaacaaattttttcgtttaccaggaagagaataacgtataaataaa

SEQ ID NO: 61398 - DNA, 2410 bp, Heterodera glycines
atgattataaaccagcagcttaaacatctgttggttttgactgtttttaaaacgattattcttctgttaagtatcaaattcatcgatgcaagtccaggtcccaaatatttttaaaaataaattttaattaatattttttcagaatttaatgccgcggatgtgtgccgtgccattgatcgctccgcccaatttcactcgctttgccttcgctcgtcggtggtccaacagaaaggcttcatccccaagcatttgcggcccccgtggttggactcatctctttttgaggacaacaaattaaaagcggaggagaaaatgtcggccaatggatgttacgcgtgttacagtgggacaaaggcgagcaatgggaccaatcaggacgaggattactgtgcttgtgtggtacggtattcgaagaggaacgaatagggtactgctgtgtgtcatttaagtacaaaaagcaaatgccgaatgaaggattttcgaaaatcattggaacattcgtcggactcaattgtttgcaggatttatacaaaatggcattggtaaaggaataaatattcttattttatacggtactttttcagatgccaaagtgtggtaatccctattatgaccaaatcaaacactgtgtcatggtcaggttaaaaaaagtgaagaatttatttcttaaaatttaaggtccatttttacgaaaatgaacccgaaaaggagccaaatggaaacgaatataaacgtaaaaacaattttaaacattaccgtgccaaaaattaatcattttaaatttgactttttctttaggcactctcgcatttttggacggatgcgtcgcgggaggaacagcccaaaattgcacggcaaaagtgaaaattgaatttgaggagccgaaaagttcgtttttctacggaaattgtgacgcacaaatgaaaacaatgtttgagaacaggtggaagaaagggacaaattatcagaaatggggcaattaattaataactaattaccattaattataaaattaaataaatttaattatattattattttattaatttatttaattgttttcagttttgaaattacggattcttccttttctccttttacctttcccgtggtattccaacaccgaatttgcagcagtttatttggcagtgcgcaaatggaaaatgcgttcaatggcattacagtaaccataagcggagagtgcgtaaagagaaaaaaatgcaaataataatattttatttcgtaggagaatttgcgcgggtttgcgagtgtttggagacaaatttaattggacaaaaaaaaaataataataaaattcgcaataaatacactttaaaataaacggaatcagtaacaacaatgaaagatttaaatgggaaaataatttgggtaaacaaccggcacaaaagaattaatgaggacaaatgatgccaatttattgtaaacttaagaaataaataatttaaatcacatggatttcattttgacaatttatttcgttatttaatcagttgtggcacaaacatcttcaaactgccagccattgaatttgaaaaagtattttaattttttatttcaatttttaaaaattcacttttctgagaaattcacacatcaataaatcactatttttggtaaatgttgatcatatacggtttaaagctttagctaatttttttaaaatttttctaacgtttttaacacctaagaaaattaaaatttttgtgttttaagctctttaaataagatgttgaccataactcatcatattttttccaaaaatttcattctgatttcgtcatttaaaacccgagaggaatcggttgatcaacatatatttgttgaatatttgaacgttttcattcgctgagagttcgattaatacataaatatttcgtcttattttgctatgatgttcataaacaatattttacttattttacaaaaattataattaattttaaaatgcatttccagggccgtgtgcatgagatgcgcggcctgcagttgaacatggctggccaagcagtgcaatggcgtgacccgaggggcgcccatttgtacacagagcagcaccaactgacgtggcaaccgaccgaattgaagtccatcagtgccaatgggaaggtgaacatcgcatttcaatatccacaaacaacgggaccacgtgagtaaaattaattgggtaattagctaatttataagtatattactcataattaatgaagttagtttttttcagaattttccatgaatttgctaaacgcaatctaccgtaactgctgtgctgatgcatcgtctacacagaatacggtactttcgcccatttcggcggccattgcgttggccatggcttatgcgggcgcgcggggacaaacggcggccgaatttgtcaatttgttggccgatg

SEQ ID NO: 61399 - DNA, 930 bp, Heterodera glycines
atggatgccaatgccattcattcgttaacccttccaagggatgcaacggcccgaaagccgtttgaagacgggcacccaaaacagcatgttgtgcacgtcgcgtacttcgatcacttcacggccaatctccgcggccaccacgcgacaagcgcgacttggcacagtttggaaacgcagcaaaacttaaatcaaatataatcacaggcatcgatggtaagatactcattatgaccaaattcagatcagaaattttaacttgttaatggcgcttttcaatgctttacttttcgtcacttttcctaccgtaacttttcttttccatactgtaactcgttgctaccgtatcattcttcacattttcctttagtttaattacgtttttctacacgagggatatgctcgcagcgcattacagtcaacagaaaaagcatttttgaatcagagaaattcgtttttcagttgcgcttgtcgccgcacgcggcgcggacagcaaacgacgcgattggttttggccggcacagaaaaatggacatcttttgggttggtgagcaattaaaaatatttccatttccaaatataggtaattaatggttccagggatacaattttagttttaagatttatatacaaagtccattaaatgttgcttattttcaccttttgtgaaagtgtttttgactttttggttcctttatgagcctttatttcttaattccttggccattaaaatgaattttgcattttttgtccaatatttacgattaaataaccatttttaatgcttttccattttctttttaagatgcttctcaaatgttcgttcctcttccatctgaattggttccattcgtttctttgttcagctttgatgaccaaatcgaagcgaactttgggctcaatttcgaattcgatttatccaatctctgctga

SEQ ID NO: 61400 - DNA, 785 bp, Heterodera glycines
atgagaaaaactgagaaatgttagtctatttataaagctttctaaactaaacaaattctaattaactttcagtcatctcaagaataaaaaagtcattattttgtcaaaaatggtgagaaatggcattgaatgaatgtattaaagtgtctgtttattttgggctgtttttgatattcccaaatggtcgttctctccggcagttgagcaatttgtccgtgtgaagtctctaagaaattatgcacaactgcaaaaatgtacgaatgtcaagcgatctcaccagcagttttggtgctaattttggtgaaaaaattaagtggtgccgaactaaaacctttttatttattaaaactagagtagagcggcaccggtagtggtactgaaataaacgtacaaatgagtgcttagtactggttttaaccggaacaggtaagtaccgttttttaccggtttttccagccaaatagtaccgtttcaatcctaaaaataccggtaccggttttttacaactacccattaccgctctactctattaaaacctaaattaaaaatttaatttgaaaaataaaagtgcgggaaaggtcacaaaaataaaatcagaatattcattttcacttaactcttaaaattttcagcattacttcatcactttacactttttaccagaatacacaacgagcgaataatatattacaaaataaaccaaactgactgggatgactcatctccgtttttcatttctaatataccgttatgataatcatttattttttgtttactaaaataaa

SEQ ID NO: 61401 - DNA, 752 bp, Heterodera glycines
atgacaaataaaattattttgtgcacaatcattgcattggcattcttaaccaaaattgatcaggttcatcgctttatttatttatctaaatttaaaaatgtttttaaaacagatttcatcatgcttttctgtcacatacggaaatagatgttgcaaaaccattccgaattttcccgttattccaagtattttaaattttgaatttaacatatgcgattttatgatttgcttgtttctaaaaaaccagtgcttaattatgtatcaaatcctaggtattgtcactttgtgtagtgtcggcagtccgtggtgcaacgcttttggagggaattgcgtcgtttgcgaatttgttttcattccgactgcacgttgtgagctgatcaccaagtgcagttgctactattgttgtgaggagcagtacaaagactattgccctcaggggtgcgaaaattgcgtgacggacggcgagggcggctgtgaggagaacgcaaaaagcagagaaaaattcgaaggctgcgcgtaattaattaatctattaattatgaaaaggaatgcccatcacaaacccaaaacccttagaaaaaatataaaattagcaaaatatcatttaaattaaaaatgctcatacaatatcacacttatcataaccataatcattgccaaaatggaatttttgctgatttttttaatattctttttcgattttcacattataacgtaggtgggtaattctgcacccatgttatgataacata

SEQ ID NO: 61402 - DNA, 627 bp, Heterodera glycines
ctggatttgtagcgatgtttggatggacattctcccatcttttgaccatgctcaactcggcctcaaattggcattgctttcttatcgtttcgatgctttggtggacacgcatttcgatggaaaaagcgaattgacaatttggcgactaatcagaattcgcaaggacacatcaggaccaaaaccgaaaatttgtgtaacgctggatgaaaataacaatgatatcgatgacgatgacaattttgtggattttccgttttcggaccgtcagctgcccaacaaaaattgctttaaaagcctttggattgagtaatttgaacttttcatgtgtatattaaggcattttaatttttcttcaggtacattgaccattccatcatcacttttctccattccaagaagcgaatcttcgacagaagtggcaccaatttgtatttgagtgtggctacggatttccagccgatttggaatgcttttgtccgtcaaatttggccaatttttgcgggaagtattcgccatttgagttttgacgctggcgatcctttggacaatttgcgtcgccgcatttcaccaacatttctcaccgatctcaatcgattctggtgctctgttacccgacggtattgctga

SEQ ID NO: 61403 - DNA, 99 bp, Heterodera glycines
aatcaattaaaaatgaaatacgaaccgaagccatgcttcaaaatgtgcaaatgaattggtggtagacgagatgagaaaactttggaagttcttaatttg

SEQ ID NO: 61404 - DNA, 871 bp, Heterodera glycines
atagaaagagccaggttcgatgaagttttggtaagccaaaaaaaaatccaaacatttaaaaatctataaaaaatttaaaaatgagaattcatgcgagattttctggaaataagcttaatagggcctagttaagctgtaaaaaaaatttggggcgatttgaatgagaatagaaagagccaggttcgatgaagttttggtaagccaaaaaaaaatccaaacatttaaaaatctataaaaaatttaaaaatgagaattcatgcgagattttctggaaataagcttaatagggcctagttaagctgtaaaaaaatttggggcgatttgaatgagaatagaaagagccaggttcgatgaagttttggtaagccaaaaaaaaatccaaacattttttataaaaaatttaaaaatgagaattcatgcgagattttctggaaataagcttaatatggcctagttaagctgtaaaaaaaatttggggcgatttgaatgagaatagaaagagccaggttcgatgaagttttggtaagccaaaaaaaaatccaaacatttaaaaatctataaaaaatttaaaaatgagaattcatgcgagattttctggaaataagcttaatagggcctagttaagctgtaaaaaaaatttggggcgatttgaatgagaatagaaagagccaggttcgatgaagttttggtaagccaaaaaaaaatccaaacatttaaaaatctataaaaaatttaaaaatgagaattcatgcgagattttctggaaataagcttaatagggcctagttaagctgtaaaaaatttggggcgatttgaatgagaatagaaagagccaggttcgatgaagttttggtaagccaaaaaaaaatcc

SEQ ID NO: 61405 - DNA, 327 bp, Heterodera glycines
atgaactgcaccgggacagcaaaaactatcgggatgagagctggagttgaagttcaactaggaaagccgcacaatcatgccccttctccaacacgatgtgaagccgctaagatcaacagaagcgtccgcaacacagcattgtcatcccgtggaaatatgccacgcacagttgtgaatgaatgcctcgctggtgcgtcaaatgaagttattgcaagccttcccctaattccgtcaatggagaaagctgtcagtagagtccgtcatgcagccgggggtcaattccaaataccaaaaacactcgcagatatcgagataccagcggtataa

SEQ ID NO: 61406 - DNA, 556 bp, Heterodera glycines
atgggaaggaaactcccagccgaacttttgttcgaaatggttctctgtgttcgaagagaacatgcccacgcgagcatttgcctctcgtcccttgtttatgcaaataatgctacctcgtgcttcattatggcggaaaatttgggtttcagtatgattttggatgtttccgctttttttttaaattttcgttgttgctgtttggacttgtctttttatttttgcactaacaattctgttattttatttttggtatttatttaaacgtttttgtctgaatgtggtgattaactcttcttccttccttttctcatttccattggtttttattggttttttttgtgcgtttccttttgtgttcggtgttcgctgtttgagcctttttgagacggtttatttgaaattcaatttaatttaggcatttttcaagctcaaagagaactatcaagacgcgatagcagctggacaagattggaactttgtgagacagacggcgcgtgatgatatcgcatgcaacaacgttatggtggctctggacagactgatggatgtgccgcaa

SEQ ID NO: 61407 - DNA, 498 bp, Heterodera glycines
atggagaaggcctgcaaaatttggagagattatatcgatgttagtgcgctaggttcgatgaaactttttaaaatataagcctaaactttttggcctgtttaaaaaggaattaaaaatttttaaaaattttattcatctcccttttgatagaaaaagcatcagagagccttatttaactttaaattaacatttggtgcgtttcagagcagtttctgaaaaaatatttatgaattaattttgctaaaaaaataaaatagtgaagctttaaaaattaataaaaaattttaaattcagaattactggagttagcatcatagcagtgcttttccttgtctttttgatgctctcgcaaaatctggttcgcttctgatcagtttataaaaaaaaagttaagcctaaaatttttcgcatatttaaaaagcaattaaaaatttttagatttttattcatctccctttttgatagtgaaagcatctgagtgcctaaaataacttgtaa

SEQ ID NO: 61408 - DNA, 512 bp, Heterodera glycines
gcgcatcggctcggggggactgccccgaaaacaaaaaaatcgattttttcaagtgtccgtttggggtactcaagcaattatggggagcaaaaatccaacgcagaattaaagtacaggctatagggaagctattcccgaaggattcggtctccccataaatctgggcgcatcggttcagggggactgccccgaaaacccaaaaaaaaatttttttggataaaaattatttaaatgaactgactagataatatttaaaataggttattactcttcctttcagtatccctgcaaagtttggtgcgcttctgatcagtttctgaaaaaaaagttaagcctaaactttttggcctgtttaaaaaggaattaaaaattttattcatctccctttttgatagaaaaagcatcagagtgcctaaactaacctgtaaataaagttttgtgtgtttcagagcactttctgaaaaaatacttatgaattaattttgcaaaaaataaataattaatgaaaaagt

SEQ ID NO: 61409 - DNA, 558 bp, Heterodera glycines
atggcatcgatgtctgattgtttggtgagtgcgcccaattggtaggaacccatgacaataattttcgctttgcgattctaaatttcgaaaaaaataacgaatttgggcaatagtcctaaagaatggggatccctccctaatttaaattcttttattttaggctcaaaatcagtttccggggatttttaagggtgctgattgcaaatttgaactcggatttgcccaattccggaccccggagccgaattcgaacaaaagttgtgaaattttttccaaaagatacgttgaaaccggtcaaattttggcgcaaattgcgcattttgtccaattaataatttaagtatgttttacaccaaattgaaaatgacaaattcgggtattttattttttcattggcattatttaatttttatttattttattaaatttgtttttctatggaattcttaaggaaggacttacccatttctttacaatttgttctatttcttgaattgcctgatcaatttttgttctccgttcgtcgtttatgagaccaaagccatttttagaaataaa

SEQ ID NO: 61410 - DNA, 94 bp, Heterodera glycines
atgccatttgtgttgtgcccgaattacgcacttggagagcggcaaaattttttgggaaggcaaagtgccaaattcaatggaacgggttcagaag

SEQ ID NO: 61411 - DNA, 2405 bp, Heterodera glycines
atggccaacgaaattggacaattagcgaatcggaggagggcatttattacgaggggtggagactatgaggaactgatggaaatgaacagcgagcgggagaagctgagaaggaagctcagatcattggcaggtgattggcccggcgggggagggcttaaatttgacaatccatcggaggacggaagatgccgttgattactgtgtaatgtcacttctaaagttcggcccaaatttccccgtacaataatagtagacatggaataatgtcctttattccgaaggcggatatccacgaaatacagtatgctaatataatgaggaaaaggggaaagggaccccgacccgtgcaggacggaaggggaggggatctggagtaaatgtgatcccggttataagaatgaatagaggtgatcgctaaggaatgggccacattacgagaaagggcggagctaaagttgatcagagtgatcagaggcactaacaaaatcagacagtcaaaaaataagaaataatgtacaattagtttctcgcccaaaaaccatacaattttaggcttcgaagtgggcgtaattattttgaagaaactttttgcgacagaaaagagagaaaaagaagacaaccaaatcattttaagaaattatcgcactttattattggctgtaaaaatgtgggccaaaggtattttaaaatgaaaaaataaaataaattattattttaaattggtatttattctctaattttctctcatcagagcatcacatttatgacaacaaattgggcttcttcaatggcattagcctttcccttttggtggccaaagtgatgcttctttacccaatggcatcacttccttttctcattgaaaagttcttcttcaccttctccacatggtcattttgttttaatattttcttttaaaaaaagttttaataaaattaattgtcaattattttttgaattttaaatgtcctaattattctatgcaagttttaggccttggccaaccccggtaaagctgtccaatttgccggatgggtcggcactccgctggaaccccagcgaagaaaaacaaaaacggagcgaaattggctatggaattgcggccgaattggcaatgccaattgtcacgccgggacacattgaacaaaatgccactttcaatgtgaaccgatccaccgcaacaatcattcggcgggaaatgcaaaacggtgtcaattaaaggaaaataaaataattagggaattaaaaagggatgtcatcattaatttgaatgtttagcaattaaaattgtacgaaattggccaaatctgagcatttcattgaatggaaaatggaaaagcttaataaaggctacaaaattcaaggaaaaggtgacccaataatattatttaaattgaaacgcgtcaggaccagtcagctggggacagctcagctttaagataatttacaaaatttataaaattgaaaaatattaaaagttttaaacaatgacttaggttagggctaggctttaggctaggcctaggcttgcttgtgcctaggcttaattttataaaaatttaattgtatggctgaatcgtccatcagtcgaattgtcccatcagctgattgtcctcagctgactagttcagaagccaaattaaaaattaaaaaatttcaaatatttttcgcagttttcccatttcattcgcattaattgcaaagccttcgctttggccgacttttacgacttttgtggctacgtggagacgcgaattcgtctccaattgctgatcgatgtcgaacgatttgatcgcattcgattggcccatgcgaagcaaattgttgaaaaggaacaaattttgggagagaatttggatggaagcaccgctaataaaaagaatcacaaaaagtgaaacggagggtctcttctatttttaggattttatcaattttttcctgggctacctttggtcagaaacgtactaaaaactatatttttggatgctattgttaaactacttttcgaatttttagatcctaaaatccttaaaaagagataatttgtcctgttttggcattttgcctaaaattgcctaacaacaacaaaaaaaacgaagataaactccctaagaatcgacttaaaatttgaaaaacaaagccctaatattgtcttttcaatacatacaaaattaagaaatgttttcttcaaaatttggttggttggcctcgaattggacgagcaaatcgcttcagaaaatgagtcggaaagtacgaacaattggaataattggaaagaagcactgaattcgatgctttccgaacaatttaacgccgtcattttgaaggcgtatcggacaaagaatggttttagtggcccattggttcacattcaattgacggcacaatatgagcaaaagcattaa

SEQ ID NO: 61412 - DNA, 709 bp, Heterodera glycines
atggcctcccaaatttccaaaattctgcccactcttctcttcatcgccgccgcatttctgctcaactttggctgctgtcagcaaaatgagaggtgtgtgaataactctttctgctgctgctgtacacgttcaacatttaattgtgttctttttcgctttcagccaaacgacggaaactcttcgcgccagaaatgcgtcgtcatcaccgcaatttcctttgaacaccacaacattcacaaccaccaaaaaagaaacgacggttgccactccttcgactacagaagctggcactgaggcggcgacaactgatgatactaatgacgaacaatcattgctgttttggattttgattgggtccgtatcattttgttcaacgcttttcacagccattcatttttctcctaccatttttagcgtcattgtagcaattgtgctcttcttggtcctgctggtgtgcattgtgtgctgcatgcgaggaggaagccaaaaagatgcgcgcgaaaccgtcaatggcgagagcggaggggctgtgaccaaattaacgatgaatggggacaacgccgacagttccagtgcttcacaatcagcatctgagcccgacgaaggatggttcgtgccggactcattgcccaacaacacaatgacggacctagcgaaagtaaacgctcgactggcccaaggaaagaagcagcaggcgccgaagcagtag

SEQ ID NO: 61413 - DNA, 634 bp, Heterodera glycines
taggcgagaaattccccgacgagaatttcaaagagaagcataccgtcccgggactattggtaacgtttaaggaatggaacactcgtagcccatgggccagaaaaagcgtcatttttcaacttatttttaaattcagtcgatggccaatgccggccccaacactaacggctcgcagtttttcatcaacacagtgaaaacggaggttggacgaaaggcgtatttagccattttcgagattcatttttaacacaaattaatctagcgaattcaagaaatactgggaaaatgcctatacttggaaaattcttacaaattgcaatttatgtgcgcagtagcgcaagtgttttaacaataggaaaaggtgccgtggtcaagaaattcggtacttgcggtttttgaataacacacaattaagcactgcaaattttccgctctcctattcccggaaattgcttttgttattttcggtttagggtttttgatgatgttttcattgcagtggcttgacggcaaacacgtggtgtttgggcgagtcgttgagggcatggacgtggtgaagcaagtcgaagcccagggcaatcagagcggaaagacagcgaacgaagtttgcccatcctttcgctgttcatttcgc

SEQ ID NO: 61414 - DNA, 881 bp, Heterodera glycines
atgactcattttccccctttggcaccgcacaggacgacgaaacgcgagcagaccttttacgatggactgccgggtcatccgccgggcatttgccatatgccaatgcatcccgcgctcaacgaacgcctgcgacgggcgctgctcgccacggcgacgcgtttgggcgctgcacacagcgaccgcggcgtgttggtgtgcgtggagggaccacgcttctccacgcgggcggagagcgagctgttccgcgtttggggcgccgatttggttggcatgacactgtgcccggaagtgatttataaattgaaaagcattactaaatgctaaatttaaggctgtccttgccaaagaattgggcattccgtacgcttcggttgccgttgtgactgactacgattgttggcgcgataccgctgaaggggtacgttaggagacaaccgtccgaccaattcaaaactgttcatggcctttttgtcacggcatctcaaaattcccgttcccgtgccactatattcctatatataatttgtttcctattgtttcatttgtcaggtgagcattgctttagtgggcgaaacaatgcgaaaaaatgcgcaactgatgcagaaattctttgtggaagcgatcagtgaaattgccggacacaaagagcaattcgttgcagaggcacagaaggccaaggtgaattggaagtggacaaacacaaaatgcaaatcaaattattaatactttgccattttagcaattggccgctgcctcagtgatggaaggagaacacaaactgaactttgatcacttgtgctgaagcttgcttgtttctctgtgatatgatgtagcatgactcttttttattaaatacatatttcgtaaaattaattaataaa

SEQ ID NO: 61415 - DNA, 1050 bp, Heterodera glycines
atgaaagccattctgattttccaaagcctcaccattcttacggtaaaatttgttgtataccatagggttcgcaagtggttttcaaaataggcaaaaaattaatatcaaaattttttggtatcgattttaatttcttaaatttggtaccaaaatcagtgaattgcacagatgtaaaattcatgaatatttttgtacctcatcaaatcctacaaatgatttatctttagattcctctcgttctttaatgaacgaatccgaaagaatttttttgcggaaagcactttggaatttacttataattttgtccgatatttagtttttggggtcactgatcaccaatctgacatctattttaacaaaatcccgagttcctaagctaaatttaaaagaaataaatcgaaaagtttgaattttcgacttttgttcgagtcaggttaggaattagaattttttgttctttaacaaatttcaaaatcaccactttgaccatagagccaaaaattctatttacagcggggaatttgtcgcttcataatttgtctgttcaaattcatcctttgggacccaattggtgccgagaagatgcacttttttccggcaattgccaatttgtatttcgtcggcgtttacagtcgcaatgttgtgccacacattttgattgttgaacgcattttggcaactgtgtttgtccgctcatatgagcattggcggggctacctgttcacaatcatttgggctccgatcgcagtaagaaatttttgtattttcaaatattaacggagttaaaatttaccaaatttttacccccccccccccatttttatgtaggaatgaaagaaactaatcctttattggaaaaatatttttctgtcatcaaattatattataaaatatgtaaacttcttaaatggcaaaattttctcgcattttttttttataaatttgagttgggaatccattagtctgaaacccaaatatttttttagtggattttttttgtaaattttattatttcttttacaattccttttacacataaattttaataaa

SEQ ID NO: 61416 - DNA, 50 bp, Heterodera glycines
atgatcacctttttctgcagcgcttcatccaacgacagcattcgcccgct

SEQ ID NO: 61417 - DNA, 230 bp, Heterodera glycines
atggaagagttgcaactgaacatgccctaccgtgttcagcctcactttggcgacacacaagaattgttgggacgaggtaggcaggcacttttaaaaattgaattataatttaaatttatggaattggcacttttaaaaaatcaattaaaaattttgtaaaataaatttaaggcatgcatcccgtgccaaagagtgtggacacggcggaaccgttgcgtgccgaaaatgat

SEQ ID NO: 61418 - DNA, 425 bp, Heterodera glycines
atgacggagtacgacttgccgacgccgcggccaatccgcgcggttgagcgcgagttgcccggctcgcgtcaatccaccgcaacggttggcatccgcgcggaaagccctcagcgggcccaacacgcattctacaggtgtttataaatattaattaaattttttttgattttaattaccccaaaaatttaaaagcaaaaattgaactttccaaaaatttaattgaaatattttattttttactttttcagtactcatactgatcaagtggcttcatacaatccaattgaatgaagaaaattttaacgaattggattatgattcaaatttattttttttagcccgtaaattgtagaaatgtttagaaaaattgaatttttagaattaaaattgtcatttttatttgttaaaaatattgaaaaaataaa

SEQ ID NO: 61419 - DNA, 252 bp, Heterodera glycines
atggatcaatcagaatctgctcattatacggattttagtgaaagtgatgagagcgctttaaaatgtaaacaatgaatgaaaaactttaatttttatttaaaattttagtggacatttggaacagtaacccaaaatatccttgctgttcatcaattataccatcggccctttctggagaacctgccccgccgttggcaccaaaattgaagctcaattagcgctttacaaaacataattcttttaaaaaatgca

SEQ ID NO: 61420 - DNA, 683 bp, Heterodera glycines
atgtccttggatgcaaggacttccttgaaaatgagcatttggaaaagtggaaaaaataatcaaaggaaatttggtaaatttttgaatttataacatatttggatattaaattatggcattatgtcaattttttgctcatagttgagaattattattttttattatagcggggtcagcgccttcggcgcatcccccgctaggcagtacgattgtgttatagaattaagaatgataaaatagactgggctttttctccaatctctgggactcaaatctccggcattccaaacaatggactcaaatctccggcattctaaacattgggactcaattcgactttttgttcgaattcgagtccgggattcggaattcgtcgcaatggatgtcagattcgtgatcagcgaccccgaaaaccccctagaaatgtgttaaaaaaaattttttttatggtctgtaaaccacataagtaccaaatttaaaattattaaagcacaaaagcttcttcattctcgtcaaataaaaattttcagaaattttgcccttttttgcttgaaaaatttacagaatcaactgcacgtgccatcattgataacaagcacagtttcaatttttatcattaaattttgaggaatttaattataaatcaaaaataatgtaaaatttagaaaaaaaagtaaaataaa

SEQ ID NO: 61421 - DNA, 423 bp, Heterodera glycines
atggccaaaaaagaatcaaagaatggtggcacaaacgagcaacagcagaagaagcacggtatgcaaactgaaaaatgaattgcgaaaatgtatgaattaatggaagggaaaagcatcaaagcgagggaatccaaatgcgaactttgagcttcaaaaaagattaatctttcaaaattaattttgaaattttaatctcacaattctgcctaaaatttgagcaaaaaacaaaaaaaaatgcgaaatgtcagaaaaaagaaatatgtatagaatgaatgaatggaatgagtaagaaaaaaagaaaaatacattttttacgaaaatataaagcagaattttttccctttttcagctacatcagggatgggatccgtccttgaatggcaaggacgtccttgaaattgggccctctttcttgaaaataaa

SEQ ID NO: 61422 - DNA, 648 bp, Heterodera glycines
atggccaaggcgacacacgcccgatgggccaagaaaggtgagtttttccattggtttttcgtaaaatctctaattttccaatttttagccgctccccagcccgacaccgatgccgaaaagccacaaccatctgaagaagggccgtcgacatcagaagcaacggcgcaggacaacgacggacaaccatcatcaactccaacaccggtgacaccgctggaaatggacgtgccatcggtggagatgatggtggtgtgtcattcccttcaacgcctgccgacgaagaccaacaaattcaaccaatgccgtcaacatcgacggcacgctgtgacgtggtggcgacaccatcgacttcaaagggcgccggtggctttggtctcgacgatcgtgagtgagaaatttcaccaaaaatttagttttttaactcgtttcattttcattacattgaaattttaattttaggttggccgctactctcatctcggcacacaagagaagatcgttgagaaactggtgaagcacacgacgatgttgaatgcactgcacgaccgtggcgttgagaacaacaaagaaaatgacaaatacccagattttgaccaaattttcacctcacttttatttattttcacattaatatttcgaaaaatttga

SEQ ID NO: 61423 - DNA, 53 bp, Heterodera glycines
atgaagaaagttatggcttatcaaaataaacaatcaaaaatgcacggatcagt

SEQ ID NO: 61424 - DNA, 1866 bp, Heterodera glycines
atggagcagtacaatgccagagaaaattcagagatcaaatctgaggccagatttggattctccggacttgatttggccacaaaaactgcttttaataaatttccaactgatcaaagcaaagttttgacccgtacaataaaagtgatcgaatttgtaatttggggacatccattggaaaatttttttaaaaatcaatttgaatggggaagaacgaaaaatggcttttaaccgaagcaaaaatgtctgctctttcctataggacagaaattgatcggctgtcacttgtggttaacggtgcaaaaaattccgattagcatagcataagaagggtgacagaacttatacaacaccccaataatattgttggaaattgtcatttaaaatttgagacgtgaaaattttaaatttgagaagtgaaatttttaatttaatttatgcctttaaagctttccttactgttgtttctacggcctactagttgtaagtttgtttgtctttactaagttacaaaatttattaacaaaaaagtctttattaaaagattttccataaaattgatcaaagttttttaaataaaacttagtcaatttacaataaattagggtggaccgggaccggggcgggaattcccggtcctccgaggtcccggtcccggattttgaaaaaaaatcccggtcccggtttgccagtcccggtcccggcgggactaataagcactggtaagaagaataggggtctgggtgaaaaattagtgatgaaaattggagaagggaaatttttaactaccaattgtgctgatgtcctagtggctaatcctcttggttttctacttctttcccatggttcaatccctctacagaaattaaaagattttgaatttttttttgtatactcatgggtttcctatcgacaaaaaaatattcctcatatatatattttttaattgacacatattttatcattttttaaagtaagtccatacaaactaataatcccaaaaactacccttttttgttgaaaatctgttaactaactacactcaaattttcaaaatctcccacggcggcgcctatcggcaccgccgaaccccctttctttccccaaaagtttttggaaaaagctcgccgaaaaaaagtgatgtgaaaagcaaatatgaatttctaataatattcgatcattagtccaaaaatgatttaataatttaaataaattttgtttgaaacattgattaaatatattataatttaattttgcgttaacttttgggttttataaataaaaaaccaaacaaaaaattaattatttaattttttcatttgaaataaactaaaaatttgaattttttaatttttttgaatttttaaaatttcccggttggtcccggtccccggtcccggacaaaaaccgaggtcccggtcccggttttggccaaaattcctggtcccgtaccactctacaataaatgtatgaaaagtcctcgaaaatatccatttgatggcataatctgttagcagatatcaagcaaaatgtaaaaaaagcttcaaatatttttgatatttttaggccaaatcggaaaataaaatgcgaaagcgaaagcccatccctgctgctcaccccaaaatgcttgactcatgcttatgcgaattcctttggcgcgaagactgcaaacggcgcggtgctgatacattcgatgacatttagttcaaattgcggcttttatgcctcattctaaataatcgttgcgcgccaaaactggcgcattttttccctttttttacattttggtgtgcggcagcataatggaaaagtgcccatagaaccaatgtataaatattatttgctatattgtttaaaagaaaaaataaa

SEQ ID NO: 61425 - DNA, 492 bp, Heterodera glycines
atgagttccattcccgcagcggtatccgcaaatttgattgttcgttctcccatttgcgcagatatgtcaatcatgcaattttctttttccaaggatgactcatcgtcgaccatcggcggtcgcgaaacgcccgccgcctccaaaagcatttctggcaccgcatctgcctctgccccatcaaagaaagcgccgtcctctttgagtgtttcgaatggcggtggtgccaaagcggcgtccgtcgtcgcctccggcactgtgccaaagagcaaaagtgtcgttgggaaaaacgcgaagagttcccccgctgcggaccctttggatttggtgcgcgcgagtggacaacggacgaacacgcgactgctcgaacgcgacgcattggaagcatttgtgaaaacggtggacccaaacgaattgttggaggacgaagtggcggacgcgattggcctggtggtggaggaatttgtggacgaactgatccgacactccgtcgat

SEQ ID NO: 61426 - DNA, 1122 bp, Heterodera glycines
atgaaaaggatccaacaaaatttctctgatcagattggagtgtcaagcatttcaacgctcaaaaaggataatcgttttgcaagtaagtggtggacaataaaacaaaaaaagacaagttatgtacgtagtagaacaacataaaagataactcgctggtgggactcgaacccacggccttcccatgtcgaggaatgttctaaccgactgagctacgggcgttccttaaggggttctcccatgtccttttatcatactttctcccacactttatttccttatgccatcacaaagcagataaccgaccaaaggcccgatagttaaggtcacgctttttaaaggcctcccgagaacgggctttggaaattttcttagacctggattatctgattttttttacaagaaatccagcccagtcccatggttttttcaaatgtccaaatgtactaattaccatatccatcttaatatacagtactgtacacgcgagtatcgcgttactgtgattggattgagaagaacactgacggtgaggtgaaatgtttgtgaattggagaacacgaagactttgcaaaatgtgataaaaaaagacgaacatttcaagatttttgcaattattatccagattaattagttttatgcttaagtaaatatgctaatggataattgatccactttcggccccggtaccgcctgttgtcctggggaaagccactgcttttccggtcgcaaattgtcgagggggatccatttttcatctgaagtcaggaccctcccgagaaatgggatgttgctgttgttgttggagcagttgagtagcgatgtccacccgccgttgtcgctgagggggggtcaaatcgtgaggcaaccacttactgcagcgccatttttttcccaattcgtgcaaaattctgtcgatttgggagtgatcactagggatgcgatttttaggtaaataagattcacggaatttaaaaatgctgattttcctgttcgtttcgtacttttcagaaaaatatgaatttttgcagagaaataccttagtataaatactttctgcctgcaaaatttaaaaagattttatatattcaaaatttttttataaacattcccgtgtttaataaa

SEQ ID NO: 61427 - DNA, 1529 bp, Heterodera glycines
atgggcacgaaaggatgccgaaacagagagacatctttgttggccattttgcatctcacgatcagcaacactatgcatggacggtaaaaaaagaaaaaagttggaaaaaacgttggcgaaaaaacaaaatgccaattcaaatataaaataaaatatgtaaccataaccaaacgtgttaaagtcgggaccagagcgtttgggcccccgtttttgggcccccgcgtttgggcccccgtttttgggccccggggtcgtttgggcccccgtttttgggccccggggtcgtttgggccccaacccaaaaatcgaaaaatgtgcttttttaaaaattaagattctaaaaactaagcctgagggatccctcgccacttggcataagttaggtttaattaacattcgaatggctaacccaattgcaaccaaaaaacaaaaagtaaaattgtcttacgaaggccacctttacaccttcgctggaagcttgcttcggtgacgggactttttcattggcgccgccactttttttatcaaatttatacaattttggctaggttagttagtttttagaaatttttttattttgcaatgtttagacgaggcaaatggatcataccagtgtgccattttctgctcacatcgaagtcgcaggcgtcatacattcgtatgtttgagctcctacatcaggcatggccaacatttgcacctacatcattcacaattgatttcgaattggccgtgagcaatgcggtcacaactgtatttggagggtgtcaaatcaatttttgtttcttccattttgtgcgaaatttgcaaaagaaattgaaggaacaaaatttgtggcaggttttaataatttttttaaaaattattgcggcgccgaagtgaccccgacccgtttcagcgctactgcaccgattctgtgtttgccgagaacgctcgaatgatcacgtctgttgcgttcgtgcccttgtgtgacattagaatggcggtagcggcacttgatacggagttcggaaatttggcggttttccaaccgctgattgactggtgtgtgaactttttttaaatttaaaccccactgaaattacaggctattaatcaattacgttggacagcccaggcccaatggcacatggtctcaaccaacttttcgccctgaacaatggaacgtctacacacgcacgcttaatgccgattcacggaccaacaaccactccgaggcggagcatcatcgtctacagggcgccttcaattgccgacacccgtcgatttttcacttcattgacgtgctaagtcgtgagcagaagacaacagacgtcaaatacgcgtcattcattgccggagaggagccaccaccaaaaaagcgaaagtttttggcgacagatgaacgaattcttaatttggtgcgcctttacgtcccgatgaatgcaggcaacatcaaccatgatcacaattaccacaatcgcaatcaatttcacattattttggagtttctccggggaatttctcgcaactatcgaatgaacccgtga

SEQ ID NO: 61428 - DNA, 86 bp, Heterodera glycines; identical to SEQ ID NO: 57243

SEQ ID NO: 61429 - DNA, 954 bp, Heterodera glycines
ataaaattgacaaatatgatcaattaatattaataaaatccgaaaaattgaaatttacgatttttttacaaaaaatttttttttttacatttttattttaaaaatcaaattaaatgctcaaaaaggcaatggtaattccacaaaatttttcctttattattaatgaaatcgaaaattcataaattaaatttaaacagtttttaaaattaaaaaaaaaattccaaaaaaaattaaagaattttcttggtccttttttattttaaaagacacagaaaaatttatttaatatgtccccaacaactaatttttattaaacattttagtccatcttgacgaggagacattgctttccattaattcggtaattttttaaattattaaaaaattcatttcaaattttaatgtcccccacccccctcttaaagttgaatggcattttgaacttttgcgaggacggcaggcatcagtttggccaaggcgtaatcacttatgcacaaggcgaaattgtcaattggtaggcccactattttaagtattatttgcccaactttctaaattgtgggactaaaatattttaattaactaaaaaaactgatttttggggggtttttccgttccaaaaaaatgaaattgtaccccaaaatttattgttttgcattcacctttctccaaataaaattaaaaaattttttttgacggtggaaaatcggttggaaactgaaaaatgagctcgtcaatttgttacataaattttctttaaaaaaatataaaatttcaatttttctgtaggataacgacactttccgattcatttcggtcagtctttttttatttatttgattttggcatattttaacataatgccaaccccctttttctccctttaaaaaacagagttgccgacgacatgggcaaattgcgctttcagttcaaagtgtccataagccgctgttc

SEQ ID NO: 61430 - DNA, 837 bp, Heterodera glycines
atgcaggcccctccggggacgggaaaaactgacgtggcaacgagaattatgctgtcaattctcaaagaaaatgacgaggcccgggtcctattcattgccccaatgaatgttgcagtggtgcgagcagttcagcagatggccgagaacatggaggaggtcagatggagagagcggatgctggcgctgtttgctgggacgggaaaggctaaataccgggacgaaattgcgcacatcggttcacatcttttggcttctgccgtcagtgctcctcaacttttggacactttggatgaggagaagaaaaaggtagtggcacggtatgtaaaggcgtgccaagacacaccgaaaatggctaatgagggaaaagttacggaaatattaatgggaaaggaaaagcggcgcctcgtcttctgcacattaagcttggcggaacaactgggggggctattttcagatttcgattatgtcttcctggacgaagccggacaagcaagcacagtgcaggtgctttccatgctgtcaaaattcccgggattgaagaaattgctgatcactggagatgaacatcagctcggggtcaatctgcaagaagtgccggaggcagttcgcgacaaatgcggtttggacaccgttttggagaatttaagggtcgcggaatcagtcgacaaaacggttctgtccgtcaacttccgtagtcacccagtgattacgaaatgtgtcgaagcagccgcgtacgcaccgcacggaatacagctgatctccggacgatcagcagaccaaatgaacatgctgagcggattgacaggatcaggctcccatccccagggattcccttaa

SEQ ID NO: 61431 - DNA, 1458 bp, Heterodera glycines
atgccttgggtctggcatagcgctgggcaaggtcgccgtcgccaacaacaacaacaacaacaacaacaacagcattatggatcggtgaaaattcttttttttgcatttaaaaattttctgtttaaatttaaataacaccaaaaatattgtcacgcttttctgttttttttcaatcttaagaatttaatcaatccttctctttttttagcctgtaaaatttctaagtaagatttgaattactacggtcttcaaaaaaggctcaaaatgccatttttgtgtttattttttcagtaactttctaaaattattttttaaattaacctacaaaaattggaacaaatttgagactgtttgctaaatgttttttaaatagtgttaaatttttcagatacaaccgaattttaaaaagtgaattgggcttaaaaagaatagtaaactgtttgcctccgcttgcgtagagatgaaatgcctccgcttgcgtagagatgaaatgcctccgcttgcgtagagatgaaatgcctccgcttgcgtagagatgaaatgcctccgcttgcgtagagatgaaatgcctccgcttgcgtagagatgaaatgcctccgcttgcgtagagatgaaagctctcacgcttccaaattcctgcaaaacgccccagcgctgatgaggaagaattggagaacccgaaaagtttgaaagatgttctccgttatgcaggagctgggacattttacattactgcaaccattgcggacttgcactatcaagtttatgatgttcgaatatttttttgtgttttctagtaaatttctcattttcctttagtcgtgcccgctccgagtgcgtggtatcccctgtcgtcgcaaactaccaacaaatctcacgtgcgattcgtgcgggcaaacagtggagaagccagtcaaaaacatttatctgaaaattgttttacaagacctagacgacagcacctgcactcaacgtgcaacaattttttcggcggttattcaatttttctttaattttcgtaatatttgcacattcaggtcgcggaagcgtttctcggacttaaggcaattgatgtccatgaaatggaagaacagaaactgtatgagcattttgaagccaaattgggaacaacaattaatgcaaaagtgaccattaaggtaaatgtttttttgttggacattgttacttgtagaacaaaattataggaggacagtcaaaactttttcggcctcgactgggtggtcacacgaatttataagtcaagcgaaaagaaaattggcgatactgaaaagaaagcggttgaaaatgaggggacttcttcaaaaattgctagattggattagacattttccatacatttgggcctgttaaaaaatagaaatttatcacattttgcgttgaataatgcacaattatgaacatgaaacttttttattggaatgtaatttcgaaattaaa

SEQ ID NO: 61432 - DNA, 464 bp, Heterodera glycines
atggaagaagcacctgacaaggccggtgaacgtaatttccatcggatttgccgacgcagtcaaaggcgagggaggaaggcgacagcggaacattgggagccgtgggctgaggaaggaatgccatgggatgtgccgtgggttggggttggaatgccatgggatgtgccgtgggttggggttggaatgccatgggatgcgctgaaggatacgataccccggcttgggtttgtgcgtggtgatacggtgccattggattttgaacattttgttgtgcctttcctgtccaattagtgcttaatatgtgcacaattattttctcctttcttttccacaatgaataatgcctgttttgccaacaattttgctgtgtcgtgcattgcttccatttcgcatcataaaccaaattgtccgagcatctcgtttcatttgcaacgccttaattattaattaattaacgcaataaa

SEQ ID NO: 61433 - DNA, 151 bp, Heterodera glycines
gggctcctgtatggtcgatcacgagaaaagaacggaaggaaatgacaccaccgacaagagggagcagagaaagcagcgaggaaaagtcatcggcaacggattcaccgtaccaatcgagaacagtgacaagcacagaacgggtcagtgttag

SEQ ID NO: 61434 - DNA, 1270 bp, Heterodera glycines
atgaaagccatcaatttggaaaggtgggacatttgaatggaaagtcaacttttattaggacgcattattattcatcatttaagggactaattttacaaaaaataatttttgcatttttataattttgaatttttattaattttggttagattaaattatgaattttcaaatgaaaccaaagtataaaaaaagaaatgttaaggctgtgttctattatattatttttattttaacagttttgccacgattggattcgccacgaaggaagtgccattggacgggtcaattggccaaattttgaacagttacggataccgaaacgatggctcatttggctgtaatggcatcaaccggccgtgcaaaatgccatttggccaaatgccaatgtcattatttggtattccatcgtcattttcccccgtggcaatgccatcggcggacgtgacaatggcatataaatcatcggaattttccactggcgacgtggtcggatgtggccttttcttggacactcagctgatctttttgacaaagaatggacgacgaatgggtgggccaattaaatttaaaaaacattttaagatgactcatcgtttttcatttcttctcccgccaattctcttttccgtgagtttctttgtgggcgggcgacaaaatcgaagcgaactttgggccaaatttcaaattcaatttggccactctttgaagaaagcagaaacaacggaagaaggcgataatcatttaaaattcattaatttttttgtgttttcattcttttttcaatttttgattttgtttttaatgctaattgtattattttatttgttttaatttattttattaaaaaatgttctggcgatttttggtgaaatttttaatagattctaaatgattgctgctcggcgcctggaaatttataagagttgggtattttgccagaattcggtttctaataatttttttgaattgataaatagacatctgcaatgtataaaaaaaattatgaaattactttcccccaacgcccacccccttcgcaatatacaaaaacgaaaaaaaaatacaataatccatgttcagttttgtaaaaagatgtctcaattatggacaactgggaatggcatttgtgtaatgattatgaattctaaaatgctaatgaccgaagtatttcttttttaaatgctaaaaacaaaatatttccacagcctttaacaaagatttattctattctctgaaactattaaatccaattttccaaatgaatttttaa

SEQ ID NO: 61435 - DNA, 663 bp, Heterodera glycines
atggcaagaaaaaaacgaaaaccaagattcgctaaatatggaaaagttgacgggcgttggagatttggactgtacaagcgcaaatacaatatattgctcgggccggcattggaaggagtacagaatttgttggtcacagcgtaccacgaagcggcacacgcgataaaatatgggcaaaacaacatcgacattttagacaaagtaagtagttttcagcaatctggtacaaaaaatgaatgcttactttcctattaattttcatcaattatttaataggtcacgattcaagcccaaggaggcaatttgggcgaaacttcttggcacgatgttgaaggactctacacagatgaagaacgctttgcgcaaattgtgcaatttatgggtggacgcgcggtggaactgttgatgtttcacaacgcgcaaggagacgaacaggatgtggaagatgcacgagctgtggcaattcaagtaacgtacatattgaaattgttcatttacattagacatttaaatcttttgttttaggttttggaattacgtgaaatggaaccaacagacgagctgatcgcaaatttaatccaacaagcaacaaacacggcgacccaagttttgacgaacaatgagaggaggttgaaacgagtaagaactacatttaaaaattaa

SEQ ID NO: 61436 - DNA, 683 bp, Heterodera glycines
atgacacaaatgatataccaatcgattcgtcttgacgagctatgcacgaagaagtaggtctccagttgcggaagtgccaaaaaacggtttttgaaccggtttaaaactcgaaaaattgagtgaaaaagggggcccctgaccctttaaaacggtcaaattttctcgccaatggcctggttgcagtcacgatgcctttgttcttcttcgacagtcaagcgtatgggaagcatttgaagggggccaaatccaaggaattattctggtagatagtgcttacccaacacgtcgctggctaatgacaccttttgcaaaccctacaactgcagctcagcaacaatataattatgcacatgcaaaaacgcgtgttattgtcgagaatgcatttgccagatggaagaggcgattccatattttacattccgaagtacgaattaagttgcagaatgtgccaacattgatcacggcagcagctgtattattgcacaacattgcaatcgatcgcaaattgccagattttttggtggctcttcgtaatttattttatttttcttttttattcatgtcaaaaattgataaatctttttgatttgttaatttttcttttttaaataatttattttttaatatttcctctcatgatccgtgcacacaccgtccgaaaaaacgagatgtgtaccaataaa

SEQ ID NO: 61437 - DNA, 443 bp, Heterodera glycines
atggaagacctttacgaaaaatgtctaaagaattcgcgtccgatccatcggaaaatggaggagaatttgtacgacatccgagttttggacgtgaaggcgaaactggcagaaaatgagctcagacaaaaaatgactcaaatggcaaacacatggaaaaagacgggcaaagacgaacgaaagcggaaatatgaggaaatcgaagaacaattcgctaagtgcggattttgtgggggaaactggcaaaatgataaaatgtgcaaaaaacaatttaagggccaatgatttgtgcaatgaaaagattcaactcgccgagagcacttatgaaatggtggactcattcatccaaaagttggacaaagagacgagcagtttcaacgcttttgtaaagcgctctaaaaggacggctcaatcaacgcccggaacatcgaaggaaaacattgccg

SEQ ID NO: 61438 - DNA, 674 bp, Heterodera glycines
gcacttcttccgcatggcgccatgacattgacacggccggtgacggagacagccaatcggcagcactgaagcgttcaaaattgcatttgttgtgcggcggcggtgacggactgacaaccgagcgtgaaagcgggggcaactctgagtttgacgaggaggagggggagggcagcgacgactacgactcgtacgggttggccagtgacgatgacatgtcgccttcatccaacaatttgtccgacgatgatgaggacgacgagctgagtgcggagtcggacgatggcggtgacaacagtgacgaggaggagttggaacgtctgttgggcggaggcgcggcggcgattgacggcgacgctgtaccgctcgccaacgacggcgacaacgcatcctttgaacagccggaagaggaggtggaggtgaaccctttctgcatggacttggccgtcgaggacccgtgggcgagcgtacagaagaagcaaagcgttgaaagcggcggtggcaaatcgcagcaacagtcgctggacaaacagcgagcggcgactgtggcggcggaggcggaaaagcagcggcgactgcagcgacgcaagcgcaaaagggaggcggcagccaagcggaagcgacaacagcggcagatgcaggaggcactgatcaaagccaccgtgtccaacattacg

SEQ ID NO: 61439 - DNA, 457 bp, Heterodera glycines
atgaaaatatgtaagaaaaagtacaaaatatgtaccaaatatgtataaaatcctgaaatatgtaaaaaatatgtaaataaaagtcccgatttttgttcgcaaacacaaaaaagaaagtgtttccctactttttagagcatggagaagccaggaaaaaaatgtatttacataaaattgacatctctaataatataatattgttcgtgcaatatttcaggtaaactgtgtcacccaatttttgccatttgcattgtatccgtccccatttccccgtactttgttccaacaagctgtgggcgtacaccaggtaaaatactactgctaacaatattcggtatcagtgatgcgatttgagccctatttgttgatattttcccatgttttcagagtattcttacacaattttacagggatgactgtaatttctctctgtttttggtaacatatgtttacagga

SEQ ID NO: 61440 - DNA, 1050 bp, Heterodera glycines
atgcagttgtgctgggacctggtcatctttctccactttcttctggcagcaaatcgtctgctgatctttatgaaggcctcttttaagccctccattttgaacaaagagccaaagtcggagcaaattcttttcaatgtaagccgaaaatgattagctaatttaagcaattaactaatgagttcttccaccatttcagtctcttctcgtgctgatttggctccttttgatcgctttgatcattgcgtttcaaacgccgttccttggcgttttgtttcagcgcgattatgtttattttttggccgatcagtctctcccggcgatgcccatttttcggctctgtgaattttattggacctgctttctgttgccaactacaacaactttctatatatccattgttgttttgttgaaaaaggttgagtactacataatgctaaaattttggtgtaatcaaaaataattttagccccattatcaaaaattgttaatccgtcccctaattcccgatctttttgtccttatataaaaccaactcccaacaataatttaacgattcaattttaaatttccactttatttcagtatagaaaaaagtcatccgatggcaaaacggccaaaaagttcgtgctgaataagcaggaatggcgcattttgggccaatcggtggcaatgttcgttctgatggcatttattgtggccatttgggatttggtcgatttgctctcgtgggttctgcccgacgggctcattctgctcagtgatttcttctttttgctgttctgtggcatcagcccaattttgtatctgtgcactcttccgtatgttttaggggcaacttttaattgagtcccattccaattcacccctctgacttcctagtgaatgggtctcgcggtgttaggtcaaacctaaaaaaagaatcaatggggtgaagctaaaaagtatcaatgtgggcaaaccaaaaaatcaatgataataacctttaaatttaattattatttaaatattttttgccgaataagatcacaatttagctcaaacttagtcaaa

SEQ ID NO: 61441 - DNA, 538 bp, Heterodera glycines
atgattggatgcaacaatttcttggcagcatcattcagagtgaaaatggttaatttataaatcgaacaacgaatttttataatctaattatttgaagaagtgccttccacttcaacgtgattgtacgcatgttgaaggacagttctttggcaatgaagatcaatgatgaacggattatgtgttgtgtgatgaaagggtgacgcatttcggctcgtatctcccccgggttagttttagtgttttttattttatgtgtgactttataaaagggtggcgcgttccggctcgtatctcctccgggagaacgatgcctggacgcgctgtccttcatttttttgttcggaaggcagtgaggggacgaaaatgtgtgaggaagggggtggcgcgttccggctcgtatctcctccgggagaacgatgcctggacgcgctgtccctcatttttttgttcgggaggcagtgaggggccgagaatgtgtgatgaaagggtggcgcgttccggctcgtatctcctccgggagaacaagacaaaaaataaa

SEQ ID NO: 61442 - DNA, 466 bp, Heterodera glycines
gtttcaaatatcgtaagattgtttgatagggccagacaagagaaggcaactgttggtaccaagtttgcggtaaaaaaatgagaaaaaagagatagccattttttggtcaagaattttttttgtttgcgtttcaaatatcgtaagattgtttgatagggccagacaagaaggcaactgttggtaccaagtttgcggtaaaaaaatgagaaaaaagagataaccatttttggtcaagaattttttttgtttgcgtttcaaatatcgtaagattgtttgatagggccagacaagagaaggcaactgttggtaccaagtttgcggtaaaaaaatgagaaaaaagagatagccattttttggtcaagaattttttttgtttgcgtttcaaatatcgtaagattgtttgatagggccagacaagagaaggcaactgttggtaccaagtttgcggtaaaaaaatgagaaaaaa

SEQ ID NO: 61443 - DNA, 423 bp, Heterodera glycines
atgaggacaactgtgattaaaagaggtacaacagtgatcagaagaggtacaactgtgatcaaaagaggtacaactgtgatcagaagaggtacaactgtgattaaaagaggtacaacagtgatcagaagaggtgcaacaatgattagaagaagtgcaacagtgattaaaagaggtactacagtgatcagaagaggtacaactgtgattaaaagaggtacaactgtgattgaagaggtacaactgtgattaaaagaggtacaacagtgatcagaagaggtacaactgtgatcaaaagaggtacaactgtgatcagaagaggtacaaaattgttagaagaggtacaaaagtgtttagaagaggtacaactgtgattgattagaagaggtacaaaaattgaatgcaatttattataaattttaaaaa

SEQ ID NO: 61444 - DNA, 306 bp, Heterodera glycines
atggcatttccccaaaggtcgtctctgactgaggtgaattggtaatagcgccatttcagcgctgctttttgcattttcatcgccaattgcgcagtccacgggtcttcgttcacttaattaaaaattattttaaaaatgccgtcagaaaacggcaccttcggccagcagacttttgctgagaatgaactcgccgttgttccaacttgaacaacccgaggaggagatcaactgactgtgcgcgaggtccacttgccgttgcagactttgaatgcgactttcgtactcctggccaattaattaaataaa

SEQ ID NO: 61445 - DNA, 2188 bp, Heterodera glycines
atgaactcgacctcgtcacgttcacatgcaattttcacaattattctcacacaaagagagcacgacacaatcacggatttggacactgaaaaagtgagggaaaataaataaataattataatttaataaataaataattttttgattccataggaattattttaatttaaaaattattattttctgtctaaaatattttcattaaattaaaataattattttcttttgaacaatttaaattaaaggttagcaaaattttcgctggttgacctgctggtaagaaagacaaattatttaaaaaattaactaaactcagcaaaaccattgtttaggaagtgaaagagccgattcgacaggggcggaaggccaaagactaaaagtcgaaaaataaacaatttaatttaattttggcatttaaaaagttttaggagggcgcaaatatcaacaaaagtctgacaacacttggaatggtcattaaaaaggtaaaatttgtgaaataatatttaaaacaaaatatttaattttaattgtttagctcgcggaacaatcgaccaaaaagggacggcactcgcgcaccgcagtgattccttaccgggtcagaaacgggcaaaagcatcgttggcattccgcttgttcaggactccgtgctgacttggctcctccgcgagaatttgggcggcaattcgaagacggcaatgatcgccgctttgagtccggtaaattttggaagaaaattagcagaaaaacttccaaaaatacaggccgacgttaatttcgacgaaacattgagcaccctaaggcaagaaactcattcatatggaaattatgtgatggttaattgctccgtcaaagatatgcggacagtgccaaacaaattgtgtgccgtgccaaagtcaacgaggacccaaacgcgaagctgatccgggaactgaaaggtggggccagcggcagaagggcatcggtaaaagcaagcagtacatccggatttgatttaagaggaagtgtacaaactgcggaacatgttgcaaaactatggagtggaggttggcaaaataaggacgaaaatggcacagtgccaagccattcccctgaaatttgccaggttgacgaaaacggggacatttcgtcgagcacgcgagtcttttcggggagagaagaggagacgctggaacagatcaaaacatcggagaaactgatcgcggaactgaacgaaagttgggaggacaaactgaaaaagacggaagccatgaagtaaacgaaagagaaatacggggggggggagcaattaagtggtaattaatgggccaaacggacgacaaacccggcacagaaaggtgcgtgaagaagaactgcgcgaactcggcttggccacctccgcggacggatcggcactgggcgtgttccagcccaagaagctgcctcaccttgtgaatctgaacgaagacccgctgatgagtgaatgtttgctgtactatctgaaggagggggtcaccaggtcggtaatttgtgcagttaaaccatttgtctaattaattaatttaatttaaaattaattttttgctttagggtcggaaggtccgaggcggatcaacggccggacattttgctgagcggagaacatattcgaaacgcgcactgtcagtttatcaacgcggacgccgtggtgaacattgtgccaattgagggcgaatgttttttgaacggacagccaatcgaaggtgttttttggagggcacaagataaaaccaaacccacaaaaaacagctggaaactccaccaaactgagctcgggaagtcgcataattctcggccgaaaccacgtatttcgcttcaatggtaatttgtgaggaaataattggccagaaaactgacaatttgcagaccctcaagaagttcggacgagtcggcacaatttggcggcaattgcaagtgagggagggaggaactgatcattgcatagattaatttcttcaacgaatgatactgttttttttgaataggagaaccaatcgattggcgttttgcccaacatgaactgtttgagaagcagggcatcgacctgaagcaggagatgcacaaaaaagtgttggagatggagcaacagtttcgcaaggaaatggaacagatggaaagggaacaccgaagacggaacaatgtaaaagcaagggaatcactcggaatgattgtt

SEQ ID NO: 61446 - DNA, 1210 bp, Heterodera glycines
  unsure (1)..(1210): unsure at all n locations
atggacaaggaaaactgcaagaaagcgggatgcgaggccaaatacggaaaccatcggtgtgattcggaggtgatttgttgaaaaatctggaaattaaaaaaattattattaaaacaataaccattgtgcttaattctaaaaaacaaatttggaaatttatttatttaatttagtgcaatttatttgcgtgccaattcgacggcggcgattgttccacaaaacaggcacaaccctttggcaaatgcccacaggcaagctattgttcacatgtgtttgcggatggcaaatgtgatgaagtgagtcggttttatgtcaccacaactcagcttatttttaatttgttttatttttcctatacctatttagcaaattaagttttaaatccgtctattttctgaattaagatttgcaacaacgaacgctgcttgttcgacggctttgactgtttggagcgacaccaggcgacgtgtccgtggatggtcgactgtgccaaagtgtacgcggacggtcattgtgacgagcagtgcaatcaggcgaactgcggatgggacgtgggtggacatttcgcgcgggttcactgggcgccattgtgaagtgattttctgggcaaaatatttatgaaataaaaaaaattcgaatttctttagacctcagtgcccgttgacaaattcaatcggaccgattctgatcactttgncccggttgtgtggcttctctttggagcatttacttcttcaaggaaatcgaaatggtcagtcagtcaaattctgatcaatttttaattaataataattttttttttcgtttttcacagaatctcgcaactctctgaccattttctgctctttcctttccgttttttgtggtgcttcgatgattttcgtctccaaatcgaaagttccgctcgacagactccaaattttctgactctacttaatttattagtgttaatatcaacaattaatttccccatgttttttgccgttttttaatcgttcggtagtggcggataaaatttctcaaaagaagagatagtcatttttcttggatataagataaatttaaaaattctctgagaaattaaatggcgatgcgattgcgcaccgccctccctctcacgctcgagcgcttttgtaacgtataaaatttctcaaaagaagagatagtcatttttcttggatataagataaatttaaaaattctctaagaa

SEQ ID NO: 61447 - DNA, 348 bp, Heterodera glycines
gacgggttgggcttggtcagccttgatcaatcaaggacaggtttggccttgaccagtcttgatcaaaaactgttaaggacgggttgggcttggtcagccttgatcaatcaaggacaggtttggcttgaccaatcttgtcaaaaactgtcaaggacggggtttggccttgaccagtcttgatcaaaaattgtcaagacggggttggtcttgatcaagaattatcctttacaggccggatgggacgcgaagaagaaccgccgtatggttggactgatcatgcgcaaagcgatcgaaaaattggaggacaaaaacaatgatgggctgatggcgtccataagcgaggatgaa

SEQ ID NO: 61448 - DNA, 49 bp, Heterodera glycines; identical to SEQ ID NO: 51181

SEQ ID NO: 61449 - DNA, 1193 bp, Heterodera glycines
atgtctgttgatgaaacaattcgcgagttgagcgggacactcactcaactcaaaatattagtggttagtcaaaaagtgtttttaaattaaattgtgacgccgacataaaaaaaatgaatttttaattatttcaataattagaatttccaaaaactggcataaaaccaataaaattgtgttgaattttttgaacaaaacatttattaatgataaattctttaacagggtaaaatcaatgagcaaattagcggtgtcagtgcccgaattaacataacactgcaaaactttgatgactcagtggctggcattgctactgatgccaaccaaatgacaaaacaggtggacaccaccattgaccaggtgaaaattggtaaaaaaccaatttaaatcacataatataaaaatgggacaaaaatatttgaatttaaattgattactttttcaatatcgcacgcataaacaacattaaagttaagaaaaagcagctcttgaaatattagggttcattattcataatttgaaatgtaataattggtttttcgaatttaaaaacgaaagaaaaaatgagacaggactattgaaatataatcacatcattaacacacttatagagttttgttaatattattgtgatagaaaacatagaatttaatttaacgaattcaaataaaaaaattttacactaaattattgacaaaatagaaaatctgagtttaattaagatccctggttcctgggccttttacacgctgttttttgcgctaattgccgtgctcatccttctctcagtgctcatcataatcaatttaatcataaaaattcaatcattttacggcacaatgcgcgggggctcgtcaagtaaaagccatttaactattttaaaattataaacattaatttatttaggagcgtcgacgccgcttcaatcgctggtccaatccgagtcaaagcagccgcttcacacgcaacaaattccagccatttatcacgggcacattccaacagaaagcaacaagcagattgagggtgggggttttgaatggctcaactgatgcagttcacgcgaccaaacaatgagtatattccacaggttcttatggatattttttcttactttttataaactatttcatttttggaataaccaaaaacttgaaacccatttcatatttcaaattttggggttaaggaca

SEQ ID NO: 61450 - DNA, 731 bp, Heterodera glycines
aacattcgaatgcacattgcgccattggagttacatccattggcacgcctggttcagggtcgttaccataaaatgcactgcttgtgcgttgcttcgtgggatcatgtacttgtacgtgttcttacgttacttgctcagctcggctgtggggttttggtgtgctggcgcgaacttgtggttctaattcgcgttttacggaccgtaactcaagcgcaccaatgctttgcatgctgtggcggagtgcctggattactggcattcctgctttgatttttcgacctgaactcagacgtgaacacccgctgaacttaagcatatcagtaagcggaggaaaagaaactaacgaggattcccgtagtaacggcgagtgaactgggaagagtccagcgctgaatcgcagctcctctggggttgcgaggtgtagcgtatagaccgtgagcttgggttggcccgcttgttcaagtttcccttgaccggggctccagagaaggtgcaagacctgtccaactggcggtgcctacccatctttacgtgtcttggagtcgggttgtttgggatcgcagcccaaatcaggtggtaaacttcatctaagactaaatacggccacgagtccgatagcgaacaagtaccgtgagggaaagttgcaaagcactttgaagagagagttaaagaggacgtgaaaccgatgaggggaaacggacagagctggcgtatctggtctgcattcaccc

SEQ ID NO: 61451 - DNA, 282 bp, Heterodera glycines
atgggcgaggaggaggaggaggaggacgaagctgatgaacaacgcatgacgatgtaatatgggagaggggaaaacatcagtagggagcagagaaggctgtaaaatggagggccaaccaaagaaagcaggcaaatattgattgatatgggcttaataggtattatatcattatcattagctctaaaaaatattattacattattcagactttgtgctttcgaatgctaccaaaaagatagtgtttgttcaaacatgaacaaagttattgtatttattgtataa

SEQ ID NO: 61452 - DNA, 163 bp, Heterodera glycines
atgcgcggcctccgcaccaccaccagcagcagcgcttggcggagaaggcgggcaccaccgtgctgctgctgcacggcggcgaaccccgcacaaatttttatgccagggcacatttgggccgagtgcttgtcgaccgactggcagtgccgaattgggttggcat

SEQ ID NO: 61453 - DNA, 1715 bp, Heterodera glycines
atggacgaagctgagcagacgatgatgaacaacgaagacgaacaaaattgtagcgatcaacccattgttcaacggacaactcaagacgaatacgtcgtctctgaggattggccaaatgccaacaatgttggcacaaaaaaggcacgaaaaagcgaaacaacaacaacaagaaggacaagcgtgaaattgactgctggccaaaaggcattggaggtggtggcgagagttaattgagttatgccatgacaaacagaaattgtctcgagagcagctctcccccgccccgcctatcatttccaccctaaaagcggcttaaaaagggaactgaaaatttttataaaaaaatttaatgaaaaacgcgttgaaaatttttttagcgattttttggacaaatttttgaaaaaatttggtaattaattattaaatttacaaatttcaacaataagaaaaaacaattttaaaagatttttctcaacttgagtgagcctattgaatgcgatttgattgaaacaatttttgacggaatttggtaatttaatgaatgatgtggtgaccattctgcaggcattctcattccaacggcttcgttctgctgctggtccatcatcaacaacaattgaaacttctgctgttgatcaccttcacactgaaccgcaacaacgacaacagcaacgaacatttgctgatcaacaaattcagaacgaacacaattttggactggctgatcaaatcattttaccgaaaaatgaaccaccaaattcacaaaattcggtattttcaaaacagtttttaactgttttatgggccagtcaaaaagaaagataatttgttaaatggcggactcttattgcctttaattttcccataagattcaggccaatgcaatttttggaattttgattcaatttaataaaaatttaaaaaaatcataaaaaaaaattgaagttggatcaaaattaaattattcaggaccgaaatttgcatttgcctgaaacttgttggggacacaacaccttcaaatgaaatcaaaaacagtaaaattgattggatccataaaacagagggaagcaataaaactaatttccatacgatttaattgactactaattgttcagcagcagtactactacgattctgcagcagacgattgttgttgtccatcaacagcagcggaggatgaagcagttgctgctgttggctttgaatttgttggtacttccgccgctgctgctgatgatgaagaatggggttgtacttctccaccaatctcatcacaacagccaatttcacaatgcttttccgtcgtcacaaacacatcggcggcaacaacaagttgctcacaaatgacgcaacaattcatttatgatgaagagcatgacgaatttggtgatgagattgatgataatgacgatgaagcagcaacagcattgtcgtcgtcctcctcttttcgtccacaacaaattgtccatgtcgacatggatgtgttgcgcacaaattttgcacatcgttgtgaacagcagaggcgacagcggcgggagcacaacaatttgttgcggcaaagttgtggaggcaacgatgacggcggcacgcggttgcacgttgtcacaacttctgctggaataatgtcatctggaagtcaggaggaggagagggaggaagacaacgcgtcggtggaacaacgcttgtcaatgatgctgaagttggtcaatcattga

SEQ ID NO: 61454 - DNA, 879 bp, Heterodera glycines
ccgcttccgcaagcggttccaccaaaacggaggagcgttggctgttcgtcttcaacgatttgctgctgttggccagtgatcggagcgctttcattcgcggcaccaccggtgccggaaagtgcaaattacgcgcaatttttgccgcaaagtttaaaaaaaattttagctaaaaaatttttgggaattttttttttccagacacacccaaatttgtgaaggtgacagcttggagcgtgagcattcattttatttgcggggctccgattcgccgcagggtgatcaattaataatttaccaatattactttaattaattgaaatttttaaatttaaattttcaataattttttttattgggcaactttgagtctagattttcgacttttttatacttcgatttcgattttccgaggccaatttgtgtggtttcgtgaaaacactgaccaactttgggtatcatatcatccaatcaattaaattgatctgcagatttcctaattattcaaattttctctacatttaaccctacctaaaaatttataaaatttcgaaaattctcttcttttttttccaggccctcagcgatgtgtggagttgtgttgtgcttctcaggcagaaaaggacgcactgtttgacattgtttggaaagtcattcaccatgaagtgagttggagttataaaatggaaaattaaatatattttaatgtttaaaaatttttgaaaatttttttagacaaattcaaaaaattcggcggaaacattggccaaaaacacgaacaacaatagcagcaatacagaacagcaacaacagaataaaagttgtgcacattgtgacactgactttggatggtaaagcgattttgggaaaaatgaaaaatta

SEQ ID NO: 61455 - DNA, 997 bp, Heterodera glycines
atgaaaagttcggcttcacagttcggcacgcgcatcgaacctattgggtgacatggtaagactacagttcataagtctccttttccaaaaaaatctctctctattccccgcccccccctcccttaattagttttaatgagtcggatcatgtcgaatggatggcggcacttttgctgtcggcaaatgccaaattgccgggcgaaagcgacgcggacgaaagcggcggcggtggaggagaagggcataatcacggaatgcagcagcggaacaacgccaccaacaattacgggggcagaagcacccgcagcagcacaatttgtggtgcaatttatgtttttttgattaatttttaaattataaatttatttttatttcttctacaaaaatataatttttgattttttaattgagaaaaagcaataaaaatacgaatttataaaatttaatttaaaagttttattttaaatgtttcattcaatttaagtaattaaggctcataaattaaatagactaaaataccaaataggggacataaaatacgtactaaaaatgcccgaaatataaattttaaaaccatagaaatccaaaaaatataatttgaagcgataaaaaatttctattttaaattaaatttaaatttttttctcaattaaaaaagttgtatttctcaaagtaataaaacaaaaatgttgacaactaattgcaaatgattccccttttttcagataatctgaggggggctgcagtgatcaattcgccgcgtccaaaaccgtcattttgcgcctcaaacccattcagcggactcattgttcgacgctccgcttccatgggagacgcgcggtaattttcaaaaggaaattattaacaaaaaaaaacaattaaaatttaattaggtaattcatcattaatttttcagaattcgccaaatgactgctcacaatcggaccaccgaaaatggacaaaatgaaaaagacgaaatggcggaaaaaaattgaaa

SEQ ID NO: 61456 - DNA, 370 bp, Heterodera glycines
atgatgcctcgggtggatttgatttgggtagacatggagaaggtgctcaacgaggagaacagcgtgacgcccgagttcaaaccgtacggcacttgtgccgccatgaaggtgggccagcaaatatgagctggaatcggacaccaaatcccaatcaccaaacctaataaatgcgcgagtctcgcttcttagggtttactgaccacattcaaatctaatcaactccttgggatgattaaacactgataaaattttaccaagcaagtcacgaacctagccgtttgatagcatccattttaggctaactttaaagcctgaaatttttcaggacctgttttctgagattaaaatcctgcatttggctttgatttag

SEQ ID NO: 61457 - DNA, 683 bp, Heterodera glycines
atgaaagatttgatggcggtcggcaagaaaatgttcggctgtacacgcaaatgcatgagcagcaaggcgggcaactgcgagaagtcgctcaggtggggaacaacaattttcgttttgattgttcagaccgacaaagaaaaacaaaaaaaaagacgagacttttctagagcgagacagaaacaatgcccaaaaatcaacattctgacattggaattttcatttgctttgtcagtggcattcttctgtgttctgttttccccccaaaaaatgccgcatcaaattttgaattgccatgcccaaaaacattgcctttctccgcacattcgtcgttttgtgcaggtgcggcttgaacttaccgccggacaacgtgttggtccagcaggtgaagcggtgcgccatcaacagcggactgaacaccgccaacgcgaaagcgatgtgcaaatgcgcgtccgccgcgggcgttaagtgagtgtaattttaattatttttggtttgtcctcgtaaaaaaaacaattaaatttgattttaattaagttaataatttggttaaataggatgtcactgatcaacagtgactcaacagtcatattcataacgcaatttgtactaattgcctaattactattttaattctttccagaaatttgacgcctgccgtctgcgcaaagatccgagtcacctaa

SEQ ID NO: 61458 - DNA, 304 bp, Heterodera glycines; identical to SEQ ID NO: 53844

SEQ ID NO: 61459 - DNA, 304 bp, Heterodera glycines; identical to SEQ ID NO: 51570

SEQ ID NO: 61460 - DNA, 108 bp, Heterodera glycines
gtataaaatttatcaaaaaaagagatagccatttttctgggatagagtataaatttaaaaattccctcaaaaataaaaggtctattgcgcaccgccctccctatcatg

SEQ ID NO: 61461 - DNA, 1028 bp, Heterodera glycines
cggacgatcgagactcaaaagctgacgatggagaaccaaaagctgacgaccgagactcaaaagctgacgatggagaaccaaaagctgacgaccgagactcaaaagctgacgatggagaaccaaaagcggacgaccgagactcaaaagcttacgaccgagactcaaaagctgacgaccgagactcaaaagctgacgaccgagactcaaaagctgacgatggagaaccaaaagcggacgatcgagactcaaaagctgacgatggagaaccaaaagctgacgaccgagactcaaaagctgacgatggagaaccaaaagcggacgatcgagactcaaaagctgacgatcgagaatcttcagttaaaaattgagaaggaggcaaaacaattgggtaagtgcagcgaattacttacgcccccccccccccttcccctctctctctttgtcactttgtatttttaggtggaagaaaataatgataagagtgattgaagagtggaaagtgtggatttttttaattaatcttttttttcatcgtttttttcttttgttaataagcagggttcagattttggaaaagaaatacgcgaaaatattaaaaattatgttaacatgaaaataccaaaatttttacgctttattttttaataattaaatttaaaatgtgactaaattttcgtttcaataacaatactttttgccaaatatttaagctaaaatttcagtcaaacgctgcaaaaattgttttaatgggcaaaaaatagaaagtcagggccctgcttatgttttttaaaacttttcatcataattattaattttcaattttattatattattttaattgtatggaaacataattctcttttttgtttattttaatttcttattttattaattttttgtttttatctaagaacatttaattgcttttttctatttattattatttttctcgtatttttatgttaattaattttaattgattatcaattatcacttttattttttgttcttaaacctcttctaataaa

SEQ ID NO: 61462 - DNA, 900 bp, Heterodera glycines
atgccgaccaatgcccttcattcgaaccgcgcaaattcaatttatctggtaaatttttaaaggataaatacatttgaattaacaaaaacgtctgaatatcaccgaaaagagcaatgataattgtttttttttcgctgttttggtgtcgtccttaaaatttcttttttggtgtcaatttttatcctaggttttttgaaagtattattactaataattagtctatgtttgtctatatttagcctcttgtctacgtgcttcaacgggtaaattcagccgaattccaaccacttatcaatactgcgccaattgaaaacaacctttatggaggaattgcttctattgagggcaacataaacagcgatttatcacttatagtacttgacacaggtaagaactataagattatctaataattttattttattcatattttattattttatgattgattgagatatttggatactttttagaggtcaaaattttgaaagtgccgggccatgagcttagtgcccggcccaaaaagactccttttcagggagccgctcacaacttttgagcctaaagctaattaaaatccacagagggtgggactggagaccaaaaattttctaatcctgaattttctacgctatttttcaaaggttttctgatgggtggaaagtccggcagtcggaaaatcgcatgaacaaaattctagaaatttcttcgttattttttttgctgaaaaaatatttttaattatcgagtttttgttaagcttcatctttaacctacatcgcattggcttatgcaattagaagaaattttcaaatcgacaccaattttgcatatgaattgatggctgcaggaaatgcaagaaatacgactttggggcggtaagcaaaaaaaaaaaataaa

SEQ ID NO: 61463 - DNA, 198 bp, Heterodera glycines
atgttacgcatcaaattgtccgttgtgcccggcccgttgctcagcgtgttcgtgcaaaacattgccaagctgtacaccttccaactgtgcaaattggaggcagacgacgattgggacggaattgaatcgttggacaatttgctcacctccaaattgcccgagtaccaatacactgaccatttggaggcgcaagagcgg

SEQ ID NO: 61464 - DNA, 779 bp, Heterodera glycines
atggtacaagcagaagcgataagcgaacgagaaggtggggttgcacttgctgctgcgacaaaaaatgcattatcggaacgcgggagtgaggttgaacaacaacatcagcaagtcgtagtgatggcccgtggaggaacaataagcaatggggatggtgcccgtgcaaaagcagaggccactggtggcgctaaaagtgttgttgaaacgaggattacggaacatcacggtgaagagaggctagctgcagctacagccgtcatacatagagaggaaaggagagaagaaagaagaagaaaaatacgcgtaagaaacagagaccgacaacaaggaggagaagagaggcagcgcggagaaggacataggcagtctcgcccaaacgaaagacacaacgacaactttcacagttcgctacaattgaatttaccgcccaacagaatggaccgaaaggaacaggaggaacacatgcatcattcacgagatggtttgatgggacagtcgaacaatcaacaaggagaagagaggcagcaaggaggaggagggcataggcagtatcgcccaaccgaaagtcacaacgacaactttcacagttcgctgcaattgaatttgccgcctagcagattggaaggaagggaacaggaggaacgcatacatcattctcgagatggtttgatgggacagtcgaacaatcagcaaatgagaaaacgaattcaacgagaatgtttttgcacgtgctaatttttttggtgtttggtattgtatgacttatattaattttctaa

SEQ ID NO: 61465 - DNA, 431 bp, Heterodera glycines
atgaaagacattgttcttgagcactacgatcatgatggacaaatgtgagtgtgttaattagaccttcttgcaatattaatctgctgctgattatttttagtgatgacgcactatattttgctgattatgatgacactttcgttttttctggctcatcgcgatcgatccgtgttgcttttcctcaaataggccgcaacacttctgctgatttatacacctatcaagcacacaaggattaccgcccccactatgttaaaggacgaataaggcccggaatggagaccctgccttttggtttccgaaatgcgcaacagcaaacacgacacagaacagaacaagatgacgaagaagaaactaatgatgatgatgatgataatgatgatttagaccaagaccgtctttccaatttgcctggttgctctcattggtga

SEQ ID NO: 61466 - DNA, 3877 bp, Heterodera glycines
atggctaaccgaaatccattttctatcgagtctgtgcatgagatgcgcaataggccaaggaacactcggggagaagtggcacaagtgcgttttgtcccgcttgaacaagtccaacgaccggaccgcgtgttggaaatgcttgttgaacaattgtttgcgcgagtgcttggagatcggccaccgccctccttgattggcttacaattgcacccgcccacgtttgagaatccattcacaattgctcttcggcctccagaacaaaaaaatccggccgcaattgctgactatattcaacgtttgaacgatcaatcagcggcaggaatagacttaacagccgggacaacgcttaccaaagttttggctgtttggccaatgcatgatgatcgaacgggaaatggacgtgaaggtaaaagagaccacaatggatgttaattgaatcatttctataggggcgtgttcatgggatcatgaacactccgttgttcacaccgtcaactcattagtccggattcggaatccgaacgacagattgtgcctagcaagagccgttttaattgggttgaaagaccatcgttcgcgccagtaccaaaacacccgagctggacaacaaatgtttaagaattatgttggccaacaacgatttcatgggcctgatgctcgccatctgttacggagagcgggaattaagacgaataaaaatatgtacacgctggatgacgtcagacagcttcagcaatgggttgatgaacgctacgaagaggcacagattcgtctaactgtttttgagaaagtgcgacagtatcgaattgttttcaaaggggcgtctggccgtgctgcttgcttcaacctgtgcctattgttggagaacgcccattttcactatgttgggcgtattgaacaactgttccgttgcacgtcctattgcgttgattgtgaaaggcgggtgactcgttggtatcatccgcaagaatgcaaagttgtttgccgcctttgtctacgctatggtgcaaactacccttgccaacaacaacaatttgccaacggaaggaacagcaaacatttttgtacacagtgccaattcgttttcccagatttggactgctacaactatcatttgtccaatcgcgcaccggccaccttggatgggcgaagcgggcgcgcgttccgttcaatctgcgaatggaggcgtgtttgtcgagcatgtggggggatcgtctataccaatttccaacatgtttgtccaccctcggtccgacaacaacaacaacagcaagaacagcagcagcagcagcagcaacagcaatttgcatcattgtgccaccagtgtgggggacctcatgcggaagatggtccatgttttattcagccaatggatggacgtcgtgtttttgggcaaacacggcgtcaacaaaaacaacaacaacaacagcaacaatcttcagttgaaaactgtttgaatggcaacgatgatgctgccgataaagaagatgataccgatgatgacaatgatgcagaaggcgagtcccagcatggggctgggggtggtggccaccgtcgccaagcttctcaaaaaacaattagatattgtttcttcgatgctgaaacatctcaggacaggccattacaacttcgaacacaaattccgcaaaaacatgttccgcttttgattattgctcaagtgatttgcgagcgctgcattgccgatagaattaccatttacggcggtattggacagaaggcgaatggttgtgtttgtggcatgccatcagggccacggggccgtctttggtgtagcccgccctttcgtaacgcaccaaatgacgacactgagatgccaacaaacatcacatataatcctagacgtcttttcttccactgctttgaagacgcaaccaaaaacccagtggaccagtttcttgacttcctcatctcaacaggccctcgaaaatcgcatactatttgtttgtctcacaatggtggaaaatacgacatgcatctggttttggaggcactacatcatcgaaatttacccccaaaacgaatctgcacaacggggctaaaaatttactcaatgtcgcttaaaggaaatcttcagcgccaaataacctttaaagacacactcaattttttcttctgtgaacttgacgccctgccaagaacgttcaatttgccaaatgaaattgcaactgccaagccgttttttccatatttatttattcgccaccaaaatttgaatgttcgcctccaagggctgccaaatgctgtattctatcaaccagaccacatgaaaacggccaaacgcgaacaatttttgagttggtatgcttatgaaggagcagtcgccaaatttcagctcagagaacaacttataatttattgtgcgaatgatgtagctatcctgcgtgaaagtgtgctgaaatttcgccaattgatcatggagaataccatgggcttggatccatttgttattgcatctacgggtgcagcacttgcgttggcaacctttcgacgttgttttctgtctcgcaataaactgatcaacacacctgagggcggttatttacgaggaagacgcgcatcggcagaatccgcacgatacattcgcatgtatgaactgatgaacccgggtgtgcacgttcaatcggcgcaatggactgtgggggaagcgcatgttgaggattctggttatcgattggatggattacatgttcgtctacctcctctgcgaaatatagcgattgaatacatgggctgtttttatcatggtagtattaattgagttaaatgcgtatgaaaaagaataataattctcagggtgtcccaaatgttttccaaacgatcgtcaacaaactttggctggcggtagatctgctgaagagttgtatgaacgtacacaacgccgcctttgggagctagaacacacgcacgggttcgagcttcacgttgtttggggatgtgagttgaagaaaagtttgcgggccaatccagtgcttcggcaaatgtacaatgacgccttcgttcctcgcccgttggatccacgtgaggatgccctgcgtggagggcgcacagagccatttactctccaacacatttgcactaacgatgaggaaattgttctcatcgatattgtttgtcatacacaacagtgaagcaaacataatagcattttaattcaaggtgagtctctacccttacgtgatgaaggcatttgattttcctgttggaaatcctcgtgtgcttacacgtgaagtgcttttacaacctccggcatctccattaccatggagaaacgcaaactgcaatacatttcgagggctgctgtttgtttgtgttttgccgccagatccggttctaagccctcttcgtatcccgctgctaccatatcggacaaatgatgggcgcctgacttttcctctctgtgctcgttgtgctgataatcgccaacagcgcgcatgtgcacatacagatcatttacgttcttggaacgctgcgtatgaccccccccccccccccgctcatcgattggtttatacacttaggtacacacatgttgaactaaacaaagcgcttgaactcggatataccgtaaccgatctgtttgaggtaactcgataaatttgaaaaaaagttgtaaaaaaaaaataaaatataggtttggcattatgatgaatgggatgctgaaatgtttcgtggttatatgaacacatttgtgggcatgaaagttcaagcaagtggatggcctactggttgtgaaagcgaagaacgtcgcgatgactatattgacgagtttgagcgtgccgaaggaatacgactcgaccgtggaaaaattgcaaataatcctggtcttcgaatggttgcggtaacatgccttgagtaa

SEQ ID NO: 61467 - DNA, 619 bp, Heterodera glycines
atgcctccaagcgaaaatttttcaaatatctcgctagattttaatgatttggaagctcgaccgctgcctgagccccaacaacccgaacaacaacaagctgaattattgattcagattttggatgttgaggaggctttgcttttcaacgttcatgagggagaagaaagaggagaagaagaggaagaagatgaagaagaagaagaggattttgtgcaatttgaagaattgatgcgtttacatgccgagtatgtagcgcaaattttcaatgaaattgatgatgatgaaataaacaatgaatgatttttttgaataatcgatgatgaccgaaaaatggattctgttataagctccgccccttttgctgtaaatttatttgttattccgcttcttcgttcgaatgaggtcattaacatttaaaataaaaaaatgcgccaaaaatccatccccaaaaaaactgcttccagttactctgaacgcctaaaaaaattcgcaaatgaccaagtggaaaaagcgatgtccgaaattgaggaagagaaaaaacagaagaagaagccgaagaagcaacacaacaaaaaataaattcggagccatcgactagcgcatccctttgaccaataaa

SEQ ID NO: 61468 - DNA, 297 bp, Heterodera glycines
atgggtgaacaaaatatactaattaggctaaggatttatcgttataaaaattcacagagtttgaacaagtttgatatagtaagtgtcgaaaatttttggaattttgcaggcacttagtccttatgccaaaatattttccttaaatttaatgccattctgaaacgatgaacaaagatacaatatcttaaattcatgagatttttgtaacgttaaatccgtcctcatatatcattgtaatacgtttgtgtgaaataataactagagctgtaattaaagtcatttctttaaaaaattaga

SEQ ID NO: 61469 - DNA, 59 bp, Heterodera glycines; identical to SEQ ID NO: 52421

SEQ ID NO: 61470 - DNA, 59 bp, Heterodera glycines; identical to SEQ ID NO: 52422

SEQ ID NO: 61471 - DNA, 59 bp, Heterodera glycines; identical to SEQ ID NO: 52422

SEQ ID NO: 61472 - DNA, 59 bp, Heterodera glycines; identical to SEQ ID NO: 52421

SEQ ID NO: 61473 - DNA, 59 bp, Heterodera glycines; identical to SEQ ID NO: 52421

SEQ ID NO: 61474 - DNA, 59 bp, Heterodera glycines; identical to SEQ ID NO: 52422

SEQ ID NO: 61475 - DNA, 59 bp, Heterodera glycines
aacatttgccttctctagtctggctctaacaaacactcacacgatatttgaaatgctaa

SEQ ID NO: 61476 - DNA, 72 bp, Heterodera glycines
atggtcacccacgcgtacagtgagctggccaacaaaattttgcaccgtaacggaatgaatttggagtgtacg

SEQ ID NO: 61477 - DNA, 1109 bp, Heterodera glycines; identical to SEQ ID NO: 31095

SEQ ID NO: 61478 - DNA, 753 bp, Heterodera glycines
atggcacgatgtgtcacatcgctagcgtttctcccaattggagatttgacccctggaatcattgctctggacatggctcttcccgacgaacttactcccgtccttgactggtaaattgacaatctcagaaattgtttactatttattgttctttaattattcattaggttcatcatgaactacacgggtcgtcttaagcatgatggaagccgaacacgcccgcgatttgacccgaacatttggagtgtttacactcgaacactgcaaagcgatgaccggacgaataaccattcagaagccgcgaacagacgcctgcaatgtgcatttgcctgttcacatccatcgatttggcgtttcattgaccttctgcgaaaggatcaaaagttatccgatgatgacttcgcgaagtgttcaactggacaagaaccaccgcaaaaggcaaagaaatatcgcaaagcagaccgccgaattctcacgatggttcaaaattatttaccacttaacaacggagaccccaatacttttccacttcatcagccttttaaccatcaatttatcattgcttttttgtccggaatttctcgcaattatgagatgataccatgatttgaaactgataaaaagtgtttttttatttaaatgttttaagctcaatatttactactagggaactgatttttagggatgaaaaaacttatcaatttttacggaaatttttcgaaaattttttggtaaggaaatgaaccaaataaa

SEQ ID NO: 61479 - DNA, 988 bp, Heterodera glycines
  unsure (1)..(988): unsure at all n locations
gcgccaaagcaanngganagcannnanncaaaagaagccaaaagangagccnancgaaaaggaggagaatcagcaaaaggcgagcannnccgacaagaaaaaacaacgccnnannaacggngagccnccagcgcgccgagaacgagcgcgagaacccncacacgccccagcgaaagcggacggaagcgacccgaaanncngncaacaaaagtcagccgatgacaccgctgaatccagcaacgaaatcaggtcattggtggcggaaccacggaaggacaccacggacaataacacgacaaacgcagcatttaccgactcggaggaggagggggaagacagttcgtgcggcgttgggtttatgagttgcgcttctttggccaccccttcttcggctgaatgcgcttcggcaccgaaacggcgacgagtgattttgtcatctgacgacgaagaagagaaaatgatgggaaatggacagagaaaagaccaaaagggggacgaaacggagaatgaaccccaaagacaggcgacgaagcgaaagcgaagggacgcggcgaaagaagcgaaggaaaggacgcctccttccgttgcccgtgtcccacgggacgaaatacagacgacgccttcggcaaaatgtgcacattcattcatcaattcatttgtatgccatctataattaagaattaatatcttttttatcctttttccaattcattacagagcatcgactcaccaaacgcttcttccgtgcagttgcccttttcatcgcttcagattcaaccaaaaaacttgaaaaaccgcaacaaaaatgaccaaatcgcagagagcgcaaacgacggtgatgaggaagccgaacgtttccctcacttggactttgactttcttcgcactgaaaaaatcaaagacgccaaaggacgaaagcccaatcacccggaatttgatgaacgcactttgtttgtgccggaacattttttgaagagccaaacgccgg

SEQ ID NO: 61480 - DNA, 419 bp, Heterodera glycines
atggcccctctcttccatcgcttctcatctctctttgtccttctgatgccgttcctttccgttgtgcttctcccgtcaactgtttgtaccggctctgacagtgccgccgcgccgttcgaccgaaagaattatccgaaaatcgatttgcgagtaattaaacgcctaattagcatattaaaaacaatcaaaaatcccctttttagctgttcgagtggcccattgcttcacattcgggctcgtccgctgaggtctcttttatcgccgtcgactgctacacccaattggaccgttctttcatctcgaccgatgccgtgctccgtctcaacaattcgttagcacttcggcaccgagcctgtctcttgcgcattccgacggggacgcggctgacagtgaccgaaatgcaaacgaccaacagaaag

SEQ ID NO: 61481 - DNA, 1433 bp, Heterodera glycines
  unsure (1)..(1433): unsure at all n locations
catgctaaaatgcttttaaaattttcaaaatttnttttcttttaaactaacttacaaattagagaacccaaaacaatcattttccatcaaaaaatccgttttttacataccaacaatgagagaagagtatgaaaaacaggcctaatttggtgtactacacccctcctcccccgaaaaatttttacatgagatttttctaaaaaaaaataaacattttgccacagaaatgcgtggccgccacggtgtgcgacgtgtcctccaaagagcaccgcaaggagaagccggaggcactgcacacggtcgaactgttgcgggtggcgtccaccgcgttgggactgtctcccgcgcaaaccatggctgttgcggaacacttgtacacccgcggatacataaggtggacgggcgggcactttggttgaaccgcttgtgccgcgcctgtctggttgctcgagactctcgacgcctttcccatattccctctgaaactcatttgggttctcgaatttctgatgctggcactgactcagtgcagtcggttggctataaacagtggagagcttcgaattttaaaacatttaaaattgatttgttttccgatcagttttattttctatcaatttttatattttgaccggcctttttgggtgatgatcaaaatcattcgatcactttcaattcttttaatattttgatcagctatttttggatgatcaaaatcgccgcctctcatcattctgctgtgatcatttccactgatctatgatggtgtttattaattggctttctgttgattgctgattagactaattagtcccctgctaatcgactcccagcaaaagtgccatccttattttttctatcgccgctcagttacccgcggacggagaccaccgcgtacccggacagtttcgactttgtcggcgctctgcgcgagttggccaaaggccaacgctttgtggacacggccattcagctgttgagggaaggcattgcgcggccccggggcggcacgaacaaaggcgaccacccgcccatcacaccgatgaaagcggccgacggatggctgagcggaggtgcgcgacgggcgacggaattttgcgaaaattttaaatttcttgaatttttttctctgatgaaattctccgtttatccatcgtaaggccgtatttacaaattctcgtaagaaaagaatacctacatatattttttaaatatttcttcaaaattttttttgctgaaaatttttatagtaatctccacaaattttaagaaaattgtcagttttttgcctctcaccccttctgctgattgggttaatttaaaaaaataataaaattattcataatttttattccctttttcatttttgagttaattttatatatttttgaaaataaaaaataattctttcggcaaattgttttgactctaga

SEQ ID NO: 61482 - DNA, 2141 bp, Heterodera glycines
atgagtgagtaattaagcgttagttgcttcgaatgatagggttttcgaggactaacttcacaatactcttgacagagactgtagctttcaattgaaccccaaaaaggggagtctcttctcgggtaaaaactcgagaatccatttgaaaatattcaagagttaaatttcacaagaccgacatttggcacccgaatgttgagacacgaaaaaaccatagaaaataatgactcatcaacatttttctcgggtcgagactcttgatcagcatcactattaattaagcttggtgttgctaattgattcaagtttttttaatttaaaatttctccttttatttgtttttttgggggtccgccagtggcaattatttcccaattggctcaaaactgcgcatttttcatacaaaatgagaggaacgcagatcctgcttaatccttcacccgagaccaagactctcgaacagcgcaccactaattgagcttggtaactaatcattcatcatttcttctcattcattgaaattctgtttttttaacccgccgataataattattgttcagtccgtttcctttttagcttctcatcattctcttttccgtccttttttatttctgcctcaatcagactcttcattaattagctcattaaacataattgttgtccagcactgaattaattgttcgagtcgattaaaatgctttttttacttttatatattttggcgatgagtttattaatgaaaatttgaaatgtttaacaatttgttggaggagtcagaaatattttacgaacgcttttattttttttcgaattttttcgtttttgctttaatatatatttttttatcgctcctaacccttaaaaaattaaattaattgacttattgttaatctaaggtgttgttgcgcaatgaatgtgctaatggtggccgaaaagcctattttggcggaggcaatcgccaaaattttgtccaacggaaaatgccacactcggaaaggcatggcacggcataataaaattaaatttaaactaattaattttaaattaatttttgccccattttgccaggatggaacggcgcctgctcagtgtccgagtacaaagcatcgtttcggggaaaacaggccaatttccgggtcacttccacctgtgggcatgtgatgtgtaagtgccgggataataaattggaaatttttaagaaatatttcaaaaattaattttccgtttaaaatttaaaaatttgattttaaattaaatcgggagatttaaacaaaacttaaagctttgtcctttatttatccttatttaagatgtttggacaattgaaaaacttcattttttgaatttaccaattttcttagcaaatttttaatgttttaaatttgtccggcatttactaaatttttgaaaaatttgcttttaaaagcaaaaattttctgtgtttgaaactttttgtcatttcttttataaaagaaaaatcagaaacctttatttaatgaattttttttgaattttttggcctgtttttaaatatttaatttttcgaaattttaatttttaaggcgtcgatttccccgcccgttacaattcgtgggatcgcactgacccggccgagctgtttctgtgcaacattgagcaaaaagaggcaaatccgaagctgaaaatgccggaggtatttatttgtttttttttgcaaaaaatgccattaatttgcatttaattgacaaaaatgccgaaaaatcagggagaattttacggcattatatttatcttttcaaatttttttgaaaattttcccgttttcaccccctttaacatcaaaaaattccataatttttcattttctttttcgcaaaatgtccatttaaatttttttaaatctttgatttttaccatttatttttaaaatttaatttttccatttttaaaattaatttttattattttttaaattaattaaattaaatcaattgtcgtcctcctcagtttctcgcctctgaggccaaacattgcgatatgcttgtgctgtggctcgactgtgacaaggagggcgagaacatttgcttcgaagtcgtcgacgccgtgcggccggcgatgcgcggcgcgggcggcgccaattttatggacgcggcggtgttccg

SEQ ID NO: 61483 - DNA, 646 bp, Heterodera glycines
atgacatttttgtgtgattattttctccacgtgatggcatatttaaaaatagcatttccatacttttttaatgcggaaaggtgggaattgctggaaacggaggtgtttggtgagcagtgaaatttacacaattatcggtgaagattggttggtgaagttgccggatcggacggccgacacaaaccatcgaaggcctaataatgtggggaacgggggaggggagggggggggggatatgcgaaagatggaaatcaacgaacgatggatataaaaaagtggccaataaggttgtggatagcacacactttacttttctgtaatttgtttaaaaaatattgttttttgatcggaggcgacagattgtgagatgatcggtgtaaaaagcggtgggatgggaacattgcacgaacggccaagtttttgccggctttaaaatgatttgttgttggaaaatggatttcattttgagcaatttgtggaggagtggagtcgtacagcagttcattctcctctcctagtcgtaccatcccctgcttctattcgcatttctttaaacaattacatattcaatttgattattcattttttttaaattttagttcattgcttcatcctcttcggctatactgttcttgaactttgttga

SEQ ID NO: 61484 - DNA, 484 bp, Heterodera glycines
atggtgaaagtgaattttgtcgaccaattgtttgcgggtaagttgtataagatttaaacatttaattttataatttcataatttatttaggcattgtcggaattgccaattcaatcgaacgctttgggggaccgttcccgagtttggatgtgttcggccttaaccgccacgacccaaattatgtaagtttaacacctgtcatgcagcgatctcaactgatttaaaatttcggcaatttatgccgcaattttgtgtgtgcttataattcaccccccccccccctccctcatccattttgcagggtttttgtattaacgaatttcgttgttaatggtacatattttaggcgaaccgcgtgatgaaagaagccgccgcaattgtcgatgattgctgcgactctcagctgtcaactgcggctgatattaatatgctttctgtctgagtgtgagttcatttttttgtaaaatattaatggttttggtaa

SEQ ID NO: 61485 - DNA, 731 bp, Heterodera glycines
atgcagcatgagcctgcggacccgcatttccctaaacgaaagaagcatcaagtgaattttgtcactgcaaaagtggcatgtccggattgcatttcgaccggaaaatggaaagaaagccttcttggaaaattctgcaaaatctgcggctatcatcggacaataacattcagtcaaatgccgttccgtgagacaacggtcgacagacaaacaattgaccgccaccctcttgttgcattcgttaaatggcttctctacaaacttccaaagcaatacgaaacaattgcctattcccatttcgggggacgtttcgacatggtcttggtctttcgggaacttttcatggagggactgaacccctcaatgatcagaaagggaaaccgtctgttcgagatgagggtataattttccatgtgtttatttaatcattttcccatctcaggtgaaaagcagaaagaacttaaacccgaatgtgacatttcgtgattcttggaatttgattcctggaccgctcgcctcaatggtgcccatgttcggcttggacgtgcaggacaagcccttctttccacacatggccaacaaacctgacaattatggatgccaaatttttccgtcgaaagcagattacctggccgacggaatgaaccagagaaacggaacaatttgatcaatggtaccagcaaaacaaaaatatttcgtttctgctggatgagtcattggcaaggtgattatga

SEQ ID NO: 61486 - DNA, 1095 bp, Heterodera glycines
atgtggtaattaaaaatcagagctatgacaataaaagcattcattccattttcagttacattgatcactccgtcatcgcttttcttcgttcaaatcaccaaattttcgacaaaagaggcacctatttatatttgtggattccatcaccacacaacacggatggccaactaatttgggacatttttggtcgtgaaatttggccaattttttctgaaaacattcgccacttgggctttaacgatggtgttgatttggacaatttgcttcgtcgcacttcgccgacaattctcaccgatctcaaccaattgacttcaatcgattcctgtgatttgtcgcccgaggcgattggtggtgattttgatgggccaaatgcaacaatttctgctggccaagcattgtccaaatggttgcactctccgagaaaagatggacaacccaaacgattgcgttgcgatgattacaacgaacaaacggacttagattggattaacaatttcaaggaggtgtggccataatctcgaaaaatcactgatttttgttttcaaattgtttagcattttctccgtgccaatgccatttcttccgtcagttaccaaattcattttgctgttcatgcgctgtcaatacaaattgtgccatttgaattggtgaacgaatggacaaaggaaaagctgacattggccaaagcaaagggatgggacaaccgatggataatgaaacgatgcaaaattattggggagacggcagcggtcaattgggaagacggaaattgggacaacaattgtaacagtgtcttcgtttggctttttcgtactgattgcatcgggtgagcaattaaaaaaggcatttaattttgtttaaataattaaaattttgcctaatttaggccattgtctccgccaccagcagaagaagccggacaaaacatcacaaaagggccgtcatctgaactgacaatgagtgatggacaaacgaacaaaaacagtgatcagccgcagaaggaatgaatgaattgagaatgatcgaccgagcataattcaaatcagtgatcaaatgtatcttataagaaaaaacctctcaaatatgtatatgtaa

SEQ ID NO: 61487 - DNA, 554 bp, Heterodera glycines
atggataatttgcttactgatttttggctcataaagtaagtgaattcattagagcccgccggcggggagaaatcggaaaaatacaaaaacatttttaatcccatggatttcgttcgccctctcatcgatggagattttgtttttgttttggtgttaatttacttagtttattattattgttattattattttaattatattttgtttgtctgtctttcactctcctctttttgaattgtctctcgtcgatcccgcccccgagagtctcgaggcgacacaaaattcattcgttgtttattgatccgtggagaatgaattttttgtgtgatcgagaagcatttgcattttatgacccatttttagcggcttaacaattccagcgcccaatttatttattacatttgaatttgccattttatctgggctcagtgtttccggaacatacattatggaaattagtttcaaggacgtccttccgttagcattcaaggacaaagctgagcctttttttataatattcatttttgtttatttttaattctaattttattgta

SEQ ID NO: 61488 - DNA, 703 bp, Heterodera glycines
atgtacagacgtggaaacaaccgacaaaacaacccaggtaataatttaaaatgttcattataaaacttaatttgggacttaaaaacaaaaaatgttaaaactgagaaccgattttctggataaatgcttaatgtttttcgtgcgtttcaggccacggggagctcagaaaaaataggcttttgcctaaaaatcccatcccttgttataaccgaattttgttttttctttttaagcgtcatttaatttgcagaaatttacgcccctgtctccgacttttgtggctttatcgcgtccgtcgccggctcgagagtgaagtgcatcgacccttacaatgctattacaatggcaaagcgtaaaaaggtgaccccataaggagaaggcgatgcttataggatcaagtttgtctatccacagacgattttggtatcatcgccttcctatgtattgtttgaatcaaataatatatgggcataatcgaatgttaccagtgaactgtcacaagtattgcgcactgccatcgaagatgctttcatacatggactcagagacgctttttttctcaagggttcacggcactcgaatcggccatccccagcaacaaaatggagaattggaattgtgtctcaaagataatttatcgggtaaatcgagggataaattgaaatttatgcccactttggggaaatgacttttaacaaataaa

SEQ ID NO: 61489 - DNA, 911 bp, Heterodera glycines
  unsure (1)..(911): unsure at all n locations
ggcaggacaagaaaagaatgaagttgatgcctcatgaaactcggaattggttatgttttgtcgaaaatatccttacataatactcataaaaaatacaaataattcaacccacctattctatgaccacattctgaaaaaaatcccagaaatacgaggaaagatatgcttggtcacaataaaataaaaaatggctagtatgtaaaaatttgcggtcacaaataaaataaaaaatggctaatatgtaaaattggcgtccagaaatttttagactaatccgaagcaaagcacgaatgaattaaagaggcgaaagaattcacagtatcgtttctaatagggaaatattgacaggatattcggctaaaaacgggtttgatcatttttagcgcatttttaggtatacatttgagacaattgggcaggacaagaaaagaatgaagttgatgcctcatgaaactcggaattggttatgttttgtcgaaaatatccttacataatactcataaaaaatacaaataattcaacccacctattctatgaccacattctgaaaaaaatcccagaaatacgaggaaagatatgcttggtcacaataaaataaaaaatggctagtatgtaaaaatttgcggtcacaaataaaaaaaaatggctaatatgtaaaattggcgtcttgaaatttttagactaatccgaagcaaagcacgaatgaattaaagaggcgaaagaattcacagtatcgtttctaatagggaaatattgacaggatattcggctaaaaacgggtttgatcatttttagcgcatttttaggtatacatttgagacaattgggcaggacaagaaaagaatgaagttgatgcctcatnngaactcgaaatggttatgttttggtcgaaatatccttacataatactc

SEQ ID NO: 61490 - DNA, 1631 bp, Heterodera glycines
  unsure (1)..(1631): unsure at all n locations
atggtaaaaggaaataaaccgaaattaattttaaaattgcgccaaaatggaggagaattgaacaagcaaaaggaagaaaaggaaaaagaggaaacagagaatgatcaaaaaaaggaagaacaggaaaaagtagcggatgatgaacaaagggagggaaaaagggaggaaaattgggaaaatgcgaataaattccattggagaataattggagatgaggatgatgaatttacactggaaaaggaaggcattgagcaaaagcaaaaagtaagtgggcctgggtttttgaaattgttttaaaaagtaattaaagatataaaaaattctgttaaactttaattgacgataactattctttttttatccattaagctattttaagctgaaataagaacaataagaaatttgaaaaatttatccacaaaatccaattttttcttgaaaaacttggacacagaaaattgccttaactttgagctggatccagggaaaattccttgtcttggccaaacttttgttgtttttataatttgcctaaaaaacaaaaaaatatattctcatttagcatgtttcgtgtccagcaaaatctttgtcaattgaacaaataagaaaaaaagacgaaaaagaaattcccgaaggtaatttcattgttttctttttaattttaaactgtctttagagttattgcttgcgttgttgaaacgccttttaattgaatatctgaaaagcgatttaaatgagtcaggccaaatgagcattttatttacattggtgagcaattgaaaaaaaaaatttatttttaaattgccaatttgtactttttgattaaaagaaataattttttgattttatttatttatttactaattgctaatcatcctcaagttcgagtattactgctccatttggtatttgaatggcattgcgcacaaaacactgaaagttatggagcgaatggcgccgaaagggtcggattttgaaaaagaagtggcaaaattgaaggagcatcacagggaaatgaatgacaattttgaatttgatcagcgagggatgacggatcagcagcagagggcggagtttgtgaacaagtcaatgctgatcagagtgttccgtttccttgaacacatcgccaacaacaaaacgttgattgaaaacagcgcagattggaacgcatacagagaggaatacatggaaaaatgggtaaaaaacagaggagggaagtgagagaagatatagagaaatgaataatagggaaagagggagagagagacagagagaaaaaggaataataatgagaggaacagagagagagagataacgtgaaaataacatgagattgagaggagaaagaagagagataatgtgaaaataacatgagacttgagagaagaaagaagagagataatgtgaaaataacatgagacttgagagaagaaagagagagagagatagagagaaagagtcagcgaaagagtgcgagagataaagagtgagggagagaatttttttgtttgtcttttcatttanatcggctntgaattttgaatgacaaaattatttgaaatcacaatttcagagaaattaaaaagagaaaaatggactttatatggctgaaaagcacaaatcctaattaa

SEQ ID NO: 61491 - DNA, 180 bp, Heterodera glycines
ccgggactgaaatgtcccgctcaggccaaaaaatttttctatttccgggaaaaaatcgaaatttttccaaaaaaattaccaatcgatagagctcgaaaaactatgttttggaagtggtctccgtttttctgggaaaattcgttaaaaattcctaaaattcaaaaacccgaaaatcgtttt

SEQ ID NO: 61492 - DNA, 1420 bp, Heterodera glycines
atgacaaaaaaacaagaagctaaaagaaagaatgatcaggagcgataccgacggcggacggagcaatctgtcagcccaggtcgctcacccgtcccagacggaagtgcagatgggaatggagaggcatctgcatctctccggggcaccaccaccccaagtttaagtgctttgcaaataagcacacctgcttcttccattggaagtaaaaaaaggggaagacccttgaaagcaggagcgaagccaattttggcaacgcaagaaactgtgtcctcaattgacacacctcgaactgctgtcacccaaagtgaccaaggttcgccgtgcaaaaaaaggggaaaggtcaccgagtgtgacaaacccacgtttgcaaatgaagctattgcttcaacgcctgtttcgactcaaagtcgtggagggcgacctgccaaaaaaattggtggcccaggccgaggcaaactcagtgattccatgagcaaaagctctgaaatggatatcaatcttgaaaatgccccaattccggcaacctcgcacactgtgtctgaaaaaattgacttcagcactgtgcaaattaatttcgccacatcgcgaaattttgcctgtaaaatttggaaatgggcagcaatcggcctttacgaacgtgatggcgaaacaccgattgccccaagatctggcccaagatacattgagacctgttggaatgatatgacccagtttctcaatgacggctttgctgccacatacttggcatacttggcaaccatatcacaacgaaaagtggtcgttgttgacccaatggtatggagcaatggcctggacagagtcatgccttataaaaatatgacatttgggtacgaccctaatgttccggcagaagttatacttttgccagtacatttccctgcacattggactctcattgtccatgatgtgcaatttggcactcattttgccgattctttgcctaccacatatggcaggttggatccgcaactgacggataaaattaaaaatatcatttcggatattttgccgtcagcagtgttggaagggattgttgatgtcgaaaatctgacggtccaacacgatggtaatagttgtgggtactttgtgtgcctgtatgctgagtcatggcttatgaacaatcgcacatttgttctgcctgatttatccatcaattatgaaaagaagcgtattttatggcacattaacgagctgtatggctctgataatgtgccatatcatccaagggaaggggtgccaactccttgcccaattgtctatcgacatgcggatgaagcgcagtcgacatccatgacggtagcgccaatggaagttgatggtaacgatgacatcatgatcatcgaaccacagacgagtggacaggcacttaatgtcattccaacccaaacccaagtggcag

SEQ ID NO: 61493 - DNA, 92 bp, Heterodera glycines
acattgacgaaaatgccgacactttgatcgaatcggagggatttttgcaaattgaccaaaaaatgttgtgcgaaattttggaacgcgacgaa

SEQ ID NO: 61494 - DNA, 57 bp, Heterodera glycines
agagcccgtgaacgagctgaatcggatgcgagtaccgccgttgctgtacgcctaacg

SEQ ID NO: 61495 - DNA, 491 bp, Heterodera glycines
atggctgatttaaagaaaatgaaaagagatacagaggcagagaaaacgtgagtaaatagagcaaagttaggactataaaaattataagaaaaaaattttattacttcaaaaatgaattattggagggccgagtctagaccatcaaataacaaaatgttttaaaagtggttttggaaattccgaatttaattaagctaagtaaattgaccacgctgagtccgaatatggctttagatttggtctctgggttctcaacaaacctgtacagctccaacttcatgcatggagttggagcagtacaagctcagggttaaaagataggtcagatttaaggccatattcggattctactggtctaatttgtacagaaaaccttcttttttgttatatcaggttacttttttgaccataaaaaattcgagaaaaattagtgggccaattttcaatttttgcatggtcgggaaaaaatactaaaaaaattgaataagcaa

SEQ ID NO: 61496 - DNA, 84 bp, Heterodera glycines
atgcatttgcctgttccgctccatctccgccccattgtccgctttctgctgccccttcgccttcccccgctgttgcgttgcccg

SEQ ID NO: 61497 - DNA, 1532 bp, Heterodera glycines
  unsure (1)..(1532): unsure at all n locations
atgtggcatcaatggttctacaggcatagcatttacacgaaaagtgatagccaattggaaccgcatgaagacgataaaaaaccgccaaattttaatgtgatgccaactgagcaaatgctaattgacattttcgaggcgttaattaatgaacgcaattggggccaattaaagagacaaaaattagcgatcatttacaaaattggcaacgtgttggagcgagctttgcatgatgatccgatcaaaacattgaaatgcatgcataattgtgaaggttatggaccaaaaatgatggaaatggtcaaagatttttgtgaaaaagattataaccgaaaatggacaggagaacaccaaaagtaatgaatgtgacttataaagtgcaaataaaattttgttttatttatttaaaattcaaacaaattgatctttggcatgctggcaaaaattggcacaaaaaaaatccgcgaattgacattaaataggcacaaaaatcatacaattttttatttatgccatttagtagcaaaacacgtaaaacttaatcaaagcacttaattttggttaaatttcaaatttcaatgaaattattaaatattttagagttttttcagatagggacaaatttttaaagcaaaaattttttatcaagaaaacaaaataaataaataaattttggcgatcaatttttaaaaagtcaattctcagggatgtgtattctgaaattttttcgggccatttttgtttttcgtgcatatctgagcgtatcaagtgtttagaattagaaattcgatccttaaagttttgggactaattgctgcctgccgagatttgtgaacaaaatttttgaaattttccgtttctgaatttagaataactgaatttttagcaatttttttttagcgtatggcgcctaatttgcgacgtttttatatgggaaaattggctgtttaattacccaatgctcacagagaaagatttgaaaatgtttcatgataaaatcttaaaattggttggtcgcctggagaaaaaagtggagaaaaatactagttggattgagatgaatgtggtggacaaatctgtcctaaatattatcggccaaattctggtggcaagagtcagttcattaaatgagaaatttaattaattaaaaaaaataatattcaaatttaatcaaaaacaaattttttaaatcaaaaaaaaaattggatgaaacctaaggatgcctttacatttttagatcggaataaattccatatttcatatatatatcaattaattatttaattttatcaatgtataatatttaggtgctaattgatcatagtagcaaaacattcatcagttttgttaattacaatcagtcgacaatttgcaatttttgtgccaatcggacatcacaattttctggatgggagcacatttgtgtgtacaacatgtggctatttgtggtgggagcattgngcaatggacaggngcgcctaattatcatatcccttttctcaaaaattgatcgccagaatctaattattttataa

SEQ ID NO: 61498 - DNA, 315 bp, Heterodera glycines
atgcaaagtacaaaagcgcctcttttgtccacaactcaaattacacctaaggtaagggaggtcattaccactgaagcaccaccaattacaacaacgcaaacagtaaaaattgagctcactacgaagccgcgtaaaattgagccaaaggttaaagtggaaactccaaaatccttctccaaaggcattcaatttaaaagagtaataaatgaacaacaaatttacaaaattatgggaattaggaaaggcacaatcctgactactacaattccatttataagtacaactcaagcaccaaaaattacaaagccgaccaca

SEQ ID NO: 61499 - DNA, 1432 bp, Heterodera glycines
atgaaaaatattaaaaaaggtatggaaaaatgtctagacagaaaagatttaactatgtgtcaagaattagcagaagaggccaaacaatcaatcgaaattgccaaaaattatcggcaagaaattgggcatatttatcggaccgcttattcacagccagatttaggtattggagatttggcaaataaactaaaagaaacaatgcgcgaaaaccaaatacggtttgaaaggcaaagacctcaggaagaatttagggacgaatttattgcatataaaatataaaagaaaaatttaataaatgaaaaataaaaaaatgaattctgaaaaatcagaaaaagctaataccattttggtggaagctgcaaaaaaagagacagagagagcatggagggatgtagcggcgttagcagaagaagttggcgattttgccaagtcttctcgggaaacacttaatcaggcaataaaatctagagaaaaagctccttatgctaacggtgttcgagaattatatcttaaaatgtccgattcaatttgggaaattttcaaaatcgaggaccaaatcaatttggagtctgtaaaggctgaatctgcatggcgcgagttcgagagatgcaaaacttttgaccaggcaacaaaattcgaggaacaagcgcaaaattcgttaatggaagcccggagattacatttcgagtcccgaagggttcagagccaaatgttaaattatgaaaataggctcaaaacaattgtttgggagcacgttggtatataagaacaaaaaaataatgatataccaaaatggaaaattgtgccataattgagtcattatgtcataaggacttaaaatttggctttaaaaaatataaaaccaaattttattttaaaaatcctttcctaattaatgcggaggaaaattttaaaaatatcctcgcatcaataatcgtaaaaatttataaaaatgaacaaggaaaattcaaaagcattctgaagatttcttttggttttgaatcattttattgccctcttagataccctagcgaaaacaccgccgaggctttgttccaacatgtcctattaaaagaagaattatattcgcttttctatcctttggatgatgtcataacactagaagtaactataatcccagatgtcgacaatagaccaagaaattaattttataaaaaacaaaattacgagaaattggaaaatttctggaaaaatacttaaacgatcaattaatctcgaaatttttgcaaatatgctttttaaacgggtgaaaaatttctacataacagcatttagtgcacctggaatggaaaatttatatttttcattcttagaaatgctcgaaaaaattcaaaaactacctaaacttattatgcatgagtatagaaaccaagcattagctatgcaaaaaatagaaattggactcaaagaa

SEQ ID NO: 61500 - DNA, 904 bp, Heterodera glycines
ttggcagtccaaattgatgaaggaaatccggacagcagaattgcaccggatgagcacggtcgctatttgatcagcaaagttcatgccgtttatgtacaccaaaataatagaaaagcatattttctttcatttcatggcatgttttttatctattgaatttcttattaatcaaagttatgaattaaaaatatattttgagaattaatcaattataaaataaattatatacgttttaatgaaaataattttataataaaccatatcttttattctgtctactctcgcccctgagactcctggggtcgcttcgttgtcacaacgaaatgacccttggagtttcagggtgaaatcgggttccccctgggttcatatctgaaccttgggcgcccatcgccatcatgtctcttttatatttaatattaatactataattaagattttgtatatgaatttattcaaaaaacaacaaataatttattcataaaattaataataattttattgtgtaaaggtttattagagcaaatttgtatttttctagggtggcccggatatgaagaatggacgatttcagaagattgcgaaaatttggagcaaactaatgagtttacggaattggtaacagttgaagctatcttcgacttgatgttaaatagaccaattgcgcgtcatttggctaagattgtcgaaaccagtccgaaatatgtccaaggtagatacaaatcgggacgaaaaccattaaaatgactgtgtttcaaattctttagttcgtcaaaaatatgggctcaaaaacacaaagatcatgaagcttgacatttcgttcgtatctaatacggaagatcgaatcaagaggaaggccgttaacggattacaaaaatttatcgataatgtatttaaatcctaa

SEQ ID NO: 61501 - DNA, 789 bp, Heterodera glycines
atgtcatttgaaccaattggccaacttcctgagcttccaactgtgcgatactttgagtgtaaattgataggcaccgggtggttatataatttgtgattaataatttattatttctttagcgcgttcggaattggttttgcctccagaaaatatgccacccacgaatttgtggggtgggcttttgactcaataggctttgactcgatgggcgatgttttaggtagtatatgctttaaaattgtcgttttttaaccaaaattgccgtctttattattaatatcatttaggccttgaagaatttggcggaccttcggtgcttaaatggtggaccatgggggcggatgatgttgtgggcgcagggttttcgggcagttctccatttttcactttgaacggagagatattacgtaatatttcattcttttttaatgattttttttgtttgaaaggaattgatgatgttcgattggacgtcagccattttgcctttccaactgtttcgatgatcggcgcagacacttctgtgttggttaacacgggcccgatttttttatttgatataaaccaaatatttatgccataaaccaaataggcccgtaaccaaaaattttttagaagcctaaaaaatttctgaatttattttggaaaattgtcaattctaggagaaaaaatttgtttaaaaattagttaactgttgaattttttcctattcggagagaggtttgaggagaaatttcctccccttggtaactggcaaaaaccaaatattttattatttgttgttgttga

SEQ ID NO: 61502 - DNA, 2639 bp, Heterodera glycines
caataccttctaaaattctttttaaaattcccaactgtcttcaacatgtttggatgcattaatggaggaaagagacgcggaaagggaggcgcgaaaggcttttgtaaagtgagcaaaaatagaataattgcaaaaaaactttatgtacttaatttacggcttctattccaaaccacgttcatttaaaacaatttaagagaaaattttatgaactttaaattttgtttcgagggccactaatgcatttgtgataaagttttaattgtttaaatgtgtaaatttttgttgtttttccaaatagtgcatatataattattacctattcatattttagacagggcgtcataacatccaaggcatcaccaagccggtcatccgccgattggcgcgttgtggaggggcaaaacgcattcccggcatgaactacgatgaaattcatacggtaccaaaaaatgggcaggaatacttttttcttttgttcaacaaaaatgactatttttgacaatatttgttattcttttcgactcactttccatttttcgtaattttttcaaaaattatccatattcagtcaattttcaggtttcgttatatttcacaattattaaaaacgattagttattttctaaaattaaagcaatgattaactaaacgcattaaattttttcaggcagactatgacaacatccaaggtatcaccaacatgaccatcaaaaattttgctcgtcttgatggagccaacgacatcttcaacatgatcgatgagcaaatttggccaaacgattccaattttggaacggtgaatatttcttggtttcagaatcaaaaaactgaatgattataattaattgacaaaaaatatattaatgtggcaaattttaacaaatccatgtagacacaacaggtcaaatctcaaagtgttaataaaactaagtcaatttaaatatatttggtatagggatgaccgaaggcgctgccggtttttggagattaggtccaatttttaaacagtatcaaaaaatttaagaattttgtaagaggggaggtgggcaggcccgtgaaaaaaagtcagcgtcgcaaataagaaattcaacaaaattttatacaaaatttctcataggtaattcaattggtttttttagattttcattaatcaaattatgatcgatcaatcccgatttgtgaggaaaatttgtcgaatcgtaggaagagacggtagaaagaacggctaaaatttgcttttttaattccaaaaatttcatgctcgtccataaattctttatttttcttaaaatatggattgggtttaacaataaattagcatttttttggagaaaatcggttaacaaattacactcaaattttcaaaaaatattgacattcattctcagtcgttagcttgaaatttgttcaggataatgactgggactcaattgctgcaaatttacaaatcgatgagacggaagagcaaattgagttgggccatgacgtgaactcggcctttctcgacattggtgcaactgtggaaattgttggtgccgagtccgacattgacgatgagaatagaagttcgactttcgccaccacttcaacaacatccaagcgggcaaaaaacacggcaaaacaacaacgaaaacgagcaaacaaacggaataagccgaagccggtagaaaagcgaaatataaaaattgaatcgggaaattctgtataataaataattatcagagcccggtgattgggaccctcgcgggatttttacgggattcccagtcccacctccgtttttttttggtgaatgggattgtaacggcagcgggattctttgggatccccgattgggactcctgtcccagaaaattttatctcccgctcccgcctccggaaattttttaccgagctctaataaaaagtattaatccgcaccttttaagcgggcagtgcaaattgaacatggaattccggacagtagaataggtcctgacgaaaacgggcggtatttgatcagcaaagttcatgccgtttatgtacaccaaaacaatagaagagcctattttttgtcctttcacggcatgttttttaagaaatgaatttttgattaatcatagttatgaaataaaaatatattttgagaattaatcaattataaaataaattatatacgttttaatgaaaataattttataataaaacatcacttttattctgtctactctcgcccctgagactcctggggtcgcttcgttgtcacaacgaaatgacccttggaatttcagggtgaaatcgggttcaccctgggttcatatctgaaccttgggcgcccatcgccatcatgtctcttttatatttaatattaatactataattaagattttgtatatttattcaaaaaacaacaaataatttattcataaaattaataataattttattgtgtaaaggtttattagagcaaatttgtatttttctagggtggcccggatatgaagaatggacgatttcagaagattgcgaaaatttggagcaaactaatgagtttacggaattggtaacagttgaagctatcttcgacttgatgctaaatagaccgattgcgcgtcatttagctaaaatcgtcgaagcctgcccaaaatatgatcacg

SEQ ID NO: 61503 - DNA, 1915 bp, Heterodera glycines
  unsure (1)..(1915): unsure at all n locations
atggccaaaattgtcggggttctgggtaggggcggggtcggggttgcaaccctanctatagaatttaaaggacatgagagagagaggagaggagataggaaaagagagagagagaagggtgaaagagagaggaagaaagagcgaattccggctttattgtttttaattaattattaattcaaagaccttatatttatatttgaaatttttggtaagtgtcaaaataatacaaataactaagatttaattgttcagtataataccaattaatcttgtatgctgcctccacatttccaatttccgtttataaacaaaatttattaatttattttttaaaatatacttactgtaatattttttgctttgttagatattattttccttttggtctcagtcgtgattctgctacattgatgtttttaagctatttaaattttaactttcattgaatataatttatctttattagttaaagaatattataagtttatacaaaaattgtttgtttcacatataatataatacatttttatatttattaatttaaattattcgagcttctttaataaaatataccatttttctcttcgggaaaaacaaaacaaaaaattattgcatttattttgacataatttttaatatttagaaatttctctttcattttttatttggatagtccaattaaatttcatttcttttactttttaaaagctttcattttaagattcatttcaattctttgttaaacatgatgttattttcgaaaattcagaatttatttgattattttttacatacaaattacataaatttatttccttattattggatatgtttaacatattattcatctttaaatatatatatatatatatattaattaatttaatcattctatttaattttaactcgtcgtttgcagcataatatggcgtacataatctgagtaggagaaaaatttgtaaaattttaaattttaaatagagatttaatgcacttatacatttgctcttgctctgcttgtaggatagccttttattattgattttgatatatgatttaatttttattaatcatttgatttttttatgattgtttgtgtcaatcaaagaactatttaaagaaattaaaatattgtaattagtttattaatcatttatattttaattatttttcacaataaataaaatttactgacttattttataattttttttattgcaaatataaatatattttttaaactcttgacgaaaaaaatcttttctgccatttttccaccgagagcaattcgttaccatcccattagatatataaattaaattactgatttaatactttattttttattataaatattaatatttttaattcttgtccacattcatgttatttaagtggtgaaatgttttgtggaatttagtaatttagaaaattagatttatgtaattgaagaaatattgtcctaaaatatttaaattacatctatgtttttaaatgtaggatctccgctctttttctcggcaataattttattgcctcgttgaatatatccttttaattaatctttgttaaatattaattatttccatttttttcaaataatagcaaaattttcaattatcttaaacatcgtaattgcttattacataatataattttatatgatttactcactttataacaattaaatttaattattttcattataactgatacttttttaggttcgtctcagcggggaccggtaaattggacaccggaaaattggacaccagaaaattggacaccggaaaattggacaccaagcggaaaaatggacaccgccggaattttggacactaaaggaaaattggacaccggaaaattggacactaagatttcctttttaaaaaaaatcaagaattaggtgaaa

SEQ ID NO: 61504 - DNA, 166 bp, Heterodera glycines
atgagtaagacattgtgatataaaatagtatttaaatgaagaatattaatttaaaattatttttatatttataaataaatattaattacaaaaaatatttaaatgcacagagaacgaattttggaatccgacaagagttcgaatacatgagatgagagcaacataa

SEQ ID NO: 61505 - DNA, 1398 bp, Heterodera glycines
atgccgacaactgttttcattgactacataatgtttagtgtacatttaacgctaatccgttggcaatttattctccatggaaaaagcaatttccgctttcaaacaaacagaaaaagaagaatggaagaagaaaaaaaagttttgagaatatgtaataatgtatccgatggaaaaagaagaaaaaaagcgattttttatgaaaaaaaaggttgcctagagggcaaaaatgtacttgcgaatttgggttttaggctatggtaaaaaaattttttttaagtgccttcgttgtaaagggacaaaaaaacaaccgtatttggcattgtcattgtgacgatttgaacaatttaaaaaaactattaccggatataatgctgctttaattattcttctaaaaatagttacaaattgtaatttgtcgtaaataaaaaaaatgacaggtaaatgtgtgggaaactttattttaaaataaatttttgtcgttaagtacattcatatttatagaaaggcatgttattgtgtaagtgtaagtggaaaaccaaatcatgggaaaaaaattaaaattaaaaaatgaatttttcacatgttaagctatcattgcataacaaaacaaacgaccaaacgccaccaccaaacacaaaaattgattataacatgtacaaatcaaacataacgccaacaacaagttttttttttaattttttgaatatttgacttacctccgttgttgacgccaaccagatcaaccaagtcctggcgcgcccagtgcggaccgcgcgaagatggcacaattgaggcggacatttccaagccccagcgtttggtcaccgtccgagcgtagagaccctttaacaaaaattaaatagttataaaagctaaaaggaaaaaacgtctgaaaatttttggaatatcttcgcgaaaaaccgagtaaaaatagaaaaaattcaaaatattccacaaaaagcgaattacaaaaaaaaaaatggcctcagggctaactgcactatatgaaaaaggacttgagagagatttataaattggaaaaattaaatgtacaaagatcaaaatgtttttttttaattatgggccggtcggtctacctcagttgggcgcacacggttgggcgccagcacatgtttttccactataacatttttctttgtcatccaaatccatcaatcttggtatcattcgagagctcttcagatgctctaattgcctgcaaaattccaaaaaattttgttaattttgaacaaatttatggccaaaaaagttggaaaaatttggtttttttaattcttctggccataacttttttgaacctaactaaattttttaaaattttgcaggctaatagaggacactttagagctttccaatgaaatcaacaatgttggatga

SEQ ID NO: 61506 - DNA, 56 bp, Heterodera glycines
gtcccggttcccggtcccgtattttgaaaagctcaggtcccggtcccggtagggca

SEQ ID NO: 61507 - DNA, 1285 bp, Heterodera glycines
atgcaacaaatgcatttctcgataggtaaaatgaagaaatagcaaaaaaatttttgaaggattttgtatacatattatgaaagtatggtttctccattccttaaccatgtagaagaccgaggatatccgttatcgttttcatttccatgggaaataatcctcacgccggaggcagacaaatttgtgtgccaaagtgttcgttcaaaaatgcccatgtgacaaaattcgccgccatttggcgcgggtataatgttttttaatcctttaaaagggtgtacggatcagggacagaaattggtctcggacatttttaataattacccttacatagaggtggaaaatgaacggaagaacatttaaatttgtccatttattaatcccccgccctcgacagacaaaatcttttgcaaaaattttttgttttataaatttcttagagattttctaattaaaaaatgaaaataattttcttcaaacaaatttcgttcaaaaaattcttcttattttgtttgtacaattttcaaagaattttttaaacaaaaaagttttttaaaagaaaaacaaagaatttttaaaattgttttttttcaaggaaatacctctaacataagaatttacaaaataaatataaattttcagtttatttttataaaattatgtatagatatactgcagtagaagtgaaactaatgccattggggcataaataataattttagcacaatcactcgcattcattcccgcaggggccataggtgaaggggaaaaagggaaggggcgaggggcattggcaccgcctaacgcacaaatttggtattggcacttctaacataaattcattcattcattctttccgcctccctccctccccccgtcccgcgtgggaagggggtggggtaaaggggtgtaaaaattcggttaaaatatgcggaaatatccccgcagggcattgattttaggcacaagaaattcttccgctagccaatgtgtgttattatgccgcgccgccccgcgtggggatgtgagattacttaatactaattgagggcggtgctctttttgatgtttatttatttataagctacaattttaaattagctcgaatttgtttgtcatcaattaattgaacaaattggcaattactgtagagtattaatttctttttgtgttcgtcatagcaacattgtgttaattgttttctatcaaaaatttgattatgccacaattaactaaaaacaaacaaagacgaacatggaaacagtttaagtgaaaaatagttaataaa

SEQ ID NO: 61508 - DNA, 83 bp, Heterodera glycines
gatatcaagaaaattttggcagcctaattgtcaactaaaaattatataaaacaaatttgtataaataaatacgaataattttc

SEQ ID NO: 61509 - DNA, 540 bp, Heterodera glycines
atgtacttagtattttcgggaattcattttggcttggtgtttaggtaaaatttaaatatttggttggacaacgcactgggtccacgatttacctaaaaacatagaaaaacctctaaaatgagcgcccgtagcaccgtcggttagagcattgcacagttggaaaggctgtgggttcgagtcccaccgggcgagtcaccttttatgcttttttaaacaaataaatatttttaaaatactttcaaagaattggcaattttggtgcccaaattttgtgcgccattttggcttacaaattagtttaacacaacaccgagggaaaagaaaagtaaattagttttataaattaaattttctttttttagaaaatataacttggcaaaaaacgattttattagcaaaaatctgattgaaattgatatgaatcttttcattcgtccaatgtcaacaccaaacacaaatgtcgaagttggcacgagttcaaatagcagcgggtgaaaagagaattttgaattttttaattttttaaaaataattaaatta

SEQ ID NO: 61510 - DNA, 650 bp, Heterodera glycines
atgagctggaatgagtcattggagcagaacaattgcgagctgattaatttggatgagattttaaagaatgcgggaccaagcggagagaagccggtgtctttgatgcaggtgtacggtaggtaattaaccatacggcttggcccgaagtcctcgaggtcatttattccactcaataattgctaaaaatacccacacagtgttacatagtgtataaaaagcaaaaaaaaaaaaaatgacatgattatgcgaattcataattacatagaaataatctaattaaaattgaactgctataatgcttttccgtttttaagtgtgccttccttcgagccgaaatggtcctgttttggtcctcctggcgaccacttttgtgtcggtacgagttattttcatgtgtttattaagaaaacactagaacaataatcgttcaaaaacagctcattgacttcaaaacgcgcaagcacattctgacacatccgatgacggacattcttttgcaagcggtcgctgggagcaaacggacgctaaaagcaacgccatttaccagaggtgtaaaaccaaaaatgagggcccagattttttagtttttcagtttatttaaaattataaaaagttaataacaaagaagaaaggtttgcaatttaaaaaaa

SEQ ID NO: 61511 - DNA, 1151 bp, Heterodera glycines
  unsure (1)..(1151): unsure at all n locations
aaagacacccnttggacaaagaatttattcagaaagtgattgaagaaatacgaccattatacggtaaatatattaaaaaggcatatcattagggatgagattttaatatttaaatgaatatgagttagatcgatttttgtaactcaatttattccctttatttttttccaaaatgggttaaaaaattttagaaaatattttggcttactctcgcaaagttacatagatttgagtacacacacacaaacgggttgccgcgggacttggaaaacatagggaccgggattagggttgggatggatcaaaatctttcgggtcacgacgcagattttggggcgcgaaaaattgggaacgggattcgtgccatgatggctaaaaaattctggtcgggatttgggcagatacataatgggactcgggctgaaatactgatgcatacgaaatttcatacacaaatcagcattttaatgcaattaattttcatcttcatcataccatgtaattttttttttgatttcttttattaatagcgtgaattattaataattttttctgaaaatgaagaatggtaaattcattctgaaaattctattacaaaaacatttgttattttttaatttaaaatttatttaaaacgcagttgaggcgatcagagaccatctaaatatattggtcaagttgaactttttggagaatgacaaaggctttaaaaaggacgcaaaaaacatggaaaatttggtatgcaaaagagtcaatatgttttaaaaaataaacaaataatttagttaaagtaaaaattgatggctaatggatagggctggggattaaattcacaaatataaacttaaaatataatttttttagatattttaaaggtggattttttgacattttcttttgaaaaaaaaatttttatgttataatttttttttaattttttgtattttcataagaaagtagtttcttactttttagagcatgtcgaatccagaaaaaatatatattatatatatatttaaatgaaattcccaacattgtctaataaatataaaatttttgtatgtatccaaatattgtaactcgaaaattacagaatgcacttgagaatcagcttatcgccaataaggcatgcttaatcannggaagatgag

SEQ ID NO: 61512 - DNA, 205 bp, Heterodera glycines
atggccaatgataatccatggaaagggaacggaaacgacggcacaaatcggcaaaattcaaccggcggattaattagcacggcatttactgaggagaagaatgaaaagcgcaaaaatattgaagaagcagaaaaagacgaagcgtacccgagggaagcgaccacatggacagaaatggccaaacaatggccaaagtcgaccattt

SEQ ID NO: 61513 - DNA, 361 bp, Heterodera glycines
atgaaccgacggtaagcacaaattcgtcatttatttacctaacaaaacttttttcagttggatttgcaacgacgtttggatggacattttcccatcctttgaccgtcctcaactcggcctcaaattggcacttctttcgccacgtttcgatgcattggtggacaaacatttcgatggcaaaagcgaattgacaatttggagaactatcgaaattcgtcgcaagggcattggaccagaaacgaaactttatgtagagatcgattacgaatttgtgccatttccattgcccgaccgtccgttgcccagcaaaatccgttttaaatggcttcggattgagtaattcggaatcagagctatgaca

SEQ ID NO: 61514 - DNA, 788 bp, Heterodera glycines
atgaaccgacggtaattaaattaaaagtcacaaattcgtcgtttatttgactaaactgttttcccatttcagttggatttgcaacgacgtttggatggacattttcccatcctttgaccgtcctcaactcggcctcaaattggcacttctttcgccacgttttaattcgctggtggacaaacatttcaatggcaaaagcgaattgacaatttggagaaagatcaaaattcatcgcaaggacaaaggaccagaaccgaagctatctgtacgaatcgatgacaaatttgtgccatttccattgcccgaccgtccgttgcccagcaaaatccgttttaaagaccttcggattgagtaatttaaaatcagagttatggcaataaaagctttccttccatttttaggtacattgatcactccgtcatcgcttttcttcgttcaaatcatcaaattttcgacaaaagaggcaccgatttacagttgtttggccaattttttcggcaaacattcgccacttgcgcttttacgatggtgatcatttggaccatttgcttcgtcaaatttcgccgacaattctcatcgatctcaaccaattgacttcaatccattcatttgatttgtttcccgctgcgattgatgatggttttgatgggccaaattcaacaatttctgctggccaagcattgtccaaatggttgcactctccgagaaaagatggacaacccaagcgattgcgttgcggtaattacaacgaacaaacggactttgattggatcaacaatttcaaggag

SEQ ID NO: 61515 - DNA, 857 bp, Heterodera glycines
ccgacttaatcaaagaatggttcactgaattcgtacaagcacatgaaaggggttccgatatcagtggaagagatggaatcgacatggtgaatttttattatttaatttaatattttccagaaaattatttggcgctaaaatttctgtttgggggttttccacttgaaattttttgattatttaaatattttttttaaaccaatttttttttcgaatttctgaatagggtatatcaattgctcagggcttttgccgtcggcatttttgccgttggcgaatgtttgtggcataatttttttaatgaactgtactaattctttgaaaaattatcattattattcaataaattcattccattaatttattaattaattgtccagggcatttgcggtcggcatttttgccattggcggaatgtttggtggcattatggttggcactgttgcggacagattagggcgccgtaaatcacttctgtacaacaatatattggcgataattgctgcggcactgatgacactggcaaaatatatgaatgtttattatttgatcatcattggacgattcattattgccggacccccctgtacgccaaatctcattgaaaaaatgtgttgtaaaaagggttttgaaaagcaaaaaaggtcgatttacatggcttgagataactctaagctaaaatgtaaaaattataagattttttcgaatttttaagcaaaatttcaaaaataatacaggttgtcaaaaatttgcctgtacctgtacctggatccaggaaaaatacaggcctggatccaggtacaggtcgatctctaaatgaaattattttgcgatgtatgaaaggcccagtattgtaa

SEQ ID NO: 61516 - DNA, 979 bp, Heterodera glycines
atgccgaacgacctgccgggcgtggatgcagcaactgaccaacggagtgtcctatttgcacgaaaatcgaatcgcgcatcgggacttgaagccggagaatattttgctcttcgaacgtggcgttctcaaaatcaccgactacggcttcgcgaaacaggtaatgaatgccacgcttcaacacaaacgttcaatttcctttttcagtgcgatgatggcgacatgtcttcaaccttttgcagaactaagctttacaaggccccggaactgctgcagaaacatgaatatgacccgttcaaagcggacgtttggtctgttttgttcgtttccattcactgcttttttcatcttcccttttcatttcaggtcacttggcgtcatttgctttgttatgcggaccaacacaatgccgttcagcagaggcgtgagccgaacacacatggtggaggaacagcgaaacagtcaataccgattcccttctcacttggtcatcagtttgcagtgtcgcggcgccattgacacgattttgacgtttgatccggagcagcgtccggtgagcactttttgtgttttttgaattttcaatttcaattccttttttcagagtgtcttcgatgtgtcaagtttgccgtggttttccgaagatgtctctgaacgttctgggagttcttctgatgtgagtgccaccagtgatacaccgctccttaatgtatttacttgcctctgtttgtatatttctgtgtatttgtgatacaccgctccttaatgtatttacttgcctctgtttgtatatttctgtgtatttgtgatacaccgctccttaatgtatttacttgcctctgtttgtatatttctgtgtatttgtgatacaccgctccttaatgtatttacttgcctctgtttgtatatttctgtgtatttgtgataacaccgctccttaatgtatttacttgcctctgtttgtatatttctgtgtatttga

SEQ ID NO: 61517 - DNA, 380 bp, Heterodera glycines
tccgtctttgcatgctaccttttgcgaaatttttccttttaaatggttatttattttggtactgaagtgtccattttctctgggactcagttgtcccagtgcttagatggcattggttcgagttgataccttgttttttagacttagctcatcaagagctttcgaatgataccaaatttgtccgaatttgaccgttttaaaaggtcaggagccctctttttcattcaaattttcgagttttaaaccggttcaaaaaccagtttaaatgcttttccgcgcccaattttaagcttttctatcgttcccagtacctaagaaaacctataaaagtgtttttgtgcgattttgagccgataccatattcggcaatttttcccaga

SEQ ID NO: 61518 - DNA, 259 bp, Heterodera glycines
atgtctttacttgtaagtttggggtcagatgcgttcagaactgacggcacactacatagtttaatataaaaaatgttgtctgccttttttcaaatttagctggcgtaattgtaaaaagaaaaatacgaaatattaccgggatacaaaattaaagtaacgggactttttagaacagaacgaaaggatttatttggttaaggataattgttggaaatcgccatagatttggaccatatgcgaaaaattcgcggtgaacgta

SEQ ID NO: 61519 - DNA, 5562 bp, Heterodera glycines
cagttttcgcgacgaagagacacgatttatgcgcgatttgaacttgttggtcaatgttttcaagcggcgactgtcctccggcattggcaccgacgcgaagggaaaggtccgactgaattcggtcccttccttaagaaaaaacttcgtaggggaaattgcttatcagggccatgcaatttgctccagcatcatcgtttaaaaatttcagcacggagcgaaaaaaaagaatttataccgattttgcgccaaaaaatgacaattttgccattttcgggtcaaaatttgaaaaagggtgaaatgggggtggtatcgttaggcgtcgccgggaaaaaatttggaaattttaatgaaatatggtaaaaaaattaagttaagtttttcaaaaaatttgtccattttttcttgaaaactttggctacggcctgaatcttccctcaaaattttacccaattttaaggatattatctccaatctgttcggaaatgtgcacgaaatcctcgagttgaccatcaaaatccaccggaccattgacgatgccattgacatgtccgacccaccgatgctcggaatgggcctttgggagttggcggagggctgcgaattcgacgcatacgtccaatttatggtgggggggggggggacaaatggggaaaaaccgaaaaatcttaattttatttttggaataatttcaggaagtctttcgcgaaccccttaacagaaagttggccaaactgctgaaggagacaaaacacatggaatattttgatgtaaggcaacaaattttgaataatcattttctttttttgaaaaataatttacatattataatatttaaaaacggtttcaccttcgaacttggaacaaactctgctcaatttcccttcttaagttttttttttaaaaaaaaaaaacgttttttattcaaaaatgaaaatttctcaaactaaagacaaaccataaaaagaaggaggacacttggaagtccctgctttacattaattttaaaattttgacggctgcctttttttctccgaaaattggcattttcagcttgaagaccgaatgtacagcggcacacccggggggcacacttttcgcatgaccgtcaaatatgttttgcctgcactgctccattcggtggtcgcccatttcaaatgttactccgaatttgtaaaggttggcaattcgttgccaatttaaaatattcgaaaaattcatttatttttcaattagctgataatggaggccagtgaccacgaggcggacagaaaagacttgtacaacacggacatgtacctgaacatggtgacgaaacgaatgaacgatttgagggggctaatgtccgcccaagtgtaagccaaaacaaaaaaagggaggaagacggcaatcttcggaaattacccttaattttgccaattaatttccatttcccgcgcctcagaaatgagagaatagcgaggggaatgcgccgggacaattcgcgctccttccaattgagtgccatccaacgcattcagcgcagcatcgacgggtgggagggcaaagagatcggatacatgtgcaacactttcatacgcgagggcaaactgttccaactgcgcgggtcgacgacaatcgccggttggtgggggaaaccgagaaaaagtcatttttattgaaatggacgaacgaattcagcggaaattgttggaagagtcaatctgtagtcagttgaacgacttccaaaagtctttggatggaaagccgggccaggaaaagctgggaattttacccaaaatgagttttttgaattggccaattcactcttaaaattggttagcatttatgggttttccatttcatcagataacattctgcgcaatcgaagcggagggactgaacggcacgtgttccttttcgaccatttgctggtcatttgcaagccgaacaaaccgatgaaaatgagcagcagcgcccatcaaacgacggccggcaatttcaaattcaaagaaaaactgtacatacgacgctgtgacatcatcgacttggacgacgaccacggtgaataatgccaataatgagttggggaggtccgaaagctgagattgtgccgatttcactggtggggtgatgaccaattgacaatggcaattaattccctcacccctccccctttggtgtgccaatggatgcctttaacaaaactcatgggttatatttttcccaaggttaaattgaatcttgctagttgcaataaatcatgttagacaattggcagaaatgaaaaacgccttcaaaatttgcacgtcggcaaaggctggcggcaacgacgagtacatgtccatgctgactttgttctgccaaagtccggaagagaaggagcaatggatggcaggaatggtggaaatgcaaacggcagggtaaaggggcgggggacattggcacatcctcggaacagacaatcggtccatcctccgaatgtgacatttcatttttacccgatttcgtacacaattgaaaaatgaatttgccaattttttgcaggcaattgtttccggaaatgcgtttgatattatttatagcctcacaatcagcattattttaaaagggcaggaacttacaattagctccgaaaaaggttgataaaattttaaaaaatccaaaaaacctaaatattctgtaaataggtactgtaagttttttcatatcaattcgctgtaaaaatttcaaaccatcacactaccgtatctcgttttcatgaaattctgactcatggacgcattttcgataactgtgcaagaaaaccaaccaatttccattaatagttatacaatttaaaaaaaacatcgttaattcgatttttaaatttctccctttgttttgtcagtgcggtaaaaagaagaataaaccgtataattcgatcacttttttcgcgtctttcattctcttttttcctcgaaattgatctcaatgggccaacaaatcacttcaaatgtttgtgtaaagaaagaaaggtaaggcgaaaaagaacaaattgaaaaggaattaattcttttacatttgtcccattggctggcattgcgcaattttcccttactttttgggcacttttggaaatttttacacatttttggcactttgaacagaacactgcagcgaatgttggacgcccatcagaaagaggaggagaagcgcattccgctgatcattcccacggtttccgagtaccgttacgcggagccggacaccgacgagaacatcattttcgaggattacacccacaacagcggcatccccgtggttcgtgccggcacagtgctgaagctggtcgaacggctgacgtatccgcagtaagtaaatgtttcatgaaattaattctgaattttgcatcgttttccctttgggtacaccgacaacgaatttgtcaaaacgttcatgaccactttccgctcgttctgttcaccggccgaattgttggcacttttaattgaacgctttgtcattccgacgccgcacattttcatggcattggacccgcagcatttgctgtcatccgtgatggcgaactcatcctggttgtttgtttgtttttttcatttttgtaattattttggcatgtttcgttagcaatgattcggcatccctctcaaatggttctctccaacattcgcaactccattcgttcgcccacaatttgtcgcagtcccaacttgagcaggcattccacaaattcaggcaggaataccaaaagcccattcagctgaagtgagtctttattgtgccgtcataaattggcagtgccattgccaaccattcgctgtttctcagagtgttgagcatcatcaaccactgggtgagcaaccacttctacgacttcgagtcggacgcccttttgctcgtccgtctgatcgattttctgagcggaaacgaccgatccatcaaattgatcaccagccacaagaaatggtgcaccaagattcaggtagaaaatgccaaagatttgctggattatcctgccaatgttttctttccttcttaaaacagtggcaaaaacaaaggcatttttaggaagtgataaagcgaaagcacaggcatcaacagcaacaacaacagcagcaaaatcagttggactcggctggtcactcggccgacggcgaagtggcggacagcagcaacagatttaacaacagcaccagcacagccatgtcgtcgtcgtcggcaccgcccgcctccgacagcggcaccgccggtgtcccagccgcagcgaatgctgcagcgactgcgttcagtgtacagtgtccggaagtgagttgggacggggggatgggatactgtagcatacagtaaaataaatgatgaaagtgaatcagaagacagacttacagtttaaactccatccatccattcatttttttgtttagcccgtttggcattatgccaaggagggcgaagtcgacgcctacgaccttctcacgctgcacccattggaaatcggtcgtcaggtgacccttctccaatttttcctctaccgcgccatcaaacccttcggtgattttatatattttttttgtgttttcaaatccgttttaagaactcgtcgacgcggcgtggacaaagcgcgacaaataccagcggagtccgcaattgctgaaacttatcgaccacagcaacaatgtgaggctttctttctaagaatttgcctaatgcttcccttggctttttagctcacttattgggtcgctcgttccatcgtcgagaccgaatcgttggaggaacgcgtggaaatgttttcgagagtgttggagataatgaccgtgtttgaggagctgaacaacttcaacggcattgtggccttttttgctgcgctgaactgtcaaccggtgtatcgattggacgaaagcaaatcggtgggtgaaatgggggcggatgagtacatatatctaaaaaacttgccaatttttgtatttgtttcagcgattggacaaagagaagaagggatggtatgaccattatgtgcagttatgtggcaatggccatttgactgaactgctccaaaaactgcgctccatcaatccgccatgtgttccatttgcaggtgaagaaaaaggcgaatgccaacaaatcaatgttcattaattgtttgtaggtacatatttaacgcaaattgtgcttcgtttggagagtctaaagcaaatggagggacggatgaaccaacaaacgacgaaagcggccgaattggcaatggcaaacattgaacagcaacaggtgggcaatgaagaggaaaaggacgtggccaatggcacggcgcccaaacgggcacaataattgcttttgtcgactccgaattccccgatttgccatttttagacttgtgaacagaatgccgactccgcttccgtcgccgcctccgccatgtcaacggaacggtcgccgctgcagacgcccaaagggaaggcggacgcggaaggggccgcgcggaaaatgatttcctttatgaaatgccgcaaaattgcggcgatcattcgcgaaattcaaatgtaccaaaatcagccctattctctgcgagtggagccgaccattcgg

SEQ ID NO: 61520 - DNA, 588 bp, Heterodera glycines
atgcaatgttcggtggacagcttggaaatgatgaaaaatgagcaacaccaacaacagcagcgcgtgatgatggaaacttcggtggactcgttggaatttggcacaaaaatgacaacggcacaacaaaaggacgaagcagaaatagaagcattgttgctggtcgaacgagactcgttgagcagtgcacaaagtcagcaacaggacgacaacgagttggagcagtacagcagcagtcgaacagggacgacaatcacgacgacaacgaccacaatgacggaaaatgagcggaaagcggaagagcaccgtaagaaaacccctgaccgggacaccgtaatggagttaaacgatttttcggttttgtgcctatgtgaagatagacaatctaaaaataaaaaactatttgaatttttcatatttttattggattggaagaagtttttttgaaatagcatggaaaaattttcaagtaatgagctgatttgattttataatttttttcccaattttttaaattttaattatttatttttagcaacatcatcttcattcccattgcctttgccaactgctgctggaggcaatgggtaa

SEQ ID NO: 61521 - DNA, 182 bp, Heterodera glycines
atgaaacaatttcgcatacaaactcttggctttcgaatgatagcagggttgtttgtgggtccgggtccgggaaatgctctaaaaaggatttcaagcacttttgatcgggatcttttccaaaaaagaaggaaaaggaaaagggaattaaatgggaaggaggcaagcgactcggtggtcaagtg

SEQ ID NO: 61522 - DNA, 191 bp, Heterodera glycines
atgagcacaatgatcgaatggtaggcacaaatgctgctaatacatgttatttgtttgataaaatttccagcagtggtgtggtcaacggcgaaattgatgacatgaatgatcagcaggacgatgatgatgctccaacgtcaactgtttatctgaatttgggcaaagacgagcgcaccgcggaaaattattaa

SEQ ID NO: 61523 - DNA, 677 bp, Heterodera glycines
atgctttcccaagaggaagacagagggcgtagtgtggtaaattaaaacatataccaaaaaaaaaacataaataaaatttacattcaggagcgaacctctgtatgtggaactgaaggatctgatgatttgtccgggcgactcgccggaatgtctctcacgttgcggacgagcgagcagcagcagcagttattaccagctagcagtggacgagttggatctgcacagcgcaagcaacagcgacgacgacaaagagaacgacgcgacttggtgagagtgctctgccgattcaaccgatgttcgccaacttggcttcacaaaatgcttcagaaaaggaaggaagaaaatgtgaaattcttgaacaaactgtcattagccacccatcacctgaaaaggaatgtagctgtttccgcagatgcgctgtcccgacatggagccaacatgatgtttgcctaccgtggattcatgggaataactgttcaacaacatttatatgtgcgtcatcgcattatgctgaaatatccccaattaccatgtgttgtacaatttggtggcaacagtcaccaggacaattttccaattgaattactccatgttgtttcagaagagcaaaagaccgattaatatgtttattctaactattactatttttctctaacataatcatgatgaagaataaa

SEQ ID NO: 61524 - DNA, 581 bp, Heterodera glycines
atgaccatctatcccaacttgctgaagcatgccaaacaggaggaggccgagatggacatcaaacagttcgcttttgccttcgtttgcccttttcatttgccctgcctttttcagatacgaaatgctggtgaaggtgcagtgcagtgccgacttcaagttcttcctgtgcactttgttcacgcccgtctgcaccattctcaacgaacccattccgccgtgtcgccacctttgcctttccgcgaagaacggctgcgaaacactgatgcgcaaatttggctaccaatggccagagatattcgactgtgacaaaatgccggagagtcgggacggaatgtgtgtgggggagagcaaaacggaggaaacggacggcggagcatcggcggacggaaagggcgcggaagagccgacggaaaggggcggaaaatgggccatggaatgtccgcacacaatgaaagtgctcagcaaacgaaggtaagcctaaattgggggctgaagtgggttttgtaatgcaaattcacttaggaaatttttattcgatattttttatatgggattttattgtttttttctctcttaattaa

SEQ ID NO: 61525 - DNA, 954 bp, Heterodera glycines
atgagtgccgcgttcttttgcccttttccacccgaaaacggcgttcgccaattggcggctccgcgtaaggcattcccaaaaaggcgaaaacggacacattattattgcccgggaggggattcagttcagaatgggtccgatcggctgggatttgctcgtttgggtcttgccaaggcgtccatggcaaatttggaatggtcacacggaggccgaccacttcgccaaccgaaagacgcaccagcacattcccccgagattcatcctaaaggcacaaatgaaaagaaaaacacggaaaaacagtcgaaccgagccgaaactattcgcagtagaagtgctgaaaaaggaaaaggcatgacaaaaagcaaagggacattcggcggattcacccaaaagagtcccacaaatcgacacttcgcgtcggttcgggaaattggcaatcagtgaaaatcagttgggcaatgaagaacagaaacgagaagaaatccattagctgctggaggtgttgaaatttgaaaaaaggggacaaatggacgaaggccaatggatcgatggagaaaaaaatggaggggaaaacggatgggaggagagagagagggaaagatgggaaggagggagcaaaacaaaaacaaacaaagagagacgaacagcgaacggacgacgaacccgccattcccaactcgcagggagaattcggaggtccgaagtgagggaggggggggggggcaatgaccaaagcgacagaagagagaatccctaagacgccaccttaacgcttttatgatttgttatcaattcacaaaaaatttgtttgtttttttttgaaaattcgggatcattaaggaaatcattataaaaccttcaaattttgcctgatgaatgaaaaaagatatcctacaatatcagagcaaaggctaatcgcagtgaatttttttgcatcgcaatagtcaaaataaa

SEQ ID NO: 61526 - DNA, 138 bp, Heterodera glycines
aaaggcatgcgcacccgtccgatccgccaagttaagcaacgattgctgactagccaaaaggttcggtgccgtgatgaaacgaaccagcactgcttaccccgcggcacccggcacggtcccccgaaggaatggatttaa

SEQ ID NO: 61527 - DNA, 894 bp, Heterodera glycines
atgtatgaagattgcaacaccgtttttgcacggtgccatgacgcgaaaaaggcgcgtctcttcattactttcacgaacaacagggaatggcctgagttcaaagagaatttacacaaaaacggtcaagtatttactgaccgttttgacatgtggatgcgtgtctggagcagcaaaatcgctgagttccgagaagaactttatgacaaaaagttcttcggaacaatccttggttacggtgaatcaatggagttccaaggccgaggaggcccacatgcccacattgtggcgcaaacagacctggacgcagttccatatgtcattcaggaatacatatgggcgcacattccatctttgcctgataaagatgacgacacgcccattgcaaaaatgcatcgcgaaatccgcgaaacaatgcatatgcaactgcacagatgcagtgacagttggtgtggtcctagcgacccaatttacgggcggtgcaagaaggggttcccagccccttactcaaaatgtacgattttgcgcccggacaggcccgcgatgtatttccggccttcaccatctgatggtggtgcccaattagaggtaaacggcttaatatacgacaactcacatgtcgtgccgtataatccttatattctgctgcgttaccgagtacaccataatgtactgtttgcatatggtaacaaagcaaatattaaatacgcactcaagtaccctttcaaagggccaggacattgttatgtcgagtgcaaagaagagtccggcaataaaattggaattgatgagccggctcaatatgccaagatgaacttccgtggtgcaacggaagcatatgccattgttcattcaatgccatttgcccgtctttcgcatcatgtggtcaaattgtga

SEQ ID NO: 61528 - DNA, 355 bp, Heterodera glycines
ttggccaacgaaattgctcgacgcgttcgcattttctgttggattttgaccggcaaacagaaccaccaaaagcgggccattcacgtgaaggcgacttgggcaaaacggtgcaataaatttgtgttcatgtcatcggaggacgatccaacattgcccgctgtgaatttgaacatttccgagggcaggtggcgtatttaaaaaaatatttcaaaaaatttgtttatgcgtaccagaattgtttcgggtcactcgaaacccaatatttttctcgtcccgaatcccaacccgatgattttgggcgggattcgggacaaaataagaatttatattaaatttttttgaaacgattgtgttc

SEQ ID NO: 61529 - DNA, 336 bp, Heterodera glycines
atgcatctactgttctcggtctgggaggcggttctgcatgaggcggaggacttgatggaggataatgagcgggagttggaggaatgggtggggatacgagaacgtctcccaggcggcggtggtggtggaggaggagcgggaggactaggtccacgtcgaggacgtctcccaggcggaggaggaggtggtggcggggcgggaggtcggggtggtgtgtctacacctctcaatcttcatcttcgccgcctttccttagcagtacacttattcctttcgtcagctcaactttggctggcctatcttcaagttccctcctcattttcaagtatcgcctaa

SEQ ID NO: 61530 - DNA, 378 bp, Heterodera glycines
atggagcggcataagcagcaacaagtaaagattggagagctgataaaacagaatcgcgactggttgtgtgctttggccaagacgaaatccggaaaaaaatgcaggaaacttatacgaaaagcaaacactgaacaactactatcgctggttgaaatttgtttgaatctcgtcgcttcgcgcttccatttgacaaccagacagaagaagcgactaatgccttatgtggatactgtacgccgaatcagcagagcgagaagtgaacggggtgccaagcgagtgcttgtccagaaaggcgcaggatttggcggattgttcgctgccctattgacacccgttctaatggaagtggcaaaatcctttgtgaacaaaaacgcataa

SEQ ID NO: 61531 - DNA, 820 bp, Heterodera glycines
taattaaatccattcctttgggggaccgtgccgggtgccgcggggtaagcagtgctggttcgtttcatcacggcaccgaaccttttggctagtcagcaatcgttgcttaacttgccagatcggacgggtgcgcatgattccactgttccaagcaccccaccaaaagcaaaacgatataaccaaaatataaggaaaaattttttaaaaaattttttctccatcttcctttttgatactaaagcatcagagtgctaaaattaagttgtaaataaaatttggtgcgctttagagcgactttctgaaaaaaatatttatgaaacaaaaaaatcgattttttcaagtgtccgtttggggtactcaaacaattatgggggagcaaaaatccaacgcagaattaaagtacaggctatagggaagctattcccgaaggattcggtctccccataaatctgggcgcatcggttcggggggactgccccgaaaacaaaaaaatcgattttttcaagtgtccgtttggggtactcaaacaattatggggagcaaaaatccaacgcagaattaaagtacaggctatagggaagctattccggaaggattcggtctccccataaatctgggcgcatcggttcggggggactgccccgaaaacaaaaaaatcgattttttcaagtgtccgtttggggtactcaaacaattatggggagcaaaaatccaacgcagaattaaagtacaggctatagggaagctattcccgaaggattcggtctccccataaatctgggcgcatcggttcggggggactgccccgaaaacaaaaaaa

SEQ ID NO: 61532 - DNA, 870 bp, Heterodera glycines
atgacattttttcttatattgttacttattcaccctgttcacttttttcagaataatctggcccgaactgttgaaaccatcaaaatttgccttcagtccattctcgcggcccagcaattaaacagctgggacattaatcattgcaacgagggaatttacgtttatgattttttgttggtcgagcatttgtcgaaaaataactgtaataatattaataaaataaataaatatttaattttttttaagattttgtgtcggtgcgctcggttatgccggccaacagtgcctttggattgttttactttgaaattaccattatgcagatgcaatcgtgaatttaaaatgttttcaaataagtttgattatattaagggatgttggagttggacttgccccagagcacatgaggatgcatgaattggtcgggcattttgaggcaagcattgcgttgtggagcgacgggtctatccacagcaaattgccatatgtgccggatgtgcttgacggattcgcacagtttggtcccggtgatgttgtcggatgcggaatggacgcaaacaaccggggcatttttttcacattgaatggccacaaaatttgtaagtaaatgaatggattcaaaagacaaaacaaattcgaattgtttcattcttaagcaagccaatttttgcaagccgaatcgtttcacatgtatgcgtgttgtactctcgtggacatgaatgactccgtccaggcaaatttcgggcccgactttctgttcagcattgtcgacatgttgcccttctgatgggctgtttgtcaatttgccagtggattatcggttgggaattgcgatgttgataataattttcaacactgttaacaaataaa

SEQ ID NO: 61533 - DNA, 542 bp, Heterodera glycines
atgaatgaagatttggcattttcaattaaattttcgaattattgccatcgaaacggcgacggcaatggcacaaagaagaataacggacagaatgtaatagccaagaagcggaatggaattgctctttggcatcgcaccggcgacaatgcccagcagaacggtcatggcaagaagagaaccaaggccaagggacacctgagaagaaaatgccgtgtttggagggagctggggatgggaaaggggagtgatcagaggataagggaaaatggtagtgatcgaaggggagggaaagaggagaaatggaataaaagcaattaaatgaaaatgagtaccttctcactgcgcggcccttcgtttgagccgggcgtgaaaataccgagaatagaaagagcggagatcagaaagatgggcacgacgatcacagtgatgtaaaaaatgggacgacggcgcaaattgaatacgaaatggacctgatcagagaggaaagggttaagtagtgatcagagcattgggcggcaattttcagagagagtgccaataaa

SEQ ID NO: 61534 - DNA, 1190 bp, Heterodera glycines; identical to SEQ ID NO: 31159

SEQ ID NO: 61535 - DNA, 616 bp, Heterodera glycines
atgggacaagctcgtaacaattccaaccgtttgtctctccaggaactgatcaaagagttgggtgccgccgtcgagctgaccaccgccaagtcggacgcgtttggccaagcgaccgccggcggactcgcccgcacgctgctctccgtgtacatttttgtcagcgtcatccgcgaggtacgcctagtggacgagcaacggatgtgggacgacgcgttggcggtgttccgcgcgtgcatttggggccaaatggtggagcaatgggcccacgtggtggacagcatgacgcgggcactcgtcctgaacctgtgggttttcgtatcaatgcatctttgactttccagagccatgcactttttttgaaaaataattggcttaatgatttcttttgtttatttttgtgtgccgtgaaaatgaatggggaagggtaaactcatttttggacccgctaaaacccatcgaaatcctatcaattttgttcgcctaaattttgaaaagataaccgttaaaaaattttgttttcattaaatttttgatgtattttggtggttcctaaaggcattggaaatttgttaattgataatctaaaaattttcaacttttttgaatggaaaataaa

SEQ ID NO: 61536 - DNA, 929 bp, Heterodera glycines
tcctattgcgagggcgcctccatttttgtggacgacgtcccatcctcatcatcatcaacagcatcatccgccaatgctcgtcatctccatgctggttcatcatctgcatcatcctccgtgccaatttgttccgctggcggttccggcgccgatgtccgtcccgcgcgcgcactgccaattgtacagcccgaacttgtggagccgtcaaccgccgccgccggcaatgccaacaacggcgcaaacaatcaacagcaactgttgctgcaacaccaccaccatagtcatcatcaccaccatcatcatcaacaaccatcgtctcagcttagctatcatcagcaccattcgtcctcctccgcctcgtcggtgtcttcgtcgcccacaaattcgtcgtccgcaaagttgcgatttcgggaacgggcacagaacctgcaggtgaatgaacaacaaataagaatttcgaaaaaaaattaagaaacttcagcgaattttggaaaactttggaatgaaaaaccgctcgtaaatttttcgctaccaataagttttttttgaaaaattctacgggcaatttttttttaatgaattttcggggcgtccagagggaaatgaagtgcacccaattttatttgtgttttcagatttatttggacaaatttctcgagtacaccactcgggagacgaccaaaattgactgggccgacccggcacggcgtgcggacaccgtcagcttcatgttggaccgcgtgattgtcgcctacattttcgaggtgttccccgacgcggaggccaacggggtggacgtgttcggcggctgggagggcacctcagctgatgaggcggaggaggagggcggcggcaccggcactgacgcggacggcgccattgtgcagccaatgctggacactgttgacccgatcatcatcgccaggtga

SEQ ID NO: 61537 - DNA, 1143 bp, Heterodera glycines
atgttgcggaaaaagccgcaccaagacttgcagaattcgttgaaccgcttcgcggagtggggccgggacccggtgtccagagcaaaacatttccgcaatgcctacgaatgcctgagtgtccaggtggggcattattgcatttttaatgcaataatcgaacgcatacgaaaagttggatttcatggcaattcgtagactgaaaatggactgggtatttcagtttctttgagaattcttggtttaacacaacatttaattcctggtagttccttttgtttaacaaaaatcttaaaaattttgagtcgattgaaagtgtttatgccactgatttatgctgtccaatttccaggaaaggcgccaactcttcgaggggttcagtttcgaaattttccacctgatcgatgcgctttttctcgcccattacgacgcggccatcgtcgacccgcaaaccatcgccgacgtcgagtccgcactttggatcctggagcaggccatgtgttgtgcacccgaacttgtcggaaagggtgaacaataattatttccgcaaattcgaggcccttgatttgggttggaaacgcttaattcatacaaattggttttcttgggttgtggtttcgattttaggaaattttttacaattcaactataaattttgaaatttcattgacgctgcccaacaaaaccagccggaaacacatccatttgttttcttacattgcgaatttggcttgtgacagtttttgggtccaattatagaaaaccatcccgtaaaatggcgaatatttgttcgtttttgcgtttatttctccatttcctgtctcactccctccatttactttcgctttttaggctggcaaaagaatggcatcgaatttgtgctgaaaatggcactccatccggacaatgtgttggcggtgcgcaagttggccatccgtctgttcctgatctggtaccaggaattggccatgtttggccacacaacgcgctgtttggacaccgtgttcaagtgctgtttgccgcactttcccttgcgcaaccgggcccaatctgaccaacttttactggtacgaaatctttttcgggcttcatttttcgtttttttgagtcctattttaaaattaacactgctgaaaccctaataaa

SEQ ID NO: 61538 - DNA, 1149 bp, Heterodera glycines
  unsure (1)..(1149): unsure at all n locations
tgagtattcaagacaaaaatatgaagcacaccttggaaaattgtggagaaaaatttgaagaatatttaaaggaaatgttcaaaaaatcggaagaaaaggcaaaaaaagataaacaatggaaagccaatgaaataaataatggcaaacatttaataattaagcattcgaaatttgatgatcaagggacatgggtgaggagacttaacaatcaatgaaagttatataaatccaaattttagactgcagatgctctattttcggaatttgtcaaaggtttagcgacaaaatcagagaaattttttaaaatggcggaagaatattcaaattatttaagtcgaagtaaagagaaagttttatttgatgaacaagcaccaataattgttgggttatgcgaatttgtggaaatgaaaaagcatttggccagaaaatatgaggcccatcttggccttgtgtatttgatgcgagcgaattggcaatgttcctattttttcaattttattcattgctggggacaatgccaaaaatttcgcaaatatttggacattttgtacgaatatttatttcgactttatgttgaaggttttatttttaaattaatgatttttaaatattataatgcatatttaaggcaaaagcaatgaattgacctataaattaccagcagtgaagccaatatttatgaatcattataagaactcaatgcaattaatttcagtcgtcagggctctaaatgaaattgcgatattattttggtcaaacgacaaaaacaaatttgaggataatgattattggaagatggttttggtaaatgatgtcgaattgaattatgagattaaagaggagaaaaatttgtttaatgaatttaaacaaaatattttgaaaaagtttaacgcaccaaaaaatatgcaaaaaaatggaaagaaaattttaaatttatcaaatgaaattgaaaacaatcttcggcaagaatttgatcaaaaaatggaaaaaatatatgaaaatacgaaagaaaatgccaaagaagaaaaggcaaaattggaaaaagcaattgaaaatgcgacaaatagtgaagaaaagaaagttctgngagttgaatacattgacaaatttggcactttcaattcatcgccatttatttacgnaatttga

SEQ ID NO: 61539 - DNA, 682 bp, Heterodera glycines
atgtcaactgaagaaattctcatggatttggtcactgcgacattgaaaggctccgaagagcacttaactttccgcgtgcactttgatgaacggatgcgtcaacttcatctgatgcaaattgacagaaaggcggcttctgactggtcaaaacttgaccaagagaaccgcaaattgtatagtttagcaaataatttaacgaccataactttaacttctaaattcaatttaagactttctacgagaattcagcgtttatcttcactcctcgatgggctcaaagaacaaaatgaaggcgagtatttgctgatttatgacgacgagacgcttcgattagtgcgggaaaggaataccggaaaagcaaaaaagatggaatattccgataatgagggcgaagagatgggtctttgtattcaggaggacgaggaggaaagcggtgaaaggtgagcatttgaattcgcattttgttggcaaatttaatttgattttctccagaaatgccccctctgttggccctgtatacgacttggaatggatcaaacattttatcaaaatgaagccaatcctttcacatgcgcctgtcgaggattattggaatggcattgaccctcactatcctctccagtggcacattgttcgtggtcaaattcctggtgcattatacccaaaaaatcaaaggaattga

SEQ ID NO: 61540 - DNA, 235 bp, Heterodera glycines; identical to SEQ ID NO: 55997

SEQ ID NO: 61541 - DNA, 1126 bp, Heterodera glycines
atgaccatggcccgttgtcaaccgctgaacgcgttagcaatgttgggcggggcccgactgtgccaccacacgccaccaaactgcacggacgccattcgtccgcttggtccgaaaagcaatgtgccgagttttaaggttttcttccctaaactgataaaaaaaataatatttgaatcacatttaagggccaggcaattgtgaacgcggaaatgaagaccatttcgtacgacgactacaagggcaaatggttgatcttcttcttctacccactcgactttacggtactttgcgaaatattttctcgggaatttcttgtcgtaatttatctgaacttgacaaaatttcagaaatttgactgatttatagagaaaactcaggaaatttgagagatagagaatgtttaggctcttgtttctggtttcctaaatttggtgccatacaatttttacgtgctataatcaattaaagggtcccctttttggttttagtaaaatttccactgtaagtagcgccatcaattgagctgtttttgtgcaaccccgaagttgaactttacttttagttttgctttttaagttccattcttttccccgacccttcagtttgtgtgccccaccgaaatcattgcgttcagtgaccgcgtcgccgagttcaagcagcttggctgtgaggtgatcgcctgctcatgtgactcgcagttctcgcatttggtccttatttgttccattttctgttgatttaatacgatccgccgtatgtttttaggcttgggtgaacacaccgcgcaatgatggcgggcttggcaagatggaaattcccgtgctcagtgacttcagcaagaaaattgcggctgactttggcgtgctggacaaggagaccggactgtcctatcggttcgtttttctcggccaaattctaatcggtaattgaaaaaagtctaaacttttcccctcatttcagcggtctttttctgattgaccccaatggcactgttcgccattgtttggtcaacgatttgccggtgggccgaagtgttgacgaggcattgcgcattctgaaggccttccaattctttgagaaacatggcgaaggtccgtcatttattttttttttaaattttggcata

SEQ ID NO: 61542 - DNA, 273 bp, Heterodera glycines
atgccaaaaaagccaggcactaatcattcttcgtgccgtcgaatacgtccttttctctcggaaccgtgtgccatctgtaaatcagctatacaatgctataattttggggccccgtcatgtcaagcttgctcagattttttcaggcaaaaaattaatttaacttttttatatttgctcattttaatgcttttttaaggcgaactattcgtgaaaaacgcaaatatatctgccgatctcagcaacaatgccaaattgatgaaagtgaataattaa

SEQ ID NO: 61543 - DNA, 676 bp, Heterodera glycines
gccgtcttcacaccgatctgcacaacaacccggtgcgtcagctgggcgagcacacatgctcatcaagtgcggcacgggtggagcggttgcgcattgtcagcaacattcgcaagcgtgcgctggtcacgggcgaagacccggcaaccattcgagccaatgaattgatgaacgtgccggatgcggtgctgtccgtgatgccaagcaaaagtgccacaaaaaaggtgcagttttgctcaactccgaacacccccatatttattttcttgtcaaaaaactataacaaaaaaaaaaaaaaaaattaaaaatcccttttatatgagaaaaaattctatgggtttttctgaaaaattattaattaaaaaaatgtttttcagcgggaaatgaattgtacccgaaatgaaaaaaaaacagtttattagacctcattattattgtttatagctgattcaacgagcacgccatgaaataaatgaagcgcccccaattcccaatcaattgtgcaacttggaaatcccaaaggcgtaccaggtgggggaaaaaaattcgaaaattaaaattttatttccgatatttccccatatttccaggtctacaagcatagtgaggacagtgaggagcaattcttattggctgattccggggtgtacaaggaggagggacttcctggtgatcagag

SEQ ID NO: 61544 - DNA, 1691 bp, Heterodera glycines
  unsure (1)..(1691): unsure at all n locations
atgaagaatgcggcgcaagcggaggagctgaagattgcgattggcgccttcgagatgaacgacaaaattgtgaaggacgtcatgacgggaataaaggtgagaatttgtttgtactttttgtgtactttatttgttnntaggacgtcttcatgcagccgcaggatacaattctcaacgcaaaaaacatcgccgaaattgtgcgctcgggctacacacgcataccgatattcgacggctcgcgcggcaatgtggtctctctgctttttgtcaaggacttgattctgttggatcccgacgcccaatttatttgtgggctaatatcttgatttttcatttttatctaaaaaaataattcaggttaagactgtgtgtgagtactaccagcatccagtgcgtcatgtaccggaaaataccccgctacgaacaatgctcgaggagtttaaaaaaggcggtaagtattaactcttactgataaaaacgataaatattcgcttgtctttaatttccagattatcacatggcgctggtggaccgtgtcgttgccccttcgacggaggacaaagaaagcaaatacgaactggtcgggcttgtgacgcttgaggacatcgtcgaggagattttacaagcggaaatcgtcgacgaaacggacgtcgtcacggacaatgtcaccaaaatcaagaggcgccgccaacaagtgtcgttaagaaaatggaagagatatcacaaaatacccctgaaaaaatttaaagcaccgtgaccttgaattgttcatcgacgacggggaagcttgtcagatttctatgcaaatgcaactcgtaaccattcaggtgtgtatgcgtgtgagaataaataaatgtgctgactttgtgtgtaggggtggtcaagatgggattttgttctttttagattcaattcataaaatcatttgttttattgtcctcgtaaaattctctcgttttttgtaaaccttaattgtaaaatataagctatcaaataacttaaaaactagtttgatattgtacttttaattaattttatgttgcgtcattcacttttcttgtcttatcaccattctgattacgttttgtgttagatcttcgtcggatatgtttttgactttcgcttgcacctatcactgatcgttgatttaccaatgactatacccatcctttcagtttttggagggcactttccgccgtgcgtttcacacggacagaatcgcgcaggccatcctcgagaaggtcatccgggcgcatgtgcaccgggtggaggtgtcccatttggccgacttcaactgtccgaagacggcgctcccgcgcaaagcgcggctgtatgtaaagaagcagccatcggacaaattcattttgattttggagggtcgcgcaatggtcaccattgggcaggtaaaggaaaatttacaattggaaaatagaccatttttagactaacaataagctcttgaatcactgatttctgtgacttaatgcctttcgttttagaccgaaatgaagttcgaagttggtccttggcactttttcggcaaggagctgctccaacaattgaaccaaatcatcgaaggcgaccctggcaatcccccggctgcctcgggcgccgcggttagcggaacggcgtcagttgtaccagcagcgacaaacggtggtgccaattcgcacagtgacaagtgctgccgg

SEQ ID NO: 61545 - DNA, 1193 bp, Heterodera glycines
atgagagcattttgttcaatgcgttccctttatatacgcattttgaatttttcgagtgcttattttcaaggacattttgaattcaatgatattttcaagtaagagggccaaattccaaggaccatccttgccaaactgaaaaggaaataacataggaaaggatgagaaactgagcggtacgattcgattcacagcagttcatccaatcctaattttatgcatacggatacaacatatatgcaatggcataaataacaatttaccaacaaatatgaatccaatttatctcatatatcatcaatcatatcgtcggttcatctatattttatggcaccagcatcgtttcaatctcgtctctctgctcattgttcacacaaaggcacatccgttcttctgcttctgatgaatgcacatattaagcgattttgccacgggtttgtcgggttgaattttgctgtggccacgcgttgcgatcactcattccattaatctaaaaacaattcgtacaaaaaaaaatatagaaaagtaggggatacaaactccattagtaccaaaataagattgggtgacttgttgtgaaccgtaccgttcttgtttcatcattacctatgctatttcttttcagtatctttcgaatgataccaaaattattcgattttatagggaatgaagcgagttatggctgatcaagtgtgatcaaaactaaacaacgcaaataaggcactgaaaatagtaaatactaactaaatttaaaatattatctctaaaaaacatctattgacttatttgaagtgggttggaagctttgacgttgattaggcatttgatcaagcataaagactctttgttttttatttgaatttactggcattttgtttttttacgccatttattttttggcaatttttttctttctttttttcgctgcccgtcaaaatgtcgccgcgtcataatgtcgccgcgtcaaaatgtcgtcgcatcataatgtcgccgcgtcaaaatgtcaccgcgtcataatgtcgccgcgtcgaaatgtcgcccaagctaaaaaattagtgaaaaagtcggaaaattacatttttaaggcttcgtaacacataattcattaacgatttatcagaatagcataaacaaataacaaaaataataaattttgcaggaaaaaggaatagttcaaaaaatgaatgaataaa

SEQ ID NO: 61546 - DNA, 188 bp, Heterodera glycines
atgatgaaacaagaacggtacggttcacaacaagtcacccaatcttattttggtactaatggagtttgtatcccctacttttctatatttttttttgtacgaattgtttttagattaatggaatgagtgatcgcaacgcgtggccacagcaaaattcaacccgacaaacccgtggcaaaatcgcttaa

SEQ ID NO: 61547 - DNA, 1437 bp, Heterodera glycines
atggcgccaagagcatgcaaaaaaactggatcaaccccaaaaagtgacgaaaattgatcaaattaattttattttaaaaacactgcatttttcagggttaaagcagaccgaagccgtaccaacagcagatggagaggggacatcgacccaagccgccgaaaatgggccgtcaacgtcaactccggaccttcgtaagtcaaaaaatcactattttgaagcaaaaaataaattaaggaccacgttcaagcccaaggccattgtcagcgactccgatcaggcgccatgtgggtttccgtccaaaaactaccgacaatgcaacaaacatggatttgacaatgatggacaaggcaacggacgtggatttggcttatgaggacgccgcgacacaaaccgagcagttggacaaacagctgaaggagcaggaacaaacgatcagctttctacgactgcaggtccgcaacagagacgcaatgatcgctgatctgagccgtcaattggaacaacaggcgcagaatgaccagctgacaacggccaaggcttcacaaaaataaccatttccttggcccatacttcacatgcaaattctccggccaacaatttcatcgtggcagcatttcccgcgaaggacaaaagggaaaatttgatcaaattctgcggcaacatttggcaacagatcggcaaattgaatgaaattgcgggcaaaaaaaatcaaattgtaaattaacatattttttctggagtcaactcaatttttcaggtttctcggcggtgatctgagcttcttgtgggcactgattgacactgtggctctgccgttacgacatttccatcccgtttgcgattgtcgccaggaccaattattggacgcgaaaagtgccaaatgaggacatcggaggaaactttgaagtaagcctagcagtttggacgacttgtggaaaatggagaaaaaccgactgctgctgctcgagcgctcaccaggggaactgtcgatgagccacttttacaatcaattgagtttgaacgaataattctggcgccttttcacgtcttccagggcattggaaatgctcttatcaaagagctcgaagtgacggaaaacgcggaaattgcgaacgaatttttccggagcatcaggggccaggaggggaagtgttcaggaaaaaaggacatgacgggaaactcaatcagaaaagttctgattcatgcggaccaattggagaggctttactcagctgaatggccacaaatcattttttgcagagcatggcacatttcgttcctcaagttgaatactcctggcataaaaggattgatttggatttatgaagcgtattgtccgtcgtttttgtataaaaaattattgaattctatattaatgggtaaattttatatatcattgcaaattgcatcgattgcattgaataatccagtaataaa

SEQ ID NO: 61548 - DNA, 285 bp, Heterodera glycines
aaatgatttgtggccattcagctgagtaaagcctctccaattggtccgcatgaatcagaacttttctgattgagtttcccgtcatgtccttttttcctgaacacttcccctcctggcccctgatgctccggaaaaattcgttcgcaatttccgcgttttccgtcacttcgagctctttgataagagcatttccaatgccctggaagacgtgaaaaggcgccagaattattcgttcaaactcaattgattgtaaaagtggctcatcgacagttcccctggtgagcg

SEQ ID NO: 61549 - DNA, 207 bp, Heterodera glycines
atgaaagaagaagacagacactggaatttgattgtgcaagattacaacaataacccacaaaatggaatgcgtggcaggggaatggcaaggaaaaacatttacgtacagcaggaccaagcaattcgcgccattttcttggatcgtcataacagaccttttttggcctatctacgtgcaatcgcttatcgaatgccggaaccaaattga

SEQ ID NO: 61550 - DNA, 64 bp, Heterodera glycines
gctgattattttggtttgtaactttctttaaatgttagaattctcttgttttctcctattatta

SEQ ID NO: 61551 - DNA, 715 bp, Heterodera glycines
ctgaccgatcacttcctcaattggctggtctcaaatgggtacgaaggcgacgcgttcgatcggcctgacattgggccaagcggaagtttcggaggcaaactgaccacggcacaacaggtgagaatttgggggggggggaaacagtcaattaaaatttgaattaattgtttttttagataacgaaagaaccggtcatttttatacatggaacggtgggaatattttaatacgattaaattaataaaatgattaaaatgctcaaaaataaattatgtaaaaaatatttaaaaattcgatgggcagggagacgccgcacttcacacgcaggcgccccaagcgacaggtgacaacaaattagcatgaaactttgcaattatgttaattaatgcaattgctttcttttaggctggagtcggtccatccaatatttcctcgagcaaaatgtacagaaaaatcattaaaaccaaaagttaaattgtaaagcctgattttttcattttgctacttcagtacacaaatgccgaactttacgccacgacttggggcgacacgtgggggacgggaaatattctgggtaaaattgataataaattaagataaatcaaaaacaaaatccatttttaataaagaagagtttcctaaaaaatttaattggcactaattaacagatggctatgccaccatgcacacctgcttcctatttggtcaattttga

SEQ ID NO: 61552 - DNA, 691 bp, Heterodera glycines
atgtgccatctcggtgacccagcccatcagcccgaaactgcttattacactgacatcaatgccttaatttcatattgtgccgaatttgtgtgctatgcgctgatttggctgatcatttggagaagaacagcacaaagtcattcagtttaattaggattagagaaacgattatattaaatttggaattttttaaatttgatttccatttatagaaccctattttgaattagcgaattaattaatctatgaaaaataattaatgcatttttagttacggaacatgtaaaaaagttgacaatttctgtgagtgttctcatgtcaattgggctcttatgctacattttggtcaacacataatattttaaattaaaattaattaaaataatattaataataatttatatcccatttcagaaccttttcattgtgaagggcataattccgctgctcagtttggacccatttgcaattgaattttgtgtctttccgatcagtctttttttccaaacgttggcatacggaagcagcgcaccagtgctttacttttgcaagtgcaaaacacgaaaataaaagtttttcaaaaaagtttggatcagaaattcatgcctacccatggctggacctgttttttcccctgaaaatccaagaaaactcctagccctggctggacctatttttttcctaaaatcca

SEQ ID NO: 61553 - DNA, 244 bp, Heterodera glycines
cggaaccagcacttgtgaaaagcggtttgtgacggaacggtggtgatcacacgcgagcactgcgaagtgaacccgaagaacgagtggatgtacgcgcagtacgcgtaccgcgactttgagaacatttacaagctgaccttcaacgtgataccacgacggatgtccaacacatttaaactgatcagcgaagaatgaatgaccgacccgaaattttgtgtattttcgttgttttttatgaatgaat

SEQ ID NO: 61554 - DNA, 839 bp, Heterodera glycines
atgggaaccatctcattgggaacctacacgttgttgaaggctgcgttcccgctcggttcgcttgttgccagtgccttgaatattgcaacaaaagtgagtcaatatccccatatatgaaaatacggtatttaaataaatttcagccatcgaaatcccaacatttttatttggtcttttaattaaatgagtttccctgatgcttacatatcatgcgtttgtttttttcttctgacgtgctattgggattgaaaaataattattagacactttttaccagttatttaggtgctaattgggaaacctcgattatttggcagttttcctttattacacttatcgctatttacaaaatatatttcccgtttatacattttgtttttggtttagcctgaatccgaggaatacaaggccttccaacagcttcacaaaaaaatggatgaaaattttgataacatcagaacaacaattggagtagcgaggaaggttatatcgatggaagcacgattgcttgactacaaaaatgtaagcttaaaaataagtttaaattattatatgatttaagtatatttttttcagaaggttcaagttccaatcaatccactccgtgacctgctggacttgttttggaacccggctgttccaaaaaaggcatcggatgtcgacgagtttcgattgctgtgctatcgttctcacgataagacgcccttaacaattcttcatgtgaatatattttttaatattaaataattagtttggtaaatactaatcagaaggaaaattttagagaaaagggattgttttcattttttgcgtaggtattttacattttttgaattaga

SEQ ID NO: 61555 - DNA, 646 bp, Heterodera glycines
atgagtggccttgaaataatccgacgcttctgcattatgtttccactggacaaaatgatcatgatttggccaactgttcgcaaatgtcgcgtttccaggaaagtggcggattgggtgttgcttacgcatgacccaaacataccaataaaggaccaacaaataataccataccaaggtatgtcatgccaagtaaaacacgacgcggttatattacaatttttttcatttttccaggcctatgggaacaaggttttcccgattttttgtcgtccccgaattccaagttcgaacacgaagattttaggcattgattcgggacaaaaaatatccccctacctaaagatgcattaaaagtcatggatggataaattttaaaaataattttttgtgcaacaattgtcaactttttccatttttaatatttttaaattttgggcaaaatccgatccaaaatggcataaaatttcaatttctgcaatatgtttttgctttcagacagtgaggcagttctgttatcaaacacttatgtggacttgttaaaagacaatgaactgtttgaatcaggcacagatgtatcacagatatatcgcataattcaacaaagcgacaaatttttattggcagcaatttggctggtaaattaata

SEQ ID NO: 61556 - DNA, 150 bp, Heterodera glycines
gaaattgacacctttaatgttttgacaaagctgtgcccaaaattttgaatgacaccgacgtgtgggtcagcttttcactgtccttggtaattggaatccaattgcttttgttttttctctcaattgaagttgacagataaagaaaaattt

SEQ ID NO: 61557 - DNA, 505 bp, Heterodera glycines
caaaagttttttacaacaatttattgccaatctaatttcttgcagattgaaagccatccattgcctgccggttctcggcacagcaaagcactaatagggtgtttgactcacttcaaaaaataattccttacacaaaagttttttacaaccacttattgccaatctaatttcttgcagatttaaagccatccattgcctgccggttctcggcacagcaaagcactaatagggtgtttgactcacttcaaaaaataattccttacacaaaagttttttacaaccacttattgccaatctaatttcttgcagattgaaagccatccattgcctgccggttctcggcacagcaaagcactaatagggtgtttgactcacttcaaaaaataattccttacccaaaagttttttacaaccacttattgtcaatctaatttcttgcagattgaaagccatccattgcctgccggttctcggcacagcaaagcactaatagggtgtttgactc

SEQ ID NO: 61558 - DNA, 4415 bp, Heterodera glycines
  unsure (1)..(4415): unsure at all n locations
atggacgcgcaacagctacaacaattgcttaatgcactccaacaaatggtcactaatgccgcaccagcaaatttgagcaatgccagtttggcaagctctatcgatgctcgcctttcggcctttcattacaatccggaggtcggcaccacatttgaaagttggttcaaacggtttgggaaattgatcgaggacgacggaagcacactgccggaggcctcaaaagtgcggcttctcctcggcaaactcggagaggaggagtacagcaaatatcgggacacgatcagcccaacccagccggaccaagtgaattggaatgacaccatttcgcacctcaaacagctttttgccgagacacgttcgctgtttgtccgccgctacgaatgcttcaaaattcgacagcaaccaggacaggacgtgtcgtcacttattgcgcagatcaacgcatcatgtgaaaatgccgacctgagtctgacaaaggagcagctcaagtgcattattttggtcatcgcactcaacgatgaacaccatgatttgcgacaaaaggcattgaaaatgttggaggacgcgcagaaaaacggcaccaacatttcgctcaagaaaattgaggaggaacttcgggcaattcagcttgtcaaggagagcgccctttcgctggtcaacccaccaattgccacaaacgccattcgcacaaggccacggcaatggaccgacccagcgcaaagacaaagcggcggctccaatcaaaggcaaactccaaatgccaattcaagcggaaagccaacgcgtggtcaaccaacgcttccgtgtggatcatgtggcaaatccgaccactggcgctccgactgcacattcaaggacgccacttgctttaagtgcaacaaaaaagggcacatttcaacaatttgccggtcaaagaaggcaaaggcaccaccgaacagccaccggtcattccacactgtcaaaatcgacgcaaattgcttacatgtcggcacgactcaaggacgatggtggaaattgtgcattttgattaatggaaggcaaacttctatgaatggcgacaccggcgctcaggccacaattatttcattgcaaacatggcgagagttgggagaaccggaactgactccatccgacatcgatgccaaaaactgcaatgaccagccattcgccttgcttggcaaattcatctgcaccgtccaattttccgacaaaccaccgcaaactctgatcgcctatgtgagcggagaagtcggacacaatttattgggattgccgtggatcgaagctttggagatcatcccccgccaaattttatttccgtccagcaaatcggctgatcaggcgacaaaaatgattgacaatttttcggcagtgaagccgccaaacaaatcgatcaatgatgtgtcaacgcttaaagcggcactccaaaacgatttcccggaagtctttgaagaaggactgggacactgctcaaaggcaaaggcgcatctcattttacggtctgatgcaaagcctgtattttgccgagctcgccccattccacacggcgccatggaagctgtgaatgccgaattggatcgtcttcttcaaattggcgcaattaagccgattgatttcagtcattgggccgcaccgatcttggccgtaaaaaagaaaaacggcaagacgagagtctgcatcgacttctcgactggcctcaacaatgcattggaattgaaccggcacccactgccaaggccggacgacatctacgcttcactgaatggcgcgaaatttttctcaaatttggatttgcgcgatgcatatttgcaaatggaaatggatgacaaatccaagcaattgtgcgccatcaacacgcatcgcggactcttccaatgccaacgcctgccattcggagtcaaatcggcaccggcaatatttcaacatctgatggaccaaatttgtgccggtatcccaggtgtattcgcgtatcttgacgatggattaatcgccacaaaaacgcttgatcaacacatcacggcactgtacactctttttggacgcataaaagaatacggtcttcgcatccaactggacaaatgcaaatttttgcagcccgaacttttgttccttgngcatattgtgtcagcaaatggcattcgtcctgacccatcgcgttcggacgcaattcggaaaatgcccgcaccgatcgacaaaagcacgctccgatcattcttgggagctttgaattattatggcagatttgtcaaatgcatgcgtgagatgcgtgcaccgctcgacaaactcctccaaaaggacgtagtttggaattggacgtccgaacagcaaaatgcttttgaaaaagcaaaggaaacgatgacgtccgaccttctgctgacccattacgacccggcacgcccaatcgtcgtatcagcagacgcctccaaggatggaatcggcgccacattaagccacacattccccgacaaaaaggaaaaagtggtggaacatgccgcatgcacactgacagcagcgcagcaaaattacagccaaattgaaaaagaggcattggccattgtgttcgccgttcagaaatttcaccgcatggtatacggcagaaaatttattttgcaaacagaccacaagcctttattggcaatttttggctccaaaaagggcattccgatctatgccgcgagccgcctccagcgttggtccatgatcttagcgaattatgattttgaaattcgctacgtcaacacaacgtcatttggccaagccgacgttttgtctcggctgatcgcaaattattcgcgtccagaggaggacatcctgatagcaaacatctgtgccgatacggattgctacattaattctgttttcgaaaacagaatggatcagctccccgtgacaacagtcgaaattacagcagaaatggccaatgatcaaccacttcaaacggttcttcaatttttgagaaatggatggccagcaaaagtcgctgattctgaaattagtccatattttccaaaaagggacaaaatttttgaagtggacaattgcctactgtatgaggaccgtgtgatcgtcccaacttcgcttcgcagtcgcatccttaaggcattgcacatcgctcacccaggcattgtgcgcatgaaagcacttgctcgacgtcacgtgtattggccaggaatggactcggcgattgaaaaagttgtgagcacgtgcgaagagtgccaactgggccagaaaaacccgaccaaagcgcctctttcgccatggccaacgacggacaaagtgtttcagcgagtccacatcgattttgctggcccctgctcagacggtcaccaatatttgattttgatcgactcattttcaaagtggccagaagtctatcgtatgaatacaatttctgcttatgccaccgtatttgttctccgatcaatcatttatcggctcggaatcccagaggaaattgtttccgacaacgggacccaatttcgatccgccgaattcgccacattctgtaaagaatttggaatcaagcacattttcacaccgccatttcatcctcaatcgaatggccaggtggaacgcttcgttgacaccttcaagcgatcaatgaagaaaatgtcaaaaggtggaaaggattggatcgaaaagatgctgttctcctacagaaccactccccacgttgccttaaatggcttttcacccgatcaattatttttcggcagaaaattgcgcacgaaattgtcgctcgttcatccgaatggagaaaaagccgaaaattttgatcaaaactcattcaaaaagggacagtcaaaatacaccgacaaaatggctcaaaattttgatcggaagcatggatcaaaactgatcaatttctttccaaatgatcatgttcttctgatcaattatcgaaacaacaagacggagtggctgcaaggaaaagttgttgagaggcttcacaaatcgcccacatatcgtgtttatgtgcctgttctgcgtcgactcgttcatcggcacgcgaatcagctaaggcgacgccatcttttggaagaagaagccgaaaaggaggcacctcaaatcgaagagccaccgccggttgtaaaaccacctcttccacctcaacaaaatctgcctcagccagccaattccccgttggtagtccgccgatcaacccgagtcaaaaagccccgccaattttattcgccatcaaaataaattttttttttggcttaaaccttcgggtttcgaatttaagaggggaggtgttagagaaggaagtaattattgattaggtgtatgaccccacgccacttcgccatcttccccctccgattcccctcattcaattgttttatttgtgcccaccaattttgacctcccaatttattttctctgcatttttattattttattttcttcggcaa

SEQ ID NO: 61559 - DNA, 430 bp, Heterodera glycines
atgccaaagtgggggaggagtaaaagatcaacaacagcacatactgtaagtgtatttgttatctcttttcgcaccaaaaaaaaagtgtgaaagaaaagcaaacaataaataaattttcaggcaattttctattaattccatttaaattcatgctcattattttacttaattctcgataattagttataaaatggtatggaaacattaataatgtaaagcaatttttagttccgacctacgaaattgaatttcgtgtcatcataataccgtacccattttcaaaaatacgggtaatgattatatgaacttttgaaaatcacaatgataaagaatcaaataattacctatgcaaaaatctgaaaatggatttttttttttcataacaaaattttttttaatgatttattttacatatttaaaaaaaattcca

SEQ ID NO: 61560 - DNA, 445 bp, Heterodera glycines
cgttttaaagttgggcaatgcctttgccatttttgaaccgggccctgcaaatgttctcgagcgtcgatttgcccgatttcgcatcagattggcactgttcgacgccgtgtcactttcacagaacgaggctgctcaatttgttggcacgaaatttgttgatgacgacaattatggcacttttgggcgcctaaaaattgggcattttgccacaaattatgccaaagacagtgccgtcgttgatgatgacacaaccaattcgaaaacaatcaccgattttggaccaattgcttatgccattcaaacgtcgggctctaccggtgcaaaatttttgttttttgtgccaaccgatttttgtgtgaaagtgccaaaatttcgtttttttcggattttcaggcattccgaaggtcgtcttggttccgttctctgccattttgccaaatgttga

SEQ ID NO: 61561 - DNA, 516 bp, Heterodera glycines
gcagaacataactcgaaatgtgaagcagaaacaatggaagtaataaaagcagaacaagtggatagaaaacaaagaaaaaaaatatttaaatgtaatagcgatgtaaagactatctggagacaaggccttgaaaaagttagggaagaagatgcgcaaaaagatgtcgattctttggaacaaaattccttgactaacctctatccatcatggatagaaattagaaagtcttataacagaagacgtcagcaagcacacggatcagaagcagcagaaccatttgatgtgcctccgaggcttcaattaaccaaatttggggcaatcaaattaacaatggggaaaaaaattgctggaagtgaatggctgatctataaaaatcaagaaataggtgtaatgatattcgcctctcaaacacaattagacgcagcaaaaaattgtcggattatggtcgctgatgcgacttttgaactagccccaaaaggcttcaattcgaatatggccacatctaaaggcatttga

SEQ ID NO: 61562 - DNA, 477 bp, Heterodera glycines
atgtccactttggctaagcgacaggaatatacggtaactaatgcatagaaaaaaaaaattaaattagcaaaatttaaaaaaacgaccatttagagtcaaaattcttttaatttaaactacaaaatataaaattatttaattaatttatgtgaataatgacaaaattttagtctgaccaatggcaggaattggaaagcgaatttgagaagatcaaatacccggatgcttatatgcgcgaagaattggccaaggaaatgggccttacggcggagcaagttaatgtaattgagggggacgcccaaattatttaatttatatttattttcgaaaattaatttagaaatggttccaaagtcgacgaacaagagaaagaaaatgggataaactcgcagaacacacggcacagataaagaaaaaagtttgtggaaatgattaatgttaacagacaaacgccgtagaaaatttgaattcattaaa

SEQ ID NO: 61563 - DNA, 848 bp, Heterodera glycines
atgcgatttttgatggagaaattatattttgtgcacaatgaattggatatatatgttcttgagtaagaaaaatctaaatttgatcattaaataatattcataattaaatgatcaaaaaatatctatggaatattataattaggacgaggatttttaggagcgaaattccaatttattggcctaaatagtggcgaaaaatttgaaaaatctgtactttttttcaaaataatataacttaatcaagaattttaaatataaaaaaataatttcttcttttttgaataaaaacttaaaaaaatttcggttttacggcttattctgtagtataactggaaactattaataaattaattaagaaaataaagagcaaattaaatttagtgagcaaaatgaaaggagtttaattaaaacaattgagtatttggaggcgattgaactgatgaaaattgaaaaagaaagtgccgattttaaaacccattctcccaaacaaaccgtgtcaattcctcaaaatgataaaaaagctaatgggctaattaccacccaatttgggtcattcaaaagcacagaattcaaccaaatgttggacattcttcacacgcacatattttcagttttggtagcaaaaaatgtgcaaaaaattaccgcttcaaacgaatcggatgaaacgaaatgcgcaccaaattggcaacgttattattcacacataataaacatggaacggctgaattcccttttcaaaagtgtggaaaatttggtgaaatccgtggagaacattgaaaagatggaaaaacaacagaaaataggttaaatgtcttttaattattattttttaaaatgttttaattaaa

SEQ ID NO: 61564 - DNA, 1088 bp, Heterodera glycines
  unsure (1)..(1088): unsure at all n locations
atgctatcgctgtgcgccaattngagagccgaaaccattagttccgtgcggcatcagttggacaatttgaaggattacgtcacgccgccggtggaccgtaagtgttgcgaaggcaacagaatttgcagattttttcacgtttctagctgcctcttacaacaattagtctcgggttttttttttgggtttccaggaccaatacccttggaattttttccatgaggcatccattggtcggtttgcggtgtctatgaaaatgcgtgcattttgcaggcgtcgaaaaggtcagtcggccgcacaacaacgaatttgtggactccatcaaaagttgtatggccgagattcagcgctcaatgcaggagaaattgcagaacattgtggaaaagcgactggtggcagccctaggaaaagtgggcgaaaaaagcgaatgatttattattttcatttgtttgtaatgaataatttaattttattaacccctccccccaattttgattaggatgacattgtgttccccaacgtggacgaccaaacgcaataccaaaatcgggtcggtttgctgaagaagcacttgcagcatttgccggaccccgtcacacggctgttcctcctccgctcgataaaccatctttcggtaatgactcattaattaagtcttattacactaattacccagcccctcacttattttaaagtttttctcatttttcagcattatttccatgccattgccatcagcgatttgttgcccaattcgttctcgctcgattatctgaagaccaaaatgtcggaacacatgaacacatcggacaacccccagttcaatcagataaacgccgatttgatgttgcgatacaccggttaaaaaaggggggatttagaatttaaaaaaatggaaattttgtttaatttgagccacatttaaaaacgaattgctttattttccagagcttgagcgtcatctgaagcaaattcagcttgccgaattggaggaacaagagcaaaagaaaaggacacttttggccaaggggaaaggcgaatgccaattcaatttggagaagaaggaaattctgaaccgactctaccgg

SEQ ID NO: 61565 - DNA, 215 bp, Heterodera glycines
atgtgctggtgttgctcaaattggccgacttcttccaggtggactggttgaagaggcgctgtgagacgcaattggcaaattgcgtggaaattccgctgatcgaccgtttccttctgatcgaaaaatttggactcatcaatttgaaagtgatttttaaatatttccgaaattaaattttatttttatatatttttagaattattttttgcatttga

SEQ ID NO: 61566 - DNA, 386 bp, Heterodera glycines
cggtaggggtcaactccgtctggccaactccgtctcagcaatgttcaaaaagctataacttttttctttgttggccaaacttcacaatcatggtatcattcgaaagccctagatgtttagaagatatttataagctgtttctcagtgattaatcagctctcaaaaaagttgtcagtttaaacccacaaaaaaggcagaattttcagttttttctttctatcttttttttatagttcgaaattttctgtaatttttagtaggctaatagagcctgtgaaaagctttcgaatgatatcaagattgtttgattcggtcaataacttcaagagttatattgactcaaagttggctcagacggagttggccagacggagttggcccgttcc

SEQ ID NO: 61567 - DNA, 838 bp, Heterodera glycines
atgcgggagaagcagcatcgactgatcactttgaacgagttgggcctggacatggagcagttcaaggactttatggaggcaatttcgctcgttgctcttcagtgtccgattcttccaaatcgtaagtttaaaaaatttcaattttcattaatttttataattgcatattttgctaacctaacaaagggaagtgtccgtgggatttccaaatgaaacttggttaggtggatagagcacccataggttcttaagaaaaatggttttattttctgccaaatgagtacgagtgccgagttatgacatgccagtttttagcttttttataattaaagaaaaggaacatttatttcgtgttaacaagcaattgttggtgtagcggtaatgtgttagtcaaaaacttttcggtcacaagttcgaatcccctatgtgtaaatccattttgtaattttgtttttgctttttatgtgcaattcaattatcaaaaaaaattatttctttatcaaaatatttattttaattttattcctttaaaaatcaaaaaattccattaaacataaagatgtaataaatatcctgtcgaattaaaaaatatatttttgtctaatatttttattgagtatttgctgcactaaataatttcaaaaaaattaaaaataaagttttttttataaaaaaatattttgataattgacttggcataatagaaaaaaattaaaaaaattaatttacatgtaggggatccaccctgggttaaatgatgctaactagcgcactatcgctacacaactggacaccgtgcttaggtacaaataggtatttcttttatttgatcattaaa

SEQ ID NO: 61568 - DNA, 378 bp, Heterodera glycines
atgcttatctcaacgttacaagtgcgtaaaaattttaggtatttaactaaaaatcgcatccctataaatcagtcagaattttgcttttttcaggaaaggcaagcgcacctcaatgcgttacaggccgtctgcgatgccgacatcaaaagtgtcaaagaggaagaggagaaggagaaggaggccgcgcaaattcttttacaggcggaaaaacagcgtgaagaggccgcgcaaattcttttacaggcggaaaaacatcgtgaagaggccgcgcaacttcttaaagaggccacagaacgtcgcaaaaaggcggaagaaaaaaaggaaaagtctgttccaagagcttcgatgtcactggtcacgaatccgttatccatttag

SEQ ID NO: 61569 - DNA, 75 bp, Heterodera glycines
atacttctgattttatggttgatccatcttttgctgatggctcattttatccattcgttactttgtttgactctg

SEQ ID NO: 61570 - DNA, 205 bp, Heterodera glycines
gccattcccaaagcattttgtgcgttgactcgccgagttgggacgatcaaatggtcgcctccgggtccaaagacaattccattttcttttggcgcattggtggagtgaagacggactcggccagcgatgggcaccaaaatttgacggatgcatttatggccgacaaaattgcagtggccacagggcacactcattccgtggcaag

SEQ ID NO: 61571 - DNA, 797 bp, Heterodera glycines
caaaactatcgttcccaatccgtaaatgtgtccatgtcatcgtcgatggtgggccagaacgggttgtggacaaaaccggcacttttcacgaaccgacccaaagaagagcggcagcgtgagcaggacgatgacgcacttaggtagcaattagtccgggcgcaaatgtctggacgctggtctgacaaatgagacacgttgtccgggttttttttttgaatatagctcggccaaaaaaatttgggtagcgaaaaactacaaacaatctccgccgaaaaaaatagattgactgtatgcaaaattggtccattggtccccggatactaccaccgcccatcatttttttaacttccattgtatggccgactatctgtgacacattttgttaaatgaaaattcttatagggttatgcgtgagaaggagcggaggaaagaaatgcgccgaaaatttacgcaagagaaccaagcgcaacagaaacggcagaaggacattgagaaacggcacaatgaatggacgaaacaaatggaagaggaaagggaggcagtgaaagaacgaatccggtgggaatcgcctgatgaaaaagatttagagcaaatacctaattagaactcggagagaaaattacttcaaatttcatgttttaaataatttctgaaaatgtgcatttttcttgaaccggaaattattaaaatattctaatcgcaattatataattttcaggatgaataaacaaaagttggaggagcgcaagaagtcgggcatgaacggggaaggggacgacgatgacgaagaaaattaa

SEQ ID NO: 61572 - DNA, 268 bp, Heterodera glycines
atggctaaaactggttttcccgattttaaatcggtaggtttaaattgttcaacaaatgtgttatttttaagattttccttggcaataaaacggtaatacagtacctgagagaagccgaattcctcctttatgtggtagttgatgaactcatttttgtgttgccatgcaacaaaccaccttaaattcaacagatggaaaaacaattaaaaaatgtttatttttgaaacacgcctcgggtcccattgttttgatgacttaaatgaataaa

SEQ ID NO: 61573 - DNA, 2695 bp, Heterodera glycines
atggaaatgtgcgaggaaatgtgggcaccgttcgggcccagccaacggctagcgctgcaaggagtggacatcatttgcaactcgagcggctcccaccacgtgttgggcaagtcgcgcatgcgcatcaatcaactcgtgttgggtgcaacagcgaaggcaattaacacatattttagaattataccaataatcagtgtccacttgagaattggtttcagcttggcggcacttatttatacgcaaaccatcgtgggatggacggtgagcgcgtgttcttcgatggaatgtcctcaattgcgcaggtgattttgaaacgtacacttttaccaaatcttacaattaggcaaatattgtgctttttgtccaggatgggaagctgtacgcccagatcgaccagttcgacatagaagaaaccgccgtttgcagttgcactttgaatttggacaattcggtcgcttaccgggcaaaaattgccagcctttgccaacaggtgaccattaccaaagtggaaatattaaaggagtttctttcatattaaattttcaaattcctctttttttgaaaattaattcatgaaattagatccatcaaaaaatgatttattttttgctttttgcataagcgaaaagtgctttttccgtccagtccagcaaagtcgtgccaatgccatgcgttcggtgcgatgcgcaattattggccgacactttggcggtcggcggcggcgctctttcgcgtcagatcagcgtggaacagcggacaaacgttgatgagctttgccatgcgcctgcggcgtggctttggcattatttgcggcgcagcggaatggtccgtgggggaattaataaattatttttaatcaaaacatcctttttctctcttcccgtagagtggcttctttttgcctctatccggtggccaggacagtgtttccgtggctctgatggtccgtttgatgtgtgaaaaagtgtgtgatgccgtaaccaaaaatccaggtttgttggaatatttttattttttaattgttgaaatggatgtaacttttctctcccacttttcggcttgagtcctcctgcagcagaagaggaatccctgttgcaaattttgagtttaacccatacaaaaaaataagactaccatactactgaattaaaaaccctgggctttatttttctaccccctccgtcgaaaggggggctttatttcagggcatacatggaaaagggaggtgggtcaaccgaaatttttgcgaagggatctgggagggggagttctaattgagtaaatacgtttttgtttgtttcattttttgccataattcattcgtccccattcgttgtcagactctgatgacccggcctattttctgtgcggtgagcgcgtgccgaccgacccggcacttctctgcgcccgcattcttttcacctcttttatggcgtcctcaaattcctcagaaatgacaaagactttggcggcgggcattgccaaagacattggcgcaacgcattcaaagtacaaaattaacaaatggagagagataatttatatttcaattaaaattcattttgatttcgcatccattcttttagcattaacatcgacggaattgttcagtcgtaccttcaaacattggatttcactccgtcctatgaggcacatttttcgaatttattttctgatataatttttataaatccacaaattttctctaaattaccaatgccttttgcgcatttttcagtcttcggacctccgtgaagggatggcccttcagaatgtccaggcccgtgctcggatggtcctcgcctatttgcacgcgcaactgacgctgaccaaagagcggcgtaaaatttgcacttattgataaattgtttaaataatccctccttttcagggaaagggtctttgttggttttgggcgcttcaaatgtcgacgaaaggttggaaatgtttatttttttattaattgtagttttaaatgtccctttcagtttggttggctatgtcaccaaatacggttggttggctctcccccccccccctctcttttctctctcttccccttttctctctctctctttctgttgcttttcatttcctcttccacagattgttcctctgccgacattaacccaattggtgctatctcaaaggatgatttacgtgagtttctgtgccatgtgaatgctaatcataaattcccacacttacaaaggttcggcaattttttattttgtttccgaattacattaattcgatcatttgttgtgtttgcccccttttcagtgtcatccattcggtgccaaccgctgaattgcgtccactgaaggacggccaaattgtgcagacggacgaagccgaaatcgggctcacctatcgggaattgtccacttttggcaaattacgtcgtccaggctgttccgggccgtacagaatgttccaagaactcgtccacatttggcatcccgcgcgcagctatgacgaagtacactaaacatgggatggatagagttaacaggttctcccccccccccgactcattttctaccgaaaattttaaatttcgtctggaagtaaaaaaaacacatttttattgaaataaataatttggtttttatttttaagatagcggacaaagtgcgcattttcttccgccgttatgctatgaatcggcacaaggcgacagttgcaacacccg

SEQ ID NO: 61574 - DNA, 504 bp, Heterodera glycines
gaacaaccggttgactacgatggcacagaaattcaagtggtggacgacggggcggaagaagggccgacaatggcggacggtcagcagaatgtccaatacattctgcaggtgcttaccaacatttaaaagcattttttaaatataagtttccccgataatttacgaattcataaatttccacaataattttttgtacagtacgcggacagtggtgagatggaaaattcgatggtccagttggaggacggccgaataatccacgccacccaaattgggcagccaattccgttgtcctccgccaccgaagcgaaccttccgattggacagccgctgattatgagcatccccggcccgaacagtcaccagcagcagatgcagcagcacttccaagtggtgggcaactccgtcgccgtgccctcctcctccgccgcctctcttccgccaatcgcttcggcgccatcgccgcaatttcaacattcgccggcggagggggaagaacaatga

SEQ ID NO: 61575 - DNA, 963 bp, Heterodera glycines
  unsure (1)..(963): unsure at all n locations
ccgaaaaaacccgaaaagtcgtcgaaaacgcagcagtcaatggcatccaaatcgacgacggcaaaagcagaatgggcgaatgcgcttccgtcagacgttttttcttcaggtgatgccgcattttgtgtgtgtgatgtgtcgagaatttccctccttttttcagaagccaacatggactatgggacattgcggaatttcgatactcaattttttggaggagcatcgccgttgaaaccgcaacgcggcactggaaagaaaggcgagagaccaaaatggacaatttggaaattggaataattgttttttgtttttcaggtccggcgccgcccgtcgttaaaaagccaccgccgtcaaagacaaagccaccggagaaagggaaaaaagtgccgccgcagccaccatgtcggtgttgatcctttgatttgaaattttcatgtgtatagtgactttttgctcccatttcagcgaagaaaaggccccggcaaatgggcaacaaacaaagtgatcaatttaaacgattatgactgaatggcacacacacttttctctttccccatttcagaacagacaaatgccgacaaattcaaggaatttttctcccagagaaggccgtccagttcaattagtaggatgacaaggggagaaattgggcaattaatgcttttaatttccatttcagttggcactcctcaaaaaccaagccccggtctcgtaccatgtaagaactatatcaataatgatcatcacaatcaatttttgacgaattttccccccatttagcaagccatcctgactatggcacacttcacttggtggacaaggatcttttcaccaaggagcagcaggcgaaaggtgggcacatcaggcggagaaaacggcacaaaacactttatccatccctctccattttcagatgccaaacgaacgccaccaaaggctgggcctctatntgttncgagtgan

SEQ ID NO: 61576 - DNA, 313 bp, Heterodera glycines
atgcaattgatggagccatgccttttccaagtccgtcttgtgctcgtccttaatttgtgcaaattgaatagcgctgttcgcctccttaatgtactgcttggtgtcgttgctgatggtctccaaatcgccagcaatcacatcaggcatttccacatgaccacttttgttcattttgatcaactcattgctggccccgtcgagcacaaccttttgaacagaaaattaattatgtaattaataattgtaaaattatgagtaggatggaaattttattcaacaaaaattaccaaatattttgagaaaaaatatttaa

SEQ ID NO: 61577 - DNA, 420 bp, Heterodera glycines
gtgtccgtgattcgttacgaagcgccaattctttttcataatgccaaacatttcaaatactctgtattggaagcagctcgtcaaattaaagggtaattattatataattattaaatttattatgttaatttaaatattcagccaattgttgggcattggcattggcactcggacgggcagtatgaaaagcatgaaaagcacaaatgccggtgaaaagtttagaaaaataaatgctaatttagtcaacaaaacctttaaaataaatttgatgcttttcaatttcattaatttagttttgttcaacttattctttatttgcttaattaaggtaatgttggctccggcgcaggtccttcagctccaacaaacaaggattcaattcaaatgaaatcaacactgttgatcagcggcgacattgtg

SEQ ID NO: 61578 - DNA, 788 bp, Heterodera glycines
atgacccgttatcgtcgaaccggctccatttatccccgctccgcgcaactcattcaccgacgaccccaccatcatcaaagcgcaataccgcctccgatcagttttatcaacgacatggagatggctgatcaggataaattaattgaaaataatatgtttgatgagcatgccattctcccgtcggcatttcggccaccaccattctcggcatgtgtttcagctgctgatcaccggctgtcaccaatttgtgcatcatccgatcagtccgggttgtccggcgctgatcagcgtccgatcgtttgccatgccgatggagcagtaggacagcaattggaaacggagttgaagcatccataccttgtgaaaaggtaagctaatgtgccaaattatcaaaagggcctaagcatttgcctggttttttgattagagggatttcgggaattcatatggactaatccgagtaaaaaaaatattttttaaagaaattgaaaagtaaatttaaaaaatagaaataggtactcgcgttcaatttattatttgtttcaatttttaaatcaatttaatttagacttttggattgctaattggacgacaaaaacacttcagcatttatgaaaactgtgataattttttactgtgatagaacaatgcattatttgaaaatgtgatcaattttataaccattcatttttacaatgttccaaacaaatttcacttttaatgtttaaattaattttgattaggcatgcgaattaattaacccttttttattttgtaaatgaaataaa

SEQ ID NO: 61579 - DNA, 790 bp, Heterodera glycines
  unsure (1)..(790): unsure at all n locations
cacnagcagtggccacattatccnncaagtgaacgaactgcttcaacaacaattggcccacctgaacaatggccaagtcctcctccaacagcacaatttgattgccaattgtgctgcagctactgcttccgcatcagcggccatggacaacaacaacaacgacaatattaggaacaacgactgtatgtcttccacagtaccggtacttgcacaagcggatactgtacagcgaaaagaaacggtggtggacaataatgatcacactatgcacggcacaaacatggacaaaaggatgacggtattgtccgccgctgctgatcagttggagtccttttgtaagagagtgggcaatctttgtgatccattattgattaatttataatcatatattcccaacaatttaatggatattgtagtttagaatacggtatcaatttcagctgtatattactatgaaaattattgtcattagtcaaaagaaagtttgttggtctttgtgacccattaggtgcaaattggcaaagaacaaattgccggaaatttacaaaaaatttatacacttacagaaaaaaagatgagactaagtgactagtaaatttttttttacaataaattttgtaattttcagcacgaaacaagttgggccgttcctacaatcctggtcggccactggtaatgcgctaatattttttaattaaaattcacaaatatttttttctagggcatgttggatcggcaaaaaattctgaacctgtaccagagggggctgaagattagtcacattgccaaa

SEQ ID NO: 61580 - DNA, 707 bp, Heterodera glycines
atgtcattggccgccagtgaaactgccgccacgagcaacaataattataatcatcattatgaacagttgtccgatcagttcaatttggcacaacttttggctaaccaacaacaacaagaacaacagaatgaatcaccactgatcagcagaatgcttcttgaacatcagcagcactatcagaaccaacaacaccatttgttacttcgtgccgcaaattcgttgtccattagtggcaataatgataatttgccgttgttggcaccgccaaacaatggctttcatcccttgccaatgcttcttcgactaatcacaatgacgtcaccacaaccagcaacaacaacaatatgttgtgatgttgggagaagcaacatgaacatgagcatggatcaactgcagatgatgatgaagacaatgatcaaagttgaagatgtaaatcaactaaaactgcaggtggaagaacctgtggcgacaaattggcagaagtcggcatttgttgcggcacaacagccgcaatttcagcaacaacagcaacttttacaacgccaaatgatcatggaacaaatgctctgggaactattagcacgggtaattagcattaattatatggattatttaataatgcttagaatgttactggattaatagtttagaaaaatatttgtataaaagctttttttaaatatggttttttggtgtaaaaaaataaa

SEQ ID NO: 61581 - DNA, 1036 bp, Heterodera glycines
atgcacgcgttttgcgctcgagctatttatcatcgggcttatcaatccaaagcgaaacaacaaagatggtgttttgaacgaataaagggcataggttattttgaagaagtgtcaactaacatgcagcaataagcctgcaaaatctaataagtggaaaatacatgagtatagaatttattttcagaaagtgtcaacagacttttggaaaaatatgtttgcaatttatcaacaattttgagaagtgagttagaaatgataaacttcacgattcaaaccaattttcggtgctctaattaaccgcgataaaaacatccgaatcaattaaatagcttctgagataataaggtttatcataaaatttcatttaaaaataaaccctcaattattggtattgtaaagcataaaattggaaattaatgcaaaattactccctggggagaacagtcaagaaaaagaaagaaaaactacgcaaattaacatttaatgcaaaaataaaataaataaaaattaaatttcaactaaaacgttatttacaaataactttaattcgaatttcactttaaactaatctttcgtttcacacgatgttcattcactttgaccccttccggccattaccgccgatgctgctaattgcttttacagtcagctgcttgcatcttaatggaatgatgcttatcaccgcgttcaatcgtcaattgactatggaaacattatgtaatttcccatcaaaagcgaacggaaactaagaaaattctttttatttggcaatatttaaaagcatcgaggaaaagcaaagaaatcattatcactcccgacaacaatttcttatattgcttaagcttaaaatgatgaccaaaattcaaatatttatagcataaaatttctttgtttagccaagcatatattcaaatcattcccaaatatcccctcacttatttcaacacagcaatcagtgcacattttcgtggcttatgtcacactcaaaaaagactggctctagggccaccagtcaagagagggatgaagaaataaa

SEQ ID NO: 61582 - DNA, 348 bp, Heterodera glycines
tggtttggtgttattttagggtttgataatttcagcaagcccacactccgttagcatttaaaactcccatattcgtgtttacttcctctgccattttatttaaggcccttgtgtttgcatatgcccttcgatttacaattctaaatgatctatttacagattcctctaggcgtagaacttctatgtgggctctttccaaatcgggaacctttaccgacgttttaccattccaaaaatttcggtcaatgattgttatgtttatttcttcatccctctcttgactggtggccctagagccagtcttttttgagtgtgacataagccacgaaaatgtgcactgattgctgt

SEQ ID NO: 61583 - DNA, 836 bp, Heterodera glycines
atgcaactttttgtcagtcaaatgaagcttttggaaaattcagttgggaacccatttattagtgaacgaagaaaggcggacgagtcaatggcaactcgtagaaaaggcaattcgtatgttacaaaataaagccaagtttaagcttaagcttaagactaaagcctaggtctaacctaagcaattctacgagctgcctttgcacaacattatacgaattgtcatgacaccaggcggacgaaaccaaatttccaaattcaaaaataaatggcccataaatttatatttgactatgaaaattcttattttctaatatcataaaaaatattcgaaatttcttttaggtcagaaaaggaacccaaatcccatttgtaaaaatgcgattctcttcaacagccatctttctgttggtgttggccattgcctcccatttgaacttttttcagtcaacggaatgcgttagttttttgccaaaaattattttaaacgataaataaaaataatttttgccaaaaaattaaaaatatttaaaacaaaaaatacgcattcaaataaatgttttaaaatattatttaagcaacaaatggtaatgcagcaggtggtgaaagcgtaaaaaacaagtcatcttctacgacacagaaaaaaacaaggtaataatgacaagaacgggatttttaaatattaggatacatatttctatttttttcaatattttgataaatatgttggcaaaaatttttaatttcagttttatttgagaaattgagtgatcattttctgtttacaaaaatttcttatcaaaaaatcatatgtgctttaccttcggaatctttaataaa

SEQ ID NO: 61584 - DNA, 215 bp, Heterodera glycines
catcttcggttgtgccctgtcccgctgagttggcactgtgccgtcaggcggtgttggtcaattcggatcagcagcagcaacaacagttgcacgactatgagcagcgtccggtcatcgttggctatgatttcaacgccggcattcaatgggaggcgttgttggattcctttttgaccaccggcttccaggccagccacatgggcatcgccatccag

SEQ ID NO: 61585 - DNA, 367 bp, Heterodera glycines
atgacccgccccatctttacctgtgcgtctcctgctgcttgtgcaccaatgctttatgatgatagcgttgttggtgatgatgttggtgatggtgatgatgatggtgagcatgtgcatgatgtggctgcggaatttgaagcattgtatctgaaattttcaaaaatttcatgaaaatttttaaattccagggcgataggtatagccttagggtaccgtaccattgttggcatccgcttcatcggccagggacaaaacgtcaaatttgagccgcatatttctggtggcacacagtccaccttcagtgttgttcaatcccatcaatgtgccgtttgaggttgctgaacaaaaatgttgagtcaaaaataaa

SEQ ID NO: 61586 - DNA, 1354 bp, Heterodera glycines
atgccgggcgcgccccgtttcacgcagaagccgtccatacagcagaccgcgcagggcgacctgctgatggagtgcctgctggaagcggacccgccgccggaggtgcgttggcaacacgcgggcaccgccatcaacgcgtcaacgcgtgtccaactgacgctgatcaatgtgtcgggcaacatgtacagggccaaccttgtgatcaaggtgggggtaattagtgttaatgcggcgctaattggcaaagtcatatattttgaattttaaaatcaagagtggacccttgtggtttgcaaaatgtacaatataatttttgtttaatgtgtttgattttgcctatcaaaccatttattttaaaatttatttttaaaaatttatttcaccaatataaagcaaataaaagtgatcagcagaatcgcacatttttaatgacttttttgtaattaattatttttgttttatattttttaataaattttgggacccataataaaattgatctgaacagcaacaaatttttaaatgaacacaaaaaagacaagaaaaagcttatccaaaaatgtcacaattttgaattttatttatttatttttatgcattttttaataataattcatttttgaggtatttatttaggagtttgatcttttatatagtagtttttcaaaaaagtaagtaatcaaagcactacaaaatttaaagagatatatcccataaggataaagctaatatacaaaaggaaaagctacaaaatttgaattcttttttttttattttggaacccatattttttgtttggcatttttagcaaaatttcgacacccccgcattttgttaaattcgacaattatgttttaggagcccagcgcttcggacgggggcgcgtacaaatgcacggcagcaaacaagttcggagaatcaaatgcaaacatcaatttgaactttgccggcggggaggaacaaaagtcgaccagcagtgggtcggcaaaagggccaacatttgttggcaaaccgcgcattttgccacgcgacggtggtgcactgattttgatggagtgcaaagtgaaaagtggcacacggccaaccgtcaagtggagcaaggacggtgagttaattggtcaattaattaaaggattgattaataattaattaattcggtatttatgttgattacggtgggttaattgacaatttaatcgatgaacccttaactaattaattgattggttaacttaattgtgttaattaatttgctctaattctcataggtgctccactaagcatgggcagcctgtaccaagacgtgttcgccgaccttggggacggcacctatttatgccaactggagatcagg

SEQ ID NO: 61587 - DNA, 917 bp, Heterodera glycines
ttccatccaaaatgaaagcagcaattatccgccctttctctatgtgattcacacttcggaaatgtcttcctcaccacatggcgacgaggacgagggcgaagaagcggccgctgcatggggccaagactcatacgaaacgggggacgaaaatgaaatgagtgggaaattttgacaataaattaagcaatttcattgtgctttcattagtaaaaaaagtgttttgtggccattaaaatttcatttaatttatcataggtccaataatagaacccccgtaattctaaaaaataaaaaattttagcgggcgggggtggggttaagaacataaaccgagatgggagcaactcgtccccgaccgcgaaaaagaaaaatctttcaaaaaagaatattattaagataattacaagaaaaaaaaaatttttttttaaacaatttcaagggaatttttcaaaattttatgaagaattactaaatttttccaaaaaaaaaaatcgctgaaaattattaaccttgaattttcttatataaaagaatttgtaaggtttttttaaagtctataaattttcaaattataaaaaattttgtggtggggggggcgtagtacatacacccaaccgaatcagccttttatgtattcctttttctgcttttcgccccaaaaaattttttccgtgactattttcctcacgagtaaacgaagcatggaaaaaaggacaaaggctttatttaaaacttaatttcagtagtttttttcctctttttcagcttattattcatccgcttcatccacttttacattgatcagaaagcattgtggttgttgctgtttttgttgtgttgatcacttgctggaccaacaaaatcatctgctgcagatgatcccaaacacaatcgccggacagaaaaatgccaattaa

SEQ ID NO: 61588 - DNA, 402 bp, Heterodera glycines
atggaggtggacacgaatggaactgctgcgcagaagaagcggcgggtgccctcatccaaaaaggaagaggagaaggaagaagaccaactggtgccggagaagcgagtccaaatccatgtgaggcctgagggcaagggatgttgagggattttaaaaattaaaaaaaaaatacacatttttatattattttccaatttcttaattttaagagtccatccccttcggaaagcggtgccacaacgccaacaaaaaagggcggcaaaaaatattccggaagtcgccactcgacccaggaagatgtgggttactgtaattcactaaacaagtttactgtacaattctttaagcattaaaatagtcaaacagcgttttatgattttttaatagtctaattgatttcga

SEQ ID NO: 61589 - DNA, 1977 bp, Heterodera glycines
atgtcatggaaaaacgcggacagcagagagtcattttcgtccgcctctgactcaccattgtcccacccgttggacatcattcacgaggaggcagctggcccgtcaagtccgagcagtacaacaggcggcggcgtggaaagtcatgcggaatcgttgtcctcagtttctcccgcattccgaagcccaacaccaagccatgatcatgatgtcattgcacatggaggacatgccaagacaacaatcagcaacaattggacaacactccgaaatcatacaaagaccacaacggcgccaagcagtacaacggcggctacacggaatgggaccaataacaatacgctcgtcaagccagctgcagctgcgccaagcttccggagcgccacccgggccaagcagttgcgtgaagaggcggaagaggaggcacaacggaaccgcgcagttgcgcaacgccggatcagcgcggtgcatgagttcgtgctgaaccggctgccacgccgttcggtggccagcaacgcaattttggacaacatcattgacttccatgctgcgcaaccggcactgccaacggtggaggtggagcgggcaaggagtaccgctgagccggacgtgccatgggcggctaagcgccggaacagctccgtgtttaacgcggtcggtccacacattcgactaaagtgccaaaaactgtcatcaactaatcacggcacgacttcaaccgaatcacacctaacacgcccaggcacttgagaaacttttgccacactaatttattcgaaatcatttcctcgtttttacaactcgagaatcttgggcgataatgtgggaatatttaatattaagttaaacgaatttttaacttgaattaattcgttataaaaaataaaattaatcaaataatttattcattttaattatataatttgtttccctatattaatccgagtataaaaaataattttttaaattaatcaaaaattcttttaacatgtttttaatccgactatattaaaaatgactttcaaaaatttttttaattttgtttgttttttaaaacgccgaacaatgatcttccaaaaattaacatttaatattggattttaatgtttgtatttatattttcaaaatcattttacccgcgctaagccttaacaaacattgtactaagaaagtcttaatttaaatttaaaatatttctaatcataataataactgttttaaaacacacttccccaaatttaatttaaaatatttataaaaaccaaaataactgattttttaaataattttttcacccaatttcagatttcacaagtcagcgacgacattccggccagcggactgaaaattccgccggagcgtcgccgtgaactgctcgcgctctccggcgggggtggcgaatcggaggacgagcgaacgtcgtccatttctgaacaaccaccagcaaaaaaagcgacgacaacaatgaaaaagccatcagtgaccatccaaaaagaggaggaaaagcagccagcacaagccaaatcaaaatcgccatctccgcgaccagcaaagtcaccgtcaccgaatccgaaagaggtgggtactgtacaaatggtaccggtgccgtccgcgtgcatcattaccatattccctccggcgggtcgccgggaagtggtcgaccaattcggcatttgcttctactcttttaaatgcattttcagtgtgtgctaattagccacttaagtattcatgatacggtgtcctgaatttgatgagaccgtaatcatcgaaaattccgtaaatttatgagccgacaattccaacgcctaatttttgcagttttttccgtttattttcattttgaagcttttttgaattaaattgcatatattttggcagttattccgttgcaactaacaaagctaatcaacaaaatgccaagtcaacagccgcggcgcgtaattttgaaaaaaaaacgaatcgcattttttggatgga

SEQ ID NO: 61590 - DNA, 709 bp, Heterodera glycines
atggccacttccatcagcaccacatccggcattaacggggacgaaagtgggccttccaagccggccaaaacggcacggtactcaccagttggaagcgtggccaaccgttttgagtcgcgcggtgccaaatcatccgtgctcaccgaaatcaatcaaacctcgttgcgggtgaccagcccacagcgcaaaaacgcttttccactacaagctgctgctgctgctgatcaacaagccgaaacttctccaacaccagaatatgtgcccatggaggaggttgagttgttgatacagtaatttgaatcatgggttttcgcgcgcgcggtaaaatttaaattcgaatgaacggcgcaagaaattttttaaatgctttcctatggcacagcgtttttctttttgccaaatttacgcgcaaaaaaagcattttgataaagcaaaggcatgcacttgttgagtgagcaattttcttgtcgtattattgcgtttgttctttgtccacagtgacactcacttacagtatactgttgtgtctaccgtatgcaattttttgtttgaaaaaataccctcgttgcttgccttaccacctccgtgctcaattttttggtttgattccaggccaacggtcgtaccccaacaatgatccaggttggccgtaaaaagactggccaagcactgatcagcgagccgacggatgagtaccgggaaagctaaa

SEQ ID NO: 61591 - DNA, 1230 bp, Heterodera glycines
atggtagcgtctagccaaactgtaccctcatgctggcccgcctgtactgctccagctgggtggcctcgcgcgcctccgcgctctctggccgcaacgaggcgcgcttcagcgcctgcacctcttccggacgcggtgacagactgtgccgcggctcagacaagcggtgcttcaagtctaccgcttccagcccctccttttggtcctccttcttggttttggccgttttcttcagctgcacctggaggaactcgtgctccacccgcttcttgcccacttggacgccttgcaggcgttgcattgagttgcgcttcaactgtgtgccatcctgggtgagatttgtggttgtggtgtgtgtgtgtgtgcatttgggagattgtatgggttttaggtgggtgggtgggtgggatggatttttggcatggggatgaggaacatggattttaatttttttttaatttttttatttttacgaataattcccgatgagggagtttcccggaattttctcaacctaaactcgacaaatgattgggggggggggattttgtcctggtcccgccacatttctatcccgatggttcggtgagtaaccctaatttacgaaaaatttattttatggtttaattttttaatcccggcacaatgcttttaagaaaagttatggcaaatttagtcgaaaaattactgtccaattaactaattaagattttaccagaatcattatcttatcacctgttccgacatcatatcattattgggaattattagtagcacatgttgaattatttgaacagaatagggtaaagggtttcaaccaaaaaataaaatgtaaaataaaaattattataaattataatgatgaagtttggcaacaaaaaataaacatttgtaattaaataaaaattaattaattaagtggggaaacatttaaaattgagcaaacaaagggagaacaaggggaaaagcagcagataaacacaaaattagaagaagtgcttcttcatcaagaaggacgaaatgagtaagatgaagaagatgaagattacaaaattgggatgcttttgaagagcaaaaatttaaaaaaaggcaaaaaggaaaaaaatggcaaataagacgatacgacgataaaacacgaaaaaagctttcgatcgatcggaaatttcaatttcaaaaaaatttcgctaatttaaatgagcctaattcaagcaaacttaactcaatggtaataaa

SEQ ID NO: 61592 - DNA, 268 bp, Heterodera glycines
gtttctctgattatttccaaatgtcgaccacaagacgaggacgagtacacattgatggtgaagaatgcgcatggcaaggacgaagttggcgccaaactgcttgtcacgccagcagctgaagtgaaagaaaaaattgccctaatttaaatttaaataataattttttttttaatttttaattttcagtcaaatttggacttccgggccaagttgaaaaaacgtgacacgagcattagcatttcggaacaagaaaaacagcgtcaacgga

SEQ ID NO: 61593 - DNA, 172 bp, Heterodera glycines
atggagtgcaccctttttcttggccttttattctgtgccacacccaccgaaaacggagctgaagtgacgcataaagggactgttggaggcgaacaatacggtccaattcggcatcactttggcgttccgtgcacaccgcaaacagttcaatctgtgacaaagaagagtgatg

SEQ ID NO: 61594 - DNA, 1265 bp, Heterodera glycines
atgctcgagccccgttctgcttcagctgctgctgctgttcactcactaaccaattttgagaattgccacgaattggaggaaatgcagcaattaattgacacattggccggctcattaagaaagcaattagatgcccttgtgtcggtcaaccgggtgaggaaaaaagaagaaaatatttaccgtattccctaaaatacagcccccccccccccctaaattagaacttctctgaaatgaagccctcaccccctctttgaggggattcaaaaataaagcccctgggggatttattttaggaaatacggtaaattttagattttcctgaaaacatttttcggaattttctaccatttcagcagtttacggaaaatatccctttttggctctgatttggtcgcaaatccgtttttctccggaaatttactaaactttttcatttctggaattgaattttttttttcaatttagtccaggccaattttctgaatttattggacaccatttttggtttccgaaatatgtgcttaaatttctagaatttactgacaatgggcccttttttcctaaacaaatttattaatttttcgggagttttcctgaatttaatcgcatttatttaattcatttttaatcacttttttttaactttcagcaaaaagtccagcattgttctgttcggtggaaaaatgttaaaaattcctttttattcgctgatgccatcccgggcaaagagcgccgaaaattggagtcacagacggacgaatgccgacttcgcagttcactgcttaccgacaaaattacggtagggccaataccgtagtgtagtataaatttgttttttttttgtatgattttgaattaaatattatattatttattttggcatagaattgcttggactatttgcaaaattttgacactctgctcaattccctgcaaagtgaacaaaggcggaaaagcggtggtaaataatttgatgttttttaaggctggggggatttatttatatttatgaaaattacaaaatattaaaataaataatatttatgaaaaaatctccaaaattcagtaaaataaatttagaatttcgaaaaaacaatttaaaacaaataagcgtgttgaaatgttttcaggaaatgagatgaaaatgttgaatttaggttgattcacttcaattttagtgtccctgtaaagtttggtgagcttctgagcacttatcgaaaaattaggagggaaaaattttaggaattaattttgtaaaaaaa

SEQ ID NO: 61595 - DNA, 280 bp, Heterodera glycines
tggcgcccccacaaagtgtccaagccacgaaatgtccaaaagagtagaaacccacgaaatgtccaaaagagtagaaacccacgaaatgtccaaaagagtagaaacccacgaaatgtccaaaatttttcaaaatttataacaacaaaatgagtctaatttaggatttttagggttttcggggtcgctgaatacgaatataccctttatattactccttgcctaaccttaggcccatctgaataataaaaaactaaaattcgagacttggatatttcgtggg

SEQ ID NO: 61596 - DNA, 214 bp, Heterodera glycines
gttaatggagaaaagaatgtttgattatttttgtcagagagcagctgcggaatggctgacgaatttgccaagccgaaatttgacggcaaaatcttccaaaaccccgacagcttcacaacatggaaaaacccgccttcggcaggggacccgagaagttggcgggacttcattaaatggaaatgggatgcaaagagcacgaaactgcccaatttga

SEQ ID NO: 61597 - DNA, 976 bp, Heterodera glycines
atggcaaaattaattttgttggcgttggcctttctgagcatgtttggcattgtttgtagtttggaagaaccgtaaaattttctaaaataaaaaatcctataaattttaaaaataatttaaaattgaaattaaatatttactaaaatcttagtttaatttaaattattgccaaaaattggattatccataatttaattggccataattttagtcgagatctaaatgtgttcaaatttcaaaccgctttaaatgccaatgttataatttttggaatttttaattttaaaaatttatttttatttttttagctccgtttgctgtgaccagtgcggcaaagagtttttggaatgccaaagcacgtgcaaactggagcatcgggcaggcaatgtggaatgtccagagtactgcaatttcgtgttggaagactgctcgcgcgataagtgtcgtaagccatgcccacgtcccagagataaacactgaaaaaagagtcatcgagaaaaatgaattcgatgggaaaagcgatggatggaaaattgtgataaaatccatgaaagaattaaacaaaatttacataaattttatatactaatattattgtattttgcaaattgattttaaagaatttaaagagtaaaaatccaactcatactaggcaatctcgtactattttatgacaaaaaaaaaaacaaagtcgtccaaattaaacattcttggcatattccatatcccttaagattttctatctatactcagacttcaagaaaattttattggttttcaaaaaaaccaaaaatcgaaaaaaaaagattctttttttttcgtcaataattttttaaacttcatcaatcagttttttagtttgcaaagaaatagagaagcttaatgttaaatttggttgacttaagcaaaaattatgaccatttttttgcctacaaacagcatttttaaagatgaattgtcacattttaagcgacaa

SEQ ID NO: 61598 - DNA, 308 bp, Heterodera glycines
atgtgccattggaatgaaacgaatgccacaaatcgaacaatggcaaatgccaacacttcgcccggcccatttgggacacggagttgcgactcgccattggtaagagaaaaaattggaaatgaatttatagttggaattgaatgaatttgagcattttcagtctctcgttaattttatggtgaaagaagcacagaaacaattggaaagccccgattatgtgatttggacgggggacaatgcggcgcacgacgaatacgacgagaaaagtgaaaaggaaaagcagaaataaacattaaaataagaaggaa

SEQ ID NO: 61599 - DNA, 489 bp, Heterodera glycines
tgccaaaaattggcaagaaataaatagggaaatttggcacaaaaatgtgcaaaaatttggtaagaaataaatagggaaatttggcacaaaaatgtgtaaaaattggcaaaagatagggttaaaaattgtggcaaaataatgccaaaaattggcaagaaataaatagggaaatttggcacaaaaatgtgcaaaaatttggtaagaaataaatagggaaatttggcacaaaaatgtgtaaaaattggcaaaataaagggttaaaaatttgggcaaaacaatgccaaaaattggcaagaaataaattgggaaataagggggcaaaacaatgccaaaaaattgcggcaaaatggcacaaaaaacggtaccataataatgccaatctggcacataaataataaatggcaaaaagtaatgggtaaatgggtaaacaaatgccaaagaaggaaaaaattaaggcataaataaatgataatggattattgattggct

SEQ ID NO: 61600 - DNA, 87 bp, Heterodera glycines
gttggtggacaaacatttcgatggcaaaagcgaattaacaatttggagaacaatcataatagacaaggacaaaggaccagaaccgaa

SEQ ID NO: 61601 - DNA, 437 bp, Heterodera glycines
atggaagcaaccccccgccagattgatctccaaaagttgtacaatgatctgatcggcttgcccggagtgatcggtgtccactctttgcgtgtttggtccctgaaatcggacactttcgccgctactgcccatcttgagttggcattcaatggcgggagtatcaaggacaaatactttgccgattctgtagtggcaatggcacagcaaaagtgaacattttgcctcaattccatgtcaattaataataatatttaatattaaaaccctttaaattactcaaaaaatgaataattattttaaaatcattttcaacaaaaaaaaacacttaagaaatatcattatcattttttgggattgttaataaaagtgaaaagcgtgcaaattgcttccttttcagaatgatttcgcggcatcacattcgctttgtcactgttcag

SEQ ID NO: 61602 - DNA, 494 bp, Heterodera glycines
atgaccacaattacaatgccaatgtcaatgttaatcccgataacatcaaccatttgctcgttggtgtttctcgaaattatgaaatgcgcccgtaatttttcaatgctttgttatttttttttgttgttaacacattgataaatattttttgataataaattaaacatttttagaaaaaaatcagaatataacccatgtgacacaaaaacagcttgccagactaaaacgaccccctgactaaaacgtcccctcagactaaaccggccagactaaaacggccagactaaaacggccagactaaaccggccagactaaactgacccggtccgaggcaatttttgtcaaaatgatgatatatgcctctattcattattttaaccgaggtcaccattactctcgatcccctccccttccgtcatgtacgggtcggggtccctttcccctttacttcattacgttagcatatcgtaccttatgggatatctgccttcgga

SEQ ID NO: 61603 - DNA, 322 bp, Heterodera glycines
atggcttcttcatcacatttatcttcgcaactacaaaattgtggattttctggacaagacactgcgtttgccattgaatacgagacgggtgctgcagatgaattatactgcacaactccaaaacgccgaaaatccgacctaattgcgggaattgatatttccaacccaaataaccgaagagaatggtcagaaagccgaacgtttaaccgattttatgactgtgttctcgataatggaggcaatttaacttcacttgtcgcatgcaaattatgcaatcaatctaattgaggtaatttctctaaatatctaaaaaatcattaaa

SEQ ID NO: 61604 - DNA, 96 bp, Heterodera glycines
accagggatgtgccgagccagacaaaatccgattccgattaaatcgccgattccgattatggcccaaaatccgattaattgcgattccgattacga

SEQ ID NO: 61605 - DNA, 2268 bp, Heterodera glycines
atgaccaaaatttctaatgttttcctccggcggtgcgtagggctctcaaaactttttttatataaaaaaaaaactggctcaaaatctctaaaatattttgctgaaaatctgctaacaaattgcactcaaatttgcaccgtcggaccccaaaaagtgttttttctgaaaaagctttgcaaataaacaattttaatgatttttttaaggttctgctcggttttatgcgtcccctgctggggtaggggtcactttggcgtagacaagaaaaagtttgattacttttttttattcaaccaaataaaataatgttgatattaaacgataggtctaaatgttctttattagcctgcaaaatttcaggaaattatattcggtctaaaaagagatatggcgcgctgcgccaaaatggccagaaaaatgcgatttttgaggttttagccataacgtttttgtatcgcggctaaattttttgaaactttgcaggttaataggcactatcaagtcattaaaatcataccaatattatttaatttggttggtaaataaaaatgctatgactttctgcgccaaaatgtcctgcgccaaagtgaccccgacccggtcccctgagaattttaagccataactttttcttacttggccaaaagctatattcttcgtatcaaacgaaagcttacatgtatagaagcttttgtagaactttatttttatctaaagtacaatagaaaaaaaattatactcgaaaaatttgaatttcgtgtttctcaaattttaatgccagtatttgcccttttctttcatttataaatcccgggacttaaaactttcgtttgataccaagaatatattccactatagcttttttatttgttatccaaatccatcaatctaggtatcatttgaaagctcttaatttcgacttttttgcaatttaatgttataacttttttagtaattaagaatataggcattgaccaagtaagaaaaaaattaggtcctaagaaacagaggatgataattagtggtaattcatgggacgcataaaaccaagcaaaatcattttttcaaaatgataattttttgccggaccggctcagttcggccccagcccaagtttttgatctataacttttttctttgtcaaccaaatccaacattcttaatatcattcgaaagctctttacatactctattagacttacaaaaagcaaaaaaaaaattttcaacaagcaaaaaatttatgatgaaaaaacttgaaagcttcgactttttcgcaaaattttcatatataacttttttggtaattgtctaatcgttaagcaatagcttagaaaaagcttctaaatacattaagctttcgaatgataccgagattgttggactttggtgacaaagaaaaacgttaatagtctaaaaattggctgggccgaactgaggtagaccgtttttggccccactttttgttggcaaaatggtgattttgaaacctttcatctgctggcagacagacctcttgctgaataaaagcattccattttcaggtgcattgatcgctctgtcatcgcttttctccgtgccaacaagcaaatttttgacagaaatggcaccaatttgcagttgagtgtgtcttatgcattcaaacatgatgtgatcagaccaattcggcttgtttttgtccgtcaaatttggcccatttttgcgacaaacattcgctgcctgtacattcagcgcattggtgattttgtcaatttgcgtcgtctcatttcaaagacaattctcaccgatctcgacattcatatggtcgattccaattttatatcgcccgatgcaactttttctactggccaagcgttggtcaaatggttgcacacgccgacaaaagacgggcagccaaagcgattgtgtttcaaaaattttgacgaacaattgatcaacaaattcaaaaaggtgtggcccataacaaattcccgcccaggtcgattttccaagttccggccccggtcccggcaatttcaaaattccggacgtcaccaattaaaatatggttttctctaacaatacaagttgcagtgctgcactttgaacacaccgagtcaattttgggcttccagttcaataaataaattggcttttgtaagatagtaaagggacaaaagacggaggttcgagtccgttgtgctacatgtcatttttttattaatttttgtccaaaaaattaaaaaatttcgattcgaagtggattcagttcttctctattgacagagataa

SEQ ID NO: 61606 - DNA, 1959 bp, Heterodera glycines
atgcataaagcattgcataatttatcagaatgggcaaataaatggcagatcagaatctcaattaaaaaaacttttgtacttcatttggggaataaaaaccccaaagaaatatataaaattggtggaaatataataaatgtcgtggatacaattagggatttgggcataaatattgataataaattgcaattttccaatcatgtcacacaaataataaagaatgcatatttacgtatgcgctctttatttcgggttattaaatcaaaatcttctaggatttggattattttgtacaaaacttatgttagaccgttattggaatatgctcctgagaacgctgctcataatggcagtttttaagaaacgacccagcacgatttgtcccacggtctctcgatttattagggatgtgcgagaaatgatttctaccgagaaccgagaccgggaaatgaccccgagaaacgatacaataaccgagaaatgaccccgggaaacgatacgagaactgaaaccccaaaaaacccgagaaatttctcgactcgggaatcgagtttttagccatttttcaccaaaaagtactattttttccatttttggtctccataaatgaattttccaaaattcagtgctcgtagggcactggttctcttatagaaaaatttttaagatttttgaaaaattgatgtttataattggatatttcatttattgacgcctgaagtgaaatagagcagaaatttaacattttcccgtttttggccaattatgttatgattcatttccaaaaatataagccttctccctaattaaaccatttttatttttaataaagtttcatctcaactttttttgcccttttcccaaatatttctttccccgcagttttgcccatttttgggtcaccgtttgcccaaactaaaaggcaacaatttgaataaataaaagataaaaacggaagaaaactatgagttattcaaatatttattattcttatcttttgcccgtcgcattttctccattttttgggtcatcgttttgcccataaatttatttactttttggcctataaatatgtgcacaattacagcggctatagcagaatttagccttcatttgctcatgttttttctgaatgcattaaacaaattaaaattaaaattttaaatttaggttttaaaattgacgaattttctcctctccaacgtaaaaaatttgttaaaattcataattaaaatacaataataaaaacatttttcaataattaaatttgctaaaattaattttttttaaattaatttttcattttcagcaatttttccaaatctgagcacatcggaggaaatgagtgttctgattgcccgaattgctgagctgaatcgagccaaaacaatggagccatctgttgccagttctgaagtgtttggacaagacggatacggtagggaattttgtataattgagtggatacagtatgaaaattatacaataaaagaaatggttttgaaattttaaaatcaaagaaattattttgaaatttattaatcaaataaagcgaaaaatttggccctattgctgcagttcacaggacaataataaaagaaatggcctaaattatttgaaagctttaaactatagcattttatagaagcaccagccaaattaacattctttgtatcatttatagctccaagagtccttttattctgcaaaatttcataaaatttgttttgttcaaaaaaagtaatggccaaaaatatttagaaaataacttttttatttaaaatagagccaaaaattattattttaaattttatttcataaattttattttgaggaatgaatgatgatcagttcagtctggaggaagaagaaggaaaagaacagcaagaagacaggaaaactccgacaaaagatggtaatatacaaatattagaagacattttcagaataatttggtaa

SEQ ID NO: 61607 - DNA, 1400 bp, Heterodera glycines
  unsure (1)..(1400): unsure at all n locations
atgcctggcggtagcaaaaccaactacaaaattcatgtgcaaaccatctcatggaaggttggtgcggttaaaattcacaaaaaattgaaatttgatccctaatcgtgatttatggggcgggtttctgggtcactgatcacgaacgaatctgacattttcgggttcgatattcgaaattgatcaaaatgaatgtcagatttgtgatcagcggcaacccgaaaaccacccataacatattttcatgactttttgaacaaaaattcttcaaaaaaggtggcccaccatctagaagttgatttggaacggttttacacccaaaaacgtcaattttttttggatttattcataaattcagaaaaaaaaccgttgatgctaacgggcgctggcagaaatgaaaaagttgaaaatttaaaaaaaaaatgccgtgacagtgcttgaaacgatattgtaaacaattaaggaatatgaagcgaatgcactgaaatcggacggtgaattggagcgcgaagaagtgagttcaaacggcaaatggttgacaaaaaaatttttaatcaaattttgccaaaacccgtaaataccaaattcagaaccccggacccgatttcttacaaaaagtcgaaactaaaattttcgcatttcaggtggagccactgtttgacccgatctacgaaaaggacaccaaacgaatgaaggcattgattggcacattgagcgaggagaagcggcgcggcttcttgcgcacgcgttacgccccggagggcaccaacaaaacgctgacggcactgatgctggcctccgtgttgggcacaggcgaaatggtggaaattttggtaggaaaaaacgcaatcaaaaactaaaaatttttttatcgtaatcgttgcagttggagagtggcgccgatccgaaccaaatgtgccttcgcaaactcatcgacgcaagaggttcccccaccatgaccagtgagtgagaagattcattaaaaaatgctttttgggggtcagtgattcaaaagggtgacnccttcgcacaccggggggggggggtgggtcaaaacgaagggtacacctcaaaacatcgacgggcgaaacttcaccgggacataacttatcgcaaattaaaaaaaaagaagattttcgtaatactgctgagggtacccacctttttggcagaaaaatgtttgaaaagattgcttaaagacatcgatttcccatcaaattttcatttctaacggcggaaaaattagaatttttatttatttttccatcaattttcagttgtgacgcccctttgggttggcgcaatggatggccatttcgaagtgtgccaagcgttggtcaaacacggggccgacgtcgacttgggcgcgccgcaatttgccatgtcaccactgatggccgcat

SEQ ID NO: 61608 - DNA, 282 bp, Heterodera glycines
atggccgacgtggagcagtcctacatgaccgaggcggaccgccgggcgttggagcgctttcggcgcgctgaacggcgcctgttttccaccgagattgagctggacaaggtgctgttcaccttccaacagtacgacatgctcagacgccgctgggccatggagcaggcacggcaaatgccgcacggcagacggaaaaggcaacaagcggcggcggcagctgtggcggcgacaacggcacagtcaccaaacgtgaacagtgccagccatttggcgaagtcgtga

SEQ ID NO: 61609 - DNA, 147 bp, Heterodera glycines
atggctacgactgactggggccaattcgacgctaacggaactgactacgatgccatctacgacgacacagatgacgaagcgggcactacggacaacgggcagggcagcgggcagggcggcagcgtgctcaatcacctactgacgcag

SEQ ID NO: 61610 - DNA, 571 bp, Heterodera glycines
atgcgggattgcggactgggatcccgcaaaatcccgcgcgggatcccgtcccgcgccggtctctacctagcaccgtgtggcggcaatggtaaattttcaattgccaaaaaaaaaagaaaaaatttctcttaaaatttaaacccagcagaatttctatatttggaaattacttatgtttattatatttctcaaatagatgaagcaccaaaaatagaccaagcaaaattgggaacaaaaatggaactgagagagacggcatggaaaacaactgctggagagaaaagagaaacaaattttaaattaaaattgaaaatccttttttaaaaaaattaatccataaataatttattagcaaaaatataatgaatttattttattttgttttttattttacttatctataaataaaaaaaagtcatcagaatgtaaataatatgttgtgaaaatattaattaaaaataagtttttgttatatttaaatcaattttatagattttcagtaattattttattaaaaaaagaaattttattttataaaattattaaaaaatatacgtaaaatatttttaaa

SEQ ID NO: 61611 - DNA, 150 bp, Heterodera glycines
ttacagcttaactaggccctattaagcttatttccagaaaatctcgcatgaattctcatttttaaattttttatagatttttaaatgtttggattttttttggcttaccaaaacttcatcgaacctggttctttctattctctttcaaat

SEQ ID NO: 61612 - DNA, 1167 bp, Heterodera glycines
atgaaatttgcaaagaaaatgttaatgattcccgaggcggaatatttggctctacggagtgcgatgaatagtggtgattatctccaaaatgaaaaagcgagtttagacgcaaaaatttctcagaatttacaagaccccggcataagcgaggacctcaaggcgaagagacacgattggctctataaagaaaggcgtacggtaaaggggatacttgaaaatagaccacagaaggtagtgattgagaatcatgtacccggtccgaatgttgcaccatatctaggcctcaacactcaatccaaaccacaggagaccgatgaaccccggaaaataattattcctaggaaaagacttgaagagcaaactcctgatcctgaatcagataatgatacaataaatgagttaactccggagccccaaacaacatccacattaaaacccattccgatcaaaactattatacacccgacccttttaaacggtctttttaggtacgtgaaggaaaacaaagatttatttaaaattacggcggccggaaaggtacagtcgaacatgaatttgccgattgaaaacagtaattatagagatgttttgttgtatctcgcggggaagaaagatgaaacaccgcgcggtgcaaaatttctcaaagataggttactgaaggatccgacagtaaaagacatggttgataaatcaaaggtcatgtggggacgtggaaggaaaaaggcaataaaatctataaaaacacccggcatagtgcgagagaagaaacccttcaaaccactaatatgggccagactgtagagaaaattttatcaaaaatttattttaatttaaaatctccggcaagttttgctggaattcaaaaaattttaaatgatgccaaaaagattgacccggaaattacgaccgatgacgttaataaattcctagaaaagcagagaacatacacgattcacaagcccatcaggaaaagattcccgagactaaagacgataccaagtggcttccataccgattggcagtgcgatttgtgcatatttgaccagttgaaaaagcataacgacggttataaatatttattggtctgcatcgacgtgctgagtcgaatgatcttcagtgcaccggccaagtcaaagaagagtgaggacatgatcgaagcttttgatc

SEQ ID NO: 61613 - DNA, 1212 bp, Heterodera glycines
atgcttgttttattcaatataataagttttttatttttcatcgccatatttttgacatatccgaaacagatttgtggtgggccgaaatcgtccaaatcatcagattctcttatggcgcccttattaaattcaaaacggattagtggagcgaaatcgtccaaatcatcagtttcgcctaaagtgcccttattactcaaatcatcactaaaatcatccacacccaaatcgacaccaaaccaatcaaagtcaacaaagaattccaattcggcaattaattgtgaaaaaatcaaccattcattggaaagtttcaagcactcaattattaaaagtccaaatgaatacaggtttaagcccagaaaccattataaacttcgtattttgtcaggcccaattggtaagaatttttgtaataatcataaaattcaatcttgagggtaaattctcggtcttgagtctcgggaattttcagtctcgagcatcgctaccattatttaaatccaagaataaacaatgcataaattttgagaatttatttaaaaacacaaatcctcaattcccaaaatagttttaattttcaaaaaaaagctcccattacttataaaatcacaaatgagggtaatgattttttgaattctgctggtaaaaaagtccaatagcccttctcaatttctgaaattaaagcttattggcttttttgatgcaattagtttgtcatttttcataattttcacgaaatctccgtacctttacttgtcccagaatcagattcctgacattttcgtgttcggaatttctaattccgcttccaaaaaattggggtctcggaatccaaatttttgaaaaattttggatctctaaatacctattttgctaattttgacatatcaattaaggtttttaaaaaatttattctcgtaacatcatccataaaatgtaccaaatttaggcaagccccaaaaacaatttcactttgtcaccgatgaaaagggcaaaataaaatggaatttcacaacggatgtgcgcgaaaataagttcacacctaaaggattcaaaaattgtaaatcaaaattgcctgtaacaattttggtggagacaaccaaagaaagtcgacttttggcaaaatacaaaaattatgcccaaatgaaaaagaaaatgcttgcaagaaaagggaaactttgtaaagaaaacattataaaattcaacgaacttgag

SEQ ID NO: 61614 - DNA, 2325 bp, Heterodera glycines
atgtcgacaattgatacgaagtcaaaccatgctgatgaaatgaaaccgaacatgcaaaaagggaccaaacgagcggcaaccgatcgctcagacgagcctaaacgaccccgcttccttagtgagaagtgccgccatcctcgtttaattgccttcgaagaaagagaagcggcgtgccagtattttgaaaaaattttcaagcgtgacaaatttttgttcaaaaattctgatacttccgagtctgaatcggaataaattcctttaatttaattaaccaaagctacaaataatcaatcgcccattcatgtgcacccattattttttcttatttatatgctaatattattcgaaagctactaatattctaagctgtgaatatacacaattcgatacttgaaaaagcccttaatttgcaaaaaattaatcagaattagcgcaattcatgtgtaccctttacaacccacgtaaaaatatgatttatatgctcgcgcaaaattttttacgaatttatctttagctttcagcttataatcatagcttctaaccaaatagaactgctcgaaatgccatcacagttgactcctgaaatgatttttgataaaatttgcaacgatggatcgacaaaaatggacaaaaatacattgcaaagtctcctttcgaatggcacagatcgatctttcaatcaggacacctgtaggcttctcatcgacctgtttgactccaatcgcgatggcatgattgatcggaatgaattttggcctctttggaaggtgattattgttgcagtgttcatctttgacttgtcgtttagtttttgataacacattgttttaacggttcattttagtatgtggacgaatggaagatctcttttaagaatattgcagccgaaggtgagctgacaataggtgttgaccgacttgaaactgctttaagagaatatggtgagtgggcattttttgtctacaattccgctgtgagaaattggcagcgggcgctagcacaagctgtcgatttctcccagcgggcgctggcaccagctgccaatttctcccactattctaaatagtttctttataggatacagattttctgtcaacttttactgtacattattacgaaagtatgatcgcacaatgtcgggtaatataactgatttagttgttttcaatctgataattatttaagatcgcttacactttgatgattttatttatctttgtcttgtgctgcagcaattgactactccattccgcgatcgtgactttgatcagaaaggaaggattagagtttgtaagtaccatcttcaaaaattcatcccaaataattctttttaggtttcgaagactacatcgcgatgtttttatccacaatattataagattttcgcatttgctattaaattttgctctctatttggatttttattggtcattttacgttcaatgacgcatataattattaacttttggtttaaatgtcactataatcgtctttttgacttaatttccagcaaatcatctcggtattctctccccatcggtgtgtgaagatgaacaacaacaacaacaacaacctgaaacgattccaaattaagccaaaaggccccgaggaacaaccaactttgcgcacgaaaacgctcagcgaggtccaggagtttgatgcggctggctctttctttctgcgcgcaaagattgctagcgttctgttttccatctacaaggtgatggacaaaaaaaacgcttgctcctttgtcgcattatgcttacaatttaggcctgtccgatgcgtagcaacggtattccatgtcgtaagaaacttgacgaggaagacttctgtgtctcgtgcgcacatcgcgccaaaaagcccagccgcaatttgtaccttcgtgttgtactccgagattgcgatgatgaggaatgcgagcagcagacaaccgctttttcccatgtagccatcaaatttctgggcattgccagcgtagacgccttttacaacctatcagagaacgcgcccgataagttggaatcgatcttgcagtcgaaaatcgaccaaactgtgttcgtcaagctcaacatcaaggtgggtagtgtaaatggtcctcccgctattatctagtccagtgtcttctacgtaaaaattatgtcagataaacatgtatgttttaaggaaaagaatgagaccgcgacgctagactggattatttcctcaatatctgaggaaaaaccggtggcggtggtagtggatgttgaaagcagcgatgatgaggccgaggatgggtcatcatcttcaaatggttcacctaagaagcgcaccaaaaagaattga

SEQ ID NO: 61615 - DNA, 679 bp, Heterodera glycines
atgaaaaagggtgaagacgacactgctactgctgctgctgctgtcccacgaggcaaacggcccaactcaaactctgtatcagctgcccatttttctactgaatcagaggagatgaaaagttgtaagaaggaagagccgatggcgaccggatgtcgcaaaggtgcgaaacgacaatacccttattcgttgatgtcagctcgagcccaagatgtgtggtaagttttcagacccaaagtaaagcgtatgaaaataacccaggtcgctaaaacttgaccagttggaggagaaatattcaagaatggaagaggagctttcggaagacagcgatgatgcaattgatttctacgaagacggtattgatgatattgtggaaaagtgagttagcctcctttataccagctagaatgttatccattcatcctttttttttaaggataaatcgtttcgaagcaaaagtgaaaaaatggtcagtaaatcatggaaatacgccagtcgtcaaaaaaccacggttagttgttttcaagcagacagaacgcaccacatattatgacaacatactgaattttacagttataacacaaatgctgatgagaatagcaatgatgctgatgatgatgcgccaacatcgactgtgtacctgaatttgcacaatgacaagatgatcgagaaaacaaattaa

SEQ ID NO: 61616 - DNA, 1005 bp, Heterodera glycines
atgccatccgattctgatagaaaaagaaggacaacatcagaaaaaagctccaagcaaagccaaactcagcctaaacaaccgagatgggatttccgctcgatgtcctattttgagaagtatccgactgagccacaaatggaagaggagatgaggcaactacgactagcgacagcaaatgatcagataggcacaggcgatacccacacatcggcagattcagaacaacaacaacaacaacagaagcaacaaccgttgtataaagagatcaccaaccatgtacataagcttgagcgattctctgtgcagcgccatgtcactgaatttatgcttaacgctcagcatgatgagcccgatgaagcgctacgtcaagcgttcgatgagctcattgccagagctgtacaaaatgcggaaaagaaaagtgggcgcgcagtctcaaaattaggcattatggtgtcagggaaagtgttaaacgatccagtagtgatacctatgcgccctccaatccaaaacaacgtcgacgtggtgatggctgagcttgacaagttgggtcagagcgagggagacgatggaggtgctgacaaaaaaactttgctgctcagcgatcctgtggagatcatcgtcacctgtttgacccctccagtagggtcagccccacgtttacatccataccaaaattggggatacgatgaatcgcaaagaattgtcatacgcaacaaggatagctactgtttatttcatgcgcttgttgcaggccgtgcctatcatgaccgcgatattttctgccttactcataacccaatagatgagcagcagcctcaatttatggcaaacataatgaacagacacgatttttgcaaagactacgaggcattcaatcgtctggtatcaaacattggtcgaatgcaaactgcagttgaagagctgatgaatgcgtcgggcattcaaaaggaccagacttcttatggaattgaacatattcagcaggttcaacaatactgggtatga

SEQ ID NO: 61617 - DNA, 531 bp, Heterodera glycines
atgcgcaaaaagtttttcgcttttacaatttttctgttcatcgttttgcaattaacggatgctgaaatgtcaaacggtaatgttgtttttaacaattaaatgaataagcattaataatctttttacgaaaatggctttaattaaaatgaaaatttttcaaatttttccgaattttataaccgttataatcggacattcacttgatccatttttcataaattttactgtatttccactggagttttttgattggaattataaaaacaaaattttatttgcttttcatggatttcaaaaaatttatgtcgtaatttggtatgttcaagattcaaaattaacattttgttcaattttcaaaatctcttccattttgaaagtatttgatatgtttagagaagaaatatatttttattaattaaaatttttatttcaatttcagaatacaaagaagcgtgcaatgacacatgtgctgctttaccaaagcagaattgcggtcgtggaaggcaaaaagtaacagtaactcacagataa

SEQ ID NO: 61618 - DNA, 71 bp, Heterodera glycines
gtggaatatgccgtgccatcggagtaccaatttgtggactatttgggcggtggtaactacggcaacgtgat

SEQ ID NO: 61619 - DNA, 819 bp, Heterodera glycines
taattaaatccattccttcgggggaccgtgccgggtgccgcggggtaagcagtgctggttcgtttcatcacggcaccgaaccttttggctagtcagcaatcgttgcttaacttgccagatcggacgggtgcgcatgattccactgttccaagcaccccaccaaaagcaaaacgatataaccaaaatataaggaaaaattttttaaaaaattttttctccatcttcctttttgatattaaagcatcagagtgctaaaattaagttgtaaataaaatttggtgcgctttagagcactttctgaaaaaaatatttatgaaacaaaaaaatcgattttttcaagtgtccatttggggtactcaaacatttatggggagcaaaaatccaacgcagaattaaagtacaggctatagggaagctactccggaaggattcggtctccccataaatctgggcgcatcggttcggggggactgccccgaaaacaaaaaaatcgattttttcaagtgtccgtttggggtactcaaacaattatggggagcaaaaatccaacgcagaattaaagtacaggctatagggaagctattcccgaaggattcggtctccccataaatctgggcgcatcggttcggggggactgccccgaaaacaaaaaaaatcgattttttcaagtgtccgtttggggtactcaaacaattatggggagcaaaaatccaacgcagaattaaagtacaggctatagggaagctattccggaaggattcggtctccccataaatctgggcgcatcggttcggggggactgccccgaaaacaaaaaaa

SEQ ID NO: 61620 - DNA, 357 bp, Heterodera glycines
ctggaaaaagtggaaaaggaaatgaacgaacggactgaagaattggaagaaatgagagaaatgctgacgcactttcaacatgtaaaggaagttgatttaaaacaattggaacaacaaattgagcaaagacaaaagagaggggaagaaagaatggacaaaaaggaagaaaaacaaagggaggaaaaggaaaagcaaagggaggaaaaggaaacgaaaggcgacagagaggagaaacaagcgcaaaagagaggggacagcagcagaagaacagtgctaatggtggacaattcgagcgaatgggccgaacagctgcagaaagtgcgggaacgggccaaactctgtgtggacacttacaag

SEQ ID NO: 61621 - DNA, 860 bp, Heterodera glycines
attgtgcctccttcaatgctttcgaaaccgcagaaaattggatcattcaaagtgagccaatcgtttttttgccatcttccccccaatttgcctgtcatttccttgtttaagccacagccatcgccgatgggccttccgcatccgaaaaacggtgtccgcactggaattgtgagtttttgttttggggcgtttcaccggcccccccgtgaaaatttaaaaaagaaatttttactaacataaatttttaaagaaaaatcttataagttgttttcataagaaattctaaaaaaaattatttgagaaattttatagcgaattactaagattttcggaaaattttttcttagactttcctcatgaaaaaaaactaaaaaaatttaaaagatttcgtggggtaagcgtagtacaacacactttgtttggctgtgtgttggtttaatgttttttgacaatcgatgtttaaggctgttcccacttcgatatgggcccccaacgatgatgacatgtacaagccgaagcagtacgaccagcaggaacagccgaagcaagcggagcgaccagcagcagcgcacggcaagctggccgacgacgacatttacaacccgaagcaatacactgaacagaaggctggtggtggtggtcgaccgacgtatgaagccgcacttgccgacgatgacctgtacaatccaaaacaatacagtcagaaaccacaacaacaaaagggcgccgacgatgatgacctgtacaagccgccgcaacaatacaatcaacagcagcagcagcggaagatgggccgaccgaaatcgtatgaagatgagcttgacgaagatgatttgtacaagccaaagcaatacaattag

SEQ ID NO: 61622 - DNA, 892 bp, Heterodera glycines; identical to SEQ ID NO: 31248

SEQ ID NO: 61623 - DNA, 1028 bp, Heterodera glycines
tgtgccaattcccccgtccaaaggtggccatttgacccggccgtgtctctcgcctttcgttagccttggcaaattgccatttgcgcactttttgctgtattccctcgtccaaactgtcggcgcctttttcggctccgccctttgcttccacgtctacagaggtgtgggttgacttgctatttttcgaaaattttgaaaattattatttttttgccagaatcattcgagaaattcgacgcgggcattcgaacggtgggagggcccagcggaacgggcgcaattttctgttcctttccggacgaacacatcggacattacacaggtaagcgaagcaaatgctaatgtaatggccacactcatctcattcatgcttttccttcaggattttctatttttttctccctttctcctttcctctcgctctcgcctctctctcctttgtctcacatttcccttttgcagcgtttgtggatgaaattgtcggcactgcgctgctcctctttttcgtcaatgcgctgatcgatccgcgaaaccaagtgccaaaatgggtgcatccgatcggctttgggctggccatctttctgatcacttcctcttttggcatggtacgtttgtctttggcataatcactccctccctcgtctattggtaatttctgcttgacagaatgtcggctctccgatcaatccggcacgtgactttggtcctcggctctttcttctgtttgccggctacggatgggaagcgattgcgtcagtttttgtcaacagttcaacagcaacgttcaatggcgcagaaacgttgcgcaacacaaccaccgtcagtggaggaagtggggacaagcgaaagtggaagcgagtcggcctcggactccagctattcgttttcttccagtggtgagtttgagtgcggggcagggttgttccgggtcgagaaaaatcatcgggtcgggtttcgggtcgagaaaaaggccgggtttcgggtcaattgacaaatttttaatttgtttaaaaatcaaatggcactgc

SEQ ID NO: 61624 - DNA, 235 bp, Heterodera glycines
tgcgtttggcttttgcagcaacatttattaagggtcaaggtgccacttaccaaaaaattggaatagattggacgcgtcaaagtttttcacatggccaaacctatgtggctttgtcacgggttggatcgtggcaacaaataaaaattaaattatcaaatgaaaatattgatggaaaagttgataacattgtttggaaagaaattttatagtatttttggctaagttgttaaataaa

SEQ ID NO: 61625 - DNA, 809 bp, Heterodera glycines
atgggctgtatggtccctgctgaaagtgcatcatttgtgccgatgacaaggattttttcacgagttggtcataacgatgatttggtgcagaatctatcgggatttgcagtcgaagtatgtccaagttgtttaattaaaatatgaattcattttgaatggatttgcgttgtttttcatatgtccgaaatggcggtaattttgcaaaatgcgaatgaaacttcactgataatcattgacgaattggccagaagtgcgttcatgaattataacaaaataatttaattacaatatgatttactttttgcctggcatttattttttataggcacttccaccgaagaaggcattggaatttgttatgcgatttgcgagaaattgctttccactggggtgtctaaatgaaaaatacttacagtattctaaagtgtttgttcaccctttaggcctttgtgttttttgctacgcatttcttggacatggcacaaatggcattgaattacccaaacattgtcaaaaagtaaccaaactgattttaattttataatgcatcaatttcagctatcatttcgcttctgtttcgacgattgaccaagcgacacgattggaaatcctcacgccatcgccacaactccacgaaggaccgtatgaagggcctttatacggtaagatcaacaaaaggcattttataatgctgttaaatccagtgaaattcaggattggaattggctgagttggcgactttacctcaaaaaatcacacaggaggcacgccaattagcagagaaaattaggaaggcgaaggaaaattag

SEQ ID NO: 61626 - DNA, 486 bp, Heterodera glycines
atgaccccccagccttttcgcgacataatgggtgaaacgacgattctcttagagccaaggtaattaaagaatcaacttgaattttaatccacagatatttaacaaaaacaatctttcgtccataattatatcattggatgtaattaaattttttctcaacttcaaatacagttcaaacttacattggagaattaattaaaataaaatcaaaaatttagctaaataatatataatgaaataataaataattcttcaggtatctaatagtcagcaattataattttttttatttaagatttttaaagaaaaatactaataaacatagcttaatgaaaaattatggtttagagataataaaatatcaaatataaataaatttcataaaaattcaacaaatacaatttaaattggttcaaaaatgatcaatttagagataatattattaattaatgtgaaaaactataaataatattcttcataagaaaa

SEQ ID NO: 61627 - DNA, 779 bp, Heterodera glycines
atgcgtgtctggatgttcgtgcagcagcagctgccggtgtgtgcaagacttgtgagagacaatgatttcaaggagagactcttgctaccggtgcgtgcgattgatcagatttacaaattcgaatggagagactcttggcttccttacttgagctttgcccaaataagtactgacgcctcacaccagcgggaaggtggtctctttgcgcaaggcaaccctcacctgagccattgtttttttgataaatatatattttttttttgcttaaaaaggcaatggctcaggatcattgggcttctctgatcatcttcccccctcctccctcggcatctcttatcattttcgtcccctcctcccccggcatttcattagtccatcccccttcaaacttctctgatcatcttccccctcctccctccacatctcaaatcactcacgctaccgttactattgatccatagatccctcctccctattaatcaacacatagatgctccatactctatggtcattcgcgaaaataaattaccacaaattatcaaaatttttcaattttctgcctaatgtttctaaaaaaattattgaggcttctaatttcgtaaaataacaatttaaacatttctatgctttaggcagtcattcgacctgtacctgaagaagatcctcgagggcttcaaccccgacctgtacccggtcgccattcgagcaaaagcgatgaaatgcttggcccaaattgtggaagcagactaccaagtacagcaataatacataatccatga

SEQ ID NO: 61628 - DNA, 448 bp, Heterodera glycines
atgaataaaatagttttgttcgtactttttggtttggtatttggccaaacaaatcctaattgttgttgcctatctaacgaagagaaacaacaattgaacgctgcgagaaaaaccattgaaaaagcatttcgggatacactcagattaaatactgaagcccgagatttcgcggctgtttctaatagggcaatttctgaggcagagaaaattaaagttcgtcatcctgaggcaccgggcatgaaaacatggttcggtaggctattggaatgggtgagaaaagtacaaggattctcagaaaaattaaacgaagaaaagcagaaaattggatttattagaaaagaaatggataagtgtttagacagaaaagatgtgttaatgtgtcgtgagttggcagatgaagctaaagggatttttgaaattgttaagcagtatagacaagatgtcggta

SEQ ID NO: 61629 - DNA, 553 bp, Heterodera glycines
atgtgttgctatgaactggacagtcacagccgtgaattggtgtgccatcgccgatcgatcaaaattgatgaggaaagaaggaaaaatgatgactaatcgaccatttgacctttctcattattttgttatttttcacatttggagtcatttttattttatggaaatttttacctctatttaagggataacgatttgtcatcagcattttgatgcttgaaatttcaaatatttcttgctttctgaccccgggagggatgatgctatgcatgcttatcatgatcataattgatgaatcgaatgttgggaccaaaatggggtgaaagagagcagaattcatcaattcacccaatcactaaaatataccacaattcgaaaagaagtgtttgacattgcagcggaaaatttgggctgtgaaaaaggagagcttgcgactgttgttcaaagaatttcaaaaaacaaatgcgctaacaaaattgatcaccgaaacactcaaccgtggtgcgacattgtggtatcgtctcgataacaattaaaagaaacataaatattatta

SEQ ID NO: 61630 - DNA, 792 bp, Heterodera glycines
atggcaaattccggcgacggaacggtcaatggcaccgaattggtggcacaaattgagcaaagtgccaaaaatgacactgaacggtaagtggtggtggcttggcatttcgtctgtcagtagtggagtttatgatgggaccgaaactcaatcgacggcaccggcattttgcctgattcatactgtctgatcaggtcgggtcacttagtgatttgatcaggtctctctgacctctgattggtctggtctctccatacgtctcattgtccgatcacactgatcggttggctttgtggtttgacccgacctctctttctctcccctccactcctttgacttggtttggtctgatcagtgcctttgatttggtcatttgatcagttggcatgaggttgaaaaaacattttgtgttgacttaccaaagttagtttcagagttgttgatacctttcttcacataattcatgaggcaagaaggcaaaatggcgaaaatggagggggacaaaatgtcgacaaatttattcgaactgtcaaaatttatcgacaaatttacgcaacattggaccaattcatggagaaaaacagtgcaaatgaagtgattgccaagaatgacacatttaaaagtgtttggaccaaactgcgaaattttatggccaaaagtgtagcccaattggatcatctggccaaacaaagggtcgaatttaagccaagcgatggaccaagtgaacagcagacggatgaagtgatcaggcaaaggttcagaagtgattttataaaaaaatattgcaaaatttaa

SEQ ID NO: 61631 - DNA, 78 bp, Heterodera glycines; identical to SEQ ID NO: 61197

SEQ ID NO: 61632 - DNA, 323 bp, Heterodera glycines
atttataagcatttgtagggttctcagcagtttccctgcaaaatttggtgagcttctgatcagtctagaacgttgggtgataaaatgaaaaaaataattaaaaaaaaataatgctggtgtggtaagtgtgaagaactgtgttcctccaggcaaaaaattctaagaaaatttataagcatttgaagggttctcagcagtttccctgcaaaatttggtgagcttctgatcagtctagaacgttgggtgataaaatgaaaaaaataattaaaaaaaaataatgctggtgtggtaagtgtgaagaactgtgttcctccaggcaaaaa

SEQ ID NO: 61633 - DNA, 344 bp, Heterodera glycines
atgaacacctatataaaagtatctcccttcatattagtatccaaaccagaaactttgttggtaaacgtgaaaataaaatactatccggtggtaagaacaaactattctcgtacctaagaaaatatatcaaatgtgaagaaaagattcccactttaaattatgataattcagttattttttctcctgatcaaaaagctgaaatttttgcaaaagttttttctgaacattatttacataattctaagtctttaccttatgatttatctagtcactctcctgtaattaatgatattgaatttaatgttgttgatgttggccgggtccttaaatctttaccaaataaa

SEQ ID NO: 61634 - DNA, 2019 bp, Heterodera glycines
atgtctgaaatatggtctttttataaaaaatcgcaaacatcggaaacggcattatgtaacctttgtcgcaattctttttcgtgtaagaaatcgtcgactaagggattatgggatcatttaaagacgatgcataatgacgaatttgaacaatggcaaaaaaacaaaggaaacacaaataaagaagtactaaatttaaaaggttctgtgatttataaaattttttaggggcaagaaaacaaaattacgaaattttttcaacaatctgatgaccaaaagcaaaaggccgacgaattggttctgaaattaatgttgcggacaaattcatcttttttaatcaccgaatcgcctgaattgagagagctgtacagcaaagcatttcctggatttgaagttattttttctctttattattcctaaaaaaatcattttttgcagctacatagtagggaatatttccgtaaaattgttctaccaaaaatggcaaatgcaatcaaggagaaaatttgttcacaagtttcaaacgattatttcacaataacaacagatggttggagtcaaccgacttcaactccttcattattaaggttataaattctctttatgttatatttaagttaaaattttagcattactattcatcatattgacaatgaattcaaccgaaacgattttgttttggaagcagtacctatcgaatcacattctggcgacaacattgccgactcaatttatgatgcacttgatgaaaacggattaaaaattgagaaattaatttccattgtccgtgatgacgcaaaaaacatgcagcgaatggctagggtcttaggaaaatcaaggtaaaacattttataagaacgaaaattattcgaaaatttaagtcatcaatgtgtggctcattttttacatcttgtggcgcatgatgtactcaaattgggccaaatcaaggaacttacggacaaagtacacgaatgggtgaaattttgccgcacaaggaagggatttgaaattttgagacgccatcaagaaaaacaaaatactgagaaaataaaattagtccaggttaaaataattttctacaaatctatgattttaaattcagtcggttataacaaggtggaattccgtttacaaaatgcttgatgtttttcgtcgtcagaaaaaggcattgctttcaatggaagcagaacgcactgaatttcatttgcttggttcacaggcaaagcgttcacggctcgattttgtctctgatcatttaccgccgctaattcagagtgattttgtatttctgcgccaactttgtcctttgttggagctgtttaacagagaaactgaaagagtaaaaacaatttaatttataaaattttctgattttctcattttaagttttcacgtgaaaagtcaacttgttcttgcattttgccaactctaaaaaggctttttgattttttaaccaaagaagaacaccctcaacaaattatgataattgcgcaaagtcttgctgaatcaattggctctcgaatgcacaattacagagaaaatgaattattgcgaatttcaatgttgttggacccccgttttgcgtatgatctgaatttatttatgagtggtttctggaaatcaattgcagaggatttaattgattttgcaaaggaaagtaatttaaacaattttaaacagaagtttattttattttaagttaatcccgaaaatgaaaccaatgcgcaaaattttaccgaaacacaacaaatgatcaatcagaatctgctcattttacggattttagtgaaagtgatgagagcgctttaaaatgtaaacaagaatgaaaaactttaatttttatttaaaatttagtggacatttgaaacagtatataaaaggataaataaaatatttatttgctaagggaaaatgaataataatttagtggtctggttaaacgtggatttgttcccacggcttttcttcatcggattactgttgccaaatttgaggactttggcattggcaaaaacaatgtaa

SEQ ID NO: 61635 - DNA, 324 bp, Heterodera glycines
taattaaatccattccttcgggggaccgtgccgggtgccgcggggtaagcagtgctggttcgtttcatcacggcaccgaaccttttggctagtcagcaatcgttgcttaacttgccagatcggacgggtgcgcatgattccactgttccaagcaccccaccaaaagcaaaacgatataaccaaaatataaggaaaaattttttaaaacattttttctccatcttcctttttgatactaaagcatcagagtgctaaaattaagttgtaaataaaatttggtgcgtaagtagagcactttctgaaaaaaatatttagaaacaaaaa

SEQ ID NO: 61636 - DNA, 1236 bp, Heterodera glycines
atgcgcacccgtccgatctggcaagttaagcaacgattgctgactagccaaaaggttcggtgccgtgatgaaacgaaccagcactgcttaccccgcggcacccggcacggtcccccgaaggaatggatttaattaaattctctccttcggggatttttttccattaggtcgtccgttagcgttcgattgctctagtcaatttttaaaaatttttgttgaaatatttgtcgtgctctgaagggcgggggggggcgggggccgaaggctcccgcgggggggtgggggggtatatttttccaaaagaatattttgaaaatttttcaaatgctaatgctccttttccatcataccattccgcctttaattctcatttttcgttcacatttttagatactgaaggcgatttttcgtggcccgattatttgcggcagtgccaagcgattccggcgcccaatgcactttttgtaagcatattttttaaatttacacttacgctttgaatttctttcatctttttcattgccaggacccacttccttcggcggcaaaacttcagtattttaaggtacgctttttcatagtaaaataaatggggtattttgccaaatttgtctgtattttaacattttttgctatactaaattttcaggtcggtgccaaattggaggccaccgaccaatgcgagcccaacttggtctgtccggccaccatttgtgcgatccgcggtcgtctgctgcaagtgcactttgacggatgggagagcgaaatggaccagctgttcgactacaggtggccggggaacggatgatggggacacgaaaaaattcggaaattttttaggtctcgtgaactgttcccgattggctggtgtgagatgtacgggtacaagtgagttgtgctgtatttaacaaacctatgtttttcctctctacatttttacttactctctcccatagttggcgccggtaggcgggggaagccgacataaaagcaacgaatatttgtaacttttacgccacaatttttcaaaagtttttgcgtcactgtccccttcctgcccgattttccaatagttttacttgtatttttttttgatttcacaacggattctgtagccctaccctccctcaaaaaaagggtaaaaaagttccatttcccattttgttttttttcagacttgaagcgccaaaagggtacgatttatcgaagaaaaagatgaggacaatcggcgagtga

SEQ ID NO: 61637 - DNA, 1429 bp, Heterodera glycines
gttgggccaaaggatgctttaactttggaaacagagcttttgcgaactgccgaaactaaagaaattgaaattaaaacggaaacaattcaaaatgaaaacaatggaaagccaaaaaattatggaaaaataaaaataaaaaaggaggaaaatgacgaagaaaatatttttataaaaaacgaagcacaaccaaatgaatttgataaaattaaatccgagcaaaatgatgaacattttggtaatgatgaacagaatttggatgaagaaagttcagacgaaaataaatcgggtaaaattttaatataattaaataaattcaataaaaaatgcacggatacagatgaagaatcatggaccgcaagttcagactatgaacaaactgacgaagaaagtgatgaaaagtcgtcaaaaaaaggaaaattggcaactaaatctgtgaaaaattccttcaaaagaacaattgcaaaacgtaaacattaaaaaattaaagtgtaacatggatctggccaaggcctggactttcctgggtacagatccaagtccatgtcggcaacctgggttcttctggacctagagttcctgcatttttgccagaaaagaacaggtccagtcaaatataaaatcaaggtctaggttaggcatgataatcctagctatcctggatgaaattttaaatttattatttaggtgactaatgtttacttcaagttatcaaaaaatggttaatcaggtccaggctttgacaatcccggattttcctggacctggatttgtgtccagaaaattcaggtccaggttcaagtctaagcatttcaaaatatcgaactttaataaaaacaaaataaaataagttttaatatttacaggaagtgaattatcagataatgaaaagataagaattgttaagcaatatataaagagaaaagggagtttgaaccaggtatgcactttttaattctttaaattttctaaaattacaatatcaatattggtaaatttgttcaaatcagttgcatgatactgattcaaaattcaatccttcagaaaaacaaaaagcgggaacaaattgcaagtgaattgggtgtgacgattcatcaaattaaaaattggacaaggaaatttggtttgggtaagacatatttttttcttaaaatttttcacgcacccacaaaaatagcagaattcagcattacgtttttaggcaatcaaaaatggttgacagatcgccaacgaaaaatgcttattaaaaaatttgacaaaatcaaagaaaagcgcactcaaaacggtttaccagctggtgaaattcgagaattggaagaaaaaatcgcagaagaaataggcataaacattcggacaatttacaaatggagaaagaaatttggcatctcaggaagttggcaaaaataaacaaaaaatattaaaaattaataaa

SEQ ID NO: 61638 - DNA, 439 bp, Heterodera glycines
ctgcgtcaggagacggcggaagaagcgaagcgacgctttgaaattgagtgcgaattcgtccaggcactcgctaacccgcattacctcaactgtgcgttaattttgcacgaatggcaaacagccaaatttaagtcgtgacattctgccacatcaacccgcacaatttgacactgacaattggtttttaataatttgtcagatttggcccagcgcggctacttcaaagaggactatttcgtcaattatttgaagtatttgctgtacttcaaacggcccgaatacgcgcgtacgctcaaattcccgcagtgtctgttctttttggaagcactccaaagcgcggactttcgcgaggccattgcctccgtggacaatgcccggtacattgaggaccaacaattgcttcaatggcacttttacatcagagtgcggcagcgccttt

SEQ ID NO: 61639 - DNA, 53 bp, Heterodera glycines
atgccgacaagctatcattcaagttataatattccaaaaatttattattttaa

SEQ ID NO: 61640 - DNA, 797 bp, Heterodera glycines
gcctgcttttcttcatgggcaaagaccgtgatcagctgatggtggagcttgttggtggtcgaatcagtttgtcatttgaccttggctcagggcttggcaaattgttgaggtaaggggctataaaaaaatttttttttgaaaatttattaataactttttccagcaatggccaacggtacaacgatggaaaatggcatcttgtgcagatggatcggcaagaacgttcggccaaactaaaaattgacgacacggataaagtgaggaagaaataattttttgcatattttttgtttattattggaattttaggtctcaaaattttcttggaattggaaagataattgtgttttctatgattaaaaatttaaactttttactcaaattacttgatcaataaacttaggtatctattttaagtcatatttttcttgaacttatttgcgacttaccccttccaaaaaaaaaaagatctaaaaaatttttaaataattaatttaagcattttagttggtacttccccccccccccccctcctccctccgaaaatgtagcaattttttaaacaaatctagacaagagttcaaggaattttcccaagcttggtgtatttgtgcgcttattagatggtggtggtattttgtaaattttccctaaaattttcacaggttgagggcgagtcgcctggctcaatgttcgagatgagtgtttccgatgtgttcttcattggcggattgccgtcaaacattgacgcacggtttattgtccacccgttccatggctgcatgcgcaatttgaaa

SEQ ID NO: 61641 - DNA, 162 bp, Heterodera glycines
atgtgcaacaaactgatcatcgtcacccaaacgccgccttcgtccggcagaaaagggacggacgtgcggaaaatggaggacaaaatcaacaaggagatggagcacacgctgagaagatatgagcaggagctgtggtcgagcaaagcgcagcaacaggcgctg

SEQ ID NO: 61642 - DNA, 662 bp, Heterodera glycines
atgccatttccgactaatggacggatttctgatcggaaaaagggcacccttttgatggacattgaaaaagtatccgaatttgcacgagaagaggttgaaagcagtcggtatagcgaaaaaatgtacataaatggacttccatggaaaatatatgcagaaaatgataaagatgaaagcactgacaataagttgtacatttttcttttgtgtgatgtcccagaggaaggtacaaattaaatattaattaataataattacaattaatttccattaagacaaacattggaattgcaaatgctcgggaaatgttcggattgtctcacaaaagaacggagtgttgggtttcaaaaaagtattcgttgaccttgtttttgataatgagaacagctgtcaatgtgtcaaatcgatttcatttgcagtgagtgacaattaaactttcccttaattgacccaattatggaaaattaaggaactgatggacctgaacaatggattttacaacagagaagacgacaaagtgacgttggccattgatgtcacagtgaaagatgaaaaaacagagaactttctttcggatcccaacaaatccaatgggacaatttcgatggaaattgaaaaagtgtcggaatttgtgcgagaagtcattgggagtgaatgcgaaa

SEQ ID NO: 61643 - DNA, 734 bp, Heterodera glycines
atggagctgtccattgataatgaccaactgatttgggatgttttcgcccgagaaatttggccaatttttgcgaccaacattcgcaatttgggctttaccagtgccaatggtttggacaatttttgtcgccgcacttcaccaacaattctcactgatctcaatcatctgaattcaatcaattccaattttctgttgcctgatgcaattgctgatgatgggccaaatgcttctgccggccaagtgttgtccaaatggttgcacacgccgagcaaaaatggacaaccgaagcgattgcattgcattgattattatgatagatcaaatcttgagtgggtcaacaatttgaaggaggtggccggccatattttgactgattgattgcctttgatttgcgttttctttttgtttaggcatttccccgtgccacttcttccgccagtttcattattcgaattgatcatgtgagaaaaatgccaaatgctgagccatttgaattggagaacgaacggaccaaagaaaagctgacattggagaaagtgtcacgttataatgttgttaatttgctgttggagcgatgtccaataattgttggggagacgacggcggcggttcaatgggaaaacgacgaaaattgggacgccaattatttgaactatgtcaaatttgagttgtggcgtggcattaattgcattgggtgagagcagcaaaacaacggaatttgattttgttgaaaa

SEQ ID NO: 61644 - DNA, 872 bp, Heterodera glycines
atgacaaagaatgactttgccattgtgggagaaaatattttcaccgcttttttggaggaacacgacaaattagaccctgaggcggtggaagaacttaaaaagcgccacaatgaaatttttggcacggattaagctcacaaatgatcaattgtttctagggtgaccaattcatttgattgtttcaattacatattttcattttcggaattttggccaatttttctccatcgatcactcattttaactgctggtcgatttctttaagtaaagaacgcagaatttcttcatattcggtatgcaaaatttgtgcaaaatttttggtagaaacccctcgtcatttcgtcccctaagccaaaatgagtcatttcgtccctcgcatgggcagaagcccaaataggaatcctattttggtggagttttaaaaatttcagatttttaattcttatttctagggtaggtcactacgggttattgaccggtacacccggttttcggtttcgtttatttcggtaatggaaaatttttttgatttcaatttttaagtgttggctctacattccttacattcctttagtcgatatatccccttgattcaattaattttgggataaattacacagattttgtctaaagaatgaccaaatttattgatttatgcaattttttaagaaaaaatcgtttttttttttggggggggggggagcggcggtgccgataggcactgccgggagaaatttttttatgaattttgttagaaattagccaaatttttcagaaatttcattcttttggatgaaaatacgccctaaaatcagaacatttcttagaaataagaacataaagaaaccctgcattaatcagataaaaatcaa

SEQ ID NO: 61645 - DNA, 438 bp, Heterodera glycines
atgtccagtggcaattctggcagctcagccaataccttcttcaattcccctatcatctcgagccactccaatgagtatttacacaacgagaagtgagttttttatgaaagataagaaagagtagcataagtactttgggaaaatattccgaacaaatgcaattaattcgcaaaactcatcgcctcctacgaaaaacccttcgattcgcttttctttcccgaattttttaggaacacaaatgcggaaaagatgcaaaataagcgtgcaatctttgcctccattgaatgaaatcgtcaattgatccaaagagctgaggggggagggggaggatgtttagattgagatgcactcacccatatttgtccaaaatttcgtcaattgttgcgatggcattgaaaagcttgacagaaaattccttggtttgagtcgcgcaataaa

SEQ ID NO: 61646 - DNA, 539 bp, Heterodera glycines
  unsure (1)..(539): unsure at all n locations
atgtcattgttttatgtgagtatgatgagtgattaattgctctctaaattaaaagcttttcntttatctagcgcattttcagcagcttcaatgacatctccctcccggaattcctcgaaatgctcgacaaattgctggacatcggacacctacatagccaaattgtttatttagaaatattttctgattaatgtaatttgcattaatttgtattgtattaaaggaatcgcatcaccgtttggcttccgaattggtcaccggaatggtcagcggatcgaagctgtggcagtacgcaaaagtcaagaaggtgcaggagcggctggagcaacgattgaccgacacttttttgggccttacggaagaagtcgaaaagaattggggcacggcgttggccaccattgttcgtcatcattttgtcagtttaatcattagtaattatttcatcgtttagttcggtgcgtgtgagccgcgcgtcactaattggcttatccaaatccttttcggactcgcaaagcgacccacagaaataagcacacaaa

SEQ ID NO: 61647 - DNA, 316 bp, Heterodera glycines
atgatcaatgaaatttgggataaatggtgggcccataaaaattaatttggcattccattgaccgaaaaatgtccgaaaatggacccttaagaaactgaccgcaaatttccgattttcagcaggccgcaaatttcatataacattttaatttcctttcttcagctgccttgccaccatttcatcgtccgatttcaagaaagcgcttgtcgaggcgaacggaggagaagcgaacaccgacgacgacagccaattgaaacatgtcaccgttgaggaagtgatctcgcgcataaatgccatggtaacgtttgttgattga

SEQ ID NO: 61648 - DNA, 803 bp, Heterodera glycines
ggttcgttagcgttggtcaccgtcgctccatccgcgttcgtcgttgtcgctggagtagtcgcagcgggcgcctcagtgttggtcgccgtagtcgcaccgggttcgttggcgttggtcaccgtcgctccgtccgcggtcgtcgttgtcggtggagtagtcgcaccgggttcgttggcgttggtcaccgtcgctccatccgcgttcgtcgttgtcgctggagtagtcgcagcgggcgcctcagtgttggtcgccgtagtcgcaccgggttcgttggcgttggtcaccgtcgctccgtccgcggtcgtcgttgtcggtggagtagtcgcagtggtcgccgcgtccgttgtcacagtcgccgctccggttgcgtcagtgttggtggctgcatccgcagtcgtcgtcgtctgctgctgggcagcgttcttcccccgtcgggcacggccttttttcacggtcctcggacgtccacggccacgcttttgtccagcagtgcgcggcgccgccctcgatttgcgcgatcccctcggccttccacggagcggtttgagcttgagcggacgacgcattgccgagccgcgcttcttcctcgtgctggtcccgtcgccgtcgttgttgttcccctgccgacgtgacgcgcggcgcaccgctgcactcacacgcgctcgggcgctgcttcgaccacgcactggcgctgtccgtctgttgttggttgaggcgccctgctgtcgtcgacgagctctctgaacaacggcggggagggcgtaaaatgagagacggaaatagttgcagcaaaaaagagggac

SEQ ID NO: 61649 - DNA, 1274 bp, Heterodera glycines
atggaggggaaagggatcaccgatcttgaagaagtcatctcgtcgatgagggacgaagaagctgtagacgaattggaattgtgttgtgatagcgcaacagagagagagggcaaaaaatgtgtaagcgctaaaattaattgcaaataattcaattaggagggataaagccgacttgaaaagagagtgaatgccaacaggggcaatcctaatttttgaatagaaaagagaattttgaaaatgttgcattttttctggggaaaagcttcgaattcattgaacaacaatttatgtatttttggtgcaaaataatgcttcaattattcctttaataaaaacaaaaatacgcattttccgtattttgaaaaaacatttcaactttttattcgaattcgggtccgagattcggaatttgggcaaatccgagttcagaatcgtaatcagcacccttgaaaacccacggaaaaattgcaattgtcacaaaaaggaacaaaacgtcgaaaaatggacagagcggaagagtgaatttgatgaattcaaacaaaaaaaaagtgcaaaaatcctaaaaatttctgcaatttatacttttttgaaaaatgactgacaaatttatgaaattttctgcgtatttaagcggtgaattccctaccaaaatcatccattcattcattgcattcacccattgtttctttccatcggtcgaatcgtcttcctatacaataaataattcccgtcagtttttttttgtttcattttttaaaatgaactgaattttgtgcccttttttcaggatggtcagagcaacaacggccaggacaagggcatcagcagcgcgagcacggagcatcaaaatcaatcgtcgaaatgccaagaaggcgcgtgccgcaattggacgagccggacatgtgagtgaagcggagggcaattaatacactaattaattcaaggacggcaatttttaaatgtgccaatttttcagacacgcaatgcgatcgcacgagagaagtgcatgatgtgtctgggcaaagtgagctccatgacgcgtgtgaccatgggctgtgtgcacgaatttcatcgcaggtggaggcggggctaattccgatcaatttcgaacccatggatccccgaattcgaacaagtctaaaagtcgagttttcctggccaaaatgccggaagttttgcttttgctgatcaccgaattcgaaatccgttccgatcaatttttaacccatgaccgtcgagttcgaacaagtctaaaagtcgttttctgtccatga

SEQ ID NO: 61650 - DNA, 981 bp, Heterodera glycines
ttggcacccgcttcagtccctcttttttgctgcaactatttccgtctctcattttacgccctccccgccgttgttcagagagctcgtcgacgacagcagggcgcctcaaccaacaacagacggacagcgccagtgcgtggtcgaagcagcgcccgagcgcgtgtgagtgcagcggtgcgccgcgcgtcacgtcggcaggggaacaacaacgacggcgacgggaccagcacgaggaagaagcgcggctcggcaatgcgtcgtccgctcaagctcaaaccgctccgtggaaggccgaggggatcgcgcaaatcgagggcggcgccgcgcactgctggacaaaagcgtggccgtggacgtccgaggaccgtgaaaaaaggccgtgcccgacgggggaagaacgctgcccagcagcagacgacgacgactgcggatgcagccaccaacactgacgcaaccggagcggcgactgtgacaacggacgcggcgaccactgcgactactccaccgacaacgacgaccgcggacggagcgacggtgaccaacgccaacgaacccggtgcgactacggcgaccaacactgaggcgcccgctgcgactactccagcgacaacgacgaacgcggatggagcgacggtgaccaacgccaacgaacccggtgcgactactccaccgacaacgacgaccgcggacggagcgacggtgaccaacgccaacgaacccggtgcgactacggcgaccaacactgaggcgcccgctgcgactactccagcgacaacgacgaacgcggatggagcgacggtgaccaacgctaacgaacccggtgcgactacgacgacaacgacggcgattgcggatggcgcggtggcgactaacactgacgcaaccggagcggcgactactccgacgacgaatgcggcgaccaatactgaggcgcccgctgcgactactccagcgacaaccgcggatgtggctttggattag

SEQ ID NO: 61651 - DNA, 259 bp, Heterodera glycines
gcagatttgtacgccgattatgaaggagatggtgatgatgataatgaggaggacgagcagtactacatgcatctgatcgcgcacaaagactcgttggaatttggctcaattatggtggtgccgccaaccgagccattaacaacagcagatggcaattgggtgcccaacgaaggcaatgttagccgtctcagcagtcaaatgagttttagcgccgatggcttaatgacaccgcttggcacgttggacacgcaagagaccg

SEQ ID NO: 61652 - DNA, 569 bp, Heterodera glycines
atgattagaagaggtactatagtgataaaaagaggtacaacagagattaagaaaggtaaaacagtgattagaagagatacaacagtgattagaagaggtacaacagtgattagaagaggtacaacagagatcagaagaggtacaaatttgatgaagaggtataactgtgattagaagaggtacaatagtgattagaagaggtacaacagagatcagaagaggtacaacagtgattagaagaggtgcaacagtgattagaagagtgatcagaagaggtacaacagtgattagaagaggtgcaacttgattaagaaaggtaaaacagtgattagaagagatacaacagtgattagaagaggtacaacagagattaagaaaggtaaaacagtgattagaagagatacaacagtgattagaagaggtacaacagtgattagaagaggtacaacagagatcagaagaggtacaactgtgatcagaagaggtacaaaattgttagaagaggtacaaaagtgattagaagaggtacaaaaattgaatgcaatttattataaattttaaaaaataaa

SEQ ID NO: 61653 - DNA, 820 bp, Heterodera glycines
ttttgtacctcttctgatcacagttgtacctcttctgatctctgttgtacctcttctaatcactgttgtacctcttctaatcactgttgtatctcttctaatcactgttttacctttcttaatctctgttgtacctcttctaatcactgttgtatctcttctaatcactgttttacctttcttaatcaagttgcacctcttctaatcactgttgtacctcttctgatcactcttctaatcactgttgcacctcttctaatcactgttgtacctcttctgatctctgttgtacctcttctaatcactattgtacctcttctaatcacagttatacctcttcatcaaatttgtacctcttctgatctctgttgtacctcttctaatcactgttgtacctcttctaatcactgttgtatctcttctaatcactgttttacctttcttaatctctgttgtacctctttttatcactatagtacctcttctaatcattgttgtaccacttctaatcactgttgtacctcttccaatcacagttgtacctattctgatctctggtgtacctcttctaatcactgttgtacctcttctgatctctgttgtacctcttctaatcactattgtacctcttctaatcacagttatacctcttctatcactgttgtacctcttccaatcacagttgtacctattctgatctctggtgtacctcttctaatcactgttgtacctcttctgatctctgttgtacctcttctaatcactattgtacctcttctaatcacagttatacctcttctatcactgttgtacctcttct

SEQ ID NO: 61654 - DNA, 1112 bp, Heterodera glycines
agtacgaatcaattgcaaaggtttgatacagaaaattcacattttttgatccccatggttttcatctccgttttactgtgattaagctgtaaatgttgccttaacttcttgggtatggtttctttatttgctattatttttaaaatttttctcttaaaaaatacattttctttcatattttgaaaatttaaatacaattaaaacaaacattttttattttattttattttttggtcatggtttttggcctataattttggcagcattttgcaaaggttccgaatttttttttcaaaatggtttgacgcctgtgataccatctgacccagttctttcttattgttagaatcttataatgaaatcaaaatttgatagtttggacgaaatctattaaaaactaacaaaattataaaattccaaaattacaatatataaattcgaagtatccccgtacgggatctccgcttcgcgaatccttctttccgcgggtcctcggttttcccgttccccggtttgagcggggatcctccggtcgcaaccaactctaatatttgttcagattggcactgggttcaaagacgaagacttgaaaagtcagtttaaagaattccaagagcttcggattgacaaggtctttgtttccctttccactctctttttccaattctgtttacacttttagccccgttcgtacttcgccttcgacccttcgttggcgcccgaccattggtttgaaccgtcggtggtgtgggaagtgaaggcggccgacatgtccatttcgccacgtcatttggctgcgcggggattggtcgacgctgagaagggtcattcttcgtcatttccagacacaaaaaactcgtttttaggcatttcacttcgctttccgcgtttcattcgaaaccgaggtaaaaaaaagaaggatggacgagggaaacgattaaaggagccacttacttttatattttggtaatttagcggacaaaaaacccgaaaatgcaacatcatcagaacaaattgcagagatgtaccgaaatcaggaccacattaagaaccaaaaggacggaaaagtggattttgatgaagaggaagagggggaggagaaaaaggaagaa

SEQ ID NO: 61655 - DNA, 330 bp, Heterodera glycines
atgcaaggcgaagcggaggaggggaaattggtggaaggtttggagaaattggggggcggaagggattctgtgggcatcatcatcaaatgatgatgatcatcatcccgagattgggtcgcaaaatgagacaatgttcgctgatgagatttgtttgtttgaagacacaaatgacagacgacgggggaaaaacagcggacacagccgaaagaaggcggtggaacaaatacagcaatgccaacgaggacgacaagcagttcagcggaagaaaacggagacgggaacgggaacaacaggacaaggatttgtacatttaattggacaattaataaa

SEQ ID NO: 61656 - DNA, 384 bp, Heterodera glycines
atgggatttcatttatttgttagagtgaggaaccaatcactttttcgtcaaccgttcggcccatttgcttattcggcattggcattggttggtgtgtttgtgcttttggattggcttttatataatagttgtcctttttttgttttaaaaattctttttcaaggatcttcaaactcaaaactctcattttccaacaaatttactgacggtacaaaaaacatgctgaattcacaaccatttgttgtcgccggatggggcatcacaaaaccatggtgttcaagtggaatacacagtgcaactgaccaactcatgtacggtacaatgcgtatgatttccatggaagaatgtgttggcgacaaatctgaatccggtagggtttactga

SEQ ID NO: 61657 - DNA, 312 bp, Heterodera glycines
atgttcaatcgcttttctccaatcgccgcccgaaagagaaattcgaatggaacgaacattcttcagggaaggcctggcaacaagcagaaaatagtcatggagaggagccgaattcggtgggggaaaagaggaaaaaagggaaaaagcatcggaggaaaaattggagggggaaaaggaggaattgaaaagggaggaaaaggaggaaaggggggaaaaggagtggaggaaacggacacggaggagcgaattgggcaacggaacggaagacaaattggcggacaattggatgacgaaaaacagacgaaagcctaa

SEQ ID NO: 61658 - DNA, 310 bp, Heterodera glycines
atgtcggtgatgccatttgtggcattgctgcttctagcggcggatttgcctcctgatccattcttgctaacactgggacgggccataggtgcgttcattggtggtccggacaatccgtcagtggtgcatccttcagtggtcaatccgtcagtggacaatccgtcagtgaaggacaatccgtcagtggacaatccgtcagtgaaggacaatccgtcagtaatggacaatccgtcagtggacaattcgtcagcaaatttttttttgagcaatgatcaaaaatcttgcgaaaatgattgttaaatgtaataaa

SEQ ID NO: 61659 - DNA, 1571 bp, Heterodera glycines
atgaatttgcccaaaaatttggcacaattggggccagtgagggtggcacgggttgcgcaaggttcatcatcggtggagcaaccgcgccagtcggcatcgcggcacctaacgacggcgcacaaagtgccgtcggcggtgagcacattggcattggcattggctgaacttagtgaggaaaattgaaaaaataattacatgaataaagtaatcagtaggaatgggaattttaggcgcaaaaattcgcaaaatagacattaaataggcacaaaaataggcaaataaattatttttcttagcactttttaggtagcaaaacatgtaaaaaaacataatcaaaaaatttaatctttgttatatcgcaattgtaactaaattataaaatattttaaaagattttctgtcgaataaggaaaatttagaaaacaaaaatttttattaagaaaaaaaatattttaagggattagtttttggaaatttttcaatttcttacgggctctatttttcgtttattgcatttttgttaaggatttattcgaaaatcctttaaacaggcacattaagcacaaaaaccccgaaaaggtaaaaatcggcattataaaagtcatcgtaaacccccaaatccaagcggaaaatgcgtttttcgtgcgaaggtcggaaatttgaaatttttgaaaaaattttcgaaattttaaaatattttaatatgctaaatttagataatataacttttgcaaatagataacaatttttcaaattatttattaccggaagtgacggcataactgctgccgggaggccaccaatcggtgtgccaaatgcgcctgcgggtcgaaattttatagaaattttaaataattttttttataatatttcaccctgaaaaccagcaaccggcatgttcagacagggcatgcccgggtaaatgcctcggcttaacaacaaaccgcacggtgcgggtgcaaacagaatgccaaatgcgaaattcaaatgccaaatgagaagcaataaatgggaaagtggcatttcgataattttatattgtttaattatggtctcgatttaattaaaacaccatttatctgcccattatatcatctaaattttgtacgaataataatttcttaattcatgtgttaaatttgtcaattttaattgaaaaaaataaattttattaattaataataatcaatttgtagtttattttgcgaataatttattgcccattatcaaaaaaaccgtagttttgaattaatttattccatttattttcagtgaattttttgatgcatttaattttattaaagattccatataattcaaattggaaggaaaattattattttttaaatttaaatatttttatcattattcttttttgtaaatataatttatatttttaaactcttaagcgagcaaatcatttgctaattttcattaattgatgctgttcaattagcggtgaatcattagacaataatgaagcgacgctaattggcgataatgatgcttcaggattcacatattcaaacaattttcaatgtccattcattttttcatttgaatacaaacaa

SEQ ID NO: 61660 - DNA, 660 bp, Heterodera glycines
aaacaaaaaaatcgattttttcaagtgtccgtttggggtactcaaacaattatggggagcaaaaatccaacgcagaattaaagtacaggctatagggaagctattccggaaggattcggtctccccataaatctgggcgcatcggttcggggggactgccccgaaaacaaaaaaatcgattttttcaagtgtccgtttggggtactcaaacaattatggggagcaaaaatccaacgcagaattaaagtacaggctatagggaagctattccggaaggattcggtctccccataaatctgggcgcatcggctcggggggactgccccgaaaacaaaaaaatcgattttttcaagtgtccgtttggggtactcaaacaattatggggagcaaaaatccaacgcagaattaaagtacaggctatagggaagctattccggaaggattcggtctccccataaatctgggcgcatcggctcggggggactgccccgaaaacaaaaaaattgattttttcaagtgtccgtttggggtactcaaacaattatggggagcaaaaatccaacgcagaattaaagtacaggctatagggaagctattcccgaaggattcggtctccccataaatctgggcgcatcggttcggggggactgccccgaaaac

SEQ ID NO: 61661 - DNA, 1340 bp, Heterodera glycines
atgagagcaatgagagatgccaatatcggaattgaccctcaattgctgagaactgcgtatgaagtgattaaaaatgtgaatccttttgctgaagcctatatgatgatgaaagaagaagaagatgaagaagttgagagagctagaaatgagaacagagagccagccgagatcaagcttttgtttgagaccggaaggcaattggacagacgtttggagtacaatgtacctcgagcgaatgaagttgctgcagtttatgtacctggggctgacggtgaagtacctaatgccaagattgtggtgagagaacgtggaaaggaattgaagattttgaagggcacagattcaatggtaactccaatgacttacccgctgttttatccgcgtggtacgcttggttggcaccctgaaatgaagcatagaaatagtaacagaagagtaacgagattgcaatatgtgtgctacacattagcaattagagagagagagtttaatccgattttgttcggtggaaagctctttcaacagtattgtgttgatgaatatgtaaagattgaaggagatagaatgaattggataaagaacaaccaaaagaagattttggcagatgcatataagaatgttgataacatgttgatgaaacgagctcaagaaagaggtttgccgctgggaaggaaggtcattcttcctccaagtgtgacaaatagtccgagatatgtagagaagtattttcaggatgctatggccgttgttcgacggtttggtaagcctgacatgtttttgacaatgacatgtaacccgcaatgggcagagatttcagagaatttgtttcatgaacagacatcaattgatagacctgatttggttgtcagagtttttaacttaaaagttaaagctattatgaatgagattgctaagaaaaagatttttggtgaagtgattgcatggatgtatccggtagagaaccaaggaaggggactaccgcacattcatttgcttttgacattgacagaacaagataaaatgataaatggcgaagatgttgagaagaaaggaattagtgcgagaatacctgataaagaattagtgcctgatttgtttgaattggttaaaagatttatgatccatggtccatgtggtgatttgaacccaaattgtccatgcatggaagaatttgttgacaagaatggaatgagagggaggaaatgctccaagggatatcctaaagcatttcaagaagagacaattgttcttgaaaatggtttggcattgtacgcaagaccaaatgatggaagaactgttgaagtatttgcaaatggaagaagacatgcattagacaacag

SEQ ID NO: 61662 - DNA, 373 bp, Heterodera glycines
atgggaaacattcgaagaaggaatggaaagaatttgatgcaaaaattaaacaaatgtttggtgttaattattggacaattgaaagatgggtaaaaaaattaaaaatcaatcaaaatgtttcaaagggtgaaatttttaaacaaattgttatttattaattaaatttaaaaatttttattatttaatatattacagggcagaagcattatacatttgcgaaaaaacggaaaaaataaaacaatattatcaattgaaaaaccaaaacccaaagctcaacgatcgccaaattgcggaaattttaaatattacaaaaagatctttagaaagatataaatctgaattcaagagaaaaagtgaaggtgtcacggattga

SEQ ID NO: 61663 - DNA, 302 bp, Heterodera glycines
atggatgaagaaataaagggacggaaaatttcgaaagaattggaaaattaccatgaacttttgttgcgtttatttaagatcaaattcaaacaattgataaatcaaaatgacaaatttgtggaggaaatgttgactaaagagtgggtcattgaattggtgggaaaatatttgcccaaattgacaatgtgaccatttgggtgagaatttcggactgctttttgttttgaatacataataccatttctcatttgcagctttgtcgtcaattcaaaaagagaagcattaagaaaaatgactgttag

SEQ ID NO: 61664 - DNA, 669 bp, Heterodera glycines
atgaatggggcaattagcaaatgccattcaacaagtgcgcacatttaaatgaactggaaaaaagtaatggcgtaagaaaggaagctgcaaaagaaagagcaaattgttatttgaaaatgataattttttattattattcaattatttaaaaaacaaaaaatatttaattattcataaaaattattttattatcttatttcgactaaagttttcattttatttaactgttaaatttatttatgaaaatttattttttaaatttatatttaatttatttaataaataaaattattaattcaaattaaaaattagaaagaaatttccttaaataaaattatttagttataatataaaaatgcatatgatttttcagtctccattaaacaattttttaaattggattttatggcaaaatgctaatttcaggcgtccacctaaaaaatatatgtgtaaaaaatgcagcaaaaaaaaaaaaacaaaaaaatgctgtttgtgacagctgacttaattaagaatgtctgctaaattcagattattcgtgcttttataaatataaacatttttcaaaaatacgattaacaattttcgaaatttgaagaatttttattagaatgatttctgacgaggaaaaagctcgtcttaaatttatgcatgttaattgaaatgata

SEQ ID NO: 61665 - DNA, 294 bp, Heterodera glycines
atgcctaagagaaagttattaagcaaaattaatgcacgaaattcaacgcaaaagcgtgaacaaaaacgggaggagagacgcgagaagacggagagggcgagacaagcccgatgggccaagaaaagtgagtttttccattcatttttcataaaatcctaagtttccaaatttttagccgctccccagccgaacactgatgcagaaacgccacaaccatccgaagaagagccgtcacatcagaggcaccggcgcgggacaacgacggacgaccaccatcaactccaacaccgatga

SEQ ID NO: 61666 - DNA, 1212 bp, Heterodera glycines
atgtttgagcaacgctttccgaacatgaccttggacattcccgtggattactccgttaaccatgcgccacgcgtgaacctgcaaatggtcacgccgggcggtgttgtgccggacattgtgtcgttgcaaacattgcaagaatttgcgcgatggaaacggctcggaaaattgttggcatacaaaccgcgcggatgggacaaagtgtaccgcgcattccgcgacccggatggctacttcaccggattatacgtatgtgtgctgtaaagttgtcctaaaaatcgttttgaaaaaataatttccttaattttcaaacgttaaaatttcattttaataaaaaattaaaaaaaagtaaaaatttattttgtgaaataacagtttttaaaaaagtcaaatattttattaaaaaacagcctgagaacatcacctttttaaaatatattctaaatttaaaattattttttctgaaaaatattgtaaaataaaatttttaaaaatattatttttaataatctaaaattttttgtaaaagccaattaaaactttttaaaaaaactattaattttgctttttttaacaaactttttgtgaaaaataattattagggttgtaaattaagatattatattttctgatttctaagtgctctgaataggtgtttgtgaatggttcttttatttacatatttttaaatatttcccactttttaacatattttttaaataaaaaattcaaaaaatatttttttaaatgtcaccttgttatcaaaaattaaattaaagtattaaaacattattctaggcctaataagttcatttttatggcattttggtcttattcattcttttcaaagattttttgtgaaaaaaatattataaaaaatttgtattttgagatttctttttcatacaattccagctttaataattataattaaaaaggaataattaattcaaattcatttgaaggtgatgacactaggcattagtatcaacaaaaatttggtctcaaattcgaccaatccgccgacctacggtgatttattgcagtcagcagaattcgctaatggcactgttggtactgctgacccaaaccatgatgacgcagttttgttcatttacaaacaggtaggaggagcatcggtcgttaaattcgcctattaacaaattaccctaaatggaaattaccctaaatggcttaaaaccctaaattaaa

SEQ ID NO: 61667 - DNA, 1228 bp, Heterodera glycines
atgaaatcattttccatcgtctgctttttactgataacaacattattatgtggtcaatttgctgcggctcacctcggcttttttgacgatttttttgattccgacgaaaattttgattttgacgaattattcaaaagcaaattgcattatgccattggccaacgggacaagaagcagcaacagaagaagccgcataaacatggcaatgttgatgtggagaacagaagcttggaccaattgtacgcggcggcgttggccgagggtggcaaattggtggtgtacgccggcggtgaagcaccacgccaacaagtgatccaatggcgagaactttttccgagactcatgctgaaactgagtccgagattagtgacataattagggatgtcaattttatgtaaatacattttttttcctggcttctccatgttctaaattagggttgcgtccccgacgtcggggttggaaaattcggggttcggggttgtcggggttggaagcgtcggggtcggggttgccaaatcgttcggggttcggggtttttcaatttttatcttatgcctaatagtcaaaatttttttaatattttttcggaaataatatttattaatttccataataatatttgtattgtttttatatttttttatttcttttttatcagaaattttgtatagaattaattttttttttcttgaaattttaaaattttttattacttttttgttttccaaaacatcttttttcacgtcgctcttttctaaagacttaaggagaaagggtacggcgtccggcggtgccgataggcgccgccgggaaaattttgaaaatttggttagatctgttagcagattttgtccaaaatatgctaaatttttgcgattttgcgccaattttttaataaggtttatgactttttgggccctgtgatgccgataggcagcgctaaattttggaattaagctctattttctaagatttttcaccaaaaaaatttatgaatttcggaaatttttgtttttcttcgatatgtattttgtcaaaatatgccaagattggtcgatttctatgagtatttaatttaaaaaaaacaatttgtcacaaagaaaataattaaagaagaaaacgtcaaacggtatcgaactcacgacagaaagtaatgtcaatggcactaacctctacaccacattccaaatgtccgaaattgagcaaatcttctttatttaataaa

SEQ ID NO: 61668 - DNA, 304 bp, Heterodera glycines; identical to SEQ ID NO: 51570

SEQ ID NO: 61669 - DNA, 303 bp, Heterodera glycines
  unsure (1)..(303): unsure at all n locations
aaaattccctcaaaaataaaaggtctattgcgcaccgccctccctatcatgctcgagagcatttgtatgtgtataaaatttatcaaaaaaagagatagacatttttctgggatagagtctaaatataaaaatcctctgtgaaataaaatggcgattgtgcacagccctccgtctcatacgcaagcgcttttgtgaggtataaaatttctcnaaaaaagagatagacatttttctgggatagagtataatttaaaaattccctcaaaaataaaaggtctattgcgcaccgccctccctatcatg

SEQ ID NO: 61670 - DNA, 150 bp, Heterodera glycines
cttttggccaaattggacgaggaaaggcgcgaaaaagcgatggaaatggtgggcgaacagcagcatacagacgcggaatttgagcagaaattcgttgaatttgcgaagggattcaaaagggacgaacaaaaggtggacaaaaagaaataa

SEQ ID NO: 61671 - DNA, 59 bp, Heterodera glycines
aacattttccttctctagtctggctctaacaaacactcacacgatatttgaaatgctaa

SEQ ID NO: 61672 - DNA, 59 bp, Heterodera glycines; identical to SEQ ID NO: 52421

SEQ ID NO: 61673 - DNA, 59 bp, Heterodera glycines; identical to SEQ ID NO: 52422

SEQ ID NO: 61674 - DNA, 59 bp, Heterodera glycines; identical to SEQ ID NO: 52421

SEQ ID NO: 61675 - DNA, 59 bp, Heterodera glycines; identical to SEQ ID NO: 52421

SEQ ID NO: 61676 - DNA, 58 bp, Heterodera glycines
aacattttccttctctagtctggctctaccaaacactcacacgatatttgaatgctaa

SEQ ID NO: 61677 - DNA, 172 bp, Heterodera glycines
atggggaagggccgaactaccggtaatagcggaggaggcaaaggcggaagcggtggaggcggagacgaaaaaagcggcggaagcggagcggggaaaggaacggtggctgccggaagcggaggtgtacgcggaaagggtgccggacagagcggaccagcagcagcagcagcag

SEQ ID NO: 61678 - DNA, 1216 bp, Heterodera glycines
ttattggcaaaacgattgaccgagttgaagatggacttgaaaactgtcgcggccattgcctccgttgatgaacacaaaaaacatctccaaaaactttcatccaatttgaagagagagaaaaacggactgaagcgtttccatcgggaattggccgacgaaattgaggccgaaattgcactgcgcacaaattacgcacaaacggcggaacatttggccaaattggacgccgaagtgcgctcagccgccgcggaagggcgcgtgccgcaaacggaggcgatgctgcggaggattgagctgcaaatggaaatgctgaagaagcagtgcagggccacccgaaagttcgtggagatgagcgtggacggtgccgcgtcgacgagcccaactcggagacggaggatcatcttcaaactgagcagcaccgtcaccacaatcattcaggcgggtcgaaacagaaattaccaagcattaggggagatgaagcatctgctgagctgttgttgcttttcaaaatgccaaggtttatttgagcaaatcctttcaggtcattgaaagtaaattgcgacaaggggaggaggaggcgaagaaagggggaagcggaagggaaaccatgtcggaatcggaggcggaagagcttaccaaactgcaccaaaagctaacggcactgaaacgggaaactgaggagacggaaatggaagaaaaggcggaggaaagggccaaaaaacaaatggaggaaaagcggacagaaacacacaccgaacttgagcatggaaaacagcaaagcgacgaaagaggcaattccaatttaagaggctttaatcagacagttgctatgacgaagaacgaaaaagtgaaagtgatcaaattaaaagcaaaaataattatttcaaaaattaaaagcaaaataattattgattattataaagtttaattaagttacgaatatttaaataatatttttttaaagtaaataaaacaattattttgtttttatttataaaattaattattttgatttaatttgatcgcttgcactttttcacattttgtctcagcacgaatctgacagactgcttgaattaaattcaaagacctgctctttatctagtttttttgccatgttcagaagagcaagaagatcagtccgactttttggtgcaagcggaacaaatggtcgaaaagtcggagatggtccgcctgaaaaaggaggaactgatcg

SEQ ID NO: 61679 - DNA, 929 bp, Heterodera glycines
attacgtccttgcgttgattttcggccattaaacaatatcacgattcccgacccatatccaataccgagaatggataagacaattttacgggtcgctggtcaaacattttattcaaccttggatttggcctccggattttggcagattccattggattccgaaagttcttataaatgtggcattgttaccccttggggactttatcaaatggtaaaattgccattcggactgagaaatgcgccaagcatttttcagaggaccatggacaaagctttggagggtattcggaatgtaaccgtatacattgatgacattttggtccatacaaatacggaagaggagcatttggagactttggaaaaagtattttgccgattgaatgaattcggattaaaattaaaaagagagaaatgcgaatttttgaaaaatgaatgcacatatttgggccatattttaaatgggaaaggctatcggccctcattgaataatcaggaagtgattgaaggattcccagagccggaaaatgccagggaagtaaaaagatttttgggtatgatgtcttttttccgtaaatttatccaaaattttgcggaaattgcaaatccgttacaacagttaacgaggggaaaaatccctgaatttgtatgggaaatcgcgaaaaagaggcatttgggaaattaaaaaataatttactgaatgccaatgcctaagggctccgaattacgaattgcctttttatcttttcaccaatgcgtctgctattgcctatgcgggagcgcttatgcagagccaaaatggcaatgatttatactctgtcggttattggtcccgaactttgtctacgacagaatcaaaacttcagcccacacacggggaattagcggcaatagtacatgccgtagaaaatttcagaccaattatttagtgg

SEQ ID NO: 61680 - DNA, 1008 bp, Heterodera glycines
gaaataaaaatcggtgattcgctggcactgtcgggaaaaaatttaatatttggaaaagaaatcgcacgagtcgcttcgcgaaatcgagactgcgtgcaattggcactttgcttcaggcaacactcgtcgatgcctccgttggaacgcctccgcctgttgcaggcgcagcaacagatgccgcacgagttggtgttggaccgctttccgccccaactcgtccaaagtgttcatcagctggcggacacggtagagcgtcggtacgaccgcagcgccaactcgcgcggcttcagtccgttcccggtgttcggcccgttcatcaccgacagcataagcggaggcagcggtgcgacgatggcaccgcagccgcggcagaaaagtgtgcctccacaggcgacgtacgacggcacaaagccctgggcaatggcaccgccgaaggaggaaatgtcagtgtccatgacgacgtcgcagcacagagtcagttcacaaggggaaagttggggaggactaattaaataatttattttcaattaataaaattttaattaccctaattacccctaatcttttcgcacatttcaaatatccttaattacccctatcttttttttcggcttttagatgcccatttttgacaaattgccaaaacaacaacaagaacagtccacccattttctgcccccaccaatgacatcaagcagtggagatgaatggcaatcggcgtatgaatgtttgccgcaatggacaaagcaaatgccaaagatgccgccagaaacggcaccaaagccacaacaagatttggtaaaaaatattgctgtttaaatttcaaaagtgatactttttagtcctcctctttcccatcgttttgtgccgcgccttttgccgagtccgtccaatgctccgtcaatctgtgcaaattccacgcatattcacgacaattggccgcaaaaagcatatggccaatgagtgattcacaagcggaaatgttccaaagtgttgtgagcgttgagg

SEQ ID NO: 61681 - DNA, 1021 bp, Heterodera glycines
atgtattacatccaagtcacaacaattagtgatgcttcaaagtgtatgctgacatttgcgctgggggcatttgcgcctatgtccaaaatcggatttaaatttgagtttttttcaatccgagaggtaaagaaaatactaaagttaaaaaagatggtcttctagtttattaggagcattaattctgctgtttgaatttaattgataatgattttttcaaaaattgacatgaaaagaataattatataatttgcttaatatgtgtataattatattttcttgcaaaatatttcgtaaaaacaatactttcacactgctcgctaacctttcaaaatatgataattaaattagtaaacaaaaataacatttaaaaagttggaaccatctaattgttctcccaaaaacacatagcttaactttttgaagaaatattctcggttggctaatattctctaattaaaaaatcactctttttgcatttattattagctataattttttaattcttttaattcttttaattttacttaatttattaattttgtattttacatgtttcttttgcatgtcacatacaatttaagacgaagaagcgaaaatggccatttttgtgaaatgccaacaaaaattaaattggacaaatttaaactaattaatattattttaaaatgaatttatctgacaatctttcggcaagtcgaaaattaaattaaataataattttaaaaattaaattgtctgtttttagttctatgattctttcaaagatgctgatttccccgccagttttatcgcaatttgcgctgcccgagctctgatttcattttttggagtgattttgaatgggatattgcttttcgtcactcttcggagcaagtgaaactttgattggatatttaaatatttatttattatttttaaaagaaactttatttatttaaaaggacaaattaacttcttgttttaatattttataatttttgcaaaaaattactgatcatcaaattatcagacacaacactta

SEQ ID NO: 61682 - DNA, 571 bp, Heterodera glycines
  unsure (1)..(571): unsure at all n locations
atgtttttaaaacaatataatntagaccaaattgactacactaagcgcattttcaaggcattgctggtcaatgtgctttttgtgtccaccggttactttctgaacgccggctttttaattttactccgaaaactttcgctgagccaagtccaaattgtgtttggcacttacatcctcggcattttcacctgcatttcggcaattagcaacccattaacactttatctcttcaggtggtgggcaattcgaccttttaatttgcagaaacaattgaaattcagttcggattatcgaactgcgttcaacaaacatctttttggacgataagcattcattttatacgagagattctgatgcgatttgtggtggaaatgtcatggcgaaacgacaaattgaccagcgaaatggcagagttggaaatgttcggttggcatgaacaaaataagaaaaaacctcattttttaaaacattttcaaccatttttttgtgaatttgttaattcttgacagaagagattactgaaaaagcaaagaaaatgtgaaattctgaattcacaattattaccaaaaga

SEQ ID NO: 61683 - DNA, 671 bp, Heterodera glycines
atgagtcgaaaaattagcaaaaaaattgctgaaaaaattggtacaaatatgcactcaatatgggattggaagaaaaaattccaattaaacaatcgtaatattttaataattaaatttatttttatatgaaattgcttttttaaggaaagaccaaaacttacacggatgctgagaaattggaatatgtgaaaaaatgtgaggaaatgatgaaaagaaacccaatgatgagtgagacgaaaattgctgaagaattggaaatccctaggcaaaacttaagacgatggaaaaagaaatttggaaccaatgaaataaattgaattatttttgtggatctaacaaaattggatattgagaattgggcactacagaatatattaaaaaaaaaagaattttcaaaaatattttcgtaggaatttcatcaaaaattagataactatcatcatttcgcattgataaagacgtatgtatcaacacattcattaatattttttagttcaattataacggcctttttttggaaaacttagcaaattaatttccgtaaaaaaatgttttaagcatttttttcgaattttaattccacttagctctcgtaaaatcagaaaaatggaaccaaaatgacaaaaataagcaaaaaatggaccttttcatgttacgtcattctaaaaaaa

SEQ ID NO: 61684 - DNA, 679 bp, Heterodera glycines
atgcccagtggttctcgtgatttcgatttgccggctgaaagtcacgaatgggctcctccgagcataaattgcgaagatttacagaaagaaattgagcacctgaggtgtatttcattgagctattccataattccctttttaaggagattgattgtaaagagtcggagtctggttactttctgtcataatgatcttcaagaagggaacattctcttgcccaaagcacattctggcaatatccgaatcggctccgaatcggacgaaattttatctggcattgacgggaatatgacgaacaattcactgaccgccttcaacccgatggatccccgtctcgtgctcattgacttcgaatacgcgagttacaattacaggtgagtgcttttgtcattcacccacgatcgtgtaaacaaaaacggaaaagaaaaatcagcttaaaaaggaagaatttgccttcttaagtaacagtattgtttattgtaggggattcgattttgccaaccattttgtggaatacagcatcaattatgacaacgatgagccacctttttacgaaatgctcccagagaagtttccttcggaaggacaaatgcttgagttcatgtacaattacgagaaggaacttcgccctaatgccagtgaggaacatttgtgggaaattgcacggtcgatggtcgaa

SEQ ID NO: 61685 - DNA, 102 bp, Heterodera glycines; identical to SEQ ID NO: 51993

SEQ ID NO: 61686 - DNA, 73 bp, Heterodera glycines; identical to SEQ ID NO: 56411

SEQ ID NO: 61687 - DNA, 592 bp, Heterodera glycines
atgcgcacccgtccgatctggcaagttaagcaacgattgctgactagccaaaaggttcggtgccgtgatgaaacgaaccagcactgcttaccccgcggcacccggcacggtcccccgaaggaatggatttaattaaattctctccttcggggatttttttccattaggtcgtccgttagcgttcgattgctctagtcaatttttcaaaatttttgttgaaatatttgtcgtgctctgaagggcgtgggaggggggggggggcgaaggcccaccacgaggccgcgaagaggccgagtgagtaccttcggtgcaggaaaattattaaattttaaaaattttttaattgctttttaaatatgccaaaaaatgtaggcttaacttttttagtgaaaattcgatcactcatattttttgctaattgagcagaagcgtaccaaactttgcagggatactccccggtaaaggactaacttacactgaaatgagcgccgagctagctggctcaaaaaaattttcgaaaatctgagtctttcgtttttatttattttttgcaataattaattcttaaatattttttcagaaagggttctga

SEQ ID NO: 61688 - DNA, 194 bp, Heterodera glycines
atgtccgcttcgttagcccgtcaattggtcgaacttcagacgaaccccaccgatggattcgctgtccgtggcctcgttgacgataatgtaggcactttcttttttaatcaaatttttgccttcattcaatctctccccctttttcagatcttcaaatggcaagtgatcatttttggtccgtccgaatcgccctt

SEQ ID NO: 61689 - DNA, 409 bp, Heterodera glycines
ctcccctcccccttcagatacctttgcattcgttaccccttaaactctcgccaaatctgttcaattcgtaatgtgcgcattgccactgtctgcatcacttgcatttccatcatttgtggccttcccaaatgtgttgactaccatttcgccgtttacgaaggccttttgtacgttgactcgggcgaatgggtccctctgaggtcagtcggtcccccccccccccccttaaaaggctccgtccccttttaagaagctgtctgtccggcttcactttcttcgtccaattggtcggccaaaatgcctttttcaatgcttacttttggactcgcgttgtcgccttcattctcctcccgtcccttctactcatttgccttaacgccctcctcatccaattggtcaattaaattac

SEQ ID NO: 61690 - DNA, 2306 bp, Heterodera glycines
atgctgcttgcgcacgcccatccgtccaaccctcaggcgctgttcgacgagttcctcgacgagatgaacccgcctgttgccgccaaccacccaggagctgtgccgaagccagctgaagtccgcgcggctgaggtgatgctcaaccttgagtattacctcaactgcatggggacgaacaccaagtgagtaaagctggcataatattgtccatataatcattatttttaagagatgttgggctgcaaggactgccagtgggctacgactttcaacatcaggcgcagctcctggaggaggacaacatcttggacagcttctatggggaggatgctcggcaacgctgcaaaccaccgcagcaagttgccatcgagcagattggacgcctcaacccagatcaacgggccgcctttgatgagatatcaacatcaattcttggcgggtgcgaccagaagctcttcttcctcgaaggcgcgggcggatgcggtaataacggcttccttatttttcaaaagcataattaattgctaaagttaatttaggcaagacgtacttttacaacacgctgatcaagtggtgcatcgcaggcaagccctccttggatggaaacgccaacgcacagtgggtacgcaaccaagaactgcagcggaactcagttgttgccgccgccagcaccggcatcgcggctctgttgctgataggcggtggaacggcacacaggcacttctacgtgccaaacgacgtgtcgcaggagacgccgccgatgctgaacttcgagtcggcaaaagcggagcaactgcgccacgcacaactgatcatcattgatgtaaacaaaaatataagtttgcttttcgttcataataacaattttaggagatcagtatgttgtccaacaccgtgctcgactacatcgaccggctgttgcgagacgtttgtgcaaatgccacaccgttcggcaacaaagtggtggtgttgagcggcgactggcggcaactgactcccgtagtcgagcatggaactcgtgaggaccaagtgggtacgtcgatcaagatgggagcgctctttcgtctgttcaaaaaaatcaggtaatttgtcaactttgtttttacaaacatatttatgttattagcctaacgatcaacatgcggaccgcaccaggagaacaatcgttgcgcgattggctgcaagaaatcggcaatggaatgcaccgcgtgggtacggacagccaaggcttcaccaaccaactgcgcattccgcccgaacttctcgtggacgacctcgaccacaccattcacttctgcttcccagaagcactgtttgacgacccgctggccaacgcggacgcaattgcccacaatgccatcctctgtccgaccaacaacgacgtgcagcacatcaatgaggtggcgcttggcagaatgagcgggtgcggaagggaattcctgtccatcgacgaacctctggagcctaacgaagagatgcacaatttccgcaccgacttcaacatggaggcggtgcacaatgaaatgccatccggaatgccgccgcacaaattgaccatcaaagtgaactattttttgttttgatcatttttaaccaattaatccaggtgggtacgcccgtgatgctgatccgcaatttggacgtcacccagggactgtgcaacggaacacgacttcaagtgatgcgcacttcggagaacaacctgttctgccggattctcaccggaccacgagcgggtgcgcagaacatcatcgccattccacaaattcaattcgaatatggccgcgcacgacaccaccgtgggctacgcttccgccgtctgcagtttcccgtccgcctttgctttgctatgaccataaacaaggtgaaatacagattatttaaggattgaaatatataagcacaaaaaattaaaggcacaaggacagacgctgcagcggatggcgctcgtactcaacggccgtcaatgcttttcgcatggccaagtgtacgtcgccatgtccagggtcacgcagatggacggcatcagggtgtacgcgccgttctgccaaagtgggtacggaacgcacatcgagaacgtggtttaccacgaactgttggacttggagacgcagcagtcgaggataccgaatcgtggactgatggacgtggacaatgacccggacgcagcaataccggacgtgggcccaagagtaccggacgtggccaatgacccggacgtggaacgagataatggacacgcagcgggtgcgaaccatcaagaaccaaatgatcttgatagttcttttgatgatttttttgattga

SEQ ID NO: 61691 - DNA, 2134 bp, Heterodera glycines
atgccttcaaaggatcgaagaagaaaagaagcagatcgtttacgctggcgagcggccattcagacacctgacgtggccaatgctcttgggggtccgaatacaagtggtcagcaaccttttggcatagatcagggtttttgttgcttttcatatgagaattaaaatctatttgtagaaccttcaacgtcgactggaattcgtgcccaaatcagacaacaacgaaatgatggacaagctattgtgggtacgtcggcactgcaactggacaccagcgttgtttcgactccgaccactgtcggattacgggctttgactattgctggaggtcttaatttaagctaataacaagctatatttattacacaagtaacaggttccgcaagtaaaagaacccgtcacaatggaaacgtgggtacgccaaacaatgcagccctaagttctgaacagcaccgatcggatacaagcgacgttgaaagcgttgcaggtattttgagttcatttttccataatttttcaacaaaaaatcacagatactcggcgtcggaagtcagcatccactcttcttgctgcgggtgcgaacactccacgttatacaagcgctaggcgcacaaaggttttggattcttttttttgtgttatttcctttttcagttaaatgagattcatgccaagcaaattgaagaaaaaatggagaaggtggtccgtgattacatggctcgtgattggcccaacccaatagctgcacaacgaccacgccggaggaatttaacaagtttgcctttttactgacatttgttagcctaattgaaatttttatttacagctgctaattatacacggtgtgggtacgcatgtgattgcccctcttatgcgcaatgccaacagaatgcatcgtcttttttgtcttcacaaaaatatttgaagcagtacgagcatggaatcaaaccagcacccgtatttaaacaaatatcagcaagaaataagggggtccgtcctacggaaagatgtcatcaaaatactgaatataaatgcgcggcacgctcgtcttcacacagagttggactgtctttttttaaacattaattaaaacaatttaggtggactattatgattgcggtcaatttggtgatgcattttgtggacattgcggtgctcgtctgctccttggcgaattcaacaacatcaagcgggcacgaaggcaaacaccttgctgtggaaatggcgccacacacactgaacaaatgatcaccgaattggatgaactcaaactgccacctcctgcctacgtgcatggcttggtcgatgctgttgacgagagggttcgagaggcatttctgaacaacataatggcgttcaacaacctgttcgccttcgcatctacacatggcgaaaaggccccacctgagcagatggggggtcgcctggacacgtgcaaatataatggttaagaattaaaatctgatttctataaaaaaataattattttaggacagttctccttcctgttcagcgatttaattgcaccgggggtccgtctcccatcatttgctcaagtgtacaccttgccgccggaagacgcattgaatgttcgtcaggaagcattggacaccgctgttgcgccacttattaaacaaacaatcatggagagacttgaggcgttgatgcggcaaaatccatttggccagacattccaaactgtgggtacgaagatcgatgctgctcgagcagctactggcgtagtcccgcatttcagagtaaaaaataaaaaaatatatgataataaattttgataataaagattgcgctgctgacggatcgagacttgaaaggcggtccgcttcacgggcgtactgatgtcaccgttattgaacgagcggatgcacccacagccaagcaagtggctgtgatttgggtgcaagaggatggccttccgccacaaatcagcggtaataaaaaacactataaaagcacaaatatcaaattttcagcattctggctgtccgacaaggccgggaagatgcgcgagctgaagagcggaatgccgcaaatcgacccgtgctgcttccctttgatccatccacgcggcacgcttggatggcggtggttcatgaagaaacgtgggttcgaggtataa

SEQ ID NO: 61692 - DNA, 949 bp, Heterodera glycines
atgccgacttcatcttcaccaacaaatttgcatccattgctttacggttcgtatgagaggctcaaaaaacatgcctgcgacattgacaaacgattgctttattcacttcgccgtctcgacaattttacgcggctcaactttttggtggaagtcgaatggaaaggaaaaacaaaaatgcaggaagggaaagaagaggatgcatacatcctgtacagccgagccatgaccatttatcttatgataagtgagtcaattgacgacgaattcaaacaaagccgcggaggtcatcttttctatgaaacttcacagcgtttgtgtggattttgacaaagttgctgtgagtttacaacagcggttcaaggatgggaaaggcgagttgcctaaattttgtgatccgttgggactgcgttgggccgaaattgttgaagaaccgatttccgaaaatttggaatgtggtaaggactccaattcgtcggatgcccagaacaaaattctgtccattttgccggcaaatgaaacagtacctccagcaaccgaagaattttccatggtggataataaaaatcaaaaggaggaaaaagaggagggcagagacaaagagacgccggcggacgaagtgttcgagggcgagttgggtttcagtcggcaagtgggcggggtcgaagttgtgctgagtcgggccgagttggagaagctgcgccgattggaaaaaccgggaattgttgtgatcggcttcaaaccgttgcatttgctgaaggattcgcatcggatgggcgccaccgtttttgtatatcccatcaaatcggtaatctccggcagttggccattggtcaatgcggaccaagtggagacggccaagcagttcgtcaagaaattgaccaacaccaaattcttaccggatgattttgcaaattccatgctccaacagcattacaaagctgtcgaaatg

SEQ ID NO: 61693 - DNA, 282 bp, Heterodera glycines
atgggattgacccgttactctttcgttaaatggattataaatttggaaaaatatgaaacgtatgcattcgcacactttagcggtgagaataaaaaaaataaaaaatgatgaaattcttttttagggcgttatgattcacactttgttttgagggacttgcgaatttgggatataagcagccggaattaacgatagcggatttaaaaatttatgagattaagtttagaagaggcgaaaaattcccgaaaattcattttcgggacagttggcttttaatgcaaa

SEQ ID NO: 61694 - DNA, 295 bp, Heterodera glycines
atgtactttcccaatcaatttaacaaagaggaaaattatggtaagaaagaatttccattaaaaaaatatacccaattttaggcataattttgacaaccctcccgccttttgaggattattttcctgatgaattaagtgaagaagaatatgacaaatttaaaaaatggtattatgcaaattataacagtggatttaatgtggttaagttaaaaaattttttatattgaactatttaataagacgtgctgagattgtcaacaacaatagcgtcttcatgtatgaagtagggaccaaa

SEQ ID NO: 61695 - DNA, 855 bp, Heterodera glycines
atgcctttggcggtgatcagcaacactgtggtccgatcagtgggcgtggagcagcacgaagacagcgaaagtgtggagaaatttgtgcgctatgtggccaagtgcaagtacaggtagagagagaaagaaattagagagaaaatgagtgagaaaaggagagaaaaatgacagagaaatagagagagggaaggagagagagtgggaaaagagaaaaagaaaggggagcgcgaagagatgttctaataatgtgagctattcgagaaacctttcgagaagatttgattccaagacccgagattaatatagagtcgaaaccgagactcttgattactctctcgacaattacctaattaatccaaaatcccaattgtcggaataagttcaaaaaatgaatatgaaaaaacagaagttctttaattacagtttggaaatcgattaccagcaatgttctgacttggacaatgagttggccaccagcgcagcagagaccgaagagccagcggaaccctcgcgccatttggccgcgtttgacccgaaagatgtgcagcaaagacacgaggggtaataaatgtttcagccaattgtttaagcatttgtcacgcttttattcctttatcagataccgtatcgaattgcccgacgaccgtacgaatttaacaaaaacgggagacgaaaatggagacgataaacgaaaacgaaggtcgagcagtagcagcagcagcaatgacgaggacggggggagaagggcatttccggtggtccaaattgacatgaaagggtacggctattgagaagagaagaagcgacggaatgaatgaaagggcaaacaaaaaatgcattaaccgaacaaatgca

SEQ ID NO: 61696 - DNA, 225 bp, Heterodera glycines
ttttaaaatttcgaaaattttgaaaatttttcgagctaagcctaaaaaacggttttcgggtttttgaattttaggattttttaacgatttttcccagagaaactgagaccacttccaaaacatagtttttcgagctctatcgactggtatttttttcggaaaaatttcgattttttcccggaaatagaaaaaatttttggcctgtgcgggacatttgagtcccgg

SEQ ID NO: 61697 - DNA, 61 bp, Heterodera glycines
ttatatatatgttatataggttttgagtttcgtttcaaaaaacaaaatctcccggccgaag

SEQ ID NO: 61698 - DNA, 318 bp, Heterodera glycines
ataggtcagctattccggaaggattcggtctccccataaatctgggcgcatcggttcggggggactgccccgaaaacaaaaaaatcgattttttcaagtgtccgtttggggtactcaaacaattatggggagcaaaaatccaacgcagaattaaagcacaggctatagggaagctattcccgaaggaatcggtctccccataaatctgggcgcatcggttcggggggactgccccgaaaccaaaaataaatcgattttttcaagtgtccgtttggggtactcaaacaattatggggagcaaaaatccaacgcagaatt

SEQ ID NO: 61699 - DNA, 697 bp, Heterodera glycines
attctgaacgcgaattaacaccatttttttcaataaaccacattttctttatccattttctatcaagatcacatgaactttactatttccttaatttgtatcgcgtaaatcttataaaagatttaaataatattaattttttaagattctacaccgcgtctgaaaccttcaaatctgtaagtaaaatattttccacaaagtgctaatttttccgtttctgttgaatccattaccaaatgatttttttatctgagcattaatacatttcgatttatcatttatataactaaaatattttaaatgattaaaataatattaatttatttatagattctgaacgcgaattaacaccatttttttcaataaaccacattttctttatccattttctatcaagatcacatgaactttactatttccttaatttgtatcgcgtaaatcttataaaagatttaaataatattaattttttaagattctacaccgcgtctgaaaccttcaaatctgtaagtaaaatattttccacaaagtgctaatttttccgtttctgttgaatccattaccaaatgatttttttatctgagcattaatacatttcgatttatcatttatataactaaaatattttaaatgattaaaataatattaatttatttatagattctgcacgcgaattaacaccatttttttcaataaa

SEQ ID NO: 61700 - DNA, 794 bp, Heterodera glycines
atgaaaagggggcaaggcaatgaacacattttgcaatggtttaatgattatgaaacccagcaaaagcaaagccaaagaaagggggaaaatgccaaagacgacgacggcaccacggaggaaaacccattcaaattcatcaaaatacacatcaatgaaatggcaaacagtttgacaattgacgcacatgtgacggaggagaagggggcagtggtcgaaatttgcttatgtgacgagaaatacgtaaaacaaaaactgttttaattggaaatttaataatttaagggaatttgtgacggtccgtttgaggcgacggaaaattttggtggaaaaattaacccaaaagcaacggaatgtgttaaatttgattataaaactattaacattttgaatcaaatcgtcaaaaaagagaacaaattgtcggtattagcacaatttcgcatgaattataagaaaggcggcaaaaacaaagcaaaaaatgcaatttttggtggtttgttcaaaaaggtaaacactcaaaacgaaaaggaaatggcacagaaaatgatcgatgttcgcaattggcacattggcaatttgttagcggcaaacgatgagcgcaattcgagaagattggaccgggaattcttcctcagaatttcatttgccaatgagagcaaatcaaacccaaaagtaaataaattaataattaatgtaaaataaatttttaaattttgaaggtcatccttggggagtgggcagtgcaaaaatccgtcaaatttgaaatgattccctcgccgaattggtccaaattgtga

SEQ ID NO: 61701 - DNA, 1536 bp, Heterodera glycines
atgccaaaagcgattcagccaatcactaccagcaataactctttgaacaatgccttcagaaatgatcgtcgatttttttgctggatgcctaggaggtaagcagaagagaaacagaaacagaaactgaccgaccggcggaagaataaaatagaaaaaatatttaatttgattttccgtttctccctttgaaggcgtcgccggtgttttggctggtcacccgcttgacaccgttaaggtgcgacttcaaacccaaaactcacattgtccaatctatcggaacacttttcactgtctgaaaaaaattgttcaaaccgaagggccatcagccctttataaaggtgaagaatttcttctccaaattttgttgataaatgaattaaaatatggtttaggcatgtcttccccattgaccagtttggcactaataaatgctgtaatattcggcgttcatggcaacattagcaagcagttcgacgacccaaatgctttgcatgtccaatttttcgcgggtgcggtggcgggtgccgcgcagggattcatttcctcgccaatggcgagcaaaagacattttcggtgtttagtcattgttttttaggaattgcttaaacttcgtgcacaaatttgtccagaaatttcggagaattcaaattcggcccaaaagcgatgttcttcttcgccctttacgatggcatgccaaatttggcgccaaaagggactcaggcatttcagccggtaaggaatcatagaaatcactccgtttaataagtaatcaaaagagaccggaaatcagtgacggaatttcgaggtcttaaaaaatagacaatcggaaaccgaaattctgatatatatttttaaaattcactttacctttttggcattttacaaaatttgagaaaagtttattgttttgacaattgtgattctgcactaaaataaaataaaatttatgtacaatactttattaaaaattttggtgacttggcccatgctgaggaaactcgacttgaaacgagaaacaaaaccgatcgaaatataaaagccaattttttcttgtcaaattcttaaacagcatgaaattatcaaatagatcaagttccaccaccaatatgtaatttcagcggccttctgatcactcagctgagggattgtcctgcgatgggcgtttattttgcttcctatgcttttttgaggcgttcaatggactccgaaaatgaacaatcgcaaggaatgtccaatttgcaattgctttttgctggaggagcagcgggaatgtgttcatggctgagcaattatccaactgatgtggtcaaaacccggttccaatcggacgatgcgtatgaaaattgtgagaaaaattggggaggatggaatgcgaaaagaaaaattttcaaaccaaatttcctgggcgcgtaaatttttttgagaaaaacttgaacaaatagtttttcagatcgagaagttgtcaaaaaagcttactcggaacacggctggcgaacattctttgctggacttggctcaactttgattaggtgctaa

SEQ ID NO: 61702 - DNA, 701 bp, Heterodera glycines
cctttttctccgctgatcgctgtaaaatgagtcaacaaaatgaagaagcacttggcaaggatcaaaaggaacttcgagcagttcaacacgacatggaacgccttttcaaagcacgagacgcgaaaggactttccgagctgtacactgtcgacgccatcttcgcgagcaatttaaatttttaaattaaatttttacaataattgggtttaatgtttgttaaaatgatttgtttaggcccatccgccgatcaaaagtcgtgcagagattgaaaagctatggatcaaattccttgacacagactctgccgaattgcatgtgaatattattaatccatcaaaactttaaatcaaatacttttgctttaaggtaacttttgacgaagtttacttttgcggcgatttgggcgtcgaaaatggcacttataaatttacgaagtaaaagaattggaaaaatagatttagttttaaatgatatgatttttacagcaacgacggcacagtgacacagaacggacttttcatccaaacttttaagcgcggttcggacggaaaatggcttatccacaacgatttttacacatgttgaaaaagaatgaatcacaatgaaggcatcagaagaaaaagaaaaaacatttatgtgtgaaattaggcataattaggcactcattaaattaaggtgataataatgaccgaattaaacaa

SEQ ID NO: 61703 - DNA, 1429 bp, Heterodera glycines
atggaatatctgtcagtgttggagctacacttgaccggctccattctgctcgcttttgtgtttggccccaagctgtacgtgttgcttttctatgagccggtcgttgtccaattcgacaccgatggatgtgcccatggggacaaagctttggacctttttgaagcggctggtaatagtgatcaataaatcatttttattcttaaaaatacgatgctaataagtgaattggcacaacactttttgatcagattgggtgccgcattcgttgcgcgatcgaaacgcccattcgccgacattaagcacggggagcagcgacggaaacgaaggacggaacaccagcaacagcctgaacaaccacaacaacagcacatcgagactgaacagtgggaatagttcaatgagagggacacagcgaagggccaacgacgacggggaggaggaaaaggtggcaaaacgaaaacgacaaattggaattaatcaaactaagaaggttcaaaaaaggggggccaaagaacgacgaaaaggagcaaagaactgtgaagaaatttaccgatttaaactcccaaatttatatttttagcccaattttttgagaattttctataaaccaaaattataaacaaaattctcaattttctgtgttctttcttgagcttaattgtttccgaaaaaaatctttgagctggcggctaatattttttaagtgatttggaatacggtattcaaaccaaatgcccattttcaggtgacctccgccttccataccgtaatgcgcaagaaaatcagcaccggcagcaacgcggcacacaaattgcaccgcactgtttccgaatcggcacgaaactcggcaagagactcattttgcgcgggaacaacggcaagaaaatgacaacaataaaaaaaataataataaaaagcaaaagcagatgataacagggatgatatttttaggggttttgaatattttttcctgctgagctgccttatgtatttttagtgttgttaaataataaaaacgaaaaatacacccccaagaattgacccgaaaaaattccagaaaataacccctaagaaatgaaaaatttacttaaaaattcattcccaaaattatttatttatttttttgacaataatttagattttatattatgtatctgaatactgatttgacttaattttgttgggtttgaataaaatttagtcattttacaccataaatttgcaacttttaacaaccattttcttgtttttagcaacattttggattttttagaacctaaaaatatcattcctaatgataacattgttattattgaatatttatcgcattttatatttatgattcatccattggcaattgtgccatgaaaaaacagcaaacaatcaaatccctttgcattgtaattaccgaatttgtacagtaaataaa

SEQ ID NO: 61704 - DNA, 1069 bp, Heterodera glycines
  unsure (1)..(1069): unsure at all n locations
atgtgcacgggcgaagaacgcttaaatgtgaagggaatgggccgactaagcaaagcgggcaatttggccaaaggggtggacagactgttgaaagccattgacaaggcacacaaaaagtaattaatgnaccaattaggaacggaatcatttttaattaattaaatttataggctttgtattcgggaaaaattatgcgacgaattcattgaaaacggacgcaaattaacgcgggaatatttgagaaaaagtgccaaagaagaaagtgccgaaatgttcgaagtgttcgaatttgtgccgattgatcatcatggtaaaataaaacaaaacatattggatttatcactgaggtgatttaggcaatttcgactattctctgatggccaatttgtctttgccccgaacttcgatcgattcgtccgccggcggggcattttcaccaaataataatccttcaatatcgaacatcgccatcaactttttggccgattaccgtccctttgcctacggtgtcccaattacgcgtgattcgccgtcggccaccgtgatttcacgatgcaaatcgccattctgtaaatgtccgctgatgatgaggtgattacagacgaattggcaattccaattaagtaattaagcgacgactttcacttcggtgccgatgtctccgcttggcttggccataattcggtctttcgtagagagccttcgaggcaaagaatggcagagataagcgaagacgatgaattcctgttgagggaaaacatggccgacgaaccagtataaaattttcttttgtgttcgtgtccctaatgaattgccattgcaggaaatccgcgaattgagtgccgatgccgtcgaccgcgaggtggcgtgggcaatccgtgccattctcttgtcactgtccgcgctgctcagtgccattgccgtcggcactttgctgtgcattctgttcaaaatatggcgtcgcacaatccgcggcagtcaatcgcttggcattttgcttctgctcggcatcatcacaatgcatctcagcgcctttctgttcaccaccgaaggcgcaaatgaacccttt

SEQ ID NO: 61705 - DNA, 181 bp, Heterodera glycines
atgtgccatacgaggtcaaaaatgatgttgacaagcgctggtaaaaagtcaagggttagtgcgaagcataatgtgacaacgacatagcaatttttcttaatatttcaaattaattgtaggtaattactaattagcataaaagagggtaatccgtacaaaaatgataattgatcaattatta

SEQ ID NO: 61706 - DNA, 871 bp, Heterodera glycines
atggtgaaaaaaaaagaatttaaataattaaaaaataaaaatttaaaggatggttgcgtcgatgtagttgagtatgaaaagcggaaggcggaagttgtcaaggaacggctccgggcaagcaaccgccaattggtggcattcaccgagagcccggagctgatgatccaaaaaattttggaagaggaagcaaaccgaaaagaaggagaggcggaagaagcacaaccgaaaaggggtttggaagaggaggaggaagaagaagcagaatcgggcgaggaggaagacgaggaaagcttttgtatggaggttggggaccaaattcaactgggggaagaggtgcaaatttcggggataaatttttttttactttgcataaaataggcacacggcattgacttggcaaaaacaaagcgccgaaaaaacaaaaagtgcggtggaaagaaattccgggaatgggcgaaacgagcactggcgaaggaagccgaagagaagcaaaatcctgggccgtccacgacggcgtccatcagctcacaatcggccttcgatgctgcaaataagtttgcagcatttcagtaccaaaagagaagaaaggcagcggaggagcgcagaaagggacgattaaattttgattaagggaattaatgagggaaatgggatgaaaatcaatttttttggaataaaactgttaataaatatttgtaatgacgattaaagaaaatctaaaaaagaaacaaacaaacacaatttaaaattaaaaaattaaaattttaattgcagtatgccaataatcggtactgaaaattacccatacgttttgactagaaaattttaaaaaacgccagaaaaaatgcgggaaaataatttattcaataaa

SEQ ID NO: 61707 - DNA, 191 bp, Heterodera glycines
atgtccgctccgccgccgtacaacccgaacatgcaacagtacccgcagcagccacagcccaactacggtcagccgggctacggtggtggcggcggtggatacggttacccatcgcaaccgtacccacaacagccgaactcatatggtggtggtggctatcctcagcaacaacaaccgcagccacaagtcgt

SEQ ID NO: 61708 - DNA, 404 bp, Heterodera glycines
atgtttggatggacactttccctttttgaccgtcatcaactcggcctcaaattggcacttctttcgccacatttcgagcttttggtggacaaacatgttgatgacgagagcgaattgacaatttggagagcaatcgaaattcgtcgcaaggtcagtgtcagaacaacggcaccacaattatttgtgattatcggaattatttgtgattatcggcgctgtcaattctgtgccatttccattgcccgaccgtccgttgtccagcaaaattcgctctgaatttccgtttcgactcatttcgaaccccaaactcaaatttggtaaaaatcaaatttcgttttcaactaaatttacagtattgggcctaaactccacaagagccaaagaaacttttatatgggaataaa

SEQ ID NO: 61709 - DNA, 349 bp, Heterodera glycines
aaactttgggagacctatccaactgcatttgacacaaacaatgccgcaggattcatccccaaattgcattggtcgctcgcccatggtccagactttgccaagcgctggggatggttcgcatggatcagtgaacagggcatcgaacatttacaccacgttttgaacaagcaggttgaacaactttcgatttcatagttcaaaaaactatttttttgttttagtctgagcgcttcttccggtacaagggcgacgaactgctgctgaagatcggagaacatcagacattgctcaattccatttttgatagacatatggattcctttgatacatcaaaagccaaaaaacattg

SEQ ID NO: 61710 - DNA, 537 bp, Heterodera glycines
atgcatccggaaaaggaaagcagtgtttatagagtgcatgtccggaagaaaaaacggaacggacatgggacacacggatttgttgaagtgagtaatttaaaagtgaaaaaagaaaaaaaagtaaaaaagtaataataataaaaaatgaaaaatgaaatgccaaaagaaaaatgaaagtatttttttattattaattagggatgcgatttttaggcacaaaaataggcaaataaaattttttattaacgctttttaggtaacaaaccacgttaaaactttaaatatttcaattgtaaatgaaattattaaatgttttaaagttttttttcgaatatgaacaaaattttaaaccaaaaatttttattaagaaaaaaatatattaaatttagggataatttttttaaaaaattttacaattcttaggggtgtattttctgaaaatttttttgggtcatttcttaggggtgtattttttgtttttattgcatttttgttaaggattttttcaaaaaccctaaaataggcactttatgcaca

SEQ ID NO: 61711 - DNA, 897 bp, Heterodera glycines
atgacccgttgggctgttatgaacttcccggccaacgaaatgtgcctgtggccccaggcacttttatatggcactaacgatgacaacaacaacaataagtacaactatcggaaattgattcgaagacgcgaagtgctttcagaccgggtgagaaagacaataacagaaacaagaggggtcgcattgatgtgctaaagggaggggacccgctatggattttcctatttaaatttttcttaaaaatttatacctccgtgggagaggaggcgaggggggcgggggctacatcggtgcaccctatgacgtcactgcccaaaaagtcgccggacaattagttctttgagaaatttcaaaatattctcttcaatgcggccctatgttttgagtaaattatttttgtacaatttgtcgcgtggtttttcacgcgtttctctctctctttgggtcgggttgcaggggaggcgtacccttttttgtctgaataacagtgccaatgccttttgcttatgctactccatttcccaggtggtctattctctgttcaaccaacattccgcccacaaattcgttgtgaacatttactattcctccgagtcggatctgttcaagcaaatgcactgcttcaccatccgtcgtcatcgtccttcccgctgattttgagattgactttaatcggctgaaattgttcattcgctttttgttctttggtttcattcctatcaatgggtttaaaagtgcttttctcttttatttgcatggaaaacatctccataatttaattcattattttaaatgacaatttttgaaattaagctctgttggcgtttaccgatatttgtaatttcgaattctttcccattttctaaatgacaaattcatttatcataattttcaaca

SEQ ID NO: 61712 - DNA, 394 bp, Heterodera glycines
gtgggcgaacaaaaagcgcaggtaggaaaatcctcaaaattgatttaaatattcaaaattaagatgacaagtttaatggttaaaaacggacgattgtgcgaaaagcttggcgaacaccaaaagggactgaaagcagttcaaaatcggattgaattgctggagcagtgccatctgcgcgagttcgttgcgggtcttccgcccgttcatgaggacggctcattggttggtgccgaaatcaaacaaaatttgccacttcaatttcaggttttgtctcaatttgaaaatggcaattatttcgcagagatgaaaatactgttccagtcgggttctcgcttttgttcgggctttgccatcaaaagctcggcacactttcgcaattatccgtcgaatttat

SEQ ID NO: 61713 - DNA, 793 bp, Heterodera glycines
atgtccaatttgtttgtggcttcttctgctgttgtttttctccttctccaattgcatttcgtcgtcactttcgcatcatcctttgaaggggcgccgccaaaagcaaatgaagaagcaatgccaacgacgggggaacaaaacggaggtgccgaatttggtggaagcaagcagaaaatggcacggaaaatgatgcgatacaatggcaacaattttgacaaggtcagaccaaaagaaacaaaagaaaagaagcagtgcaaccgcacacaatggcattttcaaaaatgaaattcgaaatgacacaaataattccggataataattcagagtaattaattaatacaagcggaatgactaaacgatttatattaattaaaatttaatttataaattgtttcatttttttcgttttttcgtcactgcggcgacaaagcaaccaaaaaaagttgatgctgattgtgagccccaggaagaaaataagggattttaatgagtcttaattccctattttgctggtttttaatgtttcgtccgtctgataatttgtcatttacccccccccccccccacataacacataattacctaattaacaccctcaaattagcaggtgtccgtcctcttcattcgacgtgaaatggcactgcgaaaacttcagctccaaatcaacgttttggagcagcaattggccaatgctttgtcgtccgctttcgccgccggctgtcccccctccggcgtttcttccgtttccgatggcatttcgcaccgacgccatttgccaatgccccgcgagtga

SEQ ID NO: 61714 - DNA, 1115 bp, Heterodera glycines
ttgttcgattggcctttggccgaactgttgccacagcaaagtgccgaggacggcactccgatcagtccgatcagttgctacacccaattggacgaatccttcgtggacgagtcgcgcctctatcgcctgaacaatacggaacagctgcgggagcgtgcctgccttctgcgcatcccaaccgggacgcggttcaccgtggaacggatgcacaccaaaaatcagggggttaatttgggcagggggggggggggggtaaatggcagaaatttaaaaatcgggagcaataatttattaaaaaacaaaattaaaaaacaaaaatatacaaaattttatccataaaatttaaaaaaataaacagtgagaaaataatttcatcatgataaattaacaaatatattaattaaataattaagcaattattaaattaaattaaactattaaactctaatattagtaatttgttaaatatttataacattatttacttttttatatttatagtccctggctaaattttcggtaataattctcttattcaaaatttaaaataataaaaattaatatggaaagcttacataagtgtttgaaggacaataaatttgtctttttccaaatgatttcattattttggtcaaattaccatggtatgattggccggcctcaaattgcataaaaccaattgaaaatttaaactttaactgattcgttgaaataaaaatatttaatctttttaatatatccaaaatattcatttaatttcagacttttgtcggcgttatggccggctcctcacaagcgtatttgcccatgtggaccggacgcattttcgaaggtaaaatcaaattgagcagcggttggttattttcaaattggtgcaatttcaaagtgtattaattgggtatgttttatttattttttaatttgcaggtcattccgatatgtacggcccatggcacgtgcaatgccaaaatgcgtatttggtgttcaattcggtggcttttccccacttggaatggttcgactttcgcttgacccgggaaacggaggaggacagaagcacttcaaatgccgaagattgcatcgcggaggaattggtcgaccggggccgattttga

SEQ ID NO: 61715 - DNA, 856 bp, Heterodera glycines
  unsure (1)..(856): unsure at all n locations
atgaactctanaattatcagagtgccgaaaatcgcatgtgatctaagcctagcaaaaaatggtgtaagtaaaaatcgtaattacgctcaaaaagcttctcaaacaattttagctcatccaattccttctacaatcgcctttatacatcccattatgaacgctaaaattatcagagtgccgaaaatcgcatgtgatctacgcctagaaaaaaatggtgtaagtaaaaatcgtaactacgctcaaaaagcttcacaaccaattttagcgcatccaattccttctacaatcgcctttatacatcccattatgaacgctaaaattatcagagtgccgaaaatcgcatgtgatctacgcctagcaaaaaatggtgtaagtaaaaatcgtaactacgctcaaaaagcttctcaaccaattttagcgcatccaattccttctacaatcgcctttatacatcccattatgaactctaaaattatcagagtgccgaaaatcgcatgtgatctaagcctagcaaaaaatggtgtaagtaaaaatcgtaactacgctcaaaaagcttctcaaccaattttagcgcatccaattccttctacaatcgcctttatacatcccattatgaacggggggattttacaccggattaatgggtcatatactacttacgttagtaaaaatttgttctcctgccttaaatgatcaacaaccggtaaaatctctcatatttaattaatataaaattacattgatttaattttagcgtattacttacatttttgttaatatcatttttgctagaagatattattgaacaaaaattttctcaataactagtttatagagttttataatttttttatta

SEQ ID NO: 61716 - DNA, 1112 bp, Heterodera glycines
atgattatgcgcgaacgcgagatggtcatggcgcagtacagccgcgtcgacgacctccccgcgtgggtccaattcccggacatcgaacgcatcgaatgggtcaacaaagtgcgccagtaccattacgatccgatcaactttgcatttagggctcaaatcccaacaaaagggatattctgggcaaaagggggggagggtatatttggcgatttatttttgattgaaataatgaaaaatttattaggcccctaaattgtttttccttatttttttttcatttttcactgatttgtctatttccattctcgcttgacagataattcaacaaatttggccccatatcggcgagtacaccaaagtgttcctgaaagagttcatcgaaccccaaatccgtgcccaacttccggcgccgttcaaatccttcaaatttgtcgctgtcgacatgggcgacattccgttcagagtggtcagtcagtcagcagaaagcggacattccattccgatcgttgctcgccattcgtccaaatttcaccctttcccagggcggtctcaaagtgtacacccaaaatgtgggccgtgaccgcgtgatcatggacatggacgtggtgtacgcgggggacgccgagttcgctgtgcaagcgtgcggcttccgtggcggactcaaccaaatggtgttctccggcaaactccgctgcaccctccagccgctgctctcccaaccgccaatgtgtgtgtttggtttgtgtacaattgttgttggcattttgttttgttttttcatcggtcggtcattttcagtctgtaggaatgggtacggtaacgaataagcgattaccggaaaaactttccttgtttttgtattaaaatgaaaagagtccgtctgtcagccaatgcttttcccatgtctaaaatttgccggtcttttatttcgagaattgttggccattctcgtcatttgttccgtgttttgcattccctcccattttagggtcggcggtgtgtcgagttcgttcatggagttgccgaagttcgacttcaatttgaccggcatgggcgagttcgtacagctgcccggactgatcgacgccattcggtcggtggtcaacactcag

SEQ ID NO: 61717 - DNA, 691 bp, Heterodera glycines
atgacgattcacataaaaaagagatacttcaaattgagggtaatatattaaatattttcaaataaaattaaaatgtaaaaagaataattttcaataaaatattttaaaaaaattagaagctttaacacctatttcatctgtccaagccgaagcaggagcaattgaaaagggtaaatttaattttctattaagtgagacgtagaaatcgtctggacctggactcatgcctaggcctttttttgacaatctagatttttcgtggattttgtccagcagaaaatccagatcaaatataaaaataatccgtttcaggttttgcacgaaaaacaaggacttattgagcaacattttagaatttattgtttcagattgaccaatgttttatttcagttatctgaaaaagattaaatagattaaaaacacattattattcaagtagataaaacaggtgttcctaacaattaatgattttttcaaacagttttatccaggtcctggcctgagaacaaggccatgacaagcctgggttttttctggacctaggttttgaccaggaaatccaggcttttttcaaaaataggactagtgaaaagaattgcaatttttattttgtagtgctcgaaactggtgtggttcaagggaaacgactttttggaagttttgtccgacactaatgggccaagtgaataaa

SEQ ID NO: 61718 - DNA, 376 bp, Heterodera glycines
cccccccctcagaacatgtcccagaatccccaatcacacagggattctgagggcttaacgatgtcaaacgtaaaatctgatcacgtattcgtgatcagcggcccaaataacccctaaagacatgtttttggaagatttttgtcgaaaaaattttttcactcaaaaaccatgtgcacccccctttggtcccgaatctcaaaatcacttttatttttataaaaattcttaaaaaagtgataaaaatgccaaataaaatttatataatagagcaaaaaactgcggatttttgtagtattttatttttccagaatatcttttcagaaccgagttatgaatttttttctgaaaattcgaatttttccagaaattctggaat

SEQ ID NO: 61719 - DNA, 1290 bp, Heterodera glycines
ctgcatgtgttgccgtttcaaaactgaaagtcgtaatgtattggataatttggcgcggtgtttgaatgccttctgcaaagtcgacgatttaattggtttttgattttgcatatttttggattttaattgattaattattttaaggtcaaattgtcagtgaaggaggggtgaaacttttattgcatctcttcaagaaatgcagtgcagaagggaaactgagggcagcgcatggactggccaaaattgggattcgatcggacccaaacattgccttttctgggcaacggatgtacgaagtaactgtcatactaattaactattattataattcgctggtcaggaacgggatttctttatatttacgctctatttttaggtggttaagccatgcattgaactccttcatcccgaaggttggccaaaatgttgtaaaattatgcgttcgaaactgtttcagttgacggaaaagcaaattacgacgcccttctcaccctgacaaatttggcatcggtcggcgattcggtccgaaagcgaattctcaaggagaaatgtctacccaaagtggaggaattttggttcgaagtgaacaacgaacatttgcgagcagcggccgccgaattattgctgaatttgttgtattgcgaagagtattttaacactgttattaaggtgtttccccgtaatcaattcaaaattgacatgattttcattataaacaaaattttaggcggggacggatcgtgcgaaggtttggctcctttactgtgccgagggggacgaccgcctgagattggcaagcagtgccggctttgctcttctcaggtttgcgaggacatcttctgtttgaactttgtcattctcacacagtgagaatccaacgttctgtgaacgaattctgcaagaattgaacagttgggaagagcttttcacagaattggcaatgtccgaaaaccccgaggtccaacggcgttgtctgattggaattgccaatttggccgaattcggtggcgagcgggtggccagccaactctttgcggtgggaaatggtgtaacctttgggttggcactgaaaacacttgctcatttctttcgggcatttcatcgaactaattaatgagcatttgtttgttttagagccaagttttccatgttttggttgcgattactaaattggacgagaaagggcgtgaggggtccaaaaaagaggcgcggagagcgttggaagtggcggagagtcgcggattgattagggcaacggaaaggcaaataaaagagcaaatcgacagcaaa

SEQ ID NO: 61720 - DNA, 3762 bp, Heterodera glycines
atggattattttattccaatatttttattattcaatctttgtcttttttttgcctttacaattggaaatccatccgtaagtgtttctgattaaacattatttttaatgcttttatcaatcatttatcagatggaagatgacgcaatggttgagcttgcaaaaggacccgaatattttaacaaattttgcgcggataaaggattaattatcaatgagaaaaaccaatttgtgtctgataaatatgaagcccaccttggcgttttgtatgttatgcgaatgaaatggaatcatgtgacggaaacgcgagtaagcaaattctctgtatattaattaattaattaattaactcgacttgacaaatggttagcgataattgggcaatggaaccactgggcccacagtgaacagtttgggaaattgttgtaaaaaactaattttcaacaatttcgtgatttaccggaactcagaaatttttactgtactcctccacattcagtctgatcactgccccaaaattatccacggccacaatcaattgtccaaataataggcaaaaccatggccaattactaattataccggagacaaaatttaaaaaaaccataataaaaggcaacgtataagcttcaaaccaattggaaaatgtgtttttaatttttgattggatcttttttacgacattttttcaattgtatcgtaaataatacgatcgaaaaaattttagtttttcgtttttttggatctggtctttttccgatcctgtatcgaaataaaccgatcggacccttgttcggtctctaaattttaccatgttattttaagtacaatataaatgtctttaatgaattggacaactttcgccaatttgctttcattctctacgaatacttcttctggcaatatgttgctgaatatgtaaaaggtaacggatttcgaacccaaattttaaattgaaatttcaaattaaattaaatcccgtaaaattttctagcagtagacccaactttagctgaacaaatttccattacaaagaatcccattaaaccaaaattagaaagcaacgggagagaaataaagttttgtgatgcaatcctagattgggcattcgtttggaggaatcattggctgggcggaaattattctaaaacgacacgcttaattaataaagaaacgctaattgagaaatatggaataaatttaaacaattggtatgagcaagaatcattgtttgacatgccaaaaatgaaattgaaattaaatgccaattcaaaatttgacaattcatttccccgtcttcgcaaaatgttcgatttcaaaatggaaaaattgaagacgatggcactggagaaggtgtcccgatatgatttttttggagcggccctaattgaatgttcttcaataacaaacgaagcattgatttcgcacattaatcacaagccattttatggaatagacaaagcggtaaatgaactggaagtgtttttggcgctttcagtgatgcttgaggagagtctcgcctcgagacaagtcgtctcggctttttgagtctcggtctcggaaatttttggtctcaagcacacttgttctttgcaccagggatggcagggactcgactttcgatttccgtttttcgcttttcaatatttttatgatcggaattccgatgtccgaaaaactttttaagccccggaattctttttgaagaattttatttatatgcatcataatagtgccaaaaaaatctccatttaattttttgatttttttgtgtgaaatatttgttgaaaatttccaaaaactcaactcttaggtgggtgtgtgttttttcaattttaatgcccttttttacgaaattttgccaaaaaatttttttagatcgaagacaacatatttcttattgttctaaaagaaatgcgtgttgaaaagtttggtgccaaattggaaacggcgccattaagtgccaatgccaaatcattgatccattcacagaaattggaaatcaagctctatcttaaaatcatttatttgatgagactcaaatggcaatgtgcggaaattgagaattaccgaaaagaatgcacaaaattccgaaaatatttcaattttttgtatgaatatctcttccgaacatacaatgaaggtattgtgagaaaatgagagtaattctttcccccacctcaccatttggaaaagtcatcagattgaacaaatttaaaaattttaaagatttttcagttaattcaaaaaatctaagaatttttgcaatagaaaaacacagaaattttataatggtttttcgtggatttaaaccgatttttaggcgaaaaatgtaaatactaacatattaccaatttagaatgaggttcttttacaattttgaccttttctactgcaaaaacttaatgataaagaactttttttttgagtatttgtatgcatttttgcaatattttctaattttttatcgctcaaatttaataaattaaacatttagcggataattccgaagtgccacaacaatttgccgcggtgaggccaaattttacatttggaagtggaaacataattaagtctttgatttatgtggcaagtgaattatgcgggattgcggcattcttttttgacccaacttatgcaaaagaattcgattacaaattggacaaatatttcaaaaaatatgcggaaccaaaattactaaacgaatcggaagtgagtggtgaaaagacaattggccaaaaagtttttgaaagtgtggcaaaaataggaaaaagtccaaaaagggtggaagaaaaggctgctgcaatttcaccatcagaacaactcacatttgacttaagccgttcaaattttgacaatttgttgagagaaaactttgaaaaattacaaagagaaaatgattatgaaacggcaaacgtaatttataaatggctttatttgccgacaaataaaaaggcgggaaggaaaagtcttcagattgaacaaatttaaaaattttaaagatttttcagttaattcaaaaaaatctaagaatttttgcaatagaaaaacacagaaattttataatggtttttcgtggatttaaaccgatttttagacgaaaaatgtaaatactaacatattaccaatttagaatgaggttcttttacaattttgaccttttctactgcaaaaacttaatgataaagaactttttttttgagtatttgtatgcatttttgcaatattttctaattttttatcgctcaaatttaataaattaaacatttagcggataattccgaagtgccacaacaatttgccgcggtgaggccaaattttacatttggaagtggaaacataattaagtctttgatttatgtggcaagtgaattatgcgggattgcggcattcttttttgacccaacttatgcaaaagaattcgattacaaattggacaaatatttcaaaaaatatgcggaaccaaaattactaaacgaatcggaagtgagtggtgaaaagacaattggccaaaaagtttttgaaagtgtggcaaaaataggaaaaagtccaaaaagggtggaagaaaaggctgctgcaatttcaccatcagaacaactcacatttgacttaagccgttcaaattttgacaatttgttgagagaaaactttgaaaaattacaaagagaaaatgattatgaaacggcaaacgtaatttataaatggctttatttgccgacaaataaaaaggcgggaaggaaaagtcttcagattgaacaaatttaa

SEQ ID NO: 61721 - DNA, 636 bp, Heterodera glycines
acccacaggaaaatatcattttattattttaaaaaccaaaattttattttagaaaaccaaaaaatgggaagtgcccattttcttggcccaattttactggtcgcttttgcggcgcttatccttggccaacgttcgtctccaaatcactcttcgggatcgccttcacagcgtgacaaatcacatggactgtctcaacagggaaaaggccatggagcaaaagaggcaccggggcaacagatcaaaaacaaagacaattcgatgccaacaattaaaaaaggaacgtcgacgaaaagccaaaaaaagggaaaaggacggcacgcaaaaaacaacgacggaattggcactttgggaaaaagcaaacgacagaagcgattcctcacagaaatattcggcaattcattggacaaatcgaaaaataatgcggaagagagtgaacgaaaaagagaagggtttggcattgtgccagaaaaagtgaagggaaaagcggaaaaaacaaacgaaagagcgacagaaaaagcaggtgaaaagaatggaaacggaggccgccaaaagcgcttcgatgaaagaatcctcggcaacaactcatttgaactgcccgttctgaatcttggcccaaattggacaccccctcaataa

SEQ ID NO: 61722 - DNA, 744 bp, Heterodera glycines
cagaaggcattccaagaagagcttgagaaaaaggtcacggaacgacttgtgacagttcagacggaagttgacaaaatggaaattgcacatcaacagcaaaagggtaagggaaatgagcaacgattactgtacctatcgtaatattacagagactaacaaataaggtcatttattgttttatttcaaattttgtttaatagaatctattccatttaagtgattattgatgaattggatggacaacaaaaacatcaaaagcagcaatgggaaaaggagacaaacggtgagttgttacttaaataatcgattaaaatattatttaaataaatttatccatttttgaataaatatgcatttattgtttatttatatataacgattttttcatgttttagcattggttagccaaatcagacaatttaaagacgaacagaagaaatatttggaaaaggtcaacgaattggaaaagcaacagaaacagcggcagaaggagagggacggtaagaaaccaaagcatttaaatttattctctcaattttaggacggattgacaaaatggagataaagcagcagcaaatgagtgattctcacaagacacttttggaaaaaattgaagcaaagcataaggaaaagcagaagatgtttaaaatggtgaataaatatttagggaaattgggaaatttatatgatatgcatttaatacggtcaccaaatgaacaaatttcaatacccaagcattattaa

SEQ ID NO: 61723 - DNA, 526 bp, Heterodera glycines
atctccctttttgatagaaaaagcatcagagtgctaaaattaagttgtaaataaaatttggtgcgctttagagcactttctgaaaaaaatatttatgaaacaaaaaaatcgattttttcaagtgtccgtttggggtactcaaacaattatggggagcaaaaatccaacgcagaattaaagtacaggctatagggaagctattcccgaaggattcggtctccccataaatctgggcgcatcggttcggggggactgccccgaaaacaaaaataaatcgattttttcaagtgtccgtttggggtactcaaacaattatggggagcaaaaatccaacgcagaattaaagtacaggctatagggaagctattcccgaaggattcggtctccccataaatctgggcgcatcggttcggggggactgccccgaaaacaaaaataaatcgattttttcaagtgtccgtttggggtactcaaacaattatggggagcaaaaatccaacgcagaattaaagtacaggctataggg

SEQ ID NO: 61724 - DNA, 626 bp, Heterodera glycines
ctgaaaatctgtttcgatttgccgtccggcgcctacgcctctgtggtgcgtttttgggggtcacgaatttttttggacaaaaacactaaagtttgtgattttgcatgttggaatacctccccccgccccttgaagatccctaactaaaatttaaaggataaattgattttttttttataacaaaaaaggaccttttcattgctttctgctgctcgaatgcccacttttatgagtccaatctccaaatcatatgtttgtattaattaacacatggaaaaagttgggaagttccggttccaaccaaatcttttcataatttaacagtaattttattttcccatttgcctaggctctgcgcgagttgatgcgcaccgactttggcaaaaaggcgcaaaagcaattggaggaagaaatgatgaggaagagaaggcggaggacggaggaagcagaaggcgaagagggaagaagcgaaaacgagcaaaagaaagacgacaaaacggaaatgtgccaaattaaaacttaaaacatttttttgttgttttgattgtttcctttttcaccacttttacttgttaattttatgttggtattcccgatatgtgtgattgaaagaataagaaaaaaaa

SEQ ID NO: 61725 - DNA, 656 bp, Heterodera glycines
atgtcaactcaccctggtaatcacttcaagtgaatgataaacgtaaaaaagtggacaattttatatttcatgttataaaattaataatatttctggtcatgaaaataattttttatcaaaaaatgggggacaattttaattaataaattatttgttactcctaaaaatgaaataaatattttatattcaaaccgctttctaatttgtatttactgtgtatttgtgggttatacatatttcttatatatcgggcttttttaataaattttttccggtcccgtttttcccaaaattcacggtccccgtggaacaaaaaaagccggataagtgagactttgaaaaagtcggatgggataaatcaaagtgtaacagttttatatccaaattttaaaaatgccaattttactcagaccgattctgaaaaacgggtttcaggaatttacgaatatttgccactgtacaccaattttgagccgaacagaacatacgaactgattggaacttatgagcccatcagccaaaccgatccaccacagtttgaaatgaactttgtgattctgcacaaatctgagcaaacgcggcaaatgatgaaatggtaatttttattgtattttacaactttttattaattttgtaattgaacattcagattggta

SEQ ID NO: 61726 - DNA, 911 bp, Heterodera glycines
atgcactacattatctgcaacaacatttcatttaattcaattaccatcctacttttcatgctgttatgcaacaggaagttaaatgtgaaaaacattataggtttgtttccaaatccattgatataaaaaaataacatttcctaattaaggaaagaagttttgccaaaaatttacgaacgagttcaggccaaaattaggagtgatttggaacattgcaaggtgttgtcgttcacaagtgactgttgggccggcacttccgataattttattagcattttggttttattatttcaattttaactatttttatttagcctgacagtgcatggcattgacaaaaattggatatacaaagagtgaattttggcagttacaaatttccctggggagcacaccggtttagcaattgcgatgaaactttgtagcgttttggaacaatggagcattgacggagcaaatgtgcattgttttgtcactgattcggcaaaaaatatgtgtcgggtataaattatcctacaaaaaattataatatttaaataaaaatttaagaaggattgtgtgccgacaatgatattgagaagctgtttgtaaaatgccgtaaaatagtgggccatttcaaaaagagcaacaaagcattgggaaagctgaacgaaattcaagaacttcttgctattcctgagcattccttgttgcaagtatatatattaataattcttaatgattgtacttttaaggaagtttcgacacgttggaattcagctttgatgatgatcgaacgactctacgagcagaaaaaggcaatcaacgaatacgcctaccaaaattgtgactttggtctcactttaacaagcgaagaatggtcaattttagatgaacttattgcgggtattgttttaaagaaaaattggtag

SEQ ID NO: 61727 - DNA, 363 bp, Heterodera glycines
tactcaaactattatgtatgagcaaaaatgcttcgcatgattaaagtacaggttatagggaatgtattccggaaagattcggactccccataaatctgggcgcatcggctcggagggactgccccgaaaacaaaaaaatcgattttttctagtgtccgtttggggtactcaaacaattatggggagcaaaaatccaacgcagaattaaagtacaggctataaggaagctattcccgaaggattcggtctccccataaatctgggcgcatcggttcggggggactgccccgaaaacaaaaaaatcgattttttcaagtgtccgtttggagtactcaaacatttatggggagcaaaaatccaacg

SEQ ID NO: 61728 - DNA, 1205 bp, Heterodera glycines
atgatgcgttctgttattaaatttgtttttaatcctataaatgaagatcaaagacaagaactatgtgaaacgtggttttacagatttagtaagatttatttctgatcaaaagtaatagcaaatataggtgatgcaccgattgaatatccagtaccgtttgattttgtttcttctgagtacggactcggtgaagttatcagtatattaggagatggtaattgcggttggcgagctgtctctcttgctatgactggaacagaatcaaatcacaccgaaatccgaagagatgtcattgagtatttgcaagaaaccattaaccaaaattcttatacagaaaattcttggtggtgtaagtataatataaatcagtactgagtgaatatgctaattttagcgctatttggcagcaatatatatattagagaacatctagaaaaagcaatcacacccgcaactggggcacacgaaaccgaaaaatggatgaataatttagatttagcagcagtcatcaaaatgtttcgaataaatatatttgtgtgtgaatggctagtggaagaaatttaccgttggcaagtgtattcgccaaatttggaacaacgggttagaattgtttaattgtgcaaattcatatttgaaactttagctttcaaatctgagtcaaaaggagtcgactgcatcaatatttttatattatcgccacagccactttgaactcataaaacacccacaaaagataaattaattattatttttatttttttatattgtattcaaaattcccttttgtaagttgcaaagaaatattgtggcacttattgtggcacttctatatttgattcttgcatgatagcccctgtaatatggttttgcgactttaaaaaaagttataaatttaatagatttataaatgtattatttaaatattatagttaatcgttgctgttataaccatgatatatgctatataaacaaatatcaaaaacaatatgattgcgacaatagcttttgcaaatgtctgtatgaaagtactgattgttttctgacaaaagtctgtctttacagtatttaaagacttaatttatctttagaatttgttatgctggtcggttaaaatttttggtgaacactttaaagaacagtgaaacaattgtagttttgtattatgtagattaaaaaaataacacatccaacaatttttgaataaa

SEQ ID NO: 61729 - DNA, 1580 bp, Heterodera glycines
atgcccattgcggatttgccaatgccaaggaatgatggaacgcggacggtggcggcggcggtaacatcaaagcatttgataaaagccctgcagcgccattttgcgcagtgttcatttgtgacgttggcagaatggccgaagcatgtggtggcggcgaaccaaagggaggcggttgaaacgtgctgttcaaagaaaattacagagactattcataaacacatgtaagtcacgtaagtaaaaaatacaccaaaacatgacaataaaaacacacaaataatataaaaacataggacgcataaaaacgcgtgtgtaaaaacaattgaataacaagccaagttaaaataagtgaaaacacaatgttagagatataataaagctggcccgtaaaacacattggaacgcataaaaacaaacacacgtgaaaactacaggtaaaacacataaaatcttttgtgttaatataacataagtggacgtataaaacattgtaaatacatattttattgttaatagtaaaatgtaaaaaagaaaaactcgtgaaaataaaacaaacaaacacgtaaataaatgagaaaaacaaaaacataaaatattgttattgcatattcatgaaaatgtaggaaaattgaataaaataaatgagctaaaacacttaaacatatattagtgcaataaaaggacgtgtaaaacacaataatacacgtaaacataggcgagacaaatacctggaattaatatgacaaagcggacgtgtaaaacgaaaacacatcttattgttaatttaatagctaacacattggaatgcagaaaaacacgtgaaaaagacctaataaacacgaaaacacgaaaaaagaaatgagtaaaatatatctaaacatagacataaaaataattgttatgcatattcatgaaaactaagaaatataaataaacaaatgttagccaaacacgtaaaaacaaaaagcaaaacagtgaacatatatattagtattgtgtaaaaagtggacgtgtaaaacatatttgaacgcctgataaaatgcatgtattaaataaaaagcgaacgtgtaaacattataaatacacattttgttgttagtataatagtaaaatggtaacgaagaaaaaacaagtgaaattagaacaaacaaataaacacgtaaaagaagtcaaaaaagatataggtataaacattgacatgtaaaacacgtgaaaatggaacaaaaaatacatgtaaacatagagatatgaataattgttattaaatataaatgaaaatgttggaagattgaataaaataatgagtgaaatacgtaaaaacacaaaacacgtgaacatatattcgggtgtgtaaaacacgaaaaaacatcttattgttaattaattgtaaaacacattggaatacagaaaaacacgtaaaattgcaggaaaaaacacgttaacaaatacgtaaaataaaagagaaaaattaatcatagacatataaaataagtgagcgaaacacgtaaaaaaacatagaacatatattagtgcaacaaagcggacgtgtgtaaaacatgaagtaatattgttaaactaataaa

SEQ ID NO: 61730 - DNA, 525 bp, Heterodera glycines
gtgacggtccgactgagcaaagatggcactgagcacaccgcgcttggtccaacattgactacagccaagcaaaaagctgccactttggcactggcacatcttcgtcccgagttggagcagctgaaactcttgttaaaggaggcggagggcacagaggaagaaaaacaaattgtgccaaaattggtgaccaaaattgatggcacagatcaacagcagcaacaaaggcaacatttgttgggttgtgatgccgcatcaaaattccatcatttatcttcatcatcaccgactgatgaaatggatcaacagcaacagtatgatggactcaacgatgatgatgatgaagaagcagtagcagcagaattggtcgaaccggtgccgctggaagaagcggaaagttgccgagaagagcggcggcagagtgccaacaaaaatggcaagtgctgccaaattttgatcaagttttggtatcattcggtgcagaataacaagttgttgaaaaaagctaattttaactcgaataattaa

SEQ ID NO: 61731 - DNA, 254 bp, Heterodera glycines
atgtatcttcatgttatattaccaacaaatatacataaacaaatcataaattccgagcagagatggatcataattataaggaagtggacaagttatgtgaaatgaataattaaagaataaagcaattatttagttggaaaacaaatatttatcaataaaatacaaaatattctattcaaataaaatgataacaatgaaacaaataatttatttatttttagcaaatgattgttaattatcgttgattaaaagca

SEQ ID NO: 61732 - DNA, 78 bp, Heterodera glycines
atgcaacgaccttttttgtcaatttttaaagcacttttttcgggagcgcttttttcaaataattttgggcaacaaagg

SEQ ID NO: 61733 - DNA, 720 bp, Heterodera glycines
atgattttaattggcttaattattattgcctttgtgactttttgtcttctgttgagtttcattgggtttaggggtattttttggttatgctgtcacaaatgataatgattccttttttaagctcgttcgcactctgcctctgtgtatgagcgcttccgtcgtgtttctcaaactggcactcgcgcacatgttattgactttgatgaaccaaatacaagtgccggagcaaaccctgttcgtggtggcggtggcgggcgttttccaattgacgatgcaacgtggttgtccatgtttcgccgcttggtgggtttaatttaatttaattcttacttaaagtttatgtcttattttgacaaaaaaattttgaaaacgaatttttaaaaaaataaattctattttaagctttttttttaaattaacttaactatttttccaaattaatcaatgctaagaaaatttggccacgattttgagacattaaatttaattgaataaaaaaaattatatattttttcttatattgttaattattcgccctcttcatttttcagaataatctgacgcgaactgttgaagccatcaaaatttgccttcagtccgttctcacgaatcaacaactgaacaactgggacttgaacaactgcaacgagggcatttacctttacgattatttattattggccgagcatttgtcgaaaaacaactgtaataattgaataa

SEQ ID NO: 61734 - DNA, 728 bp, Heterodera glycines
atgtcttccgccatttccaactgttcaattctgctgcttttcaccacaatggtatttatttccactgcaaaatcactgcccctggtcacatataatttcaatcagccaatccaactgcttcgacttctcaaaatggacccgagggtaagcaaaatttaatataaaaaaaattgctacagaaatgactaaaataaaaatgggtttttttaatataaaactggagtttacccataaaacttagcaattgtgaatttgcgtacttgaatcacactaaactttcccatcatgtacttagttaacctaaatatataaataatcattttaatttagcgacagatggctttgatccgcttgtccgattctgcgtttaaacaccgctatgtgccggctgagcgccaaacttattcagagcaacaaccgtatgaagaacgcacgagtgccaatggggacgaaacgatttcaaccgagaaaaaatgggacacaaaagcgatgaattggccgaaaatgttgcttgatgaagaagggaagagatgaatgaatgaatattgggaaaatcaaacaatttcatgatgaatttatgcgcttatgatggatgcccttgattatgccatttaaaaaagaattttacatttttcgctttaaaaataattgcaaaaaagggaattataaataaccacatttggacaactgcatccgccaatggataaaaaagaatagaaaagaataaa

SEQ ID NO: 61735 - DNA, 315 bp, Heterodera glycines
ttcgatttgtccccaattttttcgctatttttgaattaattttattccattcttttgttgaatgttttcgtcctttttgctttattttttcttttattttataaaattttgcaattatttctctttttttgagttcatttcttttttcttcttctttttcttcccatttttctccaaatatttcgccaaatgacttttgttgtaactttttcttttctgattcaattttgacaattattaaaaatataattaaaaataataaagggaataatttcatttttgtcgtcttaaaatgattttattttttcttcaatt

SEQ ID NO: 61736 - DNA, 2018 bp, Heterodera glycines
atgaaaaataattcgggtaaattggaatcattatttgaaaatataacagccacaatcagtgtaaagaataaggaaccaaaacaattttggaatttagaaactatgggagtatgggataacccggaagagaaggatgatgagattgccttgaaaatgtttaaagaaacggttcaacgaaaaaatgggagatacatggtaagttggtcatggaaaagccctaaagaagaattaccaacaaattttgccatagcataccggcgtttaatgagtatgttagaaaaaatgagagtaaccccaagtcagcttaaagcgttggaagagtcatttaaagaaaatttaaaagagcaaattgtcgaagaatcttcaataaaatggtttggcgaacattttctccctcatcattgtgtcttcgcaccgggaaataaagccatggattgtttatgatggctcagcaaaaaaaggagtggtaaatgcctaaatgacatgctttttcgtggcccaatcgaaatgccacagctcccagggcttttaatgcgttcacgaataccaaaaattgctttatggactgatattcaacgagcattttggacattgtagttaaaagaggaagacagagaatttgtaaaatttttgggtaagagatataagaaaaccaattacacaagaaaatcttttggttctacgttttaaaagagtaccatttggagtgatttcctcaccatttttactgggtgcgacggttcggtatcattcgatttggcccatccctgatatacagtatgatgcatgtgtttataatcaaagtgttttttgtcgtaactttgtctaatatcggtcaatcttaacgattttggtaaaatctcagttgacaggattcagcattatttggaaactaatgttaaaccggtctaaaagctgtattaaaaagtatgtcatttttcaagtcaaagccgaaaatatttgggaatttttttgataccttaagatttgatttggcattattaccgtatccattagttgcatggcaatggccatttaaaaatcaatgcgtcctttcgtttttatataaaaaccagaataaatgattttttaaattagcgtcggcattttatttaattttggagtccagcggtgccgataagtgccgcctgggaaaaatttgttatgttaatattagcattaaagttgctattgacgaattttccattaaagcattttctattgacgtattgtcactgatgtatttttcattgacatatttttcatataagttttttctactatattatttttcactgagttttttcacttacttatttatttattcaataaagaaaaggtccacaaaagggaaaatccgcttactttgtggacaacatatgtataaattaattgtccaaaagtaattcggataaaataaaaaatgaataaaatattaaaagagagatcacaagtcacacaattaaaataaagataagtcaaagcggctcaaatttatcaaaattatcgaatcgcttatgtaactatttattaaaaaaaatttttttcagtcctgcttttaattactctaaagaatttttgatttttgttttaaattgttttaatgaatttatttttgcaagttctttatctaattgattccacagtttggttgccctcacgtaaatggaatatattttttgttatattttgtgttaagtctataagagggggagttaaagcgaccagatggcttaaaaattttgtataaaataatccaaatttttgaagattttgattttattattctaaacaaggatcgtatatgtgaatatgcattctttgttatttgtaaaatgtgatcagaaaacagtaatttattatcgatatttacccctaagtctctaattgtatccacagcatttattgtattcccatcaaatttatatgtttcttttgggtttttgaaacccaaatataatataaaagttttttgaactgaaacttttatttgccatttatttgcccattcaaataaa

SEQ ID NO: 61737 - DNA, 460 bp, Heterodera glycines
atgaaattattccctctattattttgtttaattttaattttcattgccctaattaatcaaattaaatcagcaaagaaaaagttacaacaaaagtcatttggcgaaatatttggagaaaaatgggaagaaaaagaagaagaaaaacgaaatgaactcaaaaaaagagaaataattggaaaattttataaaataaaagagaaaataaagcaaaaaggaagaaaatattcaacaaaagaatggggaaaaattaactcaaaaatagcgaagaaattggggacaaaacgccaatatattcaaaaatggatcaaagaattggggcttaaccaaaataaatgttataaatcaacaactgatgaagaaaagttagaaattgtacaaaaattcattgaaatgacaaatgaatttaaacaaaaaggaaaatattctttaaaagaatggaacaaaaattatgccgaaattt

SEQ ID NO: 61738 - DNA, 542 bp, Heterodera glycines
atgatttttgctttgaattgcggcttaatggcaatgttttgtgctgcttttgatcgactttttgccgtcatttcgccttttaagtatgttaatgtatttttattgaataaataatttatagaactgtcatacaaatataatataaaatttttcttttctttttttttaattccagtcataatgccattttcaccaaatacaaatcactgtatttgcttggtcatctgtttatttgcacaatttactcatcatttattcagtattgtgtgattgtatatgcatatgaaaatgcgggaaagtatggcacaattaaaatattattaataattgagtttcaacccgtaatcaaggcctgggtttttcctggacctggattttcatatatttttgtccaagataggtccaggcccaggtcaaataactaaaaaaaaatctatgttcagttcaaggttaggcacgaaaagtctgggtttcctggatacttttgagcatttgtcatttcaaaaacaattttgatttcaatttttcaaaaaatgattaaa

SEQ ID NO: 61739 - DNA, 1120 bp, Heterodera glycines
atggcctgcaaaattcggagatgggccgatgttggcctttacgagcgtgatggcgaaacaggactaggcccacgctctggcccaagattcattgaaacgtgctggaatgatctaacacagtttctaaatgatgcctttgttgccgaatatttggcatacttggcaagtatatcacaacgaaaagtagtcgttgttgatcccatggtgtggcaagagggcatgcaccgtgtcacgtcatacaaaaatatgacattcggatacgacccaaatgttcaggcagaagtcatacttttgcccgtacattttcccgcacattggactcttattgtccatgatgttcagtgtggtactcattttgctgattcattgcctgttcccaatggcagactggattggcaacggacggacaaaattaaaaatatcatttctgatattttgccgtcatcagtgttcactggtatttttaatgccgaagtaacgtgccaaaatgatggaaatagctgcgggtactttgtgtgcctgtatgctgaatcctggcttataaacaaccgcacgtttgttctgcctgatttgtccatcaattatgaaaagcggcgcatattatggcacattaacgagctgtatggctctgataatgtgccatatcatccgagggaaggggtgccaactccttgcccaattctctaccgacatgcggatgaagcgcagtcgacatccaaggccgttgggccgatggaagttgatgacagcgatgagataacaatcatcgaacctctgacgaatggaatgaatgccattctcagccaagtccaagtggaaggtgaaaaccaagctgacatgtttggtttggtgtcggattcttgtgtcccacaagagcctattgcgcaggttgacgatgcaatcttcgtcaggccgaaaacgcctcctaggcgatcattgcgcattggcagaaggcaatctgcttcgattagccgttctccctcgcctgcaccaaagcggcgcacatcggcaaatgctgttgatcaaattagggcatttacgcggcgttgctaccttgtccacaagggttggtgctgtgctgccgcagcagcaaagcattatccggaatattcggattctg

SEQ ID NO: 61740 - DNA, 1311 bp, Heterodera glycines
gttatttttctgcagcattttttctcatattcgcaagttccataatcttatagggagtccatgtaagggccaatctaaacattgaaagccctttttggacaaacaaagccaatgcaacagagccaatgattagctatgaagaattatttctaacacgataattggtgtggtggggactaagcagatcctgaagaaactccaccaatgaaaacaacgaaataaagctgaccttttcgtggaatcagacgtaaaaggaactataaatctctagaaattacctaaaatggtctacaaaaaagccaatatgaaaattgtaaatatgtcttcaaaacctatcattttttgattttacatatttaataatgttctcctaaattttcaggttatttttctgcagcatttttttctcatattaccaagttccataatcttatagggagtccatgtaagggccaatctaaacattgaaaggcctttttgtgacaaacaaagccaatgcaacagagccaatgattagctatgaagaattatttctaacacgataattggtgtggtggggactaagcagatcctgaagaaactccaccaatgaaaacaacgaaataaagctgaccttttcgtggaatcagacgtaaaaggaactataaatctctagaaattacctaaaatggtctacaaaaaagccaatatgaaaattgtaaatatgtcttcaaaacctatcattttttgattttacatatttaataatgttctcctaaattttcaggttatttttctgcagcatttttttctcatattaccaagttccataatcttatagggagtccatgtaagggccaatctaaacattgaaaggcctttttgtgacaaacaaagccaatgcaacagagccaatgattagctatgaagaattatttctaacacgataattggtgtggtggggactaagcagatcctgaagaagctccaccaatgaaaacaacgaaataaagctgaccttttcgtggaatcagacgtaaaaggaactataaatctctagaaatgacctaaaatggtctacaaaaaagccaatatcaaaattgtaaatatgtcttcaaaacctatcattttttgattttacatatttaataatgttctcctaaattttcaggttatttttctgcagcatttttttctcatattaccaagttccataatcttatagggagtccatgtaagggcaatctaaacattgaaaggcctttttgtgacaaacaaaccaatgaaaccgagccaatgattagctatgaagaattatttctaacccgataa

SEQ ID NO: 61741 - DNA, 852 bp, Heterodera glycines
aataaaatgtacggacgacaaagcaataatcattattttccccaacaaaatgtcatgggcatagaagaaagcgcaacaacgagcagtcggaacagcgccggagggggagagcaccgagtgatccgatcggaagtgtggagtcgcttcagactggagggactgaacgcggtttgcttggtgtgcaatgagaagctgaaagtgggccccacgcgacagacgtaagcccagcgcaatgggctgatcaacagccgatcactaattcacgcattgaaggtccagcctatggcgccatctgaagcggcacaaccgcgtggcggcggcccaaaaccaacgcattccctcgggctttctccaaatccatccgcagagccaactgtacatccagcaacagcagcagcaaatgatgcgcaacagaagcaacaacggttttgcggcattgaacggtggcgactgcacaattcaacagcaacaaaagggcgttgtccattcgcatgcctcgcgggcactttctctgcaccaattccgcctccagcagcagcagaaaatggcggcacttcgggcagcacccgcgacggcactgcttcacaacaacaatttccaacaccaaaaccaccacactcaacagcaacagcagcagaattttcgccatctgctgcacccgtcctccgcctcctcctccacgtcaccgttcatccagcaacaatcggcttctcctcccccatcctccgccgtcgaaattccgctcacgcatccgccgctggtgaccgtggattgcaagccggtgcagaaccgggaattggaccaactgctgggcatttgtcgagaggagggggaggaacagcaggaatatga

SEQ ID NO: 61742 - DNA, 885 bp, Heterodera glycines
cacccgaacactctcctttgtcaggaccattcccaacggcaatcggctgcatttgcaagtgtacacggacggatgtgccgatcggcgggagcagcaggtcaaatacttggagcatgtgcaagcaattgtcacactgagcgcgccaagacggggcgacattcaaatttatttgacatcgccgaggggtgagtcaaaaattcaaaaaaaattgtttttttcaaaaatttgcaaattttcaggcactcgctctacgcttttggcaaaacggcaacgggacaccagcagaacggggttcaaagagtgggcatttatgaccacgcacaattggggcgaaagcgcgtacggcacttggtccctggagattgacaacgatggcaacgatggtcagtggcaattggcattttgattgctttggttgggttcaacaatttttggcattatttcatgatggaaaatcatgtttatcgagccaaaaaagggctaatttccatgaaatttatcacatttaattcagcatattttttcccaattttttttgctattataaatgccgagagcgaaaattcgcatttttttccatggcattttgttgtgccgcttttatttacggatggacaaattgaaagaaaaaaattccatttattattggacattcgaatgaggatacagttcgtacattttttaaatcgtatcaaaaacaaaaaatttaaaaaaaaattttttttttgtatgaaaattcagccacaaaaaaaattctgccctcactcgcacagatgccgaattgctcaagtgggagctggtgttgcatggcactgacgtgtacgttgggcccaccggctttgagccaaccgcagcggtagctgaacgctctgtgcaacaacaacg

SEQ ID NO: 61743 - DNA, 564 bp, Heterodera glycines
atgctgaaggcaatgcggcatgtcttcccgtcatgcgagcgctccggctgcaacttccacatggcgcaggcattgttcagaaaagcgaggagcatgggcatttttcatttatttgccgaaaacaatgccgaagcactgggtcaaagaaaatcggttcacaaaacattcaggtaagttttttcattagcaagtctttttttttaattttttcaaaatcagatcagtcctctctttggcactcaagcggaggcatttgaacccaatgcagatgtaggacgcttatttcttcgacgcactcgaagcacaactcgtaaatgcaactattttgtcatgaaaattatgaaaatttttatcaattttagcgttcagtgtgtcccaggcgtccataatgacaggcagtggaccaatacaattcggactgcattcgccataacatcaactccgacgattccattgtccgaagagagcagcttgcacgggctcgtgatgcaaggctttgcggagggatttcacgtccgtggaaattcagagagtggtgaagaaactgaggccgatcaaaattga

SEQ ID NO: 61744 - DNA, 67 bp, Heterodera glycines
tggttggtttgaaatctattttttataatggggggagggcgatcagcagaccttttttgggttacac

SEQ ID NO: 61745 - DNA, 2906 bp, Heterodera glycines
aggcaagcagcgaccagtttgctacctttattccattttggtcaaaatttagcctttattttctctaaatttttaacgattcgaaaacaaataattgattgagatttttcaaaaaaaaatcgcttaaaattctttgaaaatttttttcctaagaactttctcataaaacctttctaattgtaagatattttttttcttggagattttctaagctaataatttttttttatttctcggaggggaaacgatccgggatggatcgagctgctcccattgtttcccctttttgtttcttttccttataatcccttggaataattaaattgctggcggacaatccgtacggaggaattttcaaaatgcaatttctgtttcagttgtttgaccgatgtggtcccgaggactacaccatggatttgtgcgattacaaccgaaacctgacgtacggagttgttgtggacaaagtggacgacaattaccacaccggtgatctcggcaacggattgcatgtaaatgacgagtaacaaaaaccattcgtatttggtttcattttttatttagaccgcttttcttcaattgatcatggcactttttgccaaactgttgttcaccattttcacttttggtgtcaaagtgccgtcgggtctttttgtgcccagcttggctatggtataattttttaaatatatctcaaaatttaaaacatcagcatacggaagcacaaaagaaagagcgtgtcgatattttagaaagaatgatcaattttagcccaaaattgaggcaattttcaatattttaagggataggcacaaaacgggaaagtatataaatttattttgaatttttcagttataaagttaaagaatcccgttttattaacaaaaaaaacttattgtaaaatgacatttttaattgggttttcaattttcagggtgccattgctggtcgtctgctcggcatcaaagtggaagggctcacctacgcgttgcagcagtcctacccgaacagtgagctgtggacttgtcagattggccgtgattgtgccatgcccgggctgtacgcaatggtcggcgctgccgcagtgttaggcggtgtcacacggtgggtattgggaaacaagccattcaccccgtcatcccatcaaaaaaaaatatatatatttattgttttaggaacttgtgaaagttttgactttttttctgggaattttaagtacattttagaattgtaaaaaaaattggattgtatctcttaatttatgaattcagaatgactgtttcgctggttgtcattatgtttgagctgaccggaagtctcgagtgagtgaaaatggcgaaatttaaaaagattaaaaaatacaattaatgcgctaatttataatttttatatggtataataaacaatgctattagttgctttcaggttcattgtgccaacaatggctgcggtgatgtttgccaaatgggtaggcgacgccatctacagaatggtgggaaattaatgggaatttatttgctttatattgttgttattattattattacagtttgaattctgtatttttttatttttgattatcaaaaaagcatatattcattccattagtttgttactctaaaaatactaaaaaaaattatcatttgaatatttttttattaaaaatggacccttatatattattaacttttcagggtatttacgacgcacacattgagctgaacggctacccattcctggacaacaaaggcgagtatccctactcaaccgttgcgggccaagtgatgcggccgagcgcggaaatgcgactgattgaacagcacaaaatgacagtcggcgagttggagacgttgctccgggacacaaactgcaacggatttccggtggtgaacgaccagcgtgaaatgctcgtcgttggcttctgcacacggtaatcattttgcattggttttatgtaattatttttttgaaaattttgcaaaatttcttaacatattttattaaaattgtcaatctcggcggctcctagtggcaccaccggacgaccggaccccaccatatttttgaaaatttttaccctaaaatgacaaaaatttgccattttggcgtaaaaccgccacaaattcctattttttcgctttggcgctgaaatttgaaaaataacactggcatggacctgctcccatcctttttagtttttttttcattttatttgtttaatattaatataagtgattaacacacatctccttcccgtttgttcagaatggatctcagcttggtgttgaggaatgcacgcaaaatgcagccaaatgtgaccaccaattccacggtgcacttctccacagaagcgggcctcgccagccaatcgctccctccgcaatttttggtggccgacgacggcactgtcctcaacggtggcggcgctacagttctcccaccgtctccgtccttcgtccccgacgacattggcacggctgcgtcgacgtatgccgctggcgtatctgcgcccctgcaacttggccacattatggacgtggtgagtgagtgtgggcccgaaatgaaaacattaaaatttcaaaaaaaaaaattcaggaggctttaacggctcctccataccccattttaccattattttttggaaatttgactccatttcgacataagttgtaacttttacgttataaaaacacttcgggtcttctcaaaaaattgtcaagaaaattcgaagtaaatcgctgctcatttaggcaccaatgacagtagccgaccaaacacccatggagacagtgatcgacatgttcaggaagttgagtcttcgaacaacgatggtcacttccaacggccgattactgggaataatcacaaaaaaagacattttgacttttatgcgtgaatgtgatcattga

SEQ ID NO: 61746 - DNA, 419 bp, Heterodera glycines
catttcaatcactgggactcaattctccagcatttcaaccgccaacacttaaccctccagcttttcaatcaacgggactcaatccaccagcattccaatcaacgggactcaatccaccagaatttcaatcactgggactcaatccaccaacattccaatcaacgggactcaaccctccagcatttcaatcactgggactcaatccaccaacattccaatcaacgggactcaatccaccacattcaagtcactgggactcaattctcccgaattcaaatcactggactcaatctcatcaatccttcatcaatacaattaccgggactcagttctccgacatttcaatcaccggaactcaacctcagcaacggaatacagaactatttaaaaggaatccagaaattgaaatataacccata

SEQ ID NO: 61747 - DNA, 151 bp, Heterodera glycines
ttacagcttatcaaggcccaattaagcttatttccagaaaatctcgcatgaattctcatttttaaattttttatagatttttaaatatttggatatttttttggcttaccaaaacttcatcgaacctggctctttatattctcattcaaat

SEQ ID NO: 61748 - DNA, 561 bp, Heterodera glycines
atgctcagtttcatttacgcggacgatttaagcgaatttgacggagacaacgcaatggcagtgctttacgcgggtcgaaaaattttttaatttttatgggaatttttttaaaaataaaacttaatattataaataaataattatattttaattataaattaatcaaaaacacattttcctaaaaaaagaattacatcttaccgatcctttgcgtttttcattagataattgttagagaaggaagtaattattgattaagtgtatgaccccacgccacttcgccatcttccccctcccattcccttcatccagttggtaattgtgccccaccaatttggacctcccaatttattctcttcatttttattattttattttcttcggcaaataaacttatttaatttgttatcttcggacataacaacaataatatttatttttttgttttcagctaaaaagtattgcatcgatggattggttaatgaatgtttgcaaattccaattcctcagctgtccaatgttttcttggcctttacccaggctcgactttttgactttgag

SEQ ID NO: 61749 - DNA, 663 bp, Heterodera glycines
atgctttttttgtcactaccgccgatgatcagcacaacaaccgtagtgatggcggagattgatgctgtggttacggtaccgctttcgctcacgctcacattaaattcgacaaaaatggccgccagattggctgaggttgtgcgttgatgttcatcgggggtggtggtcgtctcgccaaccgccggtggatcaacgataggacctttaccagggaggaaattttaagaattcccgggcatcgcctttcggcacgcgcgtctgacccctaaaaaaattgtgtctcgacgaaataaaaaattttggtttttttaattattggatgaggcttcagcgaaaaatttccaaaattttgcaaaatcgcgacgaaaaaataagagaataaatagcaaaaaaatgatctcatcgtttaactagctcttggtgatctgttgatgaataaaagaggctttccttactatgaattttattcagctctttgaactccttgttgcagggataaaaactgccaaccaattggatctgatcaacacaatctttgcaatttgggctgcctcccgcttccctgcaaaagtcttcgaatttccgatcacatttgttgccatcataacatgcgctgatcacaaaaatatcattcccgttgcctggatgataaaagcttggtaa

SEQ ID NO: 61750 - DNA, 216 bp, Heterodera glycines
atgcttttgtctcctccactgctcttcgtgctcagtctgtgttcattgtgcgtctttggccataaaacgccgaatgcgtcggatggcccggcaatgccggaactgccgaaagcgctgcaaaagctgagcgacgcggagaggaactgtttgttcaccatttacacaatgtccaaactgttcgagaacaaaaaggtgcagaaaacgctggccaaacag

SEQ ID NO: 61751 - DNA, 2363 bp, Heterodera glycines
atgccaatgctacccttcctttcatgcgacagcaaagacacttctgagccggacatttcccaagagtcgggagaagagcaacggatggtgtgaggtgaacttggaaaggatcgacaggtgaagcggaaaaagagcagcacttaattagctgtaattaaaagacaaacaaatgcatttttcaaaataataacagcgaatatggccccgtaattatgcacgcccatggctcaatcgcctctatcaacggcgcccgtctatttgtgaagtcgacctcggggggcatttggatagcgatttatcagccggaatgcctaaaagagaaggatgagtcgaaaaaatcggaggaaggtaaaaaaacaatggaaatggacagccaagcgaaccgaattttggtccgggtttttggtctttctccttttttggtcattttttctcggataattaattggtcaattaatttatttgtttgatttgtcaggtgttgtgagcaacactttggaccgagtccgacgttgggttttgttaaaatgagaagaaaaggaagtgaaagccgacggaccaacaattataaattaacagacaactgctaatgatcaatgattgattttaagtgtaaatttgtttcaattggttttttaaataaaaattattttatttttcttcaaaaatgtttttccatttgttcaaaagtcttgtttgtttgttttccttttatcctttcattttactgaacatgcttttccattaattgattattttttcccaatttcccctcattttcagttaactcttttaaattcaaaagtgtaattagtttataattaattgcatattctgctaatgatggtaattgctcccttatcaatgccatccaatcaatcacttattattctgtgtttatttatgggaatgcagcaccatcctacgcactttgattctttttatcatttttaatttaccttcacttatctttccatctttgcctttttttaattttttcaccattttaaaattattttaaattaaatttgttctttttaattgcccaataatggcattattcgctaattttgctctctccgcttccctcgcttttctcgctttcgctgtttggtttaattcgagcgatttcaaaccaaaagaatttcagtaaataataattaatatccttttaattttcaatttggttcccatttttaaattcgtttcccttttttagtttgccccctccgcccgctttggtcggtcctttggctccaaataaaccaaaaattttggaaaaattattggaaggtcaaatttcgggccccgaatcaattgttatcgagaaaagtaaagaatgaattaaaaaatgaatcaaattaaataattcattcatttttagatgttttatacacttgcacaaccgacggaaaatgtgtgaaaattgtggacggaaaaattcagaaaactgtcccaatgacgggacataaaaattgtgacggtaataattgaagaaatactaattaattaaaaaaatatattacaaaatacatattcgaggcaagcgacaaaccttgccatattgtggccgtccgctgggaatccgtcgttacaatgccaatttattcgtcgttgccgatgccattttgggaatattcgttgtcgatttcgaaaagggtgaaaggaagttcgaattcaaattccaattcgaatttccttttctaggctcggccgagttgttggtctccagttccaagcttgtggatggcaaaaggctgctcttccccgacgacttggactttgtggacaacgacaccattctgttcagcgacgcgtccactcgctttggcatttccgattttctgctcgcttttatggaacacgcggaggatggccggtgaaactttccgatttttttaaagacttgtaataatgttcttttgaccccaaatttcagactaattgaatataaaatttcgaccggacaattgcgcgttgtcgctgatggcttaagttttgcgaacggagttcaaattcacccggacagacaggtgaaactgaggaaaagcccctaattggcgaaaatgaatttaattattcagtcggtccttttctgtgaaagtgccaactcgcgaatccaacggtcacttttttaccattttgaatttgattttgtgcttttcagcttttattatgcgggcccaaaaaagggacgtcaagagattttcgtagacaatttgccgggctttcccgacaacattcgcctttccgccgcccgtcgctccttttacgtggctttgtttggccaccgcagcaaagaccttccggacgcgttagattggcttgggccacggccgtgggcccgtaaatttttgggagag

SEQ ID NO: 61752 - DNA, 807 bp, Heterodera glycines
tcgtcttccgctcgtccgtccctcgtcccgtccctttccgccgatgtccccaactttttcctccgatcggtcagttggatttgctcaatcggcggctttttgttcggatattcggcttctgtcatcaacggatcggtgttttattattgcatttattttctgattttgatgtatttttccttttagcttatgtttatggaaagagaattgggcctcaattcgttcaccaagggggtggtgacaagttcgatcattgtcggcgctgccattggcgcgccgatcggcggacatttggccgatcactttggccgaaaaagggtgatgatcagtcttgacttgctgttcattgctggggtttttgccaccacgtttgcgcctaagttttgggtattttggtgttagaaacttttgtaatggtcttttcatctttttcaagtgcctcattcctttccgtgccattcttggctttgccgccggagggcattgttcggtgggccccgtttttctggctgaaatttccacgcccgaaaatcgttcacaaaatgtgactttgaattcgctgttcatcgttttgggtgaattggtcgcttttgctgtttgtgcttctctcggcaacattttcctacaatatgtgtggttctaacacaaaattaaaaagtcatttccattaaatattttatatttttaagcgatttaatttggcgatggatgaatttggtcgttgtgttgcctgccgtcattttgctgttttgtcgctgccttttggtgagggagagtcctccgttggcttgtcggagctaatcgcat

SEQ ID NO: 61753 - DNA, 757 bp, Heterodera glycines
atggcattggatcagctcggctaccccggcacttttctgctgttggctctgctcggactgtttgccttggcatttgtgtggcgttttatgccggagacgagacgaaaatcactggaagaattggagaaagaattccaacacggcgattggcaagcactgaaaaagccgggtgaaaagcggagaaatctgcgacggaaagtggagaggacattaagcaaaattgaggaggaggagaggggggaaaggtactgaattagcagggcggaggagaaacgacgatttgattaattaattggttgatcagcatctgatcaattgattaattgatcattgaaattttatttcacgatttgaccaatcattttttggtagtatctgatcactgagtaattgctcaatgaaattttttatttttggaacgatttgccaattgattatttgctactgttaatacaatttggtgccttctgttaccgtatctttggtaccgtactctctctgtctttgcgtgcctttcattctcttattttttttctttttctttttctcaacaaatgcattttacgacaaattccattttggtttctttcgtttgcccccacaaaaacaatgccttttttggaggccttcgctaactccgccgatcgctcggtattttgcggtgattaatgattaatggacagtgagtgatcagccgaagaaatcaacgaacacagcggcaaaggaaaggcattgctgtagggaataattcgtggaa

SEQ ID NO: 61754 - DNA, 541 bp, Heterodera glycines
atgggagttgagtcggattgggtgggggacttgtcacaaaacaggaccatccatgcacagtttttgtttgttttcggagttgcgactttttcattgcttatcataaatagctgtgcaatggggggacggggggaaaggtcgtgtcatcgaactcggcactgccgtaacccaaactattgtcatcaacaaattgaactttaaatagcaaaaagttggccaattttttagacaaaagctgttaacaaaccgcgttaaattataaaaattttttacagcgccgccgcaccccaccactggtctcccaaaattaattttttgaaaaagtgcgccacaaaaaaatcttggctgggcaatcaaaattgaacgaaatcccaagaaatctgccctcggcatcactctttaaacaaaaaaaaacatgggctttagacaaaaaaattcaatgttattgttgtttaggcttccgaccgaccgcagcagcacgaacagatcaaccacaacgacctcctcactttgttcatggaccaattcctcggtccgatca

SEQ ID NO: 61755 - DNA, 785 bp, Heterodera glycines
atggagccggtgctcagcgatcagtcgcgctgcattgcggcgctgactgatgcgattgacgagttgtcactcaagggaaccgagcaatcggtaaacccatccacggatggaggtccagctgagttggccaaagaagcaccgatgaacccgcagggcggaggtccagcttctgagctggctaaagggcgtaccagcccagctcgttcgaccggaagagcatggcacggaaagcaacatcgacaacccgcacgcaaagccggccgtctaaactacctgatgcgccaattggagcgcgaggtcggcggcagccaaatggtccgatccccgcatccgtactgggaaaaccgccgagggaatggttatggaggaccgcgcggtgggggacgcggaggctacaatgcgtatcgcggagaccgttctgagcgcgtcggcccgtcaaacaatggacgttgaatctgtggtgtggtttggactccggaaggggggagagatgttgaatccccttttgacaaaatcatttatttaatttaatgatcaattttcacttatttattttgtacaacttttcttctctctcttcaccgatttcctctcccatcctaaccaatcgttacactttactgtaaacccaagccaagccaatttgtgtccatcccagctcactctcgactccaccccttttctcttttgctatttaaactgaattcattccttgcattattacccctttttttctactcattttgactcattcccattttacttacctttctcacttttgctaa

SEQ ID NO: 61756 - DNA, 491 bp, Heterodera glycines
atggaatacgaaagagaggaacaacacccgtttaagaaagcgatgtgtgggaaaggaatccgcgaatgggccttttggtttatcgtcacttttttggcatgtctcactattaaagatgtggtgaatttggtaaaagattatggcaaaataaagcattgttttcaagaaaattttagatcagagaatacggagaaaacccaaaaaaatcggatatgaatggtaaggacaaaagttgccaacccagaaaactcaatttcccgaataattggctacagaaattaatggaattagtgaatcagttgctactagagtgccacgggaccgggacctggtagcggacaactgagtaccaaggtcccggttttttcccggttttcccagccaaaaattcccgggttttcaacccgaaaaggtcccggtcccgggtttgcccaaaattcccggtcccgtggcactctagttgctactctccattaaaatggtaaaaagaa

SEQ ID NO: 61757 - DNA, 129 bp, Heterodera glycines
cagcttcgcccaaaatttggcctctgttctctctgacaccaaacggtcaaaggccgaagtcgcggctttctttactcgccattgaggcgagcaattcgtgccacagaaaaccctttgctcggcaccgac

SEQ ID NO: 61758 - DNA, 758 bp, Heterodera glycines
atggagaaaaatggcaagcaatcaaaagattctgttctttgtgagaatggccaagacgtttgtcgtgcgttcttctgcgtagcgagtaattaaaaataatttttgtgccataagttttttttgaaatttgtcaaaatttaatgaaaccgatccatgcaatctggccgattgtaattaaattactaattataattatcacagaccattcccttttattcatccaatgggattgtgcgacattcagcaaaaaggacaaatgcccacaaaaagatggccccaacacggcaaatagcgtaagagtggaccatgggcttcctcagtcggatgattggcattgcgtgtgcgaatttggccaagttggggaggaaatgggcaacgaacacatttacaagatggacccgacggaaccaacgccaatggccggtgaatttttaaattcaaaaaatactttcaattatttattaataacagattcggatgttcgcgcttctgtcagtctactttttgtcctttcctttctctattgtaatttatttttattaattattataatattatttggcaaaaaattaaaaacaaataatttaggggtcattttgccattgtcaactgctctttatcgtcagttgctttctctgacctgggctgattagcaggtggccaatagtacaacgttgtgatatgagagaagagtgccaatgaacaaaggatggatgtgaagagaaataagaaaagaatttcaaatttcaattaataaa

SEQ ID NO: 61759 - DNA, 877 bp, Heterodera glycines
atggatgaaaaaagatttttaaaagtacctaaagaaaaaagacagctgagaaacaaaaaaaattatttttcgaaaacaaataatataccagacggaagttattacacagaaatttcaaatacgataaaagagaatagaaaatttggaataaaggaaaatattgtgagatttatatttaaaaatacagaaaaaaactcaaaaaagaatttcaaaaagataatcgaatatttaacaaaaaatgcaatggaaaaaatgaaaaaggatgggaaataaaaaaaatttcttacgacctttattgtgaggcgttaactgacccattaatcattccccctagggatttggtccagaacaatgaggatgtggtaatggaatcgttttaccacattcaacaaagctttagcgaaattgatttattgaatgaacaaatctcaataataataaccacatacgcaatcccgagtggctcaagtaattaaaaaaataattaaacttcagttatttattttttagggaatcaattaaattcaacaaattattttaaaataaaagaaaatggcagaattttggttgcaaatgacgataattattgtcttttttacgggataattctaagcagattttatcaaataattggagccaacgagtcattcggcatttcatacgatcagtttcggagaatttacagaaataaaaaacgacaaaaaattcatgttttgcaattaatccaagagactaaaattgattcgaatagaacaaattacggcatagatgatcttttgactgtccaagagttttacgacaaagaatttccaggaaaatttcttattgttgcattttcaaaggttaaaaaagaaaaatcttaacatttaaaaataaa

SEQ ID NO: 61760 - DNA, 746 bp, Heterodera glycines
actacatagggccttaggaaaagcattggctataataaaaccagactctaatgacttttgaatcaaaaattaattttttttcattttaaggtatcgtaaaattgttgatcactggcgcaagcgaatcaatcacagatgaagcggcaaaattggccagcaaagagccgggctttctctattacactgccggtcctaaaaaaattttaattgcaaaaaaaatttttccgcttttcataaaggtgttcatccgcatgacgcaaaagatttcgatgacggacgaacgttggatttccttcgctcccatttgaccgtaaattcgcaatgtgtcgcggtcggcgaatgcgggttggacttcaacagaaatttctcgccacgggaccaacaacttcgggttttcgagacccaggttttttttttggcgtttttaaatgcaatttcatacacacaaattccagcgttttccattcttttaaattctttatattcaaaaatcgtgaaaatgtttttccgcggggctttgacattcattttatccaattcctaactgatttcaaaacaaacatcgaaaaattatttttcctttttgttagtgctatttttgtttgcgttggcttttccaggtccaattggcatgcgatcttggcaaaccgttgtttgtccatgaaagtgaagcgcaccaagaaatggtggccattttaagtcttgagaggaaatcgttgccgcccaccgtcatccattgcttcact

SEQ ID NO: 61761 - DNA, 813 bp, Heterodera glycines
atgtttactcatggcttcattaagtactttgatcgccgagtttgggttgtcgaaatggatccatttgcatatcgaaatgcgttgtcgcgcgcaaatcaatacgctgatcgacgagtccgtcacgcatggcactcaaattttgtcagtgcattagatttttggcgaaatgttggacaacggatgccaatgtttgccgcagttattggcactgaattgttggcacaactgcaggatgagcaagtatttggcaaatttgcagttcgttttaatcttattacgtaaaaaaaaatttctttttttgaaaattgatttttgaaatccaccaaaagttaagaaaacacattaagaaattcttgttttgccgacttaaaataaacactaagataaaatccatttttgagaagaaaaaaaagtttagaaaactactaatctcgattttgtcgagatcccgatcccttccttatttcacaataaaaccgggattggcgggcgggatacggtaatcctggcgagaacttgatcccttccactgaaacattttcaggaaatcctgtaaaaaaaccaaccccaaaccccacataagccctagtctatgcttaaaaaatttatttagttaagatttcgggggattaacaaaagatttaacgataattattttttgtcaagatataattgttctataaaaattttttccctatttgaagcaaatgcttgaaaatggagcacagtttgccaccgtggaagtgctgggcactaaccaaactcaaagcatcgacgacaaaaagctcaaagccactttggtatgaatattta

SEQ ID NO: 61762 - DNA, 979 bp, Heterodera glycines
atgacgcattgctacatcattgtaattttgatcacttttgtgttctgcttctgcttccgcgatgatcaaaaagtgttggcaggtggttgtatgtcatgctcaaaagcggacgacggatctggcattaataatccaagtaatggacgaagacttgtttcaattattgacctgccaactccaactatgcatggtaaaatatacactaatttgaccaaaaattcgggagatttctatggacaacaatgaattagaaatttttaatcgaattcaactatttaatgataattctaacttattttaaatattcgtatttttcatattttcgaacctcctttttacggtttttttctcaaatgctgaaaagatatcttttgggggttttcgtgtaacgctaaaaatgctcacttgaaaaaacaacaaaatgcttaaacagatcaaattaacgacaataagccaatcaaattcgtatgaaaattactattattatttgttttgataatattttaaaatttttttggcatgcatttgttttatttacatgaaaaatattttgtctgttatgtcaggctcgtcgtcaggtagtaaatctggtcgaaaagctgcgaggaaggtggaaaaattggagccaagacttgtttcagttgggcaaggcccaaccatgcgtggtaatgctgcatttaaacaatatacttactttttgttaattttaaattgtttcataattaattcagaatatattaatgctggaaaagaagaagcaaggaaaagcagcttctcaacacctagccatgaacttcaacagtttcgagcagcagcagcagcagctggagatggacaacgacgggggaaaaagacggacagaaaaaataagtaaaaaaaattagagaaaaaatagacagatcagttaagaaaaaactaagagaaatgattagtgtattttttgatgttaaaagtgatcagaatttgttgatttaataaa

SEQ ID NO: 61763 - DNA, 310 bp, Heterodera glycines
atgcgaacggacaatttgtgccaatggctccaaattcgacggattggaagaagaagcattgccaatgtctttgattttcaatacgagataatcgcttatcgtaaattcactaaaatatgtaagtgattaatttatatagaaaaaagtatgttggcttaattatatgctattaaaatttttttgctttttaaatattcttttaaaatatttttaaattaaaaaaatcaaaatttacagatgacaatttgtagtcgtcaccgttttgtggtactgttaattgactgatcacttgttcgtaaacaataataaa

SEQ ID NO: 61764 - DNA, 422 bp, Heterodera glycines
atgggcttgtatgtgtgccgtttgttgaccgtgatcggcctgttgatgctgctcggcggtgcgatggcaattattgtcggctattgttggccacggcaacaaaacattgagggttggttggcatttgtttaaaatgggaaaaattggtacaatgtcggagtctcattcatcatccttaacctattttcaaggacatgataaagcgaacaattttcaagggcagaacagacatttttttttgttgttgccattttggggtcaaattttcaaaaataatggtacaattttttaaaggtgagctgatgaaaattgcaattgaccaggatgaggaaggtaacttctatgtgttgccggagcggcttactgaaatccttgccgacccaatgcattcctggaaaattactggtaattaaaaaaataaa

SEQ ID NO: 61765 - DNA, 1106 bp, Heterodera glycines
atgcttacgactctggaagagctcaaagccacaccatgtggcactcagcttgcgtaagtgcttgaattagtaatttgttttaagtaaaattgttaaggtctttttgtgggcagattgtaagcattttaccgtctgagaagaagttgacggctttgttggcgtgtgcttctggggagaatgttgttctcacagaatttaagagcgtgtcgtccaaattttcaaaaatttgttcccttggaattgtaagtttgctgtttctttttacagtgcttaccttactaaatacaggtcgtcaaattttacatgctgaaagctcaacgctttcaagagcgtttcgatggaaagacaatttacgttacgccactggattatgaatttgtggtgatgactttcacaagaatggaggtgattcaatgtgccattgcgactgcggattcatttgagaaattgacttcgggttgcatttattgtgagttttaattttttttattaatttataatatattacttggtttgtaaaagtgtttataaagcaataatatactcttcgtgcttttgataaacattagtgtttgttctgtgactttcgtgtgagacactaatgtgtgtcatgcttttgataaagcattagtggtttgttctgtgactttcgtgtaagtcactaatgtgtgtcatgcttttgataaagcattagtggtttgttctgtgactttcgtgtaagtcactaatgtgtgtcatgctcttgataaaacattagtggtttgttctgtgactttcgtgtgagacactaatgtgtgtcatgcttttgataaaacattagtgtttgttgtgtgactttcgtgtgacacaataatgtgcgtcatgtttttgataaaacattagtgtttgttgtgtgactttcgtgtgagacactaatgtgtgtcatgcttttgataaaacattagtgtttgttgtgtgactttcgtgtgacacaataatgtgggtcatgtttttgataaaacattagtgtttgttgtgtgactttcgtgtgacacaataatgtgggtcatgtttttgataaaacattagtggtttgttctgtgacttttgtgtgagagataaataaa

SEQ ID NO: 61766 - DNA, 753 bp, Heterodera glycines
gattctgcctcttttccctgatgatcatgctcaaaaatagcggcaaagagctgcatctcaagtacatgcccggttttgttgcctacaacaaagtaaaaaatagaaaaaataaattaaatttttattaatataaaattaattgaatttaaatagattatacagatagtgaaaatattcggtaattttatttcttcaaatgcaaaatcattttttgtaatatttttgagtcataaaattttttgggattttatccatttttagacaaatttcattttattttccagaaatttctagctttttagcgcactgccggaccaccaaattcttaacaattttcaaaatttgactcacaaaattggtcatttttgctgcacaatttgatgttggcttcgaaattttcttattttacacaaataaatttatttttttatatttttatttgaagaatgtaagcgacagcttacgcgacttcgacatctcaaaaaccgccgatgcagatgctattcgtgccaaacacattgacaatgagtacgcgttgttccaaaagaatcaaagttcgacgatggcattgcgcggcagtttggttggcgaggatgggcaagccgtctatttcagcatttggagcaagtaaagtgtactattattttatttatttattttataattatgcattaataagtttatatattaataatgtgcttgactcctttccgagaatgggagaaacgtttcttggctcgagaaaaaattaaa

SEQ ID NO: 61767 - DNA, 1288 bp, Heterodera glycines
caatttgtgtgttcagttccgttcggtgacgtgtcgaagtgccaaggagggcgaggagggcaaaatgttgccggccgaagcatgcaccggccaaatgccacctgaggagcgcgattgcaacttgggcccatgcaaaggcctccgttttcacaccaccgaatgggaattggtcagtttgtgtttattcgtatcagggattatagcctgatcaattgattatcaataatgattgtttaatttaaatccccggggattatagcctgataaattaattgattaaaaataattattgattaatttaaatccccccgacggattaaagcctgatcaattgattgatcaaagataatgatcgattaatttaaacccccgaatttttggcatagtgccaaaagtgcaacgacacggaggaaacacgagaagtgagctgtgtagacaaaaatggaagagagtatccgctggagaagtgcttggatgggaagaaggtcaccaaaattccggaggacacgaggccatgcgcaagccaagcggtcagtcacaaattttcccaattctgaccaattaaaaaataattctgatcagttcttaaaagcattttcaaacaaaagtattcaaatttgaaaatttttttgttttattgttggcattctgtttagccttgcgtttatgaatggcacacatcgcaatggtcaaagtgcagcacggaatgtggacatgggcacaaacaacgaaaggtccaaccaaccacagacatggctaattgaaaacattcgaaaatttattttgctatttcgaaataaatttactgtgaaaaagaaggtaccttgttttaaaattgtggtttggttctcgagtgctgggaatttttctatctcgggcagtgttttttgagattcccttgactataaaaatttttcaatatttttagttttttctttggggagggggtggcacaacattaagggattgggacggtgccgggatcgttactcaaaaaccatcaaaaaattacaacattttttttggaaggcagcacaaatttagggagggcggggtgcagggacactgttgtaagcgatacagtaaccttggtaaaatccattttcgaaacgattatggtaccaaacgccccccgcatttggcttccttcacaggtgttctgtgccatcaacgagctgggccaaaccaagcgtgtggatgaagcgctgtgtggccaaagcctggaggaaaagccggtggctcgggaggagtgcgtcaacgaggagaaatgcactgtaaacatgtataa

SEQ ID NO: 61768 - DNA, 765 bp, Heterodera glycines
atgcgacgacgtttggttggacacattggcatggatcaatcgtgtagaagtcggcatgaagttcgcgctggtcaatgttcggttaaacgctttggcggacaaacatttcaagcagaggaagtggtgcttcggcgagtttcatatctgtgagcggatgacggaagaatcgggcgcagaaatcatgacatcgatcgacggctccgacttcagcacgttgccactgcccaccactccgttgccggacagtgtcgtcggcttccgatcaatttccatttggtcgtcatttgctttccaaattcatttttctaactgccttctttctgcaggtacatcaatgaagaggtcgtcaattttctgcgcacaattcgccgtctcctcaccgaagacattgcgctggaattctccactttcttcacggaatatcgcagttggaaagtgatggcacaacacatttggccactgttgaaagatgggatcagcaccttgtgcctgaagaagtgtgacttggccatgctccgtaaacacgtgtcgcccaccgtgctgttcgactgtgccggcctgcaccgaatccacacgcaaatgctgcccgagtgtccgtctgctgacggtgctgtcgatgaagagaatgttgttgttgacacgacatgccgtgaattgtacacgtgggttcactcacctcgtgaagaagggcacggaccggtgtcactgaagctgaacaaatggaaggagggcaaatgggacaactttgtgaacaacttgaacaag

SEQ ID NO: 61769 - DNA, 535 bp, Heterodera glycines
cccatcgccgaattcggtccggtggcgatcagacaaccgccggaagtgattgagggtatgaccgactggtgcaaggagaccttttcgaagaacggactgattgaacggatcaaagccagcgacaaaggcgaacgcgagactgaaaaaatggtgaccgatcgaggaggggaggggacgctcaagcaaaaccaatgcattgatcgattaaggtcttggactttctgcgtgagcatacgccccccggggagtgtctgttggctggcagcagtgtgcaccaggaccaggtgttcttgcgcaagtacatgcccgagttgtgcacccatctgcacccgtatcgcatcatcgacgtgaccacagtgaaagaggtgccgaggaagaccagggattcttcacttcaaaatcaatgtgaatttctcacagttggccaagcgttggtatgagcacaccgagggatggaagaagttgccgccgaagaaagagatccatttggcactggacgacattcgcgagagcatcaacattttgaagtattgcc

SEQ ID NO: 61770 - DNA, 104 bp, Heterodera glycines
gacaaacggacccgtttttctccaatcgactttcactgcccaataaaatgcatctttttcctcttttgctagtgacattcgcagttgctggcttcctctcattg

SEQ ID NO: 61771 - DNA, 472 bp, Heterodera glycines
  unsure (1)..(472): unsure at all n locations
atgaaaactcttcgcagtcaagcgggccgccaatcaatgccaatggtggtgaattttggccgggtaaaaactcaaattttttttttcatattttaaattttaaaattatttcagactggggacgggcaaatgtttggacaagtcgggggccgccaatcgtcgatgtcaccacctgttgtgccggtgaatttngggcggcgtgccgccgtaccaggtacaacaaaaacaaataccttcgcttccatcgcttccatttcttacagccattttttttttgaaaagggcctgcaaacgcaacagcgcgaggtgatttacgatgtgccgacggatggtggtggacatgaacacgcggaagatgatgaggacgacgacagtttttgaacgatgagccgatacaacaatgagctttaattcctcataaatttttataaaatttgggaattttcatttcacatttaacaaaatttggcta

SEQ ID NO: 61772 - DNA, 360 bp, Heterodera glycines
atgtccgacagtccaacgcccgaaaccgaaataagcattgcatgggacatcctcgaaaatgataaagatgtagtaaatttttttctttaatttgaattcaaatcttatttatcatttttgcagtggtacaactggttcactccaacgaccgccaaacaagcgtgcgtcgaggcattggcattcgcgcgagaagggggactaaagcacgagaacattctgaaaataatgaagacgcttgaggagagagaaaagcgtgacaagaaatgaaatgtcgatcgatgaccgatttgttgatagtgatgtggatatatgatcatttttttttgggacatttaaaaaattggtgatgaattttgtcaa

SEQ ID NO: 61773 - DNA, 781 bp, Heterodera glycines
atggccattaatatttcggacaccaaatcgcttttcaatcaaatcctcgcccagtccgatatcaccataaccacaagcggcataactgtcagtggtccacgcctatcgaccccccgttttttaccgtttgacgattgtggacgctgccgcgtttgcaaagcaaccgaggccgaggtggacacaatggtgaccaaagagggggtcacattgtggtgcactcgtatcaacaaaccccaatttgtgccgttcgatgtcgtctacgacctgccagggcactgctttttccgcgtgaagaacaaagcgagggtgttcaatgtcccctacggagacctgccctccgggacgtgtgccaaaagcaaaccgactgaccaccaacaacaacaacaacaacaacaggacttgaagcgcaaggcaaaggtagcacttgacttggtggaggctggactaatggccgatgctatgcaggacggcgcacggtggaagaaggccaaaaccgctatcaatgtgcttggcaatctcctattggctgaatcgttggacaatacttccgctcctccgctgaaaaatgatgccgtggacatcaaaaaagaagaagaagaagcaaatgtggcggaagaacacaaagaagatgaccaacaaaaagaagacctcggagacattgacaaaactcttgacgacttctttaaaagccttaatgcttcaacctcaaatgtgcctatttaagtgaataatttaacacacatcattttctcaaaaatgttaaacacacaagcattcacca

SEQ ID NO: 61774 - DNA, 6054 bp, Heterodera glycines
  unsure (1)..(6054): unsure at all n locations
cacctccacggctcccttccccacctcgagcgaaaccaaaaccaccaccacgccatccgaccacaaagagagagcaacacaagccaaaaaagttggaattaannccaccaaaaatagagccaaaatttgaacccgattcacgaccatcgacatcaaaagtcgcgcctcggtcgaaaaaagagcctgaattcccgcttgaccctcgaccatccacatccaggcaagccggatacattcctcctccggcacccaaaattgtaccaaaacatgagccgacaaagagacccgtgccataccgtatcccgaaaagagaacccaaaattgttgaagaaacgccacagaggcaacagcaaccacttcctgctgctgtcgtcgaagaaatgcctcctgttcctccgcctaggagggggaccaaacgccgccaccccgtaaatggtgagaatgatggtgaggtgcgcataagaaaacgcgtgaggcaagcgaggagggtgcgagtacagtactcacccgagccgggtccatcaacatctgcacaaagtgatgaacaacaacaacatcgagaactgtttaccatcccgtcaaatcagctgaccatgaatcagcgggttgaacgactgtacatcaaatgcaaccgttatgcggatcgtatgggtgtccgtggcaatacaattaacaccgcaaacggcaaaccgttggcgcatagcaatttgcgaatggccatcaggtatataattgacaggagagcgggccgccctaccattaagccacctggagcggccatatttgaagagaggcttaggcaagatccaattttgtattcatggacggctcctccaaagaaaacagcacagagcacaaccaccaggacggcaccgaaaatcaagaaggaatttcgcccgaaaaagtggagttgatcaactccacgcttgacaagctgtacaacgacccatcctccccagcggcgttcgcaggtgttacagcgctgtggaaagaggcgcgaaaaaagttgaaaaatttacggaagagggatgtgcagcattatttggaggggcaccgcacctacactctgatgcgcccccgaagggtgcgctttccaagagccaaaactgttgcggctgggttcatgaccgatgttcaagtggatttggccgattttcaggcgctttcgcgccacaatcggggtcaccgatacctgcttgttgcggttgatgtgctgtccaaacgcctgtttgttgtaccgctgaaaaacaagagagccgaggagatgttggaggcattcagacaactcatcgaccaaatgccaatggtcccacatcgcatcttctccgacaaaggcaccgaattcaagaacagattgttgaaggaattctttgatgagcaggaaattgagaagcatgagccagtgcattcatcagtcaaggcgtcggttgctgagcgggccatccggaatgtgaagcagcgactgtaccggtattttgctgaaaaggagacgttgaattgggtggatgcagtacagaaaattgtggacggaattaacagcgctccaactcgtgttcacgggatgcgccccattgatgttgacttttcaaatgcgcagaaagtgtggaagcgattgtacggacaccctgcccttcaaaagcggacgccacgcttccgtaaagatgaatttgtgcgcatgagcagagagaaagggcaatttgagaagggatatttaccaaattatggagacgaaatcctggagattgatgatgtgttgaaagcggtgcgcccaattcggtacaaactgcgggatgagcacggtgagaaattcaagggcagcttttatgagcaggagctggcgcgcgtaagaaaagatgcaaacacaagctaccgcatcgagaaggtgtacagaaagaggaaaagagcggatggatccacagagatgcttgtcaaatttataggatatcccaatcgggaatggattaatgagtctcagcttgtataaaagcatgtgcatttttcatttttgttgtgataataaacaagcatgtcaaacagtttctttgtgtttttgcccagcaatgtaacggattacccggacaatcagcccaacaaatttcgtgtccgactcccaaagcctttgcattttaacggctcgtgggtgtgtggactgcacagtatcagttacccctattcgtggtccaccatcggtacattggatgagcagtggattgacattcatttcacagaccgaagcactatcgatgaggaccgacagcgggtaatccgagtgccagtgcccaaggcatcggttaacagggttgaccagctcagagactttttggcagtcacattgcggaaccgtagcggagcaaagctgttgccactcccacgtgaggtggaagaggatcgaaatcgtactaaaccccttcactctccgccaccactaaagagaaacaaaagggatgcgtcaccgataccaccaccaccaccagacgagagtgaaaaaatcgaagactctcccccattgtacgatggaaatgatgaggacctgattgaggactctcccccattgtacgatggaaatgatgaaggggttattgaggagtcaccgccccattatgaagaaacaccaaaagaaactgtgaaaacgacgccaaaagtgtcgacaccaccgcctgtctcaagccctgctaaaccaacaactgtaaaaccgtcagctcctcctccatctgtcacaacaccagcgcctcccacaattgcaaagccaccagtaaccacccctcctacaaccacaaaaccaacaacaccgatccctccaccagccgtacaaacaacaacaccggtccctccaccagtcgtacaaccaacaaacatccctaaacctgcaaagccacaagcaaccgtcactgccctgaccgtaaagcccacaacaccggtccctccaccggtcgtacaatcaacaaccacccctcaaccgacaaagacaccagtaaccgtccctcccccggtcacaacaccggtgcctccaccaccaaagacaacaactacgccaacaataagtaaggttccgagcccatctgttacaattccggcaccgccagcgcaactaaagagttcggcactgtctccgaaagcacccatttctactgttaaaccgccacctccagtttcgctttctgctaaatctaaatcgccgccatctcctccggaagaatctccaccacactatgatgaagaaaaagacataaccgtaaagccaacatcgcctgtaaaaccaacaattactgcgcctccagcacagttaaaaagtccggcagcaactcaagtcatcaaacctcctcaacagccaactaaaccgttggctccgcctccaggcgctccacctcgttttccagctgctgcggtgtcaccacccccgccgacgtcagcagctcaaattgacccgtcgcgtttgattcacacactcgatccaccaaaaatttatttcaaaactcctccggccaacgttgaccccctgacatatgtgccacattcggtgtttattttatatgaaaacaacatggaacgattcaaggtggtgttcaatgaggagatcatcagccatttatccttctcacctcagctgggctatgtgcttggctttgaaaacccgcaacatgtggtgtcaaatgaagttgccaaatacgggtatgacttgcgcggcggcatctcaagttttgcagtttactcaaaaggattaactgagaacatgataattggcaattcactgagttccttgctccgagttgtgtccattagcggtgccacccccggcgactacactgagaagatttatgactcgccaatatttgcgagagtgttgccacgggagataaacgagattgagattgagctgcgcacaatggacaagggccgcctcgtgccgttcgcctatgggacaacgatgatcgtattgatatttaagaaagtgataaatttttgatttcatcattcattttgtttttgatttaacatttttataaatggttcatattgtgtttgacccaagcattgccgggtatgatgagtacgtgcagtacggtagtggcttagaaaaggaggaattcgactacttccgcgggtccagcccctttcaacgggggtacggcattcaacgcggggcgggcgttggggatgtgtttcgtggactttggcgctttttcctgcccattcttcgtcgtgttggaactacggtaggctcagaggcactgagcactggccaacgggtgttggaacgagtcgggcacgagggggtgccgctcaaggaggcgctggtcagtgagggaaagcgtggaattgatactgtgctggagaaaggcggcctgcccaaacagtttggaagcggaagaacgggtataaaaagaaagagaacacatgtgcctggtcatcaaaccataattggacgaacagtatcaaagccagcaaggaagcgcattcgctcggacgcatttggactttattaatcaatggcatttcacaaaattgacactgactccgtgaactcaatcaccaatgctttggactttttccgcattcccccgaccaatgtgagcgtctcttcgtccaaagtgtttgagctgctgcctagcaaccctctgaccgacacaccataccacttcaaactgcactcaagccaaaactacattgatctttccaaatgctatttgctcaccgagtttcgaatccataaggaaaatgctaatggacaacttgttaacctaaccattgatgatataaacattgcaccaatccaaatgattggccaaactttcatccgtaacataaaaatgagcatcaatgggcgcgaaatatttaatgccaatgcactgatggcctacaaaacatatttttcacatgagctttcctattcaacaacggcaaaggactcccatctgaatgcatctgggtactaccgagacacgggcgactcactggaaatgggagacggatgcacagcgcgacgtgatttgtttgcgaatagtaatgtagcccaattcattgccaaaattgacaccgacctgttcaatcagccgctgtatctgatcaatttttgtgagctggacattgaaatattgcccaatgacaacgagtttgtgttaatcgcgccgaccggtggtcggtaccgtttcgaggttgtgggactgaaattatatgtgaaaaaggtgtctctgatggacgggttggcattggacattgcacgaaagttagaggtgaagcctgcccgttatgcagtgaggaagacaatgatgaagtctgtgttcatcagtccgggtcggtatgagttcacagccaatctgttcatggaccaaattccccgtcgtgttacaatggggctggtggcgaatactgactatgtcggctcaattaggcgcagcccattcaactttcaaccatttaatgtgcgcgagatttccattgttgccaatggtcgatcttacccacaagcaccctatgacttgtactacccgaacggaaagtatgttcgtccattcaatgatatgaacgaagcggtgggattcgcaaattcatctgagagcaatggcataacttttgcccaatacggcaaaacccattgcatttacgtgttcaatttgaccaacagcggggatgatcaagcggcactgtttgatttgataaagaatgggaccacagcggtgagcattaaatttaaccatccagtgcccgagggaggaataatgttggtggtgatgggcgaatgtgactctcttgtgatgttggacaaaaatcgatcgataagcaccgataccactatttaaacgcgcatcacattgtgccatttcatttgcataaaatgtattcaaaaaaattgggtatcattttgttcttgctccgcgtttctattcctgttgtttcaacattccatgaacaaccgcaaaagccaccgccagagaatacatattctgcttatttaaaaaatttgactttgtctcggcaacaacagcacccagaatattcctacactgaatatctgagaagctttaagggtgtcaaangattactacgacaacaaca

SEQ ID NO: 61775 - DNA, 432 bp, Heterodera glycines
atgctcatttgtgtgaattatgcgtcctctttttcgcacagtctcgactcggccgactctgagcttcaacctcatggaaagaagcgagcaaagcattacgacgacttgcccgagcagtcgtacgggcccgggtcagctgactactcgcaaacgccggctgaactgcttgaaattgccgaaatggaccctgacgatttgtcattcaagtcagtggaataatgggatgaaattaaccaaaatttcatgaatcaaacaattaaatcagcattttactggttcaggccaaagcagacgggacagccgcagaaaagtgccaaagggaaagcgattggattcagaaagccgggcacaagccatgcaacgaaatcattcagaaaggcaaacaaaactgaattttgaccacaatttcaatggttaagattttgctgcgga

SEQ ID NO: 61776 - DNA, 1833 bp, Heterodera glycines
atgatactgatcattgcattgcgggacgaattcaccgatctgaggcaaaaatgccttcagcgcttggaagaaagtcgaacgagcggacggtcaacctcactgcaagagcttggagaggagtgccgaaaatatcaaatcctaaaggaaagcgcgctctccctcggctcaaatccctgcagcaccagtgccatccgagccaaaccgcagcaaatcagggacaagcagaagcccaaaacgaagccgcagcaaagccacaaaggccaaaatttcctgccgaaaaattcaacggcacctaaaggaaaagtggaccaacgtgatcagccctgctattcatgtggaggcaaaagtcactggcaaaaagactgctggttcaaaaactcgacgtgtgaaaaatgcggacggaacggtcacattgcgaaagcatgcaaaagcggcacagagatccgacgtgttcgtgcagtggttactgattctgtgaaggacacgcacattcacaccgtctcaattaagccaaaatgtatggctattgaaggaagcagcaacaaatggtgggaagtgatcatccaaatcaatgggatggatcacccaatgaatgtcgacaccgctgcccaaatcacggtgatcaaaacagactcatggcaaaagcttggcaaaccaaagctaggcaaaacggccatcaccgtcaggaattgcaatgaaaaagcattcccaatcgaaggcaaattcaaatgccaagtttcgtacaaaggacgaacggcaagcctaattgcttacgtcagcgacgaaattcaccaggatttgcttggcatgccttggattgaagaattggaaatcatcccgaaggaattgatgtttccaaattcgtcacaaatcgtcaattcaatgccaacgaagccaatttcatcacaaatcagtgatgaaaagtcactcatttcggcacttcaaaccaattacgccaacacttttggacctgaacttggccattgcaccaaattcagagctcatctgatcctgaaaaaggaggcgaagccggtctactgcaaggctcggcctgttcctcatggagcattggatgaagtcaatgccgaaattgatcgtctttcaaaaattggcgcaattaaaccaatcgagttcagccagtgggcggctccgattttggcagtgaagaaaaagagcggaaaaacgcgcgtctgcatcgatttttcgaccggcctaaacgatgccatcgaactgcatcgccacccactgccaagaccagagaacatctacaacgcagtcgccggagctaaatttttctcacggcttgacctgcgtgatgcctatctacagttggaactgtcggaatcatcgaaaaatctttgcgtactgaacacgcaccgtggcctatttcagtgccagcgtttgccgtttggagtcaaatcggcgcccgcgatttttcaaggattgatggacaaaatcatagccggaattccaggcgcattcgtctatttggatgattttgtgatcgccaataaatcactgatcgatcacacctcaacaattttcgcggttttcgacaaaatcagtgaatatggccttcgaattcaattggaaaaatgcagtttcctgcaaaaggaaacgcttttcctgggccacattatctctgaaaatggcattcgacctgacccatcaagggcagaagccattgagaaaatgccggctccgaccgacaaatcaacgctccgatcattactcggcgcactcacttattacggcaaattcatcaaaccgatgcgagagctcagaggcccgctggatgaattgcttaagaaggaggccaaatgggaatggaaa

SEQ ID NO: 61777 - DNA, 776 bp, Heterodera glycines
tgccattctgtccaacaaagtgatttgggtggtgtggctgaacgcatttgccgacattgtgactgctgttttcctgatcacctatttgccaacttatgtgtccaaagttcttggctacggcgtgcgcgaaacgggcatttggagtgcggtgccggcactgttacacatccccgtcaaaattggggccggttggatggcggacacattgacgtgaatagcaaaattaaaatttaaaaaaaccattatttaataagaaatccctcaccaagggtgaaaatttgttcataattattttttcgaggcgctaagcattcgttttcgaagccgagcagaggaggataggagaaattttacttaaaaaccgcattttaactaagtttttccggcttattttgtgacaaaaattttcctgacaaatcggtcaaaaaaatttcaatagggcgcctttctgcgccgacggggctccttcaaatttttgaaaaaaactagctaaaaacatgcacaaaaatgactgtttttacagggccgggtttaatgaaaaaaaattttgtttttatcattcttaaaattccatgttctttcagttgcatgaacgagttgaaccgaatgcgcgcgttcaattcggttgcgctggtcggctctggcgttttgttcgcattgaccggctttgtgccaaaagaaatgccatttttggctgttattctgatgacattgaattttgctgtcgtctcgacaaattgtggtggtttttataagtgtgccacattgatcagtcg

SEQ ID NO: 61778 - DNA, 154 bp, Heterodera glycines
atgggcaaaactacatcagaaaccaggttttcagtcatttttagccataacttttttgaaccttaacaaaaattttcgaaattttcaggctaatagaggatacaaagtgctatcgaatgataccaacaatgttgggcaaatctatgtaaataaa

SEQ ID NO: 61779 - DNA, 559 bp, Heterodera glycines
atgcaacgcctggacttggacataaaaaatgcagaaaaacgagagcaaaggttttttcattttgctaaagtaacacaggcgtacaacttttgttgtttcgtataacctaataatttaaaaactaattctcattatgccaaaatagttttactattgcattttataaacccaaattttgattgccattttctttttcagtttgaaagaggaggcgcgcgtggcactcggacgaaaggataaaaagggggcgttgaacattatgcggaaggttgcccgagtgcgcaaggacatccaggacaaagacgtgcaataccaaagactgttggcaatgctcgagcagttggcggcctccaaacagaccaaggaaatcatcgacgtgtacaagcagggctctaacgcattccgagagaccatggctagacagggactgacaccggacaaagtcagacatttgatcgaattgttgggcaacaaaatgaaatttttgcccttttttaaatggtttcaaaattctaacggatggtgtatactattgagattttttgattgctcactgtaa

SEQ ID NO: 61780 - DNA, 1131 bp, Heterodera glycines; identical to SEQ ID NO: 31436
  unsure (1)..(1131): unsure at all n locations

SEQ ID NO: 61781 - DNA, 756 bp, Heterodera glycines
atgatgctccgcaatcgcgatttgaacgtgcagccggctgcaggtgcgggtgctccactgcccaagcgccagtcagctcatttggtaaaggtggttggtggcgccagcggccgtgcttcatctcagtcttccgccgggtcggaccgggactccaagtacgagccgaggccaaagcgtgcatgcagccagaaggacaaggaaaacagccactacaacaacaacaatcacaacaaaagcagtcataacaagtccaaaaagaacaccagcgggggcaccgtcgttccggtcacggtatgtgctccctgtccagttgtagtgtcaaaatgtgtcaatcaagcggattttcagccaaaatggattcacgccgccggggaagatttttggcctttttaatgaatcagttaagaaaattttcaaaatttgcccctcccccccccccccccctcgctgcgaatccgctccccctgcctcttacattacaccggccccccttcgctgcgagccccctttgcgagcgaggggaggtccgacccccttaaaaaatgcttaaattgtggggattaaccattccttttcaaggctttttcacggtcgctgctcatcgattcggccaagaaggacgtgaccgttgtgtcaacggctgtcgatgccggcggcggtggggtgcttgccgcaccgattgttggccgtaagagatcgtctgcgttgctttccacgcgtgattcaaatgttggcgaacacatgtcttcaacgcag

SEQ ID NO: 61782 - DNA, 589 bp, Heterodera glycines
atgaagaacagaataacggcaacacttcactgctgtactcaattggcgctgacgccacaatggtgggtgtggtcctcacgaccgtcaacgaagaaaattgtgccgttggttgatcccgagtctcaaactcgtgaacttccggtgggtaaaatggcggatataaaaatttttttaaaattgtgatacattaattttggcacatttcttgtttaggtgtaccattgaaaacccaaagtgggggatgggactctttggatgctcaaaaaaattacaaatcaaatgcccccccccccatagtttttcaccttattgacatacaatttcgactaaaatattgaaattattagaatcggagaccgacgaatatgtctcaaaaattaaaattgtaccattacaagtttttttttgttggtaatactgccgttgataccacgctgtatttatgattttcagagtgtttccgtgtatttaaaccatttaggcgaaaaattgaggtatcgactttttgttcgaattcgtgtctgagaatcggaaatggtcaaaatgaatgtcatattcgtgatcagcaaagccgaaaaccttgaataaa

SEQ ID NO: 61783 - DNA, 1149 bp, Heterodera glycines
  unsure (1)..(1149): unsure at all n locations
gatcaattatcggctctgtctcgagtccgggaatttcgacttaatttaagccactaatcccgattatcnccgcaactccgtttcagctaagtgcggacagtgctcattgttcccaagcgttgtgctaccatttggcgtaccggtctattgacggagtgtgcaacaatttggcacgaccgacgctcggcgcttctttccgggcatatatgaggtagattttgaaagctttggcaccaattgttgatcactctcgtcagtttggagagctaatattaaggactacgagccaaggatgtcggaataggaaaaactgatattccgatgatttaaactatttcggatcggcaatttgtttgttaaagcgttaaacaaatattattcaagcattgtcaaaaaaatactcatttgattagatatttgccagccgaatattcggacggattctcagagccggctggtaataaatgccattgtacagtccatctcccaaatttgacctgtcaggttcgggccgaagaccaacggcacgcgaggcttctcgtcttgtgctggccaaaggtgctccatcgatccatgatcagatcaactccatgtttatgcagttgggacagttcatggcacaagaaatggcaaaaacggcatgtatttcaaccagtttaaattgccaccttttacgcggcatttgtccgatcggttgcttcaattaaaaccaatccctggccgatcaaaatcattctaggacatctgctgtcagtccagttagcgcatccatttggctttattttttaatttattttttaataattcttaattagccagccaatttaggctcatcaacccgttgacccatgcttatcttgtgccccgttggtcggcaaatgtatgccagtgccaatttcggagcaggacaacaacccaatgttttcaatatcatattactgatcaagaaatgcagacaaattactttgttagattgatcgcaaaaaataaattgttaaaagatttcgccagaagggatgtctgaaggtgtccaggtcggcctccgtttgcggtacgggcgatcagggaaagccgcgcgaacaactcaacgagaacactgcctttgtggatggatcaacaatttacgggtcaaatgccaaggatttgtac

SEQ ID NO: 61784 - DNA, 146 bp, Heterodera glycines
atgggaaaaggaagggcattcgggcaacggctggtccaaaaggggccacacaatggcaaaggaaagggagggcactcgagcaggcgcggacagggagggcactcgcacagacagagagcagcgaaggccgggtgcagtgaaaggcg

SEQ ID NO: 61785 - DNA, 217 bp, Heterodera glycines
ccaagtttgaggtcgacacaataaacatactcttattaaaattgtgcccaacttggtctatttgcctggacgaaaaccggcacgactcatcgctctccgatcggtcccgaccccctacgttcccccgaccggctactctgcgcgcctcgcccatttcatccccttcccgtccccttcaccccgcagagttcgacgcaaatttcttgtcgccacgaca

SEQ ID NO: 61786 - DNA, 82 bp, Heterodera glycines
atggaggaacacgagttggagcagtacgaccggatcatcaacggacggcacaccgaatgggaattgttccattatttctccg

SEQ ID NO: 61787 - DNA, 409 bp, Heterodera glycines
atgacggagcccacgggatggtcaatttttgtgttgtataccgaccatttctcgtgttcggctcgcaatcggtggacattcttttgttcatcagggtaattaattaactaattaattgagcattagttttgtgattgttggcactttttcactcgaccagggccttttggaatggcatttcaatgcaaaaacaatgtacgaatatttggagaatggcaagcaaattgagaccaattcgttcttgttgaccactcatttgtcacttcgaatgattactattcaattgctgacagtgggagaacattttggatacaaattttaatgtaaagtgtaaggaacttacgaaactcataattgttgactgttaaatttacctaatatgaatatctccggtttttttgctaataaa

SEQ ID NO: 61788 - DNA, 505 bp, Heterodera glycines
caaaagttttttacaaccacatattgccaatctaatttcttgcagatttaaacccatccattgcctgccggttctcggcacagcaaagcactaatacggtgtttgactcacttcaaaaaataattcattacccaaaagttttttacaaccacttattgccaatctaatttcttgcagatttaaagctatccattgcctgccggttctcggcacagcaaagcactaatacggtgtttgactcacttcaaaaaataattcattacccaaaagttttttacaaccacatattgccaatctaatttcttgcagattgaaagccatccattgcctgccggttctcggcacagcaaagcactaatagggtgtttgactcacttcaaaaaataattcattacccaaaagttttttacaaccacttattgccaatctaatttcttgcagatttaaagctatccattgcctgccggttctcggcacagcaaagcactaatacggtgtttgactc

SEQ ID NO: 61789 - DNA, 566 bp, Heterodera glycines
tttttggttgctatttatagaaggggtatataaaggagtgaaaggaccatttgattggtacattgtatcaaaaaatgcaaaaaccgataatcgtaaatataattgctctcgctaatctcggtaccggaattaaactaaactctctgatgatcaccgaatgcgaatttaagtataaccctagaaaattcaatgccgcggttatcaaatgtacaactcccatcaaagccaccgcattattatgggaatccgggaaaatgatatgtttggggacgaaaagtctgatagactgtgaaaatgcgataaaaattttcatagaaataataagggctcggggtgtccgggggcttcttacaccggacacacggttgaaaatattgtttcgacctttaaattcggacatgaaattgaactgaacgagtttcgaaaaaatcgtcgtgcattttatgaacccgaaatattttgcggtttaaatttcaagcggggtaaaagcatgacagcgttaattttctggaccggtaaagtcgtaattacgggaactaaaaacaattctgaaattgacgaaatgt

SEQ ID NO: 61790 - DNA, 333 bp, Heterodera glycines
gtaccggcaagtcccggtccaggcttctcaggtcccggcaagtcccggtccaggcttctcaggtcccggcaagtcccggtcccggcttctcaggtcccggcaagtcccggtccaggcttctcaggtcccggcaagtcccggtcccggcttctcaggtcccggcaagtcccggtccaggcttctcaggtcccggcaagtcccggtcccggcttctcaggtcccggcaagtcccggtcccggcttctcaggtcccggcaagtcccggtcccggcttctcaggtcccggcaagtcccggtccaggcttctcaggtcccggcaagtcccggtcccgg

SEQ ID NO: 61791 - DNA, 333 bp, Heterodera glycines
atgcaattcgttagcttatccgcaagcagtttcgcattagcaatgcaattgtgcatcggattggaccgattagccggtgttgcatttccaatttggtaacatttaaaataattaaactttgatgggaggattatcggagttaattaaaaagttgaaaggattgaaagaatgactattttcaggtacaaaattgatggcaaatacacagttttcaaaattttgattggcatttgtgtgatcaaagtgatcgttgacaaatgcatccagttttacgggagctccaaacattgggaaacgtttgttaattggaatatttcattttcaattgtttga

SEQ ID NO: 61792 - DNA, 842 bp, Heterodera glycines
atggtcagttcgaatacggttgatggtacggtccattttggtgaaaggtgcgcggaaatggacaatgtccatggtccggcttttccgccgcaatccaatttttgtattcattaccgttcagatcaagtaagtgcacggggacagcaaagtttggcaccttaatgagccatcattttgctaagtaataattaatcagttcattaatttttttgccttgtgcccttttgtcggtacggtatttgatctcgacgtacggtggtgtgcatgggtgtgagcagatgagcgaattgttcaagcttttgaattgaattcgcacttttgtgctagacataggctaaaatccttttcgcttattttatattgttaattcttatcattttaattatcatttttaataaataaaaatttgccgcaattcgccaatggcaacggcattctttgccggcagaagtgcacccgatcaccggtttcaacactttggcggtctgatcagattttaattccctcgactcatcgcccaaaatctcgcagttctcatctaataaatgggaggaacatttttgggatattttatctgccacttaatcgatttaataaaaccatttttctaacaattcaattcttcaattttgtaaaatttaatataattttaaattttttactcactctcttcgagttctttacagtattcgccaccgtatccgtccggacaatggcattttgtgcaatcattcggattcaaatagcccccgttttggcacttgtcctcatggtctttgcatgagtctgaacaaaaggaaaatttacttaattatatttaattgatttgcctttgcaataaa

SEQ ID NO: 61793 - DNA, 1675 bp, Heterodera glycines
actcatgcaaagaccatgaggacaagtgccaaaacgggggctatttgaatccgaatgattgcacaaaatgccattgtccggacggatacggtggcgaatactgtaaagaactcgaagagagtgagtaaaaaatttaaaattatattaaattttacaaaattgaagaattgaattgttagaaaaatggttttattaaatcgattaagtggcagataaaatatcccaaaaatgttcctcccatttattagatgagaactgcgagattttgggcgatgagtcgagggaattaaaatctgatcagaccgccaaagtgttgaaaccggtgatcgggtgcacttctgccggcaaagaatgccgttgccattggcgaattgcggcaaatttttatttattaaaaatgataattaaaatgataagaattaacaatataaaataagcgaaaaggattttagcctatgtctagcacaaaagtgcgaattcaattcaaaagcttgaacaattcgctcatctgctcacacccatgcacaccaccgtacgtcgagatcaaataccgtaccgacaaaagggcacaaggcaaaaaaattaatgaactgattaattattacttagcaaaatgatggctcattaaggtgccaaactttgctgtccccgtgcacttacttgatctgaacggtaatgaatacaaaaattggattgcggcggaaaagccggaccatggacattgtccatttccgcgcacctttcaccaaaatggaccgtaccatcaaccgtattcgaactgaccatttgaatcgaggcgaggaaaattgtaaaataattttatttgttttttaaattaaaaaaattttaaatttgtattttaaaatgctttacatatctaatggaaaattgttctaaaaatctgttaaggcaacgtcaaactcataaattcgagcaaatgcgtgaaaatcgaaaatttgtatgccgagaaaaggagaaaaggaaccccgagcaccggcactttgcgttgttataacccgacgaagaatcaatattataactgctcctgtaacggtgataagaaatgcctcgctgaagaaaaatgggcacacgacgcgtttctttgtcaaataatacgggtgattaattaattaattaatttattattaatgccaaaagacactgccacagaaacatttcatataatattggcaatttaattttttttggctgtaaaaattaccactttttgtatcaaaaagcggaaataaggacaaatgagaacataaatgaaaaaaatgccgccatgtatttattgatttgtaaattcaaggtcaatggaattcaaatccaaattgattatcggtacaattggactcgtcttgatgttgattgttatgtgagttgggtcttcctaatttctcaaaccctttttaattgactaattttacagaaggccgaaggaggtaccgtaagcttttggggctacagtaagccggagaccaaagaaatcattcgtgtggacgaagtccactgtttgacttttgaagctgctggagtaacaccaccgtcacagaaacggttcaagagtttgcaagtcgaagaacagctgtcgatgaaattgaatccaagtacattattggacaatgcttcatcacttatccatgtgttcgtgccatttgttggccatccatga

SEQ ID NO: 61794 - DNA, 1381 bp, Heterodera glycines
atgggagaaccgctaaaagtagcgcccgtagctcagttggttagagcacggcacggattgctggagtcttgggttcgagtcccaccggcggacgagttaccttttatgtttgttatacacaaaaaaatgacaaattttgatttaaatgtatataaacaattaaaaatttatttaatgcgtgtggagatgtctttttgtttaatttttccaattgtaaataagtattttattcatttaattatttattattttgttctttataaaatccgtgtcaaaatctattgaagacaaaaaagttcaatgaaaaatttacgtacaaaaaatgaatttcaaataaaataaaattaaaagaacaaaagaaaatataaatattttttaatttttgggagtgtttgaaaatttattagaaattgtaacatattcaaattattacccatgagcgaagacgaaccgaacccttcacacatttccctttttggccaatcgatgttattcatcttttcgatattcccccgttcatcatttcattcactatttctcttttctctaactctcacaaatccccgcaaatctccgccccttttccgttcaatttttcccccaccaatcagtcagtcgagtcggaggagatgatagtcggacgttggagcgatcaaaatacaaattaattatttattaattcatttaattattcacatatttcgcgcattataatccgacaataaagagccatacaaacgattggaccctttggacttcttggggatcagggcccgattcctaagattaagacctttcagtcctgggacaatccgtctcctcccatcccactctggcatggatcctcacgtcttactgttagcaccggatggttcgactttcgagtcgaaggaaagacgatccagcgaggggatgaaatccgactggctcaagctgcagaggcttagaatcacatttgaatattttacaaattaatttttatatatcattttttgaaaaaaatcgattttttagggatacattttcaaaaaaaaattttaaattttttacaaaaaatttctataaattctcaaaaatcctcaaaatatgtaaaaaaaatgaaaaatatgtacgaaaaattgcgaaatatgtacgaaaaagtccaaaatatgtaaaatatgtatttacataaaattagcatccctaattataacccggccgttaaatatatttgaaagaaaatcaaaagtcaaaacaaaaaaaatcatcagtaaaagaaatcattcattcaaaagaaaagtttaaaaaaatcagttctaaatcagtcaaaaaaaagagggagttcattcattcaaaaatcattctaacacacacaaaaaaaaccgtcataacttgaacacta

SEQ ID NO: 61795 - DNA, 231 bp, Heterodera glycines
atgtcttcgctggctgattttgtaaatgaacagcggagtaaggcgaacagttcgtccggtcgacaagcctatttcaatgtggccactctcggctcaaaagtcagcaattcgttcacagatttcttcaaaccaagaaattcgaatggtatcgacgacgtacagcgactcactgaagacgccgacgcggcacaaaacggacaattgccgtccaacaaaaacaggcacttgtaa

SEQ ID NO: 61796 - DNA, 660 bp, Heterodera glycines
aaacaaaaaaatcgattttttcaagtgtccgtttggggtactcaaacatttatggggagcaaaaatccaacgcagaattaaagtacaggctatagggaagctattcccgaaggattcggtctccccataaatctgggcgcatcggttcggggggactgccccgaaaacaaaaaaatcgattttttcaagtgtccgtttggggtactcaaacaattatggggagcaaaaatccaacgcagaattaaagtacaggctatagggaagctattccggaaggattcggtctccccataaatctgggcgcatcggttcggggggactgccccgaaaacaaaaaaatcgattttttcaagtgtccgtttggggtactcaaacaattatggggagcaaaaatccaacgcagaattaaagtacaggctatagggaagctattcccgaaggattcggtctccccataaatctgggcgcatcggttcggggggactgccccgaaaacaaaaaaatcgattttttcaagtgtccgtttggggtactcaaacaattatggggagcaaaaatccaacgcagaattaaagtacaggctatagggaagctattccggaaggattcggtctccccataaatctgggcgcatcggttcagggggactgccccgaaaac

SEQ ID NO: 61797 - DNA, 90 bp, Heterodera glycines
aaaatctataaaaaatttaaaaatgagaattcatgcgagattttctggaaataagcttaattgggcctagttaagctgtaaaaaaaattt

SEQ ID NO: 61798 - DNA, 439 bp, Heterodera glycines
aaaatctataaaaaatttaaaaatgagaattcatgcgagattttctggaaataagcttaatagggcctagttaagctgtaaaaaaaatttggggcgatttgaaagagaatagaaagaaccaggttcgatgaagttttggtaagccaaaaaaaaatccaaacatttaaaaatctataaaaaatttaaaaatgagaattcatgcgagattttctggaaataagcttaattgggcctagttaagctgtaaaaaaaatttggggcgatttgaaagagaatagaaagaaccaggttcgatgaagttttggtaagccaaaaaaaatccaaacatttaaaaatctataaaaaatttaaaaatgagaattcatgcgagattttctggaaataagcttaattgggcctagttaagctgtaaaaaaaatttggggcgatttgaaagaga

SEQ ID NO: 61799 - DNA, 667 bp, Heterodera glycines
  unsure (1)..(667): unsure at all n locations
cccncgaaaacaaaaataaatcgattttttcaagtgtccgttttggggtactcaaacaattatgggggagcaaaaatccaacgcataattaaagtacaggctatagggaagctattccggaaggattcggtctccccataaatctgggcgcatcggttcggggggactgccccgaaaacaaaaaaatcgattttttcaagtgtccgtttggggtactcaaacaattatggggagcaaaactccaacgcagaattaaagtacagactatagggaagctattcccgaaggattcggtctccccataaatctgggcgcatcggttcagggggactgccccgaaaacccaaaaaaaaattttttggataaaaattatttaaatgaactgactagataatatttaaaataggttatttctcttcctttcagtatccctgcaaagtttggtgcgcttctgatcagtttctgaaaaaaaagttaagcctaaactttttggcctgtttaaaaaggaattaaaaatttttaaaaattttattcatctccctttttgatagaaaaagcatcagagtgcctaaactaacatgtaaataaaatttggtgcgtttcagaaccctttctgaaaaaatatttaagaattaattttgcaaaaaataaataaaaacgaaagact

SEQ ID NO: 61800 - DNA, 152 bp, Heterodera glycines
atgtcgagcagttttgtgtggaagcgggtgagcggataaacattttttgaggatatgcgtcagctttatctcattttacagggaatggttgcacttcgtcgtggctccactaaaatttctgcatgcggatttcatgggcggaatttttggag

SEQ ID NO: 61801 - DNA, 304 bp, Heterodera glycines; identical to SEQ ID NO: 51570

SEQ ID NO: 61802 - DNA, 137 bp, Heterodera glycines
aaaattccctcaaaaataaaaggtctattgcgcaccgccctccctatcatgctcgagagcatttgtatgtgtataaaatttctcaaaaaaagagatagccattttttctgggatagagtataaatttaaaaattccc

SEQ ID NO: 61803 - DNA, 1228 bp, Heterodera glycines
atgcgatcggaaaatggagaacaaaatgaaggagttgctccactatcagcagctgatcagcagcaactgaaggcgcgtgaaaaacggagaagggcaattaattgttaaaataaataaaaatgaaaatcgaaattttattttatttattttaatttttttaggaatttcgtcaaaactttggcaaaatgcaaatggaattacgggaaacaatcgaaaaacttgtggctaaagttggcgaattggagaagcaacaacagcgccaaaaagtcaattaaatgggagggaggggacaaagtccacaatattctaaaaatttaatttaatttaaaattttctattttttcaatttaatatataaataaataagaatttttccattaaatatttaaaaaaaaatgttatttcatttgacagaacaacgcgggagtgttcacaaaagtgaccgttgcaatggttggaaataattttaaattataataaattttaaattcagcagcaaaattgttgggatggcaccgcttgccccagagaattggaaatcattggtgccaaacgtttgatggtccaatacaaaggaaatcgcttaaaaggtaattgtcacaaattaacaaaaaaattattaaagaaatttaataattaaaattaaaatcactttaaatacgattattttaattgaaaggaagtcgctcaatgttcacaaaacgctgcattctgagcacaaattcgtccatttcttacgtcgaagtgaaaatcatcagtatgaaaatgtaaataaatcttagaaaaataaaaatataatttaaagtttataatttataataatttttaggtgcgcaatgattggacttgcgaccaaagaaatgccattgtacggaagggttggcacttatcctaacagttacggacaccgaagcgatggccttttttgggtcaacggttcctgccaaattggcagtcaaagtgccaaatttggcatcggagatgtcatcggatgtggcattatattggccacgcgccaaatttttttcacgaaaaacggacaccgtttgggttgacaaatgactaaaacggcatttttaatgggattttttcagattccgccgattttgtggcactttttccttctgaagatgtccctcttttcacttgtgtcactttgcacgattccgaggacaaaattgaggcgaattttgggccggaattcaactttaatcttaacactctctga

SEQ ID NO: 61804 - DNA, 726 bp, Heterodera glycines
atgaatttaaaactactgccgaaatcaatcactgtcgaaaacgcctggtaaggcaaaatctctgacaattgctaatttaattcaaaattcaacaggttggcgtactgttttcgcagaacacccaattcccagcgaagatcattcttcaggcattttttactttgaaattggagttgaacacatggaattgttagaaaattacttcactaaatatgcataatggttttttttattactttttgcagtgacggcggtgtactgatcggattggccgctaaacagaaaccgtttctgtcggttttaagccgcattggcacttacgcttacccaaacaatggcactttttacattaacggttcctcgctctatgggtcttctaatcagttttatcgtgaagacattgtcggctgtggcgttaatttggccaaccgacaaatcattttcacgaaaaacggacgtcttttgggttggaaaaaaaaattaaattaaaattttaatttatgcttttcagatgtctccaattcgttggtcgcttctttcgctgttccgttgttttccttcgtttctttgtgtggctttggtgacaaaatcgtggcaaattttgggcccaaatttcttctcccagacatttaaaaagagaacagaaaaacatggaagcgagttgcataaattaagaagaccacttttgttgttgttttttttattttccatttttgaaaaaataaa

SEQ ID NO: 61805 - DNA, 477 bp, Heterodera glycines
atggaaatgcaaatgaaaaaagaacagcagaaaatggtaaattaatgacaaaaaatgataaatgaatgggctgggaaattaaaatttgaaataaataattaatttaaatatttttaattaaaataaattaattattttaagctttttctaaaactccaacaaaattattgggatgtcaagttttgccaaaatgagctcgaaatcactggcgacgacggtcttacagtggtcaataagcaaaaacattcaacaggtaaatggaaggaaaacaaaaatccttggtacgcccttatgtctttggcgccgccgcaggacaaaccaattaaattgaaattcaaaaatgcataaaaattaacttttttgggggagtagcaaaatcggtgctgttagttttcgacagcggtgattcgacagtaaacttttgcttttaaaaaacttgtcctatatggtacgtctagtaaaattttgaaaattaaa

SEQ ID NO: 61806 - DNA, 1356 bp, Heterodera glycines
atgtcaatttcgaatgattcgacaaatgacggctttataccagcagaagcagctgatcagcagtttcaaggttcagaagagattaattattatgacaagatttttttcttaatatgaaaataaattactaaggaattataggtaaatgccgatctttgcgagtaaaacgccaaaataaacaacaaacgcaattcatttttgtaactatttggcacttttgtaaagcttagggtttttttgcgaaatttcttaaaaaggccaaaagaaaactttacagaaaatttaataaaaattcttttaaaatgaagaaaaaaatacattaaataaattaaagattagagaatacataataaataatgtgaattcttttctcaagtgattggcgatgcgttcagtttggatgactttggatataaagatgaaaatgctgaacaagttggagatgagcagctgaggaaggaggccaaaagcaaacagcaggacgatgatgaagatggcattttggtaaaaaaaaatgaaaataaaatttaaataaattcaattgaattcagttttgggagaagttagagaaactggaaatggaattgaaggtggccaaacaaatgtgcgcgttcaccaaaatggaacttgaagaggcatggggatttccagcaaaacataaaaaaccttaaatatttttatttaaaataaaaaatggattttcttaaattttaatttgacagaaatcgcttcaaacagaattaaaacagcaaaggctgatggcagaaaacattgagttgaaggacaaaattgacagattggagaaggaaaaggaaaagcttcaaatggaaaaatacagttaaaatataaatttgactattttttaattattcattaattaagctaacctcaagctgtgtggagaattttcggggcacatcattgaatgttttactcataacagttgtcagatgagttagcagggttcccagatctgaggctttagcctcattttgtggttttttgataggtcaatgaggctaaattttcaatttgaggctttttgtggttttttaagaaattttgaagatttttggggaaaattcgtcagattttttaaattttgattaattttgataaattggcataatgtttttggccatatttgtcgacaaatctgttaacaaatcgtattaaaaatcacaaaatttttcccggcggcgcctatcggcaccgccggcccaccttgttccccaaaagttttttgaaaaaagcgccgcaaaaaaatcaacttcggtttttcatgcttagaatttcacaaaatgtttatttcgaacaaaaaattgctcaaattgatcatggacaatcaaaaataaa

SEQ ID NO: 61807 - DNA, 807 bp, Heterodera glycines
atggacgacggaggaaaaggaggaggatggcatggacagcgcaaaaatgaccaaaaattggggggaaataaaacggcggtggtttttgtgtcggaccctgacaaattccgactccaccgacagttcgtgccgattttgaacgaagccaaagaaaggaaaaagaggaagcgaaatggtagcaaatgggagaaaggtgcggcacttcgccccgggggatggaaaaatgccaaacggtggccaaaacgaagccgaaaatgaataacaagtgccaaaaacatggtctacaaaacacaaaattaaaaaaaaaaaaattaactaaaaatattaaaaaattaaaatttagttcaactaatattttataggatttcaaatctattgaccaaataaaaatgaaaactaaacaaagttcctaatgaaccttgagcatttcggactattttagactttatccaaaatcttccaggccattggctgaccgttcgtgtgaatgcgtccgcgcgctttcagtcactgctcggtttcggtggcgcgttcaccgactcggccacgttcaacatggacgcgttgagcgggccaacccgctccacccttctgaaggcttactttgacagaaacattggtcattttataatgatgattgaacactcttttgtgattactcccatttttgaaggcattcggtactcagtcggccgtgtgccaatgggtgcgactgatttctctgtgcgccaatattcgtactgcgacacgcccggcgatttgaatctgaccacatttgcactggccaaggaagacttagaatggaag

SEQ ID NO: 61808 - DNA, 672 bp, Heterodera glycines
atgcagaagatcaaagtgaaggtggagaaggacaagcagcagatccaacgcgagttggaggacgccacgcaaacggccgactcggaactgcgagcacggcaggaagcggagaaagtgatcaagaacatcgagctgcagctcagcgaactgcagagcaagacggacgagcagtcgcgactgctcaacgactttgccgcgctgaagagccgcttgcacaacgaaaacgcggacttggaacatcaagtggaggacctggagaaccaggtgagacggatggacgagcagggattgggacaatgctatcaccatggacatttgatcacaggtgaattcgctgcatcgcctgaagagtcagttggtcagccaattggaggaggcgaaacgaaccgccgacgaggaaagccgcgagcggcaaaccctcgcgggacagctgaagaacgtgcagcacgagaacgactcattgcgcgaacagctcgacgacgagcaggagggcaaagcggaatgcctgcgtcaaatcagcaaactgaacgcggagatccaacagtggaaggcgcggttcgagtcggaaggattggtcaagatggaggagatcgaggaggccaagcgcaacttgcagaagaaagtgcaggagctaacggacgccaacgaagcggccaacacaaaggtgattag

SEQ ID NO: 61809 - DNA, 91 bp, Heterodera glycines
atgtttattcgaaatattatttttattgaccatctaatgtcgagattattaaaaattattacaatagatggaaattttacaagttaccgag

SEQ ID NO: 61810 - DNA, 290 bp, Heterodera glycines
atgaaacgaagcaacacgacaaaagacactcctcctcaaccaaaacgctcaatggcatttgcaccggactcgggtccaaacactgcggcactcgctgagcaagaacgccaacgcacattggtgctcattggcctcccggaaagcaatgctgttcgcccatcgcagcgtgttaaagaagacagggaagccgtgactaaaatcttggaccatcttgatgttgaggctgaaccaaccgccgtctttcgactcggccggttcaacccgcagcgaacacacctcgcccgctcaag

SEQ ID NO: 61811 - DNA, 76 bp, Heterodera glycines; identical to SEQ ID NO: 51235

SEQ ID NO: 61812 - DNA, 1070 bp, Heterodera glycines
  unsure (1)..(1070): unsure at all n locations
atgtggggcgcagcacaggcggcgactgctgccgctggaggtggcacaccagtgagaaatttcataattatatattttcactactttttatccaccggtttggtaccgttgtcttttatttccatttatattcattctntacaatcataattaatttaagaataaatttntaaattttatttctaaataatatttttaaatattttttcaattatttcaaattaatcatttttaattaattttttaaattttgttgtttttaaatatagtaatataattatgatatttattacactttttcagtaaaattttatatatttttgtaaaatattttcatatacctaaacactagagatcgacctggacctggatccagttccaggtccaggccatttttcggcaacctggatttttcctggacctggatttttgtccaggaaatccaggtccaggtctattgtgaaaaaaaatccaggtccaagcaaaacacgaaaaaccctggattttcctggacaaaattttagaatttgttattttaagtgaccgatgttttttcaagttttcaaaaaatgattaaataacttagaaacacattattattattaattagatatttttagaggtttataagcaattaattgattttttcaaacattttttgatttttaaaatgagtttcaaaaaatccaggtccaggcctggatccaggtcccgaggagtctggatttttcctgggctggatttttgtccaggaaatccaggtccaggtccaacatggaatccaggtccaggcttttttcaaaatgtcgatctctactaaacactatttttaaaataaaaaaagtatttctaaatttgaattttatttaaaaattattgattgtctttttagtcatcgattgctaacagttcaccgtttgtcaccatgtccggaaatgctgctgctgctgatagagtgacaaaatgctagaagagaagcgccagagaaggaaagaaatttttgtgatttttgatcgatagaagaaacaatttttgatcagacttttcttatccaatcaatgatctaatca

SEQ ID NO: 61813 - DNA, 930 bp, Heterodera glycines
gtagagaaaattttatcgaaaatttattttaatttaaaatctccggcaagttttgctggaattcaaaaaattttaaatgaggccaaaaagattgacccgaaaattacgaccgatgacgttaataaattcctagaaaggcagaaaacatacacgattcacaagcccatcaggaaaagattcccgagactaaagacgataccaagtggcttccataccgattggcagtgcgatttgtgcatatttgaccagttgaaaaagcataacgacggttataaatatttattggtctgcatcgacgtgctgagtcgaatgatcttcagtgcaccggccaagtcaaagaagagtgaggacatgattgaggcttttgatcgggtgttcgaaaagtctaaaattatcccgatgaaaatatatagtgacagtgggcttgaattccaagcaagaaaaatgaaaaaatattttgaggaaaaattcatcatcaaaaatgtaatgtatagtcctgatctgcacgccggagtcgttgaaagggcaaatcggacaataaaggagcgcttgtacagatattttacaaagaaagacactcttcgatgggtcgacgtaatagacaaaataataacaaacattaacaacagtgtgaatagaacactgggagccaaaccgtcttcaattaattttgaaaatgcccgtgcgctctgggaaaaattatataaggagaaggaatttaaaatttcgaaaaagaaaaaatttaaaatcggtgatatcgttcgtattaccaaggaaaagggaaaattttcaaaggggtacctcccaaactttaccgaagaattgtttaaaatcgttgttgccaattcgacgacacccgattcatacaggatcgaagatttggaaggaaatttaataaaaggcatattttataaccaggaattagtgaaa

SEQ ID NO: 61814 - DNA, 952 bp, Heterodera glycines
atgaaacgctgtgcaacaaaacctcagttggccaatgttcttcagacgctgatttatgctatgcaatcaaatgcgatgacagttaatctgccaaataataatttgtttcattcagaattcggtcaaaatccctttttttgtctaaaggtaatcagccaaacaaatttgtccaagagtggggctgtacttcgagcttttcaaatgtttccaagttttgcatggataaagctgctcaacttggtttcggatctgaccagcgtttgtgcaaatgtcatttaaaaccaccaaacaaatcgcacaaaatcagtgcttctggtaatgcataggatttttagtggttaaaaatagtttttcttaagtaattttagggatgtaattttttaaatagctgttttttaatttgcaaataattttaaacttaagcaaacaattttattcactgattccagttactttttaggttttttattccattttttgggaaattttccaaaaaataccaaaatagtggagaaacgcaaaaatagtggcaaaaaactattttagtggccaacatccaaaataattttttttaatggcaaagctccaaaatagtgattcctagtgatgaatagtggcgttaaaacgaagaatttccgagctaaaattatgtttttcgtgcatttctcgtcgaaataaagccgcagaaaaaatagttaaaaaactaaaaatccccaccctagctataatataaaagcattttttaaaaatggttaatttttgtgatttagccacacatttgctgaatttaaatattttccaaaaattaacatgcatataataaaatttcagttagaataagctcaagaaaattcgggtgttcttatatattcgaaacacattttatttgaccgagaccgattgacttaacgaaaattttgaaaaacaaaactaattaaatttaatatttcga

SEQ ID NO: 61815 - DNA, 56 bp, Heterodera glycines
gctatagggaagctactcccgaaggattcggtctccccataaatctgggcacatcg

SEQ ID NO: 61816 - DNA, 594 bp, Heterodera glycines
atgttaaacaaaattaaaatagctccctataaaaatatttgttccgaacaaattcgcaatggagagaacgaagaagtcgaaaattttatggacacaatttcggaccttgttgttggtgagaacatcacaattgattcggtaagaagcaggtcaactgcctgtttttatgaagggtcaattcgatttttttggcaaatttaaaaaagaaagacgaattcttcaattttgaaaattttatagaaaataaagattttgggatggaaaaaatacaatttgttaatagatttttactaaaaataatttttttgtgatttttaattcaagcggtgattttaaatatttaacagagcattttttgcagagcattttctcacattgtgccgacgcgagaaaaactaattcttaaaactaaactctatttttaggcgaataccaatggagaataccaggaaggtgaaactgacaatgtctggaggccaaatcaagacgtcgttccgtacgatgaattccaaaatgctttggcattaaacatggacgggggaaacaataaccttgaggaagaaaattcggaaaggtaactccagttaaattaaa

SEQ ID NO: 61817 - DNA, 824 bp, Heterodera glycines
atggcacaatcaaatgccaacatgggcctgaagagtgtcggatcaacaaatttcatgttgctttattttattgaaactaatacattctcagaaggggtccgattttatgtaagaaaatcgtaatagcaatatattggcatgccaaaaaaagacataatttgcttgtaactttttttatttgtttttttttcaaaaatatttttgatatccgttaaaaaatttttgaagagtgcctttgttcaaaaattttttggttttcataaaaaatctcgaaaaattctataaacacaactaggtcaaggatttttagatctttctttacctgcctaaaatttaattttatccaaaatagaaaatattttgtacttgcactttttttggcacttctccagccatcccgacaaattttgtcgtgaatttcctccccgacttttctctttctgaggggcggggagaaccctaatttaaagcatgaagattctgaacaaacaaaatatttcatcaaaattggatcccgagttaaaattacacaaagagctaattaaacacttatcactgtagtcgtgtgccattcacttcatgcacgacccaatgccattcatttactgccttgaaaagctgatcagttcaggcattccgctggagaaagcatccaaaaaatgctatgtcaaattgcatccaatcccgcacatttacgaccaaattacgtgagcaaatggagctttacccattaaatcaactatttttgaaattagaaaagtatatttatagttttcatggtataattcgagaatcttaattcttctttattaacatttaatcca

SEQ ID NO: 61818 - DNA, 1009 bp, Heterodera glycines
ggcaatacttttgttaatcaatgttttatatcagatatagactttaacatcatcgagacacaaaaacttttgaaaaaacttccgaataaaaacgggacctccccggataatattagctataaaatattgaaaaactgccattcttcattagcaactgttattactgacctattcaggatttcattagactctggttctcttccagatatctggaaggaatcaatagtttttcctcttttcaaaaaaggggacaaatttaatcctgaaaattataggcctatttctataacctgctcactttgcagggttatggaaagaattcttagccaaaatatttacaactttctcctaaaaaacaataaaatttcggaataccaatttggttttgttagaaataggtctacgacaagtcaactaataacagttgtggaagattggtacgaggcaattataaatggaaaaaatgttgactgtatttatattgattttcaaaagcatttgactcagtgccccatgaattacttttatacaaattggaaaaaataggtataaagggcaaacttttaatgtggataaagggctttttgagtaataggacttttcgagttaaaattggggattctttatcctcaagtaaaaaagttacctctggcgtcccccagggctctgtcctgggccctttattatttttgatttatattaacgatcttcctgatgctttgccatcaggagtgaaaataaaattatatgctgatgatgttaaattatatatttgttataaagcaagaaccgacacagaaattatgcataaagcattgcataatttattcgaatgggcaaataaatggcaaataaaagtttcaatgcaaaaaacttttgtattatatttgggttcaaaaaacccaaaagaaacatatgaatttgatggaaatacaataaatgctgtggatacaattagggatttaggagtaaacattgataacaaattacaattttccgatcatattaa

SEQ ID NO: 61819 - DNA, 696 bp, Heterodera glycines
  unsure (1)..(696): unsure at all n locations
atgacagaggagattttcaatgatgaagttaattttgtaaaagcaattcaaagtgttgtgtcggcagatgacaatttcatttgcgaaaagccttcgttttgcattgcgccgctgcttaattcggcactgttcgaaatacttttcgcattggcaattcgtctgggtttgctaattggacagaatggttttgttgaaaaatatttgccgacctttttaatcccattatacgagtaaggcattgaattacgcatttcttaaacgacgcccaattttgacattttctactattttttgctttttaaaattcaattactaaaacaatggaaaaaagcttcataaataccctaacaacataaaatttactcaaaaattcaacctcaaaataaaatctttctcaaatatacaattttttctaattacttcactttcaattttaattncttcttctcatattaattaacaattttntctcccattaaaaataaatttcatttcttaaattaattaaatttcaatttcaattaataaaattctaatttttttcacaaatccaactcccaaaatatttaataacctaattattattatcataaatattntccacataaccatacaaaattcanatttcccttacactntntttttcnaaaatcaaactcaattaattnacaanaaatcanacaataattcaataaa

SEQ ID NO: 61820 - DNA, 218 bp, Heterodera glycines
tgctcacaaaggaaggtctggaggtgtccgtggagtttcggaatgaaatttggtgggtgcatagaacacccatgggttcttaagaaaagtggttttattttctgcgaaatgagtacgagtgccgagatatgacgtgccaaacttttttctatcccaataaatcgaataaacatttgcaccgttttgtgttgttcggtggtgcggaggttgtgcgtttg

SEQ ID NO: 61821 - DNA, 1342 bp, Heterodera glycines
atcacaaaatttatctccaaaacccattttatcaatcttgaaaaaattaaaatggaatcccaacaatttgtggaacttacgaggcaatttgttgaaactaaaatgtttcaattcgagacgttttaaatgcagaccaaagtggtttcgagctcgaattgcaccagaaaagatcactggcaccaattggaacaaaattggttgaatgtgtagtccaatcggtagctagcactacccacagttatacaattatgccaattatcactgcaaatggtttattgttgtcaccattgtttattgtaatagcagagcggaatggaaaatttccccaaaaaggcatttttcaggttaaaaatatatttttagaaaataatagtaaaaatatttgatttatcaaaattaatattaaggctaaaaatgtttatgcggtacccaatacttcccatattatgacaaaaaatttaatggtcgaatgggtcaacaccgtcttatgtccagtgttgcgacctggagaaagatcggtgttgttggtcgatagttggaacggttggaatgaatttcggctcccacaaaatgtccaactacaagtcaaacaaatcccaaaacacgggactggattttcccaaccattggacgtttatgtttttcggtactaaagtcggggtagtaaaaaatccatcaaatatttttagaatttggaagcaattcacaagaagaataacggaatttgttatggtttacgacattaaccaaacgcacaacctccgcaccaccgaacaacacaaaacggtgcaaatgtttattcgatttattgggatagaaaaaagtttggcacgtcatatctcggcactcgtactcatttcgcagaaaataaaaccacttttcttaagaacccatgggtgttctatgcacccaccaaatttcattccgaaactccacggacacctccagaccttcctttgtgagcatttattggcaaataaaaagtgaaaatccaaaaatgagtgataataaaattgcaaaaatattgaaaattcatctaaagagcattttcaattggaagaaacaatttggagaagaaatactttgaaccattcttaattccaccaaaaagtaataaaatttaaaaataaatatattttaattgtataaattcgagtacatttaaattattgattactttctatagctgaaggtatttcatctctttaattttttaatttttttatgaaaagaataaaaaatatgcattaaaatcttaaaaaccctcaaatggtcatattaatgcaaaattgaaataaacatttataaaaaaaaaaattaaaatttgataaaaaaaatttaa

SEQ ID NO: 61822 - DNA, 315 bp, Heterodera glycines
atgatgattacggtggagaaagttgttggtgccggcggtagcggcactattgttggcgctgccagtgtagatggttcaccagcacgacgggtggataaacaggagctgaacagggcgtacaaaatgatgctgcaccaacgacgggacgccgtctcaggacagtctggcaatgaggcaatgctgcgcagcacatcgccagcaacaaaaggcggcacaaacagttcgatggggttgacattggcatcggaggatgagcaaaagcagcacaaagaagtgggtgaattgatgactggtcctaatggtgaaccaaattaa

SEQ ID NO: 61823 - DNA, 1576 bp, Heterodera glycines
atgccactattatttgtcccagcatgccaacgcgacttccgcaacaagcagtacccggtgcacatcaaggtggaatacttccgcaacacgctcactgtgcacgtgtccgacgggatgagcgcgacgccgcgctttgaaatgtgcatccgcgcggagcacatttttctgcccaaggcgggcttcttcggcgtgtccgccgccaccggagggctggcgggtgagagagagtggatttaggaaaaacaaaatcctttagaatttcaaaaaaaaaaaaaaaatttaaacgcagcgccgaacccccaaatactacccttagacattataaaaccattaataacgtcgatttttataaaacaaaaagtgcaaaaaatatgaaataaaaataaataaataatgtttcttaattaaaaaaatatatagtttatgctaattttacaaaaatctttgtccaaattaatttttttttaattatattaaaacaaaattcgttaaatttcaaaaaaaattactggcagcgcccgctgaacccccaaattcccttcgatattactcggtcgaaacaaaaaattgttatgttttttatcttgaaaatggcttttcaaatttttttctttatcgctgttattttgagcatcatatacaaggggtgtctcgagacacccccccccccctctcgtcgtaagaggcctcggaccagggctggccgtgatcacggaaatcacggggtttttggggtgccgtgatctcagatcacgggtcacggattttttcaatttttccgtgattttgatccgtgattggcattttatatagggaatttttattgagacgaaaataggaaagtggtgtgtgaaaagaaattttttgagaaaaaaataaataaattatttctgtttagggagtaaacatatatatatatatatatatatgtagtctggtggttaagccttctgtctttcgctgtctgtcccttgggttcaattccccattgggataggataatttttatattttgttttgataatttaattgaaattttattaacaagaaatttcctaatattgaaaattatttttctttatttttaaaacgtccatagaccaataaattaaccaatgattggacatattttggacaaaatctcttaacaaattcactcaaaatttcaaaatttttcccggcggcgcctgtcggcaccaccggcaggcggacccccattttaccgtatttttgaaattttgaccccaaaatggcaaaaaaaatagcccatttttggcacaaaaacggctaaaaatccctattttttctctccgtcgcataaatttaaaatgacaggcctaatcaaaattttcacaaaattttcccaaccccctaatattttttctaaaattttcccgactttcagtatcttttggggtgttcagatcgccatgaaggagtaatctgatcatgttggtccaaaagatttttttgttcagcatcaaaagttagcttacaaattagaggaaattttttgctctacataaatagatttttggttaaatttaagaaaaatttgaaaaattttcttaataaa

SEQ ID NO: 61824 - DNA, 122 bp, Heterodera glycines
ggggacctctagagtctttcgaatgataccatgattgtgaagtttggccaacaaagaaaaaagttatagctttttgaacattgctgagacggagttggccagacggagttgacccctaccgt

SEQ ID NO: 61825 - DNA, 280 bp, Heterodera glycines
attttctaagaaaaaaataggagttttgggggcgcggcggtgccgataggcgccgacggggaaaaaattggaaattttgatcatttataaacagtttttcactgaaaattagccaatttataggtaaaattttgaaaaattttatgggaatttaatccaattcttaggggtgtaaaagtcgcttttcgcgccaaaaagcgaaatgcgaaatgcgaaacgccaaaaaatgcgaataatgcgaaaggcgaaatgcgaaaagcgaaacctcggcccatccctg

SEQ ID NO: 61826 - DNA, 356 bp, Heterodera glycines
atggaagcgcaattccacttctctaaaatctcgggatcagatttcgaggctcagaaaaggaatttggagttgatatatctgggtcatcccccccaaactaatttttttaaattattaaaaagaaattttaaaaaacgatttttttaaaaatttattatgacgaatttgtaaaatttttccaaaatttttcaaaaaatcgccgaaaataaaaaccgggcttggcagccttctccgaatacgtaaaatatccctggccatgggtggcaccactggcaaacacacaggcaattattaaaaagtatttcctttaattacatttttcagggactcccgactctcggcactcgtacaaaagg

SEQ ID NO: 61827 - DNA, 791 bp, Heterodera glycines
atgcctaaaattgatgatattgctaagtgtttgcatttgcgacataagcgcgccgcctttcaaagtgcggtcttattactaacagaaaaagcgagttttttaaatgtttttttctctattaatttaaaaaacttttcagccgtcaacttttctgccagaccaacgcgcggacgaaacacaacagcagcaacagttgacgcaacatcagctgcaacagttgatgaacgacatcgctgattggcttggactgtatgagcagctgcctcaagagacggaaaagacaaaaacggaaatgttcaacacattggtcaacagaaatggtcaacaggtgggcagatgactcgggaggggtggcaattaaatgcttggtgatgggtgggacatttgttcattaaccaaaaacaaaaaataatactaacccatagaattagccgcacaatttcgttttttcccttttattttcataaacatttctctcttattcacaggtcgatcagtcggaacagacaacctcgtcgctcattcactcgtccgttttgcgcgagctggcaaatgcaaagcggtgcgaagaaaatgaacgtgtaagtataaatttaacggatcgatcgggagggggggagggagtcaaaagatgtgaaaaatacaaattaaatgaacaaatttcctttttttatttattttttaaagctggtgcgcgttgtgattgacgaagacgagtcagcagatgatcaaccaccgacaacttgcagcgttgggacacagacaaagatgagttttgcgaataaataaaa

SEQ ID NO: 61828 - DNA, 793 bp, Heterodera glycines
atgcacatcaaaattggtgaagcgcaagcagttacacataagtttaaagcagttaatttcaatcaaattcaaaggggtaattttatcgacgtcgaatttgaggtattttttacgcttaatttatttgaaaaggtgttttttgtgcttctattttaatgctaaaaatttcatattaaagaatgtgatgaatatttgcggagcacattataatgatcccataatgataaacatcgatataatgccagatacttgtttggtctcagataggttaataaaaccctatttacttaggttaaataaaattaataattaacttaattattaaatttaattttttatgtttaaatagcacagtccttttttgtgtttttttcttcgcttttcagtttttctcttcctcctcctcagttcggtgtattatttgtgaaggaaaatgaaacttgttcaccaaaacatattaatgttgataaaaatgtttgttttttattgtttaaatttgattaaaaaaaaaaaaaaattaaatttggatatattatagggccaattcttggcactccattcattcatttgacaattaattttggcatcctattccttcattgatcctttcaatttgcagcttttggcacttcattctccgttcttccgtacattattcttcagcgaaagtgagctgaacaaaatttctgccgttgatcatcaacatgaaattagcattgaagcaccagtaacttttgagcatttgaagcttctaattgaccttttacacgacaaaaaggcgagcaatcactga

SEQ ID NO: 61829 - DNA, 58 bp, Heterodera glycines
tgtagaacataaaaggtaactcgcccggtgggactcgaacccacgacctcagcaatcc

SEQ ID NO: 61830 - DNA, 255 bp, Heterodera glycines
gcaaataagcagcgaacagcaccgaacggcgagaagttttactatttggcgctcctgggtggatcccctccacactgccgggaccactggaccaaggagagtccaagtccgtcggtgaagggccaaggagagcccgagggaccggtcttccgagggaggcggaatgtgatgccagaaggaacggagtgtgggagaaagtgggataaaggacctgagagaacctctaaaagaggcgcccgtagctcagttggttag

SEQ ID NO: 61831 - DNA, 827 bp, Heterodera glycines
atgtgttgtgaaagtgagcacgacccgagcaagcagcatttgaagcgtcctgataaggcacaaaaggaatttgaagaaccaaaaattccttttcaaccaattccgttttcaaaaaaggaaacgccaaatcagcaacggacttttatggagatgtattccatttgtgagttggacggcaatcaacggattctcaatggttcgttctcaagaattgttgttgaaaaatcacaaaaagctcattttccctacaacgcaaagccaatcccgataaaagttaatgagtttgggaaccggctgttgttaggcaatcatatctcaagaaattttttaaatttcaatgccgaaaaaatgccttttgacccaatcaaattccatcctaataatttccaaatgaattcaagtcaagggctggcattaaaaatttttgtttcaaatgatagtcccatttcaaattttaatccgatgaaaacggagaaagtgggaaatatgccgaaaaatgaatttcatgataaaatccatcaattggaaaatgatttgaaggacgtgtccgccgaaagagatgagcttaaaattttgttggagtcaattttttctggaaaatttttgaagaggaaaggattcaaaaaattttcgaataaatttcagaagattttgaaatttcccaacaaaaaggagtatgcgaaatgtttggtggaaaaagccgaaactcacaaaaaaccaaattctttttatcatcagacagctctcaatcaaaatatttccaacaaaaacacatgtcaatcccaaaaactgggacactcacgtgttttcatcaattcaaagcttaa

SEQ ID NO: 61832 - DNA, 642 bp, Heterodera glycines
atggatgtcggaagtgtcagtgccggatttggatggacttcggagtgcagtggaggcggctcggggcacgagctgtgcgagaaaatcacgctgggaagcatcgacccggtcctggacatgtcgaatttgggatcggcggtagtcaaaacgccgcttcaagcccttctcagcatctttttgctccgatcgggcgtggcttcatcgctcacggcagcccaaactttggtccagacaattgttggagcagaaccgaagctggagttgtgtatgtacacagggaaaaggggggaccaaatcagcaccggcaaatacccaacggaggaggaccaacggcaggctttggagaagtgggtcggatcgtgctttgtggctcgacaggctttaaccgagtcgggatataagcccttgtcgatgcaaatgccagagggagtcaattcgctgcccgattctgagaaaaatggcacgaggtcttcaaagacagttcatgggcactcgaacgtgtgcgggccacgattgtgcataaagcgagccgctttttggcacatgaccgtgttctgctcggagactcgtcggcagaaatgctttccaaacacatcaacagctcctactgcattggcggagagagttcgatggcagatttaa

SEQ ID NO: 61833 - DNA, 1431 bp, Heterodera glycines
atggccaaaagaatgcatctgaaccatccgatcactttcttcgggcattcccactcgaccgtttgggttttgagtaacggaggcatcggattcgacaatggcataaagcagtacaagccaaacgcattgccaagcatgggacagaagctgatagcaccgttttggaacagaaacgacttgagaaatgggggcaaagtgttgttcagagaagtgaacggtgagagagggggggggggcaattcgatcagagatcatgatcaatcggaagtgggcgaaagtgcaaaaacaaaaataattaattaaataaattaattaattgcccacaggcggtcgtgttttggagcggggtcaaagtgaaattcgctaccaatacgacagagaagtgaaggtggtgtccgctgttgtggtcacttacgaaaaaatgcaggtgaagaagaccggttggccattcataaattaatcaattaaacttttaattgtctataatcaattgccaaattgatcaattaaacttttaattgactatatataatcaatgtttttttagcccgtcggttcgtcgcccctcccagacgaagttggtgatcaaatgagtaaagaaaccaaacagaattttaatgttcgcctcccatagaatacaaacagtttccaattggtgctgttcatcaccagcaatggcacttttgccaatttcatctacagtaacatcgggtggacgcagggagccgaagtgaccgtttcaaaattggcatgcgaaaacaattcccaattttcaggccggctttaatgccggcgacggcaccaatcattttgcattgcccacctccggcaccggaaacatcatgtacttggaggagtacgggaacacgggaatcccaggagaatggatgtttattttggaggaggaacgtgtggtacggtgcaaggccggcataaaaggggacacttgcgacgagggtaagcggttactgatcagctattgatcattcagtgatcactcactaaatatcactcggaatcactcataatctcattaatcgcggttctcactgactgatcattcggtgattaatattattcacttggtgatcatcgctcacccaacacgcagtgatcacgtactgacttatcattcgttgattattcgttggcttttcatacggtgaagcctatttaatgatcggccgatgatcacttagtgatcgtatgatactcactgatatccagtgatcactcgttgaataaacatccggggatcacgcactaacttattactcactgatcactcgtttactgtgaataagtccattagcctcgacctttgctgcatcctgttgatcattttcagcatgttcgcctggtgaatggggcgaggattgtgtgaagtgagtcactgatgaatagcagacaaagatattcactaaaatgaga

SEQ ID NO: 61834 - DNA, 282 bp, Heterodera glycines
  unsure (1)..(282): unsure at all n locations
ggggacggcgaattgggcttgttcgtgctgttcgtgatcagaatgaatgttcggctcacttctgctggtgtgttcctgagtgnnttgccttttctttgtcaattttcccttttggtgtttccctctgttcctccgttgttgccatttctgtcgatggccgtgccgttctcttcgcctcgggggtcgtcggccgttgcctttgtggcggagatggcggcacggcactcgacgacgccggctcgtgctgttccggcttttcttcggcttgctgttgcctctgct

SEQ ID NO: 61835 - DNA, 365 bp, Heterodera glycines
atgaataactggctgcagaatattaagggtcaaatcacagaactcgccaccgaagttcttaacgatgccaccgaagagggacaagtttcggtctccagtgaacttcaggtcagttttgggtaataaaaagttgaaattttcctatttattctaagacaatatttcaggttgagaaaaagaaatgtgccgaagtggaaaggcaatttttgtcagaaaaagcaaaaaacgaagcattagagaagagagtcaaagagttggaggagcaattgttcaacacaaacgaagaaaacgacgccataaaggaaaagttcacgggaattgtcagcgatcgggagcagcaaatacagcgattgaatgtgaattaa

SEQ ID NO: 61836 - DNA, 973 bp, Heterodera glycines
  unsure (1)..(973): unsure at all n locations
cccagaaatacttggagcagaacgagtccaaagtgtccaaaacgcatttgtacaggagggagttggtgaaacggtggcgctggttcctccgttggttgagcaacattggcatttattttgtgggaattgtgccactttttcagtgttttgtgatttattttcattttaggtcccttgggagtcgcggataaaacgaattgaaagtgaaaatttcatttaaaactgagaatttaatttaaatcaaaggccaatttggctctgtcgtgtccagttacttcacattccttcgctgggtgatcttcatcaattttattatcactgtaagttcttcccctttttcaaaatacctttgattattattattgtattaattaattatttattttttacatttcctcagtttatactaaaaaaagtaattttaagccatttttattttaattgtttttcagatcattttttattactttttaaattatttttttgtcattaaattattaatttatatttcattactattttctttcttttataaataataaatttcaaatttcacaggcaattatcattgcttttgtcgttgtgcctgaatgtgcggccgacgcgaccgccgatgccggacgccaaaatcggacggcaagtcgaaaacgcattccgcccgaggaacagtcgcacgtggacgagtgggcggtggtgtggcatttcgatgtgagttggcacaatgccaaattcggaagggacgaaattattgacaatttgacagtaattaacagtganccanccattnacagaagntcaaaaatgatttgncaaattaaattattccaaccaancctttntttttccaatttttaactttttatntttgtttcccctctttaccaataaaaagtaattaattttnctaaaattattattatttatacctatgtaagattttttttatcactctcttcggcatcatcgatttcct

SEQ ID NO: 61837 - DNA, 663 bp, Heterodera glycines
atggcggggccaacctgctcaatttggtccactgggctgaacgaggcgattgcgcgcgaacggttcgcccgggacgcttctttaacagttccgcgaaacaattcgggacacgcccaattggcgttggaaatggccgtgccgccggggggcattttggtgccgcaccatttgtggcagcagcagagacagcgccaccaaatgcaacagcaacaacagcagcagcagcagaagcagcaaattcggcaaagtgtgaagagcaacatcgtcaccaaaatcaacaggcgtcgaaaggcggcgatcattgcgcgatgtgccggaggcggcactgaagccgatctcattttgatgtccgcactttctacagcgaatgccaatggcggcagcaccattgggccaccacagccacaggcacagccgacgattggtgccgtgccctcgggcaattgtaccaaccagttcccaaaaccgacaaagcaacgaactccgacgacagcgaagaaaacaattacagcggtaaaagagccatcgcagaacccacgcggagcaacgacggacatttcggagtcggacgatgagtcggacgtggaggtattcgaagtggacgagaaggaattcgggaacgacgatttgttcgagaaactgaacagactggaggagcgcaag

SEQ ID NO: 61838 - DNA, 48 bp, Heterodera glycines
gcagacaatcaatgaaactcacaacctcgggtgtaaattagaggggct

SEQ ID NO: 61839 - DNA, 151 bp, Heterodera glycines
attttttgcctatcaaatattcgcaataaatgcccatctatttaaaaaatattctattctattaaaatgttctgtattttgctatatattaagaatagccgtacatctaaaggcgtcagtaattgaacaaatttctcaaatttcaagaaag

SEQ ID NO: 61840 - DNA, 387 bp, Heterodera glycines
acacatggccgccgggcaaggcaacaggtcggcacttcactttggcattttgggggcgagcgccggagggcgacggcatcgttttaataattttatttgaatttaaaaaatgttattcgcttaagtgaggtggtcctttggttcggttacattcgcgggggccacgtcaaaccgccggtggatttaattgacaggcgccgaaaaataaaaaaataataataatgattttattgtttttctcaggacaccctttcattacgcgtgtctcggtggacaagcgaacacagttgaagcgatggtataacacatttggagatgaccaattcattggtcaaatactttcttcatttattaatggccggcactttttctgatcactaattttgc

SEQ ID NO: 61841 - DNA, 907 bp, Heterodera glycines
atgaaaattgtcaattccgatggaaaagaattgccaatccctcaaaatccgttgccgaacaaagtcatcggattcaaaagcatttcgatcgggtaaaaatttaattgaatttggaaatgatttgtgatcttcaatcacacacttctaattttcagattcatcaaccaaaatgtgatcagttttcttggccgttttgaccgctttttcgcttcatgtacaacaatgttgtccattaccactggaaatgttcgcgtttcggagttcgttgttcgcaccatttggccgatgttcaaggataccatttatcagctgagtttggacatcatcgcttttcgtcgaatgcgccaattggccccgtcaatgctcaacgactgtccatcacttcgctttttcaatttaagcaacggcatttccctcgaatttccgcccgacgacagtgccaatgcgacggatggccaagcggtggccaaatggctgttcacgcctcgtcacgataattttccgaaggagctcatatgctatatgaattcaaccatggaagaacaatggtcggcaaccgtggaacaaatcaaagcggtgatttgtctaatttaattcgtttttctaaatatttgttttttagtcattttcctctgcttcttctcctgtttcttttggcatttctgttttaattccgccgtcctcttcactttctgccgttgtgccatttgaattgaccaacgaattcaccggagaaaaattggcactgtccaaagaagatgaagaagcagatttaagtggtttttccatcattcgttgtccaattgtgcccgatgataagagacagcagcaaatgaataaggaattgggcgaccgatggaaccaaattaacatttttatcggagacgacggattcggcgatgggtga

SEQ ID NO: 61842 - DNA, 524 bp, Heterodera glycines
atgcgtcgtgagcaggaatattctcaattcactcggaaagaagaggaagaaaaggtaattgctgacgatgagtctcagaaactcaaagcatttgggattttccattgaaaaactccctttgtttttggttttatttatttattttaatcccattatttagcgatatgaaaaatcgaaggttgaaagtcatctaagcggagaattttgttcaaaaatgacaaacacccaaaagagtctcaaggaattttcggaggtaataaattaattaatgctcttctcttaattgttagaaattgcactaggaactttcttctgttcgtctaaacgtcaaagaattgggaaaaatcgtcgattgtcttcaaagttccgagttggctcaatctgtcgacaattatttccgtgataaattctctacgcttgtcgagctacgacaaattacttccgaggaaaataacaaaaaaatgattgccgaggttgagcagaagtttaaaactcaaacggagtacatcgcaaatgaattggag

SEQ ID NO: 61843 - DNA, 1731 bp, Heterodera glycines; identical to SEQ ID NO: 31521
  unsure (1)..(1731): unsure at all n locations

SEQ ID NO: 61844 - DNA, 2635 bp, Heterodera glycines
atggaaaaccgtccaaaacgcccattcccattcactattaatgatattctcaccacaccgccacccaaaaaattgcggcaaggcttcctcatcaatcagctacttggtctgaccgttcaggagggagaaggagcaacacagacaacgtcgtccaaaaaaatacccagcgaatttgtcgaaaagttggattgcaacgtcgaacacattgccaaatttcactacaccaaagtgaaatcgcgcttcgtcatccgggatgtgccagccgatcccgaaggccttctttccgccatattcaaacactgcattgatgaggcaaagagcgacagtcgtgagaagagcagcgaaccaacacaccttgggtgtctgatcagcagtgcattgttagacggcggtgatgtgttcgtacccgtgcgccaaataactgccaacacaattgacgccatcctgaatttgttcaccaaagttgcacagtcgaaacagcagaatggtgtgacgctgtggggggaaccattcaccattaccataacaactgttgaccgaagccgtctcccaacaaaaagacatctgaaagggggagcaagacgtcgtctggctccagtgcgtcaccaaatcaccgaaaagtgtctgattaaggtggtacccctcccacacatatatcatctcaatatttaaaagtttaagattcacaactcggacaacttttgtttattttatgctcttcaagcgacaatggtgtccaaaacgcgcgggctgtcacgttctgcattttatgagtacatccatggtcggtacggacaacgcggaaaatttcaagaggaaacacgacaattgatgcgacagatccgagcacctttcgacttggacacctatgatgcagacacctatgtgccactcattattgatcattggaacaacgagcagcagcagcaccggcttgcagtgttcatttttggtgcatccggacactacaagccgttgtacaaatatggcaacgacgactatgacacgcccttaattctctacttcagcaacaatcattttgacggtgttcagttcatcagcgggctattcgcgggaaaaaagtactgcctcgcttgtgagcgaccttactcgagaccgtcgctgcatgatcaatcatgcaaagcgcactgcatgatgtgctctcgagtaggccctgcattcccatgttctgcatcaccagctggctttttcaaaaaatgcgatggatgcaacaaagtctttcggaacaacgattgtcatcaacatcacttaaaatccaatttctgcaatcgatcaaagaaatgtaaagattgcggtgtcatttggaatgtgaatgacaacaaaagaaaagggcgtgaggggcatgtatgcggagaaaagttctgcactctctgcaacaatttccacagcaccgagagaggttgcttcatacaacaactcgagccaagaatgcagccaccatatcgcattgtagctttcgacttggaaacaatgcagcatctgccagccgatccactgcaaccagagcgaagaaatcacgagcccaacttcattgcagcaagagtggtgtgctcggggtgcatagacaacaacaagtggcggagcgcaactgcaggctgttcggtttgcggcccttatcgcactgcagtgttctgccaacggcctttcaacggcacaaccgttgacaaaaaggttgtgacagacaatccaatggaggcatttgtcgactggttggtcttcaaactaccgatcaagtacgacacatacgcctacagtcactttggtgggcgattcgacatggtgatcaccttccgcgagctcttccgacggggatttaacccggagatgatccgtcaggtgagaattttttgaaacatactttcatttcgctcatttaatttagggaaataaaatgtacgagatgaatgtccaggcgcagaggaaaaagaacccgaaggttgtgttccgcgactccttcaaccttatgccttgtgcgctcggacagctggtgcctgcctatggattggatgtggaagaaaaaccgttcttcccgcacatggccaatcggccggacaactacggacgacaaatctacccgacaccggacgactatctggcacaaggaatgatgcctgaaaagcggcgccaattcgaccaatggtacgaacaacaccgccacgaaccatttttgcttgacgaggcattggccagctactgtaaaaacgacgtcgacatcctcacggcagcgctcgtcgctttccgccgtgaattttttgagataacaaagaggcaggctgtaaatgagacagacgaccaagaaagcaacgccggcattgacgttttgcgggagtgcatgactatcgcaagcgcctgcatgaaacactttcgcagcaaccacctccctgccgatcacttggccatcgtacctgaaagaggctatgacaacgcgcaaaaccagagcctgcttgcccttcgtttcttcaagtggtacgaggaaaaacacggcgtcaagttgcagacggcccactcagctggtggagaaaagcgagttgccaactactctcttgacgcatggattgaggctgagaagagggccatcgaagtgaatggtatttttgatcttaaaaaactttga

SEQ ID NO: 61845 - DNA, 1084 bp, Heterodera glycines
atgtctcatcaaatcgaagatggtaaaaaatcgtgacccgtccaaccactctttttaggtgtacattgaaaaagttgtaaatttctttgtcatcagagcgcacctggggctgaattcctttgctaaccatgacgcgtgctggcagacttagggacttgggcaaatgaatcggatgatgccctcccacgcatatccgtttttgcatggtgaacgggtttggtgattccaggatgaactcaaatagttgctccaaaagtggacgaataaaaatacactaaaatataaagtttaaatgcaaataaaaaataaaatattacgttcagaatgggaacggaaatcgcaacgttattcaacaacattgctgtttcatttcccccatagcacaaatacagtaggactccttttcggaagtcatccttcgccaatccgttttcttcgcgaagcgaactgaagtccaaattgcccccctcaaactgcatttttcgcgccctgcttgccatgttaaatttcttcacaatttcgttcttaattttaaatgagaattaataataataaaaactaaaaacaaaaatacaattgctttttcagcttttgtatgtgcattctttcgtccatttcgtaaaacctcaaatttccaattaattgcgctgatcgttgatttggatgctaaacaacataaaatttaaattcgattattaccactgattacaaccatttgagtagaacaggcgcatgagtgggatgaacatgatctgctcccaaagcagctcagttgggagtggtcttgtaattttgggttttttgacatgaacaacacactccatttttcgagatttttttgtaatgaaaattataaaaaatgaatccgaatttcagctggaatttcgattatgcaaattttggttgtgcaagcacgcagggacctcaagtcgaaaaatgggcgtggcctattaccaataaccggaaaattcaactggttctaacacccgaccgatttggcaaatcatttgtaatattttattatttttggcacgccttttctttttttgttcctttctctcctcacatttttcgctcaaataaa

SEQ ID NO: 61846 - DNA, 1807 bp, Heterodera glycines
atgcgacaaccaaatcatcataatgataataataataatgatgatgatagtggtaacgatagaggccatgatgatgatggtaatgaagtggaggaggaggaggaggaggaggaagatgatgatgatgatgacgcaaacagtccaaaaaaggcagtcaggctttgtttttttgatgctgaaacgtcccaggatttaccacttcaacttcgcaccaaggttgtacagaagcatgtcccgctgctcattattgctgaaataatctgcgaagcgtgcataaatgaaggaatttcggttcactctggtgttggacaatacgcaaatggatgtgtgtgcagtccccctgtgggaccaaggggacgtcgttggtgttccccgccatttttaaatgtgcctggagatgacagtgctctaccagcctatgtcaattacaacccacgaagactgtttttccatagttttgacaatgccaacaatgacccagtggacgactttatcaattttctcacgggaactggcccgcatggtgtcaaaacaatttgtttgtctcataatggtggaaaatacgacattcacttgatactggagacacttcaccggcgcaatttaccaccaaagcgtatttgcacaacagggctgaaaattttttcgatgactttgaaggggaaccaccaacggcatgtggtgttcaaagattcgctgaacttttttttctgtgagttggatgccctgccacgcacatttggattgaacaccgaagttgcgacaacaaaaccgttttttccttatctgttcattcggcgtgaaaatttgcatcaaagattgcgtggtttaccgcccaaagaattttatcaacctgatcacatgaaagcacaaaaaagagatgccttttttcattggtgggaggccgagaatcgcgcttcacgctttcaattacgtgaacaactcatcctatactgtatgaatgacgtggcaattctacgcgaaagtgtgctccaatttcgcaaaattattgctgagaatacgaatgggctcgatccgttcaaagtcgcatccacagcagctggccttgctttggcaactctgcgtcgctgctttcttccaatgaataagctggttaacgcgccagagggtggctatctaagggggaggagagcatctgctgaatcggcacgttacattcgttactatgaaatgacccatcctggggtgcatgttcaatctgcacagtggtccattggtgaagctaacgttgaggacactggttaccgccttgatggattagtcacacgagatccacctgaacgggaccttgccattgagtatatgggctgcttttatcacggtaaaaaatgttattattctttttctttaattttcataaaacggtgaaggctgtccaaaatgttacgtaaacgacagacaacaaaaattggcgggtggtaagacagctgaagacttgtatgaacgaacaaagaggcgattatttgaactggagaatcaacatgggtttgaattggaggttgtctggggatgtgaagtgaagcaacgccttcgagtagacccagaatttcggcggctgtataatgcctcatttgttccaagaccacttgatccaagagaggatgcactacgtggtggtcgcactgaaccatttattcttcattacacatgcaactcggacgaggagataatcctcattgatatagttataaaataataataattgagcaaaaaaaattttaattatttatttttaggtaagcttgtatccatatgtgatgaaggcattctcgtttcctgttggtaa

SEQ ID NO: 61847 - DNA, 452 bp, Heterodera glycines
atgtttaaaaatggaaaacagaatcaatttgcgaaagagttgggaattggcaaagatacattaagaaaatggaaaaaggaatttggtattgaaattagcaaaagtaaatttaaatttagattttttatccattcttttttattttagatggaattcgatattcaatgaagaaaaaatgagcaaaattaatgattattatgaaatgaagaatggtaatgcttctttaactgacaaagaaattgctggcattttgaaaattggaaccaccactctaataatattgaaaaaacttaaaaaatcgtaaaaatttattcggaattctgacacttaacgggcctgcccctttctacaggaaaatttgttttgtataagggctaacataacattcttcaaaatttctaaatgttttcaatcatcaacaaatttttaaaaaatcaactttttcaaataaa

SEQ ID NO: 61848 - DNA, 65 bp, Heterodera glycines; identical to SEQ ID NO: 56492

SEQ ID NO: 61849 - DNA, 59 bp, Heterodera glycines; identical to SEQ ID NO: 52421

SEQ ID NO: 61850 - DNA, 59 bp, Heterodera glycines; identical to SEQ ID NO: 52421

SEQ ID NO: 61851 - DNA, 59 bp, Heterodera glycines; identical to SEQ ID NO: 52421

SEQ ID NO: 61852 - DNA, 59 bp, Heterodera glycines; identical to SEQ ID NO: 52422

SEQ ID NO: 61853 - DNA, 59 bp, Heterodera glycines; identical to SEQ ID NO: 52421

SEQ ID NO: 61854 - DNA, 59 bp, Heterodera glycines; identical to SEQ ID NO: 52422

SEQ ID NO: 61855 - DNA, 982 bp, Heterodera glycines
atggcctacccatttttgcgttacagtatactaattgtcattttgtgctttgtgtacggtaatgatgaagaaaataggcaagaaacaatacaaaaagaagctggcattgatcataaaaatgacgatcatatcattggtgatgtttatcttggtgacgaattttgggaccaattttcaccgatcactgatttgcccacaattgatggagtcgaatttgttggaaatcatttaaaatatactgatcaaacggagaatgataaaactcatgaaagtgtgattgaaaataactaattaaaacattttgataatttgacacaaaatcaaaaaaatatataaaattaacaatttttaatatattgaaaaccgatgagtattaaaaatttattttaaaatatatcttttattaaaatgctaattgatttagcaattgatgacaatgaatggaaaggcaaaaaagaggatgacaaaaacaacaaattgaaaagaccaaatgaccaactgaaatctctaaatgcgattcacaagagtgaaacatctcaaataattaaaaaaaagatacgaagggttcgtaatttaattttaaaaattcgaaaaatcaaatgcttattttattaaaatattcattattttttatgaaaattttaacaaactttctgtttaatattttggattaattttagataataattaaaatatttccatttatctttaatatttatatagtataaaaaaacaaatttagcctaagaaaagcgaaatttgggaacattttatgcagaatgaacattcaaatacatgcaattattgtggtaaagaaattaaaattcaaaataaaagttcaaccttccatctttgggagcatttacgtagtcaccagacacaatatgaagcaacaaaatatgccaaaatgaaaaatgaaaatgagaacaaaaagttggaagcccagcaaaaagaaaaagaagaagacaccgccagcaattaa

SEQ ID NO: 61856 - DNA, 651 bp, Heterodera glycines
atggcgcacataggcatcgaaaaagccattccatgcatcatcgtcatgatcagtgagcaaattgaagaggccgtaccggttcgttaacggttgtcttggcaacagccatgcaggcaaagccttgaaacatttttatcaaatgggaaaaaatttcaaaaaatttcttgggttttaaaaaatttatgaccagaaaattacaaagttggtttctaaatatttttggccgtagatttttttaaaacccaacgaaattttttgaaattttgcaggctaatagaggattcttagggctatcgaataatgcaaaaaatgtttaatttggatgcttcttgaaaaagttattgttcactaaacttgcaaaaaattttatggtcgtgtttttttatggtcgtgtgaactgcaatagagccaaagcttgacgtcttaacgtttttgttttcgctaattatgctatattactcgtgtgcggaagcggtgccgggtgcgtggccacatgcactccaagacattggccaggccgattagggtattgaccaaagatcgtcccctggtgatcttccttgcgccgaatgtggtcggtcacccggaccaggttaggacgtgcaaattgacagtttgggcgacttaacaaaaaagagtggccataagata

SEQ ID NO: 61857 - DNA, 895 bp, Heterodera glycines
atgaatgagagagtgaaaatggttagaatttttttaaaaggcccccccaaaagtgagaaaattgcaaattatggggggcttttccccctttttttagcagaaaaattggggtttgccccccagaccggttttttctgggctggtttcccccaaataaggtaaaacttcttgaaatttcattttttttgggggtttcctgaatttttccccctcatttttcaggtttttttcccctggtaaacccctgcaaatatttggtgcccccccctttccctgtttccgatgttatgcaaattgtttggcgttggctgcaacttcattcggatcaaaccttttatttgttcgtcatacaaaaaagggggtggtttgaccttagagcagcaggccccccccccccccccgaaaatttcaaggaaaatttttttttgaaaaaaataatgaatttgcaatttttaaaattatttgttcatatttttagggtggtcaatgagaagtcgtgggtgaccatttcgatgacagttggccaggtttggttttgttttcgtttttcaaattttcgacaccaaaaatttgcatttgaacaaattaataacattttttcagctctacgatcaggagaaggatgaggacggctttttgtacatagtaagtttcttttggccaattaataaaaaactatttcatacaatttggtgaaaaaaaaaaatttttttttttattgggaaggggaagggaatccgtttatacctccccaaattcgggatgttttaccaactaatactcatcttggcctccgcgtttttcggcactgataattaatttggatgaattatctatcggcaattaatgaattcaattgtttcaggtctatgcaagtcagcacgcctttggatga

SEQ ID NO: 61858 - DNA, 59 bp, Heterodera glycines
aacattctccttctctagtctggctctaccaaacactcacacgatatttgaaatgctaa

SEQ ID NO: 61859 - DNA, 59 bp, Heterodera glycines; identical to SEQ ID NO: 52421

SEQ ID NO: 61860 - DNA, 59 bp, Heterodera glycines; identical to SEQ ID NO: 52421

SEQ ID NO: 61861 - DNA, 59 bp, Heterodera glycines; identical to SEQ ID NO: 52421

SEQ ID NO: 61862 - DNA, 59 bp, Heterodera glycines; identical to SEQ ID NO: 52422

SEQ ID NO: 61863 - DNA, 59 bp, Heterodera glycines; identical to SEQ ID NO: 61858

SEQ ID NO: 61864 - DNA, 59 bp, Heterodera glycines; identical to SEQ ID NO: 52421

SEQ ID NO: 61865 - DNA, 345 bp, Heterodera glycines
atggaccgacaaaatgacttgcgacagcaacaaaacgttccagaatttatttgtcaagaaagactggacacaaattctccaattgccttcaaagaacctttgccaggggcgtggaatttgcacagcgagtatttggtgggccgattcttaaaagatccttttgcatttcgttgattttagtcgacgaaaacaaaagaggaaaaggaacgaaatgcttcacgtttcagaactgagttggatcccgaggatgtgaagctggtcaatggtcatcaccaaccgatggaatactttgcattttatttttcagaattgggtcatttatcggctgacaaattgatggaatat

SEQ ID NO: 61866 - DNA, 1258 bp, Heterodera glycines
gtgaccaatcatccaaggaatcggcaaaatatcctcaatcgcccaccattaaccccagtcggcttcaccaccgtcgtcagcagcaccaaatgcaattgcactcccagcaaaagggcgaaagggggcacactgtcaacagcaaagcccacacagcgaacaataaagacgccaccatggctatgacgtttatgcttgggaaggacaacggcattggcattgttggtgtctcttctgcgaatgccggaacatcgctgcccattgctaacaatgccatcgctacttcggcgtctgagtcggcgagttgttcctccgtgacgccttcaccatcgccttcaccgattgttgccttcaatgctaccaacgacgctctcaattcatcatcacctttcgtaactctccgtaaacagccgtaaggggggggggagcgaaataggcatttgacttaataatttcttttttaggtttatcggaataaagctagttttggtgataatttaattgttgtaggcaatgtcagcagtcgacgccaccgactcagccaatttcgagcagggaaagtgaagcggagcgtaaggccaagtcgcgtctgaagcgttccacccgacgttctacgcaggtgtacttcctaccttacttatattaaagctcttcttatttgatttagggtgttactttggaacaattgggcgaggtgaatatgcgaaatcattcaccaaaacaccacggacgagcggagattggcaaggaacagaagcaaaggatggcaattggacatgacggcagctgcgaattggtcagttggaatcatcttttctttttcatgaagcattttcaagcaaatgccggcttctccctgctcgtctacgtcgtcgtcctccgcctatttgacggccgcctctcaccgcgccgttgaccaacataattccaaagtcgaacgcgtcaaggagaattacaatagcactaaaaatgaagctactccatcgccctcttctaccgcttcactgattgacgatttggaaaagtacaaagaattgtacgaattggaacggagtgaaagcgaaagactgcggactgaacggcgaatgtttgaacgacgtatttcggcgttggaatacgaattggaggtgagatttagtgatttagagtaattaataatgaaaaatgaattcagaagagcaggcaattgcagacggacaatgagaagttgaaggacgagaacattgcgttggtccgagttttggcaaaactttcgaaataa

SEQ ID NO: 61867 - DNA, 1478 bp, Heterodera glycines
atggtaaacactttgaaaacgacggtgaaattgtctgcgctcaatttgggcgcaattgcagcggccaacccgaaaattgtggtgccgaacttcgcgcgcgacgccctgtcggccggcattgtgcactttggcgttggcaatttccaccggagccatcaggcgagtttttggaatttacactcaaatttcaagttcatttagccttgtttacgaattgtttcagaattttttgactccattgccttaggcgtccaattttctcagttttttggccataacttttttcttacttattagtctaaacctatcttcttggtatcaaacgaaagcttaaagtctcgggaattataaaaaccagaaaagagcaaaaacagacaaaacgaaaaaaattacaatagaaaagatgaaattcagtttttcttcgagtatatttatgaataattttttgtctgttgcttttagcccaaatttttacctgtataacaacttttatagactttaagcgtttgtttgatgctaagaataaagacatttaccaaataagaaaaaaagttatggccaaaattttgtttttgtttgaaacaatggttgaaattgggtccagaaacgaactctcctgccattaaaacgcataaacaatataaccaaaaaatggttaaattgaaatttccttttctttctattcgtcgtaacataattttttggttttcaggctttgtacctcaccgaactgttcaacacgggccgtgacttggactgggccgtcgttggcgtcggaatgagggcatcggacgagcgaatgcgttgctacctgagcggacaggacttcatgacgacggtggtcagccaggacgagcacaacaccacggtgcaggtgttgtgttttgtgtaccatctccacggtgacaagagggggcaccaccgaataatgtacccttcctccaaaagaaatttcaaatttttttgtgtcttcatttcttgaaaaaattgtttcaaaaaatcttgcgaaggtatctgagtcttatcacgaatttgatatgctgctcatttcgaccaattccaaacctcgaatccaaattcggtaaaaaatgaaaattcaaatattgcatttatagaatttttcgaaaattttctcgtctatggtaggtcaagctttttgggactagggaccataaagatacggaatttgtcagaatgagtgtcaggtacttataaactaaaactacaaatgtcaattttccgtcgttgtgtttaagttggtttttgtttttacataacatttgtataaatttgtaattttcagatttggttcgaaatttgtcaaatttctttttttcattaatttcccatttttagttaaatttccattggtttttattcagatcgttgcttccatgatcgacttccttccggtggcaaattccgcggcggttttggcccaactctcccagccgaacattcgaattgtgtcgatgacc

SEQ ID NO: 61868 - DNA, 633 bp, Heterodera glycines
atggacgtaactcttcccgtcagcaactcagttggtgaatggatcggtgaggaacggggggatggcagtgttgtgctctatgcgccgtggacggacgtgtggcatgtgcagcaacaacaacaacaacatcaacaacaccaacaacaacaacagcaaaacgaggtgcagcagcagcaacaacagcttgtccggcgaacaggcacggggtggacgcggtttccagcatggaacgaaccgctcgttgccaacgattggcgagagaaggaggaaaatctgatccaaaggaagcgactacagcgtgaaaacccggtgtattgggcgcgaatattggaggaggaaaagcgagccggtgaggagcgccgcttaagggatttgcggttggagcacacatgggatggctacaaggaaggccacttcgagcgtcggcacaatgacggctcgttttttgaggccagaaaatttcttggttcaaatcgacagaatgacttttttcattttcagtttgttgctggggtcgggaagacagtggttggaagttctggaggagggctttggtgaatgatgttggcatgggattgaaagtgttaagattaactatgattggggatggtatttgacattaatcgctgataa

SEQ ID NO: 61869 - DNA, 662 bp, Heterodera glycines
aaaacaaaaaaatcgattttttcaagtgtccgtttggggtactcaaacaattatggggagcaaaaatccaacgcagaattaaagtacaggctatagggaagctattcggaaggattcggtctccccataaatctgggcgcatcggttcggggggactgccccgaaaacaaaaaaatcgattttttcaagtgtccgtttggggtactcaaacaattatggggagcaaaaatccaacgcagaattaaagtacaggctatagggaagctattcccgaaggattcggtctccccataaatctgggcgcatcggttcggggggactgccccgaaaacaaaaaaatcgattttttcaagtgtccgtttggggtactcaaacaattatggggagcaaaaatccaacgcagaattaaagtacaggctatagggaagctattcccgaaggattcggtctccccataaatctgggcgcatcggttcggggggactgccccgaaaacaaaaataaatcgattttttcaagtgtccgtttggggtactcaaacaattatggggagcaaaaatccaacgcagaattaaagtacaggctatagtgaagctattccggaaggattcggtctccccatctatctgggcgcatcggttcagggggactgccccgaaaac

SEQ ID NO: 61870 - DNA, 200 bp, Heterodera glycines
gacaatcactttctgttgacaattgtgataagcaacgcgacgaaccacgagagcatttcgtacaaacaggacggaggacgattcgactcgtcacagttcacgctgaagttccacacgaacactttgtacaaaatttacgtgaagacgaagccggcacagcagtttttgtgagcattttgtcaattgatcagctggaagaa

SEQ ID NO: 61871 - DNA, 1392 bp, Heterodera glycines
  unsure (1)..(1392): unsure at all n locations
atggagttccaaggccgtggaggcccgcatgcacacattgtggcccagactgacctggatgcagttccagatgttattcagcaatacatttgggctcacattccacttttgccagaaaaaggtgatgacactcccatcgcggaaatgcaccgccaagtgcgcgaattgatgcatttgcagctgcacaggtgcagcgaaagttggtgtggtactcgtgaccaatattacgggcgctgcaaaaagggcttcccagccccttactcaaaatgtacgattttgcggcccgacaggcctgcgttgtattaccggcctgcaccccaggatggtggtgccaatattgaggtaaacggcttaatatacgacaactcacaggtcgtgccgtacaacccttatgttttactacgctaccgggtacatcacaatgtgctatttgcgtatggtaacaaggcaaatataaaatatgcactaaagtacccattcaaaggtcttggacattgttatgtcgagtgcaaagaagagtccggcaacaaaatcggtatcgatgagccggctcaatatgccaaaatgaacttccgtggtgctacggaggcatatgccgttgttaactcaacaccatatgttcggctttcgcaccacgttgtcaaattgatgattcatttgccaaatcaacagtccattgtatatagggctttccagctggtgagcaaagctcagcaaatccagcaaggcacactgccggaaacacaatgctcagcctattggaaacaatggcaaaatgaatggcggcatgatcctaagttcaaggacatgcttttcgaaaaagtgccggaacaattccgatgggataaggacaaatgggttctttacaaaaggaagcccatcaaaaggcctccaattggtcgaattgtccctgttccacccaaggatccggaaagatttgcgctatattcacttatgcgccactttcccggtgaccctgaccatcttaaaatggtaaatggtcagccttgtacctctttcactgatgctgcaataaggcacggtcttcttgaggatgacaaaatctgggataaaacactcgctgaggcagcgttgtcacgatggcctgatcaaatgaggtggctcttcatgagcatcctcgtttatggccagcccagtaatgccgtcgaattgtggaacaagtacaaagaccaaatgtactttcctcaaggcattaccacatcggcacaacgccaagcagcagagcttgaagccctagccgacattgattggcggctgcacagctgctttaacttaagctctgtgcattttggcttgccagaccccgcaaactncattgccaanatacaaatgcggcaattaatgagtttttctttggcgatgatgatttga

SEQ ID NO: 61872 - DNA, 353 bp, Heterodera glycines
tcaaatgcaaatgccatttcgatggtccgcttttgcccgttgcgctcctttttcgcattttcgacggcgttgacagtcctttcgaacttttttcgctgcgacttaccaacaaaaattgtgctgactttgtccgctcaaaaatcagcgtaatttgccaacattgatccaaatgattggcattattcattcattcctcttcagcgtgtctctgagatggaccttcgccgcgtctcttttgaccaattgtcttcgctgtccgtcaattcgtccggcacttccgcccaatcggagaccacagtgattttgcaaggggagcaatggtgagggcactcgttcattaagcgtggtatatt

SEQ ID NO: 61873 - DNA, 419 bp, Heterodera glycines
tgttggtcaagcgatgcaacaacaactcttcctcatcaaacaaaaccaccgaacatgtgccatcggcgggtgccattgatcatgcctttgtcacggttgtgccacgccgatcggtcggtggggggccaaaaattgagcccacaagttgtggcaatgtgtcagtgccggagaatgaggccatccctcaactgttacgaattcgaacattgcttgacgacctaacaacaacggatgaatttacggcaccaccagcagtggtttatgccattgaaggaggccattggcacaatgccaatttgttccacattgatccgaacacgggatggatcagcagcaccaaaccgttggacagagagacaatggcggagcatctgctgatggtgtcagccaccgacttgaacactgtgccaaagaaagtg

SEQ ID NO: 61874 - DNA, 1465 bp, Heterodera glycines
atgggcctggtaaacaaatggccaaatgggccccaaacaacccctcccctttccccagccatttttccaggtatttaaggagcccgatttcctcagttggcatgcctcgacaagtctcagctctaatccagcgctccgacaccacttcaaaccaatcaaatacgacttgactactggtttgaccacgcacaatacgacttaactactggtcgccgattggtccaattgaggcatcggatcaacaatcgacaatcgattgagagatcaaaaattttccggcatttccatttgtccttgttccattgccttgtcccatttttctaataaattttgactccgacttcattcctttgcggtcgcgtcaaattttggtgccacgacccgggaacacggcaacacaaggacggacaccaccaacgacaacagctgccaaactgatcaagcagacaaaaaagccggtcatctgttcatcactgttctgcgaaacaactaaaaaaaccttcttctgccaaccgctgttcttcaaaccaaaaagtctgatttaaacgctgagatttaaatcagaaaagaaaaaaaacaataaaaattaataaattcagtggacaaagagccgaccaaaaaaccacaaacacgtggcaagagaagttcatcaatcgctgccaaaagcgacgagattacaacgaccgaagtgaaaaaatcttcgacaccgccattgaaaaagccgaaagctctatttgcaccagcaaaaagacaattgccggccgaacaaattgctgaactcaagcaatacttcaaacaagaggaagaagcagcaaaacgtcaacttgaccgggcaattaaagaggtcaagaaaacaataaaatttaataaaaacaaagacttaatagaatatactcgtgcactatattctatcaagccaggagcaccagaaaaggtcgaggacttccttgattcattcgatccgacgactaacacagaagtgttggacgagcttgatcgtgtccaaacaaagaaacagcaactgttcgacgctgccctcacacaccacgagaaaagaattgcaaaagaagctgaaaattgtcgacacccgcacaaattccattctgatttctgtggaaaaggctcaaaaagcctccaattttaatcaacgtctgattggtcaaattcaagcattaatcaattcccccgcacgagtcaatactcgatctggaatagaaacactcaaattgcaattcgacacattgtctaacaattatacccactttgatcgatttgttcttggtctaaatcgttctgtaaaatctattcgaaaattattcgacattgttgacaatcctgattctgtcaaaccagaaattgtccttgacgatccaagctcatcataattcatttgaaggtgatcagataccattaattgtactaatttcgaaggcgatcagatactattgtgaaattgttgaataaa

SEQ ID NO: 61875 - DNA, 698 bp, Heterodera glycines
atgattggtgaggacgaacaattgcgccgcttgggggacgacccggccttgctgagtttcgtcctcggcgacactgacgaagtgaaggctcgtaagaagaagaagcggcagagcgtctcgccgccgccgcagcagccgcaagaggcggttgcgaaacagcaatttgcggcatcaggtatgtaagggggtgcatttattttgtatgtggcaacacttttatttttacaagtaatatatgtataaaaatggtacatttataggaaggtgaataattccccctcccctgggcctggccacagtgccgacactagtgcggctgaagcagccatggcacaagttgtggctgaagatgcgatcatcgcagcggagatgagcatcgccgccggcagcattcttgctagctcgtctcgtcgaggaggggatcgccactgctgaccgagctacgccgccggtgcctcggcgtcctgctgcagcagttcggcatccctcagttgagagggcggttgcagataagttaggcgtcggtgctgttcgtgcccattttatcccttactttataggcactactcctgctaatgtgcgcaagccggtcattcgccgctcatccaccgtggagcgggcggttgccagcaaaggtttgccgttcatgtctatcccctgtcggatttaatccgaaaaaatacaaaactattaataaa

SEQ ID NO: 61876 - DNA, 1612 bp, Heterodera glycines
atgtgcgagtctcggttctcggttcccgactcgggaaatttctcgggtttttcgcttcccggtctcgtagttttctgggtcgctaatcacgaatatggtattcattttgacaactgcgaagcccggactcgatttcgaacaaaaagggtttttgaacatatagattgtatctgttttgttttatcagaactgttttaatttggagggtccaaatcttggggtagtgaacaaattttgttctaatttcttaaatataccgttaaggttatgtttataatcacaaacttttttgaaattttaacagaaaaaaattaagcgccacaatgttttgacattttttgtaggaaagagctgaaaatttttgctaagtcaatttacaggttgatcaaaaaaatcttttcggcaagttgatcagatcactccttcattcgatttgtctcatcgagactaatcgaatgatatatataatttatatgaaaaatcaaaattggtagtattcttcaattttaccaaaaaaaatttatggggttcggaatttttttttttgaaaattagagtaagcccattggaaggtaaaattttttcaattttttgtaaaatttttgatcaaaaatttaccctttcgaggaggtttgtttgcctttgacagtcccaggctaaggggtagtgtacatagaatacccttgtgggcaactgccaataaaggtataattcttgttgttttaggacaccatcgtcgctggggcggacgacctgaacgccatcaccggcaggaaggccaaatctgaggcggagcgaaacgtgctctgcaaccggctggtggagcgctcgctccgcgtcgccgctcagatgagacagttgcaggactacgtatgtatttttttccaacaatacttccaacattataacattttaaagtatgctgagagttccgaagcaaagcgtcgattgcgctgggcggttgcccagaaggataagcagatcagtcaactgaacaaagacaacaaacaactgcgaaaggacgtcgagcacctggaggactgcaacaatgaggtggttctgcaggtcaaacaggtattttttaatctttattggcagtagacaatacgggtaaatattaagcagcaaaacgtcaacttgaccgggcaattaaagaggtcaagaaaacaataaaatttaataaaaacaaagacttaatagaatatactcgtgcactatattctatcaagccaggagcaccagaagaggtcgaggacttccttgattcattcgatccgacgactaacacagaagtgttggacgagcttgatcgtgtccaaacaaagaaacagcaactgttcgacgctgccctcacacaccacgagaaaagaattgcaaaagaagctgaaaattgtcgacacccgcacaaattccattctgatttctgtggaaaaggctcaaaaagcctccaattttaatcaacgtctgattggtcaaattcaagcattaatcaattcccccgcacgagtcaatactcgatctggaatagaaacactcaattctgatgattacaaaataattaagattataaatgcctttattctatcataaaattaaaaaaacaaacaataaa

SEQ ID NO: 61877 - DNA, 887 bp, Heterodera glycines
atggttgcacacgccgagcaaaaatggacaaccaaagcaattacgtttccgtgcttatgtgagtccaccaaatttcgaatgggtcaacaacttcaaagaggtcgtctcgccagaattttcgtcaatttgtttttgttttaccaatttttgtgtttaggcattccgtcgtgccaccacttctgtcagttaccaaattcaactttattttcgtgtggaaacaatgccaattgcgccatttgaattgatgaacgaagtgacgaatgaaaagctgacactgaaacttagcaaagaattaggctataattgcctgtataattggctgttgcaacggtgcccaattggggagacggcgacggcgccagttaagtgggaaaaccgcgaaaatccgagtgccaatttgaacaatgtcagatttgatctgtggagtttcgataaatccattgggtgagcagcagcaatagcatttgattttgccgaaaaataaaatatttaattaattttaggccattgtcgccaccagcggaagaaaaagaaggagaagaagaagcggatcaaagcaacaaaaatgtcgtctgattaagtgtacgaaaatgaataattaattgtatttgagaaatgatcgatctcaattgttgtgcttaatctctcagaaaaatcgattcagaaggcaagataaagtatttcgtgcatttgaaccggttttgctgcatatttagaatttttcgaaaattgaattttcgaatttttgttcgagtccgggtcaggggttcgaaatgggccgaaatagatataagaatcgaattcttcgacccagaaaacccataaaacaactttatttcgaaaaaaatttttgaaaattttctttatatcattgaaaacctaataaa

SEQ ID NO: 61878 - DNA, 829 bp, Heterodera glycines
taattaaatccattccttcgggggaccgtgccgggtgccgcggggtaagcagtgctggttcgtttcatcacggcaccgaaccttttggctagtcagcaatcgttgcttaacttgccagatcggacgggtgcgcatgattccactgttccaagcaccccaccaaaagcaaaacgatataaccaaaatataaggaaaaattttttaaaaatttttttctccatcttcctttttgatactaaagcatcagagtgctaaaattaagttgtaaataaaatttggtgcgctttagagcactttctgaaaaaaatatttatgaaacaaaaaaatcgattttttcaagtgtccgtttggggtactcaaacatttatggggagcaaaaatccaacgcagaattaaagtacaggctatagggaagctattcccgaaggattcggtctccccataaatctgggcgcatcggttcggggggactgccccgaaaacaaaaaaatcgattttttcaagtgtccgtttggggtactcaaacaattatggggagcaaaagtccaacgcagaattaaagtacaggctatagggaagctattccggaaggattcggtctccccataaatctgggcgcatcggttcggggggactgccccgaaaacaaaaaaatcgattttttcaagtgtccgtttggggtactcaaacaattatggggagcaaaaatccaacgcagaattaaagtacaggctatagggaagctactcccgaaggattcggtctccccataaatctgggcgcatcggttcggggggactgccccgaaaacaaaaaaaatcgatttttt

SEQ ID NO: 61879 - DNA, 912 bp, Heterodera glycines
  unsure (1)..(912): unsure at all n locations
atgattagcnaacgtcnggaattttntgaattaattaacgattatacaattgaaatggccaaaccgataagatntaatgacaacactttacgagtaatatattgcaaaaaggacgagtacattaaggagcataaatgctccaatatcatgatttcgatatggtaggataataaaaaaatgggaaataaattgttttttaggaccaccgcccaggcgcggcttaaactttattcatatatggaacaaataaataattcagaaaattgcaaattaatttacacagacacaggtaataaaaaaataataacttttttatttcaatttttagacagtgtgttttttattcatcaaaaagaaatgtgtccgattaaggaagggagttttttagggtaatcatgagcaaaaaaaattttttttaatataattttagtgaaatgtcaaaagaatatgcggattcaaaaattttagaagttgtttgtgcaggtaaggaataaaaaataaataaaaataaatagcagttttaggacctaaacaatatgctttgaaattacaaaaagaaaatggagagatttggtataaaacaaaaattagaggaatgacgcaaaataagaacaacaaaattgattacaaagagttcaaggacatggttttgaattataaggaagaaaagaaaattcggtttacacactcaaacaaattcgggtaggtttttataatttttagaaaaaaataattaattttatttagaccgacgagggaaagttacgtgattagccgtaatgttacaaaggattataaaccaattcaaaagaaggggttagtttgactgtcttcattaccgaaataatattttaatttaggattattttggacgatgagaatttaactgttttgccttttggttgttggtga

SEQ ID NO: 61880 - DNA, 270 bp, Heterodera glycines
atgcggtgtacacaaacagaaaatggccagtttgatgaaccaattcaaaaagggaacaaagtgccaaaaggtaattaacggtgttacggaatgatctaattaaaatttcatttattgccaaggatttcattaatcacacatactttgttaaaaaagtcacaagaatgacagaagaattcaaaatgattccaagtgtagcgatgagtccgtaaatcagtgcgcatccaattagtgaccagctgggatggacatctttgaaggccaaataaa

SEQ ID NO: 61881 - DNA, 1065 bp, Heterodera glycines
atgcttttcactggcattgaccgactgatcggaattgctttttctgaattgtgaaagataaatttagctcatttttaattatagtaatttttagtcacgataagttgaaaacgcgattgtatctggcaatgattactgtcatttctgtgtcgtttgggtgccttttcgctgttttgaattgccaacaagcaaatgaggacgatgatctaatggtcactggctcctatactgatgctttaaaggttattaatgaaaattctttcttaattctgatgcttttcataaatatttttgtcgaatattttaaatgcgctttttcagggcatgcctcggtttggaccaataattctttctattacttcaatgggttttatcatttatctctttcttggcattacaatacgtgtaaaagcatcaggtaaaacatattaaatatgatacactcagcactttttacttttctttctgtgcttttaaaattgattaaaaattccaaaaaatttataatcgcagtaaaaaagcaataggtaaaaatagttttgccatattttaccctttcattctatgaaaaagcgttaaaagtttttgccaattaatatttccattttctttcgttcaatcattggctgtaattagctaatttattctttttttaggtttgtcgtccgctgattcgttcaatcgtcgcacttttcgtgcccttttttgcattatcactgtgaatatcggcggttattttatcacaacaattgcttacttcctattagctccctcaattacttctccagtcactgagtttttctgcgctctaatggccgcaattcctatgaacattggcgcagtgtcaaacggacccattttatattttacgaggtgtcattttaattgaaaatgttttaataataatttttaatttttagtacggagtatcgacaagcatttcaaaaggaatttccatttgtgttcaaacaaactcccaaccaaaatcaagtcgtacctcggcaaaatgggccacctattcgtgtaatctcacaatcaagaataattgacagttgtcaaccataa

SEQ ID NO: 61882 - DNA, 2349 bp, Heterodera glycines
atggcggacaacgaagtgaaactgagtggccatagtttgacaggaccagtgaccagtttccaggagtcgacattcccaggtttgcatttggtgatttggggcacctttttggggtgatttgtccctcttttattggcactgaccaatagcaaaaccgaaaaataatatttgattttcaaaaattattgattttttgagccatgcccaacacatccacggcacaatgcggacgaggcatttttgtgtatggatgaattgggatatggataaattgtgtgggataagttggtttaatccccgatttctaaatttattcttgtctcaagttgaataaatgccaaaatttattgtgtttggtgattcgtaaaatgcggagaaaaaattttttacaaaaaattttcctaaattgcattgacacagtctcgtgtcatctaaaattttatacagaaaatactcatttttttttctttcagcaccaattgttgcccaactgtccagcgtgttctccgcgcccactgccatccaggcaatttcgtggcccgtcgcactggccggaaaggacttgatctccatcgcaaaaacgggcagtggcaaaacgctgggcttcactttgccaggtttcggatttcctttccccgattttttagtgctgataaatgtgccccgccggtggtaatcgttattcaaaaaatttcaagtttcatcctgttgtttggtttacaaaacaaccatcatttaaataaaataaattttcatccaaattcatggtatatgtttctgattttgtcaaaattggtggtcatgttcggtgatcagtcaaactcaaaaccaacccagacaacatgttcataaacaaacttttaggacaacaaatttttgtattcttcgaaaatgggagcgaagagagctatgggtttcattacccattatataaaaaatatattttcaatgaaactaagaaaaatgaagaattttgaattgatcataaaccggtcaaaatttcgccgagcaggttggcatttaatacaaccggttccatggcccgacctttccaaaaccagtcaaaccggattcttcaaaaagtggcggtccggttttgccgggcccgataaaaacatgtaccggacatggccagggttccgcatccacttacaattagcaggaactctctgtcccgggttttttgtgaaaaatactgggcacataagttttaattgacccaatttttctttctttgattaccatttcattttcagccattgtccacgtgctgaacaaccaacgaccgcagcagcagcgtcgtcctggcgaaggtccggctgttgttgtgctgttgccaacccgtgagctggcccaacaggtggagacggtggcccgtgaatatggccaactgatgcggctcaatgtggtcgcgtgctatggcggtgcatcaaagtggccccaaatgggtgcgctgaagcgcggtacgttcgacatttaagaaaaaatttgttgcttggtagtgcggaacccccccccccccccaaaaaaaaattattttgtttgaaatgtaattcttccgaagggagtcgggccaacataacccgaaacttcctgaaatttcgtcactaaactttccaaaatttaggcgtggacatctgcattgcaacgcccggtcgactcaacgatttcatcagttccaacgctgtgtcaatggaccggtgcagtttcctggtgctggacgaggcggaccgcatgttggacatgggttttgagccccaaattcggcaaatcatctcgaaaattcgggtttgttttttcgcgactatgaatagcaatttgaatgacaatttgtgttttgtaaatccattttttgagtcaaaattttgtaaatcctttttgggtccaacctactatggatcataattggattttggattaggcatcccctttccaatatcctacatggaaatttttcggattttacgggaaaaaatatgtatcattctagagaaaaatttgccatatattatatatatatcattcttggtgaaaaatcggagattttttcataacaccgcaaattctcatacagcggtggtcatccaccatttcttacccataaaaaatattccaaaaactttttaaaatggaatttagacggatcgccaaacactgatgttctcagccacatggccaaaggaagtgcgcaaattggccgccgactttcagcgtcagccggtccatttgactgttggctcgttggagctgagcgccaaccacaacatcaaacaaaatgttgaagtgcttaccgagcatcggaagccccaacggttgtccgaattgttgcagcagatccttgacaaaatg

SEQ ID NO: 61883 - DNA, 179 bp, Heterodera glycines
tttcagatcagtaaatcaaacttggacgacgatttaattcagttgaaatgcaactgaatacaagcaattatcattttttcaatggccagccaagcccagcgggggccacccaaagcaacaacaaaaatttctttagtggacaaccaaattacagcaacaataacagtaattggaacagt

SEQ ID NO: 61884 - DNA, 1705 bp, Heterodera glycines
atgggccaattgtaccgacttggccaatggattcgtcatcgttatgatggaggtgtgtatatataagagaaataaaaaaagaattcaaactaaaatcattaaaatttgatagaaatttcatggttgaaaaaggcagtttaaaaataaatattttaaaatacccaagcctggggaatccatgtttttcgtgccgaacctggacctggattttttttttcatattttacctggaccttgctttcctggataaaaacgcagaaaaatccaggtccaggaaatgtccaggttgcgcaaaattggcgtgaacatggaccttgtgaccaaggaaaaatccagacctggacccaggtccagcggtcaagccctaagcaattaaaaaaactttaaaactataaaaaataaaataaaatttcaaaaatattccaagttacccatgcttgattgaaggctttttatcgccggattacaatgttaatgagctctatgtgcggagttccgacttcaaccggacactgatgtccgcacaggcgctgctcgccggcctctatccgccgaggccggacagagcgttcgaaccgggcctgaaatggcagcccattccggtacacaccgaagcgcgagagaccgaccgagtaagcaatgccgaaaaagtgtgccgaaccggaacttatttgttagcgctatttttcggcaacccgaattttggcacagaaatatcgggtcggctcgcattatggcgggcgctgtgttcgtccttgcttcaaaaaaaaaaacttggaaatttaaaacgaaaatgtttttgaaaagactagaaaacccaaaaaaaaaatgacaaatttctcagagaaaggttttttttttcttgttttttctaaattttttggatttttttgggtcattcttagaaaggaaaaaaattcttcgaaaaatttcttggaaaattattaacatttggtaattttctcaattcgattctcatgcggagggaatgaactgctccgtttcgatgtatttgagccttgtcttgtcgaccattgcaattgaaccaccaggtgatctttgacggttcgaattgtgcgccaatgttggaggaggaacggcgagtgttcagcagtgccgaagtgaaagaaattgagcgccaaaatgccgactttttgcgcttccttgccatccagtcggggttcgaacaaattccgttaccatttcgcgaaacgcgctacgtgttcgacccgctgatttgcattgtaagagacgaacggaagaagatgaattggttcttggattagggttgtccccgtcgcgctgtgacccccaaatcccggactagacaaatccctccatttatatccaattccggaaaacgatacccccccccccccctcctcctaccattcaacattcgacttcgaaattttcgggacacaaaattcggaattcttggcccccaaaaagttcgaaagtcgtaactccattatatatttataaattcttcgactgattttgtgaagcccattaattaagttgaaaccacggcataataatttttgaaaaaagtatcgttttcctttttttcagaaatttaacggggagggcaaagaattgccaaaatgggcaaacgaatcagtaattgaacgcatttggcaactcaacgacctttcatccaactacctttacaagacaacaaaattggtccgttttcgagccg

SEQ ID NO: 61885 - DNA, 172 bp, Heterodera glycines
  unsure (1)..(172): unsure at all n locations
taattaattagtatntaataattagggctgccaaaaatatgtacaaaaaagtggtcaaaatatgtacataaatatgtaagaaaaatcccgaaatatgtgtacaaaaaaccccaaatatgtaccaaataattaagtaaaatttttttaatggttattattttggaaaaaaatt

SEQ ID NO: 61886 - DNA, 819 bp, Heterodera glycines
caaaaaaatcgattttttcaagtgtccgtttggggtactcaaacaattatggggagcaaaaatccaacgcagaattaaagtacaggctatagggaagctattccggaaggattcggtctccccataaatctgggcgcatcggttcggggggactgccccgaaaacaaaaaaatcgattttttcaagtgtccgtttggggtactcaaacaattatggggagcaaaaatccaacgcagaattaaagtacaggctatagggaagctattcccgaaggattcggtctccccataaatctgggcgcatcggttcggggggactgccccgaaaacaaaaataaatcgattttttcaagtgtccgtttggggtactcaaacaattatggggagcaaaaatccaacgcagaattaaagtacaggctatagtgaagctattccggaaggattcggtctccccataaatctgggcgcatcggttcagggggactgccccgaaaacccaaaaaaaaattttttggataaaaattatttaaatgaactgactagataatatttaaaataggttatttctcttcctttcagtatccctgcaaagtttggtgcgcttctgatcagtttctgaaaaaaaagttaagcctaaactttttggcctgtttaaaaaggaattaaaaatttttaaaaattttattcatctccctttttgatagaaaaagcatcagagtgcctaaactaacatgtaaataaaatttggtgcgtttcagaaccctttctgaaaaaatatttaagaattaattttgcaaaaaataaataaaaacgaaagact

SEQ ID NO: 61887 - DNA, 301 bp, Heterodera glycines
attaaagtacaggctatagggaagctattcccgaaggcttactgtgtccccataaatctgggcgcatcggttcggggggactgccccgaaaacaaaaaaatcgattttttcaagtgtccgtttggggtactcaaacaattatggggagcaaaaatccaacgcagaattaaattacaggctatagggaagctattccggaaggattcggtctccccataaatctgggcgcatcggttcggggggactgccccgaaaacaaaaaaatcgattttttcaagtgtccgtttggggtactcaaaca

SEQ ID NO: 61888 - DNA, 827 bp, Heterodera glycines
taattaaatccattccttcgggggaccgtgccgggtgccgcggggtaagcagtgctggttcgtttcatcacggcaccgaaccttttggctagtcagcaatcgttgcttaacttgccagatcggacgggtgcgcatgattccactgttccaagcaccccaccaaaagcaaaacgatataaccaaaatataaggaaaaattttttaaaaatttttttctccatcttcctttttgatactaaagcatcagagtgctaaaattaagttgtaaataaaatttggtgcgctttagagcactttctgaaaaaaatatttatgaaacaaaaaaatcgattttttcaagtgtccgtttggggtactcaaacatttatggggagcaaaaatccaacgcagaattaaagtacaggctatagggaagctattcccgaaggattcggtctccccataaatctgggcgcatcggttcggggggactgccccgaaaacaaaaaaatcgattttttcaagtgtccgtttggggtactcaaacaattatggggagcaaaaatccaacgcagaattaaagtacaggctatagggaagctattccggaaggattcggtctccccataaatctgggcgcatcggttcggggggactgccccgaaaacaaaaaaatcgattttttcaagtgtccgtttggggtactcaaacaattatggggagcaaaaatccaacgcagaattaaagtacaggctatagggaagctattccggaaggattcggtctccccataaatctgggcgcatcggttcggggggactgccccgaaaacaaaaaatcgatttttt

SEQ ID NO: 61889 - DNA, 438 bp, Heterodera glycines
aaaatggtctaagtaaaaatcgtaattacgctcaaaaagcttctcaaacaattttagcgcatccaattccttctacaatcgcctttatacatcccattatgagcgctaaaattatcagagtgccgaaaatcgcatgtgatctaagcctagaaaaaaatggtctaagtaaaaatcgtaattacgctcaaaaagcttctcaaacaattttagcgcttccaattccttctacaatcgcctttatacatcccattatgagcgctaaaattatcagagtgccgaaaatcgcatgtgatctaagcctagaaaaaatggtgtaagtaaaaatcgtaattacgctcaaaaagcttctcaaacaattttagcgcttccaattccttctacaatcgcctttatacatcccattatgagcgctaaaattatcagagtgccgaaaatcgc

SEQ ID NO: 61890 - DNA, 869 bp, Heterodera glycines
atgggcctgggttttctggacaaaaatccaggttgccgaaaatggcatggacctggatctggatccagaaaaaatccaggcctggatccaggcccaggtcaagctctaaatattttacttttagaaagtgttattataaaaaataataaaaaaaattcaatgataataaacaagaaagtttctgaagaaaatgctgatcacaatgctaagaaaacaaataataatcagttaattataattaatttgtcagcaaaaaagaattctttaaaaaatgaattaattaaaaaagaagaaaatgaaatggaaaccccaaaaaaagaggaaataaaattaaagaaaaaagaaaaattaaaagaaaaatgcaaaaatgatttgttgaaagaatgggagcggattagcccagtgaatatatgtggtaagagcgaattttaatattttactttttttaattataaatttaatttcgtaattgaaatatttttttaattagcaattaattttacttaaatttaataattactttagttaaattttagtgattatttttaaaaattagtttttttcatgttttagtaatacattttttgatacttttactaaaactttttttaattttagaaattagtttgcttaaaattttcgtaattattttttaaaattttattattattaattcactttttaaaatttgtaatggtatttttattaatgcatcaagaaaatgcggtaaaaaatttttcaaacgagtttatctatcactattttatatgattttttaaaaaaagaaaaaatcatatttagcatttttggatgactcatttttatatgggaaatatgccgaaattttgtcctcgccccttgacggatga

SEQ ID NO: 61891 - DNA, 283 bp, Heterodera glycines
atgattgaaaagcaaaacaggtaaaaatgctatttgtgagcttttcatgtgataatctattcgcaacaaataatttaaaacataaaattcgttcctgacgataacaaaatataaaattatttaaaaacatacacataataaatcaaaattttcagttttatcaacaaaccgagaacagagaaaaaatattttgcaatttttgacattggaccatgtcaaaattttgttcaagaagcttgacattaaattttataacaaagattttttagaaaaaaataataaa

SEQ ID NO: 61892 - DNA, 2120 bp, Heterodera glycines; identical to SEQ ID NO: 6525

SEQ ID NO: 61893 - DNA, 97 bp, Heterodera glycines
  unsure (1)..(97): unsure at all n locations
atgttgtgcagtctgcccttccgtggaccagcacntgctccatctgctccaggcccaccctgtggccaatcagctgctgttcctccagcaattgctg

SEQ ID NO: 61894 - DNA, 505 bp, Heterodera glycines
atggctgaagccaaacgaattgggcgagccgacccccaggcgtcttcaacagcaccgaaggtattgctgtgcgtctggtggtgttcatcagggttggtccgctatgaacttgttccggctgggcaaaccatcaacgccgacatctaccagcaacaactgcagcgggttcatgaccaaattcgtcgtcctccattttctgcaaaattccgcggcggcgtactcctccatgacaacgcacgcctagatgttgcgttctcaacgcaacaaaaaattgagcaacttcgatgggcggttcttcctcatccaccatacagcccagacatcagcccgtgtgactactatctgtttcgatctatggagcacttcttgagagggaaagaatttgcagatcaaaacgaggtcgaaaatgcattggatgactttattggatcgaaaaatgatcagttttataaaaaggggattgaaatcttgcccgaacgatgggggaggatcattgatcaaaatg

SEQ ID NO: 61895 - DNA, 540 bp, Heterodera glycines
atggtaaattcaggcgatacattttatggaattcttgaactttttaacgttaacttgccaattagaaattttttgaatcgtaatggaaaaaaataggatttataaattagggaaaataaagaaataatccaataatgggttttcaatgagaatgggtgtcaaaatattgagtttttagattaaattcgttaattaaattaaacaattatcagcaggatattgtcaatgaggaattcggaaaattaagagaaatgaaagaagaaaacaaagacaatgaaaaggtcattggagaagaggagttgatgaatcaggcacggcctatttcacatttcacagcaattcttcggtttaatgacttgattaattaaaacaaaaacaaaaaaataggaattgatgccaaaagcgagtgcggcacacgattttttactaagttttaattgaaactgaatttttgcagtccatctcgcaaaaaaaaaaaacaaagtcaccaaatggaagacttgacatgaattggaataggccgcaagataggggacttta

SEQ ID NO: 61896 - DNA, 547 bp, Heterodera glycines
atgtcagacagaaaggacagtgtgacaggagggaaacgaatagagcaggaacttgctgaggacggccgtcctgtttacatcgtcgtattgaccattttcttaaaagggtttttctttttgtatgacttgctcgtctttattccgttcaaattatttgctgatcctgaactgaaaaaggagcgctctcgtgaacaaaaggtttttgaacccatgtaaaaataaaaacaattggaattcaggccgttccgattgatgggaatccggcttcaccatggcgacacgtcgacaccattggcactgctctgtacaccgaactttttgaggactgtccgacgctcggcaaaatttgggacaaagcggcagagtgcgcaattggcctttatttaaaaattcttttctgtttaaattaaggttgcaccgtgggcacaattgcatgggaacgcgcgacattcttgaggtcatccaagaacgacagtcggacgggaaaaccttccagaaattggcacttggcaaatatagctggatggattacgaacatgttgatgaa

SEQ ID NO: 61897 - DNA, 1080 bp, Heterodera glycines
atggacttcacaactaccgacagtgcaacaaacacggatttgacaacggtggacaaggcaacggacgtggatttggcttatgaggacgccgcgacacaaaccgaccaattggacaaacagttgaaggagcaggaacaagtgatcagctttcttcgacagcaggtccgcaacagagacgcaatgatcactgcgcttcggcggcagttggaggaaaagatggcaccaccgatggagacaccgaccaccagcaaaagtgagtgaaactaaaatcccctttttatctttttcaaataattttctctttcttaattttagcaactccaacaggacgaccaaagatgaatgtcgatcatttgcagcgcacctcacgtcgcaaattggcagatcaaattgcggatgtaataagccgcgacagatcacgttccgccagccgggcgtccctcgaagggatcagtcgggaagttcggcacaaatttgctcattacacgccaaaaaagaagaagcaacaactgccaagacaaaacgattcagtcgacccagaggatgctcttctgatcctcgggcttgtcggtacacagaaggcttacagacgactaaaaggcactattcgtctgatcaatgcaaaacttgatgtgtttccgccactcaaaaaagtaaaaacatattttagcattttttatattatttaaaaattccattgattattgttaggtgcttgacatcaaacgccgtatctgtgggccattgcaatacgcaccaattgagaccaatgtgggtgttggatttgtgtgcactgatgttggggcagctttggaggcgcgtcttttgtctgccaaagacaatctgatcacctttggcggcgaaatctacatgaagctgagcggcgaccatggccagagttgtacgaagattaccatctcattcagccaggctgctcggtcaaattcaccatcaaacaatttcgtctgtgccgttttccccgcgaaggatagccgagaaaacttggagcgctatggaggcacactttgggaacaaattgacggaattggcacattggcggaaaagcgagtaaagtggtaa

SEQ ID NO: 61898 - DNA, 112 bp, Heterodera glycines
atgattatgaaaggaggtaaaaagggaaagaaaaaggcacccgttcaaagagtttgccggaaattcgctcgagtcgaaaacgcgaaagaatgccgtggaaatggacgaggag

SEQ ID NO: 61899 - DNA, 1146 bp, Heterodera glycines
atgtccttgagattgttttattgtccacaaatttattcccggtttaagtgcacatttattttcttattgcttttccttatatgtaaaatattcctcaaaaaatgggctaatttaaaatagcttaaagcattaaatatgtggacatgaaaaatggcataaattttttaaaaatttagcgcatttttttttcaaatcgcaaacaatgcttctcctcattttattcccatgcattttcccccaaattgcttctctcaatttcaattggtggcatcaacatcctcaatcgaggcatcagtcgataaaaaatagtaatttaattttattatttattattttaattttaattaaaattcaaaattaaaaattcattgtttatagccatccaaaaatgctgccccaagtatgaaggaacatcgactccaatattttgctgtgtcgacgaaatgttcgacaaggcaccggaatttccccaacagatgtgcaaggacgacaatgttgaaatggtaaaaaaaattatatttaattaaaaaataaataaattataaaaaatattaaaaaagttttcctaaatttgtgagatggtaacaaaaaaattaatttgtatttaataatatttgtttaaaaattattttagtatttaaaataagaaacaaaaaactcatagttttatttttcaaaattttttttttaaaatatttcttttaattaattttcctgaaaattttaaaaagttttttatgtaacttgtatacatatatcctagaaaaattaattgtaaaattgaatttgctcataaaatttaaataagaaattaaaaaaataatattttttattttgcaaaaatattttttttaattttttactttaataaatttctaaaaaaactaaaaataaataaatgattattaattaattcatttattgttttaatttcctacttatttatttaaaaatatattttgtaaaatttatttattataattaatttttgaaaaagcattaaaattatttatttatagtttttttaattttaagacaaccattttcaagacgataagttgtgcgcagactgaattccatcgtcagaccggccgagtacatccgccgacggacatttgccgtaattttaaataatttaaattaaaa

SEQ ID NO: 61900 - DNA, 1103 bp, Heterodera glycines
gtttcgttggtgctgcattgaattcaattgttctgttgatcggactgcttaaagtggacactgcggataagccaagacaagtgggaaaaaattttgattttcaaatttaatcccacccaactcattgtgatcagctgagaaaattttgaaatatattttaaattaattgttttaatttatttaatcccatcccagatcattgtaatcagcatgactttggctgatttattgacttgcctattttacatgctgaccagaccatataagtttttgttttttaatttaaattttattggattgatattttattttccaaactaaattttaaaaccattccccttaatcttcacagtttttttatataaatgtcaaaaactaatttttctttcaaaaattacccctaattaatccccaactattttcggcacatgttgtttgttcatcaaccatatcaaaaaaggtttttggacatttttctgacctcgagactgggactcaattgtcttggacctgtctttagtaactttttcggaattttatcaataaaatttgaatttttcaaaaactttaccaattttaattttccaaatttttacacatcaatcggctgccggcctcactttgtcacccttattatgtgtgcattgtaactcctcaactgtgcagttgcctatgtcttctgtggattaacgtaaaacttttttggtcattatataattcggatttaaattttaaaaaccgtcaaaataattacaaaaatttaaaaaattaatttatttgaatgtaattaataaaatgccaacattttcaactaaaactgaatgcaaagagaaactgaaaaatcttaaacattcatgttttaaaaaatcgcctaaatttatttatttttttgatttttgaaaataaaaaattgaaaattgttgcatataaattttaatgaaaattattttttgtaatttcaggttgacaaattgattttcattggccgtcctctgcactattatcagctggtgaagcgcgatcgggttctcattctgattgcattgtcatggctttgtttgatcagtttggtgatcacactttactcattcatggagattaaa

SEQ ID NO: 61901 - DNA, 719 bp, Heterodera glycines
gaatgtatctgtgatattcaaccaattgcgtcggttggaatgtttttgaacggttacacgactcccctcttcggagtgtttgtcgaactgcacgactggagagacacccggccaattatgtgttgttcaggtgggaagaaagcactgtttaaacggacttacagcatgagaatcatttcaaactgaaagaaaatcaattctttaataagtagacctgctcatggatatattttttattttagaaaaggtcagttggccacttgctggtacattcttctgtccggatcggtgttcatgtgggtattcgttctttatgttcttatcccaattgctattgactttaattttctaaaacccaaaaatatacactgtacaacgggatttattttttaacgaattgaaaattccataaaaattaagatttcacataaatttggtagtttttgaaaaattggacagttttagacaagttattaattaatcactattttttaataagttttgattagcagaggcaacataaaataatccctgaaattttcaggaacaagcaaatctacttgcccattggatggtatgtctgttttggattaattgatattatcttcatttatttgtcaatgctcaaaattagtcttctttttttgcaaacttccgccccgttttcaccaattatttttttgaaaagttcaaaatggctacaaattcgtgctatttag

SEQ ID NO: 61902 - DNA, 591 bp, Heterodera glycines
atagattgaaaattaatgactgagcgtgccactaagtctggtttagcggctgaggcccaacaaaaaattcacagcaaatttgacttggaattatcgaaacaaatatttggatggatttctcaagtcactggtgaatcttttactgtcagtggcgaagtggaagaatttttgtctaccctcaaagatgggactgttttatgcaagtaagatgagcataatctaaaacaactaaggcgagatgaaaaatggataacttaatttttaaggctcgcaaatgcgctgtcgcccaattcgataaagaaaataaacaccagtaattttccattcaaacagatggaaaacatttcattctttttgggttttgctgaaaaatatgtgaacaaaagtaagatgtttaactaaaccatcaaattaatataattcaataaatcagaaatcatataagaattctttccagctttttataagtttctactttcctttatcaccaggtgaactgttccaaaccgttgatttattcgaagggcaagacccaaattctgtgctcatttgtctggctgcacttgctcgaaaatcggagaaatcatttgg

SEQ ID NO: 61903 - DNA, 60 bp, Heterodera glycines
agagcccgtgaacagctgcatcggatgcaagtaccgccgttgctgtacgcctaacagttg

SEQ ID NO: 61904 - DNA, 57 bp, Heterodera glycines
gagagcccatgaacagctgcatcggatgcaagtaccgccgttgctgtacccctaaca

SEQ ID NO: 61905 - DNA, 714 bp, Heterodera glycines
atgagccaatgcgttgcctagtactataatttcattcgttatttttaaatattttattttataattaaaaagtttatttgtattcataattgtgaccgtcccatttcagatatcgcacgatttaaatgaagatgagagacaatatgcgctgaattactgccaaatgcaaaagcaacattatttggcaccagaagaggacattccatgggacaattgggcgcgaaatgcgcatcagccgatcacttattattaccacgcggtatttttgttttatacactttcttattgctgtaacttaattagcttaactcatttacaacagttaccttaattattttcgaagtcatcaaaaaaattcacaccgaccgggaaaattgttagcaatttatgttttattttaagtttttttttagaaaaaattgtactaaatttataatgtcaaatgaatctttttctggtttgaattattaatttatccaactgttttatttaattattgtattcatttagtttttattctaattatttttttcaaaattaatttattttaaataattacctaatcaattttttccccatttggtgggtgcccgctatgctgcttttgcaagcgattctcttctacctgccaaattttatttggaacctccttaattcaaatagcggtaagtcctaaaaaaaattggccaattctttattaattttaaaaataaa

SEQ ID NO: 61906 - DNA, 1192 bp, Heterodera glycines
  unsure (1)..(1192): unsure at all n locations
aaggcggatgtttatgcgaatggcagcgttttttgggaaccgccggttcggtcctccgtttctttgtccaccgaccggtggtgttcttcaggtggtgtacaattcgatgtgtgccattgacatcaaatggtttccttacgatgagcaggaatgttacatgaaattcggttcgttcactttccccgcccctcggctcaaagtccattcgcaatttttaggctcatggacctacggcggatttgaacttgacatggtccacgtgggttttttcatttgccctttttgttgaaactgtcacgggcaaatgttgcagttggacaccgacgtggtggaacacgtcagccaggagaacggcaccgtttggaacgtggaattgggcgtggacatcagcgagtatcaggagtctgtggagttcgaattgctttctgtatgcttcgctattagcttacttactatgtgatatgatttgttgctttccattcttaaccaaaaggtcaccggaaggcgtcacgagaagcgttacccatgctgtgactacccgtgagtttcaaaaaggcattaggatcagcttaattggcaaagactgtcattggagatcaaaagtctgctgattgcaaatgccattaaatcagcagactgtgaacagaaggcgttgcctttcaaactttgctttgtttgtccccccttttcagagtgatcgacatcacttactttttgaaaattcgccggaaaaaagtaaattgtgcttttgttgtaacttaacatttggcgttgtgctgctttacagttgttctacactgtcaatctgatgatcccttgcgttggcattgccattctgacatcttttgtcttttaccttcccagccaatcgcacaacaaagtcatcactcatcattattaaccactccccctttattcccccccgcccatcgttcattagggtaacttagaaccgggactgactgggaaatcccgggttttctattcccggttccctttgaaagtgttccgccgttccccgcttttctgttctggccaatcacactcatcctcccctcatttgtcagatcaatttgtgcatcaatattctcgtctcacttaccgtgttcttccttctgntggtaatgtttttctctaatttcttcgcttttccgccttttttgatacttcctccttcttttggtctttggtc

SEQ ID NO: 61907 - DNA, 1163 bp, Heterodera glycines
atggctaaaagaactttattacggaagcgagagacaaaaatgcacgccatacgcgtgagaacaagcggtaggagagacgaaccaaaatgcaaaggagacaaaagcccgatgagccaacaaaagtgagtttttcaccaatttttaacacaaaaattccatttttcaaatttcagacgatccacagccgaaccccaatgccgaaacgccaaagcaggacgaagcagggccgtcaacatctgctgcaccggccgaagaagcgatggagtcgccgccaccaactccaggaccagtgccgacgcccgagatggacgaggaaattttggaatttggcttttcgctgccgtcgacatatgtcacaccaatcggcgatttgaacaggacgaccaaagaaaaatgttgatcatttgcagcgcacctcacgccgcaaattggctaagtcctcaaacgtgcatcggaaatggaacatctctcatggccaaagacaatttgccaagctcttatgcattcaggccaaatcccaaaatttcacaaaagtacaaattttgagcaaatcactcccaaatttataaatttaggatcaaccactttcgccaaatgacttggacgcatttgaacgccaaattgaggagttccgtggttttctggcccaagaacaacggatgcgcgacttcctatctcagaaaccgaaggcccacttattgctcaatcatttcgtctcatttgctcggcaacactcttttctcggcttgctgttgttaaaatttctaaacaaaattaaaattggttctttctttaaaaagttataaacaaattaatagtgtcatatttaaatggtcctcaaaaaatgtaaggtcgtttaaatgcataaaattttcaaacttaaattcacaccgaccttgatcgaaaaatagcccaaagatttttttattattctgtgaaatttcagaaaattttattgaattttaaaaaagttagcgacaaaattagtgagtcaaaatttttctgaattttttggttataactttttgtaaatttttgctagattataaaaaattataatacaatggaggacatgtaaagatatcactcaataacaagaatgatttaatttgattatgtttaagctaaattatgatgtagcaaattttgtcaaatttaataaa

SEQ ID NO: 61908 - DNA, 770 bp, Heterodera glycines
atgacaatggaaggtgctttgatcacgaatggaattctcagttcatgcttctcccaaattgaaagccatacaatacagaaggtagaattaagtttgcccccaaaaaacaagaaaacaatatgaaccaaacatatttgttcagctctcattcgatttgctcatgagtatctacaggacattcggctacatgtcaggtaaaatttacatggtttcaatgacactagcatcaattgtacccagctttttaaataaaattttaaaatattttcttggccattccgaagtggccaccatcattttgggccacgtgctcttgcctaataccgatttatacgagattttaaaaatatataaataataaaaagaatggacatttgcagtgtgccctttaaatctgaatccctattatacatataaatctatttttacttaaataatttttttccaatccctaagaattttctgaacggtctgtgcgaacacaagccatcccaggacttgtggaactacttcacactttcagccgttacataatcccatttgccaaatattaacctataataatataattaattgtttgttgttataatatgtgcaataatcttttatcattttttcattttgatctcgggcagcatacccaaaaaacttaaatatcaattagtctctttttcttaattatgttcatatatatatttgtatatttttaaatcaactattcaaatttcaacaaaaaatattattgttattattattggcaatttaagaca

SEQ ID NO: 61909 - DNA, 480 bp, Heterodera glycines
atggccagggcggcaaagtcggagaagtgtaaagaggaaggaacgtgagtgggccaaaaaagcggcaaaaataggggaggggtggtggcgcttgctgtgtatttatacaatccaaagtcctcccatggccccggctcggcttcatctcctccctacttttcctcaacttcccaatgcctttctccccatcttcaccaatttcgtgtattcatttcctattctttgcgcctttgaccacacaacttttgtgccaagaacaatcatttaattttgtcaaatattctgcgagaagccaattaaaatataattttgcattttttaaataattaatccctgtgaaatgatttatgtattagcattgtgaatacatgaatataattaatattcagcgaaaatcgattcaatttattttgttatacacgaatcaaaagaacagtagagcctggccttgaccctggatcctgtccaggccaaacatga

SEQ ID NO: 61910 - DNA, 1391 bp, Heterodera glycines
atgttcatagtttgcgccactataaaaacaaggattgttttttctttattactgctattattaattaattaccctcaatgttttgtgatgggccgacatcgaatcattgcggcagaggacatggaaacagtgctaaatcgcctgcgcccttctgtggaccgatttgatgccaattttcagcgcacatttaacgaatacggacgtgtggactccgtgcgtgaagtcagttcaaaaatttgttttatttttttacattgtaaattattttaaattatttaatttttaatttaattaataattttcttttctttctcccttatccatcagaagggatttctgaagatttttgaccccattttccaattgatttttttgggcaactgaatttcattttaataattttttgatacttggaattcttttttgaaaaaaaaaaagtttggacatggaatttcgattccgatttttaatataaacaacccctcatggccataggaactcaagaacacaaaaaagcagggttttcaacatttttgttacaactttttgcaaacttcacaaaattttggaatgttggcagaataatagaaagaacatttaggattatcccatgattcaagaattaaaaaacccaaatccccaagtgataagccaaatttatttggttttctgctgtttctttcagcttcttgaggacagtgtggtgccacggtttactgtggaggagcacggtcgtgttgattttgtggacgcttttcaacaattgcagttacgcattcaacaattttttgacaccaaaattcgcgcactccaccgtttggtgggcgccgctgaaaaggcggcacaaaaagtggacatggacaaagtgatgggtccaacgttgggcagtgagggacgctgccgggaccaaatgagggcattgaatgccagctcagtgcacaacccaagcatttggaagaaaagcaatggaaagacgaattcgggaatccatgttggcattttggggatgaaagtgcttggggacgataagcaattaggacatggaatattcaagactttttgagagattatttaagcattgattatgattttttgaactatcaatttttgtgcaagcacttggcatttggcacaaaacaggcattctcacacatattaatttaaaatttccatgccatatgcgccctgttttatgtcgaatcgggatattagccaatgaatatgaaatagattcacaaaaaattactttatttttttgttacattgttaatcaattattaaccaccgtatttactaattcctccgggctctttggggttgctgtattttagggaatacggtatcttagagaatgcttctaatacttttggaagataccattttcgtctaca

SEQ ID NO: 61911 - DNA, 1068 bp, Heterodera glycines
atgcagccaatgcggctttgtcgcgcagcgatgaggcacggaacaggaggaaagcggaccggaacagtcgcggatcaatgcgcggtggaagtggccgcagagtgcaagttgaagcagaaaagcgatgattgggtagtgaagcgtaactgctattccatgcggaagcccagattggaaaaactgagtcgggcgcaagcgcggaaagatgtgccaaaaaaggatgtccgtgccgtaatgaaggaagcaagcggagcaatgcgcggaaacgcgagagcgggcgcaggacggaggacagtgcggcggacagttgccattgcatgatagggcttaaaatgcataaatctgagtcacgtttctaatttaaactaattagagaatgtgtctagcaaactaagaattgtgaattttacccaggggaaagcagaatgccgaccaaaggttgggcaagagaattgttattattcttgttgacaaattcggcttcttctttgatgccctcctgctgttgctggtgttgcccgtttgattcaaacccagcggatttgaggcgttctgccaattggaatgggtccacctcatcttcctgttgtgttgtaaaaactgtttttcaaagaagttggaaactagaccactctaaaaattgattgatgcctagaaatctgattttttattagaaaatttcgagaattaagaattttatgttttttagagcccgtaggggaccgcgatccagtcgggattttcccggaatggatcccgacagaatagggatgatgtcaactccagggtcttgattcaaatctcggtaaaactgggatcttaatttcggtagtcctatcctgacttatgccaatccggacttttctaaattccggaatctactacttttttcgaccttggccttcatatccttggcgtatttacatgttttttaattgtacatacaaatcggacttcgttctgaaaatgatgttttgatatgctgattcgatgtcgttgcttcatcaacacaaagccaaccaccagcggtgtgccattcactgctacacaacgtaactgtataataaa

SEQ ID NO: 61912 - DNA, 765 bp, Heterodera glycines
atgaaaattgtcaacaggactgtggagacaatcaggacaacactttactatgcagttgaaaggcgcttttttggtctagcgaatttgaagtaaaaaaaatttaattaatttaaattaatgttatgtcttagggaatatgcgctagccacttttttggatgtgcgattcaaggacaaagtgctgatggaaaattccgcaacttttcgcgctcgagtcaatgtctggatcaaaaatgaagtgaaagaatgtcaagttgaaaatgacttagacgaactacaaaatgaatttgttcgtcctgtcatttcgccccaacccgaaaatccgccagctaaacgacgaatgtcattttttgaacgtctgaaacacattacaggcgcaaacacaacagaacagggtgattttgggtcatcaaccattattttaataacgaatttaaggcttccaaacatcgcaagacgatgacattgaaaaagaaaataaggaatttctcgcgctggaaattgcgaacccagaagcgaatccgttagatgaatggaagaaaattgctcctcgattttcaatccttgcaaaatttgcggaaaaatatctttcagcacctgccaccagtgtcccaagtgaacaaacattcaaagtcgcccgtgatgtttttgattatcgccgttccaaattatcacccgaaacggctgaacaacttattttttgaacaagtttcttcccccagatgaattacaattattgaaactattttcttgtgcatgtattaaa

SEQ ID NO: 61913 - DNA, 894 bp, Heterodera glycines
atgccattttcgactaatggacggatttccgatcgaaaaaagggcacacttttgatggacattgaaaaagtgtcagaatttgcacgagaggaggttgggagcagtcggtacagcgaaaaagtgtacataaatggattgccatgggaaattgaagcagaaattacgaaagacactgatgagaagaaatatttgggattttacttatggtacgatgcaaaagaaggtccaattttaattactattttaaaaatatattctactgaaaaaggtgcaaattaactgttattaaatgctaattaactacgataagtaataatcattaagattcgaattggcgctgcttcgttcattctgccacttttcgaattatctcgcaaaaaaatgggacggagaattcgattgggacattttgtgatcatgtttttgacaaaaaatcaaataatttgggattccctaatttcgtttcgtttgcggtaagtgccaattcaaacaaatattttaatttgacattcgtggaccagccaatattgaagttcatttatttatttgcctggtgtaaagaaatcataacaaaataaattaatttctaaaacataaccaattgaccacgcataaacaaaaattaaattagatgatttaaattaaggaattgatggaccttaacaatggtttttacgacagggaagaagacaaagtgaaattgaccatcgatctcacaactgttgatgaaccaaaagtggacaaattcaatttggatcaaagcaattcgaaaggcacactctttatggaaattgaaaaagtgtcggaatttgcgcgtgaaataattgggagtcaacgtaaaagcgaaactgtgcacatcaaatgattgccatggaaaatattggcacaaataaa

SEQ ID NO: 61914 - DNA, 870 bp, Heterodera glycines
atggaaggcacaactcatggaaaatatggcattcgcctctcatatttgtttaggtatttcttcgctgaacgaagcggcaagaaattgccacggttgcgcaatgaaaaatggaaactttcggaacgttgtgaaatcggtgagcgtaaaacggaaacaatgccaataattgccttttacaaatcactaataacgggattggatcattcagctcgaattattttctccctccactttatttgtttataataaaatccctaatacaacattttagggtttcttttttgcggggaattctccaaaattgaaaaaaatccctgaaactcgtcaaagttattaaccttttttcagatatcagttctttgaacgccgccattgacagtttggagcttttgttggccgagttggagccgaacaaattccaatccgaatttggacgcggaaaatacgacctaatcgcatcaatcatcgcccgactgcgcggagtgtacagcgatttgcagaaatatgtcaacgaagactttctcaaaagggtgtgccaaattaacatttttgaatttctttaggagatatgccattaaatgaatcactcatctttgcataataaaaaaatcataaatttctctgccaaatttcctgtttttttttttgcaggtgtccaccgaggacatcgcacggtcggtgtggcacgcgaaaagcattatgggctgtcgaactggcggggccggcactttgtcagtgctgtcggacaactctttcatttcggcttatgacgaattcgtatgaatttgtttttcatgcttttgtgcttctacttaacatccactaaaaggaacgctataaacaatcaacagcaaaagggcgaacttaata

SEQ ID NO: 61915 - DNA, 648 bp, Heterodera glycines
gattactttcaacactcacatgtccaccaattttgtccagcaccgactcgggcccatttctgtgcacttcgtcaatcagttgttgctggtcggcggcgaacagtttgttcagcgactgtttggccgcggtggatgaaagaccgtggagcagcgcgtcgatgagcacggacacagagttggaggaggagtcaactgagggggaaaattttaaaaaatccaaggggtgaccgaacaagcgccaaaaaccctaaatcccaggacaatcgctagtagagaagtgaaattaacgcaaaaaagatttattgttttaaaaaccaaaaaaaatagttaaaaattttaattatgtctgtctttcccgtccccatgtcgtccccacacaccccgattttttaaaatttactgtagaaaatttaaaaaaatattgggtttttttataataaaatttcagaaattttttattaccgatttttctaaatttaacgaactgctcccgctttgcccttcccttccgtcacacacctttgccattgtgcagcacagccaggcgcatcgcgttgctcttcttcatgcccttcagcgcatttgccaccaatttgcgcccgtcagcgctgtccaaatcggcgactgtccaaacggtgagccaacagg

SEQ ID NO: 61916 - DNA, 1097 bp, Heterodera glycines
atgagcgacttcgagatcggaatgttgaaagcgatgcgccatgtcttcccgtcatgcgaacactcgggctgcagcttccacatggcgcaagcgttgttccgaaaggccaggagcatgggaatttttaatctgttggacgaatatgatgacgaagcactggttcaaataaaggtcgttcacaaaacatttaggtttttgtctttcattagctcatctgtgtttaattgtttcccaaatcagttctctctttggcactcattccagcagtttacgttcggcacgccttttcaacgattcaacgcggcaccgcttggaattcaaggatggcttgcgtattttggcagaacatacattggcaccattcaattcgagattgatcgcggggcggaggcatatgagccgcaggctgatgtaggacacttccttctgcgtcgcattcgaagcacaactcgtaaatgcgcctcttttaatgaaatttatgaaattttaattttagcgttcagtgtgtcccaaacgtcaataatgacaggtagtgggccaatacaattcggactgcattcgccacaaccatcaactccgacgattccattgtctgaagaaagcagcttacaacttcttcgacgctgggaacaagagatcgtccaacctccgcgcttcccaatctcgttttggaatgtgcacaccagggctcaaatggaaattgagcgaacaaacaacggcatggaagccgcgcatggacaatttgcagtataaaatttctccataggagtatttatttttgttaatttagcgtgaactcaatcatcatccgtcactgagtgatttcatagcagcattcatcaaggaaggacatcgacaaacaactggacattggacgagcagaacgtctccagaagagtcgaaaacgaccgcaacggtacatcatcaaggaacagagtgttgtgcgtatccttgacgaggctgactttgaatcggaagaaggattggcaaacgccttgcatctgctcggactcgtaatgcagggctttgtagaggggcttcacatccgtggaaatgatgagagtgatgaagaaactgctgatgccgatggaaattga

SEQ ID NO: 61917 - DNA, 696 bp, Heterodera glycines
atggcgtgccgatgtgtccggcactttgacgatgaaaaaatgggtggacaaaatgccggagggcaccgacccgaggaaattggacgaacattcgattggggaacagaagttctacgcgaacaaagaggtgaaaaaacaacaaccacaattattccgtatttttcccttaattattcccatgccattttggtagattttcgcccaaaattaccaatttgtcggtgattggccattttaacagcgcattaagggcaacaaaaaatttgtttgaccgctttaaatatttggcctaaaaaattgcaaaaaaaattgattttttccaccccacgcaatacaaaatatgggggggggggaggttcaactaaaagttttgcgaaatggtctacccatgtaaactgctaacgacctttttttaaaggcattttttgggcgcgcttttttcaaaaaaaaaattaaatgagattttgggctaattttttaagaaatatatgtttctgacgggccgctggtgccgataggcgccgccggggaaaattttaagaattattaataattttgttaataaaatagccaaaattttcagaagttttcccttcgccggcgacccccctcgcccacctcttttgggtgcaccccaaaatcacgccgggacaaaatcacgccgccaaaaatttaaaaaaaatttttcaaacttaa

SEQ ID NO: 61918 - DNA, 465 bp, Heterodera glycines
atgtcaacgattcgtcaactcaacgattcgtcaactcgacgattcgtcaactcagccaaaatgcgacgattcgtcaactcagccaaatgtcaacgattcgtcaactcaacgattcgtcaactcgacgattcgtcaacccagccaaaatgtgacgattcgtcaactcagccaaatgtcaacgattcgtcaactcaacgattcgtcaactcgacgattcgtcaactcagccaaaatgcgacgattcgtcaactcagccaaatgtcaacgattcgtcaactcaacgattcgtcaactcgacgattcgtcaacccagccaaaaatagttttaaaaagcagtttcaagagcttttaatggcgcttagcacaattatagcattcttttaggctaatttagaaacaagaacacataaaatcacgacccttccgatgaaatattctatcaaaaacttgcataaacaaatttta

SEQ ID NO: 61919 - DNA, 205 bp, Heterodera glycines
aatgagaaaaaagagataaccattttttggtcaagaattttttttgtttgcgtttcaaatatcgtaagattgtttgatagggccagacaagagaaggcaactgttggtaccaagtttgcggtaaaaaaatgagaaaaaagagataaccatttttggtcaagaattttttttgtttgagtttcaaatatcgtaagattgtttgata

SEQ ID NO: 61920 - DNA, 815 bp, Heterodera glycines
attaaccaatggcatccgactgtaatccgtgccaatggctctgaagtgatggcattggccacaatgttaaagcagcacagcggaggcaaaattggcactaatatttgtggaaaaggcccggattcgaatgtggaaagtgctgcagcgattggacacgcaaaagtattaaaaaattaattaatggcaataaataaattaataccagcaaatgcaaaatttaattttagaatatgaaaattattgaatctaattgctttagtgtttttttgtaaagattaataattctattttttcagattgtacaaatcaaaatttccggggctcctaatggcatcaccaaattattaacgaagagcaaaaaaagattttaaaaaattgccagtttaatgattattgggttcaactctgaaattcattcaaaatttcccggggcccctaattgcatcaccaaattattagcaaacaaaaaaaaattcctttatcaaatttttcttaaaattaaaaaaatgtcatatttattgtttttttggggttcaattcatgtaaatttgatttaaattatgttttataattaaaaggatttggcattgtgtagcggaagtgttgtggcaatgactggcaaaactgactttttgattgacccatcatgtccatcattaatgacccaattggacaatggccacccactgatgaccaaagtcaccggcatcggatgtgccctctcggcgagtgtcgctgcctttttggcactggccaaatcggacgagcacaaacgacgcattgcctgtctaaccgcgttggctgtacgtacttaa

SEQ ID NO: 61921 - DNA, 494 bp, Heterodera glycines
atgaatatgtcaactcatcctggtaaaaaaaacattttcaatggccttactttgtaattcaccccatattcccaggaatgtacgaatttttgccaatgtacaccaattttgagccgaacagaacatacgaactgattggaacttataagcccatcatcaaaaccgacccgccacagttcgagacaaactttgtgattatgcacaaatccgagcaaacgcggcaagtgatgaaatggtaaaaacttagacaaaggtacttttctgttttgtcacaagccttagaattttttcatttagatttttaggggtaatttgaactgctgagaaatgcaatacaattatgattccgactccgtaatgtttgaatgtcctaaccaaatcgaaccatcaaattttttcactcagtaaaagacattttggcgtaaaatgctgtagcttcttcataaggtgctaggacctatccgccatcaggcatatgatgtgtagtaaataaa

SEQ ID NO: 61922 - DNA, 63 bp, Heterodera glycines
ggctttgctttgtgccgccgagcccgactgtatggtgccaattggacagatagggttaagccc

SEQ ID NO: 61923 - DNA, 80 bp, Heterodera glycines; identical to SEQ ID NO: 51817

SEQ ID NO: 61924 - DNA, 80 bp, Heterodera glycines; identical to SEQ ID NO: 51817

SEQ ID NO: 61925 - DNA, 498 bp, Heterodera glycines
atggacaatccatcggaggaatacatggaggaaaatttggggaaagaaatggcacggagaatgggagaaaggcattggaaaaaatgggagaacggagaggaggaggaggaggaaaatgggaaggagccgggagaagaggagggaaaaacatatcggaagaaattggaggaagaagagcaaaaatggaagaaaccgggggaagcgaaggaatggaagaagccggaaaaggaagaggaaaaagtgaagaagctgggcgaagaagaaaaaagccatcggaagaagccgggagaggaagaggaggaaaaatggaagatggggcaagaggaaggaatccgtttccttgaagagtccgcggcatcgtcgtcaacagaacgttccgccggaagggaaaagaatttaaatccctttgaggacacaaaatttgacgaaagattccccattcacaatttgtgcggtccatggaattccggcagacagacgagcgattttgaatggtaa

SEQ ID NO: 61926 - DNA, 894 bp, Heterodera glycines
atgaaaaagcaaaaggaggaaaggattacagcagaagatgaggaaaagcagatggaagaaggggagaaagaggatcattattattatcataatcaacaaaatgatggaacaaaaacaatggaaatggtaagagaaatgatgggaacagaaagagagtgggagaggaagaaagagacagtgggaaaagagacgaacatttaaagagtaaattgatcagagagagagagagagagagtggggtagagagagaaagacaaagagagagagagaaattgagatgcaaattttagagagaattgatcagagagtgtggaagagcgaaagatagaggagataatgagagacgcacacttaaagaataaattgatcagagagagtgggggtagagagaggaagatagagaagatatagggagtgagagagagagagagagaggcgcacatttcaaatatgatccttttttgtaattctaaattaatctcaagaacaacaacgcccatgccgcgattcggaagcgtggccaacccaaagggacggcggttctgccaaaaagtgccgtttcggcgacacttccgccaaagacggaggcattctcttcagctgaatttggcacaccctcagaaggaaaaaggcgccttttgtgcagaatgagcaacattcgtgaagagataatgacgaggatgggcagaaatcattcggaggagggcattttgatgggattgggaataatggagggggaggagggaatggcaatgccaacgaggaaagggggaggagagggacagggggaggaggggacgagcgcaagggacaggcccaaccccggcagagggggaaggcattgccaacagtgccaatgggaggacgaacggcgcggcagggcggtggaccaat

SEQ ID NO: 61927 - DNA, 535 bp, Heterodera glycines
atgcccacagtgcaaaagaatttacaaaagtgcgcaaagattggaggggcaccagcgcatggtgcaccacaattttgtcgccaaaatgtcaccggcgaagcgatcgatcatttcgccgagtgagttcattggggacggatcaaattatcagactaaagtaacaaattcagaaaagattgccaaactgatgagttcgttttcatgtcacaaatgcaggcgacggttcgcaagtcgcggagaatgcgacgaacacggtaaaagagagcactgccaattgagtaccgacactgagccaaaatgcaacaaatatttagtcctttcgcacatccgctcggggagattgaagcaagaggaagcggaagacgaacaaccgcaggaagaggaggaggaaggaggggagagagcaccgcaagtgaagaggccgaagatggaggaggagggcgaagaggacgaagtggcggaacaacaccatcgggaagacggagtcagagaagtgggggaaaagacggacatcgccggaggagtggaggaagaa

SEQ ID NO: 61928 - DNA, 422 bp, Heterodera glycines
atgatgacgcgagtcaatcgaatgatgcaggattttatgagccgagacgagaaggccaaacaagtcccgatggtgagttattctctcaccaaattattttattttaaccccgaataatgtatttattgtgtctcttttattgttttttttggttttaaataatcccgttggcccttgggaaaggcataattaattatattatattgcaataaaaaaattttaacattttattcccattgacattttaaatttacagaacaagaggagggtttaatgtggggtgtgtgttcatttgttaattgtacggtgttgcatttcacaaaatttcaaaatagaaatcgttttcaaagcagttgttgaaaattcgcgattttaaaggcatcaataattttttattataagtattattagagtattacaaa

SEQ ID NO: 61929 - DNA, 833 bp, Heterodera glycines
atgtcacaaattttgaatgaaatttgcgatgaaaaatgcgctgacccacaaaatgtccaggccacgaaatgtccaagtcttgaaattgagttttttattattcggatgggcctaaggttaggcaaggggtaatataaaggctatattcgtattcagcgaccccgaaacccctaaaaaccccaaattagactcattttgtttttataaattttgaaaattttggacatttcgtgtgtttttactcttgtggacatttcgtggcatggacattttgtgggggcgccctccattttatttagagttccggtaaaaaatttttccatgcacgggaacgggaaaacgaaaaagaaagtttataattccaaattcttagagaatttttctatattttcaatttattgacaaattttttattgattaagtctcttttttgcggcgcacctcttacaaaatctttagtggtacaggagggtcaggtggtgccgataggggtcgccggggaaaaaatttgattttttttgtgaaatctgttaacagaatttgtccaaaaaatgaactatcatttaaattaatttataaaaaaattaaaaatctccaatttcagtagggaattgaacccaagcgacaaataatgaaagacagaattttacagggaacgggaactggaaaggtatatgaacagggtggaattcccgccttttttcccgttcccgtaaaaatctcgtcaggcaaaaaagaccgaaacgggattccctggttttcccgcaagaatgccgttcccgccggactggactttaattttattgcacaatttattttttctttgaattaaa

SEQ ID NO: 61930 - DNA, 869 bp, Heterodera glycines
cctcgttttttgatcgcccccagcttgacatcattgctccttcgaatacgatgacagttaaacaatggtttgttcctcctttatataattaccattaaataattacgtaaattttttatttttttgtacttgcaaatattattagaatcattttaaaagaatgctgttttttatttattctattcatttttagccgagatatttgcccacaaataaatgttttattatgtttattttaaatatttctttcactttgttattatatttcattatagacttatttatataaatgaattactttgtttaatgttttattatagctatttttatctaaaaaattagctccatatttttaatatgcaatttgttgcctaattttcttgttatttagaaaattgtgccgactattttgagtgaattctaattttattgcaatttcctccggtttttgtgataagcatatcggccatggtccgattgtatctttcaccgcttgacgactagtgatatggtagatgtctggtgtttgaatccccaaattttggctagagattcaaatgttatgttcagaaaatgagtgccacactcagtgacgagtatttttggtagaccgattaagctggtattatatttatttattgtgaatttcaatctctaacagataaaattatttattaagaatatattttaataaaaattttattatttgaatttttcagcaaagtatattatttatttttatttgatattaatgaaatcgtacaaaatttattgtgctcacgcggccagctttgactcatcatttttcatttaattatttacattaaatttgataatatctcttatttaaaatatttatattataatta

SEQ ID NO: 61931 - DNA, 1000 bp, Heterodera glycines
atgtataaaattttatatttttctcctagtcgttcccgtcgcaagggcgccgatttggccaccggtgggcgcgacttggcaccccagcggggcgagtcccgtgccaacggcgtgtgtcccgtgccggacaccaacggaccgtccgcgtgcacatcgtctggacagaaaaaggcggtgcatatcccatcgttttcgcaagtatgaaaaaatacaaaattttcgcacaatttttcgacgtgggtacccgaaaaaaaaaattttttttttttttggttgctcttatttagtctatttttttgccattataattttccaaatttaaacaccgcggagaaaaatggcatttttgtgtcaaattcttaaaaaatccagggaacttagtcgtccaaaatggtgccaaatggcgcagccgaggaaaatttttgcaaattttcagttaaattaaaaaaaaaatccatttttcagtccggctctgctcaatcggcacgaaaagttgtccaatcggtggacaattgcgtggccgactctgttgacgaccaaatgttggacaaattgtgcacattacctaaggggttggaccgacacgaatggctggcatcgcatggtcaaagcattttgaaaattttctattttttacccaaaatttgttatttcccaacccggcatacaaaaaaaatgcaaattttaggggagggggtaaatggaatgcgtaaaaaaaattttcaaaatcctataacttaattttttcctatatttttagttttggctttgttcgaacatgtcaattgtatcagtgccactttgtctgaagtgtgcacttcgatcagctgctcaacaatgagttttccgggcaattcgttagttttttttttaaattttatatggataattaaagggtcgagaaaagcgaattcttctagaggatttttcaaacaccaaacccccctgaattttaacctttttaaaatccacaccttacccctaccccaaatcaaataaa

SEQ ID NO: 61932 - DNA, 678 bp, Heterodera glycines
atgacttgcggaaatggtcttccactgaagtgagaaaagccaaagataaatggaaaagaatgatcagtgatcagtgaatgaccgttttggtttggatttggctgtactaattgctaagtgattgtttcccgcccccaactccctgcaactgtatgagtcaactccgtcccggacagcttccaagacgccaaaatgttgtttttgaaagggttgcagtcaggggaagcggggacgggcggatcccaaggattttcatccccttccccattttcctatccccgcactgaatccccgccggggacggggatgaaaataaacctaaagatgggcttggcgaccaaaaaaaaacatcttttttagagtccggtaaaaaaaaatttccgggagcgggagcgggatcgggagttcaaaattttccgggacgggagtcccgaacgggattcccgtaaaaatcccgctcccgttaaaatcccgtccatttttaacgggagtcccgggcgggagcgggagtaattcgaaaatttaattaaaaactcacaaaaatatttttaatgcacaaatttaaagggcaatcaatttattaaattaaaaatatagaaaaatttataaaggagaaatttgaaataaaaaaatcttatttttgagtcaaaaatcagaaaattttttcaaattgcttaa

SEQ ID NO: 61933 - DNA, 2199 bp, Heterodera glycines
atgggattattggataagataatgcagaatgaaacaaaaaaatgtatcgggaagtattaatatattgtcagaggcgaacaattgccgagagatcagtcctctaaaattggtaaattttctataaatgccatttcattatgatttaatttggtaattttgcatggttttattctaagtgaatgggaatgagatgagagtagttgttcaacttttgtcggcgtctgtcctaattttgcaaaaaactcatttccgtttcccaaaaagacactcccctaagaatacattgcaatttttaaaatatatccataagatttgaatttttcgtatgctaagaattccaaaccaaaaaaattacataaaaattaacatttaaaaataatttcttttcccaattaatagtaaaattgctgaaaaacactaacgattatttgggctcaactgaacaattggatgagaacgtgataagggcgctcagaaaagcatatgcggaaaacgaaaaagtgatcaaagacgcgataattaatgataaaaaattggtggcacaaaaaagcaaaagcgatgacaaaaaaatggaagagagggcaacggaacattatgaaaagttgaaggcatttttcgatgatcccatcaaattttacaataaattggacgttaaagtctttcaaaaattcaggtaatcattaacacaaaatttagaatttaattaatcaattatgatattgcggttagcaatttagaataaaaccgttaaataggcacataaaatatggacccaaatcatgaataattaaaatttattagttttgaagcgaaaaaatgaatggcaaaatttcaacttttgcatatttttgacccaaaataccaattcataagaaaatgaaacttaaacatattcttttagaattttttaaaatgatttttaagaaaattttcctatatcaagagccaaaaggttaatttcgcggatgagagccgttcaaagaaaaattcaataaaccaaaaattcttaatcatttttaaataatttggccatttaaaaaattcattaattacacagagaggtgatgggtgtggtcaatgacaaagactcaaacgaagaattggccgagttggacaccgaacagtaccaacaatttctgctgttcctggagaaccctaatgagtacttggccaatgcaaactttgacgacactctcaaggacaccgtaatggaagtgttgaacaagaaaagtgaactgctcagcagtttgactcctgaacaaattgtgcagctaaaagaattcaaggacgcgttgaaaaatgaaacgaaattccaaggacaattggacagcgacattttcgccaagtacagaaaaacgctgccagcaagtgcaaaaaaagggatcaaagagcgtaccaatgaattttttgttgtaaggaaaaaaaaataaacattgttataaaaaaaaatcattaagaaacttgaaaagcggaaatgccaatgaattttgagttcgaattttaaatttttcagggcaccaaattgcgctttttattcgatgagcttaaaacggagcgtcaatttgatcagctgatgcgcttctttaagcatccgatccgattctatcagccacgaaacattgaacacaacgtttggaaggtagtcgaataaatttaaattttgactggatttcaatcacggacaaaccgtgatcatggacccccaaaaacggcgtgctccacctgatcagtgattttgcagcaaaaagggccaatttgaggggtttttgggttgattttaaaaatcttaaggaagagtgtgctagttttatttaaaaattttcattaatctgccccagcaaatttgtgactgacctttctttgcttccagccattccgctcgattctcaacaaaattgtagaccaaaaacagcaagacaaaatgttcgacgggctcaactatgagcagctgatggaactggcagcaaatccggccaaccgattcgcaccgagcgaaatggagggggacaggaagttgaagaagttcaaggaggcaccaggagttgacccggaggtgttaaatctctacacaaggcatttaaagcggaaccaaagttgcgctaatgtgaagccgttgattgaattggcattgtacggaatggaggaccggcagaaggccagcttggacttgaggggacgactcggtgaaaattgaataaa

SEQ ID NO: 61934 - DNA, 1652 bp, Heterodera glycines
atgagagaatactttattttcctttgttcacagatccacgatttctttgatgacccggccatattttatcttcgtggcgacaaattggacaaaacaatgaaaaaagcacttagagaaacactgatagaaatgggattattggacaagataatgcagaatgaaacaaaaacatttatagaaaagtataaaaatattgtcaaagacgaacaattgaccaaagatcaggcctataaaattggtaaattttctataaatgccatttcattatgatttaatttggtaattttgcatggttttattctaagtgaatgggaatgagatgagagtagttgttcaacttttgtcggcgtctgtcctaattttgcaaaaaactcatttccgtttcccaaaaagacactcccctaagaatacattgcaatttttaaaatatatccagaagatttgaatttttcgtatgctaagaattccaaaccaaaaaaaaaatacataaaaattaacatttaaaaataatttattttcccaattaatagtaaaattgctgaaaaacactaacgattatttgggctcaactgaacaattggatgagaacgtgataagggtgctcagaaaagcatatgcggaaaacgaaaaagtgatcaaagacgcgataattaatgataaaaaattggtggcacaaaaaagcaaaagcgatgacaaaaaaatggaagagagggcaacggaacattatgaaaagttgaaggcatttttcgatgatcccatcaaattttacaataaattggacgttaaagtctttcaaaaattcaggtaatcattaacacaaaatttagaatttaattaatcaattatgatattgcggttagcaatttagaataaaaccggtaaataggcacataaaatatggacccaaatcatgaataattaaaatttattagttttgaagcgaaaaaatgaatggcaaaatttcaacttttgcatatttttgacccaaaataccaattcataagaaaattcttaatcatttttaaataatttggccatttaaaaaattcattaattacacagagaggtgatgggtgtggtcaatgacaaagactcaaacgaagaattggccgagttggacaccgaacagtaccaacaatttctgctgttcctggagaaccctaatgagtacttggccaatgcaaactttgacgacactctcaaggacaccgtaatggaagtgttgaacaagaaaagtgaactgttcagcagtttgactcctgaacaaattgtgcagctaaaagaattcaaggacgcgttggaaaatgaaacggaattccaaggacaattggacagcgacattttcgccaagtacagaaaaacgctgccagcaagtgcaaaaaaagggatcaaagagcgtaccaatgaattttttgttgtaaggaaaaaaaataaacattgttataaaaaaatcattaagaaacttgaaaatcggaaatgccaatgaattttgagttcgaattttaaattttcaggacaccaaattgcgctttttattcgatgagcttaaaacggagcgtcaatttgatcagctgatgcgcttctttaagcatccgatccgattctatcagccacggaacattgaagacaacgtttggaaggtggtcgaataa

SEQ ID NO: 61935 - DNA, 1184 bp, Heterodera glycines
atgcctaaagaagtgatcaaagaaaaaaatgcgacgaatggagtggtgattgatcagcgggcgggaaagaaagagatcaatgttcaaaagaagccagaagccactgatcagagcaacggcctggacaaaccaaaagaagcattgactgatcagagcaacaaaaataacatcaacaatgaacagccaaaggcattggaaactgatcagacgaagcaaaacaaagagactaatgatcaaaggaccaaaacgatcgatcagaccaagccaaaggaagagattaatgttcaaaagaagccagaagttactgatcaaagcaacggcctggacaaaccaaaagaagcattgactgatcagagcaacaaaaaagagcatgacatcaacaaagaacaaattaatgctgagaagatgctaaaggacgtgatagctgatcatggaaagctaaaggcattggaaactgatcagatgaaaaaaaacgaagagatcgatggtcaaaagaccaaaatgatcggtcagacaaagccaaaggaagggattaatgatcaagaaaaaccgaaggcgaattcaactgattttatgaagccaaaggaagagactaatgatcagaaagagccaaaaacgatcggaactgatcagataaagccaaaggaagatgctgccaatacttcggtgaagtctaaagcagtgattattgatctgggcgatcccaaagagaataatgtcaacgatcggaagaagacaactacggatgataaagcgccaaaagtgatgccattcgcccaaactgagaaatcattgcacaaaatcaatgaccaaattgatcagcggatcaagccgagagaagaaaaccgggaccacattaagcaaagccgtgccaacactgagcatccattgcccggccaacggatcaagcccacaaaatgtacaaaaatatttttaaataattttaaataaattatttgcttttagtcagaaagccattcgatccgttatcaacagtggccgacactttggagcggacaatgcttggcgatgatgatcgtgatcagcgccaggaaaaatcacgattcgagactggtgtcgggaacgtgaacaagaatgggatcatccctgatcaaattgcacatttggagcgcatcatttcggccgtacagcgcgtgatgggcttgggaagtgagacaaaatga

SEQ ID NO: 61936 - DNA, 854 bp, Heterodera glycines
atgttgctggcgattgactacgcaaatacgctgaaacccatcgcggatttgcacttggcggaaagggtgagaatttgtaaaattcaaaaataaataaataaatattcatttcctaaaaagcggctcaatgaatgtttttccaaattccctcctaaaaatgccctcgttttcagctgagtttgctccgctccactgccatgccttttatggtttttgcggtggcgtgccaaagttcgtttgtccatcgacccgaccaaattctgctcccgaacggactgtttgtcgacgagcgtacgccgctgaaccttctggtgcctccgctcagtcattgccccgagtctttgcgctggcgcatcggcgcaattcgctcggaatggcttaacactttggtacaattcaacagttaataatcacattgctaattggttttggttatctgagggcaaaaaatccctcaaaaattgtttaataattatttcaattaaaataaatcttattttgcgctttcagcaaccgtcgctggaacagctgtcgctgacggaggtggaatatgtgacactgaaggcaatcgtcgcgttggacgcccacacgcccggcctcagcagtgaaacggtgcgtctgctgaacgtggcgcgcgacagtgtgcagaatgcgctgtttttgcatttggtaggaaattttgacaaaatttattttaccgtattttctaaaaaaagagccctggggcacttctacagtatctttaaaccccccccccccctctctctcaaaaaggaagggggcttttatttcagaggagagggagggggacttatattttaggaaatacggtataattaattacaataattaaa

SEQ ID NO: 61937 - DNA, 332 bp, Heterodera glycines
atggcttctttttctcccgtttttattgccattttaataatcatttacacttccgctgttggagcgcaatttggtcaatttggcagtttgctaaacggctttggaggtgccaatggcggcgccaatttgatgaacggaatggcggccaattcgcgcaactttgccaatatgggtagcagttttggcggcatgatcaatcagttcaaagggatgggacgaaacttcaaaaggcagttcggaggcaacccttcgcatcatcaccatggaaaatgatggcacccattcattcagtgttcattttgtggctaatatcacacatacatattaatata

SEQ ID NO: 61938 - DNA, 1129 bp, Heterodera glycines
atgctcttcttgcaagcgatgctgttctacctgcccaactggttgtggaaccatctgaaccagcagagcggtaagtcctcgaaaataatcaaaatcgggcaattggaagatttcggtttccattttctcccggaggggtgtggggactgaatttgctcctaatttggcaaagagaaatgggcacaaatgttctcagttctcccattatttttaagtggtaattttgaaaattttcttactattttaagcagttttatgtgaagaatttgctaaattttttcaaatccctcctactgttattatgactaattagttcattaattatttaattgattaattattattcactcccttttcctctccccttttcacaggcatcgaattcaccaaattcatcgaggaggcaacgaagctgaagggcatgcccctggcaccgattgaggagcgccaggagcagatcaaccaactccgggaaaagctgagcgaagccgtgctgaatcgggacccgtaccggcggatcgtcggctgtcgatttgggcaatcgatgggcgcatatgtttcggtgggttttgatggcaacaaattaccattaaatataattatgaatttgccgcgttttaatgagtccaacaatcattcgatgtttattgtgtccacgcccgcgtagacaggggaagggggggggggattctcgaccccttaaacgaacaattaaaaatttttgccagaaaaatggcatttaaaaaaaattttcttataaaatgcattaaaatttcaaaaatttctgccggcgacacctattggcatttttgaaatgtttactcaaaatggcaaaaaaaaatcgtcactttttctcgaacagcggttactaattaatgtttttttttctcttcggcgctgaaaataacttataatttcttgaattttctgacatttctatgcccccttgtttaatctgttcttttttcccccggttcagctgctgtacgtcggcataaaggtgctctacctgggcaacgtggccatgcaattcttcgttctgaactctttcatcggccggaattaccaactctgggggtacgaagtgctcaaggcgctgttcaacgggcagaattggcaggtgaattaa

SEQ ID NO: 61939 - DNA, 2763 bp, Heterodera glycines
atcagtcccatcgcccgcttcgcgttcagtgatctggtgatcactgtgttgcgtttggatttctacaggacaggcgacccggaagcgatgtgcgcgagaggggggggggggtcaattttatgtaaagcaccgctttttgaatgcttggcaaattttggaccggaatgcacattttaagtttactgacagtgcctgaatttcaattagcaccgatttttggatacatgcaaaaatagggccgaaatgccattcttagtccggtatttaacgcgtttttaagttgtgattcggtttcaaaaataaaaaccatacaatttgaatgccaattatttttgaaccgttattacaaaggccaaaagacgatttaaacgtttataatctcactgatttatgagttttcaatattctaaccgtgcattatgagtttttttttaaattaatttccaaaataaaaattatttcttttttagcaaattttgcaaacactcattggacattttgctgaaatggggtgaactgccggcaaaaacccagcaatcgttgcggcatcgaatcgaagtgatgatttgtgccgaacaaataccatttaacaattgttagcccatttttgatcctttaaggagaaccatcctttcaatgaagacatcggcgcattgataactggtccgactttatctgtttaaaggagctctaaaaatgctaaaatcccaccgatttcataaattttccaaatcattttaaatgtacagaaaaatttaagcgaaattctgcggaaattaagttatcaatcacttgctttgggccagcttctttcctgtacatgctgctatctttttcaaatccgagctaaattcgcggatattttgaatttatcggggtccgatatttaattaatatttactcatctgacggcagttcattttgggttcaaattttcctttatctattgccaatgccattataaaaaaaatgccaaaattttctgttgacagccgtcaagttggaccccgaattgtgccagccccaaggactgctccatctgctcggctcgctgctcctctgtgttctcgttgacggcgactacgacgcgcgtttccgggtgctgctacggcacatttccgcactgcttggcatccactgggacttatttgaggaggtgccaaaagagactgatctaaacaaatttacaaatttccgaatttttccaattaatacatatacatagaaatatacaaaattaaattttctcaaaatgctgggcactcatctttctgcaagtttggcactttcttttttcagttcgagtcaacgctttgtgatcggctgatcgacgaatacaatgaaacagtgtgagaaggaatatttttaaaaaattttctatcaattaatctttaagctcacaaaatttcttttttgaatcatttttacagtgattgatttaattttttgcggggttttcgcttttattttattatattttaacaaataattttttcaaatttatttttattttcattactcagtgacaatcaaaaggtgcgcgagagcaaaagccgtctgaagaagcttaaacggtacgcaatgatcggcgcggcttcgggcctcggtggcattttgatcggtgatcagaaaataggaattttccttttttataattatatttttcaattttccaaggtgtcaccggtggtcttgcggcgccagtgattctgacgagcatttcggcgctcactgccaccacaattttgctgccagccgccgcttcggccgctatttttgggtccgcaattttgaattacaattaaaaaattaacttaaatatgttaattgatatttgaaattaatataaaatggaacaacaaaatttttggaattttttaatgttttaaaaaggtcaatttttaggggaggggggtgggagtgtttcttgggtttttttgtcatttaaatgagcttaagtttgcagacaaaacattaggccggtaaaataagggggtgggtgatctgccgttcattttgagttgtttgagcgtactgtattcttttcaactgtacagttctgtgtttggagctgctggcgccggcctcaccggctaccgtatgcagaaacgggtgggcgacattgaggaatttcgcatcgaacggctgacggagcaggacaatcaggtggagttaattatgaaataaataaaatattttaatataaaaaattggaactccaaatgctgaattttaaacctaaatccggcatttaggaacttcactgtgttctctgcgtgtcaggatggattgaggaccgggaggagagcgcttttcggcaccactggcgccacctttggatgagcaaggagcagtacacgctgcgatgggagagcaaagtgagttttatgtgggtgatcagtgatcagcagagattataatggttcgatcaacgctttttaagatagcaaaatgagtgatcatttggtagctaaaatgctgatcagtcattaaataagtgatcaggaaacaatgctggattcggccctcaaaacttcataacagactaaaagaccataaaaaacaactgctgactggcacttaagacgcagttgttctgatcattgtaattatgcactggacaggacaaatgagtaactgattgatcaaggataaaatcgatattcatttttttcattttatctctgatcaaaaattacaatagtataaactaaaagtcatcgccaactttcccaagcagtacttggaggaattgggccgcag

SEQ ID NO: 61940 - DNA, 2604 bp, Heterodera glycines
  unsure (1)..(2604): unsure at all n locations
tctcctttgttgtttcctatgccatccaacgttcactgatggaaacaatgttggccagcctcgtgtccgccatcgcatggcctttggtgtgtaaaatntaaaaataaaattttttatttttttgaaaattttcactgccaggtgctgcttggttcctcctgtgtcatagacaacccgtggaatatttgcactcgacgtgctcgtcaggtaattaagtgccattttcgggcatttacggccaacaattgtatggaattttgttgcctaaccgaaaacggacattttgcattctgctccctaattaatacaccatcatcagtggaagaagaatgggtttaggtgaaaatgctgtaaaattatatactgggaattacagcttctagaaatctcattttacgatgcttaaagaaaattaattatcatacctgtgaactgattattagggatgcgatttttaggtacaaaaaatcgcgaaataggcacctaaaaaggcagaaaaaaatcgcaaaataggcattaaataggcacaaaaaagcccgaataggcacaaaataggcaaataaaattttttattaacgctttttaagtaacaaagcacgttaaaactttaaatatttcaattgtaaatgaaattattaaatgttttaaagttttttttcgaatatgaacaaatttttaaaccaaaaaatttttattaagaaaaaaatattaaatttagggataatttttttgaaaaattttacaattcttaggggggtattttctgaaattttttttgggtcatttcttaggggtgtattttttgtttttattgcatttttgttaaggattttttcaaaaaccctaaaataggcactttaggcacaaaaaccccgaaataggcaaagttaggcattataaaagtcatcgtagacaccccaaaccatgcggaaagggcttttttcgtgcttatctgtgcgtattaagtgcgcaaaaattttaggcatttgcctaaaaatcgcatccctactgattattaatttttggaatataaaaatgatttatttgatcacatgttttgttcatcaaaaattgaaaatataatttaatggaaaatttttatgttccgcaaaagccctactttttttgggccgcaaattttatgatataagcatccaatccactcgtttattgaatgcgcttaaacccattgctaatttctttcaggtgggtgaacacctcgccgaagtgttgctgacccggcagcacggtcggcgtccgatcactctgatcggcttttcgcttggcgcccgcgtgctttaccattgtgagtgataaaaaaataaataaagaatgttgtagagaaagggacaaactgatcatttttcagtgtttgtcttgaacctaatccaaacacacacattaaatttaggccttttggagatgagcaaacgcatgcctgaatcattgggtagaaataaatcaaataattttaatgaaatttcgttttgcccagcaggcattgttcaggatgtaattctgttgggtgcacctgtttcagcttcgcctcgtcaatggcgtcaactttgttcagtaaatttattttaattatcccattggattattgattgaaattatatttaattttactcacattaatgttatatttgaaatatctttcgtgcggctttttcgttggatataatttttcacaattttcatgttgtcgccggcagagtgatcaatggttactgtaaaagtgattggctgctgcgcttcctttaccgtaccatgagcgtccaatttatcatcgccggcacgggtccggtggacaatcgaacggagcgcaaaattgtcaacttcaacctgtcgcacattgtgcgtttgtcatttttttgcaaactttttgaaaattatataattttcttatcacatatttcataaaatttctaaaatttcccggcggcgcctatcttcaccgcccgactctattgtatcacattttgattttacccctttttggcgcaaaacgatgcaaattcttgtttttcaccctggcgctgaaaattttgaaaataacatttgagataacattttgttggccgaagagcaaaaaaaaaaagaagcttaaacacgggaaaatgagactcgaagacaattttttcactaataaataaaaacctaagaaaattctatgaaaaaaattgaaaaaatttaatgacgaattctaagaaatttcaaaaaataaaaaaaaaatcgctgaaaattttttttctcatagaattttaaagaaaatttttctaggattttttttcttgaaaatttcgaagtttgaatatttaaaaaaaatttattcccggctgtgttatgaatttggactgaaactaaagcggggtttttttcaaattgaaacattcaagttttttaaaaattaaatttgggacaattctttttatcattttaaatgaatatttctgaaaaggtcaaaggccatttggactacgcgaaaaagatgacgcaagtgctggaggccgtgggcgtccgttgcacgccgctttcgcgcgcgtcgtgcgccaatttgtccgaggacgcaccaatgcacgcagaagcagaggaagcgactga

SEQ ID NO: 61941 - DNA, 2500 bp, Heterodera glycines
atgaaagcagcaacggctactcggccaatcaaagtgacaattttataaattagcaaaaactgcaccagcgacaatttacaaaaaaatataatattatattaataaaatttatggtttttatctttattcaagctgaaaatcctgctgaaaagtatgcagaaagaattttcaaattgctcgaaagagagggcagtgaagacaacgtctacacggcttatcaaatattggacattcttatttcattgaatttttccacggtaaaattgttatattttcaattttaaaaattatttgaatatttattttcaaatctgaatatgattattagggatgcaatttttaggctcaaaaaactgccaaaataggtagctcagagctctaaaaaaccctcaaaataggctctaaaaatgcaaaacaagcactaaaaacctcatttttagggctgtaaatgacaaaattttattataatagatcaaaccaatattgagataaataattcagttaaaaatcgtaaaattcttgtgaagaaatagataaataattttgaaggtgaatttttgagaaaatttcaattcttaggggtatattttttaaaattttcggctcgattcttaggagtgtattcttgaaaaataatacaatcgtaaaagtagctcaacaaccgccaaaaaaaaaaatgtttttcaagcatttcagatcatagagagctcagtaaaaaaaaattgactaaaacataaaaattgcatccttaataattctataataatttattactcagtaatattatttgtaatttcagtgtcgcctaattggtcaagtgcagcatcacaatgagagtctcattgagagcatccgaaagaaattgccaaatggtgggccaaaagagctcattttgtcgctgctttatgagagtgccatttacgacgcagcaagtctttataatgcaatgatggtaagttaaacaactatttttgtgaaattttattaaaaagatttaatttacctttaatgaataatgtgcggcagtttaaactaaaaattgatttctgctatttagagaccgattaaaaagattattaaatactttatatttttcgattaaggaaaatttttaaacataaattttttataagaaaaaataaataaagttggcaatcctttaaaattcttaggggggtaattattattattttcggatcatttctttgatttaagggaatcggaactgatgaagaagtcctgactgagattttaatctcacgaagcaatgcacagatccgtgccatccgcaaggttgtacattaagtacatgtcataaattagtcactataaatttcattttttgttatccataggcatacgtcgagctgtaccacgaggagttgaaaaagcacattgacggtgacacgagtggtgcttacaacttgcttctgaccaaattaattgctgcaaaccgaaatgaatctgctacagtaaacattgacaaagcatttcaggtggtattttgttttttaatactccgaccttagtggaggtcagtgattatggcgaaaatcattaaaaaccgagcttggacctgcttctgagtcctagtcaaaattcatttccacggctgaacatcatctaaaaaattttgcgaaccaaagtttgccgcctccgcctttttggggttttcaattactcttaataattttatataatagaaattccatttttgttttatttaggacgcaacgattttgtttgcagtgcacaaacatggagtcgacgaagaaacattttttacaaaattgacaattgaaagtcaaaaacaactgaacgagacattcagaagctatgatcgtttttatgatgataccattgaacaggtattttgatttgatgcgaaatgatagaatttgcttcgccgaaatttattttttttttaatttttacaaaaagaatattaaataattatgaaaatattaaaaaatgcatattttaaagacttgtattgttaagaaatttgctgcggaatttggtggtgatgttttgcaagcattaaatgccatcgtacaacacgcgcgcaatccggcacgatattttgcggaccgtttgagcaccgcaatcaaggaaattgatatttgaaaacaaagcattcataagattaatgaatttttgctttaattaaaacgagaatttgtgacatttttcagagccaaaatgaacgtgatctgattcgactggtgatcacccgtgcggagtctggcgacatgtccacagttggagccgagttcgaaagagtgaatggcgttccgctgacggtacagattgtttccgagactgaattggccacaaaactaatgttggccaacttggcaagcgcatacggcggcgatggtgactgggaataatttgaaagaagcaacgtaaaatgcggatgacgggcgatattttcacatggcaatttgaaaatgaaaaaagatgagtttcagttgtcgtctattcatgctttaataaa

SEQ ID NO: 61942 - DNA, 1103 bp, Heterodera glycines
atgaaattgaagtgcccacacacgttggcgaatgtaaatcgcagagacttgcggttttttgaatattgtagagagatttctgctctttccaatgggtctactcaaaattacctaaaaattttccaaagcacctaggaatttttttccaaaaattttccgatctgcacagtattttggggtgtccagatcactattaaggagtggtctgatcaagttggtgtaatatattttttggtcagcatcaaaagataacatagagtaattttttcagaatatttcctatatttaaaattgagttttgattaatggatttagtagaccttttggtctcatttgaaagcccattgaatatgctattgatcggtagaatatacttggcatttgctctttgttaaaagattttattagccaattattagcactgatgctaaacatatgaccatgactgtatcttagggaactaaaagcattgaaattattttaattagcaaatgtgttaagcaaagataaaaaggtttttctgagaatttcacgaattagttaagcagtaaccctaaaacaggcacggaaacttcaaaatagaaaattatatattatcaatttcaaaaaatgtgattttttcagttaatttataaggaaataatttaaaaatacgtttctttttaatgtggaaaaattgttaaagcgcattataaattagtcttactttcatttttatttttacttgtttagctggtcaacccgttgtccttgggggcctacataaggccaatttgtctttcaagccgaacgcttgatttgtcacatcgtcttggccaaatggcaggatgggggcaaattttgaatgaaaagaatgaagcatctgttcccaacaaactccagctcctcaccgtcccaattcaagaaacggaagaatgctccaggttgagtcaattgaaaaataaatttattatttaatataattattagcaatacttttagccgagagggactgaaaaaaatcagttttgaccagaaattccatatgtgcgctggagggcgatcccaaggcggattaccggtagttccacaaaaagaatcacaattatttaaatttaattaaa

SEQ ID NO: 61943 - DNA, 602 bp, Heterodera glycines
atgcatttaattattctgatttggctagttatccctcattttatccatgcaacgttttcggcagttcagcttaacaattgcttaagcaagtgcggtgtaatgcatgacccagtgcccgaaattgaagaaacccgagtgagtcagaagatattttattaggattttttgaatgcgcggcacgacctctcattcctccgattttttagtccatgggcggatcggggtctcccgctcattattcgccatggactgcgctgctgttcttcgaaacaaaatgcccgaataacgaacacattgtggaccgttgcactggattcgttgtttcctcgactcttctactcactgccgctcactgtgcctttttgaattacaccgacatgctcttgagatgcaattttgcagaggaaatgcatgaaaatttccactctcagtggtataaaaaaggaatttaaattttaatgagatacaataatcagggctaaacgctaaccaagctgatttctataaaaacaaatcccctaattagagtatttttattgctgaaggaaaccccgaaatagttgctaaaaagttgccaaaaattggaaaaacatgtcaataaa

SEQ ID NO: 61944 - DNA, 2094 bp, Heterodera glycines
atggctgcctggatgttgcttggtgccaaggttgttctgtttgtagcggtcgtcgttgttgctgtggttgtcataaattatgcatccgaacagaaggcaaaagtaaaaaataaattattattattttgagaaaaacaaaattgaccaaaataaatagcacattaatgattgatccaaccttaaaacaccgactttatatttcaaaaataattttcgattatttgtgttaatatctgtgtataagctagtcaagttttcgactttaatttaagaaaattaaattggttccgcattcgatgggatattccgttcccatagcaaaaaactgataagcacttatttacattctcgttttccctaggtcacagagattatttttataattttttagagataattaaaaaggaaacacaaataaatatgaatatcatatgcctgtcgtagatcatttttatgacaataaaaaatttaatttcaataacttcagtaatgcaatttttattataagtatgcatttctattattgacacaaataatcgaaagttatttttaaaatttaaagtcagtgtcggattttcctagagcccttttaagacatttgctcgagttcctgaaacggaaattattattttggcaaaatccgttaaaataaatcaagtgcattttcaaggaaacctgtgccaaataatcctcaaaactggcacttattttgacaaaatctactacaattctcttaaatcttttagcataaaaataaaatgttttaaaaatagcaaaagttaaatttaaaaaataagtggcgtgttttttcggaatccaacgcaatttacataccaatgctagcaatctcaaagcttaattccctgtatttttcagtatgaaaagcagtaccagagtgaacaatgggcggaatgggaaagcgaaagtgatggaggaaacaatggaaaggagggaaagaagaagggaatgtttggaaaattcaaggacaatgtgaagggaaagaaggacaaagccaagaagaagatgaaggaaaaagccaaggaaaagaagaagaaactcgagaacagagtcttcgaagaagcagttgtgtacggagtgcgccgcggctttcgtcgtttcatgaaagaatgagagccaaaacttcactataatgcgtagggccgcaaccttgagtgacgaaaaatctcgaaatagccaactaaaatagagacaaaaagtgccaaaatggtgacaaagtagtgaaaaaatccgaaatagtgacgttatagtcacataattttcagccaaaattgagcaaaaattttttattcgctgaatagttgcaaatgaggtacatttcttttctaatcttttattagcaaatattggactttttaaatcaaaattttgtcaagaaaaaaaaatttggtagatgcattttttgagaaaattttccaaacaatttttaggtcgattattagtggttatttttgaatttttttaaagttgattcttataggtgtattttttggtttcattgcatttttgttaaggaattttccaaaaaatgtcgaaaatgacaaaacgccaaaatagtgatttatagtaacgaaaaatgacgttcaaatgaaaaaattttaactcaaaaatgcatttttgagctcctttcttcaaacaattgagcaaaaaaaaaagaagttttttttactaaaagttgcggccctaataatgaggcttatgtttttatgatacatttgatggattttttaaattttgtcagaaataaacctatctaaccctagagattgaattgcattcgataagattcttcttaaaataattttttctgcaaatattgatgctggtggttacagcacaagtgatgttcgagagtcccggcctcgactcgagaaaagtcttgggtttttttggtctcgaacagcactcacagcgggaaagggtcgtttcggcgccagccagagtttttgggggaagaagcatttcattgttggaagtgtggagaaatgtggcgacgatggaggaggagaagaagcgaatatttgggatggagacgaatcggacggcgatggggagaaggggacggaggaagaggag

SEQ ID NO: 61945 - DNA, 477 bp, Heterodera glycines
atgacggacgtgcccgaaacaaaggaccaactcatcaagctgatcaacgtgtgcgagaaggcgcgacgcggcgatgaaaaaggtgtggccatatcccatccgatcagtggtggccgaaaattcacaattttgtgctcgtgaaaatgctttatcccctctccccccatttcagttgatcaaattggaccccaatcttggcctggaggaccgtgtttcgttgtcattggcctacaaaggtgcgatgtcttcacgcttgcgcctaattaaggccattgtctccgccactggcagaagaaacgggacaaagcagcgaaaaaggggcgtcgtctgctgacaaatgagtgacggacaaaacaacaaaaacaatgatcagccgcataagaaagaaatgaattcattaagaatgatcgatcgatcataattcaaatcagtgatcaaatgcaattttatgaagaaaaacctctcaaatatatataa

SEQ ID NO: 61946 - DNA, 442 bp, Heterodera glycines
ggcatatatatacataattatttacacaatctgttgaatatcgttgttgtatgcataatatcgtccatctgattggtcagtcagttcggcattttcttctcaggtcgtcttggtgtggctgccgccctccggtgtccacaattccatgttttccctcatcatgcgcaagttgatcgaggcgtcatcagctaatggcaccgtcagtgtggcaatctccgcctgggccaagtcaattgcctgaaaatccggggagaatttagccacattgaaagaaaaagcatgatggaaatcatcaaattggtcccactttttgggccaatttgcgcgcctcgtccaccgattttaagatttcgaagttgaacacggagaagctgagtgcaaggccaagacgagtcggattgatcgctgcaattttggaggtggcgatgtccatggcttcttg

SEQ ID NO: 61947 - DNA, 1266 bp, Heterodera glycines
atcctctcctggcaaatttgctcctcgtcctcactctgattagcgtatttattggcattggcatcgccttttttgtcagacaattccaaccttctcaaaggtattgtgccattaggagaaaaaatcggaaacgcaccgccgggggtggtctaattaattaataaaatgaaaattctcgcgactaatccgccggcacttttcgaatgcagaaccatcgacatgatcggcttcccaggcgaactgttcatgaacttgctcaagtcgttgatcctgccgctgatcgccgccagcctcgtgtccggcctcagtcagttggacacgcgtcaatcgggccgtatcggcgcgttcgccgctttgtattacgccatcacaatggtcagagagaatcagtggccactgggccgaatgatcgaccgatcgctcactcattttcccctccctccctccacccattcttattattggttttaaggtgctcgccgttacggtcagtcagtcgatgtgaaaagagttaaatgaacggattaattgggccaaaataaaatagcccggggggagagactaaaggacctttgattttttggcagtgcttttaccctttcctcggggaacagaatcaaaaatttcggaagcaaaaagaagacattcagcacaaagagaaaaaagggaaaccaaaatcgaatgtgaaattttgtggacaaaaactaaacgcaaaagaatttctgaaaatgggacgaaatgaaccaaaaaaacgaattgcgtgccctttgccctggtcagactggcatttgccttgtgcttctcatccatcccggcgacccgagcatcaaagaacacttcgcttccgagaacgattcgcacccggcaaatgtgtccgcgttggagaaactgatggatttgctcaggtggagaagaaataaattggaaaaattgaaaatggactaacaaatacataagacaaaattagtgggcattattattcaattcgcttttcgaattaatttgccttttaatgccaatttctccccccccccccccacttttttcattttccccttttcgcccccatttagaaatatgttccccgacaacattgtccaggccactttccagcaaatggagaccgaatacgtcgaaattcgtccaccaacaaatgtcagcagcacaacagcaattgtacacgcggtgcacagacacatcgacggaatgaacactttgggtgggcaaagaaacggggggaaaagatggcatttttattccattata

SEQ ID NO: 61948 - DNA, 1881 bp, Heterodera glycines
ttcggaatataaaacaaattacatgattcattaggtgctggaagcagtgtcatttatgcatgacaatggcgttgtgcatcgggatttgaagccagaaaagtatgtgcaatacttatgccttcttggacaaaaaaaaaatttcccgtcccgtggtacagtttgctctactacaaccatgaggacgactccaagatcatgatctccgatttcggcctctccaagacggaagagtcgggcatcatggccacagcgtgtgggacgcccggctacgtggcgcccgaggtgctccaacaacggccttacgggaaggcggtcgacgtttggtccattggtgcgtttttttgggttactgtgcgtgtgcttattgttagttcctcggctactgtattcatcggattcgattgggtattgtattcctcggactcggccggttgaacacggcacaattgagagcaccatgaaaattgaggacatgtaccggtattcgggaatgcatggcactttaatgtgtttggcgtaacactcgtgccgttctcagcccaccccaggaagagaccagaaaattggcaaaaccgtaattgggatcgaaatcctggaaaatcctgaccagcagaatgccgattgcatacggcgttccgaggcggccccaaaatttttcaaaaatcggaatttcggaccctggaaaaccagtaattcccgcacgcactgtccttgctaatgtacattcaaaaagtgatccaaccaactccttcatcccctcaggggtcatcgcgtacattttgctgtgcggctatcccccattttatgatgagaacgacgcaaatttgttcgcacagatcatcaagggagaatacgaatttggttagtagtagtgatatgcgtaaagatgtaaagcagatcatcagcgtgattgataagaacgatcagatcaattcactcacagattcgccatattgggacgaaatcagtgagtcggccaaggacttcattgcccatctgatgtgctgtgatccggaacaaagatacacatgcgagcgagcattggcccacccgtggtcagtgcaatttaatgcatacatggctcattttaggggggtaattagcggtggagccccgaattttgaattaaaacccggaccacaggaccagtggtcttcgagatggaccaggacaagacaaaaatcttgttttcacacaactcctgctggcagagcaattgaatttctctaaaacagggcccaggatcccttggataacccaattctcgaatttattttgaattctcgtctcaattctaaatggttttttgttgttgctgttgcaggatcagtggtaacaccgcacgcacaaaagacattcacatcactgtggtcactcatctgaagaagagtctggccaaacggaagtggcgaaaggcaagtgaagaagcatcagtggatgaatagcacttgacaatttgttaaatgggatttgtcatttaaaaaaagtgccgaaggcattcaaatccccagatgttttggggatttttgggccggcccaaccaagggtttcggcccgaatcccgacatttttcccaacccgcggcaaacctggacccgatttaaaacattcggtggaatgagttccgcgcatgagaatcccgaatcccggttgaaaatgtgtccgtcccacggtcccatcttaaatgcgtgccaacatcccataatttcactgaaatcccgactcccgaaaccaactcattcatatccgctttaatccggtgccggtttcaacggaataaaaattagcaaaaacaaaaaagtgttaattaaaataattcgcttcgctttccattttcaaggcgtacaacgcggccgcggccattcaccacttgcaaatgct

SEQ ID NO: 61949 - DNA, 546 bp, Heterodera glycines
atgtcttccaaaagcaaatatctccagtattttaattgcgacacaattccaagcggcaatttatggtgttgccgttctgaaaattgcagctacaaatttgaatcaaagaaattgtctgggtatccaatggcttcacttcgttctcacttaaaaaatcaccatcaaccaaaattgaaagaattggaagaaaaagataaggctgcagaaagcctcaaaaataatgaagcgaacccgagacaaccgacgttaaaacgaatttttgcgacttcaagtccagtgattaaaaaaatagcgagggctgaatctgctacctcgtcgcaattaacctcgaaaaaaccttttgtacgaatttaattttaaatgaatttacataacattttcagctcaatggacacccgacggagaaatgactaagaaaattgacaaggcaattaacgatttggtatgtactgctggattgccgttctcttttgtggaagaacctgggctaaaaaatttattaagaatattggttcctcactataaaactaggtattaatttgataa

SEQ ID NO: 61950 - DNA, 274 bp, Heterodera glycines
atggcaccacgtgatgactctattaacaataacaataatggtcagccagtcattcaatttgatcaacaaattcgccaggaccctggactaaatgccgtttttgactttgttcgggaacagggcgcacgggtaatttgtcacaacaaattaattttttcattttttgattaattttgtttagcatggcattttcaacacacccgccgaaatcgtcaatgttcttcagcaaatggcacagcatcgactgaatgagcgcagagcggggaataattga

SEQ ID NO: 61951 - DNA, 88 bp, Heterodera glycines
atgctgatcaaaaaaggtagcaacaccaagttgatcagatcactccttcatggtgatctgatcagcccattttggctgggaacgtggg

SEQ ID NO: 61952 - DNA, 351 bp, Heterodera glycines; identical to SEQ ID NO: 53910

SEQ ID NO: 61953 - DNA, 311 bp, Heterodera glycines
ggaaaagaaactaacgaggattcccgtagtaacggcgagtgaactgggaagagtccagcgctgaatcgcagctcctctggggttgcgaggtgtagcgtatagaccgtgagcttgggttggcccgcttgttcaagtttcccttgaccggggctccagagaaggtgcaagacctgtccaactggcggtgcctacccatctttacgtgtcttggagtcgggttgtttgggatcgcagcccaaatcaggtggtaaacttcatctaagactaaatacggccacgagtccgatagcgaacaagtaccgtgagggaaa

SEQ ID NO: 61954 - DNA, 2253 bp, Heterodera glycines
atgccaacaaaaacggacagcagcgacgatgagtcagatgaagaaaattcagcagcaggtgggtaaataactaaataatggttaaaaataaatttaaaaatgctatttttttagcattagctttttgtcacaaaactttaaattctttttatgtataataatgacttttgaaaattaaaaacaaaaaagcttatttgtcaagggtgtattattttcgttcaattgttttgaattattttcgagccaattttctgcagaatgttcgacttaaatcatggtgtttggttgtattattaagccgaaatcctccagaaattgacattttttcaacaagattttggggttctaaaatatgaacattttttaatgcgattcaaaaactttaaatagtattttttcaataaaattgaattgttttattttgccagcaatttttctgagaatttttggcttcaaaatattcttatttttttaatattttttgattttgacgtcggtacagctaggagccgacggaagaaattttaaaaattctaaaaatattttagtaggagattttgccaataaaaagcaaatttttaggatttttataaatctattttaaaattctcaaaaattaaacattttttggcaaaatctaacaaatcgtatcaatgtcttcaaaattttcccgccggtgcccccattaccgtcgtttctgaaattttttaatatttaaaagatgcattacggaaattacggcactttttgacccccgtaatactaataacggatttcagtaatttaaattccagttacgcccacccctgctgatgttaagaaccattttgaaacatttatgattgtggatttctttaggacagaattcccaaaaaatatttttatttattttttttgcctgatttttttaaatttacaaatatcatgattatcattttagcagaatcaccagggaataaatggatgaagctaatgttgagcacgggaaagtacgcggatgtgcactttttggtgggggacggagacgcaaaaatggtgagttttaaattgcctaattataatccttttaattgtgaaatcgcccccgacacttcggggaagagattagcgaagatcagggacggaagatgggtcaaaaatgggggttattgttagttaattaattttctttaaagttttaatccttttaagcgcgtgccagcccataagctcattttggaagaggcttccgacgtatttaaggcaatgttccgttttgatgccaaaaaggaaaaagcggagaatggtaaaaatatagtaactaaaataactaagatttaattgtcaattagactctgctaattgcccagctgatgtggagattcccgatgttgaagcagcagcattcaaagtgatgttgagcttcatttatgctggtgatttgagcgaattgaacggagacaatgcaatggcagtgctttacaccggtgaatttattttaaggaaattaaatatttataaattaaatgtttgaaattaaatttaatgagtaatatttttttattagccaaaaaatacatcatccctggcctggtcgaacgatctttgcaaattcccatctccgaattgcgcaatgttttctttgcgtatgcccaggctcgtcttttcgactttgaggtgggagataaataatttaatgataatgaatttaagatgatttaaatgcaataattatttatatatttatattttttataaattttaggactattgcaatgattgtttggattatattgatgggaatgcggacgctttgctcaaatcggatggatttttgcaaattgaccaaaaattgttatgcgaaattttgggacgccaattacaaatccgtgaagaattttcaatttgggaagcagtaatttttttaatttaaaaaagttacaatttcattttaaataacttcctatttaattcgaatttattttcggcactccgttgggccaacgaaaagtgccgtgaaaatggcattgaatgttcagcagagaatcgccgtcaaatgcttggcccggcacttttcaaaattcgctttcctctcttctcacaagaggatttctcggagaaaattggtaaaaataagtcaaaatttcaaatgcattatttgatgactagggatgtcaaaaatatgtacaaaaattggtcaaaatatgcacataaatatgtaaaaaaaaatcccgaaatatgtataaaaacccaaaatatgtaccaaatatttaa

SEQ ID NO: 61955 - DNA, 89 bp, Heterodera glycines
atgcgaacagagcccggagaaaggaccggagtgttcgcaacgggcggaagagaaaacccactcaaagtttggaatttggaagagcaaaa

SEQ ID NO: 61956 - DNA, 953 bp, Heterodera glycines
atgccaaaaagaaaaatgccgaccgaattaaatgtcgaaattgtggcggcacttccctttgatattcgctgggcaaatgtgcgaatttcttttgcatttgaccattttttgtacaaaaaacaagcccaatggatcagaaatgaattgatcagacaaaaaattgtggaagaaaatgtatttttcaattaatttttaatttatttaaacatttttttgggatttagaggcgacggcttggacaggcaaaacgtcggattaaattaatgtcgttccgtctgtttgaaaaccgcttgcgcaacatgagggatcgtaagttttccagtgctttttctttttttacagtacacttttaccgtatttttggttatttactgtttacagtatcattcgactgtaatttgccattactattatgacaaagaaataattttccatattttcagtcatcgcctctcacttccgtctcgacaattgttttggcttgactgaaaaccagtttcgcggggaacttactccggagattttcgaaattcaatttgacgccatttttgagacgattgaccgcaacaatctccaggacatttcctgggcacaaaaatgtaaaaaaaaatgcccattaatgagcgataatgtggataattaagtcatccaaacgcttgccaatttctgtgagggctatgtggacgaatatttggcggcaaatcagtagcaaattttaagatggtttgatgtgaccttgttgacatgaaaatgctaaaaaacgatttttttttaattttcagtgttgttgttattttaaaattaaaatttagcattttcttagtggtgtaaatgcagactaacggtgcaaaaccgtcgctctgatcataaatttctcaaattgtttgctaatcgacccacaatacctttcttctgttcctttaacgttgcgctgcttataaatgacaaataaa

SEQ ID NO: 61957 - DNA, 800 bp, Heterodera glycines
atggacaagggccgttggattaatgtgtcgaaggttactaattgggtttttaaaattgttatgtggggcgagggaggttcagctaatgtcctggatttctgagatcgggaaaatcgcgaattccagttttcttcaaaaatctttcgagaaatcctcccgttgaatattttacccgagccaaacatcggttatgctgctctctctctactgcactcaaactttaaaaatttaagttgatttactgatgggcaggcaccgcactgaaaatttagcaaatttatatttctataagaattttaataactacaatcaattcttttcagcccattcctttcactggacaagccgaatactgccacaactttcggcctctttcacttgttcacaacatcgagcacactttccgcgtcatcactgtgtttgttgatgggcaggaggaggcgagtgaaacgtttactggccgtctcactatgaatgcggtaagcttcaattgaccgtaattgctgcttaaacattgaatcattttcttgacttgtttagtgagtgaggaaggcccaacaaatgctgtgtcagtgtgtggagaaatgaaaaagctccgtcctcttcacatattgttgtgttgttgctgttgttttgctgttggacatacttatttaacttatttgttctttttctgataaaaccgtgtagactttctttttctttttttgcaggttaaaaagacatttgaagtgcaaaatgaggcggcattagcctatttacctagttggtttttcacattgatttgtcattttgcttga

SEQ ID NO: 61958 - DNA, 722 bp, Heterodera glycines
atgataaattcggatgattggccaacaattttagcgacaaattcaatgaattttgttgaaaaagtgagagaattttccaatttacaaattattgcccttttcagtacaaaacttttgtcgcaattaattgtcttggtcaaaacggagctttcgtccgcaatttttgccaatttgtcgaaggtcgaattcgtcttcagatgacttatgacattggccacagaggggcgacgacgaattggcacatttacccggcactattccaagaaacatgccaaatcacacacaaattggagcaaattccagcaaaatttcggtagaatttgcaaaaaggctgacaatttaaatgggaaattgaattatattttaattgcccattttccttccagctcaaattaccaccaatgcaaagtttggctgattggctctgatcagtcgctgaatggtactgaccagcggatgatcaatgggcagctgcgcaacttcgactgggccataaaaagggacttcctcaaattcaacggcaaactgtcgaacaaagcctggggtgttgacattgacgaggaatgccaacggatgaacgtcactttgaagtccgtttttgtggaagacttggcacaattgttgagcagcagcaattagcacggaaagggaagcacaaccgaaagaaagacagaacaaagccttttctaattggctaattaataataccacgaaatgtcaca

SEQ ID NO: 61959 - DNA, 867 bp, Heterodera glycines
atgcgtcacgtgttgatgctcaaatggtcacgaccgcaatcaaaagttttccaaccgctgattgactggtgtgtgaactttttttaaatttaaaccccactgaaattacaggctattaatcaattacgttggacagcccaggcccaatggcacatggtatcaaccaacttttcgccctgaacaatggaacgtctacacacgcacgcttaatgccgatgcacggaccaacaaccactccgaggcggagcatcatcgtctacagggcgccttcaattgccgacacccgtcgatttttcacttcattgacgtgctacgtcgtgagcagaagacaacagacgtcaaatacgcgtcattcattgccggagaggagccaccaccaaaaaagcgaaagtttttggcgacagatgaacgaattcttaatttggtgcgcctttacgtcccgatgaatgcaggcaacatcaaccatgatcacaattaccacaatcgcaatcaatttcacattattttggagtttctccggggaatttctcgcaactatcgaatgaacccgtgaatttctgttaatttttacattttttattgttaaaattattgttgaatttatttttaaactgtttattttacatttttatgctgaaatttaaaaagttgtttttactgtgatttttcatttttctgtacttggggcccaaacgaccctggggcccaaacgaccctggggcccaaaaacgagggcccaaaaacgggggcccaaacgcgggggcccaaaactgcgcccccgactcgttaaagtctttacaaatcacagtttctgatgaatgcaattctttatgccgtcagaacatttacaagcgcttaattttgaca

SEQ ID NO: 61960 - DNA, 396 bp, Heterodera glycines
aaaggttgcgggttggttgcgggtgtttcccgcacgagcccgtgcctatgggaggggtgcagccctttgaagttgccgccccatcaaaaatccacgatggggggggggggggtgtttcaaaaccaaaacctattggaccactttgaagttgccgcctgaccaaatccgatttcccaaattgttgcgggtgtttttttcccgcgccgcgcagcgccgcgggaaggtcatcaatcatccacctgtcaccaaagtgacaggtggaggaaattcaatttaacttttgcaaattttaatcttttgtttcaaaaccttttagcgttttattttctcaatcctgaaattttttttatgatgattttttgatcctgaaattaaaaattctttttgaaaattagc

SEQ ID NO: 61961 - DNA, 545 bp, Heterodera glycines
atggcacgaaacaagaagatgactgaagcccagtggcagcagctgctcaatgaaattatttcggaaattcccgaagaagtggccaattccgactacgtaaaaatgttacggagcagaacctattcttcgctgaacagtctgttggaaaacgatgacgaatggtcttggtcttcttctctcttttcttggaaaaacaaaaaatagtccgctcaaacaattaaatctcaattaattttaattttttactaaactaacaaattttcatttggtaattcactcttttattcttttattgtcaaaattaagcgcttgtaaatgttctgacggcataaagaattgcattcatcagaaactgtgatttgtaaagactttaacgagtcgggggcgcagttttgggcccccgcgtttgggcccccgtttttgggccctcgtttttgggccccagggtcgtttgggccccagggtcgtttgggccccaagtacagaaaaatgaaaaatcacagtaaaaacaactttttaaatttcagcataaaaatgtaaaataa

SEQ ID NO: 61962 - DNA, 879 bp, Heterodera glycines
atgcccagtggagaagggccgaggaatgtccataaatttgactttggattcaaggaacaccagcggatagggtaagtgtttttaataaaataaaattaaaatagaaaaaactaaaataaaaaaaacaataaataaatttaaaagaaatacattaaatttatttaatgaagcaaaaattctttaaaaattaaatttaaaaaatcaaaaaaaaaataataaagtaaaaaataattaattaaaaaatattaaataaataaaaaatatagtttaaaaaatcaaaataaattaaataataattaaagtaaagaaaaaaagaaataattatttttcattaagcaaagcagcaaaaaaaaaacagaaaaaaaatttaaaaaataaattaaataataaagaaaaaataaatggaaataataataataataattttattaaggattacaaatgcggataaattatgtctgttttacgcgctcgtagcctcgaaattttatctggaattgcatgtggacagcttcaggagatttatgaaaaatattgtgagacagagggatgcagctattgagcttttacataattgtggaattgatattaacgaatatagctatggtgtggagcaattaccgaatgttcagaaatattgggtgggtttaaatgaaaaaatgcaaaattaataaatttttcaggatgagatttaccccggaaagtaccgggttgtggcatttgagaagtcagctgatccgcggaaatcgatccgtgttttgtggaagggccagatggggcgagagaaggtcgtaccgatatttttggagaatggtcattgggatggtctgaagaatttcgtctgcttttttaatcgagggaggaagttttgtattgact

SEQ ID NO: 61963 - DNA, 226 bp, Heterodera glycines
atgtccgttcagcaagtacaacaaccaattccggtgccaacaacaccagcaacaacaacaattgaacataaagtgctcaaggaactcaaagtttgttgcattttaagagtaattgttacatttttacacaatttattaatttcagcatttccaatgtttaaattcgggacaaaaacgccttgaaaagcagattttgaactcaaaattcagatttttaagaatataa

SEQ ID NO: 61964 - DNA, 379 bp, Heterodera glycines
atgcctcaagcatttggggaggcgatatacagtatgaatgaaggcacgccggtaaaagacaagcacaggaacaacgatacggtgaaaaagctggaggcagtcgagtgggcgcaaaagaactcgatacatgcagcagcaaagaagttcaaagtggaaaattttttatttaaaatggatttttggatgattttttctgcaaattttcgtgatttaaaccggttcaaaaaccggtttaaacgctttgccgcgcagtttttgatggtttagctgttttcagctcctaagaaaacacataaaagtatttttatgcaatagtgagtctgagacctatgatggatattttccgacgacaggtatgtaactttattataaagcaaaa

SEQ ID NO: 61965 - DNA, 1435 bp, Heterodera glycines
atgagaaataggatacccattcaagctttgcaaccatcatatgtgggagaacatgcacttgatctggcttttcaaccatcgaatttcggagcatcaacatctgatcagtcttttcaaccgaatttgggagaacatgcacgtgatctggcttttcaaccatcgaatttgggagcatcaacatctgatcagtcttttcaaccgaatttgggagaacatgcacgtgatctggctttacaaccatcgaatttgggagaatcaacagctaatcaagcttttcaacaattgaatatgagaaataagatacccattcaagctttgcaaccatcaaatttcggagaacggacatctgatctggctttaaaactttcgaatttgggagatatggcatttcctcaggcatttcaaacactgaatttggaacaaccggcgttgatgccttttgtaagttagtccagtggttttattcgggaaaatctaaatttttttttatcaatttaaatttaaatcctattttagcgcaaaaaacaaattcaacaagcaaaaatgctttacttaagtcgggcacaacagcaattagctgccaaattcgaaaaaatgcgaagcaattttttggcaatatacggcgaattgcccaaattctcgggccaaccaaaatcgcttttgggtatgccggcacatcttcagcaacagtacaaatcgcatccgtacattgccaaactgctcgaatatccgcagccagcccaaccaacagacattttcatgcaaaacttaccaaaaatgccatcagtaccgcaaaatcatcaatgcaatctgagcaccagccaacatttacggcacaagcaatgccatttgagtaccaaacacaagcaatggcacctgagcaccagccaacatttacggcacaagcaatgccatttgagtaccaaacacaagcaatggcacctgagcaccagccaacatttacggcacaagcaatgccatttgagtaccaaacacaagcaatggcacctgagcaccagccaacatttacggcacaagcaatgccatttgagcatcagccaacatttacggcagaagcaattccatttaagcaactgacacaaacaatgcaatctgagcaccagccaacatttacggcacaagcaatgccatttgagcatcagccaacatttacggcagaagcaattccatttaagcaactgacacaaacaatacaatctgagcaccagccaacaacatttacggcacaagcaatgccatttgagtaccaaacacaagcaatggcacctgagcaccagccaacatttacggcacaagcaatgccatttgagcatcagccaacatttacggcagaagcaattccatttaagcaactgacacaaacaatgcaatctgagcaccagccaacatttacggcacaagcaatgccatttga

SEQ ID NO: 61966 - DNA, 432 bp, Heterodera glycines
atgaatgttatttattaatgaatgaatttttgactggtacataaagcgattctatgcaaacgctcttttttgatgattcacttctattggcttcgccattctgtgcgatgaaagcgtaaaattatggtgatgttctgctgataattataatattgcgatagaaaagcgtcatttatattcattttattttattaaaaggattatagtttaatttgtaaaaaatgataattcttaattaatttaaataataaaatggtaattaatgatggaaattttaacgatcaattgatattggaacaaaggccactcattaacaatatttagttttatggatttcaaaataagaagtaccagtggcggttttctagtgccaccgttagtggtattaacctggtaaaatttgcattggtaagaatgggaattcgagcataa

SEQ ID NO: 61967 - DNA, 2655 bp, Heterodera glycines
atggccgataattttggatggaaagtgggaaaagtgttcaaaaggcgcaatttgaataagcaattggctgaaagatgtgttggcacagacggtacgaagggatggcacgcgctaatgatcgaacagaaggaaaacgggcaaaatggtctgatccttaagtcctcttttgggtgagtgatttaattttaaattaaaaacaaatttaattttagaaatgatttatccgtggaaatgggccccgaattttttattcaaggctccgactttttggacattaacatcacaaagggtacagttcgacaacaaattaaatttaatgatcgagtcattagtgttaatgagttcctcttccgctgaattggccgagttccaaaatgctcttccgttcggtgtttttttgaatgatttcgacggcgcagcgcttggaattatcgcatttgaaattcattgtgccattggaacaaatgacgtgaacagttgcaaaacgatggtaaagtgaaatttaaaaaataaatttgaaaattttgaatgaaaaaaatggttggctacgggggaatagaacctatggctacaaaacaactaagatttgaatgtattaagaatttttttttaataaaaattttaattttgtaggctaccgaagaaaaaagtcgaaaattgaccactcggggaattcgaacttccacaaccactcgggcaactccgccaaaaacaaagctgaaaattgtaactccattcaaaactgaaacaccacgcgttgtaatcgttttcattttttaaaaatttaaaaataatgctttttctagtctgaaattgaaaaatcaccgaaactgaccaccctggaaacccatacaaaaacaaacccaaatgtcggaacttcatctgccgtaatcatttccctcaaattaaattaaatttttttagccgaatctgttcactccacgtgattctactgtgaagcatttcggcacaaattgcgtccaaattgattttccagctgaaattgcccaattttcgctgaacgtttccgccgcactattcggcattgcctgtaaacaatacttaaaaaagtacgaaattggacaattgccaaaaaattacgacgaaaaaatggaaataaaagacaaaatggaagcgtgtggaaaagtgccgacagagacaaattgcaaaaagttaaaaaaatggaaattaaaattaaattaacccctaattaaggtcatatgagctgattggatgttatgaaagcaaaagtcagcagaaaattgccaacgaggaaattgccgaagtttgccgaaaacacctcgcaaatgccaagttttcggatgggtttcgaattcggaactgtgccagtcgtaaaccagggacgaaagtgatcgttgtcgaatcaattttggaattttcactcaccgagaaaaagtgaatttaaataagtgttgaaaattttttaatttttttatcaaagttataccatcacccgaaatgcttcaattgatgacgtaaaggaatttgaagctgcaacaaaatcaactcaattatttttcatcgaatttggccaccaaattgggcaaagtgcgctccgtggggaaagcggcggcacgtatttgtcattggacgatttggacaaaaaggcaaaaattatataaaaataatttaaaattgttgtttctttaaatttagaatgaaacaattggccacattttgggctcaatcgctgaacaatcaattgatgggggttgggcgaaatcaattcattttattccgccgtctgacagatttctgaaagcatttttccaaatttggaacccgacgttttcaaggcgaatcaacaacgaaacgagctggatgccatatcaaaacgacccgaacaatgtaagagttgggaaagaaaacagaaaaaggttaaatattactagacgattccgactagttgcgatttgctgggcaaagattgtgatgcgacacgcgaaattctacggaaaattcggaaagttttggagtgctgctccccctctaatgctgctggcccatgtatttgtaaacttccgaagcccgacctggtaaattaataatttaagctaattgtactgtcattttctgttagagtgaatttgcggtgcctccgggtacaaatccgtctcagcaacaaaagtcacgcttcagcagtaacagccaatcggacgacccattggattggtgggacgatattttatatacgaaagaggatgcgcaacaaagatacgactattttatggaaggtgattactgtatgagaaaaaaacattgcttaattggctaattaattaattatgttggttctaatttaagtgtgcgcaccgtgtttcccaccaaaaacgaaggggaaacggagaaggaaaagacaggcaaagccaaatttgagcaaatggaccaaatttccaattgcgatccgtttcagcaaatcatgtagtatatatgtagaatgaatttataaattttttaacaacattcagtgggcgacccgactccgcaacaatatgttgaagctgttgaacaagggataaaattaatcatgtgggatcattttatcaatcattaaaccgataaatagtgagataaatagatactttagataaacttttgtccaatattccttgctttctgttaaaaagccgaaaa

SEQ ID NO: 61968 - DNA, 864 bp, Heterodera glycines
  unsure (1)..(864): unsure at all n locations
atgattacgctgaaccgtttttaccaacgcacaatgtttcactcaacatatgaactttcgtttaaagacgccgccattatcaacaaaatttattgcgacggtaaatcgaattaattcattataaaatagagtgaattaatttaagaaaattgcaaaaacgttgaaaacaaatgccaaaagggaggatatcccaacccaaaccattgcaaccaatgcctttgcccggtgggatacggtggagaaacatgcgaaatggtcgaaaatggtaaaaaaaaaattaaaatgataaaaattattaatatttcagatggaaattgccaaactgacagggcaaatgaaattgaagcagattggcaaattcgaacgttgaagccaaaagtgagctgcacaaaaaaggatgagtcatgtggatgccattggcaaataaaggcaacatttatatgaaatattaaaaataaaattaaaaaaacgaaaacaaacaaataaaattaatataatattactaaaaattaatttaaagaaaaaaaacatatttacagccacaagatggcaaaaaggtgatcatcaaattgaaatggctgcatgaaaaggtgctcacctgtgatgacccttgcggcacttatcgagtcgaaataaaataccgaaaagacaaaagggcgcggggtaatttaatttaattaaataataattatttanattttgtaaaggtgcatttatttgctgttccaagcaaattgataaagatgaaacaaagaattggattgaggcggatgcacccggcgaggacattctcatttcggcttatcccaatcagactaattttgaaacatttacggaaattgttcgaattgacttacgaaacaa

SEQ ID NO: 61969 - DNA, 834 bp, Heterodera glycines
acggcgccaaaattttgccagcgagcgattgtccggacggtgtgaattggaagccggagagatcacccggaaaggttaatatgtgcaatcatcccgataccggcaagcttgttgaatgctgcacgaaggggcacaaatgtccattacgggccaactcagcattcggctgtaaactaattgttggtatggtaaaaaccaaaggggttttagaccgagtacaacttttcactaatcatttacaataagaatttataattcgcatccataatgtactatagactcagtaccctattgctttaacaaatatgttaattctctgggaaattattaaatttttgatcaaaaaaagattttagctttggccatactcttttagacagttttggcacactttgggaaaattttataaaaattttgcgaaatttgggtatggcctagtctcagagagggtatgaataagtaaaatctgaaatgttgaaagaaaattattaagctaaacggccaataccgcgagatcagaggcgtaaacgaaagcaaagtcttctttttcgaatgttttgtaagtgacattaaataatttaattaattaattgtaaaaaaatgcattgtcaattaattaaaaattaattgattaattggttaaatttatttttaaagaggcgagaaggagagatgaaaagcttttggggttattggaaggacaaaagcaaagacccaattcgcattgacgaaatgcaatgcatgagctacgaacaagccggcatcataaatccgccagacaaaacagtgattgattacccattgcgcttcaaaagtgccaacacaaacgaataa

SEQ ID NO: 61970 - DNA, 115 bp, Heterodera glycines
tttgaatacatcgaccaacttgacagtgagaacaaacacgaggaggcctattgcctgttggccaagcagagcctgaacaccggcttaaatcagcaggaaattctgtggcgacttg

SEQ ID NO: 61971 - DNA, 507 bp, Heterodera glycines
atggcgattaaaagtgctccaacagtgatcagaagaggtaccacggtgattagaagaggtccatcagtgattagaagaggtccaactatgattagaagaggtacaacagtgactagaagaggtacaacataaattcaaattaaaaattgtatgaattataaatttattaaatttaaaaataaatcctccatttattaattgaaaataacgttgaaaattaaaaattgattatttaataaattttagatgaaatttacaaattcaaaaaataaataattaaattctttaatgtaaaaaattttttaaaataatctacaacaaatcttcagattagtttaaaacattgaagataacgaaaaaatgcattaaaaataatatacaccgcccgggtccgaacctcccttatgaaatgtataataattgaatagttatttaaattgaaatgaaaaaaattttacaattaaattttaaaataatagctgaaattctttaattaaatataataaa

SEQ ID NO: 61972 - DNA, 1215 bp, Heterodera glycines
  unsure (1)..(1215): unsure at all n locations
atgtttatacaacatacatattcgtctccattcaatattaatcaatgcaaattcgtaagataatccctccatcacccactccaatttattctcgaacattggcagattggaaatctcaaatataaacataaatgttgtgaattgatatatttgttaaaatccattttcggcccacaaattcataaaaaaattttttttaaaattaatttgtaaaaataatttttttatgcacgactttattttgcgcattgttcgcccttcgacaatcatttttattatcgcggtgatgaaaataaataattaagtatatttaattaaattaaatttaaattttagttgatttttctgttgccattcctcttttatgtaacattcaatgcaacaaaatcaatttattggcaaaaaattgagctaaattccatgtttctgaactccaacgacagaaaaatgtctgagccaaaaaatgggaatgaaattccgagcaaaattgacagattgccaaatttggacgacatgaacattaatttagaatggcataaattgttgataaattcgtcaaaaatttttaaattgccagaaattagaacagctgttggtgaacaattcaagaaaattgaaaccatttctgtaaatccggtaataaacaaaaatattttctataatattttgcttattttcataattttgggtccattttacgtgggttctcaattgttagcatgaaaaagccaggaaaaataagctttaaaagcaaaagcagaattttttcaataaatcgtcatcgattgaattttaagaaaaaattattacattcattttattagtgtgaatttccggtttttttaacatcggattaaattttcgaaccttctttttcatatagagctctattatttctgcggaccgaatagacaaatttgatgaccctaatgcggaaaatgtagattatgtgatcataatccaggtaattaatatttaaatttgttttttgaaataaaatcaattaaaaaaatatataaatattattcaaatttactaaaaataaattaaggtccatgatcgggtgaaatatttgaaatcgctaattaaaagcttgtcaaatgcgtatttaattggacgagttttattggtatttagcagcgattttcaatcagaagaaataagtgctgtgatacgaagcattggattttgcagggntatttaataaataataaa

SEQ ID NO: 61973 - DNA, 199 bp, Heterodera glycines
tgcatcatttcgggcaccaccagcggctgatcagaagaatcaaagaagtgttaaaatgcgaaaggaattatttaatcgaagaattaataaatataaaccttgaaaatgtcacaataattaattacttattaatatgttgacgcaaaattttgtggataaatttgtaatatttgaaaaaattcataaatattatttaatt

SEQ ID NO: 61974 - DNA, 438 bp, Heterodera glycines; identical to SEQ ID NO: 61170

SEQ ID NO: 61975 - DNA, 122 bp, Heterodera glycines
atgggtccacggggtgatcaagcccgggattgccttcccacactcgctggtcacacaataagtggctttattctcgggacgactgagctccgttcgcttgaaaaggcaaacgttaaatacaa

SEQ ID NO: 61976 - DNA, 1468 bp, Heterodera glycines
atgcggcgcagttcggtcagtgacttctccgacttttatgacgaattcttgaaggacatgcgtatgagcaacaataaattcttggcggaagggataaaccaagtggtggatgatgctaaactgatgggcaccaacaattcgggggaaaatcatggtcatgatgagctaaatgacttagtcaacgacggagaaggtacggtacaaccgtgattggtcgattccaaaaaagtgcaaaaaccaaaaatctgatttttcctatgattttttatcaattttttaaattaagaatatgttagaatttaattaaattgatgcttaaatacacattcgtttaaaaagtttttttagatttagaataaaaataaatttaaattacataatattaatataggcgccattgaaactttaattttaagtaatctagttaatgattttattaatattaggtaaattttaattatttttattagagaaccaaaaaaacttttagaagaatgtgtatttaagcatcaatttaattaaattttagcatgtttataatttaaaaatgataaaaaaaatcataggaaaaagcagatttttgatttttgctctttttaggaatcgacatagcaccggtacaactaacgaacctcgcgaactatgagtttccaaatcgcattttaaaatcacttttaatctttttattcagttatttaattttgttttacgacaagctatctgatagagaattatttgctgattttttttaaaaaaggtatttttgcctctatcatccctttaaaattttttattacttttttaacgatttttcgaaaatccagcattgggtagtactgtgcatttgtgcatagcacagtttttcagcatgatgcaaatttgtgcagtaaaacgccgtgcagaacacagggactaattataattaatgaccaccggatttagaaaaattctgcttgaaaattaatttttgatttcggagggagcgtggagggctaataaataaacggagggcgactgacccgggggcaactgatacgcggagcggaaggcggggagcaaaagtagtgtaccctcctgggccgtgtccctgcacgtgcatagactttaattaatgaattaagaattaagtttaaataattgaaattttgagagctgaaagcactgcttgaaatgcgcacccgcctgctgtttgctgcgggccctgggcgagtctttctgcgcgcaatttccgtgctcagcaagcagatgactgcgaatgagatacgtaaattcaccaaatattttgaatggtttcccgcgtgcagagtgcgtgagaatgcggacacaattgaggcgaacggaaatggcgtgaaaccgccggcggcggcggatgacataaaatttgacgtggaacaagcgaagatggatgacgtggcggatttcgagcagttcatgcatgaagtcaaaaaggaattgctgaaggacagcg

SEQ ID NO: 61977 - DNA, 3600 bp, Heterodera glycines
gtgtgccggtatcccaggtgtattcgcgtatcttgacgatggattaatcgctacaaaaacgcttgatcaacacatcacggcactgtacactctttttggacgcataaaagaatatggtcttcgcatccaactggacaaatgcaaatttttgcagcccgaacttttgttccttgggcatattgtgtcagcaaatggcattcgtcctgacccatcgcgttcggacgcaattcggaaaatgcccgcaccgatcgacaaaagcacgctccgatcattcttgggagctttgaattattatggcagatttgtgaaatgcatgcgtgaattgcgtgcaccgctcgacaaactcctccaaaaggacgtagtttggaattggacgtccgaacagcaaaatgcttttgaaaaagcaaaggaaacgatgacgtccgaccttctgctgacccattacgacccggcacgcccaatcgtcgtatcagcagacgcctccaaggatggaatcggcgccacattaagccacacattccccgacaaaaaggaaaaagtggtagaacacgcagcatgcacattgacagcagcgcaacaaaattacagccaaattgagaaagaggcactggccattgtgtttgccgttcaaaaatttcaccgcatggtgtacggccgaaaatttattttacaaacggaccacaagcctttattggctatttttggctctaaaaagggcatcccgatttatgccgcgagccgcctgcaacgctggtcaatgattttggcgaattacgactttgaaattcgctacgtcaacaccacatcatttggccaagccgacgttttgtcccggctcattgctaattatccgcgtccagaggaagacatcctgatagcaaacatctgtgctgatacagattgcttcataaattctgttttcgaaaatagaatggatcaaatcccagtgacaaccaccgaaattacagcagcaatggcaaatgatcaaccactccaaatggttcttcaatttttaagaaacggatggccaaccaaagtcgccgatccggaaattagtccatattttccaaaacgggacaaaattttggaggtcgacaattgcctattgtatgagggtcgagtgatcatcccaacttcgcttcgcagtcgcatcctaaaggcattgcacatcgcacatccaggcattgtgcgcatgaaagcacttgctcgtcgccacgtgtattggccgggaatggactcagtgatcgaaaaagttgtgagcacttgcgaagagtgtcaattgggccagaaaaaccccaccaaagcacctctttcgccatggccaacgacggacaaagtctttcagcgtgtccacatcgattttgcaggcccctgctcagatggtcaccaatatttaattctggtcgactcattttcaaagtggccagaagtttaccgaatgaacacaatttctgcctatgccacagtatttgtgctccgatcaatcatttttttggctggctcggaatcccagaagaaattttttccgacaatgggacccaatttcgatccgccgaattcgccacattttgtaaagaatttggtattaagcacattttcacaccgccatttcacccacaatcgaatggccaagtcgagcgcttcgttgacaccttcaagcgttcgatgaagaaaatgtcaaaaagcgaaaaggattgtatcgaaaagatgctattctcctacagaaccactccacacgtcgccttgaatggattttcgcccgatcaattatttttcggcagaaaattgcgcacaaaattgtcgctagtccacccgaaaggagaaaaagacgaaaattttgatcgaaactcattcaaaaagggtcaaaacaattacaccgacaaaatggctctaaattttgatcggaagcatgggacaaaaatgatcaatttctttccaaatgatcatgtcctactgataaatatcggaacaacaagacggagtggctgcaaggaaaagttgttgagaggcttcacaaatcgcccacatatcgtgtttatgtgcctgttctgcgtcaactcgttcatcggcacgcgaatcagctaaggcgacgccatcttttggaagaagaagccgaaaaggaggcacctcaaatcgaagagccaccgccggttgtcgaaccgcctcatccgccccaacaaaatcagccggccaattcaccattggttatccgccgatcaacccgagttaaaaagccgcgccaattttattctccaggatgaaaaatttaggcttaaaccttcgggtttcgaatttaagaggggaggtgttagagaaggaagtaattattgattaggtgtatgaccccacgccacttcgccatcttccccctcccattcccctcattcagttttgtgattgtgcccaccaatttgacctctccaatttattctctgcattattttatttatttctccggcaaataaacttatttaatttgttatcttcggacataacagatatttattttttctttaggccttatgtctcggctagacaaagtggtcatcaacctaatattttgcaacaatttgtcgtttaatttgatcaacagtccacaatttcgagcattatgtaagccatggaatgagcaactgaaagatgaatcacactaccgcaaaattttgcccgttgcaagtgaactagtcaagggaaagataaaagaggagttacgaaaatgtgaagcattttcttgtacatctgacatttggagtgggccaaatgaaggatttataaggtagctgaaattttactatttttgaaattttaccatttctgatcaaatgttaagtctaacaatcgaaggagttacgaaccaatgggagcgtgtgagacacattctcgcaattaaaccctttcccggcactcacactggacgtcgcgttgctgaaattttgtccgaaattattgaccagtgggaatgtcgagacaaaattcacgcttttgcaacggatggaggaacaaacatgaaaaaagttggttatgagctaacgagttgtaaatattcgtttgttttttgcaggcatttgtggaagagaacgaaaacgggcgaattttgcctttttatcgatcaaaatgtgcggcgcatttattggaccgtgctgtcaaaaacagttttggcaatcgagagggtgaaatatcgggacttttttgtatgaaatctaaatttctttaaaatttttcttaataattaagcaaattgtcgtcggattgttggaagggttaaacactcgattaaagcatttacagaattgaacgaagcacaaataaaggagggacttccgcagcacaaactgcttcaggtaagctgaaatttcggagtaaaagcaccagtttactgtaaatttaggaaatggcagttcgatggaattcttctctgatcatgataaggcggctttctgagcaaagggctgctattgaccgaatcgcatttgaacagaggaaatttgaattgactttgcaagatggcgagtggcgactgcttaatgcattggagatgctcttggcacctttggaagaagcatcactttatttttgcaaatcaccgctttcaactcaaat

SEQ ID NO: 61978 - DNA, 1609 bp, Heterodera glycines
atgaagcgaaccaacgcatcaaacatcactccacctcgcgccaaacgtgcaatgccacctgcactggacctggaccaaaacactgccacactcgaagagcaagaacgccaacgcaccctggtcttcattggcctcccggaaagcaatgccatccgcccattggagcgtgttcaggaagacagggaagccatcacaaaaatactggaccatcttgaagttgaggcccaaccaacggccgtctttcgactcggacgatacgacccgcagcgaacaacaccacgcccgctcaaggtggtcatgccaacgcccacacaccaacatgtggcactcggaggatggaagcgcgagcgtgttcggctccgttcccaacagaacctgaaccgtctgttcgtccgtccggcgctgtccaaagaacaactcaaagaggaatacgaagcgcgtctccgaaaacgtcaacaaaacccagctccaccggcacctccaacccagctcccaaaaacgacgaatgaccagactcccattgttgcaccaaaccagaaggaggccagcgaagacatgtccaaaccgccggaagtttttgaccaaacaatcatcgtttgttatgaagcattaaaatcattgccaccaaccgacaaaatttctcaccaaattcaatcactcaaagaacaataccctcatcttttcaataaatagttctttcagacctccaaacaaacatttcctcaaaaaaatacatttattccagtacttcacatttctcaccaaaatttttcctcaaaaaaaaaaaaattttttttttctctctctttttttaaactcttaaaaaaatttcttttcgttggaggtctgactatatttttctccaaattcaattgtcttatttcactgctatcggactttatactttccaatcaaatttcacaatgttttcttcagtttgttttcttttatcactacttcacatttaacctcatttccaccaaaagtgtaagtggcatatgcccttcttttggtatttttatttttgaataaataaataaataaataaaaattttttatctatcaaatttttgaatcttttttatgattttttttccatatctgtcagagattgccttttttcattttccgtcctccagctctgtgggaaacttttgttactttaattacctagcctcattttaggcttttttggttggccgatgaggtgaaattttaggcattttgagttttttgttatggggaaaaaacagttttatttagtaattttttgatcaaagcgggatcgggagttcaaaattttccgggacgggagtcccgaacgggattcccgtaaaaatcccgatcccgttcaaatcccgtccatttttaacgtgagtcccgggcgggagcgggagtaatccgaaaatttaattaaaactcacaaaaatatttttaatgcacaaattttgagcggcaatacgtttattaaagaaaaaataaaaaagcaaaattttaaatcaataaaatcgaattttcggaattgatttgttcaaaaaaatgagcatttcagcatgttcagccttcaattttgatcgacgatagtcaaacacatcacgcgcaacactga

SEQ ID NO: 61979 - DNA, 74 bp, Heterodera glycines
gccgcgattgtgcgcgtaaaatctttgcgagtgagcacggcattgccggcttctacaagggcgggctcagcaat

SEQ ID NO: 61980 - DNA, 1178 bp, Heterodera glycines
atggcattgctttccgatcgtttcgacattttagtggacaaacattttgatggcaaaagcgaattgacaatttggagaacaatcgcaattcacccgggcattgaaatgccaaaactttttgtcgaaggcaaatttgtggcatttccgatgccggaccgtccgcttcccaacaaaatcctctttcataatcttgagattcggtcagtcttaacttttgtgcacattaaagcattttaatatttcttcaggtacattgatcattccgtcattgaatttctccatgccaacaagcaaatttgggacagaagtggcaccaatttggaagtgtttgtgtgttcaaacaacaaggaagatgagcagccaatttggaatgtttgggcccgtaaaatttggccaatttttgctaccaacgttcgacatttatgcattcctaatggtgctcatttggacaatttgcgtcgtctgatttcaccgacaattctcactgatcttgaccaactgaattcaatcgatgccggtcttctgttcccagatggaattgctgacgatggaccaaatgcaactgccgggcaagcgttgaccaaatggttacacacaccgagcaaaaatggacaaccgaacgaattgtatcgcgatgcttgtttgaatccacggaatctcgaatgggtcaacaatttcaaagaggtgtctcgccatgttttcgtcaaattgttttttttaccaatttttgtgtttagaaatttcgccatgccaccacttctgtcagttacacaattcaactttatactattgtggaaccaacgccaactgaacaatttgaattggtgaatggacggaccaatgagaagctgacactgaaacacagcaaagagtccattggatcagtgtataattggctgttgcaacggtgcccaattattggggagatggcgacgacggcggcagttaagtggaaaaaccgcgaaaattcgggtgccaatttgaacaatatcagatttgatctccggacttgcaattatttgtgtgccaatttgaacaatatccgatttgatttgtgggatggaattcattgcattgggtgagcagcaacagcaatttttgattgccgtaaagtaaaaaagtaaaatacttttaggccattgtcgtcaccagcagtggaagaagaagaattggattaa

SEQ ID NO: 61981 - DNA, 563 bp, Heterodera glycines
atgtcggactccagtatggatgctatccgtgagttgcaacgagcgttgcgcgaacaacagagaacaatcttctttttgcgaagtcaaatggtggaccaccgtgcggtcatactccaaaatgttgcgcgcacggaagccctggagggctacgcggcgaacgtaattttcaaaccaaattttgaaatgaattttaatcagtcatatagttattaaagtataaatttaatttggaaacatttcagagtcgcgggggcagattccgcccccgctattctccaatggtttcgctggagatgactcatcttggacgacggctcgaagagcgagagcagcgctgtcgtgctcaggctgaaacggtggatgccccagctgcaacagagagcgctgaggagggaacatcttcgagcagtgctccttctaatggtccgttttaagacaaatatttttctaatttttaaaattttcaagtccaaggaacttccggtccgagtactggaatggtacctgtcaacgctgagttgccttcaaattgtgtgttttaagtaattattttaaattattta

SEQ ID NO: 61982 - DNA, 360 bp, Heterodera glycines
atgacacatgtgtttttcgatcccgagtcggtcgattggtcatcttttatcactccccagcatggaagaggacagaaacaatattttgtcggaagcaagtatcaacggggattcggtttcctcggtaatgtggcacgtttcttgacccctattgcgaggaatattgcctcgagtgcaggacatgaggggctcgccgctgggcagagagttctgagtgacatcgtccagggtcgtgatttaagggatgccgtcagggaacattcaagacaggggttgactaaccttaccgattaatattattttaatcattaaaaatattttagttatataaatgataaatcgaaatttattaatgctcta

SEQ ID NO: 61983 - DNA, 177 bp, Heterodera glycines
atggtcaccatttgtggcataatccgggaagagatggagctgatcagatggcttagtcagcgagtgacctgcatgatggaacatgcaaattttgttcccgattatcctcgctcattgttcaaaggagtgataaataagcaatttgtgcacgatttaattaaagacgaaaagggcatc

SEQ ID NO: 61984 - DNA, 1356 bp, Heterodera glycines
atgaaatttcagaacaataattctactgcttgtctcattaattatgcttcttgtcattatgattttgatggagtgagagaattaaatatttaaagaaattacctgtattttcttcaaaatgaaataagttattatataaatattgaaaaaattcgatttttctgaaaaataactatttaaattcgaggtggtggggattctaatagagtgggaggggggtggcttatacctgaggaaatatattataatttcttttatttaaaatcaataatgataatatcaatttagcataaaaatggctttttaatataaattttctgtccattgcatgagggccaaaagaagttgttcagctgttgctcgggaagaacgccaacaaaacgatcctgacaaagaagcaccaaatccgccatttttagagatatacattgatttaagaattttaagaaattttggaaagtttatcccttaattagaaaatttatatgcatatttttcttttatgtgcatattttgcgacttcagtgtcatttgtaactgttttcagttcgtctcttttttggcattgattttttgtcggagaaatataatttaaaatttcagttctttgtggtcagtagggtcaatcaactacgtttggtcaactctgtctcagcaatattcaaaaggcataactttttttgttgaccaaacctaacaaacttggtatcattttacagctttaaatgtttagaagatatttctaagctatttctaagtaatgaaacagttcacaaacatctatcgcttgaaaacctcaaaaaagcataattttctaaaattttttatctctatattttttttttgcagttcgacatttctgtaattattattcggctaaaaaagcctgttatgagctttcgaataatatcaatattgttagattctgttaacaatttaaaaagttatattgactcaaagtttgctcagacggagttggcccgttccgctttggatggttttaaaaatgcaccaaaactttaattttcttacattaactttattttattgtagttcaattataaatttttttcttctttttttcaacaaattccaattacaatattcacattaattcgtcaaattgagtaattagcagaatcttcttaagctgactataattttcgaaatttgtaactaaaaatttagcggctgaaattccaaaatttggacattttaggacaaatctgttagcaagtccacgcaaaattttcaaaattgacacaaattagcaattttttggacaatagttaattagcggcaactcattttaatattagtcaatagaataattaataacacatcatattcaataaa

SEQ ID NO: 61985 - DNA, 658 bp, Heterodera glycines
atgcctaaagcagccaaatcaaacgctgtgttaaatcgtcactggatttcaaagttcccggaaggaacttattcaactgatggaaaaattaatccgggactttacaaattgattgatatcgccaaaattttgattggaggtcgggcgaaaattgataaagactgatattaaatatgatttttttttttgcgtaaatacacttggtttttccaatttttagcacatatttttgcattttttaacacatatttaggccttttttttggtttttagcacatattttgggttttttagcacatattttattacatatttcaggatttttagcacataaaaatcccagccctagtaatagtacactatgtattcgtggttaatattttcgtcagtaagcattttcgtcagtgaacgatttcgtcagtgattttcgtcagcggataatttcgtcagtgaacattttcgtcagtgtactatttttatttattttgctgttttccatttttttcgtcagtgttccaattcgtcagtgaacattttcgtcagtggatgcataaaattaaaaatttttcatttttatcaacttctttaatacagtatttatcgctttttgcgtatggtaactctagataaaataagtgattatttgtactttaataaa

SEQ ID NO: 61986 - DNA, 498 bp, Heterodera glycines
ttcaggcgttcgacttgaccaacttatggtcctcgttcagaagacaattttgttctgtcaaggttatttgcgactgtgtgattagtgggattgagtgatttagatccggttactggtctttttgtcaacaatcccgaacaatacccttgtgagttgcccactgaatgtcgaaatgtttaacgttttcctagcgcatgcgtgggtccgtgacaatgtttacgcggtccaagcggtttgggcaatgcatcgggcgtaccaaaaacgggcagagtttgacgaagatttggtcaaagcgcacgaattgggtctcaatctgtgtgaaatgtatgcagtcgctggtgacttataacgataatgtttcggggatgaaatgttctgacataagttggaatgtatgctgagacaggccgacaaagtggagttgtttaaaaggcaacagaagaaatcggactgtctgcacgctaaatattcggcgaaaaacaaggcgactgttgttgc

SEQ ID NO: 61987 - DNA, 428 bp, Heterodera glycines
aaatgtccgagttcaatctggtggacccggcctggaattgacggattcaaacccgacgtactcgcacttttccgggtgtatgatcaacgatacttccaaggacgattgacccaaagctgcgtcatcattaaccggagcaacaagcttttacggtattttccctttttgattgggacattaacgtaattgcaaaagtgacgattttgagacaattaaattttcattttttaccgccaaaaaaattattatttttttggctttaattttatgaaaattattattttctcaaataatatttgtgaaaaaaatatatttatagttgcgttggcgtcacttataattcaacagaaacaagactcatgacgattcgattgtgtgtgccaattctcaaatttcgcacaaggcgaaacagaatcgagacacttctc

SEQ ID NO: 61988 - DNA, 569 bp, Heterodera glycines
atgaacatcaaatacggtcattttaatgcgtaattcttaacaaatttttagacaccaactaaaaaaaaacatttggcgttgaatccaaaactttaaatacctttttacatgctaaaagttgttctaaatcgaaaactgctccgagaaaacgggaatcccgttcccgtttctctttttatcttgacaaggttttaacgggaacgggaaaaaagggaatcccgttcgggaatcccgtcccgctttttttcattttcccgcttccggaatttcttttacccaactctattctaaataaacatatgaaaaagttaatccggcccctcatgataaaatttatttataaaagatataaagtaattacgttcatttgtcaggtgtttacctggtgaatggcgataaaatgctttttgcacatttggaaaaacaatggggcgacgaggtcaaaatggacaaattggtggacgcagtttcaaagatttaatctcgattgtcactgatgacacacacacacacactattgcctttttggctttttctgattgtttgttctttatctcaatatcaataaa

SEQ ID NO: 61989 - DNA, 1577 bp, Heterodera glycines
tcctccttcgatttctgccgtttccatgccctgcatttcctgctgttgctgggtttgaatttggctgcgatgacgaggactgtcgttcccttcgtcttttagtaaaattccattccgaaaagacggaaattgcaccgaattactcgccgactcatccaccggtaaatctaaggagaaaagccaacggatttaattgtaagcaacgaacagaaagcagtgcctgaacagctcatcgaagtggttgacggagacactgcgacatcgacacgggacaatttgaggtcgtagggagagggggcaggccccgccggaagaatgaggcgaagatggaccttgaaaagaacaaattcggggaaaggacaaaaaaacgtagtgcgacattttcggaccgacatttgcggaccgacatttgcgggacttttgcggaccactatttctgggttgaactgtcaaaaaaaaaacaaaaaacaaaaaaaaataatttttcaaaaattgagtgactaagtagttttatttgtgatttttaccaagttgaacatcgcccttcaagagtaatcgatcaactttttgcaatcaacatcgaaagaacccattttttaaagaagtttagtttccatagataaatatagtatgtagttgctcatttttaattttgggcccatagttttaataacatcaaattacggacaatttttgataaaaagataaactattttagtttttgtttgttaatttaattggtttgacatgccggaaaaaattaagctctcggttaactaaagcgtggaagtgaaacaagataaaaaattttcttggtataaaattcttgaactgacttttatatttaatttagctaattttttcgccaatttcacagtttaattataagttagaaattctataaaaaagaaagaaatagttatgtcaaataagacttctctccaattgagacagatcgctttgcatcagcttaccttcactaatttcaatttgggaatattaaatttattaaaatttcttattatttttttctttatttagacagttcaaccgagaaatagtggtccacaaaagtcggtccgcaaatgtcggtccgcaaaagtcggtccgcaaaagtcggtccgcaaaagtcggtccgcaaatgtcggtccgcaaaagtcggtccgcaaatgtcggtccgcaaaagtcggtccgcaaatgtcggtccgcaaaagtcggtccgcaaatgtcggtccgcaaaagtcggtccgcaaatgtcggtccgcaaaagtcggtccgcaaatgtcggtccgcaaatgtcggtccgcaaatgtcggtccgcaaatgtcggtccgcaaatgtcggtccgcaaaagtcggtccgcaaatgtcggtccgcaaatgtcggtccgcaaatgtcggtccgcaaatgtcggtccgcaaatgtcggtccgcaaatgtcggtccgcaaatgtcggtccgcaaatgtcggtccgcaaatgtcggtccgcaaatgtcggctaaccaaaaaaatataataaatttcagggttttgatcagtatttggataaaagtcaggaaattaaaaatggatattaa

SEQ ID NO: 61990 - DNA, 1473 bp, Heterodera glycines
agttggcatgtcgtcttgctgtgaagacatttttagctcgcgagttaagctgcggcgactcatcatatcaattggtgttgatcttcgaactttttgcatggcaaatggaaaagcaaagtgccgacaaatggtaatggacacactgggacggcactcagacaatgaaagagcattctcgacgaagaggtgtaaattgctttttgcgtatttaaacaattcttaatgttaataaacccaaacttatttcagtcggatttgctgctgaaggacggcgtttcctcggagagtctttctccggcagagtcttccgcttctcttctgccgcgttatgtgcgcgtgaacaccgtcagaatggccttcacacaagcagttgaactgcttgaacgggacgggtggtgcctttgtcgtttgaagaagcgcattacgccaagcaaatatcgaagattggtgtcaacattggagtcgcctaaaatttacgtggacccgcacatttacgacttgttgatattcccacggggggtggatttgcacaacaacaaattggtcaccgatggaattttggtcctccaagacaaagtatcccactaaaatgttggcacttttcatttgtctgttttccctaggcaagttgtctctccgcctttgtgcttcagcctgagcccggcgcatcggcgatggatgtttgcgcagcgcccggcatgaaaacgactcatttggctgccttaatgcacaaccgcgggtcactttttgatgcacttaagtggacacatttgtttcacattttcagaacgatatgggctttcgatcgcgatcagaaaagggtggcagtgctacgacaaatggtcaagcgaagtggcgcagggattgtgacggcgcaatgtgcggatttcttacgggtcaatttgcttgacgggcgatataaaaaggtattgcatcgatttttacaaagacaggaattttacgccctttttaggtgagatttgttgttgtggatccgccatgttccggctcgggaatggcaaagcggagcgagcatttggacgaatttgaagagcccgatgagcagcgtataaaggcactggccaaccttcaggtaaagccaactgcaaattgggattttgcttttcaatttcgacccgtttcctgagggttcgcgcctcacctcatacttttctttctttttgggtaatgcttcttcggcacgccttccgtctcccctctctgcagcgtctcgtctactccacttgctctgtgcattgggccgaaaatgagggagtcatttcggagattttgtcctcttcaccactcagtgagcatttctcgctggtcgaccctttgcctcaatggcgccaccggggacaattgggccaaagtgggaacgccgaactccgcaaatgtttgagggcgtcaccaaagagggatttgaccaacggattttttgttgcattgtttcaacggagaaattcataaaca

SEQ ID NO: 61991 - DNA, 104 bp, Heterodera glycines
gtgacaaggtgatatgttgtcaaagtgtctccgctcgtcaatttttggctgctttaattgtgcgctccaaaatgtgtcttctgctggcgttttaatgaattcgg

SEQ ID NO: 61992 - DNA, 920 bp, Heterodera glycines
atgccaaaacaaaacgaaatcgttttaaaatattcctttctggacttgacttggtttcttgatatcgaagctcttttctacgctatttctaaaacggttataccaaaccccagatttttgaatccggttttcagaaaaaatgccttgtggtgaaaacaatatttcacatttcactccataactttgtgagttcggcacggatcgagaccgggataagaccattggaaagagcagctcgagctctacaagaaggtatggaaagaaaaaatagttatttctgggactttttcagaaatcagaattaattctccaatgtggcccaaattttaggcccccagccacagccccttgcttctcccagttttaagtcttggatttgtcaaataaattcaagacttcaaattaataatcaaaaattctcttaaaatttttttgaacccaattcaaaaaaggaaaaaaatttgcagtcaaaaaattattcgaatttctccaattttgtttccataatttccgaaagttattcggtatcataatgccaaaacaaaacgaaatcgttttaaaatattcctttctggacttgacttggtttcttgatatcgaagctgttttctacgctatttctaaaacggttataccaaaccccagatttttgaatccggttttcagaaaaaatgccttgtggtgaaaacaatatttcacatttcactccataactttgtgagttcggcacggatcgagaccgcgataagaccattggaaagagcagctcgagctctacaagaacgtatggaaagaaaaaatagttatttctgggactttttcagaaatcagaattaattctccaatgtggcccaaattttaggcccccagccacagccccttgcttctcccagttttaagtcttggatttgtcaaataaa

SEQ ID NO: 61993 - DNA, 465 bp, Heterodera glycines
atccgaattccgtcgacaatcggcgtctgtacgttctgaaaaagtccgagtcgccacaatgggaggatttgggctgggcctggggaaaacgttcacttccaaattcggaaaagtcggcacagagcagcgcaaattgggacgatttgggctgggcgtggggaaagcgatcgtcggccggcggaggaggcgaagcgatgaggagggcaaaagcgcacgggactgacccaattttggtgagacctttgggggagggagggcaaagcaccgggaagggggacgaaataaaaagggggagggcattcagatgaatgacacgcgggggggcacttattaaacccattaaaagaagagggacaaaaagccatcgcaacaatttcagtcggtagtcgccaatcgggttgttcgttcgatgagcaaacagagcccggactggcacgacttgggctgggctttgggacggaggaa

SEQ ID NO: 61994 - DNA, 496 bp, Heterodera glycines
tctgataaaagttccttccgtgcttttctctgatgagcagaaaccaaaccaagcaccccaaagtgaataattaaatgcacaaaacaaatggattaataaggatgcaattaattatttataaataattcgggcagccaaatggacaaaaacggggggggggggggggaattagacaaattaagcaaaaagcgactgatatttgcatggactgacaaatgagtgcggtaaatgggcgagaaaggaatgacggatggatgataataaacaaattggcattcactgaaacattccattcattcgtcagcatttaaaaatgtttttatttaatttaatttataattaacaggcgcaatttattatttgattttattaagaacaaaacaaaaaaacatgctgagtaaagcgcgcatcattgtggaacagagcagttcaaaatttttgtcattttatttataaaatgccacttatgtttctacctctttttaggcaactcctt

SEQ ID NO: 61995 - DNA, 810 bp, Heterodera glycines
atgctctatttgaatgcccactttctaatcactgttgtacctcttttaatcacttttgtacctcttctaatcactgttgtacctcttctaatctctgttgtacctcttctaatcgctgttgtacctcttctaatcactgttgaacctcttctaatcactcttctaatcgctgttgtacctctcctaatcactgttgtacctctttttatcacagttgtacctcttctaatcactcttctaatcgctgttgtacctcttctatttactgttgtacctcttctaatcactgttgtacctcttctaatcactgttgtacctcttttaatcactcttctaatcactgttgtacctctcctaatcactgttgtacctctttttatcacagttgtacctcttctaatcgctgttgtacctcttctaatcactgttgtacctcttctaatcgctgttgaacctcttctaatcactgttgtacctcttctaatcgctgttgaacctcttctaatcgctgttgtacctcttctaatcactgttgaacctcttttaatcactcttctaatcactgttgtacctcttctaatcactgttgtacctcttctaatcgctgttgtacctcttctaatcactgttgtacctcttctaatcgctgttgtacctcttctaatcactgttgaacctcttctaatcgctgttgaacctcttctaatcgctgttgtacctcttctaatcactgttgaacctcttttaatcactcttctaatcactgttgtacctcttctaatcactgttgtacctcttctaatcgctgtt

SEQ ID NO: 61996 - DNA, 438 bp, Heterodera glycines
atgactgccaattatttgggcacattttgcggtggcggcggtggcaccactgagacgacaacggcacaactcaaagtgctgaagaaaaagtggcggaagaagaagaaaaacaaaagtgccagcggtggtgccaaaaagagcggcaaaaacaaaaatattggcattttgtcctcgtcatcgtcgtcggtggagcagcagccggaagagaacggcaccgtcacaacgccacagcagcaacgacacatggcggcagcatcatttgaaatgacagtgactgctaccacggctggtaacactgctgatacggtagtgggggtgcccaaaacgacaccgccagtgttggcaacgtctgagagtgtgccatcgtcgtctgccgcctcggcaacaaaagcgtccgctcccgcaggtggcgatgcctcttttgaacgtgccgacaaa

SEQ ID NO: 61997 - DNA, 427 bp, Heterodera glycines
atgatgaatcgtaaaaaaattgaaaatcttcaaaaatgtcgtaagcgcaagtttttggataacaatgacagtgaaaacgaaacgctatctgctgatcaccgtgaacaaaatgagaacaacaacgaccgcgacgatgattttgaagaacacgccatcgtaaacttcgaacttggagaaacgaaaagaggaggtgtctgcatttggtttaatggtgagaaaaaattttttcaagaaatattttcgtttttaagggttccgatttacgcacaaacaaaatgagttgtggagatgcagtgtgcgtgactgccctgcacgcgtgacaatcaccgacaaaagcgacaatggaatggccggatatttcggacaaaaagtccataatcacctcccagagccacaaaaacaacgggtttcggacaatcattgctaa

SEQ ID NO: 61998 - DNA, 810 bp, Heterodera glycines
atgccgaaaggacgatcatcacattggcttatgtgctggaagaaccaaccgggaaaccaatcccggccctccggtgaacccgaacggaaggagaacaaccacgcgatgctgatcagtgggatggaccaacccactcacgttactacatcacgagacgagccgaacagtcgagacatatccgagacgaatgccggggagcaacgggctttcaccgcttttggaagccgagtcccggcccagcaaatgatccgaagagtgaccgcagcagcagaagaaggcgaagacgaatgccaaacaacattgttgtttgatccaggaagccaccttgactgcgccgagactgagctaattcaacatctcggaccgcaacccatcgacaagcggccgcttacagttcaagtgttcggaggaaagaagcagcggattcggtcagcaacttatcgcctacgactcaaacggaccgacggcaaatgggagagcattgaggtgtctgaagtacctcagatctgtacgctaatcagaacagaactcatcgagtcgggagcaacacccgatagcgacccgcgaaccatcacacagacaacgcaacctcaaataatgatcggcattcgaaagttctgggattacgtggtcggatttcggaaaatcgagagtggcgcgcatgtgattgacaccgtgtttggacaagttttgtgcggcgaaggcacccaagcgagcagcggggcaactcccgcggcatcaatcctaacaaccatgcaatgcggaaatatccaccaaactcgaacaaataaacaacaacaaatcggagaa

SEQ ID NO: 61999 - DNA, 1389 bp, Heterodera glycines
atgctcaagctgttcccgcgcggccactctgtttcatcgtcgctgctaattgcgctgctggaggacggagacgaacaaagtgataattcatccgctgttgatggtgggtttaattgccgggaaggactgtcccctctttcgttgtcctctttttctgacaccgatgattctccggacgagttcatcgtctgattgtgcccctcttgcgtcgttctgctgctgcctcttccgacatgtcccccaactcggcgctgtctcccgccccctcctcttcttcctctgcttcgctgttggcgtcgtactgctcgccctcccttcccttccatttgctcagtttcagaggtcacatcgtttcccatcgccactgtttccaaagtgatgggtccgcctctgctccgtcttgccatgcctcctccccctctcctgcggctcccaattgttgttgctctgccggtggtgctcaatctcagcgccggtgcgtcgttgtcatcattgattttgtcggcagatgccgttgtttggagtgatgaaagacgccctccgccaccacgcggatgacccgccctccgccctctacgaacaggcgaaaaaagcactcttcttccactgctggcccctggtgggtcatccgccgcctctgccagtccaattgcggacgacagggatgacaattcagaagatgatgagccaatgctgctgttgctgtcgtctctcgctggccttctcgccgttcgttttgctgtggtggttgtgttgcagttactcgtcggccttcccgttgtcctttcttcaatgaccgacgaatgctttcttccgttcagaaactcattttgtgttgttgcagtgcttttcggcaacagcgatttcttccttgtgcttttcctcaattggagctgttgagttgtgtcaacggatcgtcgaatgccgacgagtcgtcgcgggcgttccattccattcggcacgggccgtttccgttcgccggaaggcggcttgaactcgtcgagctcatcactcacagtctctgctgatgagtcagtgcttatgaagtcgttggaattgtccagtgtttccacttaatttcattaattttttatttttgtaaacaagttttgtagaccttaaaaattagcgataatttgaagaaaaaacactttgccaaaattttgtttttttgagcaaaaaatttatttgaatttttttgttcttttttcgctgctggtggtggtttacctatatacgactgctcgccctggacctggatccaaaactgggttttcctggatccagcaggtccaagccatttttggcaacctggatttcctggaatatatttagaattggtttttcaagcgaccattgttttatttcaagttatcaaaaaatgattaa

SEQ ID NO: 62000 - DNA, 549 bp, Heterodera glycines
atgaaaaattcaggttgtcgaaaaacagtctggacctggacctggatgaaaaaaaatctaggccaggatctcggtcaaggtgagctcaactttttacagaaattttaaatcagatgaaaatttcaactgaaaagctatgctaaaaaatgaagttataaaatgaaaatcgaattgcaatcggattttaattggaaaaacaaaaacctcaaaaaatcgactttcaactttttctgaattttttcatcacttttattttataaaacacaaatatgtattaatgttatgccatataatttattttaaattaattttctattctcaagtttcgcgtttcatttcttattatttggattatgtccttggatttcaggacgtccttaggcataaacttgcagccttcggatggataaagatcggatttaagaaaattatgattttgaacatggataatttccactgacaataattcttggtacatggtgctgttttacataactgaaattcagtaccgatttttacaaaaatttcctctcaggcatatttctccta

SEQ ID NO: 62001 - DNA, 777 bp, Heterodera glycines
  unsure (1)..(777): unsure at all n locations
atgagtgaattaagcggacaacaatttccccaaaatgttggcatttctgttcaaccaaaagcccgagtggaagtcgaagaacaaaattcacagcaaaatgatgttgttgtaagtgaatgaaaatggacgggaatttgctgacgaaacgaatttcagaaaattagattttctgcagtttctacaatcaattaaatagaattattacatttgtattttaatttgtctgactcttttcaattttattcgtttatgccattcccgaagttgtccctttgtccgggagccgagattagtccgggaattgattggcttttaattttttttgtattttaattttaaggcacaaaaacaaaacttttcggccgaccaattggacaaattggaacgcaaatttggcataacgaaatacccaagtgctgcttcgcgtgtacagttggccatggaaactggaattatggagaagcaagtccaagtagggggcactaatttcattgaaaaaaatattaaaaatttatttttaattattntaaacaacaattttcatttaggaatggttccaagaacgacaattacaacggaaacgaaaaacaatgtgggctttggctaaatattttttttaattttttaattttcaacgaatttaagccttgaacatttttttttcaaaaatttagggaccaacaaaacccacaattgccacacatttatgacaaaattatggctgttgtgcaaaaaactgttgatgacgaagtaattgcactacaaaatgatgacgat

SEQ ID NO: 62002 - DNA, 932 bp, Heterodera glycines
ttatttacgtggctgttgaagcaatgtattattgtactcgtaagtctgtgaatttatttaactatggacaaagtgacgagattttacgggtgaaaaaaaattcagtccaaattaccaatgttttaaaacaataaatttgtcaaaaactttaaaaaatttaaaggttgggcgttgctaaaagaatattgtaatagagatcggaattttgaaaaatgccgaaaaatgaagaggattggaaaatgatggacaggaaacaagcggaaaaattgaaaaattgctggatttcttttccagtaattttccaccaaaaatgcaacaacattaagccattaatatatttaaaaatattatatatgttttttagactttgtctatgagtcgggacagaatctttgccctccgacggatccgccgctcacttattacgcttcggtgcacttgtgctgcaaggaggactcggaatttggcacggcattaatttacaggacgttcgcaacggaaccgccaacaacttttccgcaggggtgccggggtaagaaatttgaaaaattaaatcaaattaaaaaaattataaatttaaattaattttaagaaaattaaaaaaataaaattaaacaataaatttacattcaatttatgataacttcataaattaattttggccaattaaaatttattgtaaaacttttttaaggatgaggatgaaattttagtcttttaaattatttttaatcactaaaaagttttccatgaaaactttttaattctttcccattttttgaaaaataaatttcaaatccatttattaattacattaaaatgtttctgtgaatttagctgctttgcatgaagcagcaattggccaatatgtttgcaaaagtggcgaggacgcgtacagcaattgggacgccacttttgctgatgtgatcccc

SEQ ID NO: 62003 - DNA, 905 bp, Heterodera glycines
atggaaattgaaaaagggtcggaatttgcgggagagtctgtcgggagaagcagattcagtgatgccgtgtatataaatggatttccatgggaaattgaagcagaaataagaaaaaagaccgaagacactgatgagaagaaatatttggggttttacttattgtgcgatgcaaaagaaggtacaattttaataaatattaaaaatataatcattattaaaataggaggaccatggaactgcgttttttctgcaacctttcgaattgtgtcagaaaagaccgaagcggagaattccattgggacattgtgtgactgtgttattaaccagtcacgtttctgttggggattcggatttttcattacttttgctgtgagtaataatttaacatatttacttaattgatataattatggttaatcaaggaattgatgggctcgaacaagagcttttacaacaaagcagaggacaaattggcattggccattgatgtcataactgttgatgagccaaaaattgagaaattcgtttccgatcccaacaaatccaacggcacactttcaatggaaattgaaaaagtgtcggaatttgcgcgtgaaataattggaagtgaacgtaaaagtgaaactgtgcacatcaaaggattgccatggaaaatatgggcaggaattattacgaaaaatggaagcactgacaaaaatgagaaatggttgggcattttctttttgtgcgatgctccaaaagaaggtgcaaaattactaataattaatatatatattaacaacaattaattaattgatattgagcagaaaattggagttgcaaatgttcggcaaactttcgaattgtctctctaaagagcggagtgtcggattttaaattagaattaaatgacgatgtttttgaca

SEQ ID NO: 62004 - DNA, 503 bp, Heterodera glycines
atggagaaggcctgcaaaatttggagagattatatcgattttagtgcgctaggttcgatgaaactttttaaaatataagcctaaactttttggcctgtttaaaaaggaattaaaaatttttaaaaattttattcatctcccttttgatagaaaaagcatcagagagccttatttaacttttaattaacatttggtgcgtttcagagcagtttctgaaaaaatatttatgaattaattttgctaaaaaaataaaatagtgaagctttaaaaattaataaaaaattttaaattcagaattactggagttagcatcatagcagtgcttttccttgtctttttgatgctctcgcaaaatctggttcgcttctgatcagtttataaaaaaaaagttaagcctaaaatttttcgcatatttaaaaagcaattaaaaatttttagatttttattcatctccctttttgatagtgaaagcatctgagtgcctaaaataacttgtaaataaa

SEQ ID NO: 62005 - DNA, 733 bp, Heterodera glycines
atgccaattgtcacgccgggacacattgaacaaaatgccgctttcaatgtgaaccgatcaaccgcaacaatcattcggcgagaaatgcaaaacggtgccatttaaagggaaataaactaattagtgaattaaaaagtggtgtcatcattaattgaatatttttagcaattaaaattgtacgaaattggccaaatctgagcatttcattgaatgaaaaatggaaaagcttaataaaggctaaacagttcaatgaaaaggtgatcatcaataatagttatttaaattggttatcaaatttcaaaattttcccacagttttcccatttcattcgcattatttgcaaagccttcgcattggccgacttttacgacttttgtggctacgtggagacgcgaatccgtctccaattgattattaatgtcgtgccattcgatcgcgttcgattggcacatgcgaaaaaagttgcggaaaaggagcaagaaaattttggcgaaaggaataacaaaaagtgatgcgtttgctttttggcaatttaataattagtcactccaatttcggggaaaggtcctaatttgataattaagaaacaaattaccttgtaggaaactatcacaactagggcttatatttttagttttttcactatttttttcctgtgcttcctatggtctgaaacgcatgaaaaactttttttgggtttttgttaagctagtttttattttttcacctaaaa

SEQ ID NO: 62006 - DNA, 941 bp, Heterodera glycines
atgctggaaaacagtgagagtttttgaaatagttcagtgtcgaaatttctctatgtcgaaaacgtagtgtcgaaattacttagtgtcgaaaatactcagtgtcgaatttaccagccaccgactgatcggagggggacacagaagtgattagcaaaagagtggtaattggtgtccaattcaagatcgaaacgcgcgttcgccagaagagcaaattagtcttgcaaattgtgtccaaatgcggcgcctcctcagccagggacattctcacagcgcaattgggccaactggtgcccgtcgatgtgtttggtgcgtgcagtgggaaggagtgtgatgaacagtgctacaggcaggaaatgggtaattaagcaattggttactaccccaattaacgacaattaacaaatattgaaaaaactaataattacccatttaaatcatcttttagcatcgcatttcttctatttggcatttgaaaattcggtgtgccctcaatatgtgactgagaagttttggaacgctttccgcgcactgactgtgccggtggtgctgcgccgggcggtgctccgcggaatgggcgtgccggacgacgcttacatcgcagccgacgacttttgcagtgcgcaagaattggcacaacatttgttgacactccgacatgacactgaccgatacatgcagtgaattttttaattacattttgtcaatccgccgagggaacaattggcctaattaattggtcaattaacagattcttcaattggacacggaagtacagcaaaaagaagagaaagtcgctactttctccaatttgccaactctgtaaaatcgcacaaaaatatccaaggccaaaatatgcaatcgacaagagaaatttttggactgaagcacaatgtaaatacaattttgttgaaaaagatctcttcaactgttcacaaaataaa

SEQ ID NO: 62007 - DNA, 558 bp, Heterodera glycines
agcaagaatattgctatcttgcctaggcgggattctgacttagaggcgttcagtcataatccctcagatggtagcttcgcaccattggtctatcgaccaagcacatgaaccaaatgtctgaacctgcggttcctctcgtactaagcaggattactatcatagcaacaggtctttagtagggtaaaactaacctgtctcacgacggtctaaacccagctcacgttccctattggtgggtgaacaatccaacgcttggcgaattctgcttcgcaatgataggaagagccgacatcgaaggatcaaaaagcgacgtcgctatggacgcttggccgccacaagccagttatccctgtggtaacttttctgacacctcttgctggaaactttacacattcaaaaggatcgataagccacgctttcgcggtccgtattcgtactgaaaatcaggatcaagtaagcatttgcctttttgctctacgagaggtttccgtcctctctgagctcgccttaggacacctgcgttacgctttgacagatgtaccgccccagtcaaactcc

SEQ ID NO: 62008 - DNA, 425 bp, Heterodera glycines
atgataaatgctagtccgtatagtattgctgttcataaggacaataaccaccctttttcgaacattcctaagagcggacgatttcgtaaaaatcttttctcttttctgatccgtgatggtgattatcgtctttcgtgggatttttttaaacatgcttcaagacgaattcactgcccggttaccaaattttaccgatacattaacggactggtacaaattgtatctacggataagaaaaaaccgcgtattttcatctatttctatcaggaaggggaaggaaaatttcgagctccttcttcttatcaagggtggcttatgaggtgtgaaatagactttgacgagattattacgacttatttggtcaaaggtagattgtcgtcgtttgctcaaataatcattgaatcgtttatttgtctatttgaaag

SEQ ID NO: 62009 - DNA, 360 bp, Heterodera glycines
atgtttcagttctatctaagccctctgtaccgtgttaaactacggtccaaaacgattgtaaatttgttcagtattcgtgaatggctagtttcgccggtcatcctaattgtttatggcttctttagcattgtcgaccggtaggtttcgggtttaaggtgtaataaattaatattttcagtgaaatgcaagaagcgtggaaacttctcaacataggcctcccttcgctaaaggatatatgcaccaaaagcatttctgagaatgagaaagctttggaagaatttcgatcgttcccatttgtttttaaaaaattatttacacgtttttaataaaaaaatgattatgttttaaacttctaataaa

SEQ ID NO: 62010 - DNA, 807 bp, Heterodera glycines
agtcctcaacccaccaacatttcaatcactgggcactcaacccaccaacattctcaatcactgggactcaacccaccaacatttcaatcactgggactcaacccaccaacatttcaatcactggtactcaacccaagagcattacaatcactggcactcaacccaccaacatttcaatcactggtactcaacccaccagcattacaatcactgggactcaacccaccaacatttcaatcactgggactcaacccaccaacatttcaatcactgggactcaacccaccaacatttcaatcactggcactcaacccaccaacatttcaatcactgggactcaacccaccagcattacaatcactgggactcaacccaacagcattccaatcactgggactcaacccaccaacatttcaatcactgggactcaacccaccaacatttcaatcactgggactcaacccaccaacatttcaatcactgggactcaacccaccagcattacaatcactgggactcaacccaccaacatttcaatcactgggactcaacccaccagcatttcaatcactggaactcaaccccaccagcattccaatcactggggactcaacccaccagcatttcaatcactggggactcaacccaccaacatttcaatcactggcactcaacccaccagaattcaatcactgggactcaaaccaccaacatttcaatcactggaactcaacccaaaatattttcaatcactgggactccacccaccagaattcaatcagtgcgactcaaccccacagcatttaa

SEQ ID NO: 62011 - DNA, 430 bp, Heterodera glycines
atggcacgacaaatatttggcggacatggaaaaggtgttgggacagaagcgagctcagccgcgaaatctattgacagagcaaaagtataaaagtctaatggaaaaagtgaaggtaaagaaagaaaagggaaaagcaaaaaaaggaaataaataaaaatataaataatttagagacaaaaaattaataaagcataaaaacaaaatgaaaatttaaaaggcaaaaaatagaattgaaaaagggacaaaaaataaataattagaataatcaaaaggaaataaataaaggaatttaaatattaatcaaaaaataataaaaacaataaaattaattaaaattttagttggccgaaagcattcgaagaatgaatggccaagtgccgaagaagcatttaaatggaataatgaaaaagtacagaatttggaaaaataa

SEQ ID NO: 62012 - DNA, 149 bp, Heterodera glycines
gtgcatattcgatattcagttattgcaaattgttactcaaaatggcctcttttctccgttttttggcctgccgtcacttttctatgtcgtccgttttgcgcaaagaggcggaacaacttaccaatgaacacatcgacaaaattcggcag

SEQ ID NO: 62013 - DNA, 729 bp, Heterodera glycines
atgattatggactggaatggtctagaacatgtcggtatgtctgatctcaattcagataagcaaaacgtgagacaaagaatgattgataaaatatcattcaatggggataggtatcaaacggaattgttatgggatgaagaattggctgctcaattgccaacaaattatgatatggcttttagacagttaatgtcaaatttgggcagacttagaaaaacaccggatttgcttcgacaaatccatgaaatcaaaatggaacaagtcgaaaccgggtttattgaagaatgtgagccattacctattgaagaaaggtatttggttggaaataaagttcattatttaccacatcacccagtggtaaaggaaacgagtgaacatactaaggttcgaattgtgtataatgcgtccgctagatgcagaggaggtctcaccctcagccaagtgttagaaaagggagaaaatgactataacgatttggcaggtatattaattcgaattcgaattaagccaatgctgttgacttgtgacatcgctaaggcatttcatcaaattttggtacatccaaaagacagagatgcgatgcgatttttgtgggtcagagacccatatgtagaagattctcccctcgtggagtatcggtttacgagagtcacgtttggagtcatttgttcgccagctcatctctctttgacaatcaaacttcatttgtccaaatacaaggacaaaaaa

SEQ ID NO: 62014 - DNA, 377 bp, Heterodera glycines
atggaccaaatgtgagaaaagcggaaatttttttttgtttttgaaaatttaatttgttttgttttagcggcggcactttcagcgaccaaatttggctcgacacattggcgtggattggacgtggcgaggtcggatggcacttggcgctggtcaacgcccgcttcgccgccctggtgaacatgcagctgcagcagaggcggtggtgtttggaggagtttcacatcagtgagcggaagccgaaacggactggcgccgaagtgttgagcttggcaaacaacggctcctacttctcgttgccattggccacctcaccgttgccggacagtgtcatcggattcaacggcacattcaacatttggtcgccattcaatttttga

SEQ ID NO: 62015 - DNA, 507 bp, Heterodera glycines
atggcattccgaggccccaaaaattttcggaaatcggaattccgaggcccaaaaatttttcggaagtcggaaatcggaattccgtgccatccctggtatacactagcaggattagggctcgtttcggcgccaagccaaaaacttgaaaaatcaaacgaaccagaaatgttcgtatctgatttacctcacagttcgaccgacacgatttagccttcacgtttgggccccgcatgtttttttagctacaacttttttctttgccaaccaaatccaacactgttggtatcattcgatagcccttcagatgctctattagcctgcaaaatttcaataaatttcgtcagttttgaacaaatttatggccagaaaggttagaaaatttggttttttgaattcttctggccataacgtttttgaacttaaacaaaattttgaaaaatttttaggctaattgatgacaatcaggtctatcgaatgataccaacaaaatgctgatttggttgacaa

SEQ ID NO: 62016 - DNA, 639 bp, Heterodera glycines
atggtcaacttttgtgttatctatcgagcatttctcgtgttcggctcacaatcagtgatcattcttttgttcatcagggtaattaattaattaattaattgagcaattagtttttgattgttggcactttttcactctccagggccttttggaaggtcatttcaatgcaaaaacaatggacgactatttggagaatggcaagcaaattgagaccaattcgtacttgttgaccactcatttgtcacttcgaaagatgaccattcaattgctgacagtgggagaacattttggatacaaattttaatgtgaagaattaagaaactgacgaaactcataattttgactgttaaatttaatatgagttatctccgggttttttttactgtaacttttttatttgtcaaccaaatcagcattttgttggtatcattcgatagacctgattgtcatcaattagcctaaaaatttttcaaaattttgtttaagttcaaaaacgttatggccagaagaattcaaaaaaccaaattttctaacctttctggccataaatttgttcaaaactgacgaaatttattgaaattttgcaggctaatagagcatctgaagggctatcgaatgataccaacagtgttggatttg

SEQ ID NO: 62017 - DNA, 533 bp, Heterodera glycines
tgtttatcaattgggcactaatagagcatttttattgtattatccctctattcagtgatttatcaattaaggcactaatagagcatttttattgtattatccctctattcagtgatttatcaattaaggcactaatagagtatttttattgtattatccctctattcagtgatttatcaattaaggcactaatagagcatttttattgtattatccctctattcagtgatttatcaattaaggcactaatagagtatttttattgtattatccctctattcagtgatttatcaattaaggcactaatagagcatttttattgtattatccctctattcagtgatttatcaattaaggcactaatagagcatttttattgtattatccctctattcagtgatttatcaattaaggcactaatagagcatttttattgtattatccctctattcagtgatttatcaattaaggcactaatagagcatttttattgtattatccctctattcagtgatttatcaattgggcactaa

SEQ ID NO: 62018 - DNA, 155 bp, Heterodera glycines
atgattgcgcgtaattgccgaaaaaattcgagaccaatttccgaatgttgaccgactaattgcaaaacgaaagccgtctttgtcaaagcgccttaccgagtcaaaaaatttggaaatgtatctcatatgcaatttcaaccaataaatttgaagaa

SEQ ID NO: 62019 - DNA, 316 bp, Heterodera glycines
atggattttcaaaactactccatggtcaatttggtgaggaaatttgagcataatttccggatttaaataatttaatttttcaaatttaatattatataaaattataaatttaaggcatttaatcgtttcggtgttggcacctttttaatggaattgtttttgtcaaattcgtgccgttggctcattacgcttcctggcttaatgtttaattctgcacttttgtacacaaccatacgcgaaaagttaaatttaaattatcccgagcccgatacccgggcccggttttttgaaaatcaaatacccggtacccgacccg

SEQ ID NO: 62020 - DNA, 1174 bp, Heterodera glycines
atgggctcgcccattacccagccaaagaatcggctttttcatcgtgcaattttgctggacggaagtgccatgtcgccatgggccatggcacacactgcgcagactcagttcatgaggctggccgaggagttgaaggtgtacaaattgggagacataaataattttaaattaaattaattaaatcaattaatgtaaaattgtcccaatgttattgttttgttaagtgtttccacatccatcgttcatcttccagcagttttttggacgaatctttacaagttcttcgttgtattcaggcacaaattttaattatttaaaaacattttttatttttaaataatatatatatatattaaggagcacagtgaacagaatgtgagcacagctgcgcgccatgttgcttcagcatcgccaacatttttgagcgcatttgcaccaattgttgacggacaggtgggccaatatttaaaatttctaattttatttaattaattataaaattaaaaacagattgtgccaaatcatccgcgtgtgctgttcaacccccaatacggcacattgttccgtgaaattgaccttatggtcggcactgtgcttaatccggcacaccatctgttggcgaaggatgacctggagaatggcatcagtgtggagaagagggacaaaatattgaggtgaatgaacgaaatggttttgggcatactgtcagtacacagtatatttgactggcacttaaaatttttaccatggataagtgatatattgtatatatgtattatgacgggctattctttcaagaactttggtgcgaaatattttcgactttcatcgcaccgaaatttttcaagccattctcaacaaatatacggattgggaaaatcccaaggtgaaattatttaaaaaatagttttttttttataaaatccgtttttttaaggaccatccaaaatctgtaaggaatggactaatggcagcacttggcgatttgctttttacaagtgcatttataaatatactttcttttttttctttctctctttttcaatatttttaattccttttttaaattcatttttcagctcctctcattgaaactttgagggcccattcgcttgccgatgccaatttgggcggttcagaggagaagaaatcatcagccaacacatttttgtag

SEQ ID NO: 62021 - DNA, 375 bp, Heterodera glycines
atgtgcactgtaatgcttcttgccggtgacgagccttataaaagatatttgggggtgagttgaaaagcaaagccaaaaacacacaatatgattttgtttttaattttagcacatagcccgatgcaaaggtttagtaatttaaaaaaggggaattttaaaattttcacacaaaaattcttgaaattctaggcgtggacaacttattggaagggtaagtgcattaaaataaaattattcattaatgcacaaatgttgagcattttttcattcaaaaatttgaattaagttggaccgatgtgtgtaacgggacaaaagcttctaagttttacgatgtttgttaaacatatttaattaaattttgagaaattaatttaa

SEQ ID NO: 62022 - DNA, 247 bp, Heterodera glycines
atggagaaggcctgcaaaatttggagagattatatcgattttagtgcgctaggttcgatgaaactttttaaaatataagcctaaaatctttcgcaaatttaaaaagcaattaaaaatttttagattttttattcatctccctttttgatagtgaaagcatcagagagccttatttaacttttaattaacatttggtgcgtttcagagcacgttctaaaaaatatttatgaattaattttgcaaaata

SEQ ID NO: 62023 - DNA, 456 bp, Heterodera glycines
ggactgcccacaaacgagcaaggagaaaaagaaacctttaaggaaaacgagaggcgaaggagagaaccaacagaccgaccggagagaaaaaggccggacgaagaacaaactgcaaacgaaaaccacggacgcaacgccagcacaaaggaagacgaaaagaaaggccaaagagcgccgacaccagccgacacgggccggaaaagcccaggacccgccgccaaaaagcgacaacgaaccaagagcacaaaaaccgacacaagcgcacacaaaaaagccggccctctccattgaaaaggactcacttaacgtgagagaccgcttacgcttgaagtttttaaaatatatcgaaattctagacttttgcattactcacccattttttgcgaaattaattcataagtattttttcagattcagctccgaaacgcaccaaatgttacttatgaagttaaatag

SEQ ID NO: 62024 - DNA, 498 bp, Heterodera glycines
atggagaaggcctgcaaaatttggagagattatatcgattttagtgcgctaggttcgatgaaactttttaaaatataagcctaaactttttggcctgtttaaaaaggaattaaaaatttttaaaaattttattcatctcccttttgatagaaaaagcatcagagagccttatttaacttttaattaacatttggtgcgtttcagagcagtttctgaaaaaatatttatgaattgattttgctaaaaaaataaaatagtgaagctttaaaaattaataaaaaattttaaattcagaattactggagttagcatcatagcagtgcttttccttgtctttttgatgccctcgcaaaatctggttcgcttctgatcagtttataaaaaaaaagttaagcctaaagtttttcgctcgtttaaaaagcaattaaaaatttttagatttttattcatctccctttttgatagtgaaagcatctgagtgcctaaactaacctgtaa

SEQ ID NO: 62025 - DNA, 77 bp, Heterodera glycines
aagcatcagagagccttatttaacttttaattaacatttggtgcgtttcagagcacgttctaaaaaatatttatgaa

SEQ ID NO: 62026 - DNA, 72 bp, Heterodera glycines
atgaccaatcagttcgctcttccgcctctcaattggcttatccttttcgcgagttttctgtcggcaaaggcg

SEQ ID NO: 62027 - DNA, 2325 bp, Heterodera glycines
atgatgatgatgatgatgattggatggataatgaaaatttgggtaatcacactacaaatcttcaatcacccaacagatcaatcaatcaatcagtcatcaattgtccactggtatgaggcagatcacgctgatccggctttggctgagctgattcatcaaatgtatatggcttgcaatcgcatttttctttgttgtcgccctttttgtcgttgtcgccgttgccttccgtcaagcatttgcagcagggctgcacgcaattacggattacggattgcggattacggaaattacggggttttgggagttacggattacggattacgggttacggatttttgggatttttccgtaatttgatccgtaattttacttttggattattttttcgagacgatttcttgtaagattatttttataaaaaacaaattattctattttttatttaaagggctacccgtatttcgatttatttaagaattaaaatagatttataatttcttatttgttgttgttaaggttatttgggtagttcgcctagaaaatagaggcatcacttttttgtcacacctatttttcacgcattttatgaaaattcataaaaccttagccaggtaaggggaggaattccccccccccccttcccccgcccgaaatgaaaaattaaaaattttacaggaaaaattgggacttttaaattttttttgtcgatttttcttaataaaatcattaaaatttaaaaaaaaatttgcccgacggcacctatcggcaccgcctgaccacgatttactcgattttaccttattttttaaatgttgactccaaaatggcaaaaattagtcttttttggctaaaaatggttaaaattcctgtttttgctcttcggcgctgaacttttttaaataacactaaataaattttaccaaaaaaattcttcggattcccccccccccccccccccgtaatttttttctggctattaaaatgttgaaataattatatacatatacataaatccgattataatgatcagactttcaaaaaattttcaaaaatcaacccataaattcaaaaagaatgatttgatcagacacaaaattataaattatttgtaaaatttaaataaaaaatgaagaaactccatcaagaaaatcagttttttgatttttattaatcactatttaaaaatttttttctaaaattctgacaaaaattgatttttaaaaattacggattacggattgcggattacgggaaattacggggtttttggacccccgtaattacggattacggatttccgtaactgagaaaatcgccgtaattacggattacggatttccgtaattgcaaatccagttgcgtgcagccctgctttgcaccgacattgtttcccgtttctttttataataaaatcgagggatgttgctgtacaaaaaaacagcttgtcattgtatcgttcgcactgcttcacacaatctttccacccttcgtcttcggacgttatatggggcaattgttctacactaggaggatcaggacaactttcgttgcgggatgttgatgatgatgatgatgctttatttaagatgcctttaaacatcccatgggcaacatccatgagggatgttgatgatgatgatgatgctttatttaagatgcctttaaacatcccatgggcaacatccatgagggatgttgatgatgatgatgatgctttatttaagatgcctttaaacatcccatgggcaacatccatgagggatgttgatgatgatgctttatttaagatgcctttaaacatcccatgggcaacatccatgagggatgttgatgatgatgatgatgctttatttaagatgcctttaaacatcccatgggcaacatccatgagggatgttgatgatgatgatgatgctttatttaagatgcctttaaacatcccatgggcaacatccatgagggatgttaatgatgatgatgatgctttatttaagatgcctttaaacatcccatgggcaacatccatgagggatgttgatgatgatgatgatgctttatttaagatgcctttaaacatcccatgggcaacatccatgagggatgttgatgatgatgatgatgctttatttaagatgcctttaaacatcccatgggcaacatccacgtcgactgatagcacaaccagcagcacaatcagcagcagaagcagacgacgacggtgtgccgaaaatggtgatgatgatgaagcggcacggcaagtgatcggaaaattggcatacattttagttctctgtttaaaaaaaaatggcaaatgaaatgattaaa

SEQ ID NO: 62028 - DNA, 893 bp, Heterodera glycines
tggataaattttttggattttttttttgccaaaaatggcgcctgaatatatttggcccctcaatcagcaaaactgttttttaatcatttcatttgccatttttttttaaacagagaactaaaatgtatgccaattttccgatcacttgccgtgccgcttcatcatcatcaccattttcggcacaccgtcgtcgtctgcttctgctgctgattgtgctgctggttgtgctatcagtcgacgtggatgttgcccatgggatgtttaaaggcatcttaaataaagcatcatcatcatcatcaacatccctcatggatgttgcccatgggatgtttaaaggcatcttaaataaagcatcatcatcatcatcaacatccctcatggatgttgcccatgggatgtttaaaggcatcttaaataaagcatcatcatcatcattaacatccctcatggatgttgcccatgggatgtttaaaggcatcttaaataaagcatcatcatcatcatcaacatccctcatggatgttgcccatgggatgtttaaaggcatcttaaataaagcatcatcatcatcatcaacatccctcatggatgttgcccatgggatgtttaaaggcatcttaaataaagcatcatcatcaacatccctcatggatgttgcccatgggatgtttaaaggcatcttaaataaagcatcatcatcatcatcaacatccctcatggatgttgcccatgggatgtttaaaggcatcttaaataaagcatcatcatcatcatcaacatccctcatggatgttgcccatgggatgtttaaaggcatcttaaataaagcatcatcatcatcatcaacatcccgcaacgaaagttgtcctgatcctcctagtgtagaacaattg

SEQ ID NO: 62029 - DNA, 600 bp, Heterodera glycines
atgtttgatagaaatatatttttgtccgaatccaagtaattttttgaatttttttttaaaccaaaaaaattaaacgaacatttgtggcagatgaaaatgaaaatcaaaaaatgccggaaaaggtgttgggcggcgaacgaagttggcactgttttttgcgctgcatttcatatttattgttgactttttgcaacttataggctgataaattgaaaaactgatcaaagatggaagaaaatgaatattttttaaaaattttactgtattattcccataaattaggcttactaaattctggtccaatttcttcaactaattgacaaattatggtgtttttctgttacttatgcttcacatttaccattacgctttgttgatttaattattcttaaattaattgccgattaatggactaattcattcaataatttttggtccaggcctccatctgcaagtctggccgagtggtctaaggcgctgcgttcaggtcgcagtcctcttcggagggcgcaggttcgaatcctgcggcttgcagttaactttttaacaattttaaattaacaaaaagaattttgctaaaaaaatattaaatatacaaaa

SEQ ID NO: 62030 - DNA, 698 bp, Heterodera glycines
atggcatttttcctcaagggttgtcactggcattttggcacaacgccccgcggcgcacttcacacaaaacacacatcacatattgccgcaccgtgccatttaagtgtgcctgctgaagtgccgtgccagagcacattgttttcccgcaaaattagggtgccgaagatggtcccctccagcagggctcacaaattttgccctggggcaataggggatcaaattctttgccctggcgttgcgggcggcggactggcggcattcatttcatttcccgcaataatccctgccggggggaaaagggtcaaaatgccaatgccaatgatggctcacaccgaaaatggactcattggcgttgtgtcggtgccgatgccgtccttgtccgtcgttgtcagtttgatggtgtgccctgaggcactttttgtggtgcatttagaagatggaatgaatgactaatgccacccgcccccccccacctctcatccccgcggggggtgccatttgggggctatcatttttgctttgggatagttaaatgagcaaattggttttgacttttttaaagcattttgccaaatttggcatgaaaaaattaatagcatttatcaagcaatttttgaaaatttagtgaaattctatttatggtgctccatatttttttaaattttttaaatctaaacacgtgaagaacaatttttata

SEQ ID NO: 62031 - DNA, 154 bp, Heterodera glycines
atgccgttgctgccggacacttcggcaccgatcattttcctccattttccgtccacactgattttgctgtgctcaacttgtgccgtcaccgggggccacgcgctgctgctcaacggagaatacccgtggacatatgacaacgatttgttcggcg

SEQ ID NO: 62032 - DNA, 1380 bp, Heterodera glycines
atgggccaatttccactgctgacattggccaccaaaaacgccacgacggcggacaccactggtggtggtggcggtgagaagagggaggagcagaagcagcaacaaccggtgctgaacattgctggcgggccggcacatccgtacacataccaaatgcaacaaattgtgggcattaattaattaattaataatgcgaaaattaccaaattaatcaattttgggcgcgctataactaaacgaaaatattattgaattaagataatgtattgttagtgaaacacttaccaaatgcaaccatattgtaggcattactctcaattaaagaaatcattaatcaattactaattaattttaattaatgagacaattagcaaattaataaaattaagggctcctttcattaaaccaaacattaattaattaacgttagttaatgcaacaattaccaaataatacaagcacaaacccaacaaattgtatcaaatcggattaatttagtaacatttgtgccaattaggtggtccattttggcgatgtgcggcggggcgaacgcggctctgaacacaccatagaccgtgtccgatttccggctgaagtaataccatgtttataaaaaaatttacagaattttttttttcgaaatacggattttcctagccccgaaaaaattgggattctaaatttattaaaatttatgtgttagctgcaaattttggcattcaattccgacctgtatgacaacttcacacaagcacaatcgcagccacggggtctgcttggcatcgccatcatcattgatgtcagttattttttgcatttttttttaatttttaaaaatttttacgaattttaaagcaatttaaaatgataaaaaaaagtttttggctaaacaaattcaaaagttcatgccctaatttgtatcagataagttcattttttattcagattttactggaaaacacttggaaattttcggtcacaatttcgggatttagtcctaaaaatacaaattattattttgaaatttattgcccattaaatcgacccaaaaacgaaattttttccacttattgaaatccgttaggggtagagtttcaaaaacaaattttaccctaagattggagacaggacaaacgcggaattgcacagattgtcccaggcgaccaagcacatcaaacatcgaagtgggaaatctatttgaattttaaaatttcatttttttaaattttaaaattccaaaccttcattttttaatttttagaccaaatggtccgcattaaacgcttccaaccggctgccctggtgccgtccactgaacattatgtgacctatgatgggtcaatgacctatccgggatgtttcgagacggtcacatggtag

SEQ ID NO: 62033 - DNA, 2882 bp, Heterodera glycines
cagcaacaacttgtgcatcagcgtcatgatgtgacgcttccgccaataacattgcccaagttctcgggggaaccccgagagtggcctttgttttggaagctctttgagacttccgttgaaagtcttcagattgaagactttaaaaagcatatttatttgctgggatgcctcccagagaagtcaattgctcggagagcaattgacttgtatccaccatcagatgaaaattatccaagggtagttgaaattctgaaaaagcggtctggggatgaaaaaacgatggtagagtccatccaagcggagttactccaccttcccaaaccagcagaatcagttcagtctctgagacaattctcagagtccattgaacggatttgccatcagttgttggactatggagaaaatgaacaaaataagttcatggcctccactattaagtccaaactgccttatcaccttctcacccaagtggtggagagggaaatgagggcaggaggtgcctttaattgcacagagctccgaagagctatcacctcaatcgttgaagtgaaagaagaagtacagagatgtactcaggttttccgtggagaggaaaaacctcgcaattttccccctcatccaatggggggaagagcccaccaagggagaggaacaccgttccgtttctcccagccgttcagacaagaacggcagtggaggccaatggaacgaaacgaaccggtgaggaggatgtctcctcaaccgaatcgttccttctcggccatcaacaaaccacagacccctatctcagatagggggtcaaaacgcttatgttccctttgtgaaacaaaggggcatgcaccgagcagatgcacaaaatacaccactccgggggcgcgaaggaagcgccttacggatcaagacaggtgtattaattgcctgatgatggggcataacaccaagaactgcacctcaccccgcaggtgcagtcattgtggtgaaagacaccactttatggtgtgttttggagaaaagtctcgagagggaacctctcgggtccaaccaaataatcagatgaaaagagaggcgagaaaatcctctcaaagtcatctgactatgagcgagcacgctcataaaagcgtgcccagttcggaatgctcacccatcactacaaatgtgatgacaagcgtgatggcgaaaaagcctcacgcatttctaatgaccagaaaaatactggtcagatccaaaaataatagaagagtttggatggaagttccattcctcttcgacccaggaagtcaaacttcctacgcctccgaccctctcatcgagaggctcaagccaccgaaagtgacttccgaagaaatggaagtctatggctttggaggagaaaggaatggaccaatgaggttccattctcccgtgtattccatccaaatcagaagaacggatggaaagtgggaagaaatcctcctaaataggacggagagaatttccacgccattcaaaatggcagaatggaattctgaggaattcccactcaaaggaatggacatggccgacgctatgagtttttctcgggaagagcccgaaatactcataggtgccagacatttctggcaattcttccaagggaaggaagaagtttctccagggttgtttgtaattcaaacaaccttgggccctttggttaacggagagtccgactttgggccggaacttccgaacccaggactatcaatgatggccattgatgagtccaatcaagggcaaatgccaacagttaaagaaattgaatatttctttaatttggagtcattggggattaaagacgatccaaatgaaaatgacgaccaaacagcaatgagcctatttaacaagtccatccgtcgagaaaaagacggaaggtactctgttaagtggccatggaaggaggaggtgcctgacctcccttccaattaccgcatgccttttcaaggctaatgtctacttttggtaagctttgtaattctccagacttaatggagcaatacgatgctaccattagagaccaattgcaaaaggggataatcgaagaggccaggaaagcccctggcactcttgagcattatatccctcatcagggagtccttgccaaaggcaagaaattgcgcgtcgtttacgacgccagtgctcacaccagaggaacaaacagtctcaatgcctgtttgtatagaggcccggtaatactgccggatctcataggaatgcttatgcgattccgatgtccaagattccctctcctctccgacatccaagcagcatttttgcaaattgctttggaaccggaggatagggaagtcaccaaattcctctgggtgaaggatgtcagtaaaccactgacaccagcaaatctgatcacttaccgattttgccgagtggcattcggagtgatcagttctcccttcattttggctgcgactttgcagcaccatttgaagggataccattctccagtggccaacgaattggcccaatcattgtatgtggataacactcttcttgagtgtgaatccacagaagaggctctgcataaatatgcagagtctaaagccattcttaaagaaggacacttcaacctaagggaatttgttacaaattccccagaggtaatgaaggcgattcctgaggaggatcgcttgaacaagcccaaggtaaaagtccttgggctcatttgggacacagacaaagacgaaattgtctttgagttcccaactcatggcttagaaaagctggcaacacgccgtcttgttctaagcttcctcgcctcattatttgaccctcttggtctaatggggccgtgcattcagcccttaaagcttttcttccaaaactctttgggaagaaaagaaaggctgggatga

SEQ ID NO: 62034 - DNA, 678 bp, Heterodera glycines
atgctttacatcccaaccaatatgacgtggattgaggtcgacgggtgtgtgtgtcctcaggcttaacgtctttaaaatactaaatttgttttcttgaatttttaacgaaaataaataatatgtcaggggttgtttaaaaggtgatgtcgttatataaaaaccaatcaaaaagggcgttatacaatataaaaaataattaaatgaaaatttttaacaaaaaactgcccaaaagttatgaacaaaaatactcaaggaaccagtttttgcgaataaccaattgtgcgacaaaggccaaacaattcgacaaaattttcaattttcaaaattttatcaaaaaagaaattttcaaacaataaaaaaacaaaaataaactgaaatatttggttttataaagtgcaaaattagaataaatctttctataaagttaaaaagatgttaaagaaaaaattataaaatattgcactgatcactttgttttttatcaattaaaaatgaaattaaaataactttgtttacagactgatccatgaggaggtagcataatatgggaaattttttgatccattcaacttatgatttattcaaaccaagccctgtcgtttttcaaatatttttcgaaaattaattctggctaaggcagacaataattttagcacaatttttgcccaatgtattaaa

SEQ ID NO: 62035 - DNA, 1008 bp, Heterodera glycines
tccaatgaaaaaggaatgccaaacaaagaggaagtgccaaaaggatcggaagagaaagtgcaaaatgaagcggaggtgccaaatgttgagggagtgccaagtgaggcgggcagcgcttcacagccgagcttgtacagccaatttgtgaccagcttcgagagcgtcatcaacagtttggtctcaggtgcgtttcagtatcaaattgtctattagaaaactgactaattataactgctggcgtaggaatcacttcgcagatgacgtggcgacgcgtccacagcaaaaattgccatctttggacttggagggcgttgcggcgttcatccgcgaagaacgacccgagattgtgttcatggtcggtgccggagtgtccacgtcagccggcatcccggactttcggacgcccggttcgctttcgaggcatcggcgtccaatccaagcaattcttgtcaaggcaccggtctctacgacaacttgaagcagtacgacatcccaaatccgcaggcgatcttcgacataaattacttcagaaggaatcccgagcccttttttgtgctggccaacgcacttttccacgaaagcataatggttcttgcgttcttcccattctcggcttttgttgtgaatttgactttatcccattaagccgacttccgcgcatcatttcattcgtttggtggcggacaaagggctgcttcggcgatgcttcactcaggtgacctttaaaatgaacacgaccataagtaacataagctttagtgctttggattcatataccatagcattaatctctttattcaaaataaaaaataaataaacctgaattaaggtagcagatccaaactttttcttcattctaattttctaaaaaaaaccttttttccatttttttggtttaaggattttaatttttttttatttaatgaataaattttgttcatttctcactttgttttgccattcgtcagaacattgacggtttggaattccgtgccggagtgaaggagg

SEQ ID NO: 62036 - DNA, 229 bp, Heterodera glycines
gtatttaatggcaatttgttatttaattggttcaagagggactgttcgatgattccttcgaccgcccacaatggtctctctcaccgcctttttgatatttctttctgaaagtgaataatgaatgaatcgctgactcccatctttcctccgtgcttgttgtttttcttttgttcttttacataaaaatatttattgtcccaatttgaaaataaattgttaatttgtttaa

SEQ ID NO: 62037 - DNA, 880 bp, Heterodera glycines
atgtctccattcagtttggaccttaatgtggacaacatttttttggtgcagggaacactccgtcccgatttggtgaacatttcgctttttatttatccgatttcttctctttgtcagattgaaagtgcctctcaattggccagcggttgtgcggatgtaatcaaaacgcatcacaacgacagcgctttggttcgcgaactgagagatttggtgagattttcggcgattcaacaatttatcctttttttgatattttagggccgggttgtggagcctttgcaagagtttcacaaggatgaagtgcgcgagttgggccgatcgttgggactgcccgagcacatcgtcaacagacatccgttccccgggcccgggttggccattcgcatcatttgcgccgacgaacccttcaaagtcgaaagaagttttcaatttcaattgaattttctttccaggaagaacatttcgacgaaacgcaacagcgcgtcaaggaatatgtcgaggcattcgacgacaaactttgtgccattgttttacccatcaaatccgttggtgtgcagggcgaccggcgttcctattcatacgtggcagcggtgtttaccaaagacccgtcgttggaggacatcccatggctgaaactggaagagttggcacgactgctgcccaacgagtgtcacttcatcaatcggttcgacagaattaaaaattatctcttgcattttgatatttttgttttctggctttaactcattttcgtccccatcattttagggtcgtttttgggttcaatctcggctataatattacaccgatcaatgacattacagtaacacacatcaacgaaggtaccgtattctgtgatgttgcctttccattcgctttg

SEQ ID NO: 62038 - DNA, 461 bp, Heterodera glycines
cgtttgggcccccgtttttgggccccggggtcgtttgggcccccgtttttgggccccggggtcgtttgggccccaacccaaaaatagaaaaatgtgcttttttaaaaattaagattctaaaaactaagcctgagggatccctcgccacttggcataagttaggtttaattaacattcgctcattttttacaattttacttattccaaatcctattattttttaatagttaaccaatttgatgtgcattctgatttggacatttttcagaaatgactaacccaattgcaaccaaaaaacaaaaagtaaaattgtcttacgaaggccacctttacaccttcgctaaaatgagttctgatgggatgacaaaattttggagatgcgagttcaaaaaatcaatttcacattattttggagtttctccggggaatttctcgcaactatcgaatgaatccgtgaattt

SEQ ID NO: 62039 - DNA, 134 bp, Heterodera glycines
atgcgggttgtgctcacccagccggacgatgtaacccaagtgatttatgacgccggtttcaacgaggccattgtgatgttcgttggccacgaatccactcaaattgccttcaacaaagtcaaaaaccgaaacat

SEQ ID NO: 62040 - DNA, 95 bp, Heterodera glycines
acatttcaaacacaaatgaggatgccgtgaatttgggagtggagcttggcgacccgaatgccgtgataattttcgacaacgttgacagactttga

SEQ ID NO: 62041 - DNA, 1144 bp, Heterodera glycines
cttttaatacactccatgcgaattcaaaatgggctattgagtattggcgtaattatggtcttcctgtttcaaccggccaaggtttagcaaatttggcggatgttcagcaatctgttacttcattttctccaattcagacatcttcattcataacaacggacaagaaagcgcaggtgtccggcattcgcattgaacctgagcagggcgcgggcggattcgtcggatatgcgtaggtcattaatgtcgatgtaagatctaacaaaaagtttcgcagggataagggcgtcagcatcgttgagccggacatggatgtgcgcgttgtgctgtttggcatccacctggacgaaattgaccttgtcggcttcacatccaccgacaattgctccgacgcggcggtgctcatcgatcgaaatgaatttgctatccaatcggaaagacgtgtcgtggtcatctatcactttgcaaggttttttggcgccatgattgaatttgttaaacccataaaactttaagcaattcattatacaaattgtgcgtgcgccaaaagccccatcctgattatccacacgagcttcccattcatttggttggttggtttttaaataactatcatatcgctccctttgcttgcagacggatgaagctcactgttgggtgtctacgaatataccgcctcgcaaatactacttctcaatgcctcttcaaattgtcatcattgcagtgctgctcgtcctttctggtctcttctcgggtctcaaccttgggctgatgtcacttactccacaagagttgactctcatcaaaaattcgggttggtgagaaaatttttgtggaataccatggatttattgtttgtctgcttgttgatagttcttggttgttgtttttttcgagaaatgatgttcctttctgtttaggttcaccaaaagagcggaagtatgctcagaccatcctgccagtgcgcaagtccggcaaccggttgctgtgctcgttgctcatcggaaatgtttgcgtcaactctgccatctcaattctcttcgacgatttgaccagtggcaccgttgcattgatcgtttcatcgaccggcattgttgttttcggcgaaatcttcccgcaggcgctgtgtgtgaagaaagggttggct

SEQ ID NO: 62042 - DNA, 891 bp, Heterodera glycines
atgacaattttgttcacatgcaacccaatgattgaaaatgtatattttgctgccatcaataaggaaattgtcatatttttctattttccattcgaattttatcaatctgattttacagtataatacaattggtaccgtatctgtacaaattggtacttttacagcttcaactttggcatcgtatgcttcatttttggttcttttttgatctctgccgaacgattataaaatgttgtaattccgctcaattaaattatctgaatatttatttttgaatgaactggattaaagaacagacaactttttagctagcttaaatttaacttaatttgaagaaattttgtgaaattttaccctcaattggaaaaaaaattgcatattttcaacttttataacgttttttttgaagtttttttttgttttggaattttatgcgattttagttgtgtaatggtgaatatctttaaaatgaaaattaattttatcatttatttataaattaaaaattactttaaatgtgccgcaattaattttccaaaaaaaatactttctccgcttttataaaatttaatttccattatattccgccaggcaaaagtttttggttccaattacttaatttttatccaaaacgacataattttgagattttgagccaatttttaaacagttagtttttaattttccttttattcttttaatggtttacaacacttatcatattaaaaagttcaaaaagaaagttttttcttgaatttgacaattttctatttaattaggttaagcgctatattaagaggaaattggaatataaccaatagcataatttagaattgccttttcatacgaaattttttttcaaattattttaaatatttatttaatatttta

SEQ ID NO: 62043 - DNA, 145 bp, Heterodera glycines
atggacgagctgtgtgaaggaaaatggattggacgaactgttggggacgatggggagggcatgttcggaggaggaatgcggaacgggaaaagggggcgaagtgtttctgagcagagagagacacgtccactgcttggaaagagca

SEQ ID NO: 62044 - DNA, 616 bp, Heterodera glycines
atgaagtacaaataacttatgctggcgacgtaaccccacctggaaattattaaattgttgtttgggataacctaacaaaaagttcggacaaaatgttttttttatacttcaaaaaataacaaaaaaggtaaaatttattaaattttaaaataattaaacataacattaaggatcgtatataatggggtacttttattagcatacaatactcttggactcgaattagaaaatattgggattctaaatctaaaaaattctcatccaaaattggtgccggtctttacagaatcggtccgtagcgttcgcattgaaatagttttttagggttttaaaaataaaatttctttaagtatatttaaatcaattaagaatcggatactcaacgcgaatacacaaagctatgaaaatgtggatgtgatattatcattttcaaatatgagaatggaattgttttggagaatttaagcgattgtttcgttcatttttattcagttcaaacaaataatgatggcgaatttgagatcaaaatatccatcaatgtcaatgacaatttaaatgttcacatatttccacttgacaaacaaatggtaaattaaattttaattatttacaaaaa

SEQ ID NO: 62045 - DNA, 471 bp, Heterodera glycines
atggaaagaaagtttgctcggaaaaaatgcaatattttgatcaaaaacggaaacagattactcgaaatgaaagtaataaatatatttttaataatatttaaatttacaatttttaggtaaaaagtcggaagaaattaaatccaaatatatcattccgagattcttggaatttggttcctggtccattagcctcaatggtcccaatgtttggcttagatgttcaagacaagccgttctttccacatttggcaaacaggccggaaaattacggctgtcaaatatttccgacgaaatcaaactatttggccgatgggatgaatcctgagaagcgtaaagaatttgacatttggtatgatcaaaaccgaaaccagccatttctacttgatgaagcattggccaggtattttttatatattttttgaaatacctaactaaattttcagtattgtaaaaatgacgtggatattttga

SEQ ID NO: 62046 - DNA, 1416 bp, Heterodera glycines
  unsure (1)..(1416): unsure at all n locations
ttcttttacactcgacggttttttccgtcgaatgtttctctttttaatattatggtttcttctagaattagcgctttatctaacgagcattttagtgtgaacgaaaaatacaacgcctttaataatacattgctagaaaccttaaacgagtttattccaatggaaaaaattaccaaaaaagatttgacccctaaatatccaacgcatttattggcctccatcaaagagaaagccagactgtataggcaatgtaaaactgacccaacaaaaaaagcactttatgatagcattagtttacacataaaaatacaaacaaataaatttcactcgcaaattgagaaaaaggctatttcaaagggaaaaaattccatttttaaatacctacaaaaatacgatgttaatccctttgaaataccgaatttaatctttgaaaacaaatgctatcatgatggtgatgaaaaatgtgaattatttgccaacttatttgcaaattcgtttaataattctgatgttgacccaggctacctaaacttgggcaatacttttgttaatcaatgctttatatcagatatagactttaacatcatcgagacacaaaaacttttgaaaaaacttccgaataaaaacgggacctccccggataatattagctataaaatattgaaaaactgccattcttcattagcaactgttattactgacctattcaggatttcattagattctggttctcttccagatatctggaaggaatcaatagtttttcctcttttcaaaaaaggggacaaattcaatcctgaaaattataggcctatttctataacatgctcactttgcagggttatggaaagaattcttagccaaaatatttacaactttctcctaaaaaacaataaaatttcggaataccaatttggttttgttagaaataggtctacgacaagtcaactaataacagttgtgcaagattggtacgaggcaattataataaaattgcttatggccgaacagatctgaaactattttctatttttaatccatccacacgctttaacatccccttttatagatttaacacaaaatacaaactgggcaaaaaattcattccctttgctgngagggtaacaaaattgtggaatcaactcgataaagaactaataaaaacaaattctttanaacaatttaaaataaaacttanaagttcactagggtaatctgtaagacggngaaagttagaatgtaacaaatttctaagtgatttggtatttcgacctcattgactttgaccctcatttatttattattnattccacatattttgtaatttttttctaatttaagaatcgactcattgaagcgatgggtaattaataaatttatttgtcttaaaatcctaaaaaggaatccccccccccc

SEQ ID NO: 62047 - DNA, 1157 bp, Heterodera glycines
cagcacagcaacaccatcaacaacagcaacaacaacaacagcagcagcagcagaaacaacaagtcgtccgtttcgtaaaaattgatgaagaaagtgacgacgaagcgctccgaatcgacatttcggagagtgagtcggaggaggaagacgacgacgatgaggaagaagcggcggcagcactcgaagcagcggtagccagtgccgcaccatcgccggttgtccaagaggtcaaaaagcctcgaattcagggacctatggaggcaccgaagaccaaacgagtggcggcagctgagggaccattcgtgaagcgagcgcgcatagtaggcccgctgaatgcgcagaaatcgcgttgcaacaaatgcggattgcttggccatttgtctggcgacgaggctcgctgcccaaagaccaatgccctggtaaaagcggagatggatcgaaagaaggcggcagcatttgccaaacgcgcggaagcaactatggaatgctcggcacctccgatcattcaactgccagtcaaaggtggtggacaggcacgtgcggccagagctggaggcgttgctgcctcaatggtcgctggtggacgggcatcagctgagggcgcatttcgcgcatcgaagaaaagagcacgccaagaattgatggccgcaatggaaaaacccaaggcggcagccatcagtgtggcggaaaagaaggcggcagcccgaccgggtctccaagtgccaatggagacaaatgccgtgctgaatggactcagcgaaatcggggcacgcatcgaccgcgagcgagacaatcatttgagcatggctgaggaattgcaacaacgtggaaaacgcgccgtggcagcaatcgacgaagtcatcgctcagggggcgcaaatcggacaaatgtacgtggagtggacgcgcaaattgggcgaagtgctgaaggccaacgaacaggaaagagccgaccgcgacgcgctggaacatcgccaggcggcagcattcatgcagtcgttgcgcctcaaaatctcggttctgcgtcgtgaactttcgtctccgcccggagtgtcgccgctggcgactgaacgcgtggaaattgggggacagcccggaggatcgctcggaggacagcccggaggaccgcttggaggaccgcccggaggaaagaaatga

SEQ ID NO: 62048 - DNA, 504 bp, Heterodera glycines
  unsure (1)..(504): unsure at all n locations
atgaaacagaatttgtcagtattaagcctattattatttgttcaaatatttgcatcaaatctctctgataaaggtattttatatggctattagcatacgtttatattattttcttattctgcacttatcgtttaggcacatttgtgaatggaaaaaatggaggtgagaaaatatttctgaaattaaaacgtaattaatctggtcattgatttaatttccattcagcaggcgttgattatttccaagtcaaatacgaagaaattgaacaaaaaattgcccaactgcaaaagcacaatgtaaggattaaatatgaatgtttaaattatttttgtgtaaaatcaatgcgctaatatttgaacaaacaaaaataattttattcaccatttagaacgaatcggacgccaaattaaacaaaatcgaaaatgaattggtaattaattatagcttanaatggattattanaacaatagaatatttttcagcgacaacttanacaagcgataa

SEQ ID NO: 62049 - DNA, 520 bp, Heterodera glycines
taccatttcgattggaatttggacaaaatccgacgacaccttttacaaatattcaaacaatggcttcattttcggacacagtgccactggcttgggcggatatccatcttttgcagagggcgacacaatcggatgcggcgccaatttaacatcgatggaaatcatttacaccaaaaatggacaaaaattgagtgagcaaatattaatttatcatgaaattaagcagatgaagactatttttagacacctcaaatttattcgtttttgacaacgaattgcttccatttgtacaagttaatacgcttggtgatgtgattgaagcggatttcggacctgtctttgagtacaagaatgtttcggatttgttcgctacacaaattacctaatttactaaaaaggaaaggaaacagagaagagaaaacttacaaaattaatttttgcttttgtttttaattgtatatacatttaatttactttatttcacacgcattttaaaatttatatattgtttctgcataaa

SEQ ID NO: 62050 - DNA, 339 bp, Heterodera glycines
atgaactcctcatttgtcatctgctgctgcttccacaactttgtgttgttccttcttttgagttgtgttgtgccacatgcttttgcttgttgtcctcatggaaatctcagagtgaaaggcaagaaatgacaagtcaataatttttttaaaatatttcccgggcagatcccaattagctctttggagattcattgtttaacttttcacaattctcgaaattgaaaagccaatcgaatttgtcaaataaaactcaataattaccaaaattatgtttttcgctttttgagctgttatttcatatataatttgtttaattacctcaaaaggtgcatagttttt

SEQ ID NO: 62051 - DNA, 2851 bp, Heterodera glycines
aagaagggaaagtcaaggagactagccactaggacatttgcacaatgtcattgtcacctttaaagaatatatattaatatattttttaactttttccctttaactctaatttttcacaaggaccccccattcttaccagtgcttgtttttcccggttgccctaccgggaccgggacctgagcttttcaaaatccgggaccgggaccttggatgaccgggaattcccggcccggttccggtcccattttccatattcctatggcgttaaatttaagcaaaaaatagtcgaaattttaataaaatcgaatcgaatgtccgtccatcaaatggcgaatcaattaatcaattttcagtgttttcttcggttagccgacttttgcgccgcgccatttgtgccgcgacacttgcgccgcctaacaaaaacgacatttgcgccgtacagcgaaaaaagacatttgcgctctgattaaaataaatttatgtgctttatagaataagaattgatagatattcattattaattcctttttcgaagcctttcatgtcaattccatattgaagtgcacgtaatgattgatcaaatcttgatcattttggttttcattgggaccatatgcgataacaagccttcgtattgcctgatcattaagcggcggattttaagcgaaaaaaaaggtaaataaatgagggcataaaaattgcgaaataatgcgaaaaatggtaaaataggagcgaaaatttgaaaatcagtacgttttttcaatgaaattaaattaaaatcgatgaaaataacttattgagaaaattaattacaaaggaattgaatttcattcctttttcgaagcaaaaaaataattggggtttctacagaaaattctttttttcagttttttgttagtttgtattcttaatcattttttcatatctttgatgaacctattcaatgttaagattttaatggttaaaaaattgaatgtcaatctttgtgactagtaattttttcgaattttcaattagttatttttgtcgatggcttatagttttagtaaaacttattgataatagtggaatttttatgaatataatatttttgacagcgcggcgcaaaagtccatttttgctgggcggcgcaaatgtcgcggcgcaaatggcgcggcgcaagtgtcgactttgctgagcggcgcaagtgtccacttttgctgtgcggcgcaaatggcgcggcgcaaatgtctcatcacggttgtttaatactcaccagaagacaccacgaggggtgttcagccaatgacgaaaattataattcatccgcctcattttaatccaatcttatgaaaagttaccaaattcggtccctagcattttctggcactccccacggcgaatataaaaaaaagtgttaaatctctgtccccaaaaggtccgtgctccgttagctgtggaccagggcggctatttgtcaaatccagaacaggttttgtccactgatcacgttgacagaaaataaagagccaattttcaaggagtatgcgaaggtgaagagcgtagtccaagcagcaatcgacaaatgcatgtgagaattaaggggggcgagaaatccatttaacgagaaacgagaccgagaaatggagagagagagcaagagagagagagagagttaaagagagagagaccgagaaatgaccctgaaaagtgccaaaaatcacaataacaaaaatataagcgagaccacgaaaatcccgagaaactctcggagaattaattctctcccccatccacctgtgttatgctgaagagcaatctctttaaacgaatttttacaattttgaattgggacaaaccctcaagatatgtgctgattgattggcattacacgagcagtgagaaatatacggacaaagcgaaggagttcttcggcagaattagcactctgtgcgctggcaaatgcaactgtttgtacgaaacatggaacgaacccatacaaaacgattggtcctcgcagttgaagccgtaccacgaggagctggttaaagtgagattttaaaatagccatttaatgggtgttggcggaaaagtgattgatcaggaccatgttttggaggttctcatttttaggtagcaccgtaataattagatctaagccattgagacagtatattttttatcattggaaatcaacgtttttccctcaggtgattcggcagaatgacaagaacggagtgataatcgctggaacgccaaattatgaccaggatgtgaaggcggtagtcaatgacccaatcaaagagcacaatataatgtaataaataccgaataaatgatagtgggggagggggggggatggtgggccaatatttatccgaatacgaggatttgatatcctacacctcttccccgccgcacaaaaggtacacattgcatttgtacgcggcatcgcataagcaagaactgcgcaacacggcacaacaggcaatcgacgcgggagtgccgttgtttgtcacggagtatggcacaagttcgtacacaggcgatggcgggccagaccttgtcgaaacacagaattggtaattttccagggaccctatttcgaaaagtataaatgtttacaaattagagagggctttgaacgaattggaatatcgaccttttgtttcaaaggtacgactttttcaacaaaaactccctctcgtacatcaactgggccatcgacgataagcaggaagcgtcggcagcgctgcagaacacacagcccccagtcgggccggccgacgtgtgcagcaccgatcggctgaccaaatcgggcaaatttgtgcacgaccacctcatcggtgtaaaccagaagccggatggctgt

SEQ ID NO: 62052 - DNA, 1364 bp, Heterodera glycines
  unsure (1)..(1364): unsure at all n locations
atgaaagagaagaagatgggcttaaactcgaacaggaaaatgtcgctaattgtgcctgtctggggccatttggggtggcaaaaggcaatttgggcgtatttgaggctcatcaaagtgccgaaaaacagcgaaacaagcacaaaagtgccgaggtaaacagtgcgattcacttttgcatgccttaattttgaaattgcattttatatttaatgccaattcttaattcatttaatcaatttattaatgttgcaattcggcaccatttttcaaatgccaattggatgagtctgtccagcccggttagtgcgattaatgccaaactcgcactgcagccgaccaacggaacgacaaggaatttgaacgcagtgaaataagggacgaaattgcggccggagagggaaacgcaaaggaaaaactaatgaccaaattggtggacagtctcaaaaagagcagtcaatgccaacagaaagctcgaagtgccacgaagagagctgcgaaagggaaagccaagctcaagaacagaaaagtgaaaatggaaacattggaacagataattaaacgaaatcaaattaagcgtaatttagggacaataagcggggaaaagtaatcggaaacattatgccaaggcttagagcctttttgagtaagcttttgcctgtatttgaaggtgatcaaaaggatgccaatgttcatcaaaatgccggggacgacgatagcattgagcagcgatgccgtgaagatgagcattggggaatggccagagtctttgtattggacccacagctganaaagcattggctaacgtaattgaagaaccaattaaactttacctgataatatgaataatttttattaagtccttcaatttgcccattcatttgggattttcagaatttaataatgcgataaaaaattaaatgattaccttttacgccaaatagatacctaattgctgcaatttccgcgagtttacattgaatttttaattactacaattagcattaatgagataagcgttaaagtaatcttcagcaggtgttttatattttttaattactttttttctgtgccgtttccgctagttaaagtcaatggcatggtaatgggcgataaatttaatgatgtgattgatatccttttatctaattcattattttcacggttcataatttgagcaattgcaataattattttgtacaaaattaggtttttcttgaaaaagattataattgaaatagttacagacagattcatttaaaaaataataataattttgatatgaattaagcatgtgcaatgaatggacaaaattgaaaatgttttctaattataaaaaattaaatcaaaaacctttccagatagaa

SEQ ID NO: 62053 - DNA, 370 bp, Heterodera glycines
cttttatttattacaaattgtattcattaccattcaaattttactttacataaaaattttgtatcccttttctttttcgatagaattttctaacttttaaatcccataaaatatttgtccaacagaatatttatatatgtatcacaaaataaactaccagaatgaacagctgtgtttttggcttttacatttgattacattaattaccgttaattacgtcattgtatcataaaactgtcattggccttgccaccgttgtcctaattgagggcaactctgtgtttgatgagttttacttatgtacaattttgatttctcgtctaaatttgaattacttattttaatgatcagcacttttttcccataaatt

SEQ ID NO: 62054 - DNA, 335 bp, Heterodera glycines
atgatgaagttgtcaaaaaaacgcaaacaactacagcatcaggagcaaagtcaatcgttggtcaacccaaggccattgaacaaatggaaggcaacccattggttaagtaagtacaaaaggacaccgagtaaatatttgtaaataggagcagcgaaataaattattaaatgaaatgctattacggccttactttatttaattaattgctaaccatggatttgtaaataaacatctttaatttcaaatttcaattaaaatattggaattttcttttgtgtgtgtttaaaaaatgctcttattattcagttaccactggtggatatcaacaagattag

SEQ ID NO: 62055 - DNA, 1145 bp, Heterodera glycines
atggaaattgtcaattctgttcgagaagcattgccactctttcaaaatccgttgccgaacaaagtcatcggattcagaagcattgcgatcgagtaaaaattgaattgaatttgtaaatgattgtgtgccattacactttcgcattattttcagcttcatcaaccaaaatgtgctcacttttctcggccgttttcaccgtttctttgcttcatgtgaaacaacattgcacatcaacaaagaaaaaagcattaaaggtcgcaaggccattattgatggtcgcattttgaagttcgttgtgctcaccatttggccaatgttcaaggacaccattcgtgtgatgtctttcaacaccaacaccttccgtcaaatgcgcaaattggccccgtccattctcgacgattgtccatcccttcgcgttgttgctttcgatggcaccattttgcccaaattgccgccttatgacagtgccagtgcgtcgaatgacaaaacggtggccaaatggctgttcacgcctcgtcccgacaatttgcggaaggttctcattatcgagaactcatcggttgagaactcagcggttgaccaatggttggcaacattggaacaaatcaaagcggtgattattaatcgactactcatatttcttttctttttttatttgtcttctttgtaggcattttcctctgcttcttctcctgtttctttcgtcatttctgttaactctaactctgagtcgtcctcttcactttcttcatttgtgccatttgaactgaccaaccaattgactggggagaaattggcactgtcacattatggaaatggtattatgcttgtccgttgtccaattggcgaaggcagtgatttggaagaggagattgaacaattgatagacggacgaaaaaacaaaattgagatttccatcacaaaggactgtgtcgacaatgggtgatcaatttaattaattcaatttgatttaatttgtttttgtttttgaagtcttctcaaggatttgcccgggccgagtggtgatcactgatcagaaacagcagaaatgaattgattggttgattgatgcgattatgtgacctaaatgttgagcgttgttatttaattgttgttgtatttgatttttgttcattcacaaatca

SEQ ID NO: 62056 - DNA, 65 bp, Heterodera glycines
atgatcgaaaatttgtggggtcaaattgtgctaattgcctattttattccaatctttgccgttgg

SEQ ID NO: 62057 - DNA, 674 bp, Heterodera glycines
atgatgttatcaaattggggtggacagtgcacaaaaatatttataatttgtatgagtacttgggcaatagttgggtaattataaatcaatcaaatgttttttttttattattttagattgcagcgccctaaacgcctttgaacaaacttttatcagtcccaggtccataactcggtccaaagtagtttccgccaataaattctctttgattcatgcattacagaccgagaggcgtggaatgatatatcatttgtgagatttggtttggtacaagttttctagactttttcccataacctaaaagtaccccatctatgaaccttcccaacttaaaatcagtcggttatttttttaatttttaaaaaatactgaaatgtaaaaatcccttttcaagatggggttccattctgctggtgaagactgtgctcgggttggcatggaactccttccccgacttgtacaaaaacctaatggaattgaaagtcttccaaacggctgccatttttgaagtgagttttctcagtgaaagtgtgaggtttggtggaactggtccgcttttgggagttctgtccgcttttcacagtgattttggccaccaatatttcatttgttcaaagattgttcacaatattgtcggtttggtccgttcgctggtgttcaacaccattgtccag

SEQ ID NO: 62058 - DNA, 1944 bp, Heterodera glycines
atggacgcacaacaacttcagcaaattttggacgcggctctaaaaaaatcagcagaagtttttgccgccgcactcaacattcaaaatcaaaacccaaacccagggtcatccacaacggcatcacttgcggcatcaatcaatgcccgcctcgaaaaattcaattataatccggaggttggacagacatacgatgcttggttgaatcgatacggaaaaatcgttcaacaagacggcgcttcgctcccagagcagtccaaagtccaacttttggtcggaaaattagacgaggaggaatacaaacggtacgttgacagcattgcccctaaagccaccgaacaattcaactggctcgaaaccgtggcaaatctgaaaaagatttttggtgagacgaggtcgctcttcctccgccgtttcgactgttttcaaattcgccaaagccaaaaccaagacctttcgagtcttttggcacaaatcaattcatcgtgtgaaaacgccgaattagatttgaagaaagaagagctaaagtgcatgattctcatcatctctttacgcgacgaattttcggatttgaaacagcgatgtcttcagcgaatggaagaagcccgaaccaatgggaaaagcatcaccctgcaggaattgggcgaagaatgcaaaaagtaccaaattttgaaggaaagcacattggcactcagcacaaaacagtacaatgccaatgccattcgtgccaagccacaacaagtaaaggacaaggcagacgcaacaaagcaatatgccaaaccaaaagcggttccaaaaccgtatgagagcaagcacaaattgccaaaccgtccatgccaatcatgcggaagcacaaatcattggcgctccgattgtgggcacagagatgccaaatgcccaaaatgtggtaaaatcggacatctcggcaaagtttgtcgaagcaattcttcaattcgccacatccaaacggtgaatacaactgaaaggcatgcacaaatcaacacagtcatcatcgacttaaattgcatggaaatcaacgcagaccatccaaaatggtggaaaataccaatcaaagtgaatggcgcagattatccaatgcatgtcgattccggtgcacaaatcacattgttcacaatccaaacatggattcaaatgggcaaaccgcctttgacgtcagcaaatattcgcgtcaaaaattgcaatgaccaaacatttgcaattaatggacaattcatgtgcaaagtgcaatacatggatcgtccaccaatgaaattgttggcatatgtgagccccgaaatcagtcataatttattgggcatgccatggatagaagctttggaggtgatcccaaaagagattatgcatccaaatcttcatccaaaaatcaatacaatttcaacgaaaaccaacgaaatcaaagacacggagacattaatttcggcgctcaaatcaacccactccgatgtcttcagcccagaattaggtcattgcaccaaattcaaggccaatctcattctgaaaaacggtgcaaagcctatctattgcaaggcaagaccagttccacatggcgctttggacgacgtaaatgccgaaattgaccgtctattgaaaatggaggcaataaaacccattgaatttagccattgggccgcgccaattctggcagttaaaaaaaggaatggcagaacacgcgtgtgtatcgatttttccacgggattaaacgacgcacttgagctacaccgccatccgctgccacgtccagaggacatttacaatgcaatcgcaggctctaaatatttctcacgcctcgatttgcgcgacgcttatctgcaattggaattgtctgatgagtctaaaaagctgtgtacaatcaacacacaccgcggactcttccatgtcagcgttaccgttcggcgtaaatcagcgcccgcatttttcaaagtttga

SEQ ID NO: 62059 - DNA, 1597 bp, Heterodera glycines
atgtttatgaaacattcgaggttagcggaaaaattttaaaaatatagcaattaatcataatattcaatttttagttcaaggcattcttcaaaagcgacaacgccgcgactgagcttgaaattccggggcaaagacaaaacggacggcgtttttgagtggggaaaatcgaaactgagcagcaaacattcggtgagaaaagcgaaataattttcatttaaaaggaataattatttaattataataacaattaatttgaacaattatttaattggaataaaaattggaaaatattttgtctctttttctcaggtcgtccgtcgtggtaaagaggtggaggtgaagctggacgggctcaagttgggcaaagaagacgttttgcgagtggtaatttaaacaaataattaatttaaaaatttaattaataaatttgccatttttgcttgtaactcctcccgccacgagtgccgccagcgctcaaattgcaggcgaacaacgcgtggcagaaccaactgcagcacaaccgcaagccgttgagattgttcaccgactccgcaagacgggcagcaaaacgtgggagatcagcttcaaaccaacggaggtgaaaatgggcatttgtcaattggaacttaaacacaaattttaaaaatggaaccataaaaatgtgccatatttaagacatttaatatttcattatttggaaagaattggttttaggtcatttaaattccgccagaagtgtttttgtactggtaaaaccaaagaaaaaatttatttgttgtttttcaaaattgttatagaacatttaaacaccgaattataccaagaaactatttaaatgacgaatttttatttcaaaaaatttaaaaggtttctgaacaaatgtgtcattttcaggtcggaacgcacaaagtgttggtgttcgtgaacaacatggtggcattttggaaataatttttagattaaatttaataaatttttaaaatgtttagccccatccccaaactccgttcccaattcgggtttatgatgctggccaaattgtggtggaagacattgtcaccgaagcgactgtcaatgatacggtggaatttactgtggacgctggcagggccggatttggaaacttggagatggccataaaggtggaggaattgttgagaaatatttcaaatattttgcacaaaaaataattctatttccaatatattaattagaaatttcataatttaaaacaaatttgaatagactttacacatttattattaaaaataattaattaattgataaaccatttttacaatacaccaaaaaatgaaattattttgaagttgtaaaaactttaaaaaataaaaataatatgtttttgtggcaaccaatcttaacgataataaaaattattaattaacaaatacaccactttctatttatttaactctaaaatattaattaatttatttttttttgccaggaccacgacggcattataatcccatcacatgtcagccaaatcgaaagcggaaccgccaaatttctggtcactttcaacccagccactgccggaacacacactgtgcacataacgtaaaatttgaataaa

SEQ ID NO: 62060 - DNA, 715 bp, Heterodera glycines
atgaaaggatgcttattaacttctttatttgtatttttgatcagcagcttaattagtattaattatgttggatcagaaaagaaaaaaatggaacaaaaaacatttgaagaaatatttggagaaaaatgggaggaaaaaagaaccgaagaacagaaaagaagagaaataattggaaaattcaataaaataaaagaaaaaatcaagcaaaaaggaaaaaaatattcaaaaagagaatgggaaaaaattgaaagaaaaatagcgaaaaaattgggcacaaatcgcaaatatatttatgaatggaccaaagaattgggattaaatcaaaagaattgctacaaatcaaaaactgatgaagaaaaactcgaaattgtacagaaattcattgaaatgtcaaatgaatttaaggaaaaaggaagaacatattcgaaaaaagaatggaacaaaaattatgaagaaatttgtaataaaattggagttggccttagaataattaaaaaatggaagaatcaatttggcattagccgaaaatttataacggaaaaagaaaaaacggagaaaatgaaaatttattggcaaataaaaggagaaaacccgaaaatgagtgacaaggaaattggaaaaatattgaaaattcatcaaaatagcattttcaattggaagaaacaatttggaaaagaaataatggaggaatgaaaaaacggatgattctaagaaa

SEQ ID NO: 62061 - DNA, 263 bp, Heterodera glycines
  unsure (1)..(263): unsure at all n locations
atgccttttaaaaatattccatggtcaatgcggtaaaaacgattttttaaataaatggttgaaaaagagcatggtcattacccacttcgatttgccgatccttaaataaatttccatttttaggcattcgatcttttcggcgttggcactttctcaatggaattgtttctgtcgcattcatttctttgactcatttcgctgccncgattttttgtttaatgccgaccttttgaacacaatcatttgcgaaaaatgataataaa

SEQ ID NO: 62062 - DNA, 631 bp, Heterodera glycines
atggcatattttgccccttttccccccatttgtcttttccatttaatttttattttccaattgctcggccccgttttctgtgctaatgtttatttgaaaaagcaatacggtgagaacgagttccgtattgagtcatggggcaaaacgaactgttcactgaacggaattgacattgcgcagcttggaattggccgaccatgtgaagaatggccagattttggtaaaaagacaattaaaaaataattagccatttataattaacaaaaaaataaataacactttataaatgatttttaagcaaccattttctgtgatggcaaaatacttgaggtaataattaagaattattaattaattacgtttacgtaatttattaggcagtgaattattggggcgagcgaatgcttttcatgcgcgactcaaagcatttcgttgaccgtcctctgctgaaagatgccaaaaaagtggtcgatgaatttaaaaccatttttgatgtgacggaatggaataaattcgtggtcagcgaaatgaacgaagcgcaagtggacaaattggccaaatttgtccaacaaaattttggaatggccgacggtgcactgattgagtaaaatttagaagattaaaaatgaaa

SEQ ID NO: 62063 - DNA, 465 bp, Heterodera glycines
atggcaccgttcattcatttattttgggttatcgtcaacgatgtcaatgacaatgcacctcgtttcggacacattctgtacttggtgggttaatgagctgatttcgtattttgctaatgatttttcttaattctctccccgatcacttttcccaatttgtttctttctccgatcacttcctaatttggtccctttttcctcgtctgatcgctttccctgtcccttcttcttccctcttccatcccattctttccttttccgcttcagtccctcaatcggtcgactcccgtcggttcggtggttttccgagttcgaattgaggacccggatttggctgaaaatgcacgaaattggttctcattgagtggagaaggagttgaagaggcggagagattattttccatcgacaaatggacgggcgaaatgacactgatcagagaattgacaggggaaaaggttttctga

SEQ ID NO: 62064 - DNA, 861 bp, Heterodera glycines
atgacggaaaatttaaaatgccacaaaacacagatttacaaagcaagcaaattcatgcgaggcattcaactgtcggaaagcgacaaaggaaaggcattggccgtaaaagtcgtctccacgggagttatcaatcgaaccatccatttggccaagcctacggtgatgatcaagcacgagatgaaaatgttggagtttatgaaccagcacgaggacgaaaacccgattgaagagcattcggttgtgaaattgtacggtggcggagaggtggagaacggaagtgcattcgcgatgatttacataatggagtttggtgacagcacattggacaagtatttggagcagtgggacgagaaaattggaggcttaaatttcaaggaaggcaagccgtttgagagtgcttgggccacaaaaatcaagaatgaagcgcaagagttactgcctaaactcgccgacacattgctcaaattccacaaaagtgagccaattaagcacatttcttatcggccaatctcgacacatgacagcattttttaaccttttctaatcttttaaaaatcacaaaagctcttaacactaacggtgcctctgtcggcatcagcggaccattttctttccaaaaaatgaaaataatccagaaaaaattatgaaaaaagtgcataaaactaaaacaaattttctgttttaatatggaagaaataattttttaagcccactctttagaaacaattgatatccgccgctagggaaattggaaaaatttctaattttgttaatggcttcaacaccaaaattttaaaattttgtattatttcggtcaattttgaaaaaaaaatattttgcctcgcgcctcgccagagagaa

SEQ ID NO: 62065 - DNA, 488 bp, Heterodera glycines
atgtcgtgcaatgtgacgatgtggtcattttccccagtcactcccgaccgtacacgtcgcaattcttgcatttgcgccccgactcccagcatcagaccgagatggacaatgtgagtacgcacataagtgcccgcctcgcagctcatccaataaacgcccatttgctgggatggactgtactcgatgagtttgcattcgtacaccgtacgaatgcgcagctgacgctttacggcggaaatgagcggcgggcgttggaacagcgcaccagtcagctaaagtcaaaaatatttgaaaacattagactttttatgtaattcagacaccttatccaatgcctggcgtatggtcttcacagattcaactgggttgtgcagtttgaaaatggcgacgtattctttgccagcattttgttgagactttgccagacgagtggtgcggtcgacgcacacaacgagaacaccggaaacctatcatagaaaaaaaataaa

SEQ ID NO: 62066 - DNA, 591 bp, Heterodera glycines
atgcgtgccgaacgggtggtgacgatggcggcggcaccgaaccaccattaccaacccaataatgccacggacgatgatgaagcggtggatgccgacccggatgttgccggctcactgagccaacgcgcggcggagattgagaagcggcgcgagtggcgccatgcccgcctgcgctccatggacgtggaatcgaagcggaccgatgagctggtgcgcatgattaccgccgcagcagcggccgccggtgcagcgggcaccgcttccggcggcaacggtgccgcgacggacagtaacaagaacaacaacaatggcaccggaagtgccacagcaacaacaacaacaacgagggcattggcaaatggaggcggaggaggagcagtgaactttggcaccaccgcgccaacgtcgacaccgacagtaaacccatcctcaaacaacagcaacagtacaccgtccccgattccaattgcaccctaatttgatcactaaatgcctattaatgctcgtcccgcaaccgggcgaccatgttgcagtgcaagtcgaacagctccaggctgacgagacagtccatttttgggcggctgcaaaaaa

SEQ ID NO: 62067 - DNA, 224 bp, Heterodera glycines
ggcacccccacaaagtgtccaagccacgaaatgtccaaaagagtaaaaacccacgaaatgtccaaaatttttcaaaatttataaaaacaaaatgagtctaatttaggatttttagggttttcggggtcgctgaatacgaatataccctttatattaccctttgcctaaccttaggcccatctgaataataaaaaactcaaattcgagacttggacattttgtgg

SEQ ID NO: 62068 - DNA, 173 bp, Heterodera glycines
atgcccggcaactccgtgatcgatttcaccactccgtcgacgcccgttgccaaccaaacactgatcaaaatcgccattttaaccgcacaaaattccactgattttgggttgccaagaaagaactctgcgctgcgcgattcgggcggcgccattccaatggcattggagcagct

SEQ ID NO: 62069 - DNA, 800 bp, Heterodera glycines
atgtgccgccaaatcgggctcggagaaaccggagagcacttctggattcctccgcagttcctcgttaagagcaaggaagagctgatagactatgtctatcctaacttccaacaactccttggcaatgacaaggagctgctcaatcgtttgattctcgctccacacattgacacgtgcgacgaagtcaacgagatcatgatggcgaatgtgccaggtcaagtgcgggaatacttgtccacggataagccccttgacgaccgcccactggacatcgatgagatcgagtccgaagtggctgcgttgaaccggcgcacagactcgggcatgcccccgcacagtctccggcttaaagtcggatgcgtcgtcgtccttcttatcaataaaagtgataaggaaggactgatcaatggcacacgcatagttctggaagaacttggcgatgatcgcctcattggtcgtgttatcaatagcaatgctattggcggccaagtgagattctttcttgaaagaacacgaaatgtctatgaagacaaatcgcctggcggcataaaatatgagcgtttgcagttcccaataaagcctgcattcgctatgaccatttaaaaaggtcagggccaaacaatccgcactgtcggcattgatctggaaagggaagtattttcccacggtcaattgtatacggccttctctcgggcaacagacggaaacaatgtccgtgttcatgctcccaaccgggaaattgatgcccaaggccgagccaaagtgctgaatattgtagctactaatatgctcaagttaca

SEQ ID NO: 62070 - DNA, 496 bp, Heterodera glycines
acatcatgacgctgatgcaccactggtgcctgctgcacatttgtgctggctgatttggctggggaattgcatcccccagctccgagaggcctaaatccccttcaatggtgtcgacaagccctcgggcttggtcgacccaatgcatgaaggccttgccttctggtttgaagtctctgtaattttgctcttcatcttgaagagcttgtcccttcactctcaggaaaatggcttcccattttccattgtatttctcaagaagagaaatggttttgcagagattttgtctctctgcaattaagtctgcacggacactttggtccgtcagctctttgcccaagttttcttgggctgtctcaatgtacatcttgagacgcaccaccattggtgcaatggagatacgcaagagctcactcattgctcttacgcttgatgaaaacgcaataaacccctttgggttgtgcgtttgatccaagcgctacggttgcgctttggattg

SEQ ID NO: 62071 - DNA, 867 bp, Heterodera glycines
atgggacaggattctggtactaatggtaacacgatcatatgaaatattaagaaaatggaataacactaattatcaaataaaaaattcatttaaatttcatttttttctatgaaaattttcatttaaattaaaacgaattgaaacattttaataattattaaaaaataaaaaataatgaaatattaaaaaaatatatattcaataatatatgaataaacaaaggtatttaaataatttaatattttgttccttataataaattttgacatcaattaaaataaaaatcttttcgattgaatcattatttttaaataattaacctaataaaattgatcagttgttcctaattaacagatgtccaattaacgttggtcaacggttgtccatacaaaatttatgttgccggtgcggtgcaagtgaatttgacggtcaatgaaagacaaacaaaaaatgtgccgtcagtgagcacagcgcaacgattatgggccaacactgactgtgacagcgaagtaaggaataattgctcaagagtcgagttctcgactctcttggtcaattcccgattttaaatattaagacaaatttcgggcccaggttcattctctctatttgaaaaattgtcggtctcgacaataatcatcattattggaaaattgttggtcttatttttaggggaattctcggtattggacaaattgtcagtctcaaggtaattctcattcttgggcattatcagtatcaatattgggacaattctctgtatcaactcttgagacaattacctgtcttggaataattgtcggtcttttttttggcaattctcggtctgggttaattgtcgatctcgagaataattctctttcttga

SEQ ID NO: 62072 - DNA, 471 bp, Heterodera glycines
atggacagagacagacagacaaatggacagagacagacagacaaatggacagagacagacagacaaatggacagagacagacttggagcgttggaacaacgaatggccaacgactgcaatggccaagccgaaagagacgagcacaacgaacagaacggcgacgaacagggcgaagttgatgcaaatggaggaagtcaactcattgtttgttgttcgacctgagaattgggggatgtattaaaagaatcgtgcataaaacaaaaagtatttgcgaagttttcgacaaaaagagaccaaagaatgctccgacaaaacactcaccacgcaatttcccaggcgctgtgccaacgcccgcttttgctgccgcaacggcgccgttgcgctctccgtcgtcgtcgtcttcttcaccctcaacgggttcgtccagaacgaacacatattgagaaatcaaatctgcatcgaccgtcctga

SEQ ID NO: 62073 - DNA, 226 bp, Heterodera glycines
atgccaaagcgcggctttcgcttcgctttcgaattgcctcccaccgctcccccggccgttcagacccattggctgcagcagcacgtggcgcagttggcccgtccgcacgtttgcgtcgactgcgacgccggcttcaccaccgcgagaagcgttgcgtgcccacagggaaatgcaacacgcggaaaaaacggcgcggaaggaacagcgaatttcgagcagaaacgaa

SEQ ID NO: 62074 - DNA, 1793 bp, Heterodera glycines
ctgaaaaaggagttcaaaagcgactttgaagaactgatcttctttataaaatgcaaaaacagccatttaaatttaaatttactaagcatttctttgatgcaaacgcccgccgtttacgatgccaaccaaatgcgtgccgcattgtccggctccaatgagtgagtacatttacaattgaattgggataaagcgcatgggaaagaacttcaaaaaggaacgccagtagctcaacaggtttaagtgatagattacggtataaacgccataatgaccacaggagaaacttagctatttgttttggctaaatttaatgttcatataagccatcgaattgatggtggattctggttacagtttacctcatggcttaccgtatatacatttcattacggtgttaccgtagggcggtgctaatcgaaattttggcgacgcgcacaaaccgacaaattacggcgctgaagcaggcgtatgagcagttggacagaaggcatcagcacaatcagctggaggaggacatcaaagcgaagacgaagggctccttccaaaatctgttggtgtctttgctcagctgctctcgcgaagaaagtgcgcccgcaagcattgtattggcacacgacgtaattagtggcaatgaattaacatatacatattaagtggcaaattagaatgaattaataaaataattacaattaacatataataaacaaaacatatcacacggctaattacatggattggaaaaaaataaaattattaattagtatattcaatatcacatatatttaattatatttataggtaaaaaacaaaatatagaataaataataattattattttggtggtgataatttccatatatttttctcttctgcaggaggccatgaaactgttcagagagggcgagggccgacggggcgttaacgccgtggtgttcaaccaggtgttggccactcgcagcttcgcccaggcaaacaaaacttaacaaagcctttgccattaccagacaataattaattaaaataaaatataatcaattatttatagttgaaaatgtttcacagttttaacaatttgattgcaaataatttgttaaaaatttcagcttcgggaaactttcgagttttaccgacaagccgcgcaccacgagattgaggagggaattaagcaagaattcagcgttcacaacgaaacggggtaatgggagaaggggcgggaaccaattagtgatgatattgtacacgagaggagacagtctaattaggctaattggatccaatgtttataaatatttggatttttaatgtcatttgctgttaatgctttcattttcagtttcttggcactaatcaaatatgtccgcaacgcttctgtgttttttgcggatttattgttcaattcgatgaaaggtaaatttaataattaatggataaatcaatatctattaatcagaacaatttacttatttaactgcattaattatttattaatctctctgctttttcagggctcggcacacgcgactcggatttgattcgtctggtcatttctcggtctgagattgacctggctgacatcaaagtgctttcaaatttaaattctgttaattgaatgttcaagaaatcaaaagccttaattaattcttatttatggatttaacaataatatttgtcatcccattaagcacgcttttcacacgttgcacaagaagagcctggaggagtcgatcaaaggggacaccagcggagcttaccgagacgcacttttggcattggtcaagggcaacacggagcag

SEQ ID NO: 62075 - DNA, 696 bp, Heterodera glycines
atgtgtgaaaaatctttggtctgctttgattctgttatgaacattttcggattgttgctgcttctctctgccggcgtcaactcacaaatggaaacaataccgtaagataattttaaaccgtaagataatttgaaacaaatggcaaagttactatatcacccagcaatggttaaaaataaatttataaataaaaatttatatttaataaattttcaaatatgtatgtaataggattcgattgactggccaaaaaagcagctgggcaaacatacaactcggcctttttgaccaatgcctcccatctgaggaatcgaaaacattcggcatcgaatttcgtctcccgaagaatggcggaagctgtgacaaagaagggtcagcagattgcgaaattaagcgaaaattaaaaaatatttatatatatatatatttaaatattccattccaatttttagtataagcatttgctacgcgagcacattaagcagccgaacactgaatgttatgcacaccgctgatgaattttcggtgacctccgagctgttcaatgtgcccgaaatggtcagagttttgacggaacatcgaacaattgctgattttaaaaaaggaaatttgttctatacctggcttaatcaaaaattataaaaccatttttaaaaatagtcctcaattttattacgaaactttaattgaattaaa

SEQ ID NO: 62076 - DNA, 729 bp, Heterodera glycines
ccttcaacgcaaccaccacgaccctcctacacgtcatgcctccccctgagcgacaagcacgtgtacaagccaatgacggtggcttataggtgggccgctccagcgccatccattttcagggctagttgattcggcaggtgagttgttacacactccttagcggattccgacttccatggccaccgtcctgctgtctatatcaaccaacaccttttatgaggtctaatgagcgggcactttggcaccttaactccacgtttggttcatcccacatcgccagttctgcttaccaaaaatggcccacttggagctcaaacattcaacgcctgggttcagagtcaagcaaccctggcttcatacccatttagagtttgagaataggttaaggacatttcgtccccaagtcctctaatcattcgggttaccgagtataactgcttaacgagctccagctatcctgggggaaacttcggagggaaccagctactagatggttcgattagtctttcgcccctatacccaagtcagacgatcgatttgcacgtcagaatcgcttcggacttccaccagagtttcctctggcttcatcctgctcaggaatagttcaccatcttttcgggtctcagcgcatacgctctgtctccgccccatcgcatgcgatcgagacgggactatgttgcgccccacaccgcagtggcagggatcacacatcagctccgtaagaaacct

SEQ ID NO: 62077 - DNA, 565 bp, Heterodera glycines
  unsure (1)..(565): unsure at all n locations
atgaataatgtgcagcaattaaggtaaaaaaaaatggcacaaagattttatttntaaaagttttattgaaattaaaaattttcaccgccaaaattttaaaaaataaattaattaattaacttagaaatttttcaacaaaaatcttagaatttttttataagaaaattttaagaaaaagattttaaaaaattttcagcgattttttttcaaatttatgatgaattattaattcgagaatgtttccaaaaaatcgtaaaaatgtttcaacaatttttccttggaattttcataaaaatttttttctgatttttattcttttaaatttctaaattaaaaaaaaattccggccgcgaaattttggccggcgaatttaatgtaatttttttaattttgaaattttagggtacaacttgagaaaatttacgagaacatgggtggaccaaatttggatgcggattccaacaaagtattgaacaatttgcagaaaaaggtgggggaccatcaaataatttaaaattattaaaaaaataattttaatttttttaaatattttcaaaaaaataaa

SEQ ID NO: 62078 - DNA, 1116 bp, Heterodera glycines
atgcacgatcttgatgaggaaagtagagcaaaagtgaaagaacgatttcaagcatggaaaattggtggtggtattgttggtagcggtagttcggcaggttacggtattcccgctcttggtagcccagcaggacacagtggtaccgtatatggtagaccgcacctagacagggcggagagcagcaaatcggcggagcagcgtgcaagagctgcggcggcacaacaaaaaaccgaaagcgagaagcacaaaaaggtggaaatgcaagaaagcaaaaagcgagaattgcttgtacttaaaatactcaagaatttggtggttttttaagtttttttctgaaaacacaacagaacaataggcttgttttccaaggacccataaaatttttactttttttcaatttataaaataatttttcattatgactcaagagtggataaaactctcgtttttcgcggtaaaatgcgaaaacgagaacccccgccccccaaaaaaaaaggctagcattaatttttcattccgatcacaattcataattgtacatcataaaattctcgcaagacgcataaattatgagaacgagaattcgagaacgagaacaaagtcccaattcataaaagtacataaaattgttgcatttcgcgctaaaatgcgagaacgagaaccccccaaaaaaggcgagaaagcgagataccagaagccagatgagcaatatgcctgtgctgattatgctataaaataacattattaatatttttcatattaagcaaaccgatgctgaggacgaatcagagaatggaagcgaattggatgattttgaaaaagatatttttggtggaatgaattcagataattatgatgaagcacttttaaacgcacaattaatacttcaaagtgaaaaaaaagtagcaaaagtggtcaaagcatggaagaaactgcaacaaaaaaagcaaaacagtcagaggacggtaaatgactggaacagtaatttatttggctggggtaatgcggagcaacaggttaattagtgatatgattattacgatatatgctgttattacggtgctgagtcgtttcgaaattcagccatcattggcattccataaattcgccaataaa

SEQ ID NO: 62079 - DNA, 512 bp, Heterodera glycines
atgaccaatttttattgcttatatggtttgtataaaactattcaaattttcagggaatatagattaaacttcaaaatttcttatggggatattgtaaaaaacgaagaatttttgtgtaaaccttaatttaaaaaaatattattatatatcatattagtattttcgctttacaattttttgttataccacttcaggaccaacaacatgtatcggcactgcaaatgagaccgcggttggaaaaattatgagatttcataatatagatgacattgaaatggggccggttaagcatgatttttcacgtgaattagatgaaatgggaaaacggaacctgattgaaaaagcattgagattttatagttttaaaaccagagttcccaagtgtgcttatttctaagatttgtgcttattttgaggggtcggatcttagaaagtaaaaatgtgcttatttctaagatttgtgcttatttcagcgttacgtgcttattttgtgcttatttttggatttgaaa

SEQ ID NO: 62080 - DNA, 538 bp, Heterodera glycines
atggtgttgctgctttttgagggttgcgtcgtttgcgcaaaccaaaaaatgactgcatcgctgtcacttcgccaatacatgccagaggtactcaaaaacaaaacatttatttatcaatttttatgattttttcagggactgttgaacgatacgtgtgaagcataagttaaacggccgacgtaaaaaaataaacaaataaataaataaatatttgttttctttgttttttagcaatgcactgtcgggggtgaagcctggcagctttgcttcggtattacgctgatggaacggtacggtaattatgtgcagtaaaacacgcactattattgtaaaaattcatttttgtcacataaataacataaaaaatttcaattggaaaacagaaaaaactgctgaacaaaaaaaatttttaatttggcaaaaattcgtcttttttagcctctgtgctgagcggaaaaccaccgaacccgagccaaaagagaacgcaaccacaccggcccccgtatatgacatgcaacagctcaagtaaaaaaataaa

SEQ ID NO: 62081 - DNA, 548 bp, Heterodera glycines
atgtacggtctcaacaaaacagaagggccggaggaaaacttcaagaacatgaccgagttcgacaaatacggcttcatgcatggtgaattgttggcattgaaaaagccattgaacatcataaatttgcaagcattggaagagaagctaaaaattaatttattaaattctgttttcaattgttgaaattattaattttccaaaaatgcttaggacatttttgaattttataggcgtttttgtaacaaagtgcactcaaattgtctaaaattttcccggcggcgcctatcggcaccgccggacccccaatttactttagttttttggaattttagccacaaaattgccaaaatttgacagtttttgacgcaaaaacggctacaagtccctattttttttgctctcgggtgctgaatttttaatggaaaaattttttttgcccgaagagcaaaaaaggtcttcaggttccccccccccccaaaatttttctggctacgggcttgataacaattttaaagactgactttggcacccaaattgaatcgaataaa

SEQ ID NO: 62082 - DNA, 416 bp, Heterodera glycines
atgcccaagtgtttgcgtcgggtggtcgccgcttatttcttccgccgggcaaagtcagtccctttgactgtttttcgtgccattgctaattttgcctctgttcaaattcaaaggcgtcacctacgaaagagtgccgccctcgagggctgtcgcgtgccgaactccgtccaatgggtgttccatccactcgcccggcatttcctttcgtgccccgtgcgcgtcggcacaattctctcacaaagcggcgtgcaaaagacgccgaactttcccttctccgctttgactcagccgccaaaacctttggaagtgcttaaagaggcgttcaaaatgcatttgctcggccaattgttgtgccgattggaaagtgcggacggacgcacacttcgactggcggactttgtggagcagtcgcaact

SEQ ID NO: 62083 - DNA, 388 bp, Heterodera glycines; identical to SEQ ID NO: 51536

SEQ ID NO: 62084 - DNA, 1270 bp, Heterodera glycines; identical to SEQ ID NO: 31790

SEQ ID NO: 62085 - DNA, 1020 bp, Heterodera glycines
atgcgtgtctgtgacccgttgtgctcgctgaatgggccatttcatcttgttgcggtaagttaattacacatgcctgggcattttcatttatacaacaattattttcgtgattttgtccatttaattgtgattaatgccaaaaatgtgctaaaacccaaaaaattgccaaaaatgtgctaaaaatgcatgaaattgttcgggattataccgaattgttcgggatttcgaataccgaattgttcgggactcccaatcccgaaagttttctgatcacccttttggctttgaagccgactgatcagtcagagtgattggtcccttccagaaagcactgctcccttccaaccgatcactccaattggccgccaatttgtcatcgtcgtcgtcggcgccactgctgctcgactatccgatcgcttctttccatggcagtgatctgttcctgggtggccatattctgggcgttcaaactgccagtaggttccgtccgatcacttatcacgtgattttttcaacaatcagatttcgagcagtaaggcatacctaatcatttcttacagagctgatcgttcaccccgaaaattttagaaattcaattttattgcaatctagaaaattcagatgacgttttgaaaactctttgtaaaaatacaaaaaatttctcaatgataattgaaatccttaataaaaattaaataaaattctacataaaattttttaggaaatttttgaaatttaaataaatctttaaaaaattacaaaatttttcctagggaagaatgtaaagaagtgaggacagggggcttcttattttttgttttcctaccacatggcggtttttaggaaacgacctagcacctcttacagagctggtcgttcaccccgaaaattttagaaattcaaaattttcaacgattttttgagacctagaaaatttagattagtgaaaatatttcactgaaatctcttcctaaaaatacaaaaatttttcagagaaaattcaaattttcattataaaaa

SEQ ID NO: 62086 - DNA, 138 bp, Heterodera glycines
atggcacgccttgtgcaaatcgcccaagtggtccacgacgagggcattcatcagccattggctgttcaactccaacgttcggattatatggcacattgggacccgtcagatgggagcatggcactcaaacaggtcctg

SEQ ID NO: 62087 - DNA, 87 bp, Heterodera glycines
atggatgaaaatgcggagccattgcatccaccaaatcctcttgaaattggaattattggcagcagtgccaacaattcgttgtcagag

SEQ ID NO: 62088 - DNA, 439 bp, Heterodera glycines
ttcgcaatgagtgccgctgcgacccaacgtcttcaagcgaagcggcaaactttggacgaggcttatgctcccccagccaattttttggagatcgaagtggtcaatcccgtaagcaatgcttagtgtggcccgttgtgacctttttcagcagatcactcacggggtcgggaagaaccgatacacggactacgaagttcgactgaggaccaacttgccggtgttcaaacacaaagtgagtcgttttggcattggcggctctgtttaaattggagtgtttgtctcccttctcaaaaggagtcgagcgtccgtcgacgttactcggacttcgaatggctgaggaatgagttggagcgagacagcaaagttttttgttttcatttttgttccatctgtttcgtcagataattgtgccgcctcttcccggaaaagccttcaagcg

SEQ ID NO: 62089 - DNA, 867 bp, Heterodera glycines; identical to SEQ ID NO: 31799

SEQ ID NO: 62090 - DNA, 4170 bp, Heterodera glycines
atggctggcggtggcggcaaagcggcattcaacctgttcgccagtcgtcaagaccaacacggtccggcagcagcgcagatgctgactcgtgccggcattgctgccaacagtgacatgtacacgctggacgatgtccaacgtctccagcagtggctcaacaatcagcatggtgtgggccaaattcgcctggcggtgtttgaaaaggagcaggaataccgcattgtattcaaaggagatgggtgagttttttatttcttttcttgttttgggtaaattagttaattgaagattggcggcgagattcaacctttgccttgtgttggagcgtggccacttcaactacattggaagagttgagcagctgtttgatgtgcccaactactgcatcgactgcgagcggagggctgacgcgcgttaccacgcgttcggatgcaaagttgtgtgccgcctttgtttgcggtacgggcctggttatccatggcaaactgaacaggtagattaagctccaaaaactacaaaaacaatagcaaaaaaaacccaattaagctaccgaatggtggaagtagtgctcgaaagtgcgctgaatgtctgttcatcttcccaaatggtgggtgctatgactaccatctcagcaaccactctccagctccgatggacggccgtggtcagcgacaacgtcggcccatctgtcaatggcgccgggtgtgtcgtgcgtgtggacgtatcgcctacgtggccacacatcagtgccacatgaccagccagccgacgatggaatctgtcggcgctgcaatgggccccacaccgtcgatgagccttgctacatccagcccattgacgacggctcagttcgacaacgtgcatcgattgctgttgacaacgacgattctgatgacgacgacgacgatgaagaattgccgcttcgtctgtgcttctttgacgctgagacgtcacaggatacgccattacagctgaacaaccgcaccgtccagaagcacgtgccgctgctcatcgtcgccgaagtcatctgcgaacgttgtctgcaggctggcatcagcgtgagcgatggccttggaagacgggctcctggctgcgtctgcatgacaggaatggtgagaggtcaactgtttcgccagtggtcttcgccaccctttgccaatgccccgggagacaacagcgcttcgccagttggagcaccagcgttcaatcagcgccgcttcttcttccattcgtttgacaacgacggcaacgacccagtggaccaatttttggattttttgctgcagcatggcccaaagaaggcacacacggtgtgcatcgcccacaacggtggaaagtacgatttccatctcgtacttgaggcactacaccgccgaaaccgtccacccaagcatctgtgcaccaccggattgaagatctactcgatgcgtctgtccgggcgtaaccaacgacgaatcacgttcaaggattccatcaactactttttttgtgccttggacgcgttggtgaagagcttccaagtgccggaccatctggcgacggtgaagcccttctttccgtatctctacatacgacgacaacatctgtcacagcgcctcaacggtctaccggctcaagagttctacgcaccggacacgatgaaggcagagaaacgggcgcaatttctccgttggcacgccgacaacaacggcaatggattccagctacgcgagcagctcataatgtactgcgtcaacgacgtggccattttgagggagtcggtcatccgattccgccaactcatcgccgacaatactcaaggcctcgacccattcctccacgcgtaaacagctgctggtcttgcgctggcaacttttcgccgctgtttcctgcccgccaattgtctggttcactcacccgagggcggctacttgcgcggacgccgtgcttcggcagaatcgcagcgctacatcctcttcttcgagctggagcacccggaggcgcaagtgcagtgcgccagctggtcggtcggagaggcgcacattgaggacagtggctaccgcgtggacggactttggcgacgagaagcgcctctccgtcccctggccattgaatggcttggatgctattatcacggtaaaggcttttttccgtttccaaaatatcttaaaattgaggctgtcccgcgtgctttcccgaccggcagcaacaattggcggcggggcgaacagcggaagatttgtacgaacggacggagcggcgcctctttgagctggagcacgaccacggctgcgaaatccacaaagtgtgggcctgccagtggacggagcggctccgtcatgacccagacctgaaacgccgttacgatgctgtgttcgtcccgtgcccgctggacccgcgcaacgacgcactgcggggagggcgcactgaaccgttcaagctccaccacgtgtgcagtgacgacgaggagataatgtgcattgacattgtcagcctctacccatacgtgatggtcggtttttgttttaaaatattcgcatattcatgatgaaaagcagaaggccaaccgcttccccgtgggcaacccacgggtcctgacgcgcgaggtgttgctccgtccgccaacggcaccgctcccgtggactgcgcccgaaaacaacatcttccgtgggttgctgctcgtccgggtgcttgccccacacaacatccgggtgccgttgctcggctaccgcacaaaggacgggcgattcactttccctttgtgtgcgtggtgcgccgaccgtcggcagcagcggccgtgccgacatgaagacgacaagcgctcgtgggtgaccgcctacacccacgtggagcttaacaaggcactgcagctaggctacgtggtcaccgatctttttgaggttgtccactcattaaaattttgagttcaagaacacaaattaggtctgggactatgacgaatgggacggcacgctgttcagcagctacgtcaacaccttcgttgggctcaaagtgcaggcgacgggctggccagaaggatgtgtgacggatgagcagcaaaaggcatttgtagacgattttgagcggacggaaggcatccgcctggactcgaccaaaatggagttcaaccccggcctgcgcctcatcgccaaaacattggccaactcgttgtggtaaatattttagggggtgaaaatttaaaaaaaaaaattgcatccacagggggaagctagcgcagcgcgtgggccagactgagattcgctacacgcggactccggctgaattccacgcgctcctcgacgacccaacggtggacaagttggactttgtccacgtgtcagaacacatggaccgctgcgtcgtgcggaagcgaccggaattcgccaaagccccgctgaccaactgccttccggtcgctgcgtttgtcacctcatacggccggcttcatctttacgactacatggagcaggtgtcagccatcgtcggtgcggagctgctctactgtggtatgtttatttgtcacgaatggttttttttggacagccctttgttttagacaccgactccatctactacgtcagcaagatgggtggtccgtgtgtagcagagggcgaggctctgtggcagatgaagcgcgaacacaccgaccgacggatcgtcgagttcgttgcgggtggccccaagaactacggcatccgccacactgcgcgggacggcaccgacgagcgcgccaacctcaaaatccgcagcttccgcctgtcctatactgcgcagcagctgctcacctttgaggcgatgaaagacctgacgctggccacttacaacattgacggcccaatgtgagtttttaacatatcattcttttacataatattaaaaaaattgaattttagcgatgatgctttagacaatgacgacctttacgtgtacgggggcggcgaacatcgtgccatacgcgtcaacttcccgcaaattgatcgcaatgtgtacgccgatctctacacgcatgaggcccacaaagactacaggcccttctatgccaaggggcgcgttcggcctgggatgcagacgcgtccctttggctatctggaggatgatggacagccgaacgaaggacaacggacgcatcgacgaaagagaaattttgtggagcaagatcccacacagcccggacactctgggtggttctga

SEQ ID NO: 62091 - DNA, 898 bp, Heterodera glycines
atgacttccttcatcatcattaccattgcattcagtttttgtgccatttcgatggctcatgtgccgttttggtgggagcagctaagcgatgcggaagagcaatggaggatcaacacaagtaaaaaattggattacaacttttaaaactaagatattaaaatcggggaattcattgaaaaattcttttgaattttttttgttgaaagaaatcatcaagcccatttctgaaaggctggctctcggaaaacgaaaacgcagaaaaacaatatcaataaaaatctgaaagaattttctggaaattttttaatggcatttctgggactgaaaaagcttaatttgaataaaataattttcaatttttaagcaatcaacgaatgctgcccaccagccacatattgttgcgtcaacaatctgttcgtgccgcgagagcttgacgaaatgggaatggacaggtgcatcgatgacggcacaatgggaaaggtgaaaaacattaaaaaaataagaatttaaataaaatttaaataaattatacataaaataataatttaataaattatacataaataatcatttacataaataaattttgcaaaaaaataatcatttgataaattatcgataaaataataattaaataaattatacataattaataatttaaataaattatacataaaaataaaattttaaataaattaaacatgaaataataattaaataaattatacataaaaataataattttttataaattttgcataaaataataatttaaataaatttttgcatctaaatttattggattgaaaaaaaaacaaattattttaggaacaaagttacaacaccatcaaatgtgcgcaacgcaaatatttgggtgacgaatcaacggatatttgcc

SEQ ID NO: 62092 - DNA, 361 bp, Heterodera glycines
ggcgcttttggttgtgttaacgaagcgaagtggaccctaagttgtgcgaaagaggcagagaaacagcagggcaaaaccggaaaagcgagcaaaagctcgaaaagggtcggtcattcagcctttcacacctccaaattcaatgcccttttctgcaggtggccattaaaacattcacaaattttgctgacatggagaaagaagcggtgccttagcctgtttactattcgaattccgaattccctaatttttagggtctgctcaaacagctcgaccacccaaatattttgcgaatgtttggtgtgacaaaattggatgacaaaaacgcaatggtcattgagctgatgaacttgggcgatttgaa

SEQ ID NO: 62093 - DNA, 388 bp, Heterodera glycines; identical to SEQ ID NO: 51536

SEQ ID NO: 62094 - DNA, 440 bp, Heterodera glycines
atgccgtataacttcgagactcttttgccgttgtgttccaatgaaatggatgcgcccaatcttatgaacgccgcattattcatcgtgaaaagcactgccgatgtggtacagaaatgcgccgctctttcgcgaactcccatggaaaagtttaaaattttacaagtaactttaaatttttcatgtaaaatgcgttatggcttaaaataaacatttttcgtgctcacaatcagcgcataaaattatcctagaaaaaaattttgaaaaaaaattttcaggggagtgacaaaacggataagcaccgaaaattttgtcctattttaacggttactccacatttgcgccccggacatttgcgccccaaaggaaaatcggacatttgcgcccggacttttgcgccccgacatttgcgcctcagacttttgcgccccagtgaaaattag

SEQ ID NO: 62095 - DNA, 2835 bp, Heterodera glycines
atgtttgaaaatgtggaggaggcagagaaaagtggcacacggatttctctcggacaaattgaagaagagttgaaagccatgcagcttattaaggacagtgcattggctcttctttcaccgccaatctcaacaaatgccatccaacttcgtccacaacaatggagagagcccaaatcaaagaaaggcaattacaattctgggaaaacgacagcaaaccagcacacaacgggaggcaaagcaaatcaaagaaagccgacctacccatgtggcgcttgtggaaattctgatcattggcgatctgattgcagatttttcagtgcaatttgtcataaatgccaaaaacagggacacatagcaaagatgtgtccccaaagatcagcttcgacatcaaattcaagacgtcaaaatcgggctgtgcacacagtcaaagtgacaagccattgcttgaatgtcggactgaatcgcggtcattggtggaagcttcaagtgaagataaatgacaatgattgtgagatgaatggggacaccggagcccaagcaacaatcatcacaatccaaacatggattaaattgggaagaccaaaattggaactgtcggacattgaaatgcataattgtaatgaggaaccatttcccaccgaaggaatgtttcaatgtgtcgtcagttgctttgacaagccgccaaaaaggctaactgcatatgttagcagtgctgtcaattacaatctctttggattgccatggattatggcttttgatctgatcccaagggaagtcatgtttcctaaggttcagcaaaaaaagatgtgcgagccaatcagcatccatgccacattggcaccaatgccaaaggcaaacatcaaggacgaagcatcactgattgaggctttgaaaacggatttttcggaagtttttgaaccaggacttggcgaatgttcgaaaatcaaggcacatcttatcctgaaacaggatgccaagccaattttctgcaaggcacggccaatcccacacggtgcaactgaagccgtaaacgctgaattggaccgacttttggaaatcggtgccattaagccaattgatttcagccattgggctgcaccaattctcgccgtgaaaaagaagaatggcaaaacaagggtttgcatcgacttttcaacagggttaaacaatgccctcgaattgaaccgacaccctttgccgagaccggatgatatttatgccgcactgaatggagcgtcatattcctcaaatttggactttagggatgcctatttgcaaatggagttggacgaggagtccaaggacctttgtgttatcaatacgcatcgcggcctattccaatgccaacgtttaccttttggagtaaagtcggcaccgtccatttttcaacatcttatggaccaaatatgtgctggaatacccggcgtgtttgcctatctcgacgatgggctcatcgcttctaagacgttggaaggacatatttcggcactttaccagcttttcacgaaaattaaggaatttggcctgcgtattcagttagaaaagtgcaaattcttccaaaaagaattgctttttcttggtcatattgtgtcatcaaaaggcattcgtcccgatccggcacgttctgaagcgatcagcaaaatgcccgcgccacacgataaaacgtcacttctatcgtttttgggagcgcttaattattatgggcgattcgtgaaaaaaatgcgtgaaatactcacaccgcttgatcagctcctaataaaggacgaaaattggaattggagcgaagagcaacagaaggcttttgaaaaggcgaagaagatcatgacttctgatctgctgttaactcattataatccggctcttccaataatcgtggccgctgacgcatccaaaaaacgtattggcgcaacgattggccacgtttttcctgacaaatccgagaaagtgatcgaacacgcatcatgtgttttgtcaaattcccagcaaaattacagccagatcgaaaaagaagcattggctctagtgtttgcagtacagaaattccaccgaatgctattcggcaggaaattcaccttatttactgatcacaagcctttgcttgccattttcggttccaaaaagggaattccggtttattccgccagccgattacaacggtgggcgttgatcatggcaaattatgatttcgacatcaaatacacgaatacagcatcatttggacaagcagatgtcctctcaaggctagccaattatccaaagcctgaggaagatgtgttgattgccaacatttgcgtcgaaacggactgttatattaacaccattttacaatcgcaaaccgttcatcttacagtcacggcacaagaaattgcggaatcgacaaccaaagatgagacactccagaaaattgttaattttgttatttctggttggccaacgaagtgcagggaacccgaaattgcaccatttcatccgaaaagaaatgaaattttggaaattgggggctgccttctctacaaaagtcgtgttatcgttccaagccaactgcgtggccgaattttaaagtcattgcattttgcacatccgggaattgtgcgaatgaaggccttggcacgccagtatgtatacttttccaaatggccggaagtctatcaaatgtcttcaattacggccaagtccacagttttcacacttcgttccataatccatcgacggacgataaaaattggactgaaaaggtgctgctcgcttacaggacgacgccaaataatgccattgatggttattctcccgatcaattattcttcggacgaaaactccgaacgaaattggcattag

SEQ ID NO: 62096 - DNA, 1029 bp, Heterodera glycines
atgtcccaattgaccagcgatcgggcccagaggcttaaatatgtagagagttctctgagacattcaaaaagcccaatcgagacttttttcatctatgccgagaaccctaagcatcatagaaaacaacatggagcaacaaagaatatccagattcaaaaatgctatttcgctttccaaaatatcttgaaatgttatttcgccaactgtcagttccctaaatgtcggataactaaatgttgggcccgaaaatgcaaaatcttgtttagatgtgaagtcgatcttcccgacccagcttgcaacattttccacagaaactgtgtgatctgccaggtcgaaatcggcaaagacaaaagcaaacagtgctttctttctgcaacacgctgcagttgttactactgttgcgacaaaaagtacgccgcgcattgtccacaaggatgcaaaaattgcatcaatgacggtttttatgaggagggcggatgtccggagaaccacacgccgatggctcggctcgcaagcagcaactacagtagcgagattgggtactgtcccattaaggggacgggcgattaccggatattcgcaacagtgtacaatttgaaaagcggacatttgggtagtaaaacaatttgaacaaaagtgtactctattggacatttgaaaataaaatgacaaaaattatttttactttgcgtctctcttttttttcattttctatatatctttagtctcactgaaaactctccatttgtacattcattgaagaaggtggaaactgcgcgaaaacattttgatacggtaattattgtatttgcccctaaaactaatttttatttttgaatattaattaattaggttgatgcggacaaaagcggtgccatttcgatgaaggaagccattgcatatttggtggagacaaagaatggcacttcggctgaccatttggcaaagaacagtgaatggtttggccacatggacagcaatggaaacagtcaaattgagccagtggaatttgatcggtcgctgatctga

SEQ ID NO: 62097 - DNA, 546 bp, Heterodera glycines
gtgttggacgaggctcgtgacggtgtgctgtgtttggatgcgaatgcgtccgaaattgtcaccggctcggcggatggcaatgttcggctgtacgacctgcgggagggccgacttttcattgactacatgaaggattcggtgcgtgccttctgtttcaaaaaaaatcatagaaaatttttttatgagaaaattttaagaaaaaaaaattgatactttttttgaaaatttttcaaaaaaaacttagtaatttatcatataattttaaaaaaatcgctgaaaattttcaaaaaattttttataaaaaaagtttctatgattttttaaaatttctaagtttgaaattttttaaatttctgcggcgaaattttgtctgtcccccttctgtttatttatctcacaaaaagattttttaacttttatgctttctctctgtttttgtcaggtgatcagtgtgcatttgacggcggacaaccaatgctttttggtcgcttctatgggcggcacaattcggcttattgaaaaaacgaatggacagcttttggctga

SEQ ID NO: 62098 - DNA, 1033 bp, Heterodera glycines
atgtccgagtttggccaagactatgacttgatggtcacgcttgtttctggcaaccgatcaatgccaaataatccttcggtgccaatgccaccggtgctcttcatttttgctcaatggtaattcaataactaatgattgaaagagaagcaaatccgacccgtgccaacttcttcaggtcaaacatcggagggccgagccaacaattcgacgccaatgccaccgattggttcaaaggcattgcggccgccttcgagcggggcggcagtgttcgcttaagcggcgacccgcgcgacatggactggaatgttaccacaccgttgtcgcaaatgcacttgagatggacctttcgaagcgtccgcgaatttgcgatgccgtacgagaagcggctttacctcagcaattgggacagtgccgagctgcaaaagcgcgggtggtctgattggatggcggaacagtggaacaaatttgttggggccagaaacgaggtgggaaaagcacggggggcggaagcagggcattggctgaaagttaggggaacggcacgaaatttataatcaaatgccatggattaaatatgcaataagtgaacagttaataagacaaaagaagctatattttaatctttttctgcagatgatacgtcaaattaattatattttacgaattttcgttttttaaatataatttactttagtgcaatttacatgatgatgaatagggcgaggatttttagtatgaatcactattttggagctttgccactaaaaaaacaatttcggaagttggccactaaaatagttttttgccactattttggcgtttcgtcactattttggaaaatttcccaaaaaatgcaacaaaaatgaaaaatataccccaagaattcaaaaaatacacccctaagaattgaactaaacattttcaaattacacccctaagaattggaaaattttctcaaaaattcttccccaaattttttttcttgctcaatatttgctaagaaaatgttttgtaactgcaatcagtgaataaa

SEQ ID NO: 62099 - DNA, 1460 bp, Heterodera glycines
gtgggtgccgatgtgacattctgcacgtgttccgtggtcaccatttgcataatctctgttgaccgctacctggcggtgacgcgaccgttgcgctacaaatccgtggtcaccaaactcaaagtgatcgttgtgatcgtgctgatttggtcattttcattgggcattctgttggccactgtccgatgggagtcccaacagcacaccgtggaaaacaaagtgagaggtggtggaaaaaatgttggcaattggaaaccgacattctgatggccccaaaaatgcggcaataggaaatcggaattcaaagctcaagaatgtgggaaagtggcatgccgacacatcgcccactgggaaagaagttgcattagattttttgatcatttgttgatgagtactgtgattgatcagatgatcagcagcataagtgaaatgctaatcgtgaatttcgatgcaaaaaattgccaaggggcagaactgatcgtctatttaaaaatggaaactcgcagggttcagctcccacccggagttatatagccattttgcgggcaatttttgtcaaactcctacagtagcaaatactgcacatacagtatgcaatagtgtacccaagagcaaattcgaaaaaaagatatctgtccatgttgtttagacatgttatgttggcgacgaaattcgctacctcgcgcacagcgtggtgttcgctttcttccttcccgcctctgtcacattgacactgtactggcgcatctacagcctggccaggaacaggcagagagcgttggaccgcggatttttgatgattctcggccacaacatgaacttcttgaccaacacattgtcgcaaacggtgtgtgacactatttttttgggatttcgaaaatgcagagcacagtgatcaagatgaacccaattagggataaattaaagtctcgacgaattaaattctcgaacaaatacactcatacaatcgcactcgtgttacaaaacgatttagaacaggatcctatcaagactctcggggccaatttaaaaaaaatgaaataaatttcaataatgggcctattaggcacaacgacattttcgatcatccacaaataaaatagcccaatcgcattcacaatggaataaataactcgagagttccgttcgcgagaagaaagaaaattctcgacccagacaattaaagagtcaatcaccacaaatatcgataccacatatataacagtcaaatattcacaataatatttcacacacagactgcactgagagtgcacatcggcaagaacaacggcatggttgagcaccagcgacgggtgttgcgcacccatgaacgcattgcaaaaacgcttggcgttgtgtcctgctcatttctgttctgctggctgccattcttcacactgtaccttttaagtgcgtcgtgtgccgcttttggcattggcacgaataattttttaaaaattgat

SEQ ID NO: 62100 - DNA, 679 bp, Heterodera glycines
atgaccatcgccagtgcctgcgtcaaaaattttgccctcaatcatctgaagcctaactcacttgccatcgtcccggagaaaggctacacccctcaacaaaatcaaagcgcactcgccatcaaatacctcgactggtactcccacatcaacaatgtcaatatccagacggcacactctcggtacggcgaatatgtctttaaacgcgaaggggaggtttaccaagtcgacggatacatcaaaggcacgaatggaaggcgggacaaaattattgaagttaatgggtgtgtttggcatgggtgtgagatatgtttcggtaatatggatgaggaatcgaggatgccgaacggaaagacgctgagggaaataagagagagggagaaaaggaagcacaaaacattgaggcgttacgttgacttggaagttatatgggagcacgaaatcaatgaggagctgaggagaaacaagcagatgcggggatttttcaataattggaaggataattcacccattcgaatacgcgacgcctttcatggtgggaggactgatgttaaaaaactactgcatactgcaaaacctggacaaaaaatcagctacaaggacttcaccagcctctacccgtggaccaacttcacagcggactacccactaggacacccaaaaatcatcagcatacagccaa

SEQ ID NO: 62101 - DNA, 162 bp, Heterodera glycines
cgctaaaattatcagagtgccgaaaatcgcatgtgatctaagcctaaaaaaaaatggtggaagtaaaaatccgtaattacgctcaaaaagcttctcaaacaatttttacgcttccaattccttctacaatcgcctttatacatccccattatgagcgctaaa

SEQ ID NO: 62102 - DNA, 345 bp, Heterodera glycines
atcagagtgccgaaaatcgcatgtgatctaagcctagaaaaaaatggtcaagtaaaaatcgtaattacgctcaaaaagcttctcaaacattttaacgcttccaattccttctacaatcgcctttatacatcccattatgagcgctaaaattatcagagtgccgaaaatcgcatgtgatctaagcctagaaaaaaatggtgtaagtaaaaatcgtaattacgctcaaaaagcttctcaaacaattttagcgcatccaattccttctacaatcgcctttatacatcccattatgagcgctaaaattatcagagtgccgaaaatcgcatgtgatctaagcctagcaaa

SEQ ID NO: 62103 - DNA, 1155 bp, Heterodera glycines
atgggtgaacaacgggatgaactcgtccaacgtgccaagctggcggagcaagccgaacgctacgacgacatggcaaaggcgatgaagaaggtggggggtggggggaaaagaggtcgctggcacggctaagcaaaatgtcattttttgtttttttttcagttggtcgaaatggacgccaagttggacgaagaagagcgcaatttgttgtccattgcatacagaaaggcggtcggtgctcgtcgaacatcacgacgtatcattacctcaacagaacagaggccgacactgacgaagaaacagaagcaaattgccaacgagttgaagaagaaggtggagcacgacatggaacagaagggcagcgaggcgttggtcggtggcattggcaaattgcgcactttggcaatctttcaaaaaatgaaatctccgtcattttgaacagtcaaaaggatggtcaaagtgttcagttagttcgtgtggcattttgttcgttcaccttaaaatgtttttgctgtttcaggacttgctggacaaaatcctcatcccgaaggttgacgagcccgtggcaaaagtgacctacttgcgaatgaaagccgacttccaccgctatatggctgagatcaaagaggccgaaaatgacggtaaaaagcgatcaaacccaaacggtttttggatttgtaaggtcatctcccactttttcagatccccagaaggcaaagcagtcgtacgaggaggcgtgggatattgcgcagcagaaaatacggccatcgcatccgattcgccttggagtggcgctcaattttgccgttttcctctacgaattcatgaaaatgccagaagagggtcgaaaattggctcaaaaggtggtggacgcagccgaacaaatcgcattttaaccaccaatttattaacatatcccaatttttgcaggctcatgacgacggaaatgctgatctgctggcggacacgagcggcgattcgtacttggagtccatcggaatcctcgagaagctggacgagaacatgcggatttgggcatcaacgcaagaacgggacggatcatcagaacgaggaaacttctaggatatgccgtcccatgtcacatatgtacaaatattgtaaagtaggcatttgtatcccatgtctgtatatattgta

SEQ ID NO: 62104 - DNA, 399 bp, Heterodera glycines
cttgtaatcagaataatctacagaaaacttttgtctcacattgtgccaaacccagtgtgtatggttctgcgacaaatattcctacggttttggtgataccgtaggaattggcgtcaataatgctaattgatttttatgtttaaataatcaaaatcccgtaactttttcacagatacttctgattttatggttgatccatcttttgctgatggctcattttatccattcgttactttgtttgactctggtgacaaaattgaggcgaattttgggcccaatttcaaattcgatttggcaattctctgaaggaagaattaattattcactaatgttttcgatcaatttgctctttttaatcatttttgtgtctttcttcttcaattaaaatttggttttttg

SEQ ID NO: 62105 - DNA, 378 bp, Heterodera glycines
atggatcagagcaaagcattggtcaaccaaaatgaggacaaattaacattggccatcgatttcactgtagatgaagcaaatacggagcttaaaccattggaatttcaatggcatggacgagtttctgattggatcatagccaatgcaaactgggggacactgacgatgaaaattgagaaattttctgaatttacgaaagaagtgggaaatagacggaacagcgaagccgtgcaaatgaagggatttgagtggaaaatatcggcagaaataacaacggataaggaagacggcaccgacaaaaatttgggcttttatcttttgtgcttccctccgtcgaaaaatggtgaaaatatgagaatttctaattgcattcattag

SEQ ID NO: 62106 - DNA, 692 bp, Heterodera glycines
atgagcgaagcggagaattccattgggacactttgtgattataacaaacaaatgaactacagttggggatttggaaatttcattagctttgaggtgagtgccaattgtttccttaattaattttaattaataattatggctaattaaggaattgatggacccggaaaaaggcttttacaccaaatgcgaggacaaagtgacattggtcattgatgtcatgactgttgatgaaccaaaaatggacaaattcatgttggatcaaagcaaatcgaaagggacactttttatggaaattgaaaaagcgtcggaattttcgcgagaagtctttggaagtgatcgtaaaagtgaaactgtgcacatcaaaggattgccatggaaaataatggcaaaaattctaacaaaaaatggaagcgttaacaatgagaaatggttgggcatttacctttcgtgcggtgctccagaagaaggtgtaaattaactaccaattattgctaattcattagcgataattaattgccattaagatttgcattggcgctgctgcgttcgatcagcaatttttcgaattattaatcaaaaaaatggtgctgagaattccactgttgggacactttgtgaccgtgtttttgacaacaattcaaccaaccggggatttcctaatttcatttcttttgtggtgagtgacaattaaa

SEQ ID NO: 62107 - DNA, 999 bp, Heterodera glycines
atggcacctgcactggacctggacccaaacactgttgcactcgcagagcaagaacgacaacgcactttggtgttcattggcctcccggaaagcaatgccattcgcccatcggaacgtgttcaggaagacagggaagccgccacaaaaatcctggaccatcttgaagttgaggcccaaccaaccgccgtctttcgactcggacgttacgacccgcagcgaacaacaccacgcccgctcaaggtgatcatgccaacaaccacacaccaacatatggcactcggaggatggaagcgcgagcgtgctcgactccgttctctacaaaacctgaaccgcctgttcgtccgcccagcgctgaccaaagaacaactcaaggaagaatatgaagcgcgcttccgaaaacgtcaacaaaaccctgctcccgtggcaccagcaatgcgacctcgccagacaaatgttccgactcccgtcaaagaaaatggaccaaaaccgaaggaggccagcgacgacatttccaaaccgccggaaatttttgaccaaacaatcctcgtatgttatgaagcattaaaatcattaccaccaaacgacaaaattgttcaccaaattcaatcactcgaaaaacaataccctcgtcttttcaataaatagttctgtcagacctccaaacatttcctcaaattaaaaaaaaaatacatttattccagtacttaaaatttctcaccaaaatttttcctcaaaaaaaaattttttttttctcttctacaaccctaaaaaaacaaacaaccacttttccatttgttggaggtctgacttttctaatttctgcttctccattcaaaatcaaaaatttggaatttaaaaaaattccttaccgtttgtttatttttgcggtattatgaatgaaaaattctgtttgacatctttatatacacataaaaaaaaaaaattttcaattttcgactttgtcgttttaagcaacaaaatttaaaaagaaaatcaaca

SEQ ID NO: 62108 - DNA, 587 bp, Heterodera glycines
atggccaggaaaatgcaattttttgaggttttttggccataacttttttgtttctcagctcattttttgaaactttgcaggttaataggcactatcaagcagggatgtatggatttatctggactaaaaacgctaaatatggatttatatggactaaaaacgctaaatatggatttatatggactacaaaactcaccaaatcaaaattttaaagtaggaatgctatttttagcacatttcttcatgcgcagaaacatatttaaactatacaatttataattttcaattaacaaaatacagaacatcattcccatttcattcaaatttgaaaattcaaattttaaattgaatattttaatacgttttgatattttttatacaaaattggcatcctttctattgtactcactttatttttatattcaacacggtacactgagtacggtaattttttgccctttcattttggcaatttttaaattttcgaaaaattcaaaatttgttttccgactacattgaaatagaatatttgcttacctaattttaaatttttcgaaaaaaaattcctctgaaacttgatcaataaa

SEQ ID NO: 62109 - DNA, 331 bp, Heterodera glycines
cgccttatttgaatggatgaatgaaatgtccaacgaaaagctgacaatgacagccaacgatgggtcggtttgccaatggctaatgaagcgatgccaaattgaggggacggagtcgattcagtgggaagacgaaaatttgggcaatttgaacactgtcatcttttccatttccgatctccaaagctgcattgtgtgagcaatttacatataaagcatttgattttattcaaattgtgctttatttaggccattgtccccgccaccaccagcagcagaagaagaagaagcgggacaaagcagcgaaaaaggggcgtcttctgacaatgagtga

SEQ ID NO: 62110 - DNA, 272 bp, Heterodera glycines
atgaacaattttatcgtaaaacatttaaatccattaagcaaaaactgttgatgagaagccatgtgaaacaatgaattgcttgttcggcataagaattgaatgtaatggcattttattaaaattttaaagcaatttaatttaataaatttactatctttagagtggaaagaaagtgaaaaaagatgatgaaactgattggattgaggaaagcaaataattataatgtttctaattttggtgcatttttttattttccaattatttttaataaa

SEQ ID NO: 62111 - DNA, 984 bp, Heterodera glycines
atgcccaagccgaacaagtgttgttttaaggtagttgtcgtggttgtcggagtcgtcgtggtagtgggagttgtcgtcgtggttgtactggtcgaagtcgtcgtggtagtggttgttgtagttgtggttgtgggagttgtcgtagtttcctctgaactttccgtagtttcgtttgtcgccgaactgtccgtgtttccgtctgtcgccgaactgtccgtattttcgtctgtagtcgcggggattgtgaatgtgaatggggacatttgctacggaaaaaatttcttaaatattacaaaaaaaaattatcctcaaaaaagtaccgaaaatttccaaaacaaaaaaaaggatttattgtccttggattttaccaattttccatttaaaatcagcccgaatctgtccttgaaaattcatcttgaacaatgagggtaaaaacccaactctcctcctagcgaacgcgtgcttgctgttttttaaaatagtcataagtttcaacaaattgaatattcttggtaccatccgatagcttttaagattctctctgtacctaccaagtttttccaaaaattctatcgtttgaaaaaaaaagttttgggcaaaaaaaagatttttaggatttttttgtcgtatcttttttggaaagcaataaaattttatttttatttttttttaaatttgcagttagatagagagaagagatctttaagagctatcaaatgcggagtaggacaaaacgtcgtcagccgaaacgtcgtcgaacgaatttttcgaccataacttttttctttctcaaccaaattaaacattcttggtattattcgaaagcttttaaaaatgctattagcctgcaaattttcaaaaatttttatttatgcacaaaaaaatcagagcaaaaaaaagttcgaattactgggtttttgagttccaactggtcataacttttttgaaacttaaccaaaatttttgagattttgcaaattaata

SEQ ID NO: 62112 - DNA, 1358 bp, Heterodera glycines
atggcatttatgctcttctgctcaattatcgcatcacaaatattctatgttgcttacggtacgattataatttgctgtgttttgatggcatggcctggacccaggcatggagctggatttttttgaaatttgttttaaaaagcaaataaatgcttggaaaattcaattaatttcttagtagtacatttaaaaatatttaaattgacaatatgaaatctatataatcattttttgatgacgtaaaataaaaaaattgatcatttggataacaaattctaaattttgtccgggaaatccagggtttttcatgcataacctggacttgagtttttttccatatttgacatggacatggatttttacaaaaaattgttgccgaaaatggcctgggcctgaatccaagaaaaacctaggtctggatccagcaagtcgagctctaatacatactataatatatacattacatttttgtattttcagcaccacaatgcgttgatgaaatcttccacaacaaatggattaagggcagcgccgatgaattcaatctgtgcaacgagggtgtacggtgctattccatgatttgtgaatacggtactcagttgaagggatagttatttttcttaatttccattttgggaattagatcagaatttcgatccaacaaaaacgccgtaaaaatcggatatggcttggtcttactgggcgacacagagttgagctcaagaattttcgagggaacaaaaagcaaatgccgaaaagctttgaacccgcgtctctggccttccggcccaatgttctaccagctgaacaacaaaccctcccctccatgctctccccaattagagattaattaatcgtcacctttaattgattcattagccttcccctcggggaagcttctccttctctatctcatgtgtgtgtgtgttttttaagtcggacaaccatttgcattcgtcaaaggctgcgcggcaacagaatcttattgcagcaacgataaccggtacggggggacgggggtcaactgcaggtagagaaagagaaaagtctgtgttttgattcggcataattactacctaaaagccttacgggatggaactgtgtttccggggctgaattgactcgccctctcatttcgggtctactgcgttcccatttcggcgctcacttttcggcgccagctcgtttttccactataacttttttctttgtcacccaaatccaaaattgttgatatcattcgaaagcttaacatgtttagaagctttttctaagctattgtttcgcgattagataattacaaaaatatacatgaaaattgtgaaaagttgaaatttttgaagttttttattaataaa

SEQ ID NO: 62113 - DNA, 1394 bp, Heterodera glycines
atgtcgggatccctaagtgtcggatcctcaaatgtcgggatccccaattgtcgggtccccaaatgtcgggtccccaagttgcaaatccccaaaagtcgggtagcctcaagtcgaacccagcatgcgttgtttgcgtgcaccgcttttatgggcttgatcaacgaagtgaaaaatgagggcattggatgggtcaaagatcaactgaagagctactgtcggctcgtcccgttttttagttccgactgctaccgtttggttgcggatgctttactgaatacgattgtaaacaaattaaattgtattaaacttgagaagctcaatccgacaattatctgtaaggaacacggtatgtgtaatgaagaacaaggaaactcaacggcaaggttgctacatgcaagcatgggtcctatggcagcgccgcgttctcgacacagtattttgttgccaaatgatggtccggttatgccgcctgggtcattggaagcccttgctgaattcaattatgaacggcttttgatggaccagctgggcgatgactcaattgaaggcaattattggcaaaaatcgggtggaaaattcatattaaggcgtggaaaaaactttaaaatttcttgcgcgatacggtttgatcgcaaactctgctttgtgccgtgaatgccaaggtcaccaaggggcacttgtcaagtatgcactagcaccggaaggatttactgtattaatacaattgagtatccgaatacaaaaatttttaagtggagatgtaattactgtcgaacatcccggggtgctgaagtgtcaagccgaatgtctgttcggatcggctcgttttttgataaaacacacatatcactcaaacaagtgcttcgcctggcttaatggtgggcacaacatccaacaagcaatttggaagttataatgagagaaaatgaaattggatcgattgcgacaatcgtcgatttttacaactttatgagagatctttgccaagtatgatggggaatggtgtctaactatatgcatgttactaatttactagtcttgggcggttcgaatgcaagcaaatgagaatttgggcgggatgggccgcgtggttgaaattgacgaatcaaagttttttcggtaaaaaagcgagtatattttctttgatattagcacccaattacagggctaagtataacagaggcagaatggtgcaacgacagtaaaattgggtgttcgggatgcttgagagaggcacgaataaagttcggtttttccctgtcacaaatcgtgatgccgctacgcttttgccattgattgctgaaaacatcgagccaggcacaatgatcatttcagacggctgggcagcaataacagagaagagatgtgatcaattccaacggagttactggtag

SEQ ID NO: 62114 - DNA, 633 bp, Heterodera glycines
atgaaaaaatttctttttttgacaattataattctgttgctactaaatactcatagttcgaacaaacagagacatcggaaacaaagagaagtttcggctttagctcgtttgactgtggctttatcacgtataagcacctacattaaagcccacccgtacattaccgcctcgacaattttgatggaaatgggctcagtttccctcaacatttatttgctaatacaagaaataaaaggttaaaaatctttattttttgaaaagatataattattttagcttgcgaagagaaacagatcttaaaggactttttcccgtttgtgctcactctgaattcttatgaattcagtgtgaatgttgatgactacaaccctggatatatttttggaaaaataaataccgaaatagggcgaccagtggaagagatttgttttgcaggtcagccacaaaaaattaattcgttaaaaaattcatttaaagcaccgaacaaagtcacccgaaagataagaaaccgaaaagatgacctcggcattttgttgctgtacgcaattagacagcaaagtcggctggaactttttgaatgtccttgacggatttctgttcccgttggcccttgggaaaggcactttaaataaa

SEQ ID NO: 62115 - DNA, 1263 bp, Heterodera glycines
atgtcgttggaagaccacaattattgcggcgagttgggcggcaacgaaacgcccacaaagagaagaaggagaaatgacgatgatgatggggagggagaaccgaaatttcaaaaaaactgcattcgcactctgagcgccgacaaacagtacagccaaaagttcaaagtgcagagtgtaaagtcgacttttatcattgaaaatctgcccgccaaccccgagtcaatgctgcgcgcattgttcgctcactgcatgtcaaccgccctggacgagtcacagcagaacgggatcacaccggatcaattgggcgctacaatctcttcagatctgctaaatccgagcatatggattcccatacgccgcatttccgacaacaccgccgactcaatcatgaaccgcttccttgaggtggcacagtcaaaatcacgggagggctctctgtggggctcgccgttcactgtgaccatcacaacgcttgatgttgcgcagctacctcagcggcaacaggtgcgtggcagtgggaaaaggacaacaaattcagtgcaacatatcgtcaaagagagtgcactcctgcgaatcaacaacagtgatgatgcctattgccttttttacgctttggaggcaagcagaaaataccacatcaaagagatgagccgaagaaatttctgttattatattaaccatcagaacgggcgacgactggaagacgtgtttggactgatgagcagcgcaaacattcgcaccgatctgagagaatatgacgcggttgtctatgtgccgattgtcgtggactattggaatcgaaaatacgccacagcaaaccagcgatttaaagtgttcatttttggcgccacaggcacctatcggccaaaatttcaatacgggccggacaattacaacgtcgaaatcccgctctaccatcacaacggccatttcgacggaattcgatgcggggtgggcaaagcggtgtttgggcgtgactactactgcttttcgtgtgagtgcccctacgataatgctaatggtcacacgctacaatgcaaagcaaagtgcataaactgcggtcgcataggagcggggcgacaacaacgacaattattacagagaatgcacagcatgtggcaaggatttcatgagccaagactgtttcagtcatcatttgtcgagcaatgtgtgtcaacagttcaaaaaatgcaaacagtgcggagttgtgtggaatgtcagacaaaaccgacgaaaaggacgcagcggacacgtttgcggtga

SEQ ID NO: 62116 - DNA, 1078 bp, Heterodera glycines
atgtattttaaaagcgctactgctattttattctttttgattgtttttattggtattggaaaatgtgcatcggctaatgcaaacaaaaccaaatcccgaggggcagtaagcaccaccaccaccgccatcaccaccaccacaactgtcaatccgcagaagattggtgtacctcgtttggcatcatctactcgtatggggaaaggcagcgtgactggcaaaccactaaaaattgtcaccgccaacaccaataccaacaggaacataaccaccgccaacaccaataccaacaggaacataaccaccgccaaaaacaacaaaaacagcagcagcaaaatcaccacccctacaacaaaaactgcaaaattggttgtggatgagcagttgccagtcgcaacactcctcccaacattgattcaccaaatgtgcaaggatcgccccggtgaggaaaacttttatcagcaagccgtttgctgggcactttttgcgctctatttaatggtgtttgtcagtctggtacttcatcagctttgttctatctgttggttaaagaagaaaaaggagtatggacagcgcgcagatttcgactattttgaggcaaagtcgggaaaccgcacgagttttccggggctgtttcccaagtgaccagctcccggcgccggacacgctacggtacccagcggcgctagttgtgaacaacgacccacattacaaacaaggatcccattggtgcgcgatttatgccccttcaaagatggaggaagcggtcatttactttgatagtctcacaaaaacaattcctcctattgtaaagacatcatttatggataaatttccaaaaggttttgttacaaataagcacccgtaccagtccccgctgactaccacatgtgcaattcactgtattgtgttcatttatcatatggccttaggtcacccatttgatgcatttctgcgcatattagacgctagtgaaagtcccgacatgtattcattgtgcgttctgaataaaatgattaatccgtatttgtgtgcgcgcgtgccaattttaccaccctttgggaaagggcatagggaatga

SEQ ID NO: 62117 - DNA, 1041 bp, Heterodera glycines
atgccggtgccgctcggcgctctgcccggagcgtttggactcaatgtgcaggataaggagttcttccctcatttggcgaatgttgaggcgaattatgggcacattctgcagtcgctaccgccaaaagctgactacttatacggtggaatgacgcccgaccgacagcgcagattcgaccagtggtacgcggaacaccgccatcagcagttcgacctatgtgaacagctcgcagcctactgcaccaacgacacgcgcatactaattgaggcgttggtcgcttttcgcacggagttcttgacgatcagtgacccgctggagcggcatggatgcttggatgacgacaacgacgacgaagatgaagaggaggaggtggatgacgacaatgcatttgaagtgatcggcggtggcattgacataacgtgggagccgatgaccatcgccagtgcctcaatgagacactttcgactcaatcacctcaagcgggatcagctcgccattgtgcccgagtgcggctacgacactacaaacacgcaaagccttgtagcgctcaaattcatggactggtacgccaaaaagaacggggtgagcattcagacggcacactcgcccggcggagagaaaaaaattggccagtacactgtggacagatacatcacggcgaccgacaccgtgattgaggtcaacggctgccactggcacgcgcacgaccatccacgtcaccgctttcagccccaaacagtgatggcgaatgggaaaacggcgcagcggatacgggaggacgatgcgcgacggatggccttcatcacatctcaggtacaacaagtgcgcgtattttgggagtgtgaaattaacgcggagaagcgcaacaacgacgaaatgaagcgcgcctttgcgcagtacaaggacagcggcccaattcgtttgaaggactgctaccatggaggacgtgtgggtccacaacgactacactacgaggtgccagaggggtggcggatgaaatattacgacgttcgttcacttacccccacacgaatgccgtga

SEQ ID NO: 62118 - DNA, 1071 bp, Heterodera glycines
atggccatgaaaacacatgccagcggcttcccggatgaaattggcacaaccgaggaagatcagcagcaattcatagaggaatgtgaggaaaaattcggaatccgaatcgagcgggaaaatatggtgcacaacaaggccaagcggaccatcgcaaaactgtgcaacaactccctgtgggggcgcttctctttgcgcaatgggttgtccaaaacgattgtgaccgactcgcccgcggaactgcgcgctctgcttgacaacccagcggtggaggtcagctccgttgaccagctcaccgacgaatgcgtactggtcacctatgcggccggaaacgaatgggtggaggaacacgagtgctcaaacattgtgctttctctttggacaacatcggtggcacgcctccacttgttgcggctaatgcagactgttgctcgcgcaccaaactcggtgctcatctacaccgatacggacagtgtgtgtttcgcccatcgtgaggcggacgggtgccctctggagacgggaccccacctaggtgacctttcggatgaatggccggaccacgaactcgtggaatttgtttccggcgggtgcaaacagtacgccctgcggatgcggcaccgccaaagcggggaggagaaaacggtgctcaaagtacggggcataacactgagcgccgatgcctgtcagcttctccactttgacacattcaagaggagtgtcctacgctacgcaatgtgccattcaaatgaggatgatgacgaagaaggagatgacattttttcaattttgattgagtaccccaatttcctgagacccaacattaaggacgggacggttatttctgtcaagttgtcgaagcggtatcgccctattgtaactaagggggttgtggggatgaatgctattgtacatgattttggttttataaaggcgtaatttatactgaattgtactttttaaaaatgcataattaacaaatggaagattacaatttaaaataatgaagcgtgagaagttgcaaattttaggtagaaaaatgcataatttagtaagagaagtagcagttttggaata

SEQ ID NO: 62119 - DNA, 666 bp, Heterodera glycines
atgcatttgcttatcgcattctcgcgcattttggactgttcccctgacgaagtgggcgcgcgaatttgctgtagcgttgcggatcgagaaaaattgttgaaggaatttgcacatcgtaagctcatcactacatactacgaccgtaatggcttcacccacacgctcttctttgctggactcactgaagagggcgccaactcagtgcttgcttatggtaacctgaggcgcccctacaatgtttgcgttgcggcccattattactcgcggcaccgcattatgctaaaatacccgcattatccatgcgttatcgagaaatgttttggtcaaagggatgacggacccttgcacaaatattacccgcttgaactggtaaaagtcgtcgatgactgctttccgcctgtgtacgttaattcgctgtctcaaaagcgtgacggcgcatcatcgtcatcatcatcatcctcgtcatcattgctgcgaaatttgccatcaccttcgtccgatgatgctgattatgacgaccatggtctctggtttggctcgatgcccacacaaaacagtgttgcggaaacaccacctcctccgtcttgtggttttgtgaaaggaatcatatggattgaaaaagagcaaatcaaaaatattctcagtcaagcagttaaacatgactaa

SEQ ID NO: 62120 - DNA, 469 bp, Heterodera glycines
atgccggaagaatctaacaacaacagcacaaactacaacaacaataacatcagcaacatcaactataacaatgagaatgctcaattatggaagcttgtacgtaagaaatatattctgaccttcaatctttgttacggctgttctcaaaaacttttcgagtccactaaaaacaacaacaacatcagcaacaacaacaattatgcttttgaaactgatcagtttggaggcgttaaggtgcaatttcacatgtgtaagggatgtgtttggttgaacatgaagctgagcgatttaaatagtgcacccaaaagtggtaataatcatatgaaaacaactcgcaactttccaaacacaaacaatgcaacttactctactgacaataattttggctccttcttcaataacaccaacccgcagaataatgcaaatgaatggatttgacaaaattttgagcagatcaaaattgtaacaa

SEQ ID NO: 62121 - DNA, 634 bp, Heterodera glycines
atgaactctcagcagcgccaaattgaacgagagcagctccgcgccaggcttaatttgttggtcgacgaggtagatatggtcgtccaaggccttatcaacaactacaggagcgatggactgataaatgaagtgagtttaggaatgcatgcccaaccagggactaggatttcaatgtagggaggcataacgattttctcgtcctctgtttaattttataaaactaaactttgatcaggaagcggccattggacaggcaccagaaactgtggaactacagaacgtgaccattgggtcacaccttcccgcgcaacaaggcgaggaatgggaaattgggccacacatgcccctacaacagcattatgagcatcagccttgggaactggacccaccgatgcccgaacagcatttggaaattgggccacagctcccggatgcgtgggaactggttccctatcagccaccaccacaatgggaccaagttgtgcatgtggaacaacagcagcaacaacaacaacaccaccagcaacaacaacagcatcagcaaggcgcgtgggacgagggatgggaggagcagctttcgccaaatgcaatagcgcagatccaggacgaggcggatgggtgcgccagagattga

SEQ ID NO: 62122 - DNA, 129 bp, Heterodera glycines
atgaactccgaaagacgtcgcaatgaacgtgagcaattgcgcgcccgtttaagtttgttggtcgatgagattgatacggtcgtccaggggttgatcaccaactaccaggacgacggattgatcaatggg

SEQ ID NO: 62123 - DNA, 870 bp, Heterodera glycines
atggacctgaacacactgcacatggacatgatggaattggccagcagtgccggggacgagggcaccgtcggcaaagccaacgcactattggaacgtgcgggcgacaaattggacctgtccatggagcacatcggaatattaaagcgccgggtacagctcagcaaccaggtgcaaagtggcattactgactgacattaaattggctttttggcactttcagttggccgagttcaaagacagacgggcgaacgccagcgaaaaaatcattcaaatggaaacaattcgggagagcatcggcgacaaggcggagcaggtcaaacagttggagcagctgattgccgccaccggttgcgagttgtccgagacggaacgtcaattgcgcaccatggaacgctcgaagcaggcaaaaattgatgttcaaaaatcaattttgctatggttttcaaggagttggaaacgactgtgcagcaaaacttgcgcaaaatggcactcgacgtggacagcatcaacggcacgctgggcaaaatcacggagatgggcgaggtaaatgtcaattgatatttttagcattttccttctctttgttaatgtatagtaatcatttatggcctataggtgttcctgctccttttgacggctattgtcatttgcgagtgcggcgcaggaagaaaaaatggtcaggcgggatgtgagcgacacaccgttggacggggcggcggaggcgcaaccggccgaaacggagcaggatcgaagcggggaggaggacgtggcggcggtcgcggtggtggaaaaggcaatggccgcggtggtggacgaggcggcggcgggcggggagggcaggcgctgcagcagccacaggatgaggacgag

SEQ ID NO: 62124 - DNA, 3328 bp, Heterodera glycines
  unsure (1)..(3328): unsure at all n locations
gagcggaccgcgtccggtggcggaaggcgacgcgttggcagcacagcggcggatcggtcggcacaggcggcagcagcggcttgcgctgcgggcgaagaggcaacggacgaggtggacaacaacgaggaggagcgacagaacatggcggtggtgacaaaaaggatggcaattttggtaaaaaaaatttcaaaattattgtgtatgcttttcgggatttttgtgcttaatacctaggcgccttttttgtgcctatttcgccattttttgcacctatttttggattttttatttattaatatttttccttgagaaaagcagcacaaaaacaaaaatctttcactttttaattgtttttttcaatttttgggcacccctttttatttctattttttaaaggacctggaaacatccggcacaccggcacggattgtcgaaatcccagaaaatgtgacggtggttgagggcgaattggccatcatcaaatgcgtcgtggagggcaacccggcaccgacaattgtgtggaaaaagggcggccgaaaaatgccattgaccgacgaccgagtgcggtgccaaacggacggtgacacgggacatgtaagtggcaatttttaaatgaaatttttaaacacagaaattaaaaaaaactgctgttttttggaaaaaactttttttgtgaaaaagtcatttatcataaaactgagaaatcactaaaaaaatttttgttttaatttcaataaaattacatttttcataccgtagccctcaaatggaggacaagaaaactttttactgtagttctaatcttggaagggatttttacggcactcaattaattaattaatgtagctcatttatttctaaactaaattcaaaacttagcagcaaatttaattaaaaaaattttatcaaatcctaaaataatgttaaaaatattttatcaaattaaaataatgttaaaaatattttatcaaattaaaataatgttaaaaatattgtcaggtttctctgatcatttccaaatgtcggccacaagatgggggcgagtacacattgatggtgaagaacgcgcatggcaagcacaaagttggcgccaagctgcttgtcacgccagcggccgaagtgaaaaaaaattgccagccaaatttaaataataatatttacaaaaaataaatttacagtcgaatttggacatccgggccaagcagaaaaaacgtggcacgggcattagcaattcggaacaggaaaaacagcgccaacggagtgatgccgagcccaaaagcaaggctgaacgacggtgagccaaaaacagctaccaccaaaaaattttgcaccgaattttggaatggtgccaaaaaatcgatgccaaattctgcacttcgcttattttctttttaatttgactgaaatttcaaaaaaaaaaatttcagtgcctcttctttttttttttgatggtgacacaaatttaaagacatggcaaaagaaattattgaaattcaatttttttgattaaataaaaatcgtgaacggaaaatgggtcagtggaaaatgcgtcagtgaatcagtatttctttaaattgagatacggtagtaatattaccgaaatcacaacttgttttttagggatttgggaaagtttcaattattttgacttttaaaaacttaattgataaaattcagaacaaaattattagacaattttgtccttttgtaataatacaatacttaatgctacagtaactttattttaaaaatactgtattattgacaccttttccactgacgcatttgccaggagccaaaattattattatttttaaaaattaattttcatttaaattatggcacaaaaatttccagcaaacgccaagtgtatgtggtggaggagccccgtgacacatttgttgtgccgttgaactcgcagcatgccaacgaaaaggaaaatgccacttttgaatgcgaagtgaacgacaaggagatcgatgtgaaatggttccatgacggtgccgagatcgggatggacgggcggcactttaaggtgggaaggagggggcaaatctcttgctaatcaaagaatacattcatattttgtgttatgaaagatcaatttcaaaaattgagtaggagtttaaattacctattttgggattcctttaagcccaaaaatccctaagtatggatatttccaaaattcaaaccaaaactagctcaaattcttcaattcaaatgcctatcagaaatttaaaaaatatattagaaaagtcagaaacaaaaccatttttttaacaatatattttttaattttatatttttttacattatctaaaatttgtttttatgccaaatttcattttgtttttctattgtgtattttattgatgcttcttgttttacaggaacgggctggatgccgtcgtcgcctgctgatcatcaatgtactcattgaagaccacggggagtacaaatgcacagccaaagacgacgaaacaatggcccaactcattgtgcaccccaaattcgtcaaaaaagcggagcgctagccggtgaccttctagttcgatgacgatttgtattaaatttttttgtttttcactgttcctgttttatttgtgcccatctcttttttcgactttttcttcgagttcgggtctagggttcggaattcagaatgatgttcttaagaattttacttttatacgacaatacttaatgctatcgaactaatttaaaatatttgtatcacagacgcatttctcgggcacgccgccgagcagtacagcaaagcagacggaatgtcaataattagagcnaaatagaaaaggagtccaataaacaccggccaacacatatacaaaaccgaggccaaccaacaagcgccattgtttgaatttanatattaaagaattaaagtggcaagcgttttttgttaatgttacaaaaaatttgaattttttgaggcaagtagttttttatcatatgatgtactttctatgtttaatcccaggattaaatcatttatttaaataaaagctttctcaaaaaagaaaatttagctgaaatattgcattacaaaattcacaacagataacactgtaagcactgataaaataataacaataaattttcgaactatttttataaatgaaaatattaattacaaccataattttgacattttatttttgcagttttatttggacttcaaagatgttaatcctagctggtcactaattggatgcgcactgatttatggaatcacgccacatttagagtcattttcaattcatctgtcattgttgtaacataagaacaaagtgtgaaattaatttaa

SEQ ID NO: 62125 - DNA, 1364 bp, Heterodera glycines
atgaaggaaagatggtttcaaaataacatccatccctcaagtggtggatttggtctagtggttattacaacggatccaagtaagcggccccgagtgggggttcaaacccggtcttccacccccaatttttcgcctaaataatagggacttttgagctaaaactctcaaaatcctcattgcaaaaaagcctcttttacccctccaaaaaactccttaaatgtgagaaaagctttgatcaaaacgataaatccaatcctgcgattaaattggaatgcgaactcttcatccacaaatagtttgtattttattttattattgttcatttggcactctaataaacacaaaaaaacatcgcagaagaacggagggacaatcaaaattcaaacatttgaatgcgatctaataactagggctccaatttttaggcactaaaaaccgccaaaataggtaggctttaggctctaaaaaacacccaaaacaggctctaaaaaatggaaaataggcactaaaaatcctcaaatttaggggtgtaaaatgaaaaaaaatttattcaaatggtaaaaaaataagtcaaatcagtattgagataaataatttttaaatcacaaattcttgtcaagaaaataaataaataaatttatgagatgaatttttgaaaatttttcatttctcttttctctggggttttgttcaatgttcgcatgcaaatgctttttgtggtaacatttgatcagtgaaagtgttcacttttttttattatgctattttggcatgccaacattgacaaattgtaaaaatgggccgactttggcaattgacattcagacatacacctgcccaatttgccgcattgttctatcattatttttcccatttctgtttgccttttctttctttctttctttttcatttctttgagataaaagcattttaaattttgtcgtttttaatttgttgaattttttatattgtcttttggtcgattcaaatgactgcgactcgattggacgtcgtttaaatttgggggtcagccgttatcggatctccgggattttcatccccgtttttgctaagcgcagaaacggggacccccgcaccgcaacccccgaggacggagataaaaatacaccccttagaagaagaatggactcaacaacaaaaatcgtcaaactagccgtcagtcaatccaacataggactgttttgaatttagcatttattaattagccaaacaaaaattgctgcattaatttgtttcgcatttatttatcggcggaaacaaattttatgcaaaaattgcatataattttttcatctcattttccactattactgagtgtgactttttcatcattgctaaaacaa

SEQ ID NO: 62126 - DNA, 1769 bp, Heterodera glycines
atgacttctaaggtgatgaatttagacatcaaattgctgagctaaacgaacaaattaatgcaatttccataaaaagtaaaacaaatgaagaaggaataaacagagaatttgtaaattcaaattacaacagagggagtgattaccgtaggccaatcagaggaaattggcaacaaaaccgaaattatgcgagaggtggatataatggtggattcgcaccaagaaatcctaactttatcccgcttggtcaaaggagaatgtggaatggaaataattcaaattctaacagatttaacaataatgagccaaggggaagaggattcggtaacaggggcaattttcagaataatcgtggtaatttccgaggaaatggtaatgaaaaacagagataccgaataaatatggtgggagatgaacaaacacagtcaagttcatcgagacgttctccgactccgacttttacatttttaacaatttcgatggttttgtctattttgtttggtacttttagtctgtcaaatgcacaatatcaaatttgttctgaacgagttcagactaccgcaattctgttaccaaatatcacgaaatgctctataccaaaataccaaaaggtggctgaaaacaaaataaccttgtttttaccagtgcgtttacctaaacaatttgccgtttataaatgctatcaaaaattaaccaaaatatgcaccggaaactttttgtttttatggaaaggagtaaaaagtcaggagacaacggtgaggggagtgtctcacgaaacttgtcaaaaatttaaacataaaatgggcggctcaatgaatcgacttagtgagaatctttgggccacggaaaatcctgaaaagttgacatatgcctggactggcgaaaaatgcgagacaacagtaaatgactttttagaggaaggaaaagggggaattttggactttttcctggtcacttcttttgggcataatttaaacccgtataaaaactgggaagaactgccaagaaagacattcatttgggaaatccctgagccaaatgagaaatattgggctacacatttttcggttggcgaattcaaggccgaaataactgaaaatgcagtggtaattgaaagtgagcaaagtgtattttatttcgaaaaagaggctaatgacgaaagggagggcataatcggtgtccctgaaaacgcctacaaaatgtcaaatgatgcttttattgtcttaagcaaaactgaaatacgggaaaaacgagaaacacctaaaattgagccgaaaagaaaggaaagcccggtaaaacagtaagttcaactgaaaagtgaaatcaataaaaaggaaaatgttttgaaaactaaggaacaaaatgctacagtatctgttttaccgaaaagcactgtaaagctggtcaaggacagccaacaaaaaatatcaaatccaattaaaattttacctcaaagtacacaaagtacagtgatcacaacttctaaacctcaagtcaaactctccacaacagtaatgcctgttacgacaagcaccactccgaagccaattactgttcaaagggttataacatcaaccagttctccaaatgttaattatgatggacattttgagacaatttcagtgaaaaggcctcagaatgagcgaatttatcaggcaaagggaagagagtttaaaaatttgggaagtcgttctgaaagcactaccacaaaaaagcctattactgtcacaaaagttgggacgaatatttcaaaaaaatttgaccgtgtctaa

SEQ ID NO: 62127 - DNA, 231 bp, Heterodera glycines
atgttctcacccatttctgacttaataacttcggtgacattctccaatcccgagaaaatatttgaattaattggtgagccaatcattaaacttgtatttgttttgtcagttggcaacactgttatttcactcgcattttgcgtgacttttgtagaaatcgtagtgacagaagtacttgttaccatgggctttaccgttgaagtggttatggttgtggtaacaattttttga

SEQ ID NO: 62128 - DNA, 291 bp, Heterodera glycines
atggcagcagcgaatccagcactcagatggtttgcggttctgatttgccggaccatggcaagaatattgaaaaatataaagaaatttatttttattttttagaacaaaattaaaaaatatatgtaatttttgacttttcataattttaattgaatcttttctcaattaaagttataatttaaaataattttattcaaaatattccaaaacgaaaaaataacaaaaactctaatgttaaacaaatattaataagaaaaaactgacaaattattattaaaattttttgttaaa

SEQ ID NO: 62129 - DNA, 600 bp, Heterodera glycines
atggtgttgatgaagccaaatttggcaatgaaagcgatcaaaagaaaagaggggtgggacgaccgaaaaggcatccgagtgaatgcaaagtgtgcgggaggaaaagcatgtactgttattacagaatccgatgttgcgaaagtgagtgacgaaaaaagaatatttataatttaatatacttaaatgtgagtgtgaatcaggagtcggcgaaagtacagcactttctgcagaaaagaaaactgaaaggatttttttcaacggggacggaaactgcttaatttgaatgaaaatctctgttcagcagattctcttttaaatacattaaatatttttatttacaaatttcggaccggatcagtttagtctggccgttttagtcagagagtcgttttagtctggcaagctgtttttgtcctaaattgattcaattctgcttttttcgaaaaatctttaatttaacgccacatatatcatcaatttgagcaaaagttcgcacagacaaaacgccaaaaaaccacgctaattcaaaaattgtcgagaatttcccttgtaaaaacggaagagccgatctcgagttaaaaacaagttctattaaataaa

SEQ ID NO: 62130 - DNA, 700 bp, Heterodera glycines
atgggtggtctgaatggcttcgacgtgcgcctcatcttcgaccaacacaacacccaacaggaaatggccgtccactgttgggaggattgcatgccacgccttgccaacaacattcagtgcggccagatcgtcgaattcagtcgtcttaaagttcgggagcaggggaagaacgccaagggattcttcccgttcaatctcctctacaacaacgagtctcgtcaccgcgtgctctcggcatccggccacattggtgagttgcattttcgcatttttcgaacgttttttttgtaactgtgttcatttttccctcacattctcaggcgcaaatttggccagcagcagcaacacaccaatcattgttgaggcggcggtggaacaacaacagccgggcatgaacactctcagcaacgtggtgcgtcacaacagcagcagcagcggtgccaataatcagcacatccacggacaaaacagtgagtgtaaagcaattgtcagttcaacaaaatatgaactgatcagatggatttaattaataatttaatttccttaaatcgttattacaggcaccggcgttgtgacggcagatgatggacaaagtgagggcgagcccgatgaggcggcggcagcgaccaatttgaccaatgccggagcgcgagatgcggatgttgaggaaggcacgagcgaaacggttagcggaaattaa

SEQ ID NO: 62131 - DNA, 338 bp, Heterodera glycines
atgcaaattgtgccatttgaattggtgaacgaatggacaaaggaaaagctgacattggccaaagcaaaggaaaatgaatggtacatcgattggataatgaaacgaagcaaaattattggggagacagcggcggtcaattggaaagacggaaattgggacaacaattgtaactgtgtgttcttttggcttgatagtgacactaattgcattgtgtgagaaaacaacaaaaacagcgatcaaccgcagaagaagaaatgaattaattagaaatgaccgatcgaccataattatatcattgatcaaatgcattttatgaagaaaaaactcaatttcggtaa

SEQ ID NO: 62132 - DNA, 171 bp, Heterodera glycines
atggacaacagcaaaaatggagaaacaaggaaagaggaggaaaaggaaggaaatagcattagggaaggaggagagacggaagagaaagagaggaaaaggaaaaattcggcggaaggaagaggagagaatgaagctgaaaagagaaaagaacagcagcaaatcggcacttaa

SEQ ID NO: 62133 - DNA, 648 bp, Heterodera glycines
atggcggttatgctggcaaaattgcaccaacagcaggtgtatagcaattgcaattaaatgaaaaggccgccataattgattccttttcctaatttctcagggatccgacatcgattcgggcggtgagggtggcggacgtgcatcgcttccagactctccgattccttccgccagtgcgttcaccactacgctggcggccagcggcggactgaacctggacgacgaattcttcgccattccgtccagcgaaggtggttgaacggaagatcggagtggaacgaagagtggattttttgatggatttatcactttagattctccacgcaaattgctttacttcatcggcctagtggacattctcacttattacggagtgaaaaagcgtactgaaatggcagccaaaacggtgaagtatggctcaagtgcggagaacgtctctacggtgaagccggaacaggcaaataattcctttttggttgcttaaaaaaactgttcatttttcagtatgcaaagcgattgcttgagttcgtcaatcgtaatgttgtatgtccgactcagcaaagctcgtcgacagcggatgcgttttcaccattaacaatcgctgaccctccgccgtcacagcgtcaaattggcagaaccgaactgatg

SEQ ID NO: 62134 - DNA, 515 bp, Heterodera glycines
atgagcagcgcccagccgttgcaaatgcggcaacagaccgcgcaaatgggcgggtttgctcacaatcagcagcaaatgatgcagcagcagcaacaaaacagtgattatcagctacatttttgcgtctgtaaattaaattttcagtgcaacaaatgcatccccagcagcagcaacagcaaatgggcatgctgaacgcacagcaacaatttatgatggcacagcaacagcagcagcaaagggcgatgaaccaacagcagcacagacaatactgactgatcacattcttataacccaattgaatgtcaaacctttcggtacttttcaattttgggcttagatttgaattcttaaaaaagcaacaaagtgcgcgcagaattgcacaaatttttgtttccgttataaatctatttgaggaaatcttagctcaaattgtgggatttatgcccttgatataattttgacgtgcaatttttgcaattctgtgcggcctttgttaatttaaaaaaaaaattaaa

SEQ ID NO: 62135 - DNA, 160 bp, Heterodera glycines
atttgaaagagaatagaaagaaccaggttcgatgaagttttggtaagccaaaaaaaatccaaacatttaaaaatctataaaaaatttaaaaatgagaattcatgcgagattttctggaaataagcttaatagggcctagttaagctgtaaaaaaaatttg

SEQ ID NO: 62136 - DNA, 759 bp, Heterodera glycines
atggaaattttaaataaattaaaaagtgaaaaaaggaaaaaagcttacaacaccttcgattcccaggacgtctccgttccaagtactaagaaggcccaacgttgcttaacttgccagatcggacgggatggcgtgctttcaacgtggtatggtcgtaagcgaaaggaaagcaatgaaagtaatttaaataggcatatttaaaagagctatttttttgccttttcacaagagaatttattaaaaaaggcaaaattcgccttaaattaataaggtgaaagtttgaaaatgtttattaaaaaatttaaggatgaaatataattaaaataaatcaaaaagaaaaaaaatcaatttatttttctaaataaataaaaaacattgtcagaggcagtgcctgccgaaaaaaagacaaaaaatttttcgaaaaaagctaaaaaaattgaaaatttaaataaatttacaagtgaaaaaaggaaaaaagcttacaacaccttcgattcccaggacgtctccgttccaagtactaagaaggcccaacgttgcttaacttgccagatcggacgggatggcgtgctttcaacgtggtatggtcgtaagcgaaaggaaagcaattaaagtaatttaaataggcatatttaaaagagcctatttttttgccttttcacaagagaatttattaaaaaaggcaaaattcgccttaaattaataaggtgaaagtttgaaaatgtttattaaaaaatttaaggatgaaatataattaaa

SEQ ID NO: 62137 - DNA, 354 bp, Heterodera glycines
ggaatcgaaggtgttgtaagcttttttccttttttcacttgtaaatttatttaaattttcaatttttttagcttttttcgaaaaattttttgtctttttttcggcaggcactgcctctgacaatgttttttatttatttagaaaaataaattgattttttttctttttgatttattttaattatatttcatccttaaattttttaataaacattttcaaactttcaccttattaatttaaggcgaattttgccttttttaataaattctcttgtgaaaaggcaaaaaaatagctcttttaaatatgcctatttaaattactttcattgctttcctttcgcttacgaccatacca

SEQ ID NO: 62138 - DNA, 359 bp, Heterodera glycines
ggaatcgaaggtgttgtaagctttttttccttttttcacttgtaaatttatttaaattttcaatttttagctttttttcgaaaaattttttgtttgtctttttttcggcaggcactgcctctgacaatgttttttatttatttagaaaaataaattgattttttttctttttgatttattttaattatatttcatccttaaattttttaataaacattttcaaactttcaccttattaatttaaggcgaattttgccttttttaataaattctcttgtgaaaaggcaaaaaaataggctcttttaaatatgcctatttaaattactttaattgctttcctttcgcttacgaccatacca

SEQ ID NO: 62139 - DNA, 107 bp, Heterodera glycines
tttgccttttttaataaattctcttgtgaaaaggcaaaaaaatagctcttttaaatatgcctatttaaattactttaattgctttcctttcgcttacgaccatacca

SEQ ID NO: 62140 - DNA, 409 bp, Heterodera glycines
atggacacatttgagaccaaagaaaagtttattgaagtggaggaagaaattggaaaggtaagtaatcatatggaacgttatgagacgttcacaaaggttcgatttgggaaaattgttgaaaaaatgaaggaggaggttcggaaaattaccgaaaatttggatgctctaaaaggccgagtacaattgttggaatttgaacaagataatccagagggatttggtgaatggtttgatgacggacaatcccaagaacataatcgattgcctgacgacaaaggggcaacggaaggggaagacaacatcccaattggggacggaagttgcgaaattatggttgcagatccatttttagggggaattacccccctcgagagggttatgatggaaacccaagtgtatcattctcacg

SEQ ID NO: 62141 - DNA, 2528 bp, Heterodera glycines
atgcgggtgccaaggtcgaacgcccattacatcttcctgatgcgggctcccaacgacatgcttagcattcgtaatttggccagccagatgttccctcgcgagcagggattcctgatggatgcctaccgacaggcatgtgccctaccgtacggctacctgttggtgactctccacgcgaacagagacaacattatacgcctaaggacaaacattttcccagacgacgaggagagaatcatttttgcccccaaaaatggttaagcgggaacagaagatcggtgagcgggttgtgcacaactacgactatttgaagaagttgggaaagacaacgtcggagaagaagcgccgtcatttgttgaacagtgccggttgtgaggaactgttaacgctggtcgagatttgtctcaacgttttgaacgggagtttctgtctgagcaggaaacaaaagcagagacttgagccatttgccaaagacatcagacagttggcacgtgtgcgaagcgagaggggtgcgcgaaaactagtgcagcagtcaggcggatcactttttgcccctttgttggcccccattctgattgaggctgcccgatacctgctttcgcgcagcaataatggccaataaacttattctgctgccatacgagcactacaaggggctggttgcagcgagggagacaaagaatgacgacgacattgctgagcggacaaacttgggctttgtcaaacgacaggtgaccgctgcagtacagaagcggaagggaaacgtcagcgagcggaacgcaatgtacaaccagcagctgcgccggtacctgaagatgcgcaaggaacataaggagcggcccgtccgagtacagctcagcaacggtgctcaactgctaaataaaacagtggagacgggtgtgcaggtacggcctggtccggacgaaccgaaggacaagtccgtgatggttaccgacgaagatgaagaggaagaaattgaagtgccaaagtttttaaccccaacaagccagacgcagggaagcagacgatcacccaggaccaataagaaagcagcaaaacagcaaaaattgatcgagaagaaggaccacctgttggccatcattatgtctgatccgcagagattcggcgcaacagaccgtggaaaaatcattaacccaaagacaggccgagagttcattgactcggacctggcctggtcaattgaacgcctggtggaccctcgcccggagaatgccccttcgccaagcggaaccaaagagttgaagaggaaactcgcacagaatccgcttgccagtagcctactcaatcgactgtttgttgggtctgggttcgtcggacaagtcaaacaaagcgggcgttttattccctcaaaatggacaagaaaataaacaaaatatacaccgacccggccaatccgggcgggtatgcgggggcgagtgctctgtacgcggcggtgaaggagaagcacccgaagttgaagcgtaccgagtttgaagactttttgcaaaggaacaccacctacacgctgttcaagccaaagagggagaagttccgacgcctacgcactgtgcctacggggttcatgaccggtaagttgtaccggggcttattgcgcacaattcagggttcagatgttcaggcggacttggccgatttccaagccctttcgcgcaagaacagcggctaccggtacctgctgttggcggtggatgttctatcgaggcgaatgttcggcgcccccgtaaagagtaagcgcccagtggacatgaaaagggcgtttgaggagctatttgagcaaatgccaagggtgccggacacactgtacaccgattgcgggttagaatttgtggcaaaaccgttgaaggagttttacgcggagaagggcattcaaaagtttgagaccagttcaaagaagaaggccgccgttgcggagcgtgccatacgcaccctaaagactcggctgtacaaatatttttcctccaacaacacatcggtgtgggtggatgtgctgccaaagtttttgagtgccataaataactcggtgtgccgcgcgaccggtcttagaccgagagaaatcagcgacaccaatgcgagggaggtctggaagagggtgtacggcgaagggcttgtacaatcgaacaagacaccaaaaatcagagcaggggaaacggtcaggattcccgagcctaagcacattttcgagaagggtactgtatttcacacattttttcggtcaatttattttaattttaggttatatacccaattactctgatcacgtttacacagtagacgaggcccgctcaaccaacccccagcactatttgctcaaagactattatggcacaaagttgaagagaaaattttatttgccagaattaacaaaagtacaagtggatgaaagcacaatgtatcgaattgaaaagaaatacaaagaacaagtgagagatggtaaaagagaaatgttggtgaaattcattggatttccggaaaaatattgggtcacaaatgaagaaataaatgaataa

SEQ ID NO: 62142 - DNA, 586 bp, Heterodera glycines
atggaccacctctgctgcgcgaatccacttgctggaatcgctgaaaaaggtgtatggccctgcaccaggtgtagagcgcttcgacacccgcattctctacatggtaaaattcagaaaataaaatgaaaatgtgaagtaattttttaaaatcaggacacggacagcatcttttacgactacctgacgcggctgggggacccacttccgggtggtgagcagctcggggaactcgcggacgagtacccgaatcatacgatcatggagtttatttgtggtaagattagttaaaatttgaccaaaataaatggaaactttgtttagccggacccaaggcgtacggactgtggctgcgcaacaacgcaacgggggaggacgagtacaagctcaaggtgcgcggcatcacgctcgactcggatgcctgcgagcgcataactttcgagaagatgaaggacatggtgaagaacaagctgggacagccggacaacaacgtccgcttcaactacccaacgaagaactttcggatcaccaagaagggagagattttcaccgtccccttggtcaagcagttcaacccgaccgtgaataa

SEQ ID NO: 62143 - DNA, 1530 bp, Heterodera glycines
atgaaaatcattttcatttccatttttctcattgttttttcctctacaacaaaaaatgtgcgtggcgttcttattggcggcaacataaacaacaggggaacacaaatagttggaagggtaacagtgaatggaccatcgaaagatgacattggacgaaacataaacaacggtggtggaacacagatcattaaagcagtgaatgtaaaagatggagcagtcatatcggatgaagaagaaacgaacacaagcgatgctgaaatggacgaagcctggagaagaagcgatgacaaaggcaatttaaaaattaaaatttaattttatggaaaaaggcaaattccattcgtagaatataagtaaaactgaatccatagctaggattgtttttcatatttttcaaaagatcgaaaggaatgcgttaccagcggcacctttcggcaccgccggttcccagcacatttggcactttagtaatatatttctttttcttcaatacttttacggtctttttggcattgcacactatctaataaagaagaaacccaagtggtggtgggattttccgaacgaaactttcagcgtaggtaaatcagtcccccctctttgtgttatcaattttttaaaataaatttgaaaataatttatgtttttaatattttttaggtttttctgagaaatttaaccgtaacgatagtgataatgaagatactgctgaaggcaactcttccaatgatagtgaaattgagaagggcgcgaaagcaaagggtgttcgacacaactcaaagaataaagggatcagcgaatcgtcgagaggaagcggtgactttggacattggaagggatggaagggtaattttgaacactaattttatcttattaaaaggatggagagaatttctatctatattaaaagtgtcattaaaaggcatattttatctcataaaaattaaataaaagaaagaaggtgcccggcggtgtctgtcaattatttaataatatttctcatcttcaatattcttttagggtgcgtaaatcaccccccccctttttgtatagtaatattttactaatattttagattttgaccagaaatttaaccataaagatagtgatagtgaagatgatgaaagcaactcttccaatgacagtggtggtggcgacgttcaagaaaagactggacaacccaccagaaactattggaaatatttgaagaaagttccggtgccttttctaaatacgtttcggaattctttcaaagggaacagtgaacacgtggctggagaagagagaccatcgcgggagaatgttcttgtgcccaacataaacacgggtggaggtagccagcacattgcaccggtaaattttggagaaggagcgaaagggaatcaagttgggggaaactattgctctggaggtagccagaacattgcaccggttaatcttggagctggattgaatctggctcgtgttggaaacaacaaaaacagtggtggaaaacagacgattggagcggtaactattcgtcgatcgtga

SEQ ID NO: 62144 - DNA, 230 bp, Heterodera glycines
cgtccgatgtctctctgttggccttctcgatgccattccgaagcgtttttggtccattctttgggttgactgtcgcgttcgttacgccgttctgacctttctttttcccaattgctccatcccactggtcgagccccacctgcacgagtcttctgctcacgttgcttcaccgtgttttgcttgtgttcatttgccttttcttcgtaccaatgagtcggaatcgttggaaa

SEQ ID NO: 62145 - DNA, 905 bp, Heterodera glycines
  unsure (1)..(905): unsure at all n locations
atggcagagcagtttgcacaacctgaaacccaggagcaccaagtgaaagaagctaaggaagcacgagttgatgaccgtttcctttggaaaatcacgcggggccaatttatgtttgcaattcgactaaaaggtgcaggaaataagcagcaaaatttaaagaaaaccattaatacttaatccaatttgctgaaagaaactttttagatttatgtattattgagtttctacaaaaattttctgttttatcaaaaatttgagagtgtgcattcaattctttgagaaaataagttaattaccctcaaaaaattgggaaatggagcaaaatctgtagagacactgtctaaatattctttaattaatacactaattgtccctcttattcaggacgccgagatcaaagagctcagacaggacctagcggaaaaggtgctggataaggacccatttgggtatcccaaaaattacaaacgaaggattcactattaggaaaagatgatcacacatcagcaaaaaaaaataaggcagtttgaaagcgatcttcgcgagcttcgacaaattgtaagtgtatttaaacatttttttaaattttaatatttaaattttctatgaggttaatggaatcgccgtttcccatgtttcaacaatgcccacttcatctgccgtcgccgaccaattcattgccaatgacctttacgaaaaaaaagggtggaagaatacgaaatcgaactggccgggctctctgatcagcgcaattggcagaaaagcgaggaggaacaaaatttagcgcaccatttgtgggatgccgtaagtttttctgaaggaattcatcatgtattttggggtgaaattcggcggggcatttacaagggatgggcgggattagactnaaaatttaattgggcata

SEQ ID NO: 62146 - DNA, 108 bp, Heterodera glycines
cagctgcaggaccaggtggaccagctgaacaccgaacggggccaccttccagcggcgccttcgtgcattggctaaccaattggggcgcgattgatttggtcgcagaat

SEQ ID NO: 62147 - DNA, 1641 bp, Heterodera glycines
aaaaaaaaggggactgaaattttctatttccaatttgttaattgaatttggatgccttttttttgttttgcctatgcgccaaaagtgatcagaaaaagtgctgattgttagatgggttaacaacacatgttttatcatgttatttttgatttattcgaatgtttccccattgattattccaaaaaagtttaagagtttggctgctttttattctttgatttttttttaaatttgctactgtacttttgatttcttacttttttttactgatttttcccaacttcacaaagtgatggtcccctttttttctgctggtcactttcctataggaactcaaaaaaaaacaattttttaaattatttatgaaacctatttttaacatttaaaacttacgaacaaaccaaatgttgctttgctaatgtattgtaataaggttcaatgttgctggtgttgagcatgaacagttgatgagtgcggagaatgttgagaggcgtaaagcagcagcaacaacagtgcctgacctgtacattaaggtggaaaaaaattgaaaaatatctaaaattcaagaaaaatctgtttggaatgatgttactgaaaacaaaatttgctgaatttccaaaaaaaaaggccaaaaaatacttgacaaaatttttgggtgtttttttgtatttgcaaaaattatcgaatttttaggataggcaattaaaaaattctattgcattgccaaatgacaatttgatgtactgtattgtacagtttcctaattcggtgctttttagccgcttgacgcacattctctgcttcgtcccgaggcatttgaaggtgggtcgcacttgatggagagaatgacacagaattttttaaacaattttttgagacattttagcatggttttacatgtatcggctgaccggtgacaagcagtaccaggactggggctgggacgcatttcaggtgactataatccacacggccaacaggggtgtatatcttcggcgacttttttttttgttgctccaccttattttactaattttgccattttttcaattgaagtggtagggcccggcggtgccgatattcaccacggaggagaattttgagaattattaacgaaatatatattaattcagaataaattagaaaggtattgtaaaatgagtaaattaaaaaaatatttattttcatacaatttattcaattataaatatgttgagagcatgctagatagactctgtttccaataaaaaatggaaattgttgaaaaataatattgaatttttgatattaatttacatatattattatattgacaggctattgaacggtacgccaagcggtcaaatggtgacggctatgcttcagtgcaaaatgtcaaacgaattcccgttcaacaccgggacctgatggaatcatttttcctagccgaggtgggggtttaacagtgtttgaattttactcttttttgaaaaatttgaatttactatttatgtatccattaaaaaaataaatatggtaaaacactgtaattttcagtcgctcaaatatctgtacttgttgctctccgatgaccaacaaatgttgtcattggaccaatgggtgttcagcaccgaagctcatcccttgccaattagaaccttt

SEQ ID NO: 62148 - DNA, 605 bp, Heterodera glycines
atgcctcgggacgaagcagagaatgtgcgtcaagcggctaaaaagcaccgaattaggaaactgtacaatacagtacatcaaattgtcatttggcaatgcaatagaattttttaattgcctatcctaaaaattcgataatttttgcaaatacaaaaaaacacccaaaaattttgtcaagtattttttggcctttttttttggaaattcagcaaattttgttttcagtaacatcattccaaacagatttttcttgaattttagatatttttcaatttttttccaccttaatgtacaggtcaggcactgttgttgctgctgctttacgcctctcaacattctccgcactcatcaactgttcatgctcaacaccagcaacattgaaccttattacaatacattagcaaagcaacatttggtttgttcgtaagttttaaatgttaaaaataggtttcataaataatttaaaaaattgtttttttttgagttcctataggaaagtgaccagcagaaaaaaaggggaccatcactttgtgaagttgggaaaaatcagtaaaaaaaagtaagaaatcaaaagtacagtagcaaatttaaaaaaaaatcaaaga

SEQ ID NO: 62149 - DNA, 525 bp, Heterodera glycines
atgccaaagataacggacacaacaatgacgagcagcatgacggcggcacggcttccaaagcggactttggcggcaattcgcgttcatccaacggtttcaagcagtccaatgccgtgccgaaaaatgagccgtccaacaatgtgtccaatgtcgactcaaccatggttttgggtatacaaaaacgatggttcaacaacagcaacaacaatggcgacaacagtttttgttggtgaacttggcggtgtcgtcgttgtcgttaattgtcgtcaaaaatgccgagaatgatgatgatgacgggaggaatggcattggcatcatttactggttgctaatgaggtgatgatgatgatgtttttggaagatgtgtcaaagctgttgaagaagcaaaatgtagaagaaaaaaaagttggcaaattttgtgatgatgaaaaagggcaatatttttaaatctacaaaatttaaaaatttagacgggggataaaattgtggaattttcatgaaatttatggtgaccttggtattaaa

SEQ ID NO: 62150 - DNA, 77 bp, Heterodera glycines
ctcgaaaagtagcttaacaacagcccaaaaaaacatgtttttcgtgcgtttcaggccacggggagctcaggaaaaaa

SEQ ID NO: 62151 - DNA, 71 bp, Heterodera glycines
atgccattggctgctgcacggcaccgaaacggtgccaaagacggcggagcagcgcacctttacactccgtt

SEQ ID NO: 62152 - DNA, 276 bp, Heterodera glycines
tctcagctcgtggaagcagcgattggaggagacagagggcggcgattcgggcgcgacagagacggcaacgacaatgggcaccgcggaccgaagcgacggcgaccacaatggcccgagcgactattgccgccactgcggagacggaagaagtgtccggcgactgtcccgtggtggtggtcggcgacggcatttccgccgcggacgcggtgctgcactgtctgagcattgaacagcccgtgctgcacattgtccgtcgtacagagcgcgagctgagaa

SEQ ID NO: 62153 - DNA, 646 bp, Heterodera glycines
atggttatggtgccagaaagcgagtatttggctctcattaatctactgaaagggagcagcggcgtatctcctcctctagccgatccgttacagggcgagaaaacgctgcttgatgtacagattcaaaggaatttggctgatccaaaaacgaacgcagaaataaaaatgaagcgtcactcatggttgtacaagcgtagacaccagctaaaagatattattgagaacaaacctcaaaaagtaattgttgagagtggctcagttacagcaccaaacgttgcgccgtatatgggcattcaaaaacaacaaacaccgtccaatgtgaacgcacaacaccgcaattcgacatcaattcaatcgtatggtggcgtaagtaagagcaacactgatgtagaagaggacacggacttttcaactgcctctgatcagtttgagcctgctgctgctgatgctgctactacatcgtcgaggaaaacgccacaccaaaagacgccagccatttcattaaggaccagtccgaaaaatttcccaaaattgatgggtattatcgggaaggatctcaaaaaattcggtgtcaatgctagcagcggagaaattttgactaatttcaataaacccgtttcaggctctcatttcaccgaatcgttaa

SEQ ID NO: 62154 - DNA, 80 bp, Heterodera glycines
atgaaggccagcttcggccggtgggctgatcgaatgaaagaatgtttcggagacggcacattctcattggcacctccaat

SEQ ID NO: 62155 - DNA, 1299 bp, Heterodera glycines
atggtaaaaattttaattccttatttaaaaatttaatttaaaataatatttaaaagatatagaacatttttttccattaaaattattcaaaatgatctgattgaaatatcaatgattaaaaacaatctttttttaatgctttattattttaataaataaattttttaaacaataaaatttaaaaaaattaataatcattgattaaattcattttatattccaaataatttttaaaaattattttgaacaatatagaatttcaaaacgatttggttgaaaaattggtgctaggtcgaacctaaaaaagtatcaatgattataatatttgaatttaattattgtttaaatattatttgctggttaataaatcataacttagctcaaaattgataaaattaaacaatcttgagaaacaaccaatttaattttgtttatataattagatagccaaaagatttctctataaatcagttaaatttaaattttttttattgggtataaaaaaagttagggaccatataattgggtataaattttacgaaattttttgtcataagtttttataaatttttgccaaattttttaaaaatatataagataatggagggacatgtaaagctatcgctaactactaagattctttaattttatcaagtttgtgctaagatatgatttattatacagcaaataatatttaaataaaataattaaatttaaatattattatcattgatacttttttaggttcggctcagcatggaaaaattaatattcaacctaactacataaaatcaaaatgaattaaattactattcaaaaattaatcccaatttcaggtagccccacaacgtgaacaatcagttgacgacagcggtggaccatctgctgcagaaacagtgccattaatagagcatcaacttttgatgacggatcaggaccagctgaacaacaacattgttcaacaacaaaatctgtatcagcagcaccagcacaattttgtggcaccgtccatcttggtgtcgtcgtcgtccatggagaaaagtgcgtcggcacaggacttggccggcacggccgcagcgctgatacgacggcaccgcagtgcgagcaaagtttggacacaacaaataacggaatattaattaatttaaattaatatttctttattgaaaattaatcattttttttttgagccccggacgggttcgatggtattgaatctttttatctaaaactcaaaaaattctgaagtaaaaaattgaaaaatgcttgccaaatttggctaatattcgatccttttaa

SEQ ID NO: 62156 - DNA, 898 bp, Heterodera glycines
atgtttctgtacgacggcacccaacaatggcccgaattgttgccaacgctgtgccaattcctggaccagaaccagcaacacgatgccaatgtctttgaggttggactaacggacgagtgcatttttaaaagtttgcttttaaattcaggcccatagcaagaaaaaaattcggaaggagaatctctgaaaaatttttttcatcttcgggtcaaaaattttttatagtttatttttcaaaaattttatcgccggagcgaaaatgcagaaattaataacggttttgtgccaaaaaataacaaattttgttattttggagtcaaatttctagaaaatatgggaaatggaggtttggctgtgccggtaggcgccaccagtgaaatttttttaagttgttttaataaaatatgatatgaaattgtgcaaaagtttcaaaaatataataatatttttattttatcaaatttacggttttccttattggttaccttctccaagagctctctgaccaaaattttcccgaaaatccattcggtgaaatctgttgacaatttgtccaaaatttccaaattttcccgacacctatcgctactgtcggcacaaaaactcataatttttcaaaaaatttttctggtatgcctatcatttatttctgtttgttcagggtacgcttggcgcattgcaaaagatttgcgaggattcggccgaccgtttgtcccacgaggagatcaaccaagtggttgcccgtgtgttgcccttcttcaactcgcagctcgcccggctccgtgccctctccgtcagcacggtcaactgcattttgctggtccaaaacgagtctatcagtgccgtcattgatcctttcctggagtgcctgttcaggctggccaacgaccaagaccag

SEQ ID NO: 62157 - DNA, 646 bp, Heterodera glycines
atgaaatggaagaaagaattcggaatgagttggaaaataacggagaaagaaaaaatgaataaaatgaaaatgtattggcaaataaaaggagaaaatcaaaaaataagtgatgaaaacattgcaaaaatgttgaaaattagtggtaagaatattcgaagatggaagaagaaatttggagaaatttaggatgccgagaattttatgaatagggacaatatcgggcacgaaattttggtttcttttttcatgtttcatgcctttttgatttattatttttttgtaaaaggctcaatttttttcgtattttttgtgttttatttttcaaaatatccagaagccgatccttaggtgtgtattttttattttactgaatatttattgtgaaaatttcaaaaaaatagatgaaatatggattaaaaatccaaaaatttcggggccgggggacttttggcacaggatcgtacgcaaaagccaagtctgggcatttttcagtgcaataattttgcacaatttcaattttttcttcatccgaagtcaatttgtgaaattatattggcctaatttttgttcaatagtaaatatattggcaagtgatttgtgcccaattttttcactattttttttcaattttccccattcttgaaca

SEQ ID NO: 62158 - DNA, 898 bp, Heterodera glycines
ggaacggaagaagaagcgggggggggggacaacggacgaaaagcaaaccgaaggggaaagcgacgaaaagcaaaccgaaggggaaagcgacgaaaagcaaaccgaagggaaaagcgacgaaaagcaaaccgaaggggaaagcgacgaaaagcaaaccgaagggaaaagcgacgaaaagcaaaccgaaggggaaagcgacgaaaagcaaaccgaaggggaaagcgacgaaaagcaaaccgaaggggaaagcgacgaaaagcaaaccgaagggaaaagcgacgaaaagcaaaccgaaggggaaagcgacgaaaagcaaaccgaaggggaaagcgacgaaaagcaaaccgaagggaaaagcgacgaaaagcaaaccgaaggggaaagcgacgaaaagcaaaccgaaggggaaagcgacgaaaagcaaaccgaagggaaaagcgacgaaaagcaaaccgaagggaaaagcgacgaaaagcaaaccgaaggggaaagcgacgaaaagcaaaccgaaggggaaagcgacgaaaagcaaaccgaaggggaaagcgacgaaaagcaaaccgaaggggaaagcgacgaaaagcaaaccgaaggggaaagcgacgaaaagcaaaccgaaggggaaagcgacgaaaagcaaaccgaagggaaaagcgacgaaaagcaaaccgaaggggaaagcgacgaaaagcaaaccgaagggaaaagcgacgaaaagcaaaccgaaggggaaagcgacgaaaagcaaaccgaaggggaaagcgacgaaaagcaaaccgaagggaaaagcgacgaaaagcaaaccgaaggggaaagcgacgaaaagcaaaccgaaggggaaagcgacgaaaagcaaaccgaaggggaaagcgacgaaaagcaaaccgaagggaaaagc

SEQ ID NO: 62159 - DNA, 540 bp, Heterodera glycines
atgagagatgttgtcgtccagagatcaggaacagtcccaggattttgcatccgccatcaaatttatgattcctcagtttcgtacgagttagtgtcctccttccaccggttgccaattcaaaaaaaaggtgtacttttctagtttacatgaccaatttatatgcattttttaatgccaataaatatgaataaattatatatttctgtttaaaaaatttttaagggtttcggggtcactcactgattacgaatatgacattcatttcgacaaatttcgaaaatccggacccgagttcgaacaaaccagtcgaatttttaaagtaatgcttgagttataaaatttgaaggtttgacttaacgatcaagttctgggccggggctcacaataattcgtcgaaatggatgtcatatgcagagtcggtgacccagaaaattctcgaaagccttttttattatgtcgtttttaaaatgtatatgaaggtggtcatgtacattttaaaaagtacaaaaaaaaggatttacagcaaatttgaaaaataaa

SEQ ID NO: 62160 - DNA, 314 bp, Heterodera glycines
atggggtacggtaacccttcgctgttccttttactttggctcccggtaaattggacaccagaaaattggacaccgaaaattggacactgttgtaaataaaaattaaaataaacaaaatatattaataaacaaaaattttggcttggcctaaaagatctttatcttaatctgcacatatgttgtttataagcgtaaataatatggaaatgaatttgatattatttttgtaacatcagcacgagaagaaaaacatcatatcattcctaaagaaaaagttttattacccatttttcgtgcattatttggcacattga

SEQ ID NO: 62161 - DNA, 570 bp, Heterodera glycines
atgtgccaccaaattggagaaactcgacgacctttgttattgtgtggatgccaaagagagatgccaccaccgcaaatggtaggagaaaaagcacattttgattggggaatttatgtgcattaatggagtttctcaattgatcaattttaaatggattttaaatgggtttgaaatgtgttcgatcgcctctaaagccgaattgtaattaaaaatattgtgaaaatttgaaaaattattaagggtaatcaatttaattaataataatattttatatatttttgcttttcagctgttctgtccgcaacaatctcgctttgaattttcactgattttgttgatgcaaaaaagaaaatgaattatttttcattttatttattgagttctaattaattggaagaaatttattgcgtaaatttatgaaaaattcttttcggattttcccaatttacgaattttaatacttttcatattgagaatttaatttaaatgttttttccattttctcactttgttcaaattgaaaacaaaaaattatcatgccctttgatagctgctggtggacgccttcaa

SEQ ID NO: 62162 - DNA, 689 bp, Heterodera glycines
atgtactactgttttggtgttactgtacagcaggactatgaccagcaaatggaaatggtgctcgtgcctttcaccacggtgctcaacaagcccaagtatcaagcgattgttgcccagctgaacacaatgccaaaaagtgctgctgattgtgcgacttttggatacggtaggacaaaaactaaaatcaaaattttgtgaaaaaatactttaaatttacagatgttttcttggtggaccctttgatcgaatatgctaagcatttcgcattggaaggaatgtttaaggcctacaaaaaagtacagtttaatttttgtcaattttctaagagaaatgaggcaaaatattagagaccggacaagagggtcggtcggtcggtttcggtataaaaaccgaaaaaaaccgaaaccgaaaaactcaaaaatttctcggtcggttttttcggttaaaaaccgaaaccgaaaaataccgaaaaaaccgaaaaaaaaaccgaccggtccgatctctacaaaatatggtctcggctttcccacgcctcccttcacattttctcattaactaattcttccacttatttattaaaattatgataaaaaactcaaattggcatttttgggtaatactgaagaatggcggtttcccttttttgggataaaaaattcatatatgggggtttaacgaggtgctcaaca

SEQ ID NO: 62163 - DNA, 872 bp, Heterodera glycines
atggcaccaaaaattggcatccgcgttggcctctttttcttgctcccgtcgctgctccttttgcccagcgctggcaatgcccagtactacagcccgccgatgatgaccggctcgggctgcgtggccaccggcaacaagctgtactcacatggggtaagcccagcagccgaatcattcattcctttttttgatgattcatcggattttaaaccaaacggaaaaaataaatttgttgctcttcgcccctctcgaattagtgcctaatttgtcaggcgttacgattgcctttgtcagtttaaatccctacgtttaaatctcgccaaaataaccctacgaaaacaataccccccccaaacgaccatgttttatgcgcttatggaaacattttattcatttaaattttggcagaattttatccgtgaactgagtgccaaagagttggcggagatggagaagtacaaacgtgaattggttgaatggaagcaggtggagaattaatgagcaaatttacagcaattaacaactccgaaaatattctaaatatgttacaaaagaacacaaaatggcattttccaattttggccaatctccgttgtgcccaaattaatttaaaaaattattcagaaggttgatgatgcatatgccagtttggagcaagctgtgcaacgaaactccaccactttgccaacaattccgcctcgtccgcaacttccgactttctgtacatcaaatcaggtcccgattcttgggactttaagttcaaggatttttgtttataaatgaatcaatttttaaaatgaggaatcacgaaatatcgaaatgctattaactagggaatccgttcaagagccaagaaaaacaaaatgaataaa

SEQ ID NO: 62164 - DNA, 1189 bp, Heterodera glycines
  unsure (1)..(1189): unsure at all n locations
tccgccgattgtaaattaagtctttgccaatgtttttagtctattttctaatcaaaattgtcgaccttctggtccttttttacagatttttttttgtacgatacccgaacaattcccctctctcttttttcatggaaactgaaaacgctggtgagccatgcctttaaatttttgatttttttttaataaatttcatttttcttcaaagaaacagaggaaacacagcaacagcaacaacgaccatttgcaattaagcgatggaatttggtgtctacatggagttgggacgtggagtgtgacacgtgcgccatttgtcgtgtccatttaatgggtcattgttacctaattgttatattaattaagtaaaaggatggactaactatttggaccatatgtaattaaagctcaacattatgaaaaaagactgggcttccatgttggcctggatttcattgacaaaaatcaaggttaccgaaaaacacccgagtctgattcaggagaaaccaattttttccccaaagttgacagactggaaaacatgaattcatcgctcaaaattttcccgtgccgggaatatttttaatttggataagaataaaaagtagaatttttagttgattgtccaatagatttccaaatttttcagaggcatgcctccgttgtcaggccgattcaaaggcgcaagaatgtgtggtcatttggggcgagtgcaaccactgtttccacctttgtatgtgtctcacattgggttatttatattcccggaggctttcgggggtcgctctgaatagaacacgaatctgacatccatttccacctgtttgaatcccgatttgggcaattgaacttcgtaaatttgagttttcgaatttttgtcgggttaggaatttggttattggtcgaaatggatggcagtttcgtggtcaatagaccccgaattatgatgaattactgtttttttttttttgaaaaattttccaagaaatcggtaaaaaaatttctattttttttttgtcattacaacaaatggggggtggggttattttttcaaaatgtgttttttcatttttcaaaaatttgacgaaactccccccccccccttacagggttgtatgtctctngtgggtgaagcagaacaaccggtgcccgctgtgccaatcccgattgggctgtccaacgagttggaaag

SEQ ID NO: 62165 - DNA, 755 bp, Heterodera glycines
atgcgcgggctccaaataccggcgaatttgcacaatctcagcgaacgctatcaggtaaatcccattcattcattcattattcgtcattcgtttaaattcctccaatttcatttttataattttattttatttaaattaaatttagttggccgaaaatattcgaacggggcgccaactcgcgccgacttttctgttccatttcattaacatttgcgggtccgtcttcaccccatttgtcgtctattttcatctgatcaccgacccaattttgctgaatttaattgtgttcacttattactccgtcctttctctcagcaacgctttgattgaattgactttaatgaggtcattaaaagtgataatagaataaaactcattatttaaatgcattttaattaattaatttttagacgtcatcaaattttgaagaaaaatgcattgaaaattttggcaaaatttcttccaaatcgctgcttctccaataatcgcatcactgacagtggcaaaagtcagaaaatggtccaaagaattgacgggcaaaagcggtgggaaaagccacagcaaaaaagagacaataaaagcaatgaaatgacggaaatgcactttaaaaagttgaaggaacagtggcaaaagtgaaaaggaaatttgtgaaaaatggaaatgataaaagaaaaggaaaggtgaaaatgaagtggacaaaatgaaattgatcattctgataatcgtttgaccattttattattgacttttggcga

SEQ ID NO: 62166 - DNA, 176 bp, Heterodera glycines
cttaaatatttattttaaataatttaccacataaaccatttattcacttttcaataattttaaataacttaattaaggattgaaattgtttctgactttttttagttttagttttattcgccaaaagtcaataataaaatggtcaaacgattatcagaatgatcaatttcattttg

SEQ ID NO: 62167 - DNA, 1233 bp, Heterodera glycines
atggcaacaaaaagtgggactgttcaagaagttgaggaggagcaggatgaaggaagacaacaaattgttggcctatccgccgatgaaacggcggaacatttggcaccaccggcggagcggcaaaaaatgccaaccgccgcggcacggcaaacgcattttgcggtcaaagtgtaccgggcgacgttggccggctttcgcaaccgagcggagtatgtgaaggatgacttccgcttcaaaaacccacgccgtgtgatgaaaatttgggcggaaaaggagtttttgaacctcaaaaggtatgaaaaaaaactcgggaaaaattttttgggatttcttttgcatctgaaattctctaataatttaaaattttgcaaaactattcaaagtttttggattttctgtatttctctacccttattagccacattttccttggagcaggtcattttctcccccaccaatttccaaaaaagtattccaaaaaatcgctttttcgtggaaatttttttaaattttcggtgaagtgcaccccattttcatttcgtttactgtgccactgaaactcagactgaaaaatgccaacattatgtgcccgacgccaatcaaattgcgcaaacacgtgctgctgatgtcgatggttggcgaaacgtacccggcgccgaaattgaaggaattggaatgggtcgacgacgcaatgcgacgggacgcgtttgaaagagtcagacgagtaagtttaaaaggttcgaaaatataaatattttatgattacaaattgaattgagcgggactggtccggcaatttccggtttcccaggtcccggaagaaaaaaaaaatttttgacgcctctcccccgttttgttttttgttacaaaatggcgttttatttgtatggacatctttcccatttgcgcagatggtcgtcacgatgtacaaacagtgtcagttggtgcacggcgacctcagcgagttcaacctgctctaccacctggacactgtctatgtgattgacctcgcccaagccatggacatttcgcatccgtcctcgctgcgcttcctccaccgggacatcagtcagttcggtgatgggcaccaacggcggaattttgttagaaattttgtccaaaacccaaatttgaaaccaatggcattctcttgattcgtgaaaacatatttatatgggttttcagggtcactgatcacctgacattcagcccgggattcgaaattgggtcaaa

SEQ ID NO: 62168 - DNA, 684 bp, Heterodera glycines
atggcagcgcggcacttcaaaaagaaaacaccgaaagaggaattgcctaagggggcggcggaaggcgacggggaggggacgacggaacgtatgccatcgacgacggaagaggcggaggacttggaggaagacgaagaggaacggcacaacgccaccgaagcaggaaacagcgttgtcaacacgcactactgctgtgagtgggggggggggggaagcgaagcaccaaccgaccccagcaatgcttttatccgaagttccctttccgcgaaaaacatgcatttttagatttggaaagtccttttaacgatgatttgtttgcgattatggtaatcgaaagctactgtcctcgcattgtcttctcaaatttcagcagaaccgctggaatttgagctgcgcttgtgcctctgccgatgggagcattgacaattcaaaggtccatttgggaagggacagatttattgttagaaacctttttcagatttatcgttttgatgttctccaatgcgtggatttagacgaatgtctctacgaagaatgccccaaaggttatttttttgttctttttttcactttggacaattcatcgtttttcaaggtcaacagtgtcttaacatgaacaaaggaaaaatctgcgcttgtcccgtgggctcttataaatctaaagacggaagaaactgcattaaa

SEQ ID NO: 62169 - DNA, 55 bp, Heterodera glycines
  unsure (1)..(55): unsure at all n locations
cattttttatacatatnttatttacatatttcgcgatttttcttacataaaaaag

SEQ ID NO: 62170 - DNA, 388 bp, Heterodera glycines
atgaaaagtatgtctcaatttttttaaaattcgattggaaacttgtaattgaaattaaattaccaaattttgcgattttgtgccatttttttaagaaaaataggagttttgggggcgcggcggtgccgataggcgccgccgggggaaaaattggaaattttgatcatttataaacaggttttcactgaaaattagccaatttataggtaaaattttgaaaaattttaggggaatttaatccaattcttaggggtgtaaaagtcgtgtttcgcgccaaaatgcgaaacgcgaaagcgaaagtgccaaaaaagcgaaatatgcgaatgcgaaacgcgaatgcgaaacgcgaaagcgaaagcttatccctgataagtacctaatttataga

SEQ ID NO: 62171 - DNA, 1014 bp, Heterodera glycines
atggtgattagaagaggtacaaaagtgattataagaggtacaacagtgattagaagaggtacaatggtgattagaagaggtacaaaagtgattataagaggtacaactgtgattagaagtggtacaacattgttaggagaggtacaatattgtttaaaattaaataaataaggaaacgtttttattaaaagttaaaaatcgagtgcattttaatctaaaaattttttaataataaaatactcttttattaattaaaaacaaccttggaaattattaattgaatatttatttaatttgaaattaaatgaatttttttttacaaattcaaaaataaataatgaaattctttaatttaaaaaaaataaatttaaataatttaaaagaaatcttcaaaaattaattaaaaacattgtaaaataagccaaaaatacaaagaaaaataatgttacaccgtccggattcgaacctgctgccccccccctcagaacatgtcccagaatccccaatcacacagggattctgagggcttaacgatgtcaaacgtaaaatctgatcacgtattcgtgatcagcggcccaaataacccctaaagacatgtttttggaagatttttggtgaaaaaaatttttcaatcaaaaatcctgtcacccccctttggtcccgaatcctaaaatcacttttatttttgtatctttttttaaaaatgtgataaaaatgtaaaataaaatttatattatagagaaaaaaattgcggatttttgtagtattttacttttctcaaatatcttttcagaaggcagttacgaatttttttctgaaaaatctaaaatttccagaatttctggaataacttttttcatattgatgttagaaaacctaaataaatcccataaaattctcctgatttttctctatttttaaagctttatttgctcaaaattggtcaacccttaggctagatatgaattttcaaatattaagccaaaatcccgagggccaaaaaactgccaaaaa

SEQ ID NO: 62172 - DNA, 572 bp, Heterodera glycines
atggactctacaaaaccgatcgtgtttttgaaggtcagcctaaaaggaaagccggcaacagttgtagggcgagtcggtgagttgtaagctcttctgtatgaatgattaaaaatggcttatcaaaaattctgggtgattgtttgtattttttcagatacgaagacgtccgttttgtcaaaagcttttgcctctaaaattggtgacattgattcgaacctgcgtggccatgtgacgctcccaactgccgatgtgcccgttgtaggatggtaggaaatgttcgtacttgtcaaaaaaaaatttaatttgttagggtggatgacgtgtcagtcgctttgctcaatgccgaaccatatgtctttgcacaacgttttggcgtcgtggcggatcatcacatgatcgcgtaagtttttgaattaagttaattttctgtgcgacatactgtaaatttaagcttttgcgaacgcaaggtcgatggcgtctttggagccgacttactcaaacgcatgggcattttgaacgaggaacagattgacgccattccgctcgcttctggagatgttcctgaggaataa

SEQ ID NO: 62173 - DNA, 1600 bp, Heterodera glycines
atgtctacaaattcacagaaatacggtaagggttgaagtgatggttttgaattttgagtgagtaaaacaattgtttctttagtgtttttaattggtaattttgtggacaagggatggcgtagccaccgatccttggcttcgggcggggagctaaaacccctccacctactccaacgataacgaccttataattttgcatttttcccaaccaaagtatttgaaaactagagagttttatcgaatcttacccaacatatttaggataattaagttgtcttagagtcaattatctattttttacaccatctttaagtttccgtcgaacaatttcaaaatggtcagaaggcacttttggaacgaatcggtgaattggagaaacaattgaaagaacggccgcacaaacaggaagaggaaacggagccaatggcaaagaagggtaaggttttcagagagcgcggtgcgccacgtaatccgcgggtgggattgggactttgagggacttccaaaattgcgggaataatcccgcgggaatcagtcccgcaaaaattaagagttctaatctcgcaatggaattcgaaaagttacaatttctgggtttagtgattaataaacaaaaaaaacattaattggttcggctcgcgccgtaaaacggtttttttgttaatcaatctttggctttttgtgaattctttgattgtttaagcattggtcgacgaacaattcgcgcagttgcaaaatggtcagaaggcaattttggaacggatcggtgaattggagaaacaattgaaagatcggccgcacaaacaggaagaggaaacggagccaatggcaaagaagggtaaggttttcagagagcgcggtgcgccacgtaatctgcgggtgggattgggactttgagggacttccaaaattgcgggaataatcccgcgggaatcagtcccgcaaaaattaagagttctaatctcgcaatggaattcgaaaagttacaatttctgggtttagtgattaataaacaaaaaaaacattaattggttcggctcgcgccgtaaaacggtttttttgttaatcaatctttggctttttgtgaattctttgattgtttaagcattggtcgacgaacaattcgcgcagttgcaaaatggtcagaaggcaattttggaacggatcggtgaattagagaaaaggggacagccggacaattacggtaggtttacgcattttgaattttgaagaaacaaagtttacgcaatttcaattttcgaataagcttttccaataacatttaacgaggtcagaagttgttccgatttaaatgtgtacatttatttaaatttgtgccgtccattctggattctttgatcaccacaggcaacgcaaaagaaaattttacattttttcaattttttagtttctgtcgatcaattcaaacgccgaatagaagcaatcgaaaccttcttttatgcatcgatttgttggggttgttgtttgaatttaaaaaataaaaatacttaaattttttgttgttcattatcaggcgaaattccaccaaaggaggacgagaagggaaaatacggtaaggaaaaaagagatataatcgaaa

SEQ ID NO: 62174 - DNA, 612 bp, Heterodera glycines
tccaaattgtttcttccatttttcaattacggtacggccaaccccaattttcttacaaattttggcataatttttcttccattcttttcccaaatattttcttcctttttacttaattcatttttcattacatataaattttagaacaatttcacttttttgttcatccgtttttgatttgtggcttttatttattttttttttcttcttccaaattttcttcccatttttctccaagtttcacttttttcttttttgctccaattccaatttgtccaattaaaagtaaaaaaccaaacaattaatatatactcaaacgaaaaaaataaatatgaggagcaattatcagagaaacttgctttcataatgatcaatcacttgtcacttcttaataattcatttacttctcattttcagacgaattttttgtgttcatttgacccgccttttgtggagacaatggcttaaataaagttataatttaaatatgacgaggttaattaaagccagggtgaccaagtgtcctgattttttagatttgtcctgtattgtggagggcacctatctgaaaaatcaaaaatgtcctgaattctcagactgtcctgaattttt

SEQ ID NO: 62175 - DNA, 671 bp, Heterodera glycines
atgttgagatcattcagcagattaactggtgcgggcgaatgcgattcatttgcatatgtaaggcaaagtaaacgttaaatacataattggacaaatccaaaatatgatgcttaaacatcgaatttcagggtcttttcttcgaattgaattttcttacaaaaaaaaacagttacactttttgccatttttatttgattttcttgtcaaaaaaattatagaaaccgagcaactcttttttagttcttatttcctaccaatgtttgaatggttttatttccttgtttataaaatactaaattaaaatcgaaattctgataaaaattctaattaattatgtttgatttaccaaatttttgaattaagcacttgtttaatttaattacgatttttttctgcctttttgggtgcctatttagcaatttttttcttagaaatggcatccctacttattaatatgtagggctcggatttataattttaattgctttttttatatgaaaatactttcagattaaggcaaacaattttattcactgatcgcacttacaaatacataaaaaacatttcaaaattttcgtggttaaaagacataaatatggttaccggccaaaattgatttataaacggaaaaagatatttcacgtcgcaagatgtcagagaagcaaaataaa

SEQ ID NO: 62176 - DNA, 544 bp, Heterodera glycines
gaataaaattgtttgccttaatctgaaagtattttcatataaaaaaagcaattaaaattataaatccgagccctacatattaataagtagggatgccatttctaagaaaaaaattgctaaataggcacccaaaaaggcagaaaaaaatcgtaattaaattaaacaagtgcttaattcaaaaatttggtaaatcaaacataattaattagaatttttatcagaatttcgattttaatttagtattttataaacaaggaaataaaaccattcaaacattggtaggaaataagaactaaaaaagagttgctcggtttctataatttttttgacaagaaaatcaaataaaaatggcaaaaagtgtaactgtttttttttgtaagaaaattcaattcgaagaaaagaccctgaaattcgatgtttaagcatcatattttggatttgtccaattatgtatttaacgtttactttgccttacatatgcaaatgaatcgcattcgcccgcaccagttaatctgctgaatgatctcaacattttctcatcagt

SEQ ID NO: 62177 - DNA, 762 bp, Heterodera glycines
atggaacatcttgctgatctgcgcacggtccgtcgaacactcgaggacgtggaaaagctatctcagctttcatccgggactcggtcaggaacaggggacagtctgcctgcgggagatgatctcgctatccgtcgcacgccgcctgcacagcaaatccatgacccgactgatcaccagtcggacgagtggctgtttggacaattcccaagacggttcgagcagctgaacatccaagagggacgtcgggcagtgacgcctgtgatgcgaagcgtcgcccaggtcgcccaatacccggtcttaaacgcaggaggagccggagccaacattcgagaatgggtcaatcaagccagtgatcggagggaacgacgacaagcccatcccgggcttcgaaaagcatcttcttctccttcgctgcttaaaggagggatccccagccaggagggctgtcgaggtctaccctccttcggacgggaattatcccgtgagtagtatatggcacagaaatccggtgtaaaattccggcccttcttacgcaaattccccctcccgcccaattcgaactctattttatgaatatcccttgtcatcccgttcctttgttttcttttttgaccactcgggagttaattgtttcactaattttgactcctttctcttagcattttttttgctgcatgaaaataccgaaaaatgatgactaaaaaaaagcatttacaaaattttccaatattgatcctaattataattttccatttagcaata

SEQ ID NO: 62178 - DNA, 1266 bp, Heterodera glycines
atgggtgaaaatattgagaaaattcgacccaagtaccgaaatatacaaaacccgttaattttaaaagccggagcgctttttgaatcagacaatgtgcgatttgaggaaacaattcgtgaatatcgctcaaaaatgaataatttgcacacaccgatattacgattagttgaaaaaccaaacattacggaagctattaaattggttaaaagtgaagcaaatgaaacgcttggtgtgataattggtagatccggagattggttggaaatagtaaagaaaattccggagaaaaccaaggaagcaataagttatttgaaaggcctatcatatgcactgattgcgataccattattaattcttttggtattgatgggatacattggaattaaatacagactgataatatttgccggggttcgtgctgggtcagtattggcaagagtgttaagagcaatcatgggaacaaaaaaacgaagtactcgggttttggcggtaccaaccgcaccagaattggattcaatcgatgaagaagcttatgttctggattatcttcctccgagacgggttgcagcgattacgaatgacccgaggagactcccatccattagtgtccgtcttaatgatttgttaacagcagccttggttgattcatgtgctagtgtatcctactgtagagaaagaacagcaagaaaagcaggacttaaaattttggagcaaaatgacggaaaaggaaatttgactgcggcaaacgattcgagcatagaaattttggggaaaactatggcaaaacttcgaattgaggataatgtgactggaaatgtccgagaatgggaagttgtattgcttgtctcagtggacgaacattgtcccggccctttgcttattggattaccacttcttatggaattaaaaggtgtaatttccctgggagagaaaagagttagacttggcgatgtgtggacaaacattgtgtcagtaattgggtctgaaaagccaaaaccaccgtctgtgatacttgaaaagacggaagttttagagccaaggtctgaaaatatactttcagcaaaagtcaacgaatgttttccaatggaacaaaattttttggtgaaaggaattaagcttaaatatcccggaataattgttggacgaactttggtttcaccaggaaatagtaagaatgtaacaatacaaattttaaatgcgggaaattcagcggttaaattatatggaaagtcacatttggcagattttggaaatcgttcaaattaa

SEQ ID NO: 62179 - DNA, 792 bp, Heterodera glycines
atgctgatcaaaaaagggagcaacaccaagttgatcagatcactccttcatggtgatctgatcagcccattttggcggctgggaacgaggggtaaatttcaaaaaaaatttctagggggttgggaaaatttttctggaaattttgagtaggcccattttatagagcacaaaatttgctaccgaattgcctttggaatagtgggtctacgatttaggcccgctgagatacgtcgacttttatttcggtgcctataaaaagtactgtatttcttaagaaaatagtgcattttacactacgtcaaaattgaagtgcccatacctcagccggtataagtcatagagacatgcggttttttgaataatcagcggcaattttccaattttgcgaaggggtctccggccatgtaaattaatgtaaatcaatgacctttttttgctttcaacaccgcttttttcgcggcacgttttttccaagacttttgggggacaaggagggccggcggtgccgataggcgccgccgggaaaaattttctaatttttaatgcgatttgttaacagaatttgtaaaaaaatgaccaattgattaagttttgggtttttaggatgcttaacatgaaagaaaaaagttggaatattttttaaaattaaaattttaattaaaataattgtaaagaaaatgtgaggaatattctatccaagtggggaattgaacccaggcgaaaaattatgaaaggtagaaagtttaaccactacaccacatgtgcatgtgtgtaatccaatgactaaatgaa

SEQ ID NO: 62180 - DNA, 68 bp, Heterodera glycines
acttttgaccacctatattttgatcaaattgtgaatatggtaaaataaatcaaataaatgtttatgtc

SEQ ID NO: 62181 - DNA, 75 bp, Heterodera glycines; identical to SEQ ID NO: 54636

SEQ ID NO: 62182 - DNA, 386 bp, Heterodera glycines
atggaattggccagggaaaggctggccaaggagcaggaaacggtgcgaacactcggcacaaaagtgggcatttatttatcatgttgatgatatcatacacttagagcctaaccagaaaattatcggcattgcaaggcacaagccgacggcattatttttttttgtttatcgtccaaaaaataatttaattcgggttcggtaatgccgacagacgtgaccagagaatttttaaatgaaatcggctaataaaatgctttatttcaccagtttttttctttaaatatttataaaattcagcttaaagagcgacaaattgaagaggaacagcgcggtaaaacaagtcaactgaattttaatcaatcaatggcattttaattaaaaaacaa

SEQ ID NO: 62183 - DNA, 530 bp, Heterodera glycines
atgtcccaaatgatggccagtgagaataaagggcttagagaggagaagggcgcgctggaggaaaagctgaacgaactccgacaaagggtaaaaaaggagagaaaaaacggaaattaaaaattaaatttcaaaattaaaattaaaaaattggaatttcagttgcacgccaaagactcgcgcgtccatcggttggccgaacttttgggcgaatttttggaaaagtaccggcaaaatgcgcaaagggcgcgccaccaaatcgggcgacaaacggaagagtgagcgcagaagcgggggaaacaaaatgaaaatgagctataaaacagatgccaacagttggaacaaattgtggacaaaattcggcaaaccgccggcgccgcgccctttgccgcgtcgtcgccgccgcacgcgtcggccaccgcgacgacgtcaagcggcgggtcgagcacgcggacggtgggcggcgggtcgacgacgcggcgatcgaaaacggactaaattatattcagacaaaataattatgaaaaattgga

SEQ ID NO: 62184 - DNA, 139 bp, Heterodera glycines
agaattaaagtacaggctatagggaagctattccggaaggattcggtctccccataaatctgggcgcatcggctcggggggactgccccgaaaacaaaaaaatcgattttttcaagtgtccgtttggggtactcaaaca

SEQ ID NO: 62185 - DNA, 90 bp, Heterodera glycines
aatggtaccttcacatcaaaaaacgactgtcatggagatgagctgcagaaaaaaattacaagccaagaacaagccactatagcagtatag

SEQ ID NO: 62186 - DNA, 994 bp, Heterodera glycines
agtgccttccgcgccttttgccccgccattacacactttgctgctatttgtcggcacaacctcacaagcagcaacagttgcgtttccgcttcgtttactccgtcctccaaatgcccccgtcagtgataattgacgaatgtgcggaatttgagggccaaaaacaacaaaaacggtacggcgcatgcactcaatggttgttgcagcaacggactggccaaactgttcaggtggggacggacacccgtaaaatttaaaaaaataaataaaatatttgcggcgattgcaattattttctaattttgaagaaccctgacgaacttgaccaaaaatggttccaatttaccaaaaatcataattcggaattataaccgaaatgctttttctcttgcattccgctcaacctaaaaaattgtgaaaaatttcgaaaataattttattttttcagttttttttacccttttttaatttttgctatgaaaatttttcgtccaatttactttttttgacagttttttggttcataaagaaatccatttccatattgaaaaattgcagatcatccaaaaggagccgtccaaattccgctttttgccccttctttcgtcccctctcccgcttcaatgccgtcccccgactccacgatggttgaccagcccgaccatgcgctgttgttgctgaacatgccgttgatgatggtcggcccaggcactggtgttgctccgttcattgcctttcttcaaaaaatcaggtccccctttttcaccttttctgaggcctcaaaaatttccggaaattggaaatataatttttttttttggggctgtaggagcaaattgaatttatcaacttgaaattgacttaattctttctagaaacttttcacactatctgccctgtcttttttttataagaaaaaattctttcaaaaggtggattttttaaaatttttccaggcatttcatgcaacgaatgggcggcgattgtggacgagtga

SEQ ID NO: 62187 - DNA, 874 bp, Heterodera glycines
atgccggaccggaccggactggtattttcaaaaatgaccggattcgggatccggtctctcataatccggtaatccggtcaatccagattttcaaattgccggatccggaaccgaattccggattggtaaaaatttatatttcacatgttaatttgggaaaaaacccttaaaatttcatctattatatgtagaaatttggtgcaccagaaaatgtcgtcatagaaaagacaatgcgccgaaaaaaatatataaaatttcaatttttcaaaaaaaatttaaaaaatttattttaaagttttttatttttgaaaacctatgtttaatgaaaaaataaaaatttttttttgcggcgccctttttccaaaaacttttgggaaagaaagaagtgggtccggcggtgccgataggcgccgccgggaaaaattttgaaaatttgaggcgatttgcaaacagattttcaccaaaaatgagcttttttttttttgcttttttgggcaaattttttaaaaagaaaaaagttttggaggcccggcggtgctgacaggctccggcgggggagaaattgaaattttgaccatttaaagttaaagacattatgccaaatagatattttcaaagaaaaacgaacaaacgtcaaggttttttggttgagaccaagccggaccggatccggtcaaaaattcgccggaccggaccggattggcattttcaaaaatgaccggattcgggatccggtctctcataatccggtcaatctatgtaatccggtcaatccctatttttccaaaaaatcgccggaccggattcctgatccaggaaaatccggtaccggatccggtccggtccgctctctaataaatatcctctgaataaa

SEQ ID NO: 62188 - DNA, 123 bp, Heterodera glycines
atgattctttcttttttgccaattctgatagctttcattgctcactttcgccttttttcttgtctaagtccaaagggcgaaaaattaacggataaaacggaaaaggaaattccgttgcaaatt

SEQ ID NO: 62189 - DNA, 929 bp, Heterodera glycines
atggaggacccgtccaaccgcaaccgcctggccaaactgttgcgcttccacagctccgccgactcggccaaacagacaacgctggaggcgtacgtggagcgaatgaaggagaagcagcaggccatctactacattgctggctcatcccgtacgttttgctttttgtggttttccgccaaacaaatgggtgtaaattgaaaggaaattaacggcacgggttaaagagttttcttgcgagtgaccgtttacatttttttaaatattaaatcccaatttttattcccatttgttgactccaaaaaaatttccattcttttaatatattgttctaattttcaaaaaaaacgttagtaaaattttaaattttttttcttgaaatttttttataaaaatttataacatttttcttgaaaaatctttttaaaaatgacatcaaaacaaaaaaaattttcgattccattcgatagtttctgcagaaattatgtgcttttttggatcctatatttatccaaaaatctgaaaaaaggattacatatattttgtattatagtacagtccaacgtgcggatataattatatttttgaaattttaccaatgtttttttgttttcaaggcgaggaggtggagaactcaccgtttgtggagcgtctgcttaagaagggctttgaagtgctgtatttgaccgagcctgttgatgagtactgtattcaggtgagtcacacacagaaaaaagtggattttttttctaaaaattttaatttagtcgatgcccgaattcgaaggcaaaaagttccaaaatgttgcgaaggagggactgaagctggacgagggcagcaagtcggaggagcagcacaaactgctcgaggaacagttcaaaccgttgtgcgactggctcaaggagaagggcctcaaggacagagtcagttaa

SEQ ID NO: 62190 - DNA, 77 bp, Heterodera glycines
acatgcttctgagtttatggatggtcctttgatccacaaggcgtatattattccgttcactttcgacataaaacagg

SEQ ID NO: 62191 - DNA, 892 bp, Heterodera glycines
atggcaaataaattgcaattttctttgtttgttgttttggtcctttgctacggttccacggcttttccgcgtctcaaccaacaacaacagcataagcaaaagcaaaagcatggaggtgaaatgttcatattttaaatttaaaattaaatccacttaaaaataaagctcattaagttaattgtcgttagggatggttccggaatttctgggataaaaccctaaatttagacattgccttaggagttccctaaactcggtggtataaacaaacaaacagaatattagtcttaaagatactgtatttgcagtaaaaaataacaaaaactgttttgtcaacttaattttatttagaaaatgatgggaaacagcagcaaatggcgcgtcgtgtgccatttcctcacccgggtcaagcgccggaatattttcaggaagccagcgacaaagcccaaatggaatacaagcaaatttttgaggatgaaaaaggccaaatgccaaaaggggagctgaaggaaaaactgaagaaatgggctgaaaacaatggcataaaggtgaaaaatatgtaaaaattaacataattcaaaaacggataaaaattaaaaaaaattttaaattactttttaaaaactttaaggatgaatacgaaatgtcccaggaagaaaatgaacaaaagaaggagtcattccataaaataatgtcagcaaatcttggcggagacgcactgaaagtatttaagaagatttgggtatgttattgtcaaataatggcacatcgcagattttgtcttcctccctcattattattggtttttcatattttatttaattttttttttcacgacatatcattaatatttcaggaaatcacgcacacagatgaactgtcacgtcaatga

SEQ ID NO: 62192 - DNA, 459 bp, Heterodera glycines
atgaacagcgacatggactgtgacgagctgaccaagcagtgcattgaagacggaggaaaaccgtcgaaatgcggaaaatgccgtggccaaagggatattccatgcaatcatatggaatcagaccaagtaaaaataaattggaaaaactgagacggaggcaatttgacaatgaacaaacttttcaagccgcatattaggcaaacagaatttaatcttcgaaaataccttacattaattacatttaattgaccactaacaaaattaaggccaaatgtgtatttcggtttatcccgttactcttttattgttgactcgagttaacggttctgtgcaattacctcctaattaaataacatttggtatcaccctcactcaaattgtatttattgaccatgcgttttcttccagcgatcgcctgtgcaaatgaagtgccattggactgactgcgcgagtgtgtga

SEQ ID NO: 62193 - DNA, 159 bp, Heterodera glycines
tgtggtaagtgtgaagaactgtgttcctccaggcaaaaaattctaagaaaatttataagcatttgaagggttctcagcagtttccctgcaaaatttggtgagcttctgatcagtctagaacgttgggtgatcaaattgaaaaaaaaaaatataaaaaaa

SEQ ID NO: 62194 - DNA, 120 bp, Heterodera glycines
cgggcatcgcacggctgctgaacgtggcggcactgatccctcaactgcacccatttcagcaactgcagcgaacacagcagacgaccacagcgacgaaacatgagggaaacggcgggggag

SEQ ID NO: 62195 - DNA, 485 bp, Heterodera glycines
atgattttattattaaaaccgcttattgttcaaccaaatgttcggtatcattcgttttttattcgtacctctcgcctctataggtgtttcgcctaaagaggcgaggttacttaattccattcggacttttcgctaaacttcttcgacacctatcggaggtgattctttacttttgaaaccacctcatctcattcagtgaccaaatttatttatattgttatttatcggtcggtgtcacgcttttcgcgtataaattggattggattgaaatggttcggaggtgtgccaataatccgcttaaaatattttctaatttttattacattttttcagaacccaacgcattggttgcccaacggcggctcatcaagttgttgttggcacccaaactggatgagcacatttcagcacgaaaatgggcgggattagcattcgggacactatgaaggcgcgatttggtctgacaacggacagaaagaaataaa

SEQ ID NO: 62196 - DNA, 836 bp, Heterodera glycines
atgcttgttggcggtggaaaagcaacaacaaatttgactgattcatcgggggacgacgaaaggcagcgaaaggaaagtccgccccaatcgcacggactgacttcattccccgagacattgaattcgacaaattttgacgagaaagaaatgaaagatgtgcaattgtacgacgaaaatacaccgacatcatttgacgggaaaaaggacgaaagccaaaatgaggggggaacagaagtggaagcaggacaaaggacagcggaggacagccgatcgaaaacgacggcacggagacactctcagacaacggcggacgaggaggaccagcagcaccaatttgtacaaagacagacgaataattgataaaatcccaaacacaattaagccattccgacttggcattttttggaacttttcttaattgatgattggcaaaattgatcagaatcgctacaagcaaattaatgacattgaaaattttttcaggaatctctcgccgtttccatcaatggccaattcggaaagaccgtcgtcatccatgcgaccgacgaggacccaagcgaaactttcgagcggctgaaggaggcgtgcatcaacgccacactcccgtacaaagacatcattgacagtctgttcaacacggtaagaaatggatcaattattttaagccgtaaattacaatcaaatgcctaggggatgtccggtttttgtattcaaaatgccatttaaagctttattttattgaatttgcatactctgaatcaaattttgaaaaatcaatttagggcttaatttgactgactttcttcggattggcataaatgcaaagattaaataaa

SEQ ID NO: 62197 - DNA, 145 bp, Heterodera glycines
atgaaaatttggccgtataaaaccaccgtcgaatgcgtctcatgccattgcggccgccgcgtgcgcagccactcgcgggacggacatgtcggccatggcctcgaggagaacgggcacaatacgctcatggcatttcttttggatg

SEQ ID NO: 62198 - DNA, 1257 bp, Heterodera glycines
atgagtgccgttgttcagtcgaacaatgccttggctctaccgacgcgactgaaacaaccattgtctccaccaccgcaaattgctcaggtaaagcaaaagcattgttaaatccacgcgtttcccggctttctttaagccatccgcgagggcaaaccattttatatagttttacataaaaatgatgcatttttttctacaggacttcggaagtgtcgacggtcgccaactcgtcgcatttgtgcgcaaaacgaatgagtcgggcgaaaccgcggtgctgccggtcgacgcaatttcattccttcgccgtttggtcgctcagtttggcggagtgagtttgggttaaccactgcaattcaatggtttttgaaaattcgccctcaatttggattccatttcagcatcacttggaaccggacgatttgtttctgggcactctgcccacggcggacaaccgtgccatggcactcgagtgccttcagatggacgacgacgacacacacagccaacagacgaagcacagtcgtgccaaggaggtgaaggatgggttaggcggtggcattgaatttttctttatttttaggtgattgaccgtctcggtctcgtcgcaaattgtcgtcatgtttttgccggttccaacaaatgggttaaaactcgttttttcaactttcaattaactttggtgtttagaatttcggttcgtcactggttttgcatgcgttgatgtcagcagtcggtccaattgcgtttgccaccaatccgcaattgaacatgtgcttcgaaggggttaattttcaacaaatttttaaaaccgttttttcattttgtgtatttcaatgatttaaaggcctagccaataagactataagccctcatcggttagcctctctctggttacgcccattcactgatcgtgataacatttattttaccgatgtcaaataccggatccgaattttttggtgcacttcattcccccccgaaaatttttttttcaaacctagaaatttttcagaaaaaaatttcttagttaaaaaatttttttgaaaattttttcagcggttttttcgagattttatgatgaaccactatgtttttttcaaaaaaacgctgaaaatttttcataaaaatttttcttgaaatttttaggagattttttaatgaaaatttctaggttgaaaaaaaaatttttttcggagggggtggaggtaacgatctgctcccaaatttttattttaaaattggacagactccaataaa

SEQ ID NO: 62199 - DNA, 233 bp, Heterodera glycines
agttcccggatgagcctggttttttttgttcggataggttggccagatacgaacaggttgatctaacatatcagacttaaataaaaaatatttcacgatttaaggaataaaattataatttattacttttacttgatttattattacattcacatttttaagtccatgctaattgagacgggacatatgtacgcccaggcagcgcgcaacaactctgaggcggcgcgcaacaa

SEQ ID NO: 62200 - DNA, 184 bp, Heterodera glycines
atggccagaaagtttcaaaaggttggttttctaaacatttttagccataaattttttaaaacccaacgaaattttttgaaattttgcaggctaatagagaattcttagggctatcgaataatactaagaatgtttaatttggatgcttcttgaaaaagttatgatccattaaaatttcaaaaaa

SEQ ID NO: 62201 - DNA, 129 bp, Heterodera glycines
  unsure (1)..(129): unsure at all n locations
ggtgagaaacacaacgtcaaaatataccatcccgccagaatacacatcctnttggttgatcaaaacgccatttgatcaattgttgttgttgttaattttgttttttttgcaaaatttgaattataaaaa

SEQ ID NO: 62202 - DNA, 114 bp, Heterodera glycines
atggcaaaagtgccgcaaatttccatcgtttcgccagcaaaaatcaaacagatggaaaagggcgaccaacaaattggggaagaaggcaaaaaaggaacagaagcacaaattgag

SEQ ID NO: 62203 - DNA, 571 bp, Heterodera glycines
atgggtgcgcgaacaaaggaaaaacgtttggttggaaacgcacatttggcacgccaaacgctttcacatgacgtaaccccaaatgtttctcctaaaaactcttccccagaattttaaagggaactttggggctacaaattgccaatgaaaagctgtcagcgtggttttcgcccaaattaccgttgcgccgtccgttcggccgtgtaatttttacattaaattttaaaattccaaaagtgctttcagctctcttgaccaaagttacctatgctgtctccaatttgttgtgtccgcccaaatttcgtctgattgtaaaatgaaaattatttccgaagttttggcccaattttgcgaaaaagtaaaaattaatcctccactctaaaatttaaaatattcaatttaattttttcagaaggtttcgccgacttttgcccattttggcgccctttcgggtcatttggaagtgccggtgatgcttttttcgcccggcaaatacccacacggatttttggggcccggccgagccatgtggacggaggacgggtcagaattcgtcgattttttaacttga

SEQ ID NO: 62204 - DNA, 1255 bp, Heterodera glycines
atgcagcaattgatggcttatcaaatcgtcgtggtcaaccaggcatttccggcgggcaacgaaacgaaggacagatttaaccgtgccaaattattaaatggtgagcaattaaatcgaaataaatttattttccgctaatttttctccaatttaaaatttagtcggtttcgttgaaatgcttaaacaattttgcaaccattctgctcaatgttgggattgtgttgtgttccatgacgtcgattttgtgccagaaaatatcactaatatttaccaatgcgaccgaaacgcaccgaaacggctaatctcagccaccgacgaatgggacaattacaaatatgagtcggttttcgaatttaaaatattaaatattttaaaaagttgaattttatgcctggcgataaagcatggatgggcggcgtcgttgcgataacgccggatcacttttcgctggtcaatggcttttccaatgactattggggctggggagcggaggaccaaaatttgcgtgaaaggttttttgggtgccaatggaaattaattaattaaaaaaaaataaaaaatattttaattaattaaaataaaattgggaaaatattttaatgttaacatggattatacataaaaattcttgtaaaatatttttaattaatattatatttttggattttaattaatgcaattaatctatatataatttgttgcataatgcctaaatgcctattttatgcctatttcgcgagttatagcgcctttttcaggattttgaaaatttctatttcctattatagtgcatattcgggggtttttgtgcctattttgcgattttttctgcctttttaggtgcctatttcgctcgcagcactatttataacttccgcgcgtcacgaaaattttccattttaagatttaaattggcaaataaatcggtgcttttcgttcacggacccatcggccattacaaaagcattgagttggcccacaaagacaacgacacgacaaatgccgagatggactgcgcatgtcggcagcttttgatcaacaatttgtccaacacttggaaaatggatgggctatccagcttaaattatgcgcatctgagcacaacggatgagattttgtacacaaatataacggtgaatattaaaaaataataattaaaaaacagccattgcttaattgtttaggtggatttgttaatggacgaatcactgaaaaagggccatccatgcggaaagaaaattaacggcatttatgg

SEQ ID NO: 62205 - DNA, 80 bp, Heterodera glycines; identical to SEQ ID NO: 58324

SEQ ID NO: 62206 - DNA, 80 bp, Heterodera glycines; identical to SEQ ID NO: 51817

SEQ ID NO: 62207 - DNA, 195 bp, Heterodera glycines
atggtcgtcacgcctggcggcacttcggacaattactgctcctcggcagcggagttggagcagtacgcggaagacggcggcgatgactgtggcgatggggacaacgatggcggggacagtgttattgtgcatcgacggtgcagcagtgggctgagcactgaaattgtcaacgacgcaatggcaaatgccattcgg

SEQ ID NO: 62208 - DNA, 189 bp, Heterodera glycines
atgattgcagctgtgccatttggtgagtgttttgcccataattttcattattatttaaaatttttaacagatttgttacttgttgaaaccgacagtgatgaggtgtcaatttttaacttctaaattaaatttaaaaaagagatatcatagttcactatcaaataaggtccaaaattggtcacaaataaa

SEQ ID NO: 62209 - DNA, 2092 bp, Heterodera glycines
atggctgaggttggctttcgattaaagccagagaagtgccgatttgcacttggagaaatacgatatttgggacatttaatttcggaaaaaggtgtgcgaattgaccccaaggatttggagccgatacaaaaaatcaaaaaaccaaaaaatataactgaattacgatcgctgattggtgtcttatcatactttcgaaaatttatttacggattcgctgaaatactgcaacccatttatgaactaacaaaaaatgaaagtacgacggaatggggacaattacacgagcaagccctggaagagttaaaagaaagattgatgacagcgccagtgttagctccgccaagatttggacatccattcgtagttgaaactgacgccagcaccaaagcaatcgccggatgtcttctacagaagaacaaaaaggaggaaatccaccccatttgctactttagcagagttctaactaaacatgaaaaacgatattcagtagtggaattagaagcacttgccatttgcgcttcattaaagaatttccgcccatatttggagggagctggaaggtcaacggtggttacagacaattcagcattaacatcactattccgaagaaaggacttagaaggacgattaagcagatatcagctggcaattatggcattcgatgtagatattattcacagaccgggaaaacgaaatcaattctgtgactatttatctcgttatctgcacgacaaaactgagcaagaagttaattctttaaaattggaccagaaaataaaacgagaagaaatgatcacagcacaaaaacaggacaaagaatcacagagaatttgcgaattaataaaaaatgcggacgaaaaagggaattctgaggggacattcggaagatggaagctttttgagggccttttatgcattacagacaggggagagtggaaggtttatgtcccagagtgtatgcgacaacgattaatgagtgaatatcattctgaccctttccaaggaggacatttgggggagaaacgaacgaaagaaaaaattagacgaagtttattttgggaaggaatggacaaagatatccaaaaccaggtgaaaaactgtgacccatgccaaagaaggaaaataattggcgtcaataagagcgttgaaccaatttgcccaatagaaccggcagcgcgaccatttgaaagacttcatctcgacttaatgggacccctaagaatgacaaagggaggattccaatatgttcttatgattattgactcattttccaaattaatggctgctattccattgagagaacaaacagcaacaatcattaattcagcatttgtagataaattcttatgtctatttgggttaccaaaaattgttgtaaccgactgcggcacacaatttttgagtgcgacttttgagtcactcgctgaaaattggggatttaaacaccaaactacggtaccgtaccatcagtccgctaatggacaagtcgaacggtacaaccgaacattggtggacatgctcgttacaacaacagggggaaaagattgggcttccgcccttccaatgctttgttttgcgtataattcttcaattaattcgcaaattggacattcaccgttctatgtaatccatgggtttgacccaagaataccaagcgaagctatttttgacaaaaaagaggaacaattctcagacatggctatttacgtccaggaactgacaaaaagaatgggtgaagtaagaaaggtagtacaggaaaggctaaacaaatgcgcaggacgaatgattaatcagcaaaaatggacaaaagaaataaattggatggagggaatgttggtcctgaagacaaaaaatgacaaaaaacataaattggaggcgaattatgaaggaccttttcgcatcataaagatcgaaaaaccaaatttaattctgagggctttgaatccggatgatgagagttttgctgcacatatgaatcagtgtaaaccatattatactgaaccggaagaagcaacggaaaagggagtagggcctatcccgaagggaccacggaaaattggggaccgaaatatagaagaatcagatgaggaaa

SEQ ID NO: 62210 - DNA, 556 bp, Heterodera glycines
tatcgtttttcatgtttagttagaactctgctaaagtagcaaatggggtggatttcctcctttttgttcttctgtagaagacatccggcgattgctttggtgctggcgtcagtttcaactacgaatggatgtccaaatcttggcggagctaacactggcgctgtcatcaatctttcttttaactcttccagggcttgctcgtgtaattgtccccattccgtcgtactttcattttttgttagttcataaatgggttgcagtatttcagcgaatccgtaaataaattttcgaaagtatgataagacaccaatcagcgatcgtaattcagttatattttttggttttttgattttttgtatcggctccaaatccttggggtcaattcgcacacctttttccgaaattaaatgtcccaaatatcgtatttctccaagtgcaaatcggcacttctctggctttaatcgaaagccaacctcagccatcgttttcagaaatgtttcgatgtcttttaagtgttagtcctctgtcatcgaaccgataatacaatcatccaaat

SEQ ID NO: 62211 - DNA, 875 bp, Heterodera glycines
atgaccgaggaggaaaaggaagaaaaaacaaaaagagaagaagcgcaggaagcagcaagaaaagaacgagaggaagttggcaagaaggccaatcaaaagggaccgttaattggcgctgacgccaaaaaattattcatgacaaccgtcgagcagccctatgatcacggaagagtgattggacaagtctttgaccccagagcggaagtggaagcgccctgggatatgactaaagccctcgcaaatcgggaaaaggaggatgaaataagagtaaaaagaaaggatgaaagggaggaaggttggaggaatttcgttggcggggaaagaagaccggaaacgggaaatgaaagttggaaagaaaggcaaagaaatgagggaaatagtggggaaaggtggagagagagaccgagggttgtcgatgcttttgcgcggaacacaatttggtcagcggagaatgatgtatccacaaaccccggcattccgccggagggatttcggggaagaagaccgacgcctaatccctgttggaaccgtttccgcaagagaagatacatgagtccgattcgatacaatactgagcagcatggtgtggggacccaaacaccgacatggccgacaacagaaagttccgtcgaacaacttcgatcaatccgcttgatgttggatgtggcaattgcgggactggtgcaaagaaacggcaaaaaggagggtgaagaaacagaaaatggggaagacagcaagggaccaaaatgaaatcgccggcaagataggtccttctcagcacgaggtattgcgtcttattttatgtattaaagatatccaagtattgtaatgaaaattctttctgaaactatatttaaaaaatgaactttaactaa

SEQ ID NO: 62212 - DNA, 931 bp, Heterodera glycines
atgaaatcggagaaaaatgatgtggggcatagggggagtcagagtattttatttgttgcgctagtaaaatttcttatttgggtcggtggtcatatatgacaccaaaatctatgcattttaaatcaaatgattgattttcagcagaagcagccaagaaaacgcagcagtcccgcttcattgtcctaaagttctctcctaccgctgttcctggttcagtttcagcaccttgtcgtcctctgcaggtattttttccataaccatttaaaaactgcgctaaacgaggatgaaacccaactcgtaataggcaaactcatgctaaccctactcatattattttttgacaaaaaaagataatttttgtcaaaatcgaccaaattaaacattcttggtatcatttgatagacattaaagttctctctacctgcaaaatacaagaaacttttattggtttacaagtaaaatatgagcagagattttataaactcaaataatttcaaacataaattttgcactagagaatatttttataaacttgttagggatttacatggatcttattgtgagaatgcggggccgacaatttgcgacagggacggaggaagggacgacccgtgtgtgcacggcacttgccgagttggcacgacggtggacgactttgtgtgcgattgtcagtacggatacacaggtgggagaggcgaaataaaattcaaaatattttttaaaaattgtgcaaaatgccataatttgcatttttaaaatgtctttcccttctctctttgccccaccattcattaatcattcaatgagttaggggtgtaccgtaatctctttttttgcccactgttgtggcattcattcgcgcactttcacatttgcacagcggggcgaaatggcgaaagttatttatgaggggggagaaaaaagggaaaaa

SEQ ID NO: 62213 - DNA, 490 bp, Heterodera glycines
atgaagagaggaggaaagaggaggaggataaagggaggaaaggaagaaagtgagagaaaagggagacggaagaggagaggagaaagaaaagagggaaagggaggaaagaggaaggatgaggaagaggaaaagaggtggaggaggaggatgaagagaggagcaaagaggagtaggataaagggaggaaaggaagaaagtgagagaaaagggagacggaagaggagaggagaaagaaaagagggaaagggaggaaagaggaaggatgaggaagaggaaaagaggtggaggaggaggatgaagagaggagcaaagaggagtaggataaagggaggaaaggaagaaagtgagagaaaagggagacggaagaggagaggagaaagaaaagagggaaagggaggaaagaggaaggatgaggaagaggaaaagaggtggaggaggaggatgaagagaggaggaaagaggaggaggataaagggaggaaaggaagaaa

SEQ ID NO: 62214 - DNA, 1729 bp, Heterodera glycines
gttgtgcaagaagaagcaacaccggaagctttttgccgtggtgttcagctttcatcagaaatcgctgaatttttcgccaacgagttcaaagaaaggaaagacggaaacaatcagcgagaaatgagttccgacagagttggaaaaattttggtcatcaaaattgaaacatttggtgcaaaaacggaagcgatgattgatggtggagcgcaaatttcgttgattggtgcctcatttctgtatatgctgatcagagaaaaaggattgaatttgcaaaaaacaaattttgcacgcacaaatgaccgaattgccgacgtcaatgggaaggaactccgatgttttggcacactcacattgccaattctccgtaaaggctgtaaagaagtggccatacatttttacgtaaccagtgcaccgttcggattcgacatgcttttcggaacgaattcattgtcagcactcgggttctccctttacgatgagcccaataatgaaatgatccatttcgaaaaagcgacaaaaagcgaagacaccgtccgcattattttcaacacgaaattctaaccaaggactagcaaattcgtcgaaatggaggttgatgaaaaatggaatggccaggacgtgctaatatgtccagcgcctgctaaaaaagcagtcaaaattgatcagtcaattgggaaagttgaaaatgggaaaattgtcggccaaatttcaaatttgagttcaaatgtggagaaaattgacgggaacacagtgatcggaagagttgaagaggtggaatcgtcttatgattctggcaattcgtttttgccgacaaaagactttctaattggaaaaggtgaaaacgatatccaatttggagatgaaatgtcgctgaaagttggacacattccgaatgaagcgaagccgaactaatggcgttgttgaatgattttgttcaaattttcgccttttccgatgaggaattgagccaaacggacttggtgagccatcaaattgccacgggaaattcggcaccgatacgttcaaggatgcgacccgtcccctatgcctacagggaaaaggttgcggaaatgatccaaaactatcttggacgtggcatcatccgaccttcttcgtctccatgggcttcaccaattgtgattgtgccgaaaaaggatggcacactccgtttttgtgtggactacaggggactgaattcagtcactgtaaaggatgcatatcctttgccgaatattgacaacatattattggcactgggaggcaagaaaattttttcgaccctcgactttatttccggttattggcaaattaaaatgtcaccggaatcgatcgacaaaacggcttttgccacagaatttgggcttcatgaattcgtcgttttgccgtttggactttgcaacgccgttgcaacttttcaacgatttatgtcacagcttttcgaaggattaatcaacgattttgtcttcatctatattgatgatatcttaattgcctccgagtcgtgggaaaagcatcaagagcacttaaaaatagtgttcgaacgaattcgggaagcaggactaaaattaaaaatcagcaagtgccatttttcggcaaacgaactaccgtttcttgggcacattctcactactgaaggaataaaaatggatgtaaacaaagtacgtccgattatggaattgccaattccaacgtcaaagaaggcacttcaatcactgcttggatttttggc

SEQ ID NO: 62215 - DNA, 817 bp, Heterodera glycines
taattaaatccattccttcgggggaccgtgccgggtgccgcggggtaagcagtgctggttcgtttcatcacggcaccgaaccttttggctagtcagcaatcgttgcttaacttgccagatcggacgggtgcgcatgattccactgttccaagcaccccaccaaaagcaaaacgatataaccaaaatataaggaaaaattttttaaaaaattttttctccatcttcctttttgatactaaagcatcagagtgctaaattaagttgtaaataaaatttggtgcgctttagagcactttctgaaaaaaatatttatgaaacaaaaaaatcgattttttcaagtgtccgtttggggtactcaaacatttatggggagcaaaaatccaacgcagaattaaagtacaggctatagggaagctattcccgaaggattcggtctccccataaatctgggcgcatcggttcggggggactgccccgaaaacaaaaaaatcgattttttcaagtgtccgtttggggtactcaaacaattatggggagcaaaaatccaacgcagaattaaagtacaggctatagggaagctattcccgaaggattcggtctccccataaatctgggcgcatcggttcggggggactgccccgaaaacaaaaaaatcgattttttcaagtgtccgtttggggtactcaaacaattatggggagcaaaaatccaacgcagaattaaagtacaggctatagggaagctattcccgaaggattcggtctccccataaatctgggcgcatcggttcggggggactgccccgaaaacaaaaaaa

SEQ ID NO: 62216 - DNA, 48 bp, Heterodera glycines
atggcgacggttctttggcgccatcgccgagtgaacttcccaagaatt

SEQ ID NO: 62217 - DNA, 191 bp, Heterodera glycines
  unsure (1)..(191): unsure at all n locations
atgcacattctcaagtccctcactgtcatcattgtgttcgtcatgttcggctggactctgaacggactgagcaccttttatgtgccacttttgaagctgtcgccggagaacagcatcagttttgccgctgggcttgttcagctgactctcgtcgcatcggccagcaatacgcccgttctctatgtngtcag

SEQ ID NO: 62218 - DNA, 828 bp, Heterodera glycines
atgaagaatattctatcccagtggggaattgaacccaagcgaaaaataatgaaaggcaaaaggtttaaccattacaccacatatgcatggttgctaaacgaaataaaatttatttttttctcaaaaatttctccttcttcaccaatttcctatttttttctcgaccagacccccattcttaccagtgcaaatttttaccggcggtaccggtactagacaaaccggtaacggtactttcatttttgaaaaaaccggtaccgataccggtaccaaaaaaaccggtaattaccggccagtaccggtaccggtaccggtaccgagcaactctaaaaaaaacaattgatcaaaaaaaaaattgtgtgcttataggtcaaaaattgagcgcaatgtcaaacggtacaaaattgtgctgaatctgatcagctttacctacggactcatcaacaactccatcgtctacattggcattttgaacgaatttcaaaacaagttgcatttaaagttttaattgctctccaataatttaagaaatcatccaaattttgttggccattttattaaattgactagatttattggtaattgattggtaaatggcctcataaattgcaattcattgattgatttataattcctttctgctgccatcagattggtgttgtgcttcttgggagacaatcggtcgacattctccaagctgtacagctttcgtgtcaacgtctccatggaaatctgcacagtgtgtttttattgcctaatttgggtccaaatggccagagggcgatcaaaaaagtcaaaagtaagaagggcaaacgacaatctaataaa

SEQ ID NO: 62219 - DNA, 603 bp, Heterodera glycines
  unsure (1)..(603): unsure at all n locations
atgtgtcctcgtccgtggggttggccatcagatgagtgtacgcggcacggacagccgaacggaggtcgcccaactgaaaaacgcacaaagagtgagttgtgattgatcagagaggagaaatctgatcaaattcggagaacacttttgagggaaaaagtgatcaaaccagcaaaaagcatgatccatcagtgatcggacaaaattgccggaaaagctaccaatttttacaaaataatgtgccgcggcaaaaaaaaagaaattttttaaattagattttggcaaaaaaaatctaccaattcaaggattttgattaaattttagcgctcccttaaatggacttttttgaaaaaaagagaaaaacaaaaattggacaaaaaaaaatgttaaaaaagaatacatttaaaaacttctaagtttcatgaaaatttagtttttatgaaatttatgcgcaacaaaaaaatgtgcatcttanattttgaatttttttttttgcataatttatggactatttttanagttaattntcttagcactaattatcaggtcagggtaaagaaaatccaagtttatgatcaaaatttaacatttttggcaaaaaataaa

SEQ ID NO: 62220 - DNA, 1009 bp, Heterodera glycines
  unsure (1)..(1009): unsure at all n locations
atgggacagacaaaacgtctagagtcagtgggacggaagcgaatggggtaagagggaggggcaggggaagaggagggggcagggggaggggagggaagannncagcagtggaaaggtagggaactcggtgacagaaagcaacggaagacgggactggcatttacttatcagagtgatgctaggcaattaataacagttaattgtctgtctaattgcttttcagcagtcaaacggtgtcacaaattgcagcaccttcgaaacaacgactgagagaaaagtacactttaatgttaaaacgatagttgaatatttctgctcgtccgctatccctaactgattcagtgcctttggctctgtttcttcttatggcgggtacggagtgccgtcgccaattggcacgggcgaagccgaagagcaagcgcaagcggacggagtcaccgcattcggaccgggatttttatctaatcaattgggcgaaggaccactccgagttgggcgcgacccaccgggtgagaagagagctagtaagaagcaatttgggttagcactggactgatcagggagaacggaatcaccggacgaatcgaatccgacggagccatcggtcggtggactgaagggacagccgcaggcggcgatgagtgccgagttcgaaacggaggacgagctaatcagcaaaacgatagtggacaacatgccaacgcctgggaggacattcaccgacggcgcaccaatggcagagaatgggaaaatgaaagacacggaaagagagacagcgaaaacaacggagagcggacagaagaaaggtcagcagagaaaccgatcaaagccaagcaaaaactgatcaactgacagtagattattcggattacgagacggacgtgacagtgccgcccaatctgacggatttgctggccaaccttcagccggcggatataagtgcgcgaaacctgcaaaggatgttccgagactcagtgaccgaccgaaggacacttttgcatggctttga

SEQ ID NO: 62221 - DNA, 279 bp, Heterodera glycines
atgtttgcattttttttggcttaccacaacttcatcgaacctggtactttctattctttttcaaatcgccccaaattttttttacagccacgaggccgcgaagcggccgagtgaggaccttgggcgcaggaaaattattaaggaggagggttcattatttatttatttttgcaaaattaattcataaatttttttcagaaactgttctgaaacgcaccaaaatttatttacgagtcgaataaggcactctgactcttatattatcaaaaagggagatga

SEQ ID NO: 62222 - DNA, 349 bp, Heterodera glycines
atggatcggattgatctttcgcaatggctgcagcaaaagtgtgcttccgatgcggcttctgttcatgttgtgtcccgactgtgctcaaaccgtgcaaaagtggccgagttcaccgctttcgcatttcgcgagtcgctaaaaatgtcgcagcaattgcggggccatttttgcaatttgaaaatgccaaccgaagagaagggacgttttgaagaaattaatgagtcgaagcaaattgaattcatcggaggaatgagcgaaattgaaattgcaaaaaacaaattgctcattttggtcggtggcctccatttcattcgcttcgaagaagagtttcccgaagtgttgagaatag

SEQ ID NO: 62223 - DNA, 1763 bp, Heterodera glycines
atgcaggccgatgtaattactttttgtcgttggcttcaccgacaattggttggtgaacgaaacatgcaaattctatgggatcgaatgaacaaattgtttgatttggaacacgacgcactgtttgtctgcttggaggagcaaaattgggacgcgatggaaacaattttaaaattgggcagaattttcacgaagacggaacaatttatggacgacgaaatattgggcaaaaaactaggacaaagttcaaattatgaacaggaaatgttgaagagcaaatgggaaaaagcaattggccaaaaaggtgacgaaaaaggaggggaaaaggcgacgaaaatggagggatggaacaaatttttgaacaaaattcaccaagcggaaatctttggactgatgggacgtcatgagcacataatggacaaattcagagaatgttcgtttcaaaactgaatgaaagaattagagaacggatgggatcgggattccgtgggattaaattcgggatccgacctcgggatccatcccgaatctttttttaaattcatcggcaatgatcgggatcgtgatttcatcgggatctcagagtcgggatccctcccgacccaagttgtccggtctctagaaagtttttcgttttacaccgctttccacaaaataagctaaaaaacaaaagatatcacaattaatttttgcagaaaaaaaataattgtcttaacaattcctttcttttagtttacacagaagaaatcttttcgagattttcgcttttcgtaaagatttctgaatttattaacgaatgggaaacactttatggaatggatgaacataaaaagaatgcaaaaagaaataaaactgggaaaattggaaaaattggaaaaacggaaaaaagcgaatcggaaaaggaaattgaggaggaaaaaatcgcaaaatcaaacaattcaaagggacgacaaaaggaaaaagtaatgagaaatataggacaatagaaaaattttaatataaaattattaaagtacataaaatgtaaaaataataaatatttatttaagaatcaaaattttggctgccccgacagaaaaacaccaagcgaattgtctccctttaatgaagaaaatttcattctgaaaggtatacaactttttgtttaaagttaaaatagcatttattttattttcgattttcattaatttgtcattttaacttaagcagatcaaagtttggcgtcggatttcattgaatttttccaagtggaaaacgacgacgcccaaattattatgaacaaaattggacaatgcttttccattgaattgagcacaattttatgggctttaaccaattttctacagcaaatggaaaaggaaatggaaaaagggttcacaaatcaaagcaaaagtgtccaaatttgtgtggcgtaccatctgatagaatacacagtgaaaagtgaggccaaaacattggaccaatggcggcaatctttgctctacgaagaatttatcatagacgaggcatcttaaaaatattgaaaaatataattgtttaagatgggaattgataactaggctgggaatttaagtcgtgagcttggaagtttgaaaagcagattttcttattcaatttaagttgttaaatgacttgaaattttgcagataaatactttaatataagggccaggatgacattccgaggccccaaaaattttcggaaatcggaattccgagggtcaaaaatttttaccgattttgagcaaatttctcaagaaaaataaa

SEQ ID NO: 62224 - DNA, 1351 bp, Heterodera glycines
atgcaatgctttttgccatggttatgcaaatttattataaccgtttaataattttaattgatttaaattgaaattgagctaaactaattcttatattcgaattcttttttaactttttaattccaaaaaaatcattcattttcaaaaatttatgggtaaaaaattttgacttaagacattgaaattttgtgatcaaaactttttataattttgtaaaaaaatctaatattctgttagacaacacttaaagctattgaatgataccataaattttaatttggtttaaactgagccaagttatgtgttacattttttcataccccttgactttattaagactcataattagcaagagaaatgcaaaaacattgaatagaatagctttatgagcattttcttaaaaaaacaaaataattacacctaaaaatacttatcttcgaggcttggcacttaaatctgtttatcaaaaaatacataatatcaattaatatattttaaagtgacaatttagagaaagaagattcaattatcactgattacaaaaagtatctgagcaaaccaataatacagggaatggtggtcgtccatgtcgagaaacttttattttatgccgaagatgacagccataaaatttttgaaattcaagcagtgaattggcactttcaagcattggctatggaaattgtggaagaagcacttccaaatttaaacattgcgaaattggatgaagaacacaaaaaaattgtagccaaaaatggcaaaatgaaaggcatagacggcacgaaaaaggcactgtgctatcattacaattttgtggaagaaattgttgcgaatggatacaaattggcgaaggacaaaactgtgtggaaagattttgtggagaaaaaacgcattggacaattggtcaaggcaaggcatttaaaagcttaagacaaattccacgtttataaaagatacataaataatcctcctaattaataattatatttttttaaattattattattattattttgtttttcattttatttgttaggtcaattcatttgatacttttgaagtaccgacaataaaatggttggacataatttgtaattcaaaggacgaatacgaaaaaactgttgaagaattgagcagttctgagcaaaaattaagcataatccatgccgaaaatttggcaagggccatccgaaaatcggaacaatttcggcactttctctgcagcaaagacatggatgatttgcagataattgtaaagccaagaattgaaaaattggtgggcactttggaattgatgcgacttgaggagcaattcccggaacacttgcgaattggtatataaaaaaataaa

SEQ ID NO: 62225 - DNA, 967 bp, Heterodera glycines
atgcaaaatttacttccagcagaagctgatgatggacgtgacaacaatccgatcagagacatacgccgtagagttcatttcagcgatcgctcccaaagggttctggacgactcggaccatttgctgaaatccatccgaactcgccgagcggcacctctcgccacttccatgtccatgtccacgctacccacctcgttggagcgcaacggtgatcaaagtctgcaggaccatgcgcggaaaacactgatcagagcgcagcgatcggtcagccccgaagagccactgctgagcgcatcaacgtaagcaatttacagcattaaaatataaaataaaaggtgaaaaaaacaaatgaaaagtaagcgaaataatgaaaaatataattaatctattaaagtattaccggaaaccggggctaaaatcccgagtttgtaggaatcacggtcctgggtatcattttagggcatgattcgggatttgtctccaaaaatgaaaattccagcaaaattttctgaaaatgacgaactaatagagtaccaaataattaatctcttctagtattttccaaagcattgaaaatgccgataaatgtcactgaaaaaaattctaaaactggtttgaattgagaaataacttttgggtgcggtggtgaaaagccggggccgttgtcccgagaaaattgcggcgagatccccgaccccgcccgggctattggttttagaaggcggttatatagcagtaaattttatctttcattaatttttagtagattattttttactcaggagccgttatctgcagcacaccccgaaatttccgagaatcgattttgacgattggattgaggaggaaacgcaagcgaaaaagccggcatggaaagtgctccaagagaatgtcaaatcgtcctacaacaaagtgcgaaatgttgttgctcataaaactatttcattaattttatgaaaaaataata

SEQ ID NO: 62226 - DNA, 269 bp, Heterodera glycines
atgcagtccggcggagattcaccggataatgcggttctgatgattgcatcaaaaagtaccaaaagcttagcgaccagcacaaaattatctatgcaaaatacgaacaggaatataatgaaaatcaagagaaggtgacaattaaagcattttttctatatattacaattaatttttattttaaattaaattaaattttttaacaatttgtaggagacaattatcgaagagaacaacgatcaactccaaacatcggcaacgaattggcataa

SEQ ID NO: 62227 - DNA, 464 bp, Heterodera glycines
cttggttatgtgatcggttcttccgccacttcgttggccaaaagtgcgcttggctccgtcgactgtcccttctgttggcagtggggaattcgcgtcactccgttgctcggcttcttctgcataatcactttgctgatttttgtcaaagaaccggtcaattaattaattaattaaatggaaaacaattcaaagaaagcaattaaaatattaattaattaaatcgcaggtgaggggacaatccgaacaaagtgtggcacaactgatgccgacaaattacgaaacgtattgaaaaaggaaaatttaaaaaagagaaaaaaaatttaaaaacagcggaacgatcagtccaagttcaaggcgaacagtggcatcagcagaagcaccgaatgagaacatttggaaggagtattaccatcggatacgcactcacactaaaagttattgcgcagacattggacatttaattg

SEQ ID NO: 62228 - DNA, 339 bp, Heterodera glycines
atgaattattattttttggcggatttacgaaacgccctggcggatttacgaaacgccctggcggatttacgaaacgccctggcggatttacgaaacgccctggcggatttacgaaacgccctggcggatttacgaaacgccctggcggatttacgaaacgcccatagtggcggatttacgaaacgcccacgttggcggatttacgaaacgccaatagtggcggaatttacgaaacgacctagcaccatttcgaacggacaaacgaaatgcgttttcctccttctgagcgaagccgttgaacggtcggtgattaaaatcaatatttattcgtgtgaataa

SEQ ID NO: 62229 - DNA, 1028 bp, Heterodera glycines
gccaccaatttggctgccgcaactgcgttggcaacgtccgcagcggctgccgccgccgccgcttcgtcgaccagcagcagttgtgccaacaacagcaacagcaattcgactgcccaacaacagcaacagcagcacagccacagcatgaaaagcattgagcaacaaatgatgttgctgcagcaaacaatggcactgggcgggttgggcaattccagcggagggacagcgagcagtatgatgaaccatccgtacgcatcatttctctaccagcagaacccggccgagctgttcgagtgtgttttatcgttgtctttgttgaacgaatgcgggcgtattattacaaaaaaaaaattttcaataatttttcttaatgtgacgatgtctgtcggcacttttaaaaatttcggaaaaacgcctatacgcaccaccgcttttcaaaaaattgtgccaactttatccatttgtatccaaaacacttgtgcctttcagcattaaaaatggtcagcagcagtcattgtttggcactgtcgctagtggcggtggcggcaccagcaacaccaccaactccttgtccgcttcggcactgctttcatccgtaacacaacaacagcagcacaaccaacagcaacaccaggcttcctcctccgctatggtggagcagcaggcgatcgccgcgttggctgccgctgcggcggccgccggctttccgtctattggctccatggtgccaagcgctgctgcgacgactggcggcggcggcattgcaaaaagcggcgccagcgcttccgctgcggacatgaacgcgttgtcgtcggccgctgccgcactcaactcggccgacctttatttggccgcaatggcctcctcattccaatcactcataggtggcggcagcggcggtaacgcggcggcggcggctgccgcttgtgccaatccgtcggcaatggccaacaacattttcatgcccaaccaacaacagcatgtgcgaaattcagctgctgctatggccacaaatccggcgtcagcag

SEQ ID NO: 62230 - DNA, 76 bp, Heterodera glycines; identical to SEQ ID NO: 51235

SEQ ID NO: 62231 - DNA, 996 bp, Heterodera glycines
tacgtgttcctgttttgtttggcacattttatgcacggagttggcgcaactccactgtacaccattggcgtgtcctacattgacgaaaatgtgtctattattaaaattttcaaatatctctccaaactcaaatggttatttctgaataaatggagcaaaaaattagaaaagatcaaaaaaatatattaaaaatttttaggttggaccactgctctcttcactgtacatcggcgtgttctatgcatttgcaatttttggaccagccattggattttttgcctcaagcaaattccttctctggcacaccgattttctcgtcactggccaaaaattacaaaaattgtatggaaagcgagcgcatttttctggctgcaatttttttttacaaaatttatattttatacagaatcatcgacctagacgagacagacccaaaatgggtcggcgcttggtaccttggttttctgttggcctccattcttggcttaatggctgtttttccaacactcatttttccaaaattactgccggaatcattgaaatggcacaggttggttgtcctaaaacaaatttatgattcatttatagaatttttaaggtttttcaagaaaattcattctgattactggacattccagaatatttaatattttttgttcatcttttttccccctacagaactcgtcttcaagaagagacgttggggcagaaaaaacgttcacccgaatgttgtggtattccgccgtcgtccggcaatcgaacagcaatcgtttttggcgctgggagcgccaattttgatggtacctatttcattcaatttatctccaaaatttcttctggctatggtgcctgacttcgattaaatttcaaaaaaaaatttagaaatttttatttcgctccttttccgttcacagaggatggcaatgagaaggcgccaatggtacaatttcagtcctcagcactaaagcctcgttcgggccccatttggtaccaact

SEQ ID NO: 62232 - DNA, 4697 bp, Heterodera glycines
atgtctaattttaatcagaatgactttgccattacatcggtgcaccaaatgcgcaaccgacctcggaatacaattggtgaaatagcggaagtgcgctttgctccccttgaagaagtggaacggcccgatcgtgtgctcgagcgtcttgtacagcggctgtttgacagagtgcttgatggacgtccagcaccgatgttaattggtcttcaactgcatccacctacctttgagaatccatttacgattccacttcgtccacccgagcaaaacaatccggctgctatcgctgatctgatccaaagactcaatgatcaatctgctgccggaattgatctgactggcgggacaacagtcacaaaagtgcttgcagtttggccaatgcaatcggaccacagtgaatcagggagagcaggttgaaatttatttttattttcttttcatattttcttttgctgtataggcgcatgcagccttgaggaagagcaccgattggtgaacactgttcgctcgttgatccgcattaagaatccgaatgatcgactctgtttggccagagctgtgttgttaggtcttcacgattggcgttcacggtcaccaggcggaggcggaccaacagcattcaaaagtttcgcaaatcgccagcacacccacgggcctgaggcacgtaacttattgagacgtgccgcaattccccgcaacaaacacatgtacacaattgatgacgtccaaaaagtacaagattggattgatcaacgatacgggccagcagaaattcgaattgcagtttttgagaaggaacgtgagtaccgaattgtgttcaaggcagcatccggcgaggcagccaagttcaacttgtgtcttttgttcgaaaatcaacacttcaactacattggtcgaattgagcaactgtttcgtgtgcaaggatattgtattgattgtgaacgtcgcgtgacacgctggtaccacccgcaggaatgcaaagtcgtctgccgtctgtgtttacgttttggcgcagggtatccatgtaaacaacaacaacaacagcaatcccgagcagatgggtcaactggcaatcgtctttgccgtgattgtcaattcgtttttccaaatgacgactgcttcgcctatcatctgagcaatcaggcacccgcaagcatgtataatcagggaggacgcacttttcgcccaatatgtgaatggagaagagcatgccgacaatgtggagccataacctatgcgaattatccacataaatgtccagcccaaattggccaaacggaatgggtgcgctgtgcacgatgctctggaccccatcaaagtggagacccttgttttattcagcctctcaaagatgaaccaatgaggaggagaaggagaagaagagggcaacaacaacaacaacaaaataataataacgatgacgaagacgatgatgatgataatgatggtaacgaggagggagacgacgatcacggtcatgatgctgataatgaggaagaagaagaagttggaacaaatcggtcggtcagactttgctttttcgacgctgaaacgtcccaagatttaccacttcaactgcgtacaaaggttgtacagaaacatgttccgatgctcattattgccgaaattatctgcgaagcgtgtataaatgaaggaatttcggttcattctggtgttggacaatacgcaaatgggtgtgtgtgtggtcctcctgcgggaccaagggggcgtcgctggtgttctcctccgtttctgaatgcacctggggatgacaatgctctaccagccaatgtccactacaacccacgaagactgtttttccatagttttgacgacgctaccaacaatgacccggtggacgattttatcaactttctcaccggaagtggtccacatggtgtgaaaacaatttgtttatcacacaatggcggaaaatacgacattcatttaatactggaggcacttcaccggcgcaatttgccaccaaagcgtatttgcacaacgggactaaaaattttttcgatgactttgaaagggaaccatcaacgacacgtgatctttaaagactcgctgaactactttttctgtgaattggatgcactgccacgcacatttggattgaacgctgaagttgcaacagcaaaacctttctttccttatctgttcattcggcgtgaaaatttacaccaaagattgcatggtttaccgggcaaagaattttatcagcctgatcacatgaaagcgtcaaagagagattcctttatgagttggtgggaggtcgagaaccgttctgcacgcttccaattgcgtgaacaactcatcctgtactgtatgaatgatgtggcaattctgcgcgaaagtgtgcttcaatttcgccaaatcattgctgaaaatacgagaggactggacccgtttaaaatctcatccacggcagctggtcttgcgttggccaccctccgccgctgctttcttccaatgaacaagcttgttaatgcgccagaaggtggctacctaagggggcggcgagcatctgctgaatcggcacgatacattcgttattatgaaatgacacatccgggagtacatgttcggtctgcccaatggtcaattggtgaggctaacgtcgaagacactggctaccgccttgatggattagtcacacgtgaaccccctcaacgcaaccttgccattgaatacatgggttgcttttatcatggtaaaaaaaaaaggtcgcccttttcaaccgaacaaaaaaaaaatgcttaaaggttgccccacgtgttacgctaacgacagacaacaaaaattggcaggtggaaggacagccgaagacctgtatgaacgaaccaagaggcggctatttgaactgcagaatcagcatggctttgagctggaagttgtctggggatgcgaaatgaagcagcgtctgcgtgctgatccagaatttcgccgggtgtacaatgactcattcgttccaagaccgcttgatccaagagaggatgcactacgaggtggacgcactgaaccgtttatccttcagtacacttgcagtccagacgaagagataattctcattgacattgtaaaaaaagttaggagaaacaaaaaatattttttcattgttaaaggtgagcttatatccatatgtgatgaaggcattctcgtttccggttggtaacccacgcattctcacgcgagagacacttctatgcgcaccgaccaccgcttccctggtgttctgtcgacgcgaacacattcaaagggctgttgtttgttcgtgttctgcccccagatcccgctgtacacccgctaaaagttcctttgcttccctatcgaactaccgacgggcgcctaacttttccgctttgtgcacgctgtgctgacaaccgacaacaacgggcatgcaaacacattgatgcgtcaagggcatgggtttccgcgtaattttgtgaaattaatccatgtcaatttacttttttttgtcccggtgtttagatacacccatgttgaattgaacaaagcactggagcttggctataaagttattgatttatttgaggtaaaaataacgtatcgtttattagactaaactttaaaaaaaaaggtatggcattatgaagaatgggataaccaactgtttcgtgactatatgaacacctttgtgggtcttaaagttcaagcaagcggttggccatccggttgtgataccgatgaacagcgcagagcctatgtagatgaatttaggcgggttgaaggcattcagttggaccacaacaaaatttcaaacaaccctggacttcggatggttgcggtaaaaaaaaaatacagaattacaattttttaaactttaaaaaaaaaaaaaaaacacacacagaaaattcttgcaaactccctctggggaaaacttgcgcaacgagtcggtggaacggaagttcgttatacccgaactccaagggagtatcatgctctggtggagaatggctccgtgtcggggcttaaccctaatttttattcacaattttatcgttttccaaaaaatattaacaaaaatgcaataaaaaccaaaaatacaaccctaagaaatgaaaaacatcggcttttcctacgcctcgttaaaaagtggtcgactggcatggcaaaaaatcttattctatcaataataaaataataatgtgtaaaatatatttatggattttattgcctttaaaatatttcatttaaaacaattaaatttatttattaatataattttctgtactgaaatgaccccatccctctgaagtctctcactgatatttttgtcacttcggctcaccacatgtgcttacaaattagatcggtctgatcggtcactgatcactcccccccccatttcagccttacttctcttttctgtttttgcttgctcatctcctctccatggtcgtccccgctgcaaatcctctcctttacggtaatttcttttctttttttttgccatttttcatccgcattttttagcttggatgaacgcctcttttcgtgatgcctttttgcgcgtattgcccttccgaaaatggcacaaaaatgccatttcaatgaaacgaaaaacgaccgaagggaaagccagagaaagagacaaaggagaaaagagaggcgaggacaaaacgaaaggacagacggagaaaaaacgccgcggggggacggaaaagcggtaa

SEQ ID NO: 62233 - DNA, 190 bp, Heterodera glycines
gaacaaaggcggaaaacgggcagaaagaacggatggacggattgagaagagaagtggcgtcggaaaaagggaccgatcggaggaaaatttggcaaagtgatcactgatcagtcagccattctttggacgatgtgacaaaatgtagacagacacaagtggtgattaagtgactaatcatatttacccgtcg

SEQ ID NO: 62234 - DNA, 530 bp, Heterodera glycines
atgacacatccgggagtacatgttcggtctgcccaatggtcaattggtgaggctaacgtcgaagacactggctaccgccttgatggattagtcacacgtgaaccccctcaacgcaaccttgccattgaatacatgggttgcttttatcatggtaaaaaaaaaggtcgcccttttcaaccgaacaaaaaaaaatgcttaaaggttgccccacgtgttacgctaacgacagacaacaaaaattggcaggtggaaggacagccgaagacctgtatgaacgaaccaagaggcggctatttgaactgcagaatcagcatggctttgagctggaagttgtctggggatgcgaaatgaagcagcgtctgcgtgctgatccagaatttcgacgggtgtacaatgactcattcgttccaagaccgcttgatccaagagaggatgcactacgaggtggacgcactgaaccgtttatccttcagtacacttgcagtccagacgaagagataattctcattgacattgtaaaaaaaagttag

SEQ ID NO: 62235 - DNA, 879 bp, Heterodera glycines
atggacgcgattcttgcgaccgattggctccacaatgcgtacccggaacaaaagatgacaacaggaaatgaagaagaagataaagcaacacaggtatttttttttatgaaaaaagtttataaataaaactatattagtaaaaaaaaaaaataaattttcaggaaggacaaatgagttggcttaaaatcatcgaggaggaggaggagcgggcgagggaattgcaaaatgatcaaatggaactggaacaagtgaaaggtttatttagttatttttagacattaaaaacagttttttaaatttagacaacattgagttgccaaagcacccgcaaccacaaaccaagtgcagttgcaatgaaaagcagaagagtgtgccgttgattgattttctctgcaaacactacaaatgttcaatgaatgagcttcacgttctgctgcagacgctgagcaaacgtagagaaatttcggaaatgttgcgttccaatcttcatttacgcaccaatcatctgcgccctgcctggaaaaacattcgcgtccattgcaacgaactgacaattcatccagctcaaactgcatatgctatgcgcggttatcttggcattacggtttgtgtttgatttatttaaatttaaccaatctatgtgtacaatacactttaggtgcgcgtctactactatgtaaagcatggtataaagctggcttacccccaactgccatgtgttcttcaatttggtggtggtgatcatagctctctgttcccgcttgagtgtcttagtgttattgttgttaaagaaccatgatttagtgatgatgatgatgatgcatgatgaacgggtgtttttttaattcaaatattgtcgttttttaatgtcagattaaa

SEQ ID NO: 62236 - DNA, 649 bp, Heterodera glycines
ctccgaggagttggtcaaggaagagcaccgaacgcacgtttcaccacaacacatcagcctaatggaagaacggtgggatggattttcaatgtcaaaaatgccctattaggcaccgacgaaaattttccatggacaaacatagaaagctttttatttctaaactcggtttttaattgccttattgttagttttttgaattatttatttagccagatctttaatttatgtagaggcggcgactccatcacaatttcatttttttgctccgacccaatttccaaaagttggcatcggggaaccctgtttcgatgctttttcaaaaaattcttttcattactattttaatttatcgtatcatttcatctaaaacaaacaactttctactgtcattaggcgtcgttgggaaaatctgaatttatcggaacggggcattttctcataaatcgaaaaacggtgggcctaaccgtcgatatcgctagtacttttctttcacaccaaacttactattaacataagtatgccttattttgcatgtattctattttaattacaggaaaaaacgctccgaagaatttcggttagcatcaaaaaattctcattcgcggaaaaaacaaaaccgacgttcgggcttcagcatttaaacgggccg

SEQ ID NO: 62237 - DNA, 710 bp, Heterodera glycines
  unsure (1)..(710): unsure at all n locations
atgntgcccgaagtgtttcgtcaattcacatttcatttgggtaacaaaaacaatttatctgcatacattacggtcgatggtaaaaaaatatttaaaattataaaattattatataatttaaaattatttttaaatttaattttaaaatttatttatattttagaagaagtgattgaagttgaagatgcaaaggttgagcagtataagaataagtcattaagtggtgccaaattgagagattttgtgggcttttgggtgctcggcttggacatgatcccatgggatgaacaaacgatgagacttttcgtcatccggcactgcaactgctcattggaagcatgggtaagaaaaaatgccaaaatcaaaaattgaaatgccaaaatcacttttttaaaataaagtttttgcgaccatccgattcggagccaactgatcccaaaaaggcatcgatgggcacgggacgctttgaggaccggtacggccaacatttaaataatcttaatcctgcttgtgtcaaatttgaattgcgcaactttgtgtgtcttaatgattgcttacggggaccggtaaattggacaccagaaaattggacaccaagcggaaaaatggacaccgccggaattttggacatcaaaggaaaattggacaccggaaaagtggacaccaaattctttttaaaaaatgaaccaaggaattagtttaaaaataaa

SEQ ID NO: 62238 - DNA, 1829 bp, Heterodera glycines
atggtgcaagaaggtgctggaacatcatcatcgtcatcaaaaacgagtaaagactatgttcgaaagttggacaacaccatcgaacatgtgccacgcttccaatacaccaaagtcaagtcgcggttcagcattgaagacgtgccagccaatcccgagggactcctcgccggaatcttccaatacagtattgacgcagcggtggcggacagtcatgagcgtggggttcggccaacacatctcggctgtctcatcagcagcccattgctcactggcggggacattccaatccccatccggcaaatcacggacaacacggtcaacaccatcttgaaccaattcctcaaagtggcccaaagcaagaaacaacagaacgttacgctttggggagagccattcaccgttattgttacaacagttgatcgccgcggactccctaccaaaagatcacttaaaggtggcgcacgacgggctctggcacctgttcaccatcgggtcaatgatcggagtttgataaaggtccgcatattcaaaaaaatcaattctgatgaggaaggtttaagataaacaaccctgatgaccgtaactactgcctcttttatgctttgcaagcaacgatggtggcaaaaacccgaggctgggccagttggaagctttacgactatacgcacagcaggaggggacaacagggatgtttgcagcgagattctctacaactgatgcagcaaattggcgtacggcttgggctcaatggttatgatgctgaaatttgtgtgccgcgggtggtggatcattggaacaacacgcagcaacagcatcgttttgcagtatttatttttggatcaactggtcagtacaagccactgtacaaatacatcaacaacaataactacgacacacccctggtattgtacctgaacaatggtcattttgacggcgtaaagaaagagtatggattgtttggtcaacactactgccttgaatgtgagaagccataccaacgaccagcaacacacctcaattcctgcaaagcacgctgtatgctgtgctcgcgagtcggtccagcattcccatgcgctcctcgtgatggctttttccatcaatgtgcgggctgcaacaaaaagtttcgcaacaacgaatgccatcagcaccatttgacatccaatttttgcgcccagtcaaaacagtgtaaagagtgcggggtatttgggacacacgagtgcatcatcgaaatgaacgaaaggtaagaagcgtaaataaatttaaaaataccattcgttggcttcagggtcacaaatgtcacgaaacgtattgtcaattgtgcaacacgtaccacaatccagagcggggttgcttcatccaaccaattgaaccgaaggaacatgacccctaccgcattgtggcctttgacttggagacgatgcagcaccaaccagtcaatccacgtgagcctgagaagaaggaacatcaacccaacttcatcgctgcgagagttgcgtgtccagactgtattgagagcggaaagtggcggagagcaacggcaggctgccaaatatgcggactacatcgaaccgtcgctttttgtcagcgccgttttatggacactcaggtggacaagcaagtagtggctgacaacccgctggaggcatttgtggattggcttgtctaccaactgccaaaaaagtacgacacctatgcctactctcactttggcggccgcttcgacatggtgctcgtcttccgcgagctgttccggatcgggttcaaccccgagatgctgagacgggtacaatgctatttttctaaatttggttaatttaaaatttagggta

SEQ ID NO: 62239 - DNA, 111 bp, Heterodera glycines
ggccgtcgatcttggacaccatcccttgcgcatgttcggttattttgccatttaaccggttcaccacaaatttatagtaaaaaggataaacattaaattggaaaccaaaaa

SEQ ID NO: 62240 - DNA, 391 bp, Heterodera glycines
atggccataaaatatggaccaaaaatcgcaaaatatggacataaaatggcaaaaatcgcgaaatatggacataaatggcaaaaatgccaaaatatggacataaatttttcaaaattgagtgcaaaatttcttcaaatttattggttgaaattgcatatgagatacatttccaaattttttgactcggtaaggcgctttgacaaagacggctttcgttttgcaattagtcggtcaacattcggaaattggtctcgaattttttcggcaattacgtgcaatcattttaaaagaaaaaaaacataaaagctaaaatttattaattttttagcgcaaaatcaacaacaaaagcgaaattttcgcttttttgcttatttttgacataatttattaa

SEQ ID NO: 62241 - DNA, 154 bp, Heterodera glycines
tgattgcacgtaattgccgaaaaaattcgagaccaatttccgaatgttgaccgactaattgcaaaacgaaagccgtctttgtcaaagcgccttaccgagtcaaaaaatttggaaatgtatctcatatgcaatttcaaccaataaatttgaagaa

SEQ ID NO: 62242 - DNA, 228 bp, Heterodera glycines
atgacttcgacttctgctgatatttctagtgattttgatcagccgaatcaaaaacaggacccagatgactccggagaatttcaacgtgaccctgatgaattcgttgagtctattcagaatgaagtaactcaatggcttgacgaattacggcgaatcaaaaagcctggcgaaagggatgggccaaaactcggcacgcttgagaagtctctaaacgatttgcaggctgca

SEQ ID NO: 62243 - DNA, 356 bp, Heterodera glycines
atgttggagaatggaaacggaatgctcaatatacgtattttttcttcatacttcaaatcattttttgatcaatggtcaattgcatttgttctttttttcgaaacatttatggagaaaaacatttattttgtgatgtggtcagctgggttgaacctaattgtaagaaaagtgtcgatgatagtaataattaaattaataaaaatttagactcttagaattgattgaaaaataattagtttaacctttcgttcaaaaacttcggcctaagaaaagattcttttcttttttttaaactttcgatgatatcaaaatcgttttgtttacattgagataatgcgggttatgggctgatcaaa

SEQ ID NO: 62244 - DNA, 348 bp, Heterodera glycines
aaaatctataaaaaatttaaaaatgagaattcatgcgagattttctggaaataagcttaatagggcctagttaagctgtaaaaaaaatttggggcgatttgaaagagaatagaaagaaccaggttcgatgaagttttggtaagccaaaaaaaatccaaacatttaaaaatctataaaaaatttaaaaatgagaattcatgcgagattttctggaaataagcttaatagggcctagttaagctgtaaaaaaaatttggggcgatttgaaagagaatagaaagaaccaggttcgatgaagttttggtaagccaaaaaaaatccaaacatttaaaaatctattaaaaaaat

SEQ ID NO: 62245 - DNA, 348 bp, Heterodera glycines; identical to SEQ ID NO: 62244

SEQ ID NO: 62246 - DNA, 532 bp, Heterodera glycines
atgtacagagcaaaaaatgcgtgtgaagagctaagcgaaattttggaagaaattaagagaaaacgcgtagaaatggcagaaagtttgcaaaaaattgcagttgcagcgcgcgaaaataaggaaagagtttatgtagacttttgtacacagcttgacattgaggcaaaaattaatcgagcagtgattaagaaaaatgaatggcaaaacaaaaaagaacaattggaagatatttttgacataaaccctcaaaattcactaaatagcacaattcttactccaagaaatcagccaatcaaaagagtgaaaattccacaaatacaattgaaaaaatttgatgggtcagttgaaaaatggataccattttgggagacattcagagtacatgtccacgaggatgattcggttaccaaaattgaaaagcataatttattggagtcaaatttagaaggggaagctaaggagctaattgagggaataccaatttcggaagatggttaccaaattgcaattgatttacttttggaaaaatacg

SEQ ID NO: 62247 - DNA, 255 bp, Heterodera glycines
atgcttattttggaagtcaaacccgcaaatttttatggtaatttattaatcaatatatttttttaaaccttttctagcaagttattaattttattagtttctgttttttatattaatttttagttttttaactcaatttcattttattatttattttcttttttattaattttaattaatttattgcgtataattttagcattagtcaaattaatttaatttctctgtttattttatcttttttctaaaaataaa

SEQ ID NO: 62248 - DNA, 714 bp, Heterodera glycines
atgaatattattgacaaaattggcaataatatcgttaggccgacgctcgattttttgagcaaaacaaagctgtcgttatcgcacctcagcggaggctttgattttgatggaaaaatgccgcaaaaagaggtgcgatcagattagggcaaattacactaatttttatatctgtagttttgagatgctttttgagcttactattagtcttttaaatctggcatttttaatcttaaacttttttaagccaaaccattggagcgtaaacaaatcgcacagtggctttttaattttgaagcctacatatacaaaagcaacagtcgtcgggaaaataaatggtgaataatagaatatgcaaatgtttattattggtataaaatgcatgtttaatatatgaaatgctataaaactaacaatttttgttcgattttacaattttttataaaattaaattacagaaaattttccagattatcggatgttaattgctgagtttgaccttatcccgcgttttggcatcgcttattacgagactaaaataatccgaaggcaaatgtcctacgggagcgggtatgtcaaaaactcaaattatagtagtgtggcccgacaggaattcatgtctcttggacttaatctttgaaaaattatattcatggtcacggtttagcaacctgtgtaagaaaattgggaattaaatagtagattaatattaataaa

SEQ ID NO: 62249 - DNA, 1481 bp, Heterodera glycines
aatttgaggatcaaacccttcagaaaatctatttattttatgaggagttcccgaagtgatcagttccatttctctcccaaggtcaatttcatacaagaatggctctattattaaaattcgatggaaattaaataaatttccggcacagatccgtcgcgatttgtcctgtggtgagctaatctgtaccaacgagaacaccgctgcactgttggtggcactgattgtgcagtcggagtgcggcgacttctctccgttggactatccggacgccggcgcctatttggccggcactcatttcgtgccgcaccaaacgcccacttttgcacaggtcggacccatcgacaattgaagttgactgatcagagtcagaagaacgatttgatgatcagaaaatgccaaaattgatgtgtcaaattgaccagtagaggattcactgcttaagccgtactaatcaaaaaatatcccaggcttatcgatcatcaatttccaactgatcactccgttaaacttgatagcccggtgcccttcattcactttttgaaataataccatgtgaacttacataatccgaggatttttcctcagttcatttgcccttcttcttaggccgtgttggagcagcaccggcgactgattggcatggagccggccgaggcggactttgttctgctggagacggcacggcgctgcgatttctacggacttcggctgcacccggcgagagatatcgaaggtggggggggggggatttaaaatatccacccaatttatttgaactattttttacgtgatatttgcattatttatttgattaaaaatggctaatgtatttatatttgatcagcagtttttcgcctgtttaggcactgaagtcgctttggctgtggcgcatatggggattaaagtgttccaccaaatgaattgtgtcaccacattttcatgggcaaaggtgcggaaattgagcttcaaacggaaacggatgatgatcaaagtgaggcggaagaacaataattaaattttaaaaaggaaaaaattgcattaatgtaatctttggggtaatttaattatttatttttatccgaattgaggttcatcccgacagcttccaattctacaaagaaacaatcgaattttcgttcgaaaatcgagacgactgcaaaaacttttggaagaaatgtgtggaacatcactcattcttcaggtggtgtttatctctccattgccagcttcaattagcaaaataatctcctggcattttaaattcctttttattttggatgtgccgattcggtcgccggcagtgccaaacggacggaggaaaatggaacggggggaggacggaagggcacgcagcagcagcaacaccaccaacagcataatctgttcacgaggggatccaacttccaatacaggggacgaactcagaaacagctgatcgattacgtgagagagcaccgaaagaggagagagccctttcagag

SEQ ID NO: 62250 - DNA, 937 bp, Heterodera glycines
acttcgaatattccgcgaggagtggtaaaaaggaaattgataaataattaatcatatatatgtcttcattggcattttcaggggtgcccacctccgccggggatggacccgcgaaaaggcaaaggcaaattgatgtgtatcaaggcaagcagtgccatttggaacggcattttcagaacattaaacacaaatactatttatttttaaataaaataaaaatatatttattaaatatttccaataataagttgttaattttgttaggttcgtatgttggacgattcggtgggcgtttttcacctcggggttggttattcaaaagcagtaaaatataaataaaatcaattatgttgataatacagcataaagcggcgggccaagcactgtttgaggaagtttgtcggtatttgaatctgttggaaagtgactatttcggcttggagttcatcgacagctatgggaacagagtaattagcaagagggactaatgggaattcattataaagcaagaaatttcaaaaattctgaattttagaatggcctgggttgattttctgggttgaaatccgtttcaaaaaaatgcccgcccgttccttaacttaaccaggcagaaataagactggatcacgacccggtccccgcttaattacctaacattaaacgccttttcctttttaaacgccttttctttgccccccccggcggtcccattcttatgctataaaatgatcattgaaacggctatcactttcgcagtgttggctcgacaaggacaaaagcattttgcgtcaaattatggtcgcccaatcggacgcccgctttttctttgtggtgaaattttacacgccgaacccggccgagttggaggaggagtacacgcgctacctttttgctcttcaagtgaatgaattggaaaattccatcaaaaaagacttaa

SEQ ID NO: 62251 - DNA, 592 bp, Heterodera glycines
  unsure (1)..(592): unsure at all n locations
tttattaagtgagaagggcgtgagaatgacccaaacaaagtctcagtgttcaaaatttacggcaccaaaaagcttacaggaattgaaatcattgctcggcgcacttacatatttcagaagatttattaaaaattttgcgcacattgcgagacacnttcaaattttaacacaggacaaatttgaagggaaaataaaagaacattggggaaatgagcaaagtgaagccttagaaacccttaaaaatgtgttaacaaccgcaccagttttacaatcaccccgttttggtaaaccatttatcattgagtgtgacgcatcccgaaaggcaattggggcagttttactacaggaaaatgggcaagtagctttcgcttctcgggctcttaaccgacacgaagctaattatccatccatcgaacgagaagctcttgccctcgtttattcggtcaaagaattttcaccatacattgtaggctcaggaataacaaaagtgataactgattgcagcgcattaaccggaatgatgaaggcaaagggattaaagggtcggttatagaaatatcaagtaacttttcaaagctacgacattgaaaaa

SEQ ID NO: 62252 - DNA, 101 bp, Heterodera glycines
aaaaatccctcaaaaataaaaggtctattgcgcaccgccctccctatcatgctcgagagcatttgtatgtgtataaaatttatcaaaaaaagagatagcca

SEQ ID NO: 62253 - DNA, 305 bp, Heterodera glycines
aaaattccctcaaaaataaaaggtaaattgcgcaccgccctccctatcatgctcgagagcatttgtatgtgtataaaatttatcaaaaaaagagatagccatttttctgggataacctctaaatataaaaatcctctgtgaaataaaatggcgattgtgcacagccctccgtctcatacgcaagcgcttttgtgaggtataaaatttctcaaaaaaaagagatagacatttttctgggatagagtataaatttaaaaattccctcaaaaataaaaggtctattgcgcaccgccctccctatcatg

SEQ ID NO: 62254 - DNA, 305 bp, Heterodera glycines; identical to SEQ ID NO: 62253

SEQ ID NO: 62255 - DNA, 104 bp, Heterodera glycines
aaaattcctcaaaaataaaaggtctattgcgcaccgcccctcctatcatgctcgagagcatttgtatgtgtataaaatttatcaaaaaagagatagccattttt

SEQ ID NO: 62256 - DNA, 204 bp, Heterodera glycines
atggagcagtatgagcacggaatggagcagcaacagaacaccgacgagggagccgagccaatggccgtcgaagaacacacaaacgacggagaaaatgagcagctgaagggcggtgccgagttggacggcgaaaagccaaagcagcggccgatggtggacgagcagaatgtggttggtgctcagctgctcttcaacctgatttaa

SEQ ID NO: 62257 - DNA, 578 bp, Heterodera glycines
ggcccgacttaacgccaaaatggacaccctttcgggcgcactcccgtgcttaccgattatgtaaggaatcgaggaaagtagtggaatttcactggtgccttgaggctcccacttatgctacacctctcatgattcttcacaaagtcagactagagtcaagctcaacagggtcttctttccccgctaaatttgccaagcccgttcccttggctgtggtttcactagatagtagatagggacagtgggaatctcgttgatccattcgtgcgcgtcggtagttagccgacgaggcatttggctaccttaagagagacatagttactcccgccgtttacccgcgcttaatcaaggttccttggcttaacattcagagcactgagcagaaatcagactcggacaacgtccacaaggaccatccgtctcctctgttttaattagaccgtcggattacccgagctcgagccagttctaaactggtcgttcagcgccaagcgaagagaataccctgacgagcatacatgcagctgaagcgctccacaagcagctctcagctctagtccacgcaccatccccgaaag

SEQ ID NO: 62258 - DNA, 466 bp, Heterodera glycines
atgaaagtattcttaatgatttctttatttgtgtttttgatcatcattttaattaatattaattatgttggatcagaaaagaataaattggaacagaaatcatttgaagaaatatttggagaaaaatgggaagaaaaaagaaacgaagaacagaaaaaaagagaaataattggaaaatataataaaataaaagagaaaattaagcaaaaaggaagaaaatacccaagaaaagaatggagtaaaattgaaagaaaaatagcaaaaaaattgggcacaaatcgccaaaatatttatgaatggatcaaagaattaggattaaatcaaaaaacaaagaaatgctacaaatcaaaaactgacgaagaaaaactcgaaattgtacagaaattcattgaaatgtcaaatgaatataaacaaaaaggaagaacatattcgaaaaaagagtggcaacaaaattatgaagaaattt

SEQ ID NO: 62259 - DNA, 3043 bp, Heterodera glycines
atgtcatcgtcctcaaagcaggggaatccgattgaacggatgaagcatttgttgagctcgggagaagacgcggacatccaatttttggtgggggacggagacaaaaaagaggcgagttttttttaatatttcaatttgaaatataatttatgtcaacttttaaatttttcagcttctgtcggcgcataaactgattttgaagcacgcttccgaagtttttgaagcaatgttccgttttgactcacagaaagaaaaaacagaaaatggtgagaaaataaaaatttgttgattattttttttgaaattaacccctgctaattgccataattagggatggcattcttagttttttaactattttttctgcggctttaactcgacgagaaatgcacgaaaaacacattctttttcgaaaatttttcatttttagtgccaatattcatcactaggaatcactattttggagctttgccactaaaaaaagctatttcggaagttggccactaaaataattttttgcaactattttggcattttttggaaaatttcccaaaaaatgcaataaaaacgaaaaatacacccctaagaatcaacctaaaaattttcaaaaatacacccctaagaattggaaaaatttcacaaaaattcttccccaaatttttttttcttgttcaatatttgctaagaaaatattttgtaactgcaatcagtgaacaaaattgtttgccttaattttaaattatttcaaattaaaaatagctatttaaaaaattacacccctaaatttggacctttttcgccactatttttgccactattttggcattttttggtcactatttagttaattattttgagattttttatcactaaaaatcccatccctagccataattacttttcaattagcctctgttgaaagtgccattgtggaagtgcccgacgttgagccaacggcgttcagagtgatgctcagcttcatttactcggacgatttgagtgaattggacggagacaacgcgatggcagtgctttatgccggtgaaaattggcacaaattaatttagggggcggttgtaaaggagggggggggggggtagcttcttatggaaaacgcaattgcagtgctttacgcgggtcaaaaaatttggagcaaattaattttaattgggtgattaatttataatagttatatcttatatatataaatagtaagaggaagagaattttcctatttgaggctgtgaaatttttggaaaaaaggaatagcgccattcaaaaaagcatttttcagccaaaaatacggcattgatcggttggtcagtccatgtttgcaaattccaattccgaagctgtccaatgttttcttggcctttgcccaggctcgtctttttgacttggaggtaacaaaatataatattatattttgttttttatggtttatacatttttaggatttttcccaccaatgtttgcgtttcatttgtcaaaatgcggtccaattgttcggatcagaggaatttttacaaattgatcagaatttgctctgtgatttattcgagcatgatcaattgatgatcaatgatgaatttgatctttggaatgcggtaaaataaatatttaaaatttaaattacatttgtttattttccaaggcacttaattgggccgatgaaaagtgccgtcaaaatgccatcgaatgttccgatgagaaccgtcgtgctgcgcttggcccggcacttttcaaaattcgtttccctctcatcccaccatatgcatttgtgaaggcaatcggtagaaattcaactgtcatttatcaacattacccccttttttacagttccttctggcatttttacaaacgatgaattcgtcggcgtttatcaattcaatttctaccctaattttcgtggtgtgcccgagctttacccattaaaattgccatggcatggacgaatttccgattggaacacagccaaaggcaacagagggaccctggcgatggaaattgagaaattttctgaatttgcacgagaggaagtggggagtttccgaaaaagtgaaaccgaagtgtcaataaatggactttcttggaaaatatcggcacaaatatatgagaaaagaaataaaaaatggtttggattttatctttggtgcaccgatcctacaacagaaagtgggcaaagaatattaatttggattaaaatttaagtggcattaattaaggtggaaaatggagctgcaaatattcggcgacctatcgaattgtttcgcaaaaaagcgggacgaaggatttaattggcaaaataaatgatcacattattagcaatgaaactcctgcttggggatttaactttttcattacattttcggttagaagacaattaaaatattttttcgcaattaaatgagcaaaattaaggaattgatggacccgtgcaaaggcttttacgacaaagacggggacaaagtgactttggtcatcgatgccgttgtggaggaagaaaataatgagaaattcataaattgaactttgagcaagactatttggattcggcgtatttccctgtcaatgagcaattattttcgtccgaattctttatggaaattctacagtatttatgctttggaaaatacaacaaaaatttggctccaaacgacattttaattcatacgacaaataatgatgttgtaaggaagagagataaatattattttgaaattgaatttttaagtgcgctgcggtctcgaaattatgtgggcgggtgattgagtacgtcgttgggtcatccaacccattcagcgtccgcaaacgcatcagcttgggcacaatgcagccaaccgatctacccgcatgtctgaagcagccggcgagagtgatggtgcgcggaggaatccatcctcaaatccgttcagatgaaaacgaagtctaccacctctacaattcaaatctcatgaagaaagttggatacatttcgatgttctaccatgtacgaattggtgattgtgtttggctcagtatagacttggtattgtattattaa

SEQ ID NO: 62260 - DNA, 578 bp, Heterodera glycines
atgaaggcaaaagaaaaacaacaacaacagcaacacaaccagccaaaaattgatgatctgctcaaggacttggcccgactccagctcaaccaatcacagcaatcggccggagttttgatgaccgtgccaagcccgcaaactacaatgtcttgctggcccaaattcaactcaatcgaatttgatggagttgtcacggtcgacagcggctcttctacccgccaacattgcggagggtagaggtcccgttgactttggtaaaattaatttgaaagagatagaaatgaaaataaaaaatattttaaattatattaaaaatggtttctcaaattcgttaataatttatttaatatccaaattaattttttgtgtcttttcaacatgtgttttccagcaaccgccttcgccgaggagcaacttgtgaaaaaaaaaacgcgttgctcgattgcattgctctggcggaggagtccgcaaagttgctgagcgcggatgcgcgaattcgctgtctcctggatcttggagaagagctggaggctgggtttcagcgaatacttagtgggtttttaaagaaggaaaaatga

SEQ ID NO: 62261 - DNA, 820 bp, Heterodera glycines
atgtctgtctctacccctatcttccccacccgtcccgaatggattattgtccaaaattgctctggttgtcctgggcttactgtatgtgcgagaccattgccatacactaagccaattgagtgcattcacccccgctcgctctcaaatgtcactgctcacctcctctcgcctccgatgagcaccggaaacgggggatttgatgttttcccgtttctccttctgcttttcatcctcattattatccttaaagttcactcttatcccaatcacgaaattatccatcaaaaattttagtgtgctgttctcgcggccattctttgcgttcgccgcccacgtcgtcgtcctcaatgctcagagccaatcttgcgcagttatcgtcgtgggaaggtgaaaaatgttttcaaaaaacgtaaattaaacttaattgctttctttccaaattacattttttttgttctatgagtcaaaatttttaaattatttgtttataaatattttttgtcatttacaggaggacgtggtgatcgaattggggagtccgatggcgaatcgtgacaatgacgaggacggggcaaaaaaggaaatctccgagcaggaattggagggtgagtgaaaatggcattataaatttatcgttttttacttactattatttcagtcattctcgaaggcaatgagaaagagtgttagaccatgcgcacggagtgcgcatatttaatatgatgaatttaaaatattaaatttaattatttttggttttaaattttcattttcatgtttagaataatatttttaaaatcattttctaagttaaaataaa

SEQ ID NO: 62262 - DNA, 552 bp, Heterodera glycines
atggctgtttgtaaatgcaaagtgtgcgacgagtgccgtcgaaagcaacggctgcatgaaattagcgaacggaaaaaaattattgaaagctgcggtggggaccaccactatataaaaatgattgaattacggatgcgcgacttaaaattatataaacgagcttataggcgaataaaatctgtgatcgaccaagtggtggaaggttggtaatataaggagggtgaaattttaaaaaaatttagggccattccatgtaaaatgcacttcaaagtgcaaagaagaatttacatattatttgattaaatgggaatgttgcactgaggattatggatggggagtgggctgcacatatgcagaaattagtgatatagtaagaaaaaaaataataattaaaataatatttaactgttagcgccaaaatgagttgttggcatattacgatcaggaacgggtgctcggcgatataattgtaggccgtcagggcagagatgcgcctagttaataaagcgggcgcgacgcaaaatacaaaaagaggggcggtaagtaaggtaa

SEQ ID NO: 62263 - DNA, 1056 bp, Heterodera glycines
atgagatttgaagttgtgtcaattgctgaaaaagaacagcgcacgaatgaggatggaacgaagattaaattgagaaaattcttggtaagtgtaaaatcataacatcgaatccatctcaaaactcgaatatttataaaattattatataaaataacctcaattttaaattttttgttcaaattttaaggggtttttttttgaatgaaacaatttttttcaaaataaggcttttattaaatttaaaaattaagaacgtaaatttcggacacctataataccactggcccagttaatcccacattgtgaaatattgttttcaattgaaattatgttttataaaaccaaaattttcagaaagactcatttatttcgtcgggatttttgctgaacagacgaggaacggtaaacttttgcttccggctatcattgttttatctttattatcggcaaattacggtattttctttctttcaggtctattgccctcacatcaccaatttcccttttatctgggctaattgtaagcacgacgtggaagtcggcacttttttccagttttctgctgaattcgttaaagcaaaaagtcggtacgaaatccaagagattgtgaaagtgatctgtgattgccctttcgacgtagtcaaactgacgaaggaagaggatgcatttgcggtgtgttcctctgaatcttccgatggtttctctcgatgagtgaccgttttgtcatttccttctgctgaatgcattttctttcagttccaaattcccctctcaaccaacttttactacagcacttatcttgcagtcgacgttcgtttcaccctttcaaatatattataatatgtacttttcgcggttagggtcaatcttaattgagacattaaacttttcaaaaacctttcggcgcggtttttccaaaaaaaattttggagaacggggggggggggcggcggtaccgataggcgccgcccttttttcctttagcttttaaaatatttgtttgttggtgataagttatttatggctgatccctctcacaattagctgactaataaa

SEQ ID NO: 62264 - DNA, 1062 bp, Heterodera glycines
gcaaaggagagggactgtcggcgcctaaatattgcgcgtccaacgtttactacgcatgctcaggcggtgtgtccacgaagctgaactgcccgaaagggcttgtgttcgaccaggcaaaccaagtgtgcaactacccaagcgattgcggaaagaaacaaccgtaaaaacactcaaaaataaataattattaaaatttatatttattttaaggcctcaaccgcagcctccatctaaaggatacggcaaatacggcagaggaaaacgcgacgcgtctggagcaccgccagcacctccgccacctcctccgcccccacctcctccaccaccaccgcctccgccacccccagcgtacgagccaccagaaccgccaagctatggagccccaccgcaacccccaagctacggagccccgccgccgccaccgccaccacctccgccacctcctccgcccccgcctcctccaccgcctccgccaccaccagcgtacgagccaccagaaccgccaagctatgagccaccgcagcccccaagctacggagcaccgccgccgccaccgccgcctccacctcctccgccgcctccaccgcctgagacatctcaaccaaaagatgagagagcagttctgccactaccacaaccagaaccaacagcataaatgtgtaaaaatgcggcatagggttatatctataataatcatgctttagcagagctgattcactaaccatttcattctataaatttaaatatgttccttaaacttagaaaaaatattttaattctttttatttgcgtcggaagtctgatacttaatacaaaattgatcgttatagtttattttattacatatattatcacaatgattatgagaaatcggagtggcgtgtgaatttttgaattagaagcggaagatccatattaatgatagatctcaaacgctaatgaatgaatatgtagataatacaatattaattgcattatgaattaatttaaatatgaatttccatttattaataatttttttagcttttacaatattaattgtatctgcgctagattaataaa

SEQ ID NO: 62265 - DNA, 561 bp, Heterodera glycines
atgcacgaatcaaatgggcatcgaattgccgttgaagcagatgaggaagaagaagccgcaattgctgatgaagaacgaattgagcgagagaaggagcgaactacctagttaaccgcattcaactagttcgtttatagaagcagcattaagaacaatttacagcaaaaggaagattgccatagagccaccgttgaagttcacgtacgtcaattgtttcaagaaactatattatgattacaacaaaagggagtggaaggaatatgttcaacaagaacgagctggtcaaaaactttgtcgccttaaaacagtatctccatcacatatgcaactttttgtaccattcattaattaatgagcaactttacaaatattttttatatgtgaactataatttgttaaatatatttgaaattgaatataaatatgatttttacatttctccattgacacctttcgccgaatttggggagatagaaaagagtcacttgtgtttagttcaggggtgcgagatgcggccaaaaatttaatatttgatacctttttgatcgaataattttaaaa

SEQ ID NO: 62266 - DNA, 885 bp, Heterodera glycines
atggctccatttgaatacctatttggttcaaaagtatttataaacaggggaaagctcaataagcttatggccaattcacttttcgagtgcgcagacagtgagaggacagacatacagagtggtgatttggccagcgaagttgtgttttgtaattaactattaacaacagaaatggatggatgactcatccaaaatttcccattaaacgaattattttggttttcatttgtgttgtgtacatacatttgtgtgcacatgtttgttttcatattaccaaatgcgctttttccacaggttctgtccttcctaataatcatttttatcccttttctcattccaatatggcagtgacttttgcggatttctttaaagtcatttgtgccatcattttaccggtttgtttctctttaaataatttattaatttctaattaatgttgtgcggtggagtaagatttggttttattatatatatgctaagttttgaaaatataattttattaaattgaatttaaatgggtatggcttttggatttgtaatcgaattaaataatgataatgcaacaatagtcaactgtgctgttagttgttactgttgaattgcaattattttagctcccttggcgtttttgtggagacgggctgctccatccacattttgattaacatcattttgaccattctcggctacatccccggcattatccatgccctctacatcattttacagtactgatgaagatatcgcaattgtgaaaattcgatcagttaaaagaattatttttaatttgtcaatttgcttttcaacaatatcggatgttttttgtgatatgtaacagttctcgccaattctctcctccattttcacttctcatttcagaataaa

SEQ ID NO: 62267 - DNA, 185 bp, Heterodera glycines
attaatttccggcatctatttctaccaatcaccgagccccagacccgaattcgaacaaaaattcgaaaagtcaaattttatgaattttgagttttatatcaattaaagattaatttccggcatttatttctaccaatcaccgaaccccagacccgaattcgaacaaaaattcgaaaagtcaaatt

SEQ ID NO: 62268 - DNA, 986 bp, Heterodera glycines
atgaatttaatcattttcttttgttttattcgcttgatgccgacgacattctcagcaaaattatggacaaatactgaaaatgattcgctaattgactcctctaatcgttctgctgctgatgctcatttgagcaatgttttgccatcggcaaatggtgataagattatggcaattcaaatcaaaactgatcaaaagcaaattgatcaatttcttgaagaaatttatgacgaatgttcagaaaaaggggagaaaaactcgcaaataattaacaaaatattaataattcaaagaaaaaaatcattggaatataataaaatgagaactgatgaacaacgaattgaaattgttcaccaaatttgtgaaatgcgtaacgaatttgacgaaaatggaaaacgcaaatataaaaatgtgaatgaaattgcaaaaattcttgatgtaagccttgcaaatatttacagatggatggacaaatttggattatcgcgtaaaataatatctaattttagacgaaatatccgatttttattttaatataaatttcaattcaatttttagatttaaaaaaagatcttccacatacaaaaaaacgtacgtaattaagaaggagattacaatttttaaaaattgtctcaattaattttatattcaataaaaaattaaataattcattcaattttaagctagacaccgaacatccgaagtgtggactttttttgaacaaatgccaaacagtctaaatgcaccaaatgtggcaaggaaattcgaattcagcgggacagacagacatcggatatgagacggcacttacagaaaaagcatcaattactcatgcctaattagtgaggaaaaagaaaatattattatttttagaaaatttcatttaaattataattttctaatttgtgcatcattttattttgtcacagcaaattaatttatattttcaatgccttaaattttgattttgagattatgatgtaaataaa

SEQ ID NO: 62269 - DNA, 658 bp, Heterodera glycines
ataaaaaaatcgattttttcaagtgtccgtttggagtactcaaacaattatggggagcaaaaatccaacgcagaattaaagtacaggctatagggaagctattcccgaaggattcggtctccccataaatctgggcgcatcggttcggggggactgccccgaaaacaaaaaaatcgattttttcaagtgtccgtttggggtactcaaacaattatggggagcaaaaatccaacgcagaattaaagtacaggctatagggaagctattcccgaaggattcggtctccccataaatctgggcgcatcggttcggggggactgccccgaaaacaaaaaaatcgattttttcaagtgtccgtttggggtactcaaacaattatggggagcaaaaatccaacgcagaattaaagtacaggctatagggaagctattcccgaaggattcggtctccccataaatctgggcgcatcggttcggggggactgccccgaaaacaaaaaaatcgattttttcaagtgtccgtttggggtactcaaacaattatggggagcaaaaatccaacgcagaattaaagtacaggctatagggaagctattcccgaaggattcggtctccccataaatctgggcgcatcggttcggggggactgccccgaaaac

SEQ ID NO: 62270 - DNA, 410 bp, Heterodera glycines
atggagtctttggactcgcccgcttttaagctcgaagcggatgagtcagacgagtcgggtgattatgtccaaatcaacaagaaaatgcgcgagtcgccatatgttaaagtgcgtccgaagcggtcgcggtaaggacaaattgggaggtggtatatatattttagcaaatttattcaacagtctcaactctccgcgcttggagttttctcgattcatcccgaagagttccctcaaattgtctgtttcgagtcgttccgttttggtgtgtgttttcttagtcagcagtttgacctttttatgtttgcaatgttcagaaaagcccagatgacgctggtccatacgtcaactccccgattactttggattagattgctgatggtttgtttcccaccgtaatatacctaattgta

SEQ ID NO: 62271 - DNA, 191 bp, Heterodera glycines
atggaattggatttggagttccgtccattcaacaattacccgacaatgtcttggagttgattttcacctatgtgtcgccttacgaggattacaattccataaaattggtgtcccggcgatggtattatcttgcgaccgcaacgttgaggcgaatgaatcattttttcaacaaatgcataaacttttcatgg

SEQ ID NO: 62272 - DNA, 1144 bp, Heterodera glycines
atgcgcgggggctcgtcaagtaaaagccatttaactattttaaaattataaacattaacttatttaggagcgtcgacgccgcttcaatcgctggttcaatccgagtcaaagcagccgcttcacacgcaacaaattccggccatttatcacgggcacattccaacagaagcaacaagcagattgaggtgggtgttttgaatggctcaactgatgcagttcacgcgaccaaacaatgagtattccacagtttcttatgcatattttttcttacttttcataaaccattcatttttggtataacgaagacttgaaacctattcatatttcaaattttgggcttaggacaatagattaaaaaatgctgttgaatacactcgaaaagatattattttggatgcaaacagataaaaatttgataaacctttttgtagaataaacaatcaaaaaatctaatgcgttctgtaattctgcaaaattccaaaaaatcagacccataaactaaacaaaaaatgtcaagtcgagttttcgcacctttttgtcataactgttttttaaatggaccataattttttaatttggaggcttacagaagacattttactatgcgaaaaggagccagacccacaaatttgtaataaaaaatgttattaaataaattgtaattttggccaaatattttcctttaaaggcaccatctcgcggtcgaaatggaggctgaaccaagaagatacggacttggcatgccgacctgtaatattttaaaatgtgattaacagaaaccatctgactgttattacggtcagcaagtgcaaccactacagtataccatccggggccgacggtcactgcacggccaatggagtaccacggacgtcgaaatggtggtggaggaggaggcggagagggcgggcacagtccaaattcggagttgaggggccgaagccacgggggcagctgcagtccacgcacacaatgacaaaaaaaatgggagagaagcgggtgctgaatttattaaatgaaaaaaacaaaagtgctctggaaaatatttaaaaatgggtggagagtaaataattagcatttacaattatgtacagagaaaaaattaacaaagcataaaagttagttctatgtatgtatatttcta

SEQ ID NO: 62273 - DNA, 1005 bp, Heterodera glycines
atgccaatgccattcaacgcggcgattggacaacagagggaccgccgctacgttgggagtgccaattggccatttccattggaatttgtgcccgtgccaatgccatcggacggcgcattggcattccaatcgccagcattttccaccggagatgtggtcggatgcggcgtttgtttggccactcgacagatctttttgacgaagaatggccgacgaatcggtgggccaaacacaaaacgaaaaaagcaaataatttcaatttcaatttgtcagatgactcctcttttttcactacaactcccatcaattctctgtttccatgcgtttctctgtggactggcgacaaaattgaggcgaactttgggccaagtttcaaattcaatttggccactctttgaagaaagctgaagaaacaacggaaagggcgattactcatttaattaattaattcattatccatttttcactttatttttttcacatttattttcagttttttatattatttatcatgcgtatttgttaacaaataaattttactgttctttttgtttgtcttcattttttcatgtaaaaatttgatggaaaaaatggaacaggaagaaactcttgaacctgaagagattaaaaacttaaagaaatttttaaaatattaaattactcaaaaaatctctttttttctttcccctcatttatgtcccattgtgttacaatttaaaacgtttttctcaaaccctttacccaactgtaaaaattaattaaaactaaaaatacatatttctatcatatgaaaatattaaataaaaaaagtctgtaaaatataaaataattataaaatttttattataaaaatgaaaaaagaagaaaaaagcttacaacaccttcgattcccaggacgtctccgttccaagtactaagaaggcccaacgttgcttaacttgccagatcggacgggatggcgtgctttcaacgtggtatggtcgtaagcgaaagggatctaattga

SEQ ID NO: 62274 - DNA, 469 bp, Heterodera glycines
atgcgcacccgtccgatctggcaagttaagcaacgattgctgactagccaaaaggttcggtgccgtgatgaaacgaaccagcactgcttaccccgcggcacccggcacggtcccccgaaggaatggatttaattaaattctctccttcgggggatttttttccattaggtcgtccgttagcgttcgattgctctagtcaatttttaaaaatttttgttgaaatatttgtagtgctctgaagggcgtgggggggggggggcgggggcccaccacgagtccgagaagcggccgagtgagtaccttcggtgcaggaaaattattaaggaagagagttcattatttatttattttttgcataattaattcataaatatttttttcagaaaatgctctgaaacgcaccaaattttatttacatgttagtttaggcactctgatgctttttctatcaaaaagggagatgaataaa

SEQ ID NO: 62275 - DNA, 845 bp, Heterodera glycines
taattaaatccattccttcgggggaccgtgccgggtgccgcggggtaagcagtgctggttcgtttcatcacggcaccgaaccttttggctagtcagcaatcgttgcttaacttgccagatcggacgggtgcgcatgattccactgttccaagcaccccaccaaaagcaaaacgatataaccaaaatataaggaaaaattttttaaaaaattttttctccatcttcctttttgatactaaagcatcagagtgctaaaattaagttgtaaataaaatttggtgcgctttagagcactttctgaaaaaaatatttatgaaacaaaaaaatcgattttttcaagtgtccgtttggggtactcaaacatttatggggagcaaaaatccaacgcagaattaaagtacaggctatagggaagctattcccgaaggattcggtctccccataaatctgggcgcatcggttcggggggactgccccgaaaacaaaaaaatcgattttttcaagtgtccgtttggggtactcaaacaattatggggagcaaaaatccaacgcagaattaaagtacaggctatagggaagctattcccgaaggattcggtctccccataaatctgggcgcatcggttcggggggactgccccgaaaacaaaaaaatcgattttttcaagtgtccgtttggggtactcaaacaattatggggagcaaaaatccaacgcagaattaaagtacaggctatagggaagctattccggaaggattcggtctccccataaatctgggcgcatcggttcggggggactgcccaggaaacaaaaaaatcgattttttcaagtgtccgtttgggg

SEQ ID NO: 62276 - DNA, 1282 bp, Heterodera glycines
atgaagacgcggccgtttcccatcggcacgccaagtgtgtggaccggtgagcagctgtggcaccagcagcagccacaaacggcaggaggccacccccacactgattgtggtatgtataattatagttttatgatcatgactaatttctgccccctttttctacagctggaccaccaccaccggttctccgaccacccgcactgccatggtgccgaccggaggacaaccccttccgcggcttcctcttctgccgtgtgctgccacccagtgcggacgagctgggcgaccgcgagccgctgctgccctatcgcacacaggcagacggacgactcacgttcggcttgtgcgcacgatgcgcggagctccgacagcagcgtacctgtcgtcacacggagcgtgagcgcgcgtggaccgccgcctacacgcatgtggaagtgaatcgcgcgatgctcctcggctaccgtgtgctgcaggtgcacgaggtgtggcactacgagcagtgggcgtcgccggagagcgggaacgggctgttcagcgactacgtgaacacctttctgcggctgaaggcggaggcgagcggctggccggccggctgtgacgacgagccggcccgggcggagcacgtgcgtcagtttggggagcaggagggcgtccacctacgccgcgacaacattgggcacaacccgggcctgcgacagctggccaaggatttgctcaactccctgtggggcaagatggcggagcggccggagcgcgacgaggtggtatacacggacagtgcgcgtgccttccacgagctgttgatggatgcgcggcaggaggtggtcagcttcacgcacatcaacgagcagctggaccgctgtgtggtgcgcaagcgggagccgtttgcacgggcgccggagcacaacaatctggctgtcgcctgctttgtgacatcacacgcgcggctcaacctgtacgaatggttggaggaggtgcggcgggtaggcggccgagcgctgtactgcgacacggacagcgtgttgtatgtgaggcgactgggtgcggccggtgtgcgggagggcaacgcgttgggcgacatgaagcgggagctgcccggccgccgcatcatcgacttcttcgccgctgggcccaagaactacgggttccagcacgtggacgcgcgcacgggccaggacctgagggcggagcgcaaggtgcgctcctttgagctcacctacgcggcggaccaacagctgcagtacggacggatgcgccagctggtcatcaaccactttggcag

SEQ ID NO: 62277 - DNA, 1119 bp, Heterodera glycines
atgtccctacccggaggcgagtcacacccgaaatcactacctttaaattggtttccaactgtcaacttcagtattgtcaacggactccgttgggcaatcaccgatgcctttgtccgtcttccttttcgcgcgactcccaaactggcgagtgcgtgtcgtcgcgcgtgccgttgccgcccgcctcgccatgcccggcggggaaaatgctgagtgcacggacaggtgaaaaaaccattattaagcaaaaataattgctgaattctttatgcaaaattaaggcaaatgtttgctgcctggctcctgcgaccccaccgacgcaaattcgtgcgatttgcggaaacgcgagttgtgtttgcgcactacgccgcaacagtcgcagtcgcacccgcaagttcagcaagttcggttgcccacggcaccgccagcgacagaccaatcgtacagaaagaagcaccgcgacacagagacatatgagacaagtaggaaagcagaagaagcagaaaggggctgagggaaagagaaagagagagatagagagggggggggggagacagttcgtattaaaagaaattttcaatttttttttgaacagaatttttctaaaggcctctgatggacttccgattcgaaaatttttctctcggtccatcccccgggggcaattgacaaaagtggacacgcattcactcactcattcagagaacccgataagttacgtgtcctcacaattgcccgattacacgtgccaatgtgtgagcggagagaaacggcatccgatcacaggagtgtgccgtaagaaatgaattgaaatgttgcaaataaaataaatgttatgattgatgttcagttcggaatgaatgtcttcggaaggaggacaacgattgcgacacgcacgcccaatgcattgacacggacgaagggtttttgtgcatttgtctgccggggttcatggacaacagtcaggacaaagtgcagcacacacaagcatggcttaatttgattccatttctctttgcagttgcgtaaaccgggccgtgtctgtacgcctttggtcgacgaatgctcctcgggcattgcgaagtgttcgccccatgcgaaatgcaccgatacgcccgaggg

SEQ ID NO: 62278 - DNA, 1579 bp, Heterodera glycines
tggaaccaatgtgcggtggtgacggatcagcagatgatcaatctcaagccaattcactacaaaatgatcccaaattctaccatcggctgattgaggcacaaaaatttgcatacgctcaacgcgccaatttgggcgatcaagcatttgtgccagaagcgaaaaaattggccaagcacatgacaagcaatacatttttgcataatgtgcacaaaaaaatgttggacaaagcaatgccggacgagcattacactgatgatcggcccatcaaggctgatgtgcgtttaatttaatttttttttttaaatttattttcatggcatttattttaatggattttcatattttcacgaaacttcttttgtgctaacaattttcaaaatttcattttctaggttataagcctcttcaaaattagccttttatatttagtaattaaaattttttaattttgttttacgaattattacttttttaattttgtgaaaaattaaactatttttatgtaaacagttcatccatattttttgagttatatgaggccatagtacagtaaattaaacaaaatttgttttttttttaaaatttttagaaagatcatactggaacatctcacacatccatattagacgctgatggaaatgccgtttcagtgacaagctcaatcaatcaatggtcataatttatgggatttaaaaatttatctaaatggacaaaacttattccgttattttataggtttggggctgtgattcaatccgaaaatttgggcattatatggaatgatgaaatggtaaaaaaaattatttaatggttttttaatattttattttatttgcaggaagatttctcatttcccgatgtgaaaaattggttcggatatgccatttcaccaaccaattttgttgcacccggaaaacgtccaatgagctcatttagtcctatggtcatctacaacaagcacacggggaaagtgagttgcaaacgaattttccatttttttaaatttttggggcaaaaatgaagaatacttgaacggaaacctaatttggggaaatcgtctttaaaaagtttcaaagacttttttgaattttagaaaatttcctgtaaacttttctctactttttatgaaaattttgtcgctgactaagatgttactcgtcgatagttttgaaatttcccatgccacttcatgacaaattttgtcgaagaatttccttccctaaccccgacttttctctccttgatggccgtggtttaactctacttacaattaacagtgtaaaaattccccgctgggtaacgaatgtcggggaggacaggtccgggagaaggcccaaaaaggtcggggatgttgaacgggagttctgggtccgggctcaaccctaattgatatcattaaatttatcaggtgaaatttgtcattggcggctccggcggtgccaaaattccgtcgtctgttgccaaaacagtgttgcatgtgttgtgcctgaaccaaacagtgaaagaggccattgatgcgccagtgttgcacaaccaattcactccgaaccatgttatttacgagaatgggacaccgccg

SEQ ID NO: 62279 - DNA, 292 bp, Heterodera glycines
aaattgatcaaagatctaaacgaaaacttcgggcacattatgaagtcgtacgacaacaacaacgtggttgtgcaagctattcatgtggccgatgacggcttcatctatgcaaatggggacttccgtcgtcgaacttacatgcacccggccggcttctaattggcgtggcacggtgccatgaatttgtggacggacccccggagttttctagactgaatatacaatataacaccaccatcaacgcataacaccatagattatagacaaaaattgaaggcgatgggaatagaaa

SEQ ID NO: 62280 - DNA, 1515 bp, Heterodera glycines
  unsure (1)..(1515): unsure at all n locations
atggatgaagcgcaaagattgatcaaatcggaattaaatgtgccacacgattgcttcaccgatgagaatggnaaattcaaattggaatatganattgagaataagagcagagaagtggcacgatggcgtctcccgcctgtgcatttgtacatttttgnggtacattttttanaataatttcactttttattttttttattttaataattanattgcagtccatctatgagaattttaaaaattttaggactcacaatttccggaataacggggaagaatttgatcagtaaagcagccgatttcctgttctggactcaaagttcaattcccaaaaaatataagtatcgagatccggtttccaattttttgatcgccataaactaagaagactaattaagcactctaattgatcacgtaaatcttatcgattactcagtctttaaaataatgagaattcaatcataagtgtcgtaacgaaaaattcttcatccacactaatactaatattaaaaaggcatttaaatttttaggcaagcgtttggacaaaagaatatgtgcatgtgacagattggcatcatgtgcatatctttgatttgaaaaatgggaaaaaatacgcactttcggcggataaagtcgctgaaaaattatacgaattaagtaaaagggacaaaatgaatgaacgaacaaagttggcagaaacaaatgaaaaaacgaaaattaagttttattatttttttaaaattagaaaaacgaaaaattaaggtaaaagagtccatttttggtcattggtcttatcagctagcttaacagcaattttgagcattctgatttataattaataaaaatgccaaaatattttgtataatattttaagaatattaaaacttaatgaatttttttttttacaaaaaatctaagtaaattttatgaattggttttaaaaaaaacacaattatttacttaaaataaagaaaattgaaagtttctgatcaagcagaaaaacatccggccttgtttttgacgaaaaatcattgatcaaatcaattcaaacccaattctttcttccgataaaaaaatatattgctcctctctaattaacttaactaaattgattttaataaaaatcattttttagtgagatcacgttcacgcgttcgttttgccgattcagacagtgactattagaaatttcgatgtcaccgaagtttttcgctggatgtgttggaacgggaattggagaatggctgatgaatttttggaatttataatcataaacaatttgttagattagagttcaagaacatatattaactaagtgtggtgtcctcatatatgtctgagtcattatgttaaaattcaaaaaaaaaaattaatcaaaaacacgcaaattcgaatttttacaacaatttttcagaggactgactgactcttttttcataaaaaatcataaaaacgaatttctaaactgaaaaagtattagtcattgttagctccacaaatgttgaattcaataaa

SEQ ID NO: 62281 - DNA, 213 bp, Heterodera glycines
cgaaaaggaacacattatgaaaagaaaatacgcgttgacgattgggacaatcattacattgtggatttggccactaatgatgtacaagatgtgttaaaacaaaatttggacttggaatttctaaagctaagagacagtgttgccagtggagaaagttggctttaaaaaaattcaaattatttattaatttctaataattataatttaaataaa

SEQ ID NO: 62282 - DNA, 343 bp, Heterodera glycines; identical to SEQ ID NO: 53449

SEQ ID NO: 62283 - DNA, 371 bp, Heterodera glycines
atgtacgtgaatcaaagtagaaccgaaattcgtatggaaattttaagtgaaaaatgccaaaatttttcaattggagaagtttgggtagaataaaacatttagaaatatttattaattgttagttttaggagtgtgatgtcagagaggaattgaagaaaaataaggagatgaaaaagttctttgaaagtgtgccggacaagggaccgatcaatccgagggatgcttatgccgagggaagaacgatgccattttgtttgtacgcaaaggctaccgaagaaattgagatatcaatgtttgacatcattagtttgtacccctttgtgaattatggtaaaaatctgcttgcatttttaatattgccattcacttaa

SEQ ID NO: 62284 - DNA, 637 bp, Heterodera glycines
atggtggtgccaacccaagcaccgccggtgactgctgccgctgaaggcacatttcgggcattgccggtgatcaaattaataatgaattaatttgtgttaattaaaaaatattaattaattttaaagttacctgcgccagcggatcccgacctgcaatcactgactttcgaagcaagcatggcagttgataaagcactgctaaagtggaaagaaattgacccgcaggtggccaattggctgaacaatttcaaagtgagtttattattttatttattattgttaataaagaaaaagtccgcaaaaggaaattatctatttaaaatcactttggattagcatatccattaaattgaatttgtttttgcagttactaatttgattatagaatttttgatttttttgaattgatgaaatgattaattacctaatatctaattaagttgttgccaaaggctgttgcctacccacaaaagaatttttgccaaatttattttcggaaattaaatgattattttaaaaaatgtttacgaaaaaattattatttttttaataagtttgtattaaataggaaatgctgaaccgtcttgggaatgacgccgacaaatatcgtccaagaaaaccgccgcgtgcaaattaa

SEQ ID NO: 62285 - DNA, 1441 bp, Heterodera glycines
atgctggctcaggtgagtgtgattaatttattttttaattaaattgggtagtttgtcggcaaagtgattttccatatttaaaaaaagaatagattttgaaggaaatgaaacacattctctaatatttgttctcagatatggcagttggctgatgtcaacaaggatgggaaactggaccgattcgagttttcaatcgctatgaaattggtgctcaattgcttgtccggcatttcacttccgtcggtgctgcccgagtcgatgcttcgaattggcggtggcatgccaattccctcaactccgtcgtcatattctctgtctaatggcggtggtccatcgacggctttgccgtcctccgtaagccatccacgtccaatgtccacttatggctcaatgccggcgatggcctcgtcttctcatcgtccctacggaagtttttcagcaggtcacttcactttgaattcttttatttggtaaaaaagctataaaaacttagcacaaacaccagtgaccgcaacttcacccccgtttctcatgggaataaaagaattgggcgactggagcctgccacagccgttaaaattgcggttttctcagaagtttaatcagctcgacaaaagtcgagtaggacttttgacggggcaacaggttgtcaaaaattgtaaaaatgtaaataaagttataattaattcaggctcgtggtgtgcttggagaaagtcagttgccgacgaatattttggcacaaatctggacaatgtctgatgtgaacaaggacgggtgcttgggcattgaagagttttgcaccgcaatgtttctgatcgaaatggtcaaggtcagtgtttttggtcgatttacaattgtgaaatattattttagtccgaatttattttttcactttctttgttaggctggctatgcattaccttccaaactcccaaatgagctccattccttctgcaaccggagcaaaacagtctctccgtctacgatggccacggaggacgacccgtcggctcctccgccgcaaaaaccgggccatggccaattcagaacttttgaagacaaacggaaggataatttggacaaagggcaggccgaattggaacggcgtcggcgcatcctccgagaagaagtgtgtttttcgtgatttaatatttgttctactgaatgttttaaggaggaacgacgaagagccgaaatcgaacggagggaaagagaagaagcagaacgaaaggaacacgaaaggcaagaattggagagacgacgagaggcggagatggaggaggaacggcagagggaattggaacgggagagggagagagcggagcaggagcagagactgaaggcgaggcgggaagagatccgcgagagaatggagcaggagagaattcgagagctggagaagattcggatacgggacctcggggtgggcatacgcttctga

SEQ ID NO: 62286 - DNA, 737 bp, Heterodera glycines
atggggccgaacccgaagccaggccagaaaaattttgtattaaatttaagaattgcaacgggttgttacgggtggaaattttccggcgaatttgggccaaactgttgggcttcctgttgcgccgaacgaaacggacatagtaagaaaatttcgaagacagatagataacatacattattagttgtaagcgaaaaaataaaaattctggttttttaagaaggaatggaaaatttttgaaaattgttacgaatcggctaccccaataaattcgattcgttaaaaattttaaagaaacgatgaaaagcaattcggtagataattttgtcatcactctttctgacagacctactcaaattttacagaaaattttcccaacccactaggaattttttcgaaaattttcccaatttttagtgtattttatgggtgttaagatgagagatgaccatcaaggagtgatctgatttatgttggtccaaaagacttttgatcggcatcaaaagttatcttagaaggaattttttcagaattttatctcgacataaaatgtcggggcaatttttggctataattagtgcactaattgatgttttttcttttgacgtaaaaaagacctttttgccaccattcatttttgagaaaacgaattttacaaaaaatgatacaatatttttgagactaacagtaattaacatttttcataatttataaatttacaaaaatatcgaaaaaggaaa

SEQ ID NO: 62287 - DNA, 203 bp, Heterodera glycines
gcctcgttggacgcagtggggatgacaagtacaaatactccaacgatgtgtccgtggcgcctccaatcgccctgttgccgtcgccgttcccccgcgagttgtacgagcaggcgactgacgcgcaacagtcgctgaacgaactgtactaccgcatcgcatgcgaccacgaatttctgatggaggcgtacaaggacgtgatcaag

SEQ ID NO: 62288 - DNA, 1208 bp, Heterodera glycines
atgaataactttgaccaattgaaatccgaacaacaggaaaagttggatgatcaaatggccgaaatggaaatattaatgaacggggcccaggaggagaagaacaatgaaggcacagaacaatggcaaactgaggaaaaacagtggcaaagcgtaaaagaaaaaattaaatttaaaaaggaaatttttgaaaatggcaaaatgctattaacaaaagcatcagcaaatgattttgatttgatcatcaaagagaatttgttcaatttgcatgaagcagcaatcagaaaattgacacaattccaaccgtttattgataaactgaaaagtaaaaatcagaataataaaaaattattattattaaaatattatgaaatttattttagttattgaaattgagccaaagcgagttgagcttattttggtgaaaaacactgaaatatttaaacaattatcacaaaaaccagttgagattccaaaaaatgaacaaaaattatttacaggtaaaaagacaatttttaattataacaaactaaattgaagaaatgaaacagtatttcggcccatgttcaaacatttgccctaagaaaaatctctattatctttttttaagaaatttctgtttctttttttttggaaaatttctacgccgatgaaggtgttgccaatcccggcaaatttttccagctatacccaacaaaatttatcgggcaattttctcatggcttttctctcaccgatggtcgaaaaaaaccctaattaaaataattgacctaaattaaccaaattctaacatttaagaagaggcttttgagctgaatttggtgcacaattaccaaaaattgttgagtgaagagggccgaccaattgcacaatcacttttaacacaaattggcaccgatgccatttattttcatcataaaatacttttgcatgattacattaccaatgttagtcaaatgaatgccccaaatgcgcaatttaaagaatcatttgccgccattcgcaagaaaattgacgaattggcactgtccgaagcattgaatgacaacggggaaaaacagcgcaaaatctttttaatgggaatgtttatcaaaaaattatccaaagtaaatttaacaagtttggcaatgtcggacgaattaatgcatttaaaaacggtataacattcattcaaaattatgcaaaattgttgggaactattgtctaataaa

SEQ ID NO: 62289 - DNA, 340 bp, Heterodera glycines
atgtccgatacccttcattttttgttcgtacggtaatacggagaattggtgtcccggcgaaaaataaattaaaaatttttcttttctaaaagtcgttaaaaacatatttatagaggttttcagggtcgctgatcacgaatctgccattaattttgacgaatttcgaatcccggaccaagactcgaacaaaaatccaaattcaaaattcaacttaaaaatcaattttgaattgaattggccaaaactaaggcatattcgtgatcagcgactccgaaaactccagaatgcatgctctcatgtttttctacatgaaatttgttttaaaaaatcaactacttga

SEQ ID NO: 62290 - DNA, 884 bp, Heterodera glycines
atgccgcaaattaattttgtgattattttattcatatttttattcgtgctaattgatggaattgatgaagatttatttgatgatttatggaaaaaccaaaagccatcgacctcaaaaaacttcaaaaaacaaaaattcggagaaataaatgcaataaaggaagaaataattgttaaagatgaaatttataaccaacaaaaggcaaataaaattgaaattgaagacacaaagccaaaagaattgcaaaagattaaaaaggaaaaaacattggaggaacaaaataataatttaaatagaaaactgaaattgccaagaaaagaaatggaattattggaagaagaatcatatgaaaatgagtttaatgaggaagctgatcagaatgtctcgtctactgatcagagcaactctggaaatgatgaggattacaataatttggtaatataatagacaaagcaatatcattccttgaaaaaattcgctgaattctaaaaattttttctcttaaaaaggatttctttagaatacagaagaaataaatgaaatgcaaattgtgaacgagtttaatttgaggaataatgaattgagaaaagaaaatgtttataataaaaggacaaatactcaatttgaatgtgaaattgccaaaaagtttgacacaaatccggacacaatttataaattgaagaaggaattgggacaaaaaagagtgaaaacggaggaaagtgaagaaacaaaaatggaattgatcagaaaatttgataaaatgagaaaagaaaaaatttgtgggtttaaatatgacgagaagaaaagatcagtaattgaacgtgaaattgctaatgaattgggaattaagcggaataaaatttacaatttgaagaaggaatttg

SEQ ID NO: 62291 - DNA, 638 bp, Heterodera glycines
atgcacgccatacgcgtgagaacaagcgggagcagagacgaaccaaaatggcaaaggcgacaaaagcccgatgggccaaccaaagtgagtttttcaccaatttttaacacaaaaattccatttttcaaatttcagactagagatcggatacggaccagatccgtatacgtacttttacggatccgtagtccgtaatacgtatttttttcggccgatacgtatttttacgtagtaaggattttccgtatttttagtatgtaagtacgtaatccgtatcgatatcaagtacgtaatactgatacttatccgtataaattacgatacgtattacggactatttttttggcgtttttaaggtgaaatggagtaattttttaaattttgtgcagtcaattcgccaaaattttgaaatttgagggtctattccgtaaaattttcgatgaaaatcgaaaaagcactggaaatatgggaaaattactaaattggaaaaaagcaaaattttatgccaaaaactcaaaacctttacgttattaaattcatttcgtttaaattttacgaaattctttttcatttttttccattttgtaaatttttcaaaattatacatagatattttttatgaaatttgttcaaataaa

SEQ ID NO: 62292 - DNA, 140 bp, Heterodera glycines
atggcactggccgtgaacttcgccccgtgtcgaacgccttcgtccgctttgtcgccgctttcttcggttgttacagctattttccctacaacactgatcccgaccctgaaccaatcgctgtcgttgaaaaggaatgagtg

SEQ ID NO: 62293 - DNA, 143 bp, Heterodera glycines
atgggcttcatccgcaaattgattctcaccaatatgccccatgcttatgtgctttcgctgcagttgggctcctcagttgccgaggacattggccgcggctatttcgccaatatgaacgacgaagtggcggccgtgtgccaaca

SEQ ID NO: 62294 - DNA, 51 bp, Heterodera glycines
atgtttgatagggccagacaagagaaggcaactgtttgtaccaagtttgcg

SEQ ID NO: 62295 - DNA, 187 bp, Heterodera glycines
cagcccgttaaaaatttattatcatggaattgcagagaaactattggcttgcactcggtcgtgtatggttaattatgtaatttcaatcactttgaaatctgtcaaaagaggtgtcatagggggctacccgacttttggggatttgcaactttgggacccgactgttgatgatcttgacattaggtga

SEQ ID NO: 62296 - DNA, 107 bp, Heterodera glycines
ctcgaaaagtagcttaacaacagcccaaaaaaacatgtttttcgtgcgttttaggccacggggagctcaggaaaaaaatagccttttgcctaaaaattggagcccta

SEQ ID NO: 62297 - DNA, 779 bp, Heterodera glycines
atgctcatcaactttgggggttatattcgaattcttgtacgatttcatcagttgtcttctcagcagaagaagttgaaattcaataaagtgaggattggatgagttttcggcgtgtgccaacttaaataatttttacaaattttgtttgtccgacccagtttttgcgaggtcatattttttcatgacagcctatttctttttttaccaaatatcgcccctcagttgtttcacagttttgtcattgaatcggggatgtcccaattccgcgcactcttcggcaacttcgcgtcaacaatactcaacattgagaaaatcggaccccattacagtgtgaaaaaagatttcgtgtcttttctcgacagccttaactcaaacggcttagacaacaaacacatctcattttaaacaactctttacgaaatcatttatcactctttagccgcacatttttctaagttatcccaaaatttgccaatttttgacaaacatgtgtttattatttatttccataaaaattcagaacaagcgacaagcctctgcaaatttgttaattctaattggacgacaattcgacgaacttgaacgacaaacgatttatttttttgtcgtgacaacaaattaggtaagagacaaccgaaaaaattgtcgttcgtaattctgaaaggcaccatcagcagtccctttctgccagttcttttccaggtaaacttaagaagccataacttttttctcaagtgatcaacacttttttttgagaattgttaagcaagtctaatcga

SEQ ID NO: 62298 - DNA, 884 bp, Heterodera glycines
atgcggcagaagaagctgaaggtgtggattttcccggagggcacgcgcaaccgcaatggccacgggctgctcccgttcaagaagggcgccttcaacgtagcggtccgtgcccatttccccattgtgccggtggtcatctccgactacagcccgttctattcccatcggggcaaatatttccacaccggcggccgtgtcattgtccaagtgatggagccgatcagcactgaaaatgtaaaaaaaaacaatttttttggctgagcaaaattttaattgtgagattttttcattggaaaacccttcaattaactatttttgatttgaattatgaataaattcatgttcagtttgaccatgatgatgtgccaaagctgtgcgacgaagtgtctgaaaaaatggtcaaagtgtacgaggcgatcagtgcggaggtccgaacggcgtcaaaagaagcggcgcattgatcgaagcgggagagcgagaaagactgggtggaaaaaggagagaatacagacaacgaaagagtattgggaaagaatggcacggcacagacaaatcgcatttctgatcggggagaaggaagagaaggaggaggaggagggacaaagcgaaaatgagagagacaaaaaatgctcaacaaaatcacttaaatgctctccattgctttcttttttaattctctcataaattgtccagactttaatcgtcttcgttttcttttttaccattctcatattaatgccatacaaagaaagcacgagttttttgaaaatgtgctttttttgcattttccctccgcccctccattttaaaatggtttttttaaatttatttgtcgtaatggctttaccgaaaagcttcttgatattatggatatggctataaaa

SEQ ID NO: 62299 - DNA, 555 bp, Heterodera glycines
gttgaagcatacatggatgcgatcaggtagcaagattatgtaagaatttagtggtcactcaattttctgtaacgcacaggcttgagctgcaatgttggggaatcggctgtagcatattggagccaggtccttcttgccatttttcgggtttggctaatatcaattcgcttttcttcaggcatgttccgcaccaaattggtaatttctccttattaatgatgaacattaatgccataaatcgcacacttggctatattccaaaattaaaataaggaatattcaaaaaataggatttattgaaattgtcgttcttaatttacaggttacgcgacctacaaaatgacaaattggcatttctaatttgtttctttaaaaaaatcagataaatgccgatgcaatgacggcacgggtggacagagcatggcaaaaaatgaaacccgaaataaaagaggaatatggcgaaaattttaagaacaaatgtatgaatatttgacataatgctttcaaattttaggtcaaatttcagttgttgcttcatggaacaaacttttccag

SEQ ID NO: 62300 - DNA, 964 bp, Heterodera glycines
acgtttctccaagtgatcgtcataagtttgtttaattcaattgcctgcgtaatttacgtctcaatgcaacttgtaagaatcagtaaaacctacatcatcgttggcacttatgcatggcttttttcgcatggtaagtcaaaaatttaagccatgaatttgacaactttgtaaataaattttgtaggatttttaattgaaattttgctatctttaaattaaatcattagtttcatactgtataaacaaagatatcaaattattttaatttctaatatgtgggttatgtttggaattgaaaaaatttgaggaatctagtaattttttggtgcttgaaaatgcgtaaattaattaaataatgaatttcatatttattaaatggtatattctctatatttaaaaaatacaaaaataatttttcaaaaggttgtcctcccctggtgtatttgctgctgaacaaacgaattcgaaatgattgtgccaactttggccgtgccattttccgttttttgcacaattgcaacaacaattcggtgtcaaatggaccaattgccatggcatggacggcaccaaattatgccgtgaacaatgtcaacaggaataataataataatatgccacaacgatgaagaccagccgaaagtttttgtgggaccaattcctcagggataaattccctaaaatccagaacattgccgtttttgatactatccattgctgatttattcaagcgggtttttgggaggaggtatgcaatatattttattgtaaaattttttaattttaaatagtatttttaaattcagctttgtgctatgccgaaacaagtgccgaaatgttgttggcaattaaccgatgcatggaattgttgagaccacagttggcacatgccattttcagtggtaaagttttatcttatacagcatttcattgataataattatatttaaatacaattatttattta

SEQ ID NO: 62301 - DNA, 56 bp, Heterodera glycines; identical to SEQ ID NO: 52733

SEQ ID NO: 62302 - DNA, 355 bp, Heterodera glycines
gatgaagttgtcaattctcacaacatttctgcttctgctgctgacaattgccttcgcttcgttcacagcgaccgatgggacagaaaacattgggcggagaaagttggtgatcagtgaaaaagcaaagcaaacgaaggatttgaattcgaaacggaccaatcagtgctttgtgatcagtgaaagactcaaaaaatcaaaaaagactgatcagagtgaaattaatagttgaatttaatattttgattttccagtcggcttttggctcgttccaagcgagactgtaaccgagcgaattgccatcccggcttttgcctgttgggccgttgtacggctggctgaacaatcgactgaataa

SEQ ID NO: 62303 - DNA, 1229 bp, Heterodera glycines
atgccaattgtttgtcgcagaaaatatctatccgagggaattggggtaagtaaaattaattacctaattaaccttgtcgatttaatggttcccaaaatttatataaaataagttaaattaaacaaataaaaaaatgttttaatactctaaagatagttaataatggagaaaattaccctaaaaaatcatattttattatacaaatgacaattgccaaatttttgaatattttataaattagtaatttctataaattttatgaatatttaagtttagagatatttaagattattttacaatgataatttaatacctaatgagaatatcaaaggattttcaaactccaagagaagtaataattgcatgccaactaatttaccaagagcaattttcgtcttaattaattgttcacactttccattcaaacggcatttatttcccacaattcgcaaaacactcactaattttgtctcacttttgaccatttgatctccataaaattccataaaattccttaattattttttttgcttggcactttctttttgaatttattttaaaaatataattcgtataaaacaaaaaaaaatgtatttaccaaaattgcacaatattctgactcatctgctgctgattctttgaaaattggtgacaatggccattttcacaagtcaatggtttcattaacgttccaattatgtaaaaatgggcaaattcgcaatcttttttaatttctattaggaaatttttcattttttgttcttcaaaagttgtcattttatcagggttttttatttgtttagtaatttcactgcattcaatcttatcattgtccattttagtgaagagttgctcatatattttattgtgtcgttcgattggatacttttgattctctataaaaaattgctttaaaactaatttttattattaataaaagtttaaaaatcatttttattgttaaaattagagcccggaaatttcaaatttggattgcggactgggatcctgcaaaatcctgcgcaagatccggtcctgttccgggctctagttaaaatatcatgtttaactgtatgtggtgattaaatcgcgccaacatttccaaatttggcaatgtgtctcttcatcaattgtttctaattgttttgtcattgcacgaaatttgcctattttttgccgatagatttttgtttgcgattcatttaattcttttaatttaacggcatcaa

SEQ ID NO: 62304 - DNA, 670 bp, Heterodera glycines
gaaaattgctcttggtaaattagttggcatgcaattattacttctcttggagtttgaaaatcctttgatattctcattaggtattaaattatcattgtaaaataatcttaaatatctctaaacttaaatattcataaaatttatagaaattactaatttataaaatattcaaaaatttggcaattgtcatttgtataataaaatatgattttttagggtaattttctccattattaactatctttagagtattaaaacatttttttatttgtttaatttaacttattttatataaattttgggaaccattaaatcgacaaggttaattaggtaattaattttacttaccccaattccctcggatagatattttctgcgacaaacaattggcattggattacgccatattgttttgcacaaatccaaccgtttcgtccgatgctgagaatcggctgtcaattcgtttgtattttgccaaaattatggcaatttttacgaaaattttcaattttattacaacgagtacagaaaaagaaaacaagcaaaaatatttgcttgtatttgttgaaatttggaacaaatttgtccgcgtattcatacagaactccaacagaatgacatttcatcgactggtggcatactgtacaacatttgggcgggaattgcatcc

SEQ ID NO: 62305 - DNA, 904 bp, Heterodera glycines
atgacaagcctatagtaatttacaattttttcatcgtttgccttttataaatcgattaaaagtgcaaaattggttcattttacgacaaaatctgttaacaaattgcaccaattttagatttttctcccggcgaggctccaaaagtttattcgtttcataaaaaatggttcaaattcgcaaatttggccttgtttggataaaatttgtgcacaaattgaactcaaattttaaaaatttttgcagcggcgtctatcggcgcccctggaccccttttcccaaattttttttttggaaaatcataccgcaaaaagacggtatagaaatcaaaaaaattggccgacagagaaattaaaatcaaaattcaacggcatcttcattggaggcaattttctttttaataattttgggaaattttcattcacaaacttttttcttttttgcagtttaaattttaaaatatttaaggtagcacttccggacttaccagtagaagttaccaacacattgttaagcagcgttaaaaaaaagttgatgaacataaaaagtcataaatatacattttaccctgctggccaatatgaaattattgtggcacttggaccatatggtaagtttttggggaaaggcgtttaggaaaaaaatccatgcattttgccaacaagtaaatgtacaaaatattaaaataggtgctagcagctgcaaactgaaaagtttgaatgaagtttcaaaaaactcacaaaaatctatttttgggcaggaaccttttctaaaaaccttacaataacagattgattgattaaggacctacttttatgattatttttcagacttctgggccagtattcagcttgagaacaactatgttctaaagaaattgaaatattttaaaacagtggatttttaa

SEQ ID NO: 62306 - DNA, 1167 bp, Heterodera glycines
atgagtgaattcttgaattatgccgatatgacaaagactatggaagacaccaagggccaattgtgcaattctaagagcattaattttaacaaactagcggtatgcttttaaatttaatatgtttgttaatatttgcattaaaagtaataattatttgaaaaaaaactaaattttataaactcattaattaaaaaaagtttctttaatgattattttacaattaattatcaaatgttatcaggttgcaccttatgacactttttcaccagaaaaaatgaacaaaaaattcggagaagtcgaacagaaacttaataatgtgcatgagcaattaattctcaagcaagcggatattgaggaattaataaaccgagaaaaaagtccattgaagttagaaggacaggtaataacaaacaaacattttgtaaaataaaaataaaagtaattaaagaatgaacagcaatcaattgagcagtcggccgtagaaactcagattcgcaatgagcaaactgcagaaccaaagtcatttggccttccggtgcttgttgatgtaaaagatttaaccccgacccatctaattgaacctcccatcgaccaaatcgcggcatctcctaatcacaaagagccgaaattaaagccaagatatcataaagtcataggagacggcgattgcttctacaggtcgttgagcttttattttatttttttgaaagaataaaattttacagagcaatatgctattcgatttttcaagttgatgaaatcgaaaactctgatgctttacgagtggcagcaagcagagcgattgaaaaaattgtgaataacaaagagatattcccgagaaaactgtatgaaactcatgcggaattcatcaaggagttagaattggcacttttggagaggccgtcaactaaggactacaaccaaagtcttagtgcctatgccaaacacatcgcaaaaccggcacgaaatggaaaaggccaatgggcccagcttgaagatgcgcgggttgcttctatccttttaaagcgcaccgttgtaattcttcatccaaatgaggaaaaggagttgcttgaagaacaaaggccaaaatatgacgatccatcgataaagaaacgcattaatgtttatttcccagacggggacacaatggttacgatttatttttaa

SEQ ID NO: 62307 - DNA, 135 bp, Heterodera glycines
taagaaaaaaaatgctttctaaacaatttattttacaattaacgaaatgcgactgtatgcggctgtcattttttcccgccgttcgtcaggttcatcagatgcacacgcaatctgccgttgaaaaagcaaaaggag

SEQ ID NO: 62308 - DNA, 1063 bp, Heterodera glycines
accggagattggtgaccacaacgcagatctcagacagcggtgcctcaaatcactcgaagagaacgcaaccttcgaacaacttttggccgagtgtaagcagatcattggccttcgccacagcactgcagctttggctcgtggaaaggagttcaatgctgtgcagctgcgcccgcaaattttgaaggacaaaccgagggtcagcaaatcaccaataagaacacgaacattttcgaccaacacgcggcacaacagcacttcatcaccatcacaaccaccatcggcttgtacgagatgcggcggtaatcactggaactcggactgccgtttccaaagggaagtgatttgcaataaatgcggcagaaaagggcatattgcgaaaatttgccataatcagaacaacactccccaacattcaggctttaaatattcccgcacaggctcaaataagcaaaatgccaacatcatcgactgcctgcacatcatgccatccgactggaagacggaaaatgaaccgtacattgagcggcatgttcggctcaatggaaaagtgcacaaaatggtagtcgactccggctcaaaattgagaatcgtgagaaagctcatttgggtcaaattgggccaaccgtttctcacagaaacaaagctcaagggtcgttcattcacagggaacattttcacatttatggggaagttcaaggtccaagcagcattggacgatggaatgcccctcgatttggaatgttttgtcatcgattcgacggacacacttgacttgatgggacttccatggataagagcatttgaacgcgcctacaaccaagtggtggcgacaactttgtcaatcgaaaatgtgccgacagtcgttggtgcaaccgatcaaacagcacgtcgacgcaattggagatggatttacagaacacatttccaaacatttttgaggaaacattgggactttgcaccaaaatcagggcccatctcaaaattaaagaaaattcatctcccgttttttgtgcagcacgaccaattcccatcggcgttaagcaagaagtggacaaggaattag

SEQ ID NO: 62309 - DNA, 63 bp, Heterodera glycines
atgcgaatggaattattcaatcaaaatatgtcttcctcagcagctaaaagatcgttcccaatg

SEQ ID NO: 62310 - DNA, 192 bp, Heterodera glycines
atgttttgcgtggcgatgaattcagataattatgatgaagcactttcgatgcttcccgatcgaaaaagcgaagctaaagtgatcgaagcgtatgcacgacgacgaagtaaaaagcgtaatcgtcggaggatggttgaggaatggaagcgtccgatgctatttggttggaatcgaaaaagtgaggagaaagtg

SEQ ID NO: 62311 - DNA, 820 bp, Heterodera glycines
tgtaccgccttcagtcaaactccccgcctgacactgtcatcggcgcgggtcgccgggccaccgggtggcccgacttaacaccaaaatggacaccctttcgggcgcactcccgttttaccgattaagtaaggaatcgatgaaagtagtggtatttcactggcgccttgcggctcccacttatgctacacctctcatgattcttcacaaagtcagactagagtcaagctcaacagggtcttctttccccgctaaatttgccaagcccgttcccttggctgtggtttcgctagatagtagatagggacagtgggaatctcgttgatccattcgtgcgcgtcggtagttagccgacgaggcatttggctaccttaagagagtcatagttactcccgccgtttacccgcgcttaatcaagtttccttggcttaacattcagagcactgggcagaaatcagacacggtcaacgtccacaaggaccatccgtctcctctgttttaattagacagtcggattccccgagttcgtgccagttctaaactggtcgttcagcgccaaccgaagtgcataccctgacgagcatacacgcagctgaagcgctccacaagcagctctcaccactagtccacgcaccatccccgaaagaacagcacgcagccacgggcaaaagccgcctgtttcacgcaacagcccggctgacccgacctttagagccaattcttttcccgaagttacgaatctaatttgccgacttcccttacctacattattctatcgactagaggctgttcaccttggagacctgctgcggatatcggtacg

SEQ ID NO: 62312 - DNA, 858 bp, Heterodera glycines
atgattctcctcacagctgtatatcttctgtctcttaatgaggttcgtaataaataataataggacagctgattctgttatttgtcgcaagctcttattttgactgggacacatttttatggtagaattttatggagccatatctcatatctttttgagttttaactcctaataaagctataaactgatttgggcttaaaattttttccacagacatgtaaaaaagggttcctggacggaggggatttatgaccggttttattattattttggtggttttcagaccatcttgtttaaaagtataataaccattaaaaacttatactctccgagtgtaaccataattacctatcaggcgatcattaaattttttattaacgaatattttgtggctaattatgccaagactccgagaggcgccaatcacaatcacgaacgacaatgacatagacaaacaaatgacaaatttgtcctaaaatattcgacattttcctttatcacaaactcaattaaaaaatgggtcgtatcatctaacaagagaacaaacatcgcgaactgtgagtgtccaaatcaatttttagccacttctatcatgtagagcatagtcgatttagtgattggccgacatttgcggcgcagacacttgcggcgcccagtcaaagcgacacttgcggcgcagacacatgcggcgcccagccaaaaggacatttgcggcgcagaattaaatgaccccaaaaatatttcaacaatttatttaagttaacaattgttattttaatagtttattatttaacaattactaatttaataataattcttgcaacctatttatattctatatgtcttatttctaataaa

SEQ ID NO: 62313 - DNA, 77 bp, Heterodera glycines
tccgaatgggaggcgctgcagctgtacacgcacacgttcaacccgagatagaaaaacggaaagaaaaccgtcgataa

SEQ ID NO: 62314 - DNA, 1205 bp, Heterodera glycines
ggaccaaggctgacctggtcgaagaagatggtgttgacgtcaaccatggcaaaaatgacgaagacggcgaagaggacaacggtggtggtggttcaacaccaccagcagcggcgggtggtggtggtggtgcggttactggccgatgccgacggcgggtggacgagttggaggcggaacagttgtgccgggcgcatgccatgcttgcccagctggaggtgtcctccaagaccaacgtcaacattgacacaagtaagcgaaagggtaaagcaaagcgacaaatttaaagggccgggagagggagtaaaattgcattaaaatttgcggattttccagaaaattcccacccccccccctctcaaaatttccaaaaatggtcatttaaaagcaagcgattttggagtgccggggctaacaaataaggtcggactggcataggcaccgaaaaatgtggtcggtcaagctttttctatggcattcattttgtcgcccgagtttcggttgcaatttttcttggcggagagattgggcaattaattggccaaatggcatttcggcactcatttgtcagtggtttatttttttttctgtttttagaaaaaacagtaattcaccataaattttgataatatcgctgtacaattttttccttgaaaattcgtacaaaaaatttttctaatttttttttgaaaaacttttaatttgaaaaattataaaaattacagttttccacgagttggcccaccacctgaagcgtcactacgatgagctgggccacttggacgcgtcgggcacgggcggcgggcccaagtcgacggcggacgccgccttccgtctcggctacccaaacgccaccaatttgtccgcccggtggcgccgctgttgcaactattacgcatgatcatgccgaaacgatgtgccgcgaaacgatgataatgatgaaatggtgccacattcttacgaaaaaatgttttccgtgtcatttccgagtgtccatccgttcgatttcccgaaaatttcccaaaattttttttgtaattttgccattttcccgcccgtcaaatcacaagcgaattgtgtgcccggctctacccctaaattactcaattaggtgtgattgctttcccaatttaccaatattcgcatcgattggcccgtcggtccctacttaaaattggattttgccgaaattgccgtctaaaattaaa

SEQ ID NO: 62315 - DNA, 1147 bp, Heterodera glycines
atgaccgacctgttgctggacccggccatccgcacatgggtgttcgtgcccattgtggtcagtcagtttgttttgttttgtcgtcgacgggccaccactttggggccttccttttggagccgtttgcacttttcagcgcccgtgccccgaaatgccggccgttttatgccgttttttttttatcaaatccgggttctctaagcacgctccgtgtcagggggctcgaaaatgacattaaaaaattttctaccagtctcatttcccacaaatcgtgcccaaattagtttctgatcactccgcgatcagaattttgcactgtttttccatcccaaaattctcccccccccccccctccttttagttaatcacttttttggttggcattgtccggcactacgtgttcctgttgctggtcaccaagaagagtgctgacctgcagtcagtgcgggacaggtgcgtttttttgtccataagaaaaaatttttaagcatttttttttttttgaaaaattgccagaaaaaattttcaaaaattcttttcctgaattttcttgtttaaaaaatgttttacaaatgaatattttttgagaaattattacgcttttcatttctaccagccctttccgttcgttaagccattggctgctgaaggcgcgtctgttgcgtgagaatgggcgctttttgcccgccgattcgtttgcccagcggcgctggctgctgtgtgacgagcagcatggccagctggtcaagcggcaggacaaacagaacacgcagccgaacccggtacagttggtttagcccgggggcgggggcaaaacagaaaagaatttttagaatttttaaaaaatttttttctccgatccaaaggggtgccattcctctaaaagtcagaaaaatcgggcacttgccgagtttgaaaatcgggcactaaaggaaggggaggtgccgccgacagaggcgccgcgccattgaattactaccatttttgtgcagtttttttcaatttatcccttcattttcctaaaagatgctggacccgtccacgatgacggagatggtcaagggcaacatgctgaacatggtgcccatgctggtcatcggcggttggatcaactggaccttttccggcttcgtcaccacgcgggttc

SEQ ID NO: 62316 - DNA, 867 bp, Heterodera glycines
cgtcgttctgctgctgaagtgccaccgccaaaattgggccgtcaaaagtgtacgacgacgaaacccatccgatggaccctgacgactcgttcgactacctgttcaaggtgagtaaacttcattttccttcgttgtttccacccccccccccctagcagcccctctcgaatttaaaaaaaattgaaaaaatttttttgtcaggtggtcctaatcggcgacatgggcgtcggcaaaacatggtaaaaaagcgtaaatgtccatcacctttaaaattaattaacataattgtctgtatgggaaggcactgagaaaagcaatggcatggcaacccctaaacaatgacacgaaaatttaccgggacaaatccaaaagtttgaaaattaaaaatttaatttccctttcccattttcagcgtggtccaacgcttcaaaaacggcacgtacattgagaagcagggcaccacaattggcgtcgatttcaccatgaaaacgctgatggtggagggcaaacggatcaaattgcaaatttggtgggccaattttcggggtttttcggggaccgggggaattgcaatcaaaaaatgtttaccaattaaattttaaggctgtttagagggcatagtcagaggaaatcaaaccgaaaatttttaaagaatttttatggttcggtttttgataaaaaaaatttttttttttgaaactgagggcagagggggccaagccctcatttttaaatccgtttttcccatcactctccgaccgcatggccactaaaatgtcgtctttcagggacaccgggggtcaggagcggttccgcaccatcacccagtcctactaccggtccgccaacggcatcatcctgagctat

SEQ ID NO: 62317 - DNA, 349 bp, Heterodera glycines
gcgtcaatctcagcggcgccccgggcgacggactcggccaacgctggcgtacgcccgcggaagcggtggcgcgtgacgcgtgcgacattgtggtggtcggccggggcatcaccggcgcggcggacgtcggcgcggaggcgaaacgctacgcgcgcgtcgcgtgggacgcgttgcgcgcggcccgcgcgtggaccgactgatcaatcaataatttacctaaaatgccattgatcaaaccgatcattttggaaaatttgtcactcatcgatggtttctgttgtttttttgttctgtttcttacatatgcctttttatttaatttaatttatgttcgtttttgttttgtttg

SEQ ID NO: 62318 - DNA, 448 bp, Heterodera glycines
atgaaagtacccatttcggtcagttccggacacgaattctgacaaaaagcccaaaattttagaattcttaactttttgcttctataacctttttacataaaaaacattgtaccattagaaaatgttacactttcaaatacaaaaatcaaatgaagcttcgaccttttgttcaaattcttgtccgaagttcgaaatttggcgaaaaccacgcgggaaacctgtttcactggcccgtttcataccccaaacatttcactaaaaaaaaaaaaaaaatttttcaggcttctgctgcacccgctgctgcggagaagaaggaggaaaagaagaaggaagaagtgaaggaagaatcggacgacgacatgggcttcggactgttcgactgatcaccgaccgattgatcgatcggacggaatattgtttttgcttcttaccatttcatcaaattaaa

SEQ ID NO: 62319 - DNA, 825 bp, Heterodera glycines
atgttgattaattccgtttttatgattcctttttttattagtatttttcaacaatttttaattacattttcaattgcaaattcatcggtgagttaattataattttactaatttatttcattaattaggttgaggacaatatgctaattgcatttttgaaaggacagaaagaaattcaattcagtgagtattcaagacaaaaatatgaagcacaccttggcatcatgcattttatgagaatgaattggcaatgtgacaaaattgcggaggaatttgaagaatatgaacggacagaatgccaaaaatatcgcaaatatttggacattttgcacgaatatttgtacagagaatatctcggaatccccacagtgaagccaaaatttgtgtttaaagaacgaattgaaattaatggaccactgatttatgcggtgaattgtctggccaaaatttcgcaattttattttaaattatattggagtaattattgtgaatataaattaaacaaattattcaataattattttgaactaaaattgttgaatgagaagagattaaattataaacaaaaattgccaattaatgaaatgattttgcaattggcaattgaaaaagcgaataattataaaacaaatgaaagtttagacggaataataaaacaaaaatttgatgaaaatttagagaaaatgttcaaaaaagcggaagaaagggcaaaaaaaaacccattggaaatcaatttaataaataatgacaaacatttaataattaagcattcggaattcgataataaatggacatgggtgagacttaataatcaatgaaaataaa

SEQ ID NO: 62320 - DNA, 623 bp, Heterodera glycines
atggcagcggtaaaaaaggtcggaaaaggacccggaccatttttgccagagatgtgctgggcaacttggtgggaacggttcgaattcttcatccagctgaaaggcgtgactgatgtcgcaacaaagcgtcttctgctgttcaacgaaatgggtcaggtgtacgaagagcttcgacgaatggcacagcccgatgatgtccgaaccatggaccttgctgaaattgagcaattgatggtggaaagatttggcgaagcaaaatcgatcgccgcgtgcaggcatgaattattttcagccaagcagcaaacaggccaatcgataagggactactcagtccaattgagaagtttgatcgcgaaggctgaatggagccgcgacagcattgacatgtgtctttgcgcattgtttatcaatggcatctccaatgatgcaattcgggttgaattgatcaaaaaaggtgacaaggacctaaaattcaaggatgccgtcgaatcagccgttttgttggagcagtccaatttggatgcccaagcaattggctcaaatgcaataccggaggtcgcaaaagttggcactcagcaaagaggaccaagaacgccgacgaaaagcacgagaggttgctttcg

SEQ ID NO: 62321 - DNA, 740 bp, Heterodera glycines
atgctaattggcctgcttctgctcaatgtgttcgccattctgttctggaattttgtgtggaaacgccgaaaattgccgcccgggccaagcccactcccattaatgggcaatttgcaccaattagccaatttcccggaccatggcggtgccggtgcgtacacccattttgccaaggaatatggcccagtgtacacgctgtggctgggcgaagtaattatcatacatcattaattagggtgcctttgcttcaattcatcactaattaaccgctttaatctacaatttccattttaaaccatttaaataaagcaattaaaaggattattagagaataactgattaattactctctaattaactcttaaaccaataattgtaaaacaaatttttgttaggatccttatgtgattgtgaccgactatgagctaattcgttctatttttctactaaatttcaatgagcagacgtcgggacgccacttttttggcatcgcccaattcgtttcgggtcagccattggaatgcataattaatattaaaacaaatctgtgtgggattagtaattataaaataatgtcaaaatatgaaaaataaattagaaatcaattctttctttctttaattgtggcggattaaaagaaaaaaaatttgaaaaaaattaaataattttttaattaaaggaactcatggcctttacggtattacaaaaacgcatggtgaagtttggctgtacctgagaag

SEQ ID NO: 62322 - DNA, 875 bp, Heterodera glycines
atgggaaaaagaaaattattacctaaaattcacggcaaaaacggagtgaaagagcgtcaaaagaagcgggaggagaggaaagcgcaaacggccaaggcgacagaagctcgtctggtaaagaaaagtgagtttttccatttctttttcataaaatccataatttttcagtttttagccgctgcccagcccaacaccgatgcagaaatggcacaaccatctgaagaagagccatcgacatcagaggcaccggcgcgggataacaacggacgaccaccatcaactccaacaccgatgacaccgcaggaaatggacgtgccgtcggtggagatgatggaaatcggtgttccgttcccttcaacgcctgccgacggcgaccaacaagccgagcctgtgccgtcaacatccacggcacgctgtgacttgctgtcgacaccatcgacttcaaaaggcgccggtaacttcggtctcgatgatggtgagtgaaatgccatcaaaaatttgatttttaaaattatttaattttaattattttcaagtccatttgacgagctacgacggcgttacgtttggatcgaggaggagctgcaatgacagcgccagtcaaacgccttcctccgaaaacagctcaaggcacagcgcgaccgttcgacgagcctcgagcgttcggcttcagcatgccgccagcgtaaagccctttccgacgtgaccaacaaccaacagatggacatcaggctgagcgcggcaaaggatctgctcatcacattggacgcaggcatctcgttcaaagcccgtgaagcattgaagcggtcgtttaccggccaaggacttgacgtttgggcaccgacaagagcagtgaagcgtctgaagacggagct

SEQ ID NO: 62323 - DNA, 198 bp, Heterodera glycines
atggctgtgatttcggccgtcaccgtcgccggcaatttggtggtccttctgtcctttgtgctcgaccgtgccattcggcagccgtccaattatttcattgcgtcattggcaggtaaaaattcgcaaaattctttaacaaattgaaaattcgtgcaaatttcagtgtccgatctggtgagtatgatcatccgtctgtaa

SEQ ID NO: 62324 - DNA, 957 bp, Heterodera glycines
atgggcaaaatgaaaatattcattttgttgatcaattggatggagaaaatggaaatggtccaactgatcaacaaaaaagagaaacaattcaaaaatttgaagcaattaaagaaaggttgaagcaaaaaggaaaatatgaatggaaaaacaataacaaaattgaatgtaaaattgcaaaattattaggccaaaatcgccaaaaaatatacaaatggaaaaaagaattaaatctaaataaaacgaagaaaaagagtttttatgaggggaaaaagaatgaattcattgaacgatttgatgaatttaaaagtttatatggccaacgcaaacagaaagaatttgcgaaggaattgggcatttccaaagacacatttttaaaatggaaaaaagaattggcgccaaattatcggaaaagtaagtgaaatttttagaaaattaattaaattttgtacttatagtacaaaagaactattccaataaggacaagttgagaaagatgaagcaatattttaaacttaaagaacgaaatccaaaaattagcgacgtaataattgctgggaaattgggaattggaagtgaaactttgcgcagatggaaaaagaaatttgcattaatttcaactctgtaatttatgaaatatgtcgattataataattggattgtagttgctaaaatagaaaaaaatcctaaaatttttcatattgtgaattcatttcacattcatcttttttattatccactaattattttaaaaaatttattcaaattaccgcacgaacattgatcagatggaaaaagaaatttgcttatatttcgaaaatgtgatttttatagcgtacaaaatgggtaaagtaaattgtttatacattcatatgtttttctattataattaactgtgagaaagtctttgggcattttacataaattttaaaaaatttcattaatttgcttagaaataaa

SEQ ID NO: 62325 - DNA, 1445 bp, Heterodera glycines
  unsure (1)..(1445): unsure at all n locations
atggaaacgcttaaaaatttcactcttgacgatttattcaaagtattggctcttcaagacaaagaattcgaagaatggctcaaagaacttaagcttctacacaccacccgtttttgcgactgtggcaatgaaatgagctacaaatggaagcaagatcgacaacaaccactttggatatgctattcgaggaagaatcacgacggcaaacggccaactgctggatatttcaccggcactttttttgaaggagcacatctttcgcctaaacaagtttttctaaaaggccaaatttacatgaatcaattttatattaaggtttttaaattttcgtactactgggcccacaaatttgcaaatgatcaaattatgtttcaaatgatattgggaagtgatacagtgaccgattggaaaaacttcatgagagatgtgacatcagaattttacagcagaaatccaatcaaaatcggttttttgtttgtttgcaaatgttttattanatgataagttnangcgcagcaggtgcgacggtggaaatatttcggatttttgtggcgtaagcaattcgaggaccgnatatttnttataatttgtgtcacaaatcgctgaatgtaccccataaaacataaagcaccttttatttgtcatttaaagcaattctgataataaaaaacaaaaaaaaaaacatttgaaaatttctggccaaaatgggacccaaactgcattagtgtacccacctatcggcccaatgttcccaaaaagttttcaaaaaagcgcgccgtaaaaaaagtgactgggtcgtttcggcgccagccaaagtttttgggttataatttttttttcgaccaaaccaaaacaatcttggtatcattcctaaacctttcacacgttctattacaaaaagtataaattttctagcaaccattaagaaaaaacttaatattttctactttttgtcaattttcatgttataacttttttgctaattatctaatcgctaagcattaacatagaaagagcttccaaacaagataagcttttgaatgatactacaattgttgaacaatcaaaaaagctatagtccaaaaaacattgttctggcgccgaaacgacccctccccactcgagtaaagtgtatgggttttgtgctctctgatattgtttatatttatttatttatttttagcgtttatctcattttcgtcttaatctcttcgatttccttcaaattgcctctcatccgccaattatgtcttctcccccaacaccaaatgccgcgctcattttggaggcacaggccgattttgcgttgaatttgctgcgtgaggtgtccaccgacgaccgttcgtgcgttgtttcgccgttttctgtcgccgtcactttgtccatggtttacgcgggcgccgaggaaaacaccggcgaagaaatgggccaactgctggcaaagg

SEQ ID NO: 62326 - DNA, 304 bp, Heterodera glycines
atgatgcaaaacggcttcggcgccgagcggagttggacgaacatgaaacaaggcagaaaattcgccaattggagagaaggaccaagcaaatggcggaaacccgacggctcatcaactttgcaaagcttcagcaaaggaaagcggtggcggaaaaatgtagagcgcagcgcatcattgacgaactcgaggttcgtgaacactactaacactactaaatttattcatttaccgaaaaaattccaggggcgacgacacggaagaggctgagaggaccgtggaacaaaaaattgaggaggcgttgtag

SEQ ID NO: 62327 - DNA, 934 bp, Heterodera glycines
aaagccattcattcttccgtcgatgccatcggcaacaacacttctttcaacacttttctgttgtgtgatttggctaatttgctccaatggtctcggcaccctcagggcaaatgattcaatcaattcgagaagagtgccgggatgccctgacttggaagccttccagacaagctcatcattggaccttctcagttccccccaactgacaaaaataaactgtctctgtggcccggaacaatcaatcgacgaaacattggcacaaaaggagttggcttacaatgaagagattatttccatcacttgcatttatggcacgaaaatcacagatttgagaaaaacgctcgaatttgtagcaaaagccaataaaagcgttggaagggtaaatacaaaaaaaagaacgaaggtgtgaataataatttacagatgattctggaccacgtggacttctctgaagaggaaatgacaaactcagaagagcattttcatctgagccacgaaattgcccatttgacgcatttggaagtgaaaaagtgtaaagggattccgaatttggaattcgaaacaaattcgaccgccaaattcgactcacttgttgagttagtgatcgaagaatgcaacttggaaaaagtgccaacgaaactgctgaggaaagggcccaaactgaagaagatttcgttggcaaacaacaaaatatcgacactgagaaaggccgactttgacggagttgaaatggtgaggtgaactaacaaaagacaagcttatagtgaatggcatttagttggagacactgaacattgcgggaaattcgctttcatcttccatcgagaaaggaagcttaagtcagctcaacaaccttaaaaatttggtgattggagaccataattatggaagcttatcattgttaactgaaatcggacaattgaaaaacttggag

SEQ ID NO: 62328 - DNA, 273 bp, Heterodera glycines
atgaccttccaaaactactcattggtcaatgaagtgagaatgaattatttaataaaacaatgaaaaattagtcggaaaatattttcaaatttggaagggcaatttctaaaacaaattatgctttttattttaaggcgttcaatcgtttcggcgttggcactttctcaatggaattgtttttgacgcattttttccgttggctcgtttccctgcccggaatgttgttcaatgcagcccttttgaacacaatcattcgcgaaaagtgataattaa

SEQ ID NO: 62329 - DNA, 1208 bp, Heterodera glycines
atgtcgcaacgtctaaccggggatgtgccatattttcgaactgtgccctcctctccgtcaaatgaagacgacggattggcggacgaggatgagccggttgatcaccaaagtcccactgctcaacagcaaaaagcggcacaaaacggtagctaattaagagccaggcttcgttttttggggaataaaatcttttttttttttttttagaaatacgggccaagaaaagacgattctctgagttcgaattaggtcggtctgggtccaggtttatgcttttttttcatggaccaagacgccaagccaatgcatcttaggccgtcggggtttttctttgggtctgaaaacccaggcccagttaaatccaaaaaacctgagtttcctggaccatcatttatttttctatttatttgttatttaaaatgataaatttttgataattttaagtggttcaacattgaattatttttaggtaatttttatatttttctaaacaaaatatttttggtttctgggcattaaaaaacacaagttctagcggtgggttttttcccagaaagtccaggcttaattcaaacccagaccaagacttttcaagtcccgagctctaatcattatcacttattttaccctacaatttttcaattttatttgacccattttttccttttttctagtggaggatgatgaggagacaattttgcgacgtcgacttttggagaaaaagttggaaaaggagaaaacaaaggcagccgcgactgttggccagcagatgacgaaggagcgcgacggggccgaacagaagggggcaaaggatggttccagaaaggagcacccgcaaaaggttttcggcatttttgtgggcatttatacgctaatttgtggttttggtttcgttttaattccgagtcttggtcctaaaaaatgattttaacccaaaaattacacaaattttagagcatttgtgggtgccaaatttaaaaaatcaacagcatttatttaggagaggccaaagcgtgagaaaattgtgtgggacagagaaaaagtgacggcccctaaatcgtcgcgtcatggccaattggtgtcagcgattgcggacaccaaacatgggcaacgttcacaaagccaggtttctgtccaatgatgcgctcatttttggcaatttttttttgtctaaaaaggggaattcttggtagcttatgccacaaaaa

SEQ ID NO: 62330 - DNA, 226 bp, Heterodera glycines
aaaagcgttggatcgattgctcatttggtttggttcaattcttatcacaaatgtttgttgaaaattttaccattggaaaaagaagggcgatttgtttgtgaatttttaattctggtgctgatacatagcaaatttccagggagttgaagaaggccatcgaaaaccggaattcacaacacaaatggacaatggcactatttttggtggcaaactcacagaccactaa

SEQ ID NO: 62331 - DNA, 144 bp, Heterodera glycines
aaatcgtgggttcaacgtgcaaagctttggctccggcaattacgtgaaattgcccggcccaaaagaggacaagccgaacatttacgagttcgactccaccacatatgaacacattttgcaggacctgaagcagaaagacagcaa

SEQ ID NO: 62332 - DNA, 999 bp, Heterodera glycines
atgtgggagaaatacgcggtgaacaaattcaagccgaacaaaggcgttggcggtgaatacgaagttcaggtaatttgagggggaggggagggatttggtcgtcgcaattggacttttcctttgtcagtccgggttcggctggtccaacggagttatcctggacctgctgaccacctttggggatcggatggagttcaagaacgacttggaggaggaccccagcgcagtggccaaggaggtgatcaaggcggagccgcccaatttgcccacgcccaacccgaacattacacccgtactcaacggacccttcgtggcggttgggccgcagggcgaaggcattggaattccgaggccaagcggcgcccttcgaacagcgatggcacctcggcacacattgtgccgatggttgtggtggtggacaagcgtactcatggcactgctcgtcactcgcacaattcattgagtagcaacaacaaaggggacgggacaaaatttcgccgcaaaaaaataaaatcaaaaaattagacttagaaattttttaagaaaaaatcatagaatttcttataagaaaatttcaaaaaaaaattagaaaaaattttaaggattttttttgaaatttatgataaattagtaagttttttcgaaaaattttccaaaaaatcactaaaaaattttttcaaaaatttttcattggaatttccatataaaaaaattctaagaattttttcttgaaaatttccaaattttttaaaaaaaaattttggcgaaattatgtcccggcgaaattccgtccggcgaaatttcggcggcgaaattttggggtgcaccctatttaactgtaaggattaaaaataaattattaaatattttatttagcgatcttctcaagcgcaagtgaacgccttcaacatgacgaagcaaatcttcaacgatcctttgcgggggcagaaagaagcaatcgaagcgattgtggacggcactctgatcacaatgcacatg

SEQ ID NO: 62333 - DNA, 841 bp, Heterodera glycines
atgtcgacacacagtaaatcatgtaaggcgcgctgtgtgctgtgctcacgtgttggacctgcttttccatgtccatcatccgccggcttcttcaaaaaatgtaaagagtgcaacaaaaaattcaccaacaacggctgctaccagcatcatctgcagtcaggcttctgcaagcggtcgaaaaagtgcaaagattgcggtgctgtttgggatgtagcagataacaaaagaaatggcagaaaggggcatgtttgtggtgaacgcttctgtaagatgtgcaacaactaccacaacaccgagcggggatgctacatccaacccatcgagcccaaggaacgcgacccctaccgaattgtggcatttgacttggagactatgcagcacatgccatctgaaaagcccgaaaagcgtgaacatttgcccaactttatcgctgcgcgtgtcgcctgccccgactgcattgaaaatgagagctggcgagaggcatcgggagggtgtgaagtgtgcggtcctaatcgtacggtcgcgttctgccagcgccgcttcaccgaaacaacagtcgacaagcaagtggtggcggaaaaccctttggatgcgcttgtcagctggctgataaacgacttaccgctcgcctacgacacctatgccttctctcactttggcggtcggttcgatatggtgctggtgttccgcgaattgttcaaacgcggatataacccggacatgttgcgcaaagtaataattgactatttttcaaatttgaataattttcaattttaaggggaataaaatgtacgaaatgcggattcgaaggcagaaaaagcgcaaccccaacattggttag

SEQ ID NO: 62334 - DNA, 448 bp, Heterodera glycines
atgaaaagtgcacccatggatatcgttgtcctttggtatcaccgtaatctggtttctaattaatttttttatttagttcttgatctgcttcctacgtttttgaagactgcttgaatgttttagatttcattagttcgtgtttttataatttcataaaatttataattatttgcgtttatttcgaaccctatgaaatatcttctttagctgatgttttttcaaaaaaattatttattgctatttttagataacattctgtctttctatattatttcttacatttataaaatttctgtttcgattactaagatcaatgaaatttgtggagacaaaaagtgttaagtaaaaggtcctttagatgaaatatatttgtatgtgtaattttttattcgtaaaaaatttataaatagaaaaatttttggttaattaaataattctttttaataaa

SEQ ID NO: 62335 - DNA, 478 bp, Heterodera glycines
atgcgttcgcttcgcgcattctttcattctcgacatggcgaaggtattcgttgttggttttttaaatgaatgatattaaaaattgattatggaaatatttttgacatgctactttatgctttaaggtattactggagatcataaataattataatattttataggacaaaaattaacaaaattattgattgtaataattatacttttatcaaattttatttttttgtttttcaatgactgtgtttaagaattttatttgctaaaaatacttaagcaatcgctgcgtttgcgcacgcatatcgttggaaatatgtattttttatatgtttaaccattttcatacatatgtaataatttctatttacattttggtaaaatttattttttaatcatatctttattttttcagtcaattaattcaaaatattttcgaatcgttttttgatatttatttggttctctttgcataatttttgta

SEQ ID NO: 62336 - DNA, 1069 bp, Heterodera glycines
atgaagtggaataaattaataaaaatggaaaaaagtaaaaaacagaaaaatttgaatttgtttaaagggatttattttttattttttgagatcccaaattaatgggtgtattttacaaaatttttagcggttttacgccaaaaattactattttttaccattttagtctcattaataaaaatcatcattttaataattttatgaaaaatttaagtcgtcggcaatcaaaatacataaaagaaacaaaaatttataaaaaaaaaagcaaaaagaactgaatatacaaataataaaaatttaattaaaatatattaatacatatggaaatataaaaatgaatttaaataaaaaatcaatttctatcaaattctgttaaatgatccatatatttctaacaaaggcaaaacaaaaattaaaaaatagcaaaaatagcaaaaattctttttaaaaataaagctcaaattatatatattaagaatcagaacaaaaaaagtaaaacttgttgaataaaatatatgacaaaataaagtgatatttttaaccaatcaatgttcatttttaatatcattatttggcagtttttttaaaagtttgtgatttttcatattttctctctgaaaacaattataattttattttagatagatcataaaaaaaaatttatcatgcataatctataaattataaatttaatttattgaatataatttgcataaataaaaatttaaaggaaatcaaaatagctaattgttcctcactaaagataaatcaattaagttgaagggaccgataaagagttcttacgtttgaccaagattaaaataataaattcaaccaaatgatgaaaatgaattaaccttgaatacacaagatttttaaatacaataacaaattttaaaaataaatatttatagataaagaaattaattgaaaaacgcagatttgtctaattatttacaaattttaactataacactaatgacgacatagttcatggtgtatttgaaaaatgaatttatatatgccaaaaaaaattctttaaagataaaaaacataaccaaaaaataaa

SEQ ID NO: 62337 - DNA, 663 bp, Heterodera glycines
atgatgataattttatcaaccaaactgctcacaatgtccgttctgctgcttccaattttgcttggcaatgcaaatgccgctggcattggcgaccgacaaaaaagggcggtggaggaggaagaacaaagaattgtgagcgaactgtgtgccaccccacccatgcacagaagttcaaggagttattcaatgctgaaaatggaagtgctgaaaaagaagttttatggatggaaaacattgaaatgaaagcggacaaagaggaggaaaaggaacagcagaaaaaaaatgaaaagcaggaggaaagggaaaagcgggaagagaaagcggcggaagttacaatggatgccaaaaatgaagcatcgcttagcactttgttgagaaatttaactcattcttaccacttcggcttttgtctgtcctcctttaggttgacgaaaatgctgttttggaatatggaaaaaaaattacaaccctagcaaaaaaatttatttccgacaaagttccaaaaatttatccttaaataattcaccagagtttggtaaataaccatttaaaaaaatgaaaactaaaaattttaaacatgaacctgaaaatatctcaataatacatttaaccattaacaaatatattaattagttcgaaataattgcaatcatttttgttgaa

SEQ ID NO: 62338 - DNA, 144 bp, Heterodera glycines
atggaccttcggcacggcctccgtctgctcctcctcttttgccttgcccatgcgctcgcccaatcgaacgactcacaacaatcagcagactgtgcggatggcgaattttgtgctttgaatgatccggattcatcacatttcatt

SEQ ID NO: 62339 - DNA, 60 bp, Heterodera glycines
ttcaccattttacgcatttttaattcgtcgatcgcttctttaataaattttgtgtcggaa

SEQ ID NO: 62340 - DNA, 172 bp, Heterodera glycines
atgactacttatttgtttgataaattgaaaaaaaaagaagatctcttgggaatggttagaaccatcgaacaatatgctgatattggtgttttggatttcaaggaatttatgccgtcgaatcaattttcaactgagggtttaaaagtgaatgagattcatgacattgtctcta

SEQ ID NO: 62341 - DNA, 466 bp, Heterodera glycines
gtttcaaatatcgtaagattgtttgatagggccagacaaaagaaggcaactgttggtaccaattttgcggtaaaaaaatgagaaaaaagagatagccattttttggtcaagaattttttttgtttgcgtttcaaatatcgtaagattgtttgatagggccagacaagaaggcaactgttggtaccaattttgcggtaaaaaaatgagaaaaaagagataaccatttttggtcaagaattttttttgtttgcgtttcaaatatcgtaagattgtttgatagggccagacaagagaaggcaactgttggtacaaattttgcggtaaaaaaaatgagaaaaaagagataaccatttttggtcaagaattttttttgtttgcgtttcaaatatcgtaagattgtttgatagggccagacaagagaaggcaactgttggtaccaagtttgcggtaaaaaaatgagaaaaaa

SEQ ID NO: 62342 - DNA, 152 bp, Heterodera glycines
aggcaactgttggtaccaagtttgcggtgaaaaaatgagaaaaaagagaaaccatttttggtcaagaattttttttgtttgcgtttcaatatcgtaagattgtttgatagggccagacaagagaaggcaactgttggtaccaagtttgcggt

SEQ ID NO: 62343 - DNA, 741 bp, Heterodera glycines
atttgaaaaaaacagaatgccaagggttaaaataatttttaaatttgaaaaaaaaagaatgccaagagtcaaaataattttttaaatttgaaaaaaatgccgactgaaaataattttaaatttgaaaaaacagaacgccaataatttaaataaattttaaatttgaaaaaacagaaagccataatttaattttgaaaaaaacagaatgccaagaatttaaatattttttaaatgagaaaatggggaaaataaatgcaagaaattggcaagaaataaatagggaaatttggcacaaaaatgtgcaaaaatttggcaagaaataaatagggaaatttggcacaaaaatgtgcaaaaatttggcaagaaataaatagggaaatttggcacaaaaatgtgtaaaaattggcaaaagaaagggttaaaaattgtggcaaaataatgcgaaaaattggcaagaaataaatagggaaatttggcacaaaaatgtgtaaaaattggcaaaataaagggttaaaaatttgagcaaaacaatgccaaaaattggccagaaataaattgggaaataaggggcaaaacaatgccaaaaaattgcggcaaaatggcacaaaaaacggtaccataataatgccaatctggcacataaataataaatggcgaaaattaatgggtaaatgggtaaacaaatgccaaagaaggaaaaaattaaggcataaataaatgataatggattattgattggct

SEQ ID NO: 62344 - DNA, 723 bp, Heterodera glycines
atggcagctgaggtggaacggcttaaaggtttgaccatttcttgggtcatgaaaatgggaattttaattttttttttaatttggaaaatcatataccatttatctgcccccgtaacactttcgataattttttagttttcgccttttggggcaatttttgaaggtcttcctttcctccgaaatgatttgggcgcttataactcattgtcagctacagggatattaaatgggagctaatcctgaaactaaaaggctgtcagtgcccaaatttttctaattaaggcattaacagctatttaaaattgcaaaaatattaagttgccaacattgagatcgaccccaaccaaaaatttagtttttaaacccaaaaaaattaaaaaaaaaattctttcttgacagatgccatctttgcccaggacgagttcatcggcatgttggagggcgatctgttggtgtacgaggcccatgtgggcattctgcgcgattcgttgggcgccaccaagcgggaggaccgccagcacatcaagtcgaaggcgttcagcgccaagctgaacgcgctggagatggagaagcgggagattgcgaagcggaacaacggtggggttcaagtttactatttttttaattcgaaaaagattacgaatttttttttaattgcctgtcatatccccaaaattgcaaacaaaatcccaattcaaatccctatcatttcttaaattttaa

SEQ ID NO: 62345 - DNA, 330 bp, Heterodera glycines
atgcttgttgtgactgtgccaccaccaccacaatcaccatcagcagttgcggtaacgacagtagctgctgtcttcggagaatggtcgtctactgtagctgttgtgtctaccgtattcccaaccaccaacaccaaactgttactggtgttgttgttaccgcaagcatttgcagctgttgctgtgccaccaccaccaccaccaccaccaaaaccaccaccaccaccacagcttggacccattgaaaatgtgccggccgtactcattgatggacgctgctgtgccgtcagcatatatttgatgcgcttaaatgattattttttcaaacactaa

SEQ ID NO: 62346 - DNA, 920 bp, Heterodera glycines
atgccaattcccaacaaattgcacatttttttttctcgtattttcatcgaaaaatttcgttgggcaaccggaaattggaattccgagctcaaaaagaaaaccggatttcgacatatccctgctggtgtgtatatggcttcaactatagagatttaaaaaaaaaacttgaagatagtttactaattttccaaaaaatcgctgaaaactttttcaagaatttttttctagaaattctttaaaagttttttttaattccatctttcgagggggggggggggaggggtaagaaccagtgaggtggaaacccctatttccaagccaaaatcttgggcagcctgtctatggccaaaatctagaaaattttgctaaaaatcgcaattctgacataacaaaaaaaaattttgtgctaattttactgggcacagtgtccaacagcagcgccaatagaggcccgggtagaagccgagcatcgagtggatgtcctgaaattttgtaaaattttttaaaaaaaaattagtgaaaaattgttttttcatttttctttttcttgcctcgctgaaccgccgaataccgtagaaccaacagacggcaatcatttcgcacattacgatgaacagcacggacagtgacacaccgtactcgtccaggaacggtatcacataggagccaccctaatgaggggggggggggagaagaattatttgtggaaaaaaaatttaaaaaaaaaaattttgtatataaattaaatgggcaaaattgtaaaaaaatatataataataattaagaaattaattcagaaaataaaacttcgtaaaaaaattaacttaagaaaaagaatatctatgtaaaccaattaattttcttcgaaaaattatgtgaaatcgaaaaaattagtctaaaccatttaattttaaaaaata

SEQ ID NO: 62347 - DNA, 1681 bp, Heterodera glycines
  unsure (1)..(1681): unsure at all n locations
tttgcatatantgtgtgttcataatgttcccccagtttccctgcatcgaagcattcatcaccggcttctgcgacgagtacccgcgactgttggcacgtcggcgcgaaatttttgtcgcatgcgtcatcgccgttcattacgttggctcattgccggccacaacttacgtaaaaaaaaaacaatgaaaattttgctattatttttagatgtgttggaaaatgtttagttttccaataaatatttattcatttttttgttaaatttttcaatttaattttaataggccatttatttcttgctttaattttcataaaaatttgtttttctattttagctatttttttaaatcatcgaattttatgccgttttaggctagacaatttctaggaaaaaatatttttattttaaatttttcgctcaaaaattttattattttttaaaattaaatggtttagactaattttttcgatttcacataatttttcgaagaaaattaattggtttacatagatattctttttcttaagttaatttttttacgaagttttattttctgaattaatttcttaattattattatatatttttttacaattttgcccatttaatttatatacaaaatttttttttttaaattttttttccacaaataattcttctcccccccccccctcattagggtggctcctatgtgataccgttcctggacgagtacggtgtgtcactgtccgtgctgttcatcgtaatgtgcgaaatgattgccgtctgttggttctacggtattcggcggttcagcgaggcaagaaaaagaaaaatgaaaaaacaatttttcactaatttttttttaaaaaattttacaaaatttcaggacatccactcgatgctcggcttctacccgggcctctattggcgctgctgttggacactgtgcccagtaaaattagcacaaaatttttttttgttatgtcagaattgcgatttttagcaaaattttctagattttggccatagacaggctgcccaagattttggcttggaaataggggtttccacctcactggttcttacccctccccccccccccctcgaaagatggaattaaaaaaaacttttaaagaatttctagaaaaaaattcttgaaaaagttttcagcgattttttggaaaattagtaaactatcttcaagttttttttttaaatctctatagttgaagccatatacacaccagcagggatatgtcgaaatccggttttctttttgagctcggaattccaatttccggttgcccaacgaaatttttcgatgaaaatacgagaaaaaaaaatgtgcaatttgttgggaattggcatgcttcctgtatttatttttttttaagatttgtactgatcaatttaaaaattaaaaattttttgactgaaatatatgctagaccaacaaaaaaaaatttaattttggagaaatccgcgaaattttttaatttcaaatttttctcagttgttcatcggcatcatcttcgtgttggcactgtactccacctcgttttcgcccatgcaaatccccaactacacatatcccgcatggtccgtgtggcttggctggctgttccgcttgctctcctgcgcgtccgtgcccgcctatgccctgtacctgttcatcttctcacgcggcaacgtgatgcag

SEQ ID NO: 62348 - DNA, 1114 bp, Heterodera glycines; identical to SEQ ID NO: 32032

SEQ ID NO: 62349 - DNA, 104 bp, Heterodera glycines
gcgcgaagcgcccgtcctgaggctgcgatgaattgctaaattaacgcactttctagcgacgcggcgaagccgcgtccctgagcgcgaagcgctttctcacagca

SEQ ID NO: 62350 - DNA, 1261 bp, Heterodera glycines
taattaaatccattccttcgggggaccgtgccgggtgccgcggggtaagcagtgctggttcgtttcatcacggcaccgaaccttttggctagtcagcaatcgttgcttaacttgccagatcggacgggtgcgcatgattccactgttccaagcaccccaccaaaagcaaaacgatataaccaaaatataaggaaaaattttttaaaaaattttttctccatcttcctttttgatactaaagcatcagagtgctaaaattaagttgtaaataaaatttggtgcgctttagagcactttctgaaaaaaatatttatgaaacaaaaaaatcgattttttcaagtgtccgtttggggtactcaaacatttatggggagcaaaaatccaacgcagaattaaagtacaggctatagggaagctattccggaaggattcggtctccccataaatctgggcgcatcggttcggggggactgccccgaaaacaaaaaaatcgattttttcaagtgtccgtttggggtactcaaacaattatggggagcaaaaatccaacgcagaattaaagtacaggctatagggaagctattccggaaggattcggtctccccataaatctgggcgcatcggttcggggggactgccccgaaaacaaaaaaatcgattttttcaagtgtccgtttggggtactcaaacaattatggggagcaaaaatccaacgcagaattaaagtacaggctatagggaagctattcccgaaggattcggtctccccataaatctgggcgcatcggttcggggggactgccccgaaaacaaaaataaatcgattttttcaagtgtccgtttggggtactcaaacaattatggggagcaaaaatccaacgcagaattaaagtacaggctatagtgaagctattccggaaggattcggtctccccataaatctgggcgcatcggttcagggggactgccccgaaaacccaaaaaaaaattttttggataaaaattatttaaatgaactgactagataatatttaaaataggttatttctcttcctttcagtatccctgcaaagtttggtgcgcttctgatcgagtttctgaaaaaaaagttaagcctaaactttttggcctgtttaaaaaggaattaaaaatttttaaaaattttattcatctccctttttgatagaaaaagcatcagagtgcctaaactaacgtgtaaataaaatttggtgcgtttcagaaccctttctgaaaaaagacc

SEQ ID NO: 62351 - DNA, 956 bp, Heterodera glycines
atggaaattaaacaagataaatgtcagaatctactgcaatgcttggaaaatgtggcatttgagctgacggagcatgtgtgccaactgccggatgtgccgtcatcgtcttcggtggaaaaggtgggaaatgaattttttttaatttttaaaaatcatattcggcggtgccaataaaaaaaggcaaaggaaaatttaatgtgtattttaggagaattaataaaccaattttttattttgtccaaaaaatggtcaacttttgcaaaaagtgtgcaattttgtgggtgatcgtgatttgtgaaggtttttgtttaacaagtcaaaatgctaaaataactgatttttagatttttttttattttgtattatttttatttactttttaaatttcggcatctttttttaataattttagaagaatttttttgcgaaaattttcgcgcaatatttattttgattttttctcaactcagtccctcttttggcacaggaagcgcctcaggtgcaatgcgtgcgcaaactgcaagcagtgattggcaagctgacacaacaattgcagcagttggacagtgccgaggagcgccgggcagtgcgggacaaatttgttgtaagtcaattataaatatttaaataacaagggaacatttcaaaaagagagagagggggggggagagagagcgagaaacagagagagagcagtcgattttaaattttttttttgctactacaccaaaaatgatcaaaaaaaagtaatcaaagtttcgaaaaaccgataaaagtgatcaaattttcagaaatttctaaaaaatattagaaaggagctgagaaccacaaacttttttaaaaaatgatcagcaaaagattgagcaaaagaaattgccagcaaaaaatatggtaattttaagcattttttttcaagattgcagaatttaagagtgattaatttttttatttttgta

SEQ ID NO: 62352 - DNA, 206 bp, Heterodera glycines
atttataagcatttgtagggttctcagcagtttccctgcaaaatttggtgagcttctgatcagtctagaacgttgggtgatcaaatgcaaaaaataatttaaaaaaaataatgctggtgtggtaagtgtgaagaactgtgttcctccaggcaaaaaattctaagaaaatttataagcatttgtagggttctcagcagtttccctgc

SEQ ID NO: 62353 - DNA, 853 bp, Heterodera glycines
atgccagtcaacaactttttgcaaaaggatgatgtaagtcttttcatatttgaatgactgtactgaattagttctttaagatttcgctgagtggtgagagtgctggagaggaatacgaagttgaccaaattctcggtgtgcgcgttcttgaggacggaacgaaggaatataaggtaaggcgaatttttgggttctcaacattgctttgtattagtactatatttgtcgaatgattgctaaattatttatttttgttgagtttaggttcgttggaagaattacggaagcaatgacgacacttgggagccgatggacaatctcgttggtgcaaaggatgcattggacaaatttctcaaagcgaataaacaggccaaaaaaacgccgaaagcatcgcgaacgccggtgagcacatttagccgaacaaataaaagaaaagcccaatttaagaaggcaacgaagctaggacgaaagcgcggtgggggtgacattagtcaggaggccgaagacggggagaacaatcggagcagcaacgaggacgagtcggacgacgacttctcggtgtcatcggccagcaagaagaagaagacaacgtaagtgcgggagaagaacaacagcaaaaagggctgctggtgacaattggaaaatggggcgacagaaaaacagtcaattaatgtgggaaaataattatggaaattgaagggataaaaagtcgaagaaggctcccgtccgccgtgctgtcactgcctccagcggtcgtccgtcctctcgtccgaccccccacaatggggactcactggtgccgaccgattccgctttgccccctgcatttgttgtcacttccctccacccttag

SEQ ID NO: 62354 - DNA, 514 bp, Heterodera glycines
cttccaaagcgtccgaacatcacctcaaattcgacggaatctatttcgacaagaatggtgtgcttaaactcgtcgaaaagggaggaacgcagcgggtgtttaccttcgaaggtaattttttgcttcaaactaaattcagattagtttattgattagcattacaattctttcctttttcagaggccaaggataagaattcgagtgccttgtgcgattacatgtgcgacatggtcacattcacggaaaagggcaagccgcaaatccaagtggcaccgcaagaaatggagacggaggagggacagcatgaggaagaggaggagaaagtgttggaacggacccatgacgacgacgggaaactgaacttcgacgattaaaagggcagagacataatttgagaagtttgagacggcactttacttcattcctcacggattttactcaatgatatattatcttcaatgtttgtttgtagccccacccaatgaaagtgaactcacataaaaccgaatttgga

SEQ ID NO: 62355 - DNA, 786 bp, Heterodera glycines
atggcattcattggtttagaagtgcctccgaatccgaattttaatccggctttgcttgggtttgatgatgttgggcttcagccgcccctcgaccagcagaacggtggtttgtcattccttttgttccattaaagtcattgtcagttctttccttgaccacacaacacgaaaaataggaatttgcatgttgtttttggcaaacaaaaaaattgaatttaaaatttagacttttccaatgtttccttaatatgaaatttctaatttattaaatttaaaaaaattcatgtggggaaacgagctgctccctgttaattcatccatcttttccaaggggcactgaacaacaatggccagcaataattctccctcaaaatcagcaacagtacgaaagaataagcggccggcacatccatccaacttccaattttgtcatttgttctttttaaatattatgttttgtctgataatgagaataaaacttgacaacacattttgatttcaactttgacattaatattatttggtcataaaacatcgatatattaatttttctctgtaattgtctattgccatcacccgagacccaaaattctccccatttacctatccacataaaaagacccaaaagcgctaattatcggatttgattaattaagcacattgttgattattttggtttgtaactttcttgaaatgttagaattctcttgttttctcgtattattacattattcagattttgtgctttcgaatgataccaaaaagatagggtttgttcgaacatga

SEQ ID NO: 62356 - DNA, 1487 bp, Heterodera glycines
  unsure (1)..(1487): unsure at all n locations
ataccaattcgcctctgtttatgctttacactttcggcgttggctttttggtgcccgcccttctgatcactttcttttaccttcgcgtcatcctcaaactccgtgccgatgccatttccgtgcgaaagcattccgacgggcaaaattgggcgctgtcttccgcgcggtttcacaaagtttgccattcgccaaaattataaattaaaatgctaaaaaatattcactctttttgtttaggtaactaaacgaattgtggcggttattctattttatttcctttgtaagtcagccaataattatttaattaatttacccttaattaccccctccctctaatttttaggttggactccctactggacgctgaacattatgtcccaatttggcattatcattgtaattgaacttcaatatttaaaaattgaaaaatattaggcacggcattttcgcataaattaaaaaatattttttcatttaattgtggtgactcagaaatctgtgcgattaattttaatcaatcaaattgtcataactgcagaaaagtatcatcatagtcactgttttggttggggtttgaacccgatacgcagaaagggaaggcattaccaactgagccatgttnggcaatggaatttaaatgattttatctaataaaataaaataaaaatgatcctctgcctatcctcctaaatttgtcaggtcagttggtccactttgacgctcagttcggtgtttttcgtcgcccatttgctcgtctgtttcaattccgccgctaaccccgtcctttacgcgctgatcaatcgcgaacttcgccagcaaaatgcgcaggcactgcagaaaaggcgccgatcacttaatgtggccacaaataatgcgaagggattcatcgaaaaacagtgggaaaatggggaaaagccaaggaaaaagccaagagactttttatcgcttcgattggcctaaggtttccaacggcaccggtgagaaaggagcagcagaggggcgcttcggtgggtttttcggacgattcgcaccaacggctgttgaaaataattggaatgaagaaagggccgaaggcgacggacagcgacaaaatgttggagaaaaagtgagactaatgagagaagagagggagggggggagggggggggggcgggagtgcccatttgattggagtgactctttggacgggatggacggagtgccgttatttaaacgagatgccgattttggtccgattggagcggatggcgtttcgttatccgtgagttggcccgtgaagttatgcccgccccatttcccttctctttgagcgaccgtttccttctccgaatttcggcgcccgcccttttcccgcctttttacgccgaattgcgaagagggggcggcgattgttccggttgcgaatggccgtttttctgcgtcccttcggcggcgtcgggggcgggaagaaaaagcggcggcccatttgtccgaatggaaaagaagga

SEQ ID NO: 62357 - DNA, 372 bp, Heterodera glycines
atgagaaaaattataatcaaaataaaaatgaaagtaaacaactttttaaactaataatatattatttaatatttaaatttataaagtatttatttcagaaatgcatattactaaaactattaaaataattaaatacccattttaaattttatattaaaatgaataactaacaataatttttatggaaagtatactaaggatcttttattaaaaaataccagttttgaaatatttaagttcttcaatatttaaagacattaagcaaaataatataatgccataaagaataattaaaaatgctgaaattttttaagaacaatgttggaatttttcattaattgtaaacaacgcaggcaattatatagcaataaa

SEQ ID NO: 62358 - DNA, 279 bp, Heterodera glycines; identical to SEQ ID NO: 58736

SEQ ID NO: 62359 - DNA, 217 bp, Heterodera glycines
atttgaaagagaatagaaagaaccaggttcgatgaagttttggtaagccaaaaaaaatccaaacatttaaaaatctataaaaaatttaaaaatgagaattcatgcgagattttctggaaataagcttaattgggcctagttaagctgtaaaaaaaaatttggggcgatttgaaagagaaatagaaagaaccaggttcgatgaagttttgttaagcca

SEQ ID NO: 62360 - DNA, 364 bp, Heterodera glycines
gctgtaaaaaaaatttggggcgatttgaaagagaatagaaagaaccaggttcgatgaagttttggtaagccaaaaaaaatgcaaacatttaaaaatctataaaaaatttaaaaatgagaattcatgcgagattttctggaaataagcttaatagggcctagttaagctgtaaaaaaaatttggggcgatttgaaagagaatagaaagaaccaggttcgatgaagttttggtaagccaaaaaaaatccaaatatttaaaaatctataaaaaatttaaaaatgagaattcatgcgagattttctggaaataagcttaatagggcctagttaagctgtaaaaaaaatttggggcgatttgaaagaga

SEQ ID NO: 62361 - DNA, 739 bp, Heterodera glycines
atgaaaacagtgtcagtggcgctggtgctgtgcctgaacatcggcccccgacccgccccgacgtgcagaagccgcagccgtgcgcgcgcaaggaggcgtgggtggacccggcggagccgagcgtggcccacgcgcagcagcggccggcccaacgcattgcgcaaagcctgcagaaaatctacgaaaaattgcatccccgagcaaggttcaaatctttatttgttttttaggaaggtggacaacataaatatgctttatattagagaccggacgggatcgggatcccgcgggatttcttcgggatcccgcgggattaaattcgggatcccgacctcgggatccgtcccgaacgattttcaaattcatcgggattgatcgggatttcatcgggatcccgaagcgggatccctcccgaccattttaccaatcccgcgggatcccgcgggattgaagtcacgataatttttggaaaaaatctcattttttaaattaagaccttaaattttaaattaaaaatttgcttattttttctttaaattcccttaaaatcccaaaaaattttcatgagtctcaaaatacttgtgaaaattttcaaactttgacacaaaggttggccattttgtgacttttattcctttaaaaaaagaattatcaaaaattattttttttaattccttaaataatattttaaatcttattaggtagtttcatgcacaacaatttctaagaattttgtcta

SEQ ID NO: 62362 - DNA, 61 bp, Heterodera glycines; identical to SEQ ID NO: 61697

SEQ ID NO: 62363 - DNA, 924 bp, Heterodera glycines
atggatgatttattcgaaaatctttttgaaaataattcacaaaatttgaaacgattgaaatctgacgaacaaccggaaaagcagcaacaaaaactgagtgtaaaagctgaacaaaacaaaaaatgggatgaatcatcgcaaaaaatgacgaaaaaattaaaaattgaaattaaggaggaagaagaagaagaagaagaagaatggcacacggataaagtgccaatgggcgaacaaattcacaaaatcaaaagcgaaccaaattttgatcaaaatgaaattgccaatcggacgcaaaaattaaaatttgtaaagaaagagccaaaaatggaaaatgatgaccattttattagcaatgatggcactgttcaagctgaaaatgaaagtgatcagcaacagaacgagtgttcttcaccctctcaaaatgatcaaaacgcctcttctgatcaatcaatggacgaaaagcaagacgaatcggaagatgaaagaaagttgaagcaaattgaaaagtttgacaaaatgagaaaggcatattgggccaaaaatggccataaaagagaagagcgaatgaaagtggaacgaaaaattgccagagaaatgggcatttatcgaacacaaatttataaatggaagaaggaattgggccaaaatgcatatgacaaacgggaaagtgaggagacaaaaaagcggacaatttatttgttcgaagagataaagcagcaaatgaaggacaacaaattgtacatttgcaaatatcggaggaaaattgaacagaaaattgccataaaattgggcacttaccattgccaaatactgaagtggaagaaggagtttgtgatcagcagagggagaaaagtgattgaagaatcggaccaagatgatcagtcttcttctgcggatgaggttttaatggtactgggaccaggg

SEQ ID NO: 62364 - DNA, 323 bp, Heterodera glycines
atttataagcatttgaagggttctcagcagtttccctgcaaaatttggtgagcttctgatcagtctagaacgttgggtgatcaaatgcaaaaaataattaaaaaaaaataatgctggtgtggtaagtgtgaagaactgtgttcctccgggcaaaaaattctaagaaaatttataagcatttgtagggttctcagcagtttccctgcaaaatttggtgagcttctgatcagtctagaacgttgggtgataaaatgaaaaaaataattaaaaaaaaataatgctggtgtggtaagtgtgaagaactgtgttcctccaggcaaaaa

SEQ ID NO: 62365 - DNA, 940 bp, Heterodera glycines
aaaaatttttttaaatttattcatctccctttttgatagaaaaagcatcagagtgctaaaattaagttgtaaataaaatttggtgcgctttagagcactttctgaaaaaaatatttatgaaacaaaaaaatcgattttttcaagtgtccgtttggggtactcaaacaattatggggagcaaaaatccaacgcagaattaaagtacaggctatagggaagctattcccgaaggattcggtctccccataaatctgggcgcatcggttcggggggactgccccgaaaacaaaaaaatcgattttttcaagtgtccgtttggggtactcaaacaattatggggagcaaaaatccaacgcagaattaaagtacaggctatagggaagctattcccgaaggattcggtctccccataaatctgggcgcatcggttcggggggactgccccgaaaacaaaaataaatcgattttttcaagtgtccgtttggggtactcaaacaattatggggagcaaaaatccaacgcagaattaaagtacaggctatagtgaagctattccggaaggattcggtctccccataaatctgggcgcatcggttcagggggactgccccgaaaacccaaaaaaaaattttttggataaaaattatttaaatgaactgactagataatatttaaaataggtttttctcttcctttcagtatccctgcaaagtttggtgcgcttctgatcagtttctgaaaaaaaagttaagcctaaactttttggcctgtttaaaaaggaattaaaaatttttaaaaattttattcatctccctttttgatagaaaaagcatcagagtgcctaaactaacatgtaaataaaatttggtgcgtttcagaaccctttctgaaaaaatatttaagaattaattttgcaaaaaataaataaaaacgaaagact

SEQ ID NO: 62366 - DNA, 222 bp, Heterodera glycines
atgagcattgcaatggtcgatgacgcgtccgtccactcggaaagcgttgaattgcgttcgcgaaacaccaaaatgcatggcccaatcggtggaacggaaatggcgtatcggaacgacaattgcacgacgagtggcggaaacggcggcagaatgccactaattgaacatgtggtgaagaacggggaaagtctgatgcaaatttcgctgcaatattcagtgccg

SEQ ID NO: 62367 - DNA, 291 bp, Heterodera glycines
atgggactcgacccgaaagtgctcacttcggtgatcaactccagctcaggccgttgttggagcagtgacacgtacaatccgtgccccggcatccttccgaatacccccgccagctccaattacgagggcggattcggctgcaaattgatggccaaggacctcggactggcgcagaattcgtccactcagttcaaagtgccaactccgatgggttcgctggcaccaaatttaccttttgctctccgctcaaccaaaattcgcgaacaaagacttcaccgtggtctaaaaaat

SEQ ID NO: 62368 - DNA, 53 bp, Heterodera glycines
attcgtgatcagcgaccccgaaaaccccaggaagacgtttttgacgaattaaa

SEQ ID NO: 62369 - DNA, 279 bp, Heterodera glycines
attttctaagaaaaaataggagttttgggggcccggcggtgcccataggcgctgccggggaaaaaattggaaattttggtcatttataaacaggttttcactgaaaattagccaatttataggtaaaattttgaaaaattttgtgggaatttaatccaattcttaggggtgtaaaagtcgcatttcgcgccaaaaagcgaaatgcgaaaagcgaaatgcgaaacgccaaaaaatgcgaaaggcgaaatgcgaaaagcgaaacctcggcccatccctgct

SEQ ID NO: 62370 - DNA, 252 bp, Heterodera glycines
atgaatggatgggaagaagcgataatggactatgaaaaaaggaaaacaaagcgaaaaaattggtttctggaatttgaaaggcgatggatcaggatgcacattcgtatgatgagtaataagataaagaaaaaaatgttaaaaaataatgaaagcaaaaacaaataaagtgaataaaaaaagcaaaaaaaaatccagaatatgaaaaaaagtacaatttggtagatgaatgaattatttttcaaattctaaaaa

SEQ ID NO: 62371 - DNA, 77 bp, Heterodera glycines
ttttttcctgagctccccgtggcctaaaacgcacgaaaaacatgtttttttgggctgttgttaagctacttttcgag

SEQ ID NO: 62372 - DNA, 457 bp, Heterodera glycines
atgaaaattattaacaaagttcaaaaaatgtgtcaggtgaagactactggattgattgaatatgaacaaaaaattggttatttctatttaaatgaagaaatatttaattcgagtgaactctttttatttctttgttttgtaaagtgttttaaaaattatccttatggtattatcttattgacagcggtatgtatgtattgataatttaatttaaaaattatttttttagtactgtaatgtctagggcttcgatttttaggtgctaaaaactgccaaaataagtaggttttaggttctaaaaaacccccaaaataggtgctaaaaatgggaaaataggtgccaaaaagttccgaatttaggggtgtaaaatcgaaaattttcatcaaaaagcaaaaatattttgccaagtcattaaggatatacataattttcaaaatcaaaaattatcgtcaagaaa

SEQ ID NO: 62373 - DNA, 1230 bp, Heterodera glycines
atgggcattgccaaccatgaggagtactcattggtaaggggagcatcgccggaggggacggacagcggagcggagaacggaatggccaagggcgaaagggaaaggacgccgtactcaaacggcggaacggacgaagcgcggccgaaacagcgcagcgggttggagcacacgttcatgaacacaatcggacggaagaaggagcggcaaattcagcagctgaggtgcaaagccatgccgaacattgggccatttcgccgccttaattaagggccaaattgcacacggacgccgaaattaattgggtggactattccaagaccctcagggaacagaacatcggggaggaggaggagctgactctgcgcagaaaattcttcttctcggacacaaatgtggacaccagggacccggtccaactgaatttggtcagtttttgttgccgtcggcatcgaattcttggccaaatggtgacggactgattaagctgtacattcaatgccgggacggcgtcttgcgggggcttcatcccgtctcgagggacacggccatcaaattggccgcgctccaatgctacattgaatacggcccttacgaggagggaatccaacggagtgttgagtcagttggccaaatgttaaccgatggaggaccctcgcttttagtgccaaaaatctgttgccgaaagaatatgcgaaggccaaggaattggagaagaatattatccaagtgagcggaagaagggaatggcggagaatgaattggaatgactaatgaatgaatgacctcctaatggactgacgaatgaatcccctcccctaattagactgactaatgaatgccctccccctgaaggagtaccgcgagttgatgtatgaagactcggccgcgcccaaaaagaaatactgcgaattgtgccaatcgttgcccacttacggcgtcactttcttcttggtaaaggagaaattgccaggcaaaaaccgactgataccgcgactgctcggcgtcaacaaagattcggtgatgcgagtggacgaacggaccaaagcggtgctgaaggaatggccgctagaacaggtcgcccccccccctttttaaattggtaattattggacatttcttttttaggtccgtcgatgggccgcctctttcaaaacgttcactctcgactttggcgactataaagacggatattattcggtgcaaacgctcgagggcgaacgcattggacag

SEQ ID NO: 62374 - DNA, 1013 bp, Heterodera glycines
atgctgagtgaagaacaatgggagcaactgctgatgaggcgtgatactgtttttggccgaagagctcgtatcttccgtgatagcaagggcgaatttgggaccataaatctctttgctattgttggcgctgccgatctgatagttcgcaggggcggaagcagtcaaatttcggatattaccgagtgtgagttttattaaatttaaatattaagcgaaaatttaagtcttaaacatattgtttaagtgcggcgcagaatgagaaaagcccagttggagcatcacacgaaccgttttccagacttcaacaatcttggcgaagatgagcaagggcgaattctgcggagagcgcagctgatcggcgcgatttggaacattgcttttggcagtggttctgcggagttttcactccaagaatatttgggaggtttttattaaatatttatttgataagaaacgtaaattaagatatggatttattgggtttgtgggacgtctattttgaagagggggcgcaccaagatcaggaggttttagttaaaattttgcgacaattcttgacgtctttagtttgatgaggactatccaattccgccaggaattgtggagctgattgcacagcaaacgcaaggggtgcctccaaacccccagagtgatgaagttttttgctgctggcggtgtggcttagctgggcatcgagcatctaattgccctattgggggttcatgggctcgcaactcacttgggcagctcattcgcaggggcgggcaaccacgatgttttgtctgttgcctcaataccgatcacatgagcgccgattgcccttatagggctcctgagtctcggcttagtactgacaaaccaaattatcgcggtttataaaatttacaattcaggaacaactcaatgttggaattgccacaccaaactgcaagggcgtgcgcaaaagcagaacacctgttggaactgccatgaacctctgcgctgttggaattgtggcgctggacataggctga

SEQ ID NO: 62375 - DNA, 300 bp, Heterodera glycines
atggtccatcatacggacagaattggcaactacaatgaacttccactgtatgagcaagggcgaaaactgaacaaagcccaaattgttggattaatttggaatatttggtttggaacggggtcaaaaccattctcaccggaagaatatctgagaggtttaaaaattgaaaaaaggtaatttaacaatttaattctattatttagaaatggaccgtcataatttatgggacgtctacttttaagcaatgggcgttgtccaaatagcaggggctttatcaacttggttgttgacatttatata

SEQ ID NO: 62376 - DNA, 438 bp, Heterodera glycines
atgtgcaaggattttgcggacaaatgggccctccgtgggcaagctgaacttatcccattagcccaaaaaatgaacaaagccaagtacaaaaatcaggtaaactagattataacaaaaaatttgcttacatttttttagtgggatactttgcctgcaggggcgatcagaaaaagaatgcgtctcgacagtgataaggatcttatggtggtctaattctgttaagcacaataatcgttacttttctattaggatgcgcccctgcttgcaggggcgtctgggaccgattctccacaaatggataaaaacatggtggaataatattttattttctttactaactattgtttgtttaggaagataatatgcccaacacttaaggagtggcctccccaaaaacagcttttgactctctaagtgcaagaaacttaccttaataaa

SEQ ID NO: 62377 - DNA, 1432 bp, Heterodera glycines
ttatttataaataggtaaacttatctatacaattccctgatccgttggtgcctcgctggaaagccagaaattgatcaaattgctaacaataatgagcaagggcgaaaggtatgctataacgactattttcatctctgtttttgtttcagctcctaaacggcacggtgctttcagcagcaagcacaggaatcgccgcgttgttgctaattggtggtggaacggtacatcgacagttctccgtgcctaatgacattgatgatgattcaccgccgaaaattgcgtttgaatctgcaagggcgaaacaactacgcgctgtagaactaatcataatcgatgtaattatcacttccgctttaaataaacaaattaatttttaggaaataagcatgttgagcaaaaaagtccttcgctacgtcgatcgtctcttgagggatgtttgtgccgttgacaaaccgtttgctggaaaagtggttgttcttggcggagattggagacaactgacccctgttgttgaacacggcacgcgcgaagatcaagtgcaggagagcattaaaatggagacacttttttttgatcattttaaacagctcaggtgttatttttcccttatttaataagttcaatctttttcagtttaacgcaaaacatgcgcgttgttccaggacaaattgaatttcgcgagtggttaaacaccatcggcaacggcctccatgatgcaggggcgaacaaacagtttcgtctcaaaatcccaaaggaaatggttgcgcgtactttggaatctatcatcgatttttgttttccgagtgcattgttttgcgatccaaatcgtcattcggatatcatcaaagattcagcgatactatgccccactaacaatgatgtgcagagaatcaacgacctcgcaatcgatcgtttagcaggggctccgatattgtacgagtcaatagattctccactcgaagctcaagaggaatttggcacttttcgctcggactttaatctcgaagcgattcataacgaaaccccttctggagtaccgccacataaactcattttaaaggcatttatttttttattttttagtttcattttttaaattaggcaggggctccagtgatgcttatcagaaatctggatgtaacgtgtggcctttgtaatggaacgcgtttgcaaatcaaaacgatgacggatgaaaatttgcactgccgtattctgacgggctctcgcgaaggacaagactttctcattccacgtgttaagtttgaatacgggcaggggcgtcatcatcgaggcttacgtttccgccgtatacaattccctgttcgtccatgctttgctatgacagtcaataaggtgttgtacattctattttttttaattttcgtatttaagtcgcaagggcagacacttcaaaagatgggtcttgtgctta

SEQ ID NO: 62378 - DNA, 1308 bp, Heterodera glycines
atggaaaagggtggcaaagtatgcgacttttggtgccaaacggcgaaaaagggaaggactgaaatggcaacaaagggaaggactgaaatggcaacaaagggaaggactgaaatggcaacagagggaaggactgaaatggcaacagagggaaggactgaaatggcaacagagggaaggactgaaatggcaacagagggaaggactgaaatggcaacagagggaaggactgaaatggcaacagagggaaggactgaaatggcaacaaagggaaggattgaaagtgccgaagagatggtgccgtgccattaaatgaagggatcgccgctgatttgtgagcagcaaacactcaatgttgtgttgtgactttggactgagacttctgctgttgacgacgtcactttgcgttgtgatttgattgatcattcttccttttccctcccctttttttgtgcttcgctttccctcccgcaaaattcgcttatcactcattgccttggatctcattttaacaccttataaatgtgaaagattgtcgtaacaacaaattgactgactatataatggcaacattcacaaaatacactgacaatttgcactgaaaatggaatgtttggcaaaatgtacaaaaaaaaacaatttgaatatttcctattgccccagggacaattgtccgattggtgcgatgctaacgtaattgacggccgccgttgtttcttcgtgccccgacagctgcgtttgctcggctccctcgtatgcctccgtttcttccgacgctgcgccgccgcccaaaaggccctccgcgctgctcatcgccgacgaaccgccgtggcccgagctcgacgagtccactgaacgacttcgccaatcgccaaggcgcacctccgacgacgagccaacgaccggcgaacggcccaaattagtggaggaagtgccggtgccgaatactgagcctttgcccatgccctcctgtcttcgacttggccactctcccgacgctttaaaatttggccaaccctcgtccagttttaaacatggcacggaaaacccacccaaattggcattttgctgtgaaattccggtaaagagtgcgccttggacacgcattttgtgctccgatgccaccgactttttgggcctttgtttgatgggctgagaagagtcggagcagccaccagaagagggcggaatggcatcggttgaggaggacgggcccaaacggtggtgaagcggagaaagtgccgtcggggaacaaggcgaaggcgtattggcatattcgttggaccgtgttgcttggagctgataaataaa

SEQ ID NO: 62379 - DNA, 959 bp, Heterodera glycines
  unsure (1)..(959): unsure at all n locations
tgcctccaaccaatcgctgcgataggtgtgccgtgttcgtcttcggcacaaagtgcgcttcncaaggggcagcagagaaaggcgaacaaagaaaaggaagaaactgttcaaactgtatctgatgaagtgaattattgagtttatataattaatgttattaaaattaaattgagaagattctgcccgagtccgatgggtcagagaaaggaaaaagggagggaaagagtacgaaacggagaggagagcggcagagaagcagagaagacagaaagaaaaggggaggacaacagaaaggcaagggaggagagcggcggagggattttgttctctgtccgcgtctacagtatccaattttgcatttccctactctacagtatcctttgggctgacaaacgaagaaaaggcacaaatccgcgcgacggaagcgaacggcgaacgcgcggaagggtacagctgctgtcgatgcggcaaagtgttcagctacgaatattacaggtgggcagagtaaacaaacttatcattttggcttcttttttttttgcattggctttcccttcccaattaccctaattattcattaattaagtgttaatgacccatttaagggacaaacatttgaaattcactcgatgtgtggacagcggaaatcggtgagttttgtacggtcgaaggccgatcaaattcatacggaaaattggacaaaattaattgacaacaaattatcccaacaattattaggcgcttcccctgctctctgtgctcacggtaagcattaaaattcacccctaatgaggggtggggggtagttaggtgattatatgccattccatcggtcgctcagttccttcgaaaaacgcgaccgcctgcgcattcacattttgcacgtgcacgaacgctaccgaccgcacgaatgttcaatgtgttcgaaggcattctcacaatcgtcgagtctaaacaaa

SEQ ID NO: 62380 - DNA, 499 bp, Heterodera glycines; identical to SEQ ID NO: 60789

SEQ ID NO: 62381 - DNA, 662 bp, Heterodera glycines
atgcagcatacaaagcgctatttgctagtccccgaagagatttatcagagtttggcagcaccgccaccgtcagacggtacaccaattgggctggtccgtacccgaattaaacaaataaaaaatgatgacgccataaatgaggcggaaagggcagtcaaatatgagcaggaagttaagcgtctcaacaagctcacaaaggacgaagatgaacgtcccgtgggtgttaaattagaaaatttgagtgatgtggttgacgccatgccaaaaccagtcaacgttacaaggccaattgttgtttctacgcgacgccatctcaaggttggacgtgcgcgaaaagaaaatgttgaacaattagaagatactgatgatgatgattatcaaaacccacggtcgtcaagttcaaataaacgacaacccacacaaacggaaatcttaaaattaatttataaaaacgcccaatctctaggggtgtcggaggaagggcaagttttgagagccggtgggcgtccatttataaccagcagtgttgatgacattgttagtcacctgtttaacaaggacaagcgtgaaaataaagagccaacggcattcaaagaatttgttgaaagggcaaggcagaatccgctcttgagtaggcatttatttcccgaaggccaatcccg

SEQ ID NO: 62382 - DNA, 152 bp, Heterodera glycines
gttcagagaatccgtttcttatattcatttcgagccttgaaaatccgaactcgaacaaaattcgaaaattcattccgcaactggagatactttttttgatgcttacttcctcgagacgagcccatttgtataccattaactatcctcaataa

SEQ ID NO: 62383 - DNA, 996 bp, Heterodera glycines
atgccagcaccaacggatgagcaaacattacgctcttttctcggcgcaattaattattattcccgttttgtcagccaaatgcacgagatccgtgcaccgctagacgaactgcttaagaaggatgttcaatggcgctggggaccggatcaacagcaggcatttgaaggggcaaagaaaatcatcacttcagatttgctgctcatgagttacgacccggccaagccaatcgtcgtcgcagcggacgccagcaacaaaggactaggcgctacgatcagtcacacattcgccgatggcagcgaaaaagtcgtcgaacatgcgtctcaatcattgacgccagccgagcgcaattactcccaaattgagaaggaggctctggccatcatcttcgccgtacagaagtttcatcgcatgttgtatgggcgaaaatttagccttttaacggaccataagccgttaatcagcatttttgggtccaaaaacgggatccccatttacacagcgtctaggctccaacgctgggcattaattctgtcaaattatgatttcagcataaggtacatctcgacaaaaaattttggccaggccgatgtcctctcgcgactgatcaaacagcatcgcgacacacttcaagaggaggacaaagtcattgcttctgcacagatggcacaaaatttggactattccgagaacgctaacattgagttttgtgccgcagcagtcgactacatgtttcaaacaacaattgatcaactgccagtcacggccgacgaaatcgcagaacacattgaacgtgacgaagaaatgaaaaaggtcattgaacattgcaggaatggatggccaaaaacagcaaacgaattgaccatggcagcattttatacgcaccgactgcgaatcagtgaagtcaacggctgcctgctcatgggcgatcgcgtcatcatcccatctgcattgcgttttcgcattttgaaggcacttcatttcacccatcccggcatg

SEQ ID NO: 62384 - DNA, 203 bp, Heterodera glycines
atggctgattttaataatgatacagtaagtgaagaataccaaaattaattttggcgagtaatttgttttttttagttttatttgacgttcaaagatgcaaatccaagctggtcgctcattgggtgcgcttcagtacttggattaatcgctttatttggaatcatttccaattcttctgtaatttatgtaaccattatgacaaa

SEQ ID NO: 62385 - DNA, 805 bp, Heterodera glycines
gcatttagtcgaactgcttagaaaactcattcagtttagggccacaaaataccctatttgggccgacatagaaaaggcttttctgatggtaagtctgaaagaatcggaccgtgaattttcaaaatttttgtgggtaaaaaatatatttgcaccactttctggggaaaatctcctcgttttccgctttcggaggataacatttggaatagtgtcttgcccttttctattggcagcgacactccaacatcatttggaagcatttcccagtgagttagcagaggaaatccgggaaaaatctctgctttacgttgataaccttctgcttttggctgattcgcctgaggaagcacgcagaaaggcagccgaagcacaaaaaattttcgccgcggctcaaatgcgtctgtgcgaattcattgcggctgatccgtcaagtttggacgaaatacctgaaaatgatcgcctccgaaatgaggcacctctcggactaaaatggactatttgtgaggacaatttgtctttgacttttcctacggttcctagtccggacggtttaacccggagttgcgtcattttttgaccccttagggttatgttcgccttgtttggttggggcgaaattgtttttccaaaaattatgggatggttcaaaaggctgggacgatccaatcccagcggaagagaccaaagaatgggatgaaattaaagccctctgggcggcaaaaacgatgcacatagcgcgcttcacgcctcgaattaacactggaaaagattcaattacatgttttcaccgatgcatcacctaatg

SEQ ID NO: 62386 - DNA, 2043 bp, Heterodera glycines
atggcaatggagcgggggctcggagaagtcaagcgaatttttgaagggcattttgagaagggcatagccgaagcgggtgcagcacccgaggagcggcaggatttcttctatgattccattgccgcccctttgccagctgcaacgaaataccttcgactgcgggagcacccaactcccgccgaactccttcaaattgcggccgagcacctcggggatctgcgagcaatgcggcaaacattcgaggacgaagaaagggagagcatctcccgatcgagcagatcagtcgagaccgagaacaatcaggcggaggaagaactcccacgtgccatgccacgacggagcatgcaagagtgggagacatcgttcagagaagcttatgttcgacagcatgacgaactgttcggccagcagcaaccattggtcaaccaagcggaacgggtggccacacccgtaatgtcaaacatggccgcgcttatccaacgacgctcaaatgctccctcggtggccagtgttcgtgtgaacaatccggtcagggagtggatggcaaggaaccaaggggtcgggaacggacccccggcacaggcccaacaaccaacacaagcgcaacgcccgctacaggccgtacagcaacgcctcgaacaacttacgctcaacgatccaagagccaatttccctcgggcagcacctcatttccatgtccgacgggaggaacctcccactcgggaccgtacccgagctcagggggtatttccttcacggcctcatcgcccagacgaatcagctggcatgttaacgacctttgaagcagtgcgcctacaaccgccgacattttcggggaggccggaggattggaccactttttgggcctacttccaacgggccgtggacgacaagcaaattcccggcttcgagaagcagcttcatctgctgcggtgcttaaaagaaggatcgccggcacggagagcggtggaagtgtacccaccgtcggatggtaattatccggtcgtggtgcagctgctgaaggaacgatttggggacacgaacgacttgcaaagagcgatccgagctcagcttctacacttgcagccagcaaaggacaacgtgtcgagcttgacggcagtgatcgacgaattcgagagaggagtgtgccagctcgaacaactgggagcgaacgtggacgacgagtcgttcggcccgttgttggaggccaaactcccggtccacatcctcacagaattgaggatccgggagagtacgatgggagcaaaatggacagtgcgagagtttcggaaagcggtgggagtgcaagtcaagtgcatgagggccgccgaatccgcgttggcagcaatgaaaggacccgaacgccgacatgagcagcgatcggagcccgaacgaggcggacggaacgcccgaacaggacaaggattccagcgggcatttatgatcagagatcagcccccggagaaacgaacgacgaacgaagcacacaccaggaccgaagtcgcgatgccacccactcgaccagcgaatccgaatcgtgtgccgctcgggagttactcccgaccgatgggagcgcattcccaaacacagaatggacaagaaggacaaccccgacaagggtgctcgttgtgtggacaaacgggacaccaaccaagccggtgtggcaaatatgggtcagcacaagccaaaaggaggagactgatcgagcaacgccgttgtctcaaatgcctgggatccgatcacaccgcgcagcagtgtacacggaaaaccgcctgccggacgtgcgaacaaatggatcaccactggctgatatgctggaagggggagagaaggaacgaaccccctagccactcgagaacggaagatgcacaacaaaatcggacgatgatcattcgggaaattgaagcgaagcacgtgcgcactccccctcccaccgagtccagcaaggacgggatgggggctaaaggggaggacccccctttgctcgacggagagcagagagcattcaccaccgtgggccagcaactcccggcctatttaatg

SEQ ID NO: 62387 - DNA, 348 bp, Heterodera glycines
atggaggggcagctgaagcgcaggaaaattttgaaaactttaatgcacttaataaagtgagtcaaattttaaaaaattttagcctttttttaaatttttatttcggcggagtggaaattccctgctctaatgtaatttaaaccaccataaaaaatacaagaccataaaaaatttaacagaactaattctttgaaattttgcagactaacagaggattcttgggacaatcgaatcatattaagatattttgtattaaaatttgggttcaactacaattttaagcgtggaactggcccccagggaagacgtggaactggcccccagggaagccgtttgtctgccaactga

SEQ ID NO: 62388 - DNA, 1351 bp, Heterodera glycines
ttccacttcaacaaatacacaaagaaatgacgggttaaaagctcccggaaaaagcggagaactgaataaaagggttaaacgctccctaaaaaagcaatttgaacaaattggtgactcaattgaattgaataaagatgaattggaagtcaatgattgtttgtttaagcgaagaaaagtagatagagaactgattaatttggatgaagtttcaaatgatttttttgttggaacatctaacaaacaaaatagtgatgtgaaattttatgaactcagtgattttaattttaaatgccttcactgtccagcagttcattttttggaagagaggaatacgtcaaaaattaatgttgaattcgggaattgttgtagttatggtaaattagcaaatttggaagaaacaattcctgaatatccgcatgaatttgaacttttatttgatcaaaataattttgataaaaaaacacacgagctttttatgaaaaacatacgattgtttaattcaagtttttcttgcgcatccttagggtgtatgagattttgttacccgaataaaaaaataccaatttttaaaattcaaggggctgtttatcactcatacaatactgctgcttttccagaaaatgaagatcttcctaccaatggacaattgtatttcattgatacagatcaatctttgaattatagaatgcaaatgtgtaatgaaaatccaaaagaaaaagagaaaatgggatttttaatgtcttacattgaaaattatttaagggaaaattacattttcgccaaatcttatgaaatgatgaaagacgtaattgagtcatcaaaaaaaacagaaaatgaatttgaaattcctgatgtgacaatgctttttagtgtaagagaaggggttgatttaagaagatataacattccaagatcgaatgaagtttgtgcagttttgtttagagatgcaaatgaagaaattcctgcggcaaacattgttgtccactcaaaaggacaaaaacaaattaaaaatatatatccgttagataaattagtcgaacccttaatttatcctattttttatccgaattattatgaaggatggcattataaattaaaagatcaaaaaggaaatccaatttctttatgtgattttacaaagtacaaattattttaccgaaatgaaggaaaatttttaccacatcattttgctcgaaaactatttcaacaatgggtggtcgatcaagctgctcggattgaatggaatcgtttaaattatataaaaatacaccaaaaggaaatctgtaaagaatcatatagtaacatcggaaaaatattagaaagtagagcaatagaagaaggaatttcttaa

SEQ ID NO: 62389 - DNA, 931 bp, Heterodera glycines
taattaaatccattccttcgggggaccgtgccgggtgccgcggggtaagcagtgctggttcgtttcatcacggcaccgaaccttttggctagtcagcaatcgttgcttaacttgccagatcggacgggtgcgcatgattccactgttccaagcaccccaccaaaagcaaaacgatataaccaaaatataaggaaaaatttttaaaaaaatttttctccatctccctttttgatagaaaaagcatcagagtgcctaaactaacatgtaaataaaatttggtgcgctttagagcactttctgaaaaaatatttatgaaataaaaaaatcgatttattcaagtgtccgtttggggtactcaaacaattatggggagcaaaaatccaacgcagaattaaagtacagactatagggaagctaatcccgaaggattcggtctccccataaatctgggcgcatcggttcggggggactgccccgaaaacaaaaaaatcgattttttcaagtgtccgtttggggtactcaaacatttatggggagcaaaactccaacgcagaattaaagtacagactatagggaagctattcccgaaggattcggtctccccataaatctgggcgcatcggttcggggggactgccccgaaaacaaaaaaatcgattttttcaagtgtccgtttggggtactcaaacatttatggggagcaaaactccaacgcagaattaaagtacagactatagggaagctattcccgaaggattcggtctccccataaatctgggcgcatcggttcagggggactgccccgaaaacccaaaaaaaaattttttggataaaaattatttaaatgaactgactagataatatttaaaataggttatttctcttcctttcagtatccctgcaaagtttggtgcgcttctgatcagtttct

SEQ ID NO: 62390 - DNA, 85 bp, Heterodera glycines
atgcttccgaattgggaccccgtgcttcaggctttgttcgcctctctcttcacttggggtgtcactgctcttggcgcttctttgg

SEQ ID NO: 62391 - DNA, 350 bp, Heterodera glycines
atgtccaccagtttttttgtatgccaacacggcaaggaaaaaggccaagggaagtttgttcaatggaatggacaaagtctgccgaattcggcaccaaatgggccccaatttgggcgtacactaaaaatgccattttttatgaaattatattgttaatccatttaattactgactttcccgcgtgaaatttgcaggattgcccaacaaattgaacatgctcagccatacgttcttcgcaatactcaaatggccttggaaaatgttcgcagaatcgtcgacggaagtgccaaaaatgcgagtttcatctaaatttgattgtagtaaggttatgtccaattcggttagcagta

SEQ ID NO: 62392 - DNA, 512 bp, Heterodera glycines
gaacatcgacactgggcaccgcatcgcagaagaccgcagcggcaccggctggaggaacatcgccactgggcaccgcatcgcagaagaccgcagcggcaccggctggaggaacatcggcactgggcaccgcatcgcagaagaccgcagcggcaccggctggaggaacatcggcactgggcaccgcatcgcagaagaccgcagcggcaccggctggaggaacatcggcactgggcaccgcatcgcagaagaccgcagcggcaccggctggaggaacatcggcactgggcaccgcatcgcagaagaccgcagcggcaccggctggaggaacatcggcactgggcaccgcatcgcaaaatttgacatatgattttcctctggattacctgaacatgagttcgcagtggggaggcggacggccggtaaagccggcagcggcaccaaaggcgggacaggcaccacatggaggaggcggaccggcacagacaccaagtgaaaaaatgccgaaattttaa

SEQ ID NO: 62393 - DNA, 656 bp, Heterodera glycines
atgtcccttctccgtcctcaatcgctgcttcttctggccgctctttgcctgtcctttgcgctgctctttgtcacttcgtcggaagagggagggcgagtgaagcgcggcggatggccttgggattgggccggcaaacaactgtgcaaaacatcggcaaattgcaagtgcaagtgagtcgaagagagtaattgcgctaaaaatagtttggaatgggaataagggagggaatgggcgacgacgacgatggcacttcacttccctttttagggatggcaaaaattgggccaaatgtgtaaagtcggaaggctacgcggccagcaattgttgcgacaaaaattacgtgtgggcatgttgcgggaagaagcccaaacattaacgaggagagaagagaaagggagagaatgagaagcgagttcccataattcattctgttttggatttttagtctttttttctttttgggtttttttggtaaatattttctttagttattataaattgtttggcctaaattatgccattggaaaaaaatgtatttgttttctattacttttttctcttaactccttgggcctgtacgaaaaactttttttaattgctgctgtttaaattactttttgagttatttcatcttttttagcgcatttattttttag

SEQ ID NO: 62394 - DNA, 1559 bp, Heterodera glycines
atgaagaacattctgctctcaattctcttggctcttctcgtcttttctgtgttggctgacgataaagcgcaaaaaacggaggacggacagaaaaagtcagtgacgcatcaacattaaacatacttttcggcatttgatttaggcaaaatttatttttcattttttaagccctgcgattgctcgtccaaaacgaggccacggctatgggtacaataattggggaggcaacggtggatatggatacggtggcggatggggcaacaacggtggatggggcaacggtggatggggcaacggtggatatggatacggtggcggatggggtaacaacggtggatggggcaacggtggatatggatacggtggcggatacggttacggttggaagtagagaatgattgatgcccatgctatttcatgatcatcatcaatgatgctaatgcattttataaagccgccaaatgggcaaaaatgaaaaaaaaacattttttattaaaagcataaaaaagttaagttctctgacaataagctattcacaaaaatgaataaactatttttgacttctttgattaaaaatgagctgcgcgtttgcgttgaattctaccgaaatccgttaaaatattttaggatttaggaccggaaacaccaaaattattcttaaaatttttaaaattatttttggttgcattttacagtttaaaagtcaattttcagtggtgtacatttttctttagaaattttcggcaaatggcaaaatttgacaataagaattttcaaaatttaggagttttgtacctaaaaaataaatgcgctaaaaaagatgaaataactcaaaaagtaatttaaacagcagcaattaaaaaaagtttttcgtacaggcccaaggagttaagagaaaaaagtaatagaaaacaaatacatttttttccaatggcataatttaggccaaacaatttataataactaaagaaaatatttaccaaaaaaacccaaaaagaaaaaaagactaaaaatccaaaacagaatgaattatgggaactcgcttctcattctctccctttctcttctctcctcgttaatgtttgggcttcttcccgcaacatgcccacacgtaatttttgtcgcaacaattgctggccgcgtagccttccgactttacacatttggcccaatttttgccatccctaaaaagggaagtgaagtgccatcgtcgtcgtcgcccattccctcccttattcccattccaaactatttttagcgcaattactctcttcgactcacttgcacttgcaatttgccgatgttttgcacagttgtttgccggcccaatcccaaggccatccgccgcgcttcactcgccctccctcttccgacgaagtgacaaagagcagcgcaaaggacaggcaaagagcggccagaagaagcagcgattgaggacggagaagggacattttgcggattggcagatgaagcgaatgatcggatggatggatggctttgcttttgagggaatgaatgcatttgcgcttcttttgcgattatttataaggccaaaaaag

SEQ ID NO: 62395 - DNA, 544 bp, Heterodera glycines
ttgcttcccttcgtcacaaatttaactttcgtttcgtttccttttccaaaatgaattggtgcgccgttttgtgctttttgcttctcatcgaagtcgcctttgtgccaattgtgaacagtgcgccactgtaagcactttctgtgcttaattgcctcttctatcccatttttgccttttccaaaaagtgagcgggaaaaacggctgactgccagccaattgggcaaaggcgccgtcgtcggtgccggcgtcggcttagtcggcgccgcactttacgccggcggcaaaaagttttggaacaaccgaaaagcaaatgctgcggcaggtaaaaaatggactgataaagcaaagaaaagtaattggaatttaagccgacgcaggcggagccgacgcggccaatttaaaaacaaagggccgaaaatgaaaggatgccaaagaaagacagaaaacggagagaattttaaatgaaatttatgaaaggacagataaaattttaaaggtgcaaaagttgagaatgttttaaaataagaaataaaaaaataaaaag

SEQ ID NO: 62396 - DNA, 381 bp, Heterodera glycines
atgccaatggaaagaatgtgccgaaggaaaagggggaagcgacgtggagaagacatggccagaaacacatcagacggagaagtgaccagcgatggtgggatgccactggtaaagaagcgcatggtgacgaggcgacaagccatgaaagaggccacaacaaccgctgctcgtccccatcggatgaagcgatttccatcgccgacttcccccgttgcatttgtttcttctaatgatttgcttcaccagctcgatttcggcattgttagcattcagccgccacttttcagtttaaatgatgccgcaactttttctgttctgaaacgaatcggagaagagcaaaagctgtctttggaggaaaggaggttaatctcggacgattag

SEQ ID NO: 62397 - DNA, 981 bp, Heterodera glycines
  unsure (1)..(981): unsure at all n locations
atggacggggaagagaccacctccacggaggaagaggaggcggaagaagcggcgggtgaaacggaggaagagcatgaggaggaggaagaagaagaggaggacgaagaggaggatgacacgggggaggacattgacatgttgctcaactcgtccgaagggaacaaagcgtgagttttcaattacattccaaaaaacatttcgaacttaaaccgaaatgaacaaaattatagtaatataggaattaattacccatgcaattttttggtgaaatttcttttgcgattgtattttttggagagccgatgccattagttggcactttctcattatcggcctaattttgagggaaaatgttcgtttcagcttagaaattagtcaatattttccattaatttttggtttttgggtttatttgaaagcctcaatttattttaattaagtttaattattgatatgaaaatttgtttcagtggcttcgattccggttcaactgcatgtgtcgtactgctcttcaaagtgatttgtttactcttctttaaaaaataataaattttcaggacaaacttgtcgttgccaatattggggacagtcggtgagtgaaattttatggcatttgtttaaaggtaattaacttattattnctctcggttgtgttcaacagatgtgtgctttgtcgcgcgggaaaagccgttgaattgtcggccgaccataagccggaagatttgaaggagaaggaacgcattgaagcggcaggtatgcaaggcgctcagcaaattagtctatttttatgaccatatttattcgttgtaatattctttatttggcacaacattttcaggcggatccgtgagcgaagatggccgagttaacggaggtaatgagagcctttttatcaaaaatagagtaattggactgaaatttttgaagtcagtttgggaaaacccgttattattatttcatccgaaagaaccacattattga

SEQ ID NO: 62398 - DNA, 827 bp, Heterodera glycines
taattaaatccattccttcgggggaccgtgccgggtgccgcggggtaagcagtgctggttcgtttcatcacggcaccgaaccttttggctagtcagcaatcgttgcttaacttgccagatcggacgggtgcgcatgattccactgttccaagcaccccaccaaaagcaaaacgatataaccaaaatataaggaaaaatttttaaaaaaatttttctccatctccctttttgatagaaaaagcatcagagtgcctaaactaacatgtaaataaaatttggtgcgctttagagcactttctgaaaaaatatttatgaaataaaaaaatcgatttattcaagtgtccgtttggggtactcaaacaattatggggagcaaaaatccaacgcagaattaaagtacagactatagggaagctaatcccgaaggattcggtctccccataaatctgggcgcatcggttcggggggactgccccgaaaacaaaaaaatcgattttttcaagtgtccgtttggggtactcaaacaattatggggagcaaaaatccaacgcagaattaaagtacaggctatagggaagctattccggaaggattcggtctccccataaatctgggcgcatcggttcggggggactgccccgaaaacaaaaaaatcgattttttcaagtgtccgtttggggtactcaaacaattatggggagcaaaaatccaacgcagaattaaagtacaggctatagggaagctattccggaaggattcggtctccccataaatctgggcgcatcggttcggggggactgccccgaaaacaaaaaaatcgatttttt

SEQ ID NO: 62399 - DNA, 296 bp, Heterodera glycines
cggtctccccataaatctgggcgcatcggttcggggggactgccccgaaaacaaaaaaatcgattttttcaagtgtccgtttggggtactcaaacaattatgggaagcaaaaatccaacgcagaattaaagtacaggctatagggaagctattcccgaaggattcggtctccccataaatctgggcgcatcggttcggggggactgccccgaaaacaaaaaaatcgattttttcaagtgtccgtttggggtactcaaaacaattatggggagcaaaaatccaacgcagaattaaag

SEQ ID NO: 62400 - DNA, 360 bp, Heterodera glycines
acttcttccatcccaatgggccccgttcttccgtgcattggccaaaacaataaaaaggacgaagtgatgaaaaagaaggagaaaaatgacgagaaaatgaccttggaaacgaacaaaatggcgagtgaaaagcgaaaaaggccgccgagtttgtccgagaaaagttttccatacaacgccggactggagaagaacaaattgtttgtgaagaaattggattggtcgtgtacgggcgaggaactcaaagtaagtaagaaaaagggaaatggagtaagattatgctttttaagaaatttttcgagaaattcggaactgtagtggacgcgcgaattgtcaccaaatggaacggtcgctccgagg

SEQ ID NO: 62401 - DNA, 926 bp, Heterodera glycines
atgaccaacgaaaaagactctatttggttttattttgacaaaattcacaattcttcttatgccaaatgtaagattgagcttaataatcgcaaaaaacaacctttttttgttgaaaatctgttaacaaattgcacccaaatttttaaaatttcccccggcggcgcctatcggcaccgccggaccccttctttcccaaaagttttttgaaaaagcgctccgaaaaaaagtgatgtgaaaatcaaatctgaatttctattaatattcgatgatttagtccaaaaatgattaattgtttgaaataattgaagaaaatttgtttgaaaattttcattaatttaatttattaaataaaaaaccaaataattttgtattattttcacttgatataaattaaaatttgaatttttttttaaatttttaaaatttttttgaatttttaaaatttcccggttggtcccggttcccggtttttcttgcggtcccggtcccggtcccgaaaaaaaatcgaggtcccggtcccggcttctcaggtcccggcaagtcccggtcccggttttggcaaaaattcccggtcccgtggcactctaattcgaacactcaaatttgtagatctaacagacaatgggtaagacaaaagcctgttactatcccattttattatttctagggcttccatttttaagcataaaaaatcacgaatagacacctaaaaaaggctgaaaaaataacaaaattggcattaaatagacataaaaacccctcgaataggcataaaaataggcaaaatttttgtttttataacacaaaaaattaatcaaaaaacttattttggctatatttcactttttaaatgaattattaaaaattttaaagtttttcttcgaataaggataactctttaacaaaaaatattatcaaaaaataaa

SEQ ID NO: 62402 - DNA, 327 bp, Heterodera glycines
atgaaattatgcctaatattttctttaattttgtttttgctcattatatttgatcaaatcggagcagaaaagaaaaagctacaacaaaaaacatttgatgaaatatttggagaaaaatgggaggaaaaagaagaaaaagaaagaaatgagaagaaaaaaagagaaataatcagaaaattttataaaataaaagaaaaaataaagcaaaaagaaagaaaataaacaagaaaagaatgggataaaattgaaggaaaaatagcaaaaaaattgggaacaaatcgccaatatatttatgaatggatcaaagaatttggattaaatcagaga

SEQ ID NO: 62403 - DNA, 324 bp, Heterodera glycines
aaagcgcacggttgcgcacgggtgtttcccgcacgaacccatgcctatgggaggggcgcagccctttgatgttgccgccccgcacgaacccatgcctatgggaggggcgcagccctttgatgttgccgcccagaacccaaagcatatgggaggggcgcagccctttgatgttgccgccccgcacgaacccatgcctatgggaggggcgcagccctttgatgttgccgccccgcacgaacccaagcctatgggaggggtgcaatcctttgaagttgccgcccgtggacccatgcctatgggaggggtgcagccctttgatgttgc

SEQ ID NO: 62404 - DNA, 232 bp, Heterodera glycines
atggacggagggatcgcgtggccgggaatggcatgggtcacggagtgccacggggaaaagggggtcgaatcaggcacacatgcagggaaatcagcaacggcgtggcacggaagtgcagcagttggaaaaggagtcgaattgcacgggttgttaagttggcacaattcgaagggttttaacggtgcggaggaaatgccaaatgatcggccgaaggggcacactgaaatgggag

SEQ ID NO: 62405 - DNA, 566 bp, Heterodera glycines
agcagtgaatcccttcccattggcagacaatggacaaattcaattgtggcaattccttttggaactgctctcaacgggcgattcgtgcattacgtgggaaggcacaaaaggtaatttagcaaaaaaacgaaggaaatgggaaaacattttgaggagaattcaaactgttgaagccggacgaagtggccaaaaagtggggagaacgcaaaaggtaaggcgaaaagagaaaaaatcagcaaacgaagggagagcaattaaatggaattgattcatctgttaggctttacggattcggcttaatcacccgccgtttcagcaagccgaacatgaattacgacaagttgagtcgcgcactgcgctattattatgacaaacagttcatgagcaaagtgcacggcaaaaggtacacgtacaaattcgacttggacacattggcaaaggcatgcgaagcggcggcggagggaccgaaagaaatgccaaaagaaggacgaaaagggacggcagaaacaatggcagaggacgaaagggcagcgaattggggagggacaaccgcaggtaaaaattaa

SEQ ID NO: 62406 - DNA, 306 bp, Heterodera glycines
atggaggtgaaatttgaggaggaagaagaagcggacggacgagtggcgatggcattggcattttgggcactgttaagctgctgttggacggagtggtgcagggaggacgagcgggacaaaaagctttgcccactcatgctttggttcattctcgcactgaaaaaagccaagaaaattaatccgaaaaacggagaaagtgattcaccgcagcttcgcctcgtgccaaatgtaaaaacggagatacaaagcgcggaaacagaggagggcactcagacagaaacagaacgccaaaagaatgccaattga

SEQ ID NO: 62407 - DNA, 1678 bp, Heterodera glycines
atggacagagacggtggaaaaggaggagacggagaaggaaaagagggagggactgaatggacaatgccaaatgggacgaaactgatcggagatgagcagagacagcacggaactgatcaaaaggagacgaaggacgaaagtgccaaaaatgtggcagcagcaacgaacgcgtcctctgctggagacgtaaaaccgactgatcggcccaaatggaagtcccttttagccgatcgaagtccgtccgtcatcccctcccactgatcagtctgccgatctccgccgtcgtgtccaattgcgcagtccgccggtgttttcttcgccccttttcgactcgccttttcttggctctgtccatccgtcgctctttcaactgaaggtcgtttctgagcactcaaactcgtcaaaattcctttttttgtccacactttcagcttaatcgtccatccccatcgatgccaatttcgacgaacggtgcccaaatgccacggccaaagtcaaggattcaagcggacggagagcaacttcggtttgaagtgttggtctcagaagtgcgtttagtttttgacaatttcggggactgggattgatactaattaggccaacaataatcattggccaattagcccatcaaatcatttggactgtttgattgacttttttgaggattccggcaattacacgtgtcgcgtgaatggtgctgtggttgtgcttcggctactcgttgaaaagcccgtcattgagctcagtgccgttgaaattggctctcattacgttgctttggcttggaatgactctttgaaggtcttttcttcccattgctattgcttttcttcattttccacctttgtcatcagattcgagctgctgagcgagtccatttgtcgttggaagtgcgcgatgcgatcacccaacagagacggaccatccaattgtcgctgcacaatccctggcgcagttacaacgtcgtccgtctccgtcccctcaccgtctgttttttttcttcccactttttctctgccctccaatgtctctccaatgagtgtattatttcagaattacactttctgtctggagtaccatctcgtccattttctacttcatttggctgattcgtcctcatccattttcaaaacttgcatcgacgttcaaacggaagaaccgctcggcttttggacttcgctaagtccgatttcaattggcattcttttggcgttctgtttctgtctgagtgccctcctctgtttccgcgctttgtatctccgtttttacatttggcacgaggcgaagctgcggtgaatcactttctccgtttttcggattaattttcttggcttttttcagtgcgagaatgaaccaaagcatgagtgggcaaagctttttgtcccgctcgtcctccctgcaccactccgtccaacagcagcttaacagtgcccaaaatgccaatgccatcgccactcgtccgtccgcttcttcttcctcctcaaatttcacctccatttgggaagaacggagttcgccagcccaatgtcttcaaacaccgggaaacgagaaaagaataaaaaagaaacgaaaggacaaaacaacggcacttcggctgggggcgaagaaatcggcggacaacgatgcccgaggggacggagaagggatgggcgtggcggaaagcatcgtcctttgctga

SEQ ID NO: 62408 - DNA, 303 bp, Heterodera glycines
atggctaaggtccaattcttcaattgccggactgaagcgcagaatatgttcactgatagtctaaaaaaggcaaaaaacggtgaaaagattagggaaaagggaaaagccaaccaaaaggcaattagcgctgagggaaaggcgccgcaggcgaaacagtcgaaaggcctcccattcgacgctaacgatgcgattggtgttcaggcgaatttcttcggcattcggaaaggcaatgaaactgtgccgggaaatactctgagagagaagagtgatcggagtttaaacatccaaagttaccgtaattaa

SEQ ID NO: 62409 - DNA, 204 bp, Heterodera glycines
gcattaaaaacgcaatcggaaaatgccaggaagtgaccgatggccaatccgaacaaataaatgcggagagaattgataaaacaacgtcgaggcgaaattcgcaatttgaggacgaagaaagagaaaatgaacaagaaataagaaaggcacttctgccaaaagcacaacagaaagacatttatttatccgaaatttaattaaaaa

SEQ ID NO: 62410 - DNA, 1275 bp, Heterodera glycines
atgactgacatttattataaaatagcctcctttgaccattcctacttgaataaaattaatcaatctgaattattctcaatgattgatgaaattgttgaaaattttcaactttgtaatgtagaagaaacgaggtcattatcgagatgggtatactgtatgcttttggttttgttgtggatagctcttgttatgacaggaattttcctctattttaattcattaattagaaatttatgtaagcttatgcatatatgtagagacgaaaatggacacaacgacgataaatcggattctagcgggaaacacaaagaccagagaactctacttgggatgcttcccttgcgacaaactcccaaacataatcaacaagtacccttcaacattggtggcgaataatgatccttcgaataaggaaggaacgcattggatagcaatgttcatcgttgacgataggaccgtctactattttgatagttttggtaggaaaccgaacagatgtatcagccagtttttacggaattatgaaaaagtgatttcgaataagccagctattcagtcagtgttcagtgagaattgcggttattattgcatttattttatttattgtatgtgctcattaggaggaagaaattatgagagtaattttgaaaaaatgacaaaaaagttaataggataagataatccagatttgtttgtcgtgaattttgttaaaaaaatgataaaaactatttaaggaatttatcattaactcatttataaaaatggaccgtttagacacaataattgcttctcttctgaactgtcccgcacgtaacttgtgcgactgcttaaatcacccggatgagatacaaaaagtagaaaaatacctcaaagggaaaactctacagacaacatacaaaaatcaactagatgaatacaaagattttgagtacggtggaattacaagagaaagtgcccgtaagcaaatggcttacaatggtttcaagaatgtgaccgtcgaccagcatttttatgtacggcaccgcatttgtcttcgctacgctaataatccttgcgtgattgagaagcgatagaaatggacacgaacgattctacccacttgagcttgtgaaagtgaaacacggagacgaaagcgatatttatttgggacaaaatttcccaaagtcaatacctttacttgacgaaaataattcaaaatataatgacaatcattatgattcttgtcgcttatggtgaatatttaaaattgcagataatttgataaaattgattaaa

SEQ ID NO: 62411 - DNA, 568 bp, Heterodera glycines
tgattttgtatttaatcaattttatcaaattatctgcaattttaaatattcaccataagcgacaagaatcataatgattgtcattatattttgaattattttcgtcaagtaaaggtattgactttgggaaattttgtcccaaataaatatcgctttcgtctccgtgtttcactttcacaagctcaagtgggtagaatcgttcgtgtccatttctatcgcttctcaatcacgcaaggattattagcgtagcgaagacaaatgcggtgccgtacataaaaatgctggtcgacggtcacattcttgaaaccattgtaagccatttgcttacgggcactttctcttgtaattccaccgtactcaaaatctttgtattcatctagttgatttttgtatgttgtctgtagagttttccctttgaggtatttttctactttttgtatctcatccgggtgatttaagcagtcgcacaagttacgtgcgggacagttcagaagagaagcaattattgtgtctaaacggtccatttttataaatgagttaatgataaattccttaaatagtttttatc

SEQ ID NO: 62412 - DNA, 268 bp, Heterodera glycines
gtttagattaaaggatgagaagtgggcaaggggctaaagaaccagacaaaatttaatggtcacaaatcgattggccggcggaaggctttgggagaacgacgacggctgacgcacctttttgagggggaggcacagacagaaggaaatgtgagagacatgcacactctatgaatccactcgacggcgcgctgtcagaaatgggattgtgcgagaaaagaaagaagctcaaaacaatgggcagatggttttcatttatttgggcagtgat

SEQ ID NO: 62413 - DNA, 406 bp, Heterodera glycines
atgacttccgcttctcaatatgtgcgggataaagcaaacagaacgcgcttgtcaatcgaaagttattatgcccaagcggtggtccatttggccgaacgagaacaacgtgcagaaaagctcgaaaaacaaatggcggaggaagggctaaacgagttagaaaaggaggacaggaggaaaatccacgctgccaaagaaaacgactttttgcgacagcgaagaacaaaactttcagcgaatgattttcaatccttaaaggttaatcaaattcttgttctctttgcatattgctttgtaggtgattggtagaggcgcatttggtgaagtcagacttgtgcagaaaattgatactggtcacatttatgcaatgaaaattttgaggaagtccgaaatgttggagaaggaacaa

SEQ ID NO: 62414 - DNA, 321 bp, Heterodera glycines
ttgcttgacccggaagcgagacaacgcgaggtttaccaggccggctacaaagacccgaacgcgccgaaaccgatgcgcgtgtgcgaagtgtgcggaagttttttgatcattggcgatgttcagcagcggtaaaaaacctcattttgtttatgttgcaattattttgaattaagcattgatgaccacatgcaggggagacaacacctcggatatgcaaaaatcactgccactttggcggaattgaaggtatttaatcttaatgttatgtggagaaatgcttggatttattattttggaaaggatttgtatcattcattttaa

SEQ ID NO: 62415 - DNA, 467 bp, Heterodera glycines
acatttctccgtgccaccacttcagtcagttaccaaatgaatttcaaattgaacaattcaacgcaaattgagctatttgaattggtgaacgaacggactaatgagaaactgacactgattatggatgacggtgaagtcattaattattatgggatgttgaagcgatgtccaataattgttggggagatggcggcggcggttcaatgggaaaacgacgaacatttggatgacaatttgaacagtgtccaattttttttgtgggatatcgcagttaatttcattgggtaagtgtaaaagataggtaattcattcaccaaattcaaattgtatttaattttaggccattgtcgcccccagcggacgaagaagaaaaagcgggtcaaagcaacgatgaaatgttctcgacgactcccggggccaagtggaacagcggcggaatgagtgattattttgaaaatgtcgtctaa

SEQ ID NO: 62416 - DNA, 59 bp, Heterodera glycines
  unsure (1)..(59): unsure at all n locations
aacatntgccttctctagtctggctctaccaaacactcacacgatatttgaaatgctaa

SEQ ID NO: 62417 - DNA, 59 bp, Heterodera glycines; identical to SEQ ID NO: 52421

SEQ ID NO: 62418 - DNA, 59 bp, Heterodera glycines
aacattttccttctctagtctggctctaccaaacactcacacgatatatgtaatgctaa

SEQ ID NO: 62419 - DNA, 59 bp, Heterodera glycines; identical to SEQ ID NO: 52421

SEQ ID NO: 62420 - DNA, 59 bp, Heterodera glycines; identical to SEQ ID NO: 52421

SEQ ID NO: 62421 - DNA, 59 bp, Heterodera glycines; identical to SEQ ID NO: 52421

SEQ ID NO: 62422 - DNA, 59 bp, Heterodera glycines; identical to SEQ ID NO: 52421

SEQ ID NO: 62423 - DNA, 59 bp, Heterodera glycines; identical to SEQ ID NO: 52421

SEQ ID NO: 62424 - DNA, 59 bp, Heterodera glycines; identical to SEQ ID NO: 52421

SEQ ID NO: 62425 - DNA, 199 bp, Heterodera glycines
aattaatccagataaacaattctaacttacgtcgaattaaactaatttcacgtttaaaaaatagaagaacagtctaaaaaagaaaaaaaactaaaaattttacttatttataaaaaacaacaccgatgtaaaaaaatcctgttaactctagagaaattttaaaaaaccaaaaagggtcagaaaaaaataaaaaatttta

SEQ ID NO: 62426 - DNA, 1877 bp, Heterodera glycines
atgacgctgaacacaattccgaatttggacggcagtagaggctccgattcggtgaacgccattttcaagcaatttgatattgcgactgaagaatggcctgaacagaagcgagttcgggcgctgcgttccaaatgttttggcaaagctgagagagctttcaattccgcggttgctgaaaatcgccatgactaccaactgatcagaacatcgatcattcggcaattggacgacacggacgccaaacaattgacggcgtttgaccaactgatgaaaggagtttggcttcggccgaatgaaggcattgatcagcttggcgaacgtgtttcgcgcttggtccgttgtgcatatccggggctcagcgaacagctctacgacgaatattcggccatgcatttcattagggcactccctaactcagaattggcaatgaatttggagatgactcgtaaaccgggtgcaacattcgatgagttcatcgcacaagcagcacgagccgaggcagttcaaaatgccgcacgaaattcttggcgaaacagccaaaacaacggctgtttccaaaaccaacgaaggcatattgtttgctataattgtggccgagtcggacacacttctcgaaattgctattcacagccgacacatcagacgcatcagatcagtaaaaactgcaatctccagtcgacaccaccaccactattgaatcaacaaaatgacgaaccgccgaaaaagggaaatttgttagttggcgccataaacttggaacaccgtcccgagattgagaaattcttcggaaaagcaacgaatgagtcggataagggtcgatttttggaagaaagcccggcggttggtataattttgacgaccaaagtttcggtgtttggacgtaagttggatgccatgctggacggcggatcccaaatttcactgatttcggccaaatttttctctcaaatcatggataaagttagcaaaaaggatgtgatctcccgctccgaaagtcaagtcatcgacataaacggaaaggaagtgaagtgctatggaattgtttctctgccaattgagcgcgggcctttaaacacgaaaattcgtgtattcgtcgcagagtcatgttttgggtacgatttgattttcggcacgaatgccttgaatcaattgggcttaaaaatgctcgatgtagtgaacaacaacatcgtacacttcacaccagcttcgaagcccgaaaattcgcctttaatcgttttcaaaacatttgtgtcccatgacaagatcagatacgatagaaagatgtgatcaaaagtcaaattgttgttgatggccaaaatttggacaaaacaccgcgaaactttggagggaagagaaaggacgagtcgggcccaaaaaatggcactaagacgaagaaacataataagaaacatcggcaacagaagcacacaactgtggagaaaacgacaattcaaaatgccacagagaatttaggagagcggaagaagcagcgacagcggaaggaaaacggcgaaattgcttgggcgataaagcgcgtttggagacggaaaattttggaccaatttcagttggggacaactgaaaatttgggtagggggaaggccagcccaacaacggcttcgtcggcaaatgggaggttggatctatgcgatcgccgccctgactctcgtccccaatcatcattccatcgcggcgagactaacaccaaatttggccaaagaattttttatcgtggaggaaaatgccgtaaagagcccgatcgtggaatgctaggagacggacgccggcacaagctgaactcgcccaccacctattggatgcgaatgagcataaaaggcaggggacgcctttttctcggagggtcgggatgtgttaat

SEQ ID NO: 62427 - DNA, 460 bp, Heterodera glycines
atggaaaacagaagcaatttgcgaaagaattgggcattcacagaaaaacattcagaaaatggaaaaaagaatttggcatcgaaattggcaaaagtaaaattattaatttaaaattttttttgaaaaatttctcttttcagaagcaaatgcctattcaaatgaagaaaaaacagtcaaaatgaatttgtattataaaaagaagaaagaaaatccttctctaagtgacaaagaaattgccagatttttggaaatcggaagcagcactctaaaaagatggaaaaaggaaaaaaatttcatattttaaatattaattttcaaatctttattttattattgaaggataggaatcggtactcaacagaagaagaaaaaaaaattgagcaagatgagcacaaaacgccaaaatagttgaaaatagtttttttcaaaattttatagttttttagttgctaaaaataaa

SEQ ID NO: 62428 - DNA, 1404 bp, Heterodera glycines
atgcgtatgcgagaggaggaagaggaacatgaggaggaggcgccgccgggggacgaggcgccgccggggggcgaggccccgcccccgccggaggacgaggaggacgcggaaaatgacggcgggccgggcccgcagcaggcgcagccccagaaaaaacctttgccggattttatcgttcaggaggaccctcgagacggtgccaattagcggcgacgaaaaacttatttcttttttgctgatttgttctgcacatttattcaagctgttctattgtttcatcaaaaatttattggaaaataaaatatgaactctaaaaattgaagattttttctgggactgtaaaggtcgcccgaaaaaacgcaaaataagaaagttttaatttttggctttttgttcggggttcgaattctattcatgatcagtgactaggactagcggcccctaaaattacataaacactttttatgactaaatttaaaaaaaatcgaaaatctaccatgaaatcctccccctaacaaataggcatagaagtactgaaaatttttttttttgcttatatacaatttaaataattttgattttattgttagttaaattttttgtttgccagaattatgacgaaacgacgacacaaaacatgtgagctgactgggttcaacgccgggctggccaaggcgttgttgaacagcaaagcacgcgcacaaacacacagcacaggacggggaaggagtgcaagacaatcggtgggacatacggccacgcaaaagccgctgctcgagtcgaaaacgcacgagtcggacgtgcaggaactgctcaccaacgcggagttggccaattcgacatttgaggcggaacgcggggacatcaaattgttgtccgggttggcattcacccttttttgttctcaacttctcatactgtttgttcttggcacaatttcagcaatggcaatgtggcaatttcttccacaaaacaaatggatttggccaattcgcttgaccgattgaacgccgattatggtcatttgttgcgaatcccgcgtcgtcctcggcccaacacttacgaagatgcagaacagctgaacgcgttggaagccgaggaatttgttgcttggcgtcgacaattggccaaactgagcgaggttagctttgatgggttggcatttaatttctggaaatggcctgctccaatgatatgtcgtattgttagtattgtaaatatcaagtaatatcaatggtatttttgtcccaattttagcgtaatattgtgatcacaccctttgaacgtaatttggaaatttggcgtcagttgtggcgagtcgtggagcgaagtcatttggttgttcaggtcaatttttattttaaagggcattttatcacttaccaaattctgtttttgctactg

SEQ ID NO: 62429 - DNA, 356 bp, Heterodera glycines
atgccgcgttatttatttgcattttacggtggacgagcagtagccgaaccaaagggcacagagcgaagcccaactcggaaaaacgcactgctgcaacccgcagaggcccacaacgatgttgaggacgaagaacggagtccaacagatgaaaaaggaagagaacacgacgatgagcacctcaaaggggccgactcattgccagcctaattaccccctaatactcaccctcgtcgccttttgttccgatgccaattccgccgtccgttttgccctcccccggcggactctgcgccggcggcgctgccgcgcgttcgccgtttgcgaatcgccgctgatacttccggatgattttcgca

SEQ ID NO: 62430 - DNA, 264 bp, Heterodera glycines
atgtgtttaaaatatgtgtgtggtgaattattggtgggttactcggctcgctctccccttattccttctcctcttcctcctcctcacaatcggcagcaaagagttggttggggtcagcgaacactgccgaggctgagaatgccaatgcctgatcccgaatgtaacgggcacggcgaaagcacttgtccagcggagacaccgtgtcaccgccttccatttctgtgccaaggagaaaaattagggaatggcatggaaaaaaattaa

SEQ ID NO: 62431 - DNA, 146 bp, Heterodera glycines
atggctatctatttttttgagaaattttctatgcaacaaacgctctcgaacatgaaacgaagtgcggtgcgccgtggccattttatttttcaaataatttttaaatttaattgatattccagaaaaatggctatctctttttttga

SEQ ID NO: 62432 - DNA, 146 bp, Heterodera glycines
atggctatctctttttttgagaaattttctatgcaacaaacgctctcgaacatgaaacgaagtgcggtgcgccgtggccattttatttttcaaataatttttaaatttaatagatattccagaaaaatggctatctatttttttga

SEQ ID NO: 62433 - DNA, 344 bp, Heterodera glycines
atggctatctatttttttgagaaattttctatgcaacaaacgctctcgaacatgaaacgaagtgcggtgcgccgtggccattttatttttcaaataatttttaaatttaatacatattccagaaaaatggctctctttttttgagaaattttctatgcaacaaacgctctcgaacatgaaacgaagtgcggtgcgccgtggccattttatttttcaaataatttttaaaattaatagatattccagaaaaatggctatctatttttttgagaattttctatgcaacaaacgctctcggacatgaaacgaagtgcggtgcgccgtggccattttattttcaataa

SEQ ID NO: 62434 - DNA, 1323 bp, Heterodera glycines
acagtctagacccatgtgatgaatacggcgcagattgcgtgccgatcagaaatttgttgttgaaaattgaggcattggcaaactgtggaaagaacgaaagcgaaaacaatgcggtaaaataaaaatttaaaataatatttaaaaataatttcagattttcaaaaagccagactgggccccacttccgccagaaatgccatggaaaaagccatccgaaacattaatatgcgatggggacatggcatgtgacaaacaaacgctgcgagaacagtacaacagattgagggagagtgagttaaatttaacaaataattaattaattaagtaattaaattaattacaaatccaaattaaaattcacagtttgtgggcttaagcccgaagaaatagaaagtcagcggaaaaaacgacaatacaacgcacgccaaaaatggaccgaatccccgatcaaaatcacattcgacgaaagagctcgtaataattttaccataatagtgtagtttatcaaatgttttaagtaggtttacacgggtccgggtattgccgggtccagaaaagccggctccgggtattgccgggtccggatagtagccgggtccagaaaagccgggtccgggtattgccgggtccagaaaagccgtgtccagaaaagccgggtccgggtatttccaggccagggtatcgggtcctaaaagaatccaaaaaaaaattccattttttcattaagaaatgcttatacttttaaaaaagcatgaaaaatattcgggaccagcaggggcggtcttataatttgtatttgtaaattaaattattaataaatttttataagctatatatattaataaaattataatttttataatatacatattaataaaattataattttgtattcgtaaattaaattataataaatttttataatatacatattaataaaattataattttgtattcgtaaattaaattattaatacatttttataagctatatatattaataaattataatttttataatatacatattaataaaattataatttgtgtattcgtaaattaaattataccgagttcaggtcgggtcttgaaaaaaccgggcatccgggtctgagacccggtcgggttccggactcgtgtaaccctagttttaattgcttgattattaattaattgtttagtgccaaaggacgggtaccaacaatggaaggatgcgataggaattggtgccgctttgataatgtgagaatgattttttaagtttggtcgattcttagggggcgggtgtatttttggtttttcttattcatttcagttaataaa

SEQ ID NO: 62435 - DNA, 110 bp, Heterodera glycines
atggcggtacgaaaacggcggtacgaaaatggcggtacgaaaacagcggtacgaaaatggcggtacgaaaacgtcctggcccgcaacattcactatgggtaccgaaacgg

SEQ ID NO: 62436 - DNA, 66 bp, Heterodera glycines; identical to SEQ ID NO: 53774

SEQ ID NO: 62437 - DNA, 520 bp, Heterodera glycines
atgcaggtgaaaatttattgaaattttggataattttttaacaaatttttgttcaaaaatgatcacttttgcgtcataacgccaaatagcataaatggcgtagttttttgcgcgcaaattcaaaaaatatactgctaaatgccttttttgtattgtttattttgatgatctggcataactcgcttaatttccagctaaactgaacaaatttgatattaaaaaagattttgaaatggagaatctttttcaaagcaaatgctaagaaatttaacatttcagaaaaaatttgtgggagtttcaaactttcattacgtaataactagagctgccttttttttctgcgcattagtttcgatatattaagcataaacaacacattttccacttggtttgaggcttctacgttgacttttattattagggctgcaaaaaatatgtacaaaaagtggtctaaatatgtacataaatatgtaagaaaaattccaaaatatgtacaaaaaaccccaaatatgtaaataaa

SEQ ID NO: 62438 - DNA, 84 bp, Heterodera glycines
ataaaagtcaacgtagaagcctcaaaccaagtggaaaatgtgttgtttatgcttaatatatcgaaactaatgcgcagaaaaaaa

SEQ ID NO: 62439 - DNA, 271 bp, Heterodera glycines
atggtgggcggatgttggtcggccaaattcaacggcgatgagcacagtgtgtgatcacaacagctcacagagatttgtcaggcctcggttggcattgttcgaatgatgtccgagtcgcccgggtcagtgatggacagcatggacactcggaacagtttgccgcaagcggtgcccagctcgatgttgttgccatggtactcgtgcacgcccgtctttgacagcatggcgtagtattcaacttcactgcgtctaaaggccatgaacaaataaa

SEQ ID NO: 62440 - DNA, 67 bp, Heterodera glycines
  unsure (1)..(67): unsure at all n locations
gatgaaagtgncaatgcgtcggatggccaagcggtgaccaaatggctgttgacgcctcgtccggatg

SEQ ID NO: 62441 - DNA, 73 bp, Heterodera glycines
  unsure (1)..(73): unsure at all n locations
aattactggangtagcatcatagcagtgcttttcttgtcttttgatgccctcgcaaatctggntcgcttctga

SEQ ID NO: 62442 - DNA, 135 bp, Heterodera glycines
atgcgcaaaggcaaaattcaaacacaacagcacgaagtacacatgcgcatgggattacgtacggacatcgccaaggggagggatcggctgctgttatccgtccgtggaaagctgcgaaaatctgcgcagcatggg

SEQ ID NO: 62443 - DNA, 176 bp, Heterodera glycines
atttttactttaaataaatttaaatttttttaaattttttgaatttttaaaatttcccggttggtccaggttcccggtcccggacaaaaatcgaggtcccggtcccggcttctctggtcccggcaagtcccggtcccggttttgctcaaaattcccggtcccgctctactctagta

SEQ ID NO: 62444 - DNA, 2433 bp, Heterodera glycines
gctctgcccgtgttttacttcgtctcttcggttggtcccttttccacgtccgcgtctccttcgccttctccgtcgtcatcgccggttccttcgctctttggcttcataaacagcaggtagacgaacgcgccggtgaagatgaccagcggaatcagcaaaatgatgctgagcgtattaaatgggcctcctggttcttctttgccattcttctccttgtcttttgctgccagtgacacatcgaacgcacagatgagcagcaccagcactgagcacacacagcggagcgaaaggggccggcggaacggagttgggctgacgacgctcttcatcggtgtgttggtgaagaatttgcttgtttgtcgaggccgtttctgaacacaaatggaggggatgtaaaaagaagacaaaaaaacacacgaaaaaaaagagaaaaaactcacaaaaatgttgcagtgggtgcacttcgaaatgggcaaatggtagtagcgaaggtgaaaaggatgaaaacgcatccccttatatatcaaatgaaatttggcaaaatgttgggtttaagaattgtcgtggctgagattgtataaaaggaacgggcattcgcattttcgctcacttcccaataataaaataatctcaacgacgataattgcgcaacaccttcaaccgatacatcttccacacacgtcaacttcgaccgcgcttgttctccaatcaaccaaatgagcttcttcttctacctgatcgttgctgcggcactgttcggcggtggaatggtgcgtttgctcattccaaatctgttgttccatcaatcattttaacggttttgttttcccttttcagttcgttggcatgtcacttggcggcaaaaagtcatcggatggagcgagcggcggcggggccaagaaggagaagaagcacaaaggatcgaagagctccagcagtgagaagagccaatgatgccgccgcagtacacgaggacggacgaacgatggaatggccgacaacagttcccctcccaaaccgatgctatccccaaaatatatgttgttacccctatcatttgtgttttatcactctgtaagcaaattttgcgctttccataccagcgatcatattgttctaattgtattgatgtgttatatatgtgtacacatgtatttatgtatggtccaatgtaactccgtttcatattgtatgtaaaatgtgaacaataaattgtagttttgatggtaattgtgacacttgtatgggtaatactatagatggtaccccccccccccctttttgaagaaacattttttggcgctatattgaaagtggccctttttgaaaattttttcaaaaggggggacccttttgttttgcaaatttttttttgtgatagtcataaaaatttattctggggtttttggggtccccgatcacgaatccttcaattattttgatcaattccgatttcctaatctgaatttgaacaaaaaatcataatttgaaaaattcaaaattccgatttttattcgagttcgggttagggattagaaattagtcaaaatacatgtcagattcgtgattagcgaccaaaagtcttggaaacatgtttatggggggttttcgaggtcgctgattacgaatatgcgatagtgagatccgaatcgaaaattttcaacgcagaaatgtatttttgagcttctttcttcgaaacaattgagcaaaaaaaattagttaaatcactaaaagtagcgaccctaataatttccattaaatttaattgttaaaacgaacatttgaaaggacgtggacgttgccgctgcaaatccaattactggctactcaaatttaatgtgaatttatatgatgtcatatattttgggatatcattttagctaatctgtttgacacaaacttccccaaaggtacactttccacttttacaccggcactcacacagtttctggcctcggggcaaaactcaagacggcctacacaaaaagtggttcttggggtcataatatttaaaaaaacaatatttgcactaattgccaggtctgcccatttttctgactgagtacggcgcgtgcgaatcgtccggcgacggcacaattgcgaccagctccatgaacgaatggtggtcctttttggacggctacaaaatctcctactgtaactggtccgtctgtaacaagggcgagtcgtgttcggcattgaccaccagcgcatcggcgagcaatgtgaggaaaaatgaaatgtgaagccaaaaaacggaaaggaaatgatggccaccaatggccgagactgtattcgaccaattgcatttctcgaaatggaaacattccaaatttttgtaattttatttaggtcggttcctcttcctactggacaacctcaggaaaactgatccaagcttactacaaggagcaaagcaacggcaagtttttt

SEQ ID NO: 62445 - DNA, 796 bp, Heterodera glycines
atgaagagcgtcgtcagcccaactccgttccgccggcccctttcgctccgctgtgtgtgctcagtgctggtgctgctcatctgtgcgttcgatgtgtcactggcagcaaaagacaaggagaagaatggcaaagaagaaccaggaggcccatttaatacgctcagcatcattttgctgattccgctggtcatcttcaccggcgcgttcgtctacctgctgtttatgaagccaaagagcgaaggaaccggcgatgacgacggagaaggcgaaggagacgcggacgtggaaaagggaccaaccgaagagacgaagtaaaacacgggcagagccaaattggcaaaacaactaataatgtttttcccatttcagaacggagcctcgaattgaatctccagcaactcttttgggcgtgacagtgccgttggagcaagacgaagaagagcagaaaaaggacgacgaggggtaagtgcaaaggtggcggatcattttttactcattaaaatttaccatttttagtggcgaccaaaccgcggagaagaaagaagaggacgcggcggcagcggacgaacaaccgaaagaaggcgccgcggaggcagcggaagcggagaaaagtgcgacaaaggaggagacgaccgaggacacggaggagaccacggaaggatcgaccacagagacttccgacagcggctccggctcgggatcgtcttcagcatcgggctctgaggggagttctgggacttcggacgccacttctgaagccacagaggacgcatcatcttcatcggagggttcttaa

SEQ ID NO: 62446 - DNA, 121 bp, Heterodera glycines
ttctttctgtttattacgacagtaaatgaattgtgatcatgcagaggctgcagaatactcaataaagcagcaaaaaaggaaggatctattcgcagattaatttacgagagcaaattgaagg

SEQ ID NO: 62447 - DNA, 1029 bp, Heterodera glycines
attcccttcacagcgacaacaacaacaacaaacaatcagcaacgacgacaattgcgcaacgcttcaacacagcacatccatcgcccgtgcacacgtcgaatccgatcacttctgctgctgctgctctccaacaacacaatgggcttcctcttgtacatgttcgtggctgcggttgcgttcggcggtggagcggtgggtttgagggtgggggaatttgttttgttgctgcattttttgagtcccaatcaaatttgtatccatttcaaaatttgttgttttaatcagctcgggattgagctttcaaaaaggatgaattcgagactcataaaagcacggaaaatgaatttggcttactttcagcgtgttttttgctggtgtgagacgaaaccaaaatttaaaatccgaaaatttgttttgaggcttttcatttcagaagtgccattaacatatacacggttcattttgaccaatttcggacccgaaaaccccaaatttcatcgttccatgactagtaaaatggtttagttggcccgcttttgcctccgttcgtgttcgttttgtgtctaatttgtttcccatttccttttcagtactgtggcatgatttacaccaccaaaggggccagggcatcggcgggcggcggcggctccaagaaggacaagaagcagaaagcgtgagccccagcggtgaacaatgatcgactcgaggatggcccccgtggatgaacgaacgaacgatggacttcgagcaacaaacgcttctccccttctaactgctgctgatccccacaatatgacgctgttcccctccccccaaattatatcatttgtaggtgctttatcaccctctgatctgttgtccgtgataagctatatgcgctgtccatatcagtgatcaaaccattgtaattgttgtaatgatatatgtatgtatgtcctatatattgtattgtatttgtatgtgctccaatgcaacaaccaatcattatgtgtacataaatatgttgtatgaatgtattcggacaataaa

SEQ ID NO: 62448 - DNA, 618 bp, Heterodera glycines
acttcccaataataaaataatctcaacgacgataattgcgcaacaccttcaacccacacatcttccacacacgtcaacttcgaccgcgcttgttctccaatcaaccaaatgggcttcttcttctacctgatcgttgctgcggcaatgttcggcggtggaatggtgcgtttgctcattccaaatctgttgttccatcaatcattttaacggttttgctttcccttttcagttcgttggcatgtcacttggcggcaaaaagtcatcggatggagcgagcggcggcggggccaagaaggagaagaagcacaaaggatcgaagagctccagcagtgagaagagccaatgatgccgccgcagtacacgaggacggacgaacgatggaatggccgacaacagttccactcccaaaccgatgatatccccaaaatatatgttgttacccccccccccccccctatcatttgtgttttatcactctgtaagcaaattttgcgctttccataccagcgatcatattgttctaattgtattgatgtgttatatatgtgtacacatgtatttatgtatggtctccaatgtaactccgtttcatattgtatgtaaaatgtgaacaataaa

SEQ ID NO: 62449 - DNA, 811 bp, Heterodera glycines
atgaagagcgtcgtcagcccaactccgttccgccggcccctttcgctccgctgtgtgtgctcagtgctggtgctgctcatctgtgcgttcgatgtgtcactggcagcaaaagacaaggagaagaatggcaaagaagaaccaggaggcccatttaatacgctcagcatcattttgctgattccgctggtcatcggcaccggcgcgttcgtctacctgctgtttatgaagccaaagagcgaaggaaccggcgatgacgacggagaaggcgaaggagacgcggacgtggaaaagggaccaaccgaagagacgaagtaaaacacgggcagagccaaattggcaaaacaactaataatgtttttcccatttcagaacggagcctcgaattgaatctccagcaactcttttgggcgtgacagtgccgttggagcaagacgaagaagagcagaaaaaggacgacgaggggtaagtgcaaaggcggcggatcattttttactcattaaaatttaccatttttagtggcgaccaaaccgcggagaagaaagaagaggacgcggcggcagcggacgaacaaccgaaagaaggcgccgcggaggcagcggaagcggagaaaagtgcgacaaagaaggagacgaccgaggacacggaggagaccacggaaacgacggaaggatcgaccacagagacttccgacagcggctccggctcgggatcgtcttcagcatcgggctctggctctgaggggagttctgggacttcggacgccacttctgaagccacagaggacgcatcatcttcatcggagggttcttaa

SEQ ID NO: 62450 - DNA, 2327 bp, Heterodera glycines
atgtttttcacgatttttcttgaaaatttcaaaaaattagtcataactttgtatgcgcattataaaaaggtgctgtccgggctcaattttaacctcagcgtgccatactccatgcagtttctgcgtcgctatcgcttctacgatttgccgtcaaaggtgtgtgggcgtttgcgaagttgtcatggtctgctacgcgctggcccacatcccaccttccgttgttgccgccgtatccctccatttggctgcgtttgcgtacgcatgttcgctgcggttgcccgagctgtttgtggacacgttccgaatgcccgaggcggtcatggatcgcatttcacgctcattcgtcgaccatgttgttttacttctaaaataatcagcccgggccggccttttttgaaaaattctgtccttaacaggcactacaaacaaattttattttctgccccgacaacgcttctctgagtataagagggatgagagaaaacagcttgaaggcgtgcaggctctgggccaggggtgcaacattgacatgcacctgcccttatattccatagaggaatatggagaaataattcaggcacaaaattttttattcttcgcaatatttatcattaaggactattatgaggtgctccatcccggaatgtttcggcttttctgctttgagacgtttggaaaaatgaagccttcgtggaaatcaactgtggaaaattataaacatgaagtctgcgttatttttatcgacggtgaaggcggtgttgaagggcactacgacccggttaaaaatgttggaaaacttttcagtgcacgcaactattgttttggggtatttatagataattagaaaataattttttttaggctgaaaattatggcactgtgctggacaccatgccaccaattgagaactattacccaggtggactcttcccggcagatcgcgcaaagtttgagcaatggtacgacgagaaccgggaaactgggtttgagctcaccgaagtgatcgcggattattgcaagacaggtacaatttttgaagaaaaaacatgcaaaaataacaaaaaaaattgaagatgtccaaatcctggcacatggtatggtaaagatgaggcagctgtttttgtctgagacgcggcacgacataaccgactcggtcaccatcccgtccggttgcatgaagtattgggtgcagttggctcaccacgacaaagaacgggttgccatcatcccacacttgggatacgagaagcgaggcaaacagagctccatcgccaggaaatatttgaaggtgtatccaaattattttaattttacattttgtcgactctcagtggcgtgccgaagaagaattgcgggagaatggccgagtccaacgccatgtcgaaagccctggaggggagttcaaattcggaaactacagcttggacgggatgatggagcgccctgatgaggacaaaaacttggccatcgaggtcaatgggtaaggaaagaattcgaaaaatgtgccaatttacccattcaaaaggtgctattggcatggatgcccaagctgctttcccgacgatgcggcaattgtgggcggtggtgagacagcaggagccccagggcccgggacgcaaaacgaacccgggacattgcgcgggaattcgaagtggaagtgatttgggagtgccacttgaacgcaatgctggaggacaacccagccatgaaggcgtatttcgacaattgtccggattctggcccaattgacttccacgatgccttctttggcggtaccttttccatttaatttttaactaattttccggcacaggtcgaactgggcccgaatacttgggcgcttcagtgatcaacccagagacgggcgactggaaaagccgaacgatcaaagtgaaagactttaacagtctttacccatcgcggtatgaaaatgcgaaaaaaaataattaaaatctttgaaaattacagaaacatgttcaccaattacccggttggacaaaccggacgctgttccccctctgtcggacgtgttcggaaatgtacccgcgcggcttgatcgaccccgagtacaattgcgatcatcttgaggactctgaaaggggtgagtttgaagcttgtaattaagcaaatattttttcttaataggcttttcgacaacagtcacacacattgagctggaagccgctctccgctcgtggtacaaggtgacgcatgtgtaccgtgcctatatctggcctctggcgtgcgattggagcaatgggctgttccactcgtacctgctgaagtttctcaaaatgaaatttgaaggtaaaatttaaaaaaaatta

SEQ ID NO: 62451 - DNA, 1182 bp, Heterodera glycines
ctcaaaatggacaagaaaataaacaaaatatacaccgacccggccaatccgggcgggtatgcgggtgcgagtgccctgtacgcggcggtgaagaagaagcacccgaagttgaagcgtaccgagtttgaagactttttgcagaggaacaccacctacacgctgttcaagccaaagagggagaagttccgacgcctacgcactgtgcctgcgggtttcatgaccggtaagttgtactggggcttatttcgcacaattcagggttcagatgttcaggctgacttggccgatttccaagccctttcgcgcaagaacagcggctaccgttacttgctgttggcggtggatgttctatcgaggcgaatgttcggcgcgcccgtaaagagtaagcgcccagtggacatgaaaagggcgtttgaggagctatttgagtaaatgccaagggtgccggacacactgtacaccgatcgagggctggagtttgtggcaaaaccgttgaaggagttttacgcggagaagggcattcaaaagtttgagaccagttcaaagaaaaaggccgccgtggcggagcgtgccatccgcaccctaaagactcggctgtacaaatatttttccgccaacaacacatcggtgtgggtggatgtgctgccaaagtttttgagtgccatcaacaactcagtgtgccgcgcgaccggacttagaccgagagaaatcagcgacaccaatgcgagggaggtgtggaagagggtgtacggcgaaggactcgcacaatcgaacaagacaccaaaaataagagcaggggaaacggtcaggattcccgagcctaagcacattttcgagaagggtactgtaattcacacattttccggtcattttttaaatttttaaggctatatccccaattactctgatcacgtttacactgtggatgaggcccgctcaaccaacccccagcattatttgctcaaagactattatggcacaaagttgaagagaaaattttatttgcccgaattaacaatagtacaagtggatgaaaacacaatgtatcgaattgaaaagaaatacaaagaacgagtgagagatgggaaaagagaaatgttggtgaaattcattggatttccggaaaaatattgggtcacaaatgaagaaataaatgaataaaaatattacaaatttaatgaa

SEQ ID NO: 62452 - DNA, 431 bp, Heterodera glycines
ggttcgatgaaactttttaaaatataagcctaaactttttggcctgtttaaaaaggaattaaaaatttttaaaatatttattcatctcccttttgatagaaaaagcatcagagagccttatttaacttttaattaacatttggtgagtttcagagcacgttctaaaaaatatttatgaattaattttgcaaaataataaataattaatgaaaaagtcagaatttcgaaaaattttaaaaacaacaagcgttggcattttttcaggttaagttagtcctttacaatggagaaggcctgcaaaatttggagagattatatcgattttagtgcgctaggttcgatgaaactttttaaatataagcctaaactttttggcctgtttaaaaagaattaaaaattttaaaaatttatcatctccctttgatagaaaa

SEQ ID NO: 62453 - DNA, 114 bp, Heterodera glycines
ttttagattttttattcatctccctttttgatagtaaaagcatcagagagccttatttaacttttaattaacatttggtgcgtttcagagcacgttctaaaaaatatttatgaa

SEQ ID NO: 62454 - DNA, 512 bp, Heterodera glycines
atggagaaggcctgcaaaatttggagagattatatcgattttagtgcgctaggttcgatgaaactttttaaaatataagcctaaactttttggcctgtttaaaaaggaattaaaaatttttaaaatatttattcatctcccttttgatagaaaaagcatcagagagccttatttaacttttaattaacatttggtgcgtttcagagcactttctgaaaaaatatttatgaattaattttgctaaaaaataaataagtagtgaaaaagtcagaattttgaaaaattttaaaaacagaattactggagttagcattttttcaggttaagttagtccttgactttttgaagctctcgcaaaatctgagattatcgcttctagagcgctaggttataaaaaaaaagttaagcctaaaatttttcgcatatttaaaaagcaattaaaaatttttagattttttattcatctccctttttgatagtgaaagcatctgagtgcctaaaataacttgcaa

SEQ ID NO: 62455 - DNA, 543 bp, Heterodera glycines
atgaacgttcaacttcgcaggattgatccatcagtcgtgtacgttatttttccgtcaatcctattgatccactcgcgtatccatgcagagttggatttaattttaggcataagcaaatgtttttctgagggatattaaaaatcggaaaaaaatataccgaaaatggcaaaatatgcaaaaaatcggaatatatgcacaaaaaatggctaaatatgcacgaaatatgcagaaaaagccaaaatatgcacaaaaacctcgaaatatgcaaaaatatgcacataaaagtcccgatttttatacgcaaacacaaaaaagaaagtgttttttcctgctatttagagcatggagaagccaggaaaaaaaatccatttgcatattttttgcagccctgatgattatagtcttggatatgaattgagttacgcttccgacacgaattcgcaaaattcggtgtttttccgccctgattttcagaatccggctcaggggatacgcagtgattcagggagttttctgagtgaaacttggaaaactaacacataa

SEQ ID NO: 62456 - DNA, 638 bp, Heterodera glycines
  unsure (1)..(638): unsure at all n locations
tttttcagtgtccgntttggggtactcaaacaattacccccacgaaaaaatccaacgcagaattaaagtacaggctatagcgtagctattcccgaaggattcggtctccccataaatctgggcgcatcggttcggggggactgccccgaaaacaaaaaaatcgattttttcaagtgtccgtttggggtactcaaacaattatggggagcaaaaatccaacgcagaattaaagtacagactatcgggaagctattcccgaaggattcggtctccccataaatctgggcgcatcggttcagggggactgccccgaaaaccccaaaaaaaattttttggataaaaattatttaaatgaactgactagataatatttaaaataggttatttctcttcctttcagtatccctgcaaagtttggtgcgcttctgatcagtttctgaaaaaaaagttaagcctaaactttttggcctgtttaaaaaggaattaaaaatttttaaaaattttattcatctccctttttgatagaaaaagcatcagagtgcctaaactaacatgtaaataaaatttggtgcgtttcagagcattttctggaaaaaatatttatgaattaattatgcaaaaaataaacaaataatgaa

SEQ ID NO: 62457 - DNA, 557 bp, Heterodera glycines
atgtccgctgttgcgatgtatataaaccgtccttttcaacaacgcttctcattcttgagcagttcgtcagttccattcgtccacgacttccgttggtttttgctcaattttcttttttttttgaaatttccgttccaattaagtcaatgcaagttcatcaccaccaccaccacaagagccaccatcaacgccacaaacgttcatattcttccgcccgccatgtgttgatcaatttcggcttccaatttccgcatgatttcaaacttggcagtggtcgttacagcaaagtgtacaaaggcgagttcgctgatcgtctcttcgccttccccgtttcagtttttccattttcaggattttaccgcgaagcaaatcgttattttgcaatcaaaattaccgacttggaagccgtttctgacagattcaagcataagtttgtgccccgtgaactcaaagtctggcgcgagttgagtcacccgaaccacgtccgtttgtacaaggatttcatgaagaatgactttctgttcgagatcatcgacttggctgttggcggtgatatg

SEQ ID NO: 62458 - DNA, 80 bp, Heterodera glycines; identical to SEQ ID NO: 62154

SEQ ID NO: 62459 - DNA, 1159 bp, Heterodera glycines
  unsure (1)..(1159): unsure at all n locations
atggtgagtgaaattataaaagtgtatttaatattttattatttacctaaattaaaacagaaaaagcacagaaaatgaacaaatcgattagttttcgcattggtttaagtgataactgttaattaataatcacttattttgtatgcatacggaaaatattatcaattaccatcattcccttcaaaaaagtaaaccgccattatcaattaaaggaacgccctccaaatgacgaatgaatgcccttatctgaagggagggcaatcggcatttaacatacagtataataccgtaattaacataaattaattactcttgaaatgtcgaattaacgaattaacaatcaacgaacggtagaagaacaaaggaaacgaattgatcaatgatcaatgatcagtctgaaaaatgccattgaaatgaaaggcaaacgatggaaaaatgaagtgacaaacatttgatcaccattgaggaattgttctctttattggttaattcttttctcaattagcatacatttttcgtaattttctgccattttcttagtttttttcgtcgtcctcccattaattcttttcatttttcagttcattcctccatcacataaatgtgtgtgtggaatatatgaatatttaatcattaaacaaagcaccattcatttgatcagcagattgctcacattttgctcaatgctttttctgttttttaccatttgtccctttgggtaaattttttcttttatgaattttaattccatcggaggatattaaatacataatttttccatttccaaatgccattaatgattaattatttttccatttccaaatgccattctctccctcccctcccccctttccccccaatttcagatcatttcacaatgtttttcttcacattcgtcgccctttttcttcttttcccttcctttaaccaggccaacaatgccgatgagtgcgtttttcctcaatttatttaattatttttaaatttaattttaatttaatttaatttcaaaggtccaccgccgcctgttgccacaaatgctacgtcgcgttcagagattgtttccgcgagtgtttggacaatcagtcggagaatttggtgtgcgtgccgaactgcaaaattgccttgngaaattgctcgaccgacaaatgcggattga

SEQ ID NO: 62460 - DNA, 92 bp, Heterodera glycines
attaaatacacttttataatttcactcaccatttttcattttaaatggcgagtggcgaacgccaaaagttggtcaacaattcgacagctgaa

SEQ ID NO: 62461 - DNA, 360 bp, Heterodera glycines
atgggccaaggaaggaaggaaaaggaagagggaaaagaagaggaaaaggaagagggaaagaaagaaaaggaaaaaggaagaggaaagggaggaggaaatgaggaagaaagaggaagaaaaaggaagttgagcaagagaaaggcgagcagttgtcccactccccccacgttcccgggggaagaacattccgtcccatcccagcaacaacaacaacatccgcaggcactgtgctctcttctcttcttctctgccgcgtcattcattcgaatcgcaaattcacagcgaatgcgccctccgtggcccccgtttgaatgtcctccacgaacagcagagtctgttgcggagcaaaacgattattag

SEQ ID NO: 62462 - DNA, 1563 bp, Heterodera glycines
atggccaacttgaccttcctcaacgaagcgtccgtgatgtccaacctgaagcagcgttacggttccatgatgatctacacatattccgggctgttctgcgtggtgatcaacccgtacaaaatgttgcccatttacactgaatcggtcatcaaagcgtacatcggcaaacgccgtaacgaaatgtgagtcgacaattttggcacacttttgcgcttgggctaaacatgccgcttccttttcaggcctccccatttgttcgcggtggcggacgaagcgtaccgcaacatggtgcaggacagagagaaccaatccattctgatcaccggagagtcgggggccggcaaaacggaaaacaccaaaaaggtgccggagggggaatgaatggcgaacaattaattaattgggcgtgccaaatcggaattaattgtgccgcatttgcaaatgctttttcttttcctgcgcgtccgtccctttatttatgctgcttttttctttcatttggtcttatcgcgtcccgttcaggtgatctcgtacttcgccatcgtcggcgccactcagcaggcggcggagaaggagaaaaaggagggccaaaaggggggaacgttggaggagcaaattgtgcagaccaaccccgtgctggaggcgtttggaaatgcgaaaacggtgcgtaacaacaactcgtcgcgtttcggcaaattcatccgaacgcatttctccgccgcgggcaaattggcgggcggagacattgagcactatctgctggagaagtcgcgtgtggtgcggcaggcgcccggcgagcggtcctaccacattttctaccaaatcaactcgggattcaacccgggactgaccggccaactgaagctgaccaaccccctctcctactaccacttctcatcccaggcaaaaagccaaaacgcaaacggaaaactgacaaagcaatggcaatttacaggccgaattgaccatcgaaggggtggacgacaaggacgaattccgagtgacgcaagaagcattcgacgtgatgggcttcacggacgacgaaatcaacaacttgtacaaaaacgtggccggaataatgcacatgggagagatgaagttcaagcagagaccgcgcgaggagcaggcggaagtggacacggaagacggtgagtggggcgggaagtactaattggccaattaattagtcaactaatgattgccaagtggtcgaattgcaaattgaccaattgcactaatgtaaaagcagcagtggaccgtttccaagttcagacgccaaaaatgcgtccttttgctttggaatcgaccacgaagcctttctgaaagcgctggtgaagccgcgagtacgcgtcggcaacgaatgggtgaacaagggacagaacttggagcaggtcagctgggccgtggccggtctggctaaggccatctacgcgcgaatgttccgctggttgatcttccgctgcaacaaaacattggaccaacgttccaccgaccggaaactttggatcggagtgttggacatcgccggcttcgaaatcttcgacctgaactcatttgagcagc

SEQ ID NO: 62463 - DNA, 1451 bp, Heterodera glycines
atggcggccagcggattaactggcaattcgaccggcacaaacagtcacgtggtggcggtggtcaatttcgcgctggcactgttcggctggatggaggagttcaacgagaactcgttcggcaatttcaacctcagaatcggtagggaaattggtggagagtgactggggagtggggttcacaaattagatactaattatatgccaacgaaaaaaaagaaaaggcaagatttgagaaatgatttatataatatttttaaaatttttctcattttttcgaacggatcacttcgctgtcgttgaaaagtttttgctttacaacaaaattttataaaaattttttttttgacattttttaaacatttttaaaaatgttgtcaaaaatttgaataaaattaaaaataattcttaaaaattcgatgacacggattggaggggggggggggggatttctccgttttttatgcctttttcacaattgttattttttaatgtttgtgatcactgataaaattttccttaaggcatcaatgttggcccggtagttgctggagtgatcggaacggaaaagccgcactatgacatttggggcaacactgtgaatgttgccagccgaatggactcatcgggaattccgggacgaattcaggtggagaaatagaattttatttttagtaatttaatcaaaatataaatttaaattagcatacgaatttattccacaaatcaaaaccaaattttctaatcaaagaatattaatccaaatattttattcgattaatattaaattagaatatttatttatttttttcttttattttcattagaatgattttaatttgtcattttgttaaggtgacggatgagacgaagcaaatccttgaaagggaaggcttccatttcgagtgccggggcgaaatcaatgtgaagggcaagggactaatgaccacctatttgctgcggtcggaggaatcccggcgcggcacagtatcgcgcagacggcgatcgagcgcagtgccaccgatcactctgcagcaaagccacgggcacgggatgatgaacggagggacatgttgaaagcggacaaaccaattaaaactaattaatttcctaattagtaatgcgccaaatcgagtcattaagcaaagttgttttgtgtcagtgttaaagcagtagcaaatgcttgtttaagtcactaaatttgattcatttctgacacggcatttcattatttatttgccatacaaatatgtccttttgctactgcttcatttatttgtactaactttttttattctttttttgaattcggaaaacggggctcattcaatccaatgaacttttggctgttttttgtcttcgctattttattattttttgatttgtaatttttgtattcacaatgtacaaattttcccttgctaataatcccgatgatgtcttttaataataaa

SEQ ID NO: 62464 - DNA, 784 bp, Heterodera glycines
atgagtaataacggtaattcatcaccatcttcgtccgttaatgaatttggagaatccgaccaaatttacgtgtacaccgtttgggtgacaatcattcaacaaattttgtcactttttggcattgccctaaacagtgccatcgtttacatcaccatcaagcacaagtaaaagagaagatttgaaaattgcataggaattgttttgaattttaattttgttttgactttacttttggatattataaaaatgcatttttaattatgaaattaggaaacttcaccggagtttcggctttctgttggccatctgttctttttgtgacgcactcactgaattggccactccattagctaccggtaataaataaataaaaataaaatattttattatttgtttttattattttttcaatttttcatttattttagtcctcgtttttcttcgtgtgcggattcctcttttgacttgcgtttatgcccaattctttgctgtcactgcaaatattaatacttttataaatctgttttggataagcgttgatcgttttgtggcattggcattccccgttttgtaattttataaatttttattcttgaaattaatctaatcttctttaagttttcgtaacatctcaagattttccggaaaatatgtgttaattgccaatgttttttcattgtcaattgcattttacattgtttatttatcgtttgtatttgctctacaacatcccgaaatgtagcaaattataatgaatgaattaattaattaactatttaataaa

SEQ ID NO: 62465 - DNA, 95 bp, Heterodera glycines
atggtggcggaattgaaacgccggctcagatcatcgcagatgcagctcagaccgagccagcggcggcacccatgccaccgcctccgcctcaggac

SEQ ID NO: 62466 - DNA, 949 bp, Heterodera glycines
atgtttgatcacgcgggattggtggatttgaaatttcaaaaaaattagtatcaatttccgacggtgccaatacagctgtccaaaatttatagcgtcaagaaacttttcgtcactttacctacttccccaaaactttgaagacaggtaacttattttataggcaagaaaaaatctgaaacatacttacttattttgtccacaaatcactaaaattaaaattttttgagtttttccccttttttcagacatttcgcttaaaaattaattttttgcattttccattttgtcccaaaaggtgtcactttgttggttgaaaattttcctattttttgtgttttttgtaaaaaaaaaaatcgaaacttgtgtttttatagcgaatattctataaattaaatccttaagatattttattataaatatttaatttattatttgcgaaagaaaatgatatttatatttaatcattattttaattttttaaataaatattagttatttatgaatatggatattaattaaataattataaactactctactcttgtaattaatttgcaatgaaagtagggaataaaaaaatatattttttgatcagtagggataacaattttatttaatcgtggaattattttattttttatttatttattatcttcttaaattatttattctaagaaaatatatgaattatatacatttatttgcgatgaaaatgctgtcaaattaaaataataaatttattttttaatgttttaaattttatttgtttttagaaatatatcatctttaaaatgaaattctttttaattatctttttatttggaaaattggatcagtggataaaaaattgcaacagcaaacttttgatgaaatatttggagaaaaatgggaagaaaaagaagaagaaaatttggaagaaaaaagagaaataattcaaaaatattataaa

SEQ ID NO: 62467 - DNA, 539 bp, Heterodera glycines
atgctttatgatggtccgaaaaggggactatccacaagcaagagcagcgaactcaactcccattcgttttatctcggcactcgccaacataaaactgggagattttgaaggcaaattcccaattctcgtcagtgaggacgatagctgtccatgcacagccataattggaacggatttgatggatttcatcagtgaacaaggcgaagaagaaattggattgaacttcaaaagaggactcctacgtgttggaaacacgcaactaccaatgatcgccgctgtcagcatcgagaagcaaccgattgaagtacaacttattgagacccaaacattgccaccgctgtctgattcgctcgtttggggaaaaattaaccgaagtttgggactagacgaagttttcatcactgttgagcgagagcacgattatttcccgctgcgagtcggaaactgtctaacaagtccaggctcaacgcgaattgtgccactacgattgcttaatttcggaaacagcgtaataaaagtgtatgagggatcgcgacttg

SEQ ID NO: 62468 - DNA, 52 bp, Heterodera glycines
atggaacatttttaccgctttggaatacgcgggagagcaggaccaattaaag

SEQ ID NO: 62469 - DNA, 1485 bp, Heterodera glycines
atgggggaagcacaggaccaacgagacgaagcagtacaggaagaggaactcggcgcggttgctgggacagaagccgaaggtcagcccggggaggacaacaatgctccccgtggcttgagtggcagtgagggagaaaaaactgtggaagctgaagaagtcgcgcaagacgaagcagaggaagggcccattccaccgagtttcgttcaaaacgaagtcgggagcacctctcccgtgtcgcagacaaatgagcagatacgggaaaccgtgaaccaaaagacggaagcggagaaagctgactcaccggagggatcgaacagcatgcgagaagttgaaccacgaaggtcgcggagagtccgacgaactcgagaagtatggtcaccggaacgatgtgccacgaaaaggagggggattggtggccccctggtcagcttggccatgatgaccatgttggtctacccgactctgacgtcagggtgtcagccgactatccgacccgaaattgttggacaacagtcacaggaattgccaacaacgatgttgccgtgccatatgcggtgtacggaacgtggagtgaaagtgctgagcgggcagcgactcgaaaaaatggaaatttgttgccctgatggatgctgggcaattgtgcccacttcgacggagatcagctacgagctaccaactgaactgctcgtccacgattaccagtgcagtggtcaatgctggagggggtctggccccccttataacatcacacagcgatgtccagcgagagcagaatgcgacctgatcaattgctccttctgtgggaagcagctggccaacccgacgtgcaacccgcgatgggcatcctcgctcttcgggtttggagctgcaattttgctcgccatcatcggctgcttctgctcaatttttgggcggtttttgtcaggagccaagctgctctcgagagccgtggcatggggagttcgttgccccatcgggctgatcaattgggcaaccggacgcgattttcggaaaccgaccacggagcaaatcgaacggaaagtgaggaaaggagcgagaaaggcacgaacggaaatacgtgagctgcagcagcaactgcaattgggaagacgggctcgggcgatggccagagcgtggcaaaatcccgacgggactcgaaaagcctttcccgcaaaggcagtggcagccctcatcccattgctgctcatcatcggcccggcaacggccaacaaacctttgtccgtcatggtccgatcggaggactgttcgaggacggcggcgggactcaaatgtgcagggacagcagcgacggtgctgacgcttctgccggcggaccagacaaactcattcgtcatacggactcaacaggacgaactgctcggggcagtgaggctcagactggcctccctcaccatggtctgcgtgccaaagacggaaagctggctacgatcatactcaatttcgacgacggcggtcaagcggtga

SEQ ID NO: 62470 - DNA, 875 bp, Heterodera glycines
tgcgctcgcaagttttcgcaagtacgacgcgaccatcgactctcagccgctcctcaacgccagcaggccgctgctccatatgcggccgctcctcgctactatgccgctccgtactaccatgccgctccgcttgccggtcgtcaactccaagccgctcttctccctgccgctcctcaacggcaggccgctgctccatatgcggccgctcctcgctactatgccgctccgtactaccatgccgctccgcttgccggtcgtcaactccaagcagctcctctccctgccgctcgtcaacttcaagccgttcctctgcctgccgctcgtcaactccaagccgttcctctgcctgccgctactcgactctctgccgctctgctgcgagaccctgctggtattatgcacggtaagggatggcttatgagtagggcccggatttttaggtttttatttttttttctgcggctttaacttgacgagaaatgcacgaaaaacacattttttgttcgaaaattttgcgttttaacgcccttattcgaccttagaaatccttatttcggatgttcgcccttaaaataactttttatccatattatggcgttttgcccctattttcgccctaatttcgcggtttttaaaatttttcacataaaattcaaattctttaacaaaatgcaattaaaaaagactttttgacgcgagcacgtttttggcaaattcaaaaatttttcacataaatttgttcttttttgcctaaaatttagtaattttatttcctttcttgaccaaattttggtttttcaaattttatttgttttgaaaaagtattgaaaattttagaatatttttattattggcaactgtaatcaatcaataaa

SEQ ID NO: 62471 - DNA, 569 bp, Heterodera glycines
atgtgccgttttttctgttaccaatggttttgcgtcatttatgccattttatttctgcccacacaaattcggtgttgccacccggagggaagagcaccacgagaaggtaaggtcgaccaaatttgaacattaccaaagagtttaacgggactgggaatttttggaaaaacatggaccagaaaaaccttggccgggattatggattttaaatagggaattggaccaactataattttcaaaaaaaaaaaatcaatttatttttccaaatgaaaaaaatcagaaaaaatcgtttgcttttgaaaacaggaagtacgacaggcatcactttggaaaattttgaaatttatattgttatttgtagggatgcaaattttaggtagggaaaaacgcgaaataagtatttaaatagataccaaaatcccgaaaatggtagaaaaatttgtaaacaaaattttgggatgaatttttgagaaaattttccagatcttatttgttaggagtatattttttgaaaattttcaggtcgattcttaggggttgtatttttggtttttattgtattttcgtaa

SEQ ID NO: 62472 - DNA, 966 bp, Heterodera glycines
atggatttgcttcttttccaacgcgataaatacgctttggcgtacaattgtacgaatttcgatgccaatttggtgccaattgggcaacgcattcacactgttcacggcatcatcttaatcattatgtttttcgtgttcgaagtaagtttcagcagaagattatttcaatggaaatatttaaaatgtttgccaattaaaatcttagcattttcatgaaaaatttttattttatggtgaaaaaatctgaaaatgatataaaatttatggtaaaatcgttccaactttttttttttgaattggatcaaaatctgaaacttaaatttcttaaaacagtcaaatttaattgttttcttattggttaaaaaccaagcacccttgtttttacttttttttccttgtctatcaaatccaacaatcttggtatcattaccaagttgttttaaaacgaaaattgaaaaattcggaattcttaagttttttttcttccttttatatgcttgagcgaatagagcttgtaaagaatctccgagtcatgctaagattgttggatttagacaataaagaaaaaagttagaaaattttagctgtcgccaaaacgtcggcacaaaaacgaccttttcatttgtcacatgggcatgagtattttttttccattagttgttgtacattccctgcatgatgtccatgtaccacaatttgacaactggtatcacagacatggtaaataatagagaccggcgcgggacgggatcccgcgcgggattttgcgggatcccagtccgcaatcccgcattttttggaaaatgcgggatttgcgggattaatcccgcgggatcccgtcccgcaaagaattttgagttccaatcccgcagcgtgatccgcaaatttgattttttgtgcgggattatgcgggattttattgattttttgaaaatttttcaaagacagaatgccaaatatttttga

SEQ ID NO: 62473 - DNA, 671 bp, Heterodera glycines
atgtcgagtttttcactcaaaaattacatgcaaattggattaatcactttgaagaaaatgattgcactttattgctttttagatcgcattgttttaaagtgcgtgcaatttccaagaaaaagactaaagttgtattatgaaccattttattataaaaacctttacgtacatataacgaatttatattttaaaatacaaaaaataactcaaaaatatatattttttcataaattaagctttttaatcgctgccagaacaaaaattaatcgcagctaataatgatcgattcccagtttgtcggattttaattttcctctgcggataaaataaataaattttgaaaaataaaaatttttgaatttttcggaaagaaaagtaagtaagtataagttttgttcagatttgcaaagttaaatcagtatccaaatttatatgttaaaacacaaaatcattcaaattttgtaatttctaaaaaaagtggtttggtatccgtcggaaatggctttcaaagagaaaatgaatagtgccacggctaattatttaattatttggcacaaagtgaaaaaaaacacttaacatttaaatgatcagaatcagctgtaattaaattcttatgttttctcccaaacgtaaaattaattaattcccataaatttaataataataataaa

SEQ ID NO: 62474 - DNA, 553 bp, Heterodera glycines
atgccatctccgtccgtcacaatcgtcaacattgcatatttaattttgtcatttgaaatgttcacagatttatctgtgttggccattgcgtgcctgaatttggccgtgattgtgcccaacaaactgttgcacaccaacctgaaaagcattctgatcacccaaagttttgccgttttgtattttggcattcttcgcttagtaatcatatgccaaagattaatttatgttgagccattaatgtccgacgatgtgattctatcggtaactttttaagatttccaatctatgcaaaatacagtagtcactgaaattcacacaggattactgtaccatataaaaattttaagccgtggtcacatactttttttttcaaattttagatacttatgaatttcaactcggtattccgtcgattgctgggccatatgttgatcattgaacgttttcttgctacttttcgtaccaattcatatgaaaaattctcgaaaacctattttactgtgacttggttcagcattacggtatttattttaatataattgtgatattgtaa

SEQ ID NO: 62475 - DNA, 281 bp, Heterodera glycines
  unsure (1)..(281): unsure at all n locations
atgtttgcattttttttggcttaccaaaacttcatcgaacctggttctttctattctctttcaaatcgccccaaattttttttacagccacgaggccgcgaagcggccgagtgagtaccttgggcgcaggaaaattattaaggaggtgggttcattatttatttatttttgcaaaattaattcataaatttttttcagaaactgctctgaaacgcaccaaaatttatttacaagttgaataaggcactctgactcttatattatcaaaaagggaganntga

SEQ ID NO: 62476 - DNA, 151 bp, Heterodera glycines
ttacagcttaacaaggcccaattaagcttatttccagaaaatctcgcatgaattctcatttttaaattttttatagatttttaaatatttggatatttttttggcttaccaaaacttcatcgaacctggctctttctattctcattcaaat

SEQ ID NO: 62477 - DNA, 364 bp, Heterodera glycines; identical to SEQ ID NO: 62360

SEQ ID NO: 62478 - DNA, 1849 bp, Heterodera glycines
atggatgactatctccaatttttccgagaaaattatgaacaaattctgttagagacgtctcaaaatattgctaaggcacaggcaattcaaaaagctcaatttgatgcaaaaagaaatgtgaatccagaaaaatacaaaattggagacagagtaatggtctattttcgtccttcagtcaaaaccgatcacaaaaaattaggttggaatttttatgggccctttttgataaaaaatctcactcccactgcttcatttgtcattcccataaatcatttggatgatgtacctattaaagtgccaattgaacatttggtttcggcaccaattgaaatttccgatgaagttttcctaccaaaccaaaaaaggaaaaaatttctaaacaaaatgccatttttaccggaaaacaaattagaacacagaaaaatccaaatcaacttatttacaaagaaaccatcaattttagacccggaggagaccagtggaatgtgccacaattcgttgtgcagtggaatcgaggagcacagcaattgtgcggcaatcactttggcggatcttcaccctgctttggccgtgatggacaaacttcgaaatgtcaaaattgagatgctcggggagctgatctcacttatgatcgccaaggatgtcccaattgcgcaaattcgaaattgggcaacaaacagaaacacacatggacctgattttcttttaaaattcagttcaaatctgtccccatcttcccaggaattcatctcaatcatttctctttggattgaccggtgcgactttgcttttcacaacctccaggcttcagggtgcaaaaaaataaaatttttaatccccaaagaaaataagagctatccattccaaaaagcgattgaaattgctattgaggatgtgaaagctcgatctgtgttgggtctgtctaaagtaattcgaagtcctttcattgtgttcagtgattcggttggagaagtaatgaaaaataagttggaggcggaaatatttttggagaggagctacacggcactctcaaacgaaattgtcaccacctattttggtgaagaagttaaaaaaattttgattatggccggcaccgatgacattattggaaatgtgccaattgaagaaacgaaaaaggccattaaaaaaatttcatttcatttatccaagttttccatcaaaacttttattattcccctgccattcatttcaaaaaaatcgatggcacatgaaaaatttcttgatttgttggatgaaattgtgccgaaaagtggtaatgtgatcttggcactcacacgaggccatagaagcattgcagaaataactcgttatggagataaagaagagaaccgaaatgtcgatgagagcggtaaattgaaagacggtggcgcaaaaattacgctcaaatttctttgaggcggtatttggtatgaaaacgccgctcaaaatttcgccatttcctgatccacgcggaaaggaaaaaaatgaaaatgaatcccaacaaccaccaaacttaatgaccattcaattttctcatcaacaaaaccggcaatttcacccaaatccgcgccaaagttatcgcggacgaccatttggtggtaatcagcattggcgtggtaatcgcggaaatccccgatttcagcaaaattctcacaacgatttccgttttgggacccatcatggaggcccatacccaccaaaaaggggccgcttctcataaattattgttttattgtcctaatctctcaaagatattgttgctaaatacctcagacaaaattatttttctcccatttgcttctcaatttattattgtattttgcttaaatttgcttaaaataattagcga

SEQ ID NO: 62479 - DNA, 1095 bp, Heterodera glycines
atgtgcagcgatgtttggatggacattctcccatcttttgaccatgctcaactcggcctcaaattggcacttctttcgccacgtttcaatgttttggtggacaaacattttgacggcaaaaacgaactgacaatttggagacaaatcagaattgccaagaatggaacaaaagcaaaattgtatgttgagaaaagcaatggcaaatctgtgcattttccgttgcccgatcatccgatgcacaacaaaattcggtttaacgacctttggatttggtaaacaaacaaaattcaaagaattattaaatgataaaagtatttcctttcagttacattgatcattccgtcatcgaatttctccgtgccaacgaacaaatctttgacaaaggcatcgatttggatttttatgttgaggccaatgatgtccaaccaatttgggatgtttttgctcgtgaaatttggccaatttttgcgacaaacattcgctatttgaccgtttccgatctccatgatttggacaatttacgtcgccacacatcgccgacagttctcaccgatttcaacattatttcaatccattccggagatttgcccgatgcaattgctgatgatgggccaaatgcaactattggccaagcattgtccaaatggttgaacactccgacaaaagatggaaagccaaagcaattgagttgtcgtgttggtacgtcagaaaccattggattcatcaacaatttcaaagaagtgtgtggccactttcgtaaaatgttggattaaatgccatttgcttttcgttttccattttataggcatttctccgtgccactatttcttctgccagctatatcattcgacttgtactactatttgatgaatcaacgccaattgagccatttgaattgaagaacgaacggaccaacgaaatgctaacactggcaaaagaaaaatatgatgaaagtattgatgaagaagatgatgatgatgatgatggtaaacatatctatttggtgttgaagcgatggcaaattgggaagacaattcaatgggaggacgaaaaattgaacaaaatcacttttgaactttttgaaaattgcattgg

SEQ ID NO: 62480 - DNA, 1031 bp, Heterodera glycines
atgtggatgcgagtctggagcagcaaaatcgctgagttccgagaagaactttatgacaaaaagttcttcggaacaatccttggttacggtgaatcaatggagttccaaggccgaggaggcccacatgcccacattgtggcgcaaacagacctggacgcagttccatatgtcattcaggaatacatatgggcgcacattccatctttgcctgataaagatgacgacacgcccattgcaaaaatgcatcgcgaaatccgcgaaacaatgcatatgcaactgcacagatgcagtgacagttggtgtggtcctagcgacccaatttacgggcggtgcaagaaggggttcccagccccttactcaaaatgtacgattttgcgcccggacaggcccgcgatgtatttccggccttcaccatctgatggtggtgcccaattagaggtaaacggcctgatatacgacaactcacatgtcgtgccgtataatccttatattctgctgcgttaccgagtacaccataatgtactgtttgcatatggtaacaaagcaaatattaaatacgcactcaagtaccctttcaaagggccaggacattgttatgtcgagtgcaaagaagagtccggcaataaaattggaattgatgagccggctcaatatgccaagatgaacttccgtggtgcaacggaagcatatgccattgttcattcaatgccatttgcccgtctttcgcatcatgttgtcaaattggcaattcatttgccaaaccaacagcccattgtatatagggcattccagctggtgagcaaagctcaacaaatccagcaaggcgaactgccagaaacgcagtgttcagcctattggaaacaatggcaaaatgagtggaagaatgatccaaagtttaaggacattcttttcgaaaaagtcccagagcggttccgatgggcaaaggacaaatgggtcctgtacaaaaggcagcaaattaaaaggccacctatcggccgaattgttcctgtacccccatcggacccggaaag

SEQ ID NO: 62481 - DNA, 1286 bp, Heterodera glycines
  unsure (1)..(1286): unsure at all n locations
atggaagaggaaaaaaggcagcaaaaggaaagggaggaacagagcaaatacggtagggaaatggacaattactactgtatttctatgaaaattactactgtatttgtatttaaaaaacctactgtattatttcgagttttatttgttcaaaataacgactcaattttcagtttacgccgaacaattcaacgccattttggagaaaatcagtgacttggaaggtacgaagcaaaaagaagaggagcagcagaaagggatgatgaaagcagcgaaaaattgtcagttaattaattaatgaaacggagagaccaattaaattaattagtgaaacaaattgaaaaaaaagaaaaaattaaaattgtttccatggttaagtcattgtggaaaaatgcgaagcaactaacggacggatgggcgaaattgagaagcgactgaagtcggaaaaaggaaaatacggtaagaaacgcatatggtagaaataagaaaatttgaaaaggaaaaatcattaaataaatttggaaaattaaaaattggccatttgtcgcattttaaaattcccaaataattttaacggagaaacaaaatgccataaataaaccaaaaaattcgaattcccttttcagtgtctgctggtcaatttgagaaagtcttggatagaactgaaaaactcgagaaacaattaaaacaaatgcagcagcaacaaaaacaggaagcgaaggccgccaaatacggtaggaaaacttacggtagccattgggaacacaaacaaataaagttacggtatgtttaagcgactgtggagaaattagaagaaacttttggtcaattcggcgaaatgctaaaacaacagaagcagaaattggaacagttggacaccgcacaacaaaaattatgtgaaaaaatggcgtcgatggaaaattttgttggtgagtaaaatttggcggaaatgactaattgctttactaattaacttgtaattatttgctaattattctctctttgtttagttgatctgttttctcaaatgcaaaatgctcagcaaacggaaatttatgccaaaattgacgaggtgaaaataattcttaaaaaaaattgaaaaattgttttattaataatttttttcaaagttcgcgcaccaattgaagatggaaattgatatgatggcaaatgccaccanaacaaatagttgaagtgttggacagacagcataagaaaattgcgacaaatttttcgtagtggacaatttattggcattttgaagacagatttcaaaatggtaaaataaa

SEQ ID NO: 62482 - DNA, 1705 bp, Heterodera glycines
atgcaacgcagccgacgtgacccaactccaccaacatctcccaaaagaatgagggccccaactccgcgaccaatcgttggactaccaattcctgttgtggagagtgagtttgtgctttgacaatgagagaaacggtttcatggttggccattttatcccccaaaaatttaggcaatcggccagcggaagatgtaagctcagacgatgacgacggttacggcaatgtcgcccaccaaaacattgtgcaaagacaggaactggacattggcgcacgagctgtccaacgtccaattgcccgggtgccgcctgcatttcgtcaaggccctgttcgccgcccctttccaccacttctactgccacgtcaggtcagaaaccaaaggcttttgagctttctttgcccagattcacagctttgggtcttagggtccacaaatgccacatcgtgtattcccagtcccgcaccaccatgtccaacaccctcttctccacgtccgaccacttcctatgccccgtcaggtcgaaatcgaaatcgctttttttgctttgccacaaattgtcaaatttgggctttagggtccaccaatgccatacaacgccctccgtgccccacaacaccccatccggtttccaattgtgaatgttccgccacttccgctgccccctcaggtcggatactgttttttgaccctattttgtgccaacatttctcaaacttttgagttcttagggacaaccaatgctgcgtaatgttgttcctgttcaccaccaccatcatccaatcaacggcctaccacttccactgccccatcaggtcaaaactcatgactttttttcgccttctcttgaccaacatttcccatctttgatttgttaggggccaccgttgttgcgtcatgttgtacctgttccgcatcaccatgtccaacctccaccgaatggtctaccgcttccattgcctcatcaggtcaaaaaatgacctttttttcgccttctcttgaccaacatttctcatctttgatttgttaggggccaccgttgttgcgtcatgttgtacctgttccgcatcaccatgttcatcatccaatgaacggcctaccacttccactgccccatcaggtcaaaactttgaattcttttgacccaaatttctcatctttgatttgttaggggccaccgttgttgcgtcatgttgtacatgttccgcatcaccatcatccaatcaatggcctaccacttccactgccccatcaggtaaaaactcatgacctttttcgccttcttttgacccaaatttcaccgctttgagttcttaggggcaaccaatgttgcgtcatgttgtgcctgttcaacatcaccatcatccaatcaacggcctaccacttccgctgccccatcaggtcctaaacccgcagttttttctaagacaggagaaatttaggctcatcttgtgccgccccaaccatggcatttcccacctgtcatcgttcgcgtcccgcccgtcgcacaaaggaacgaagctcttcaagttcggaactttcaaaacacccaaaatcatcatcgtgaatttatttaggcgcctccaattgtcaatccgttggggcaaaatccacagcaaatgatccgttggccaagacaacaatggattgggagaccaattgacccccgctcacccccacattaatgagaaaaaagaatgcatttgtta

SEQ ID NO: 62483 - DNA, 333 bp, Heterodera glycines
cacagaaatttacggaaacgcttggaaaaataaaaattggtagtttgagttggtccgtgtacgggcgaccgcctcacacactgagtgatattgcccctcattagatttcgacaacttaagcctcacacccgagcttaatcggtctttggttggtgttgtttcatgccgccaccaaactttctcaatcttctcaatcaccctccagtgccggcaaccactcggcctatctgtccgcgtgtgggaatcaacgtaagcctcccaatccctcctcagcccctgcccggtgttggcaggtaaagccatgcacccggcctatcaatccacagtggtggc

SEQ ID NO: 62484 - DNA, 657 bp, Heterodera glycines
atgtcagaatttctcattttccttttgggtttctcctttgccatgcttctcatgttgtgtttgctggtttcgctggtgctctttgttctttgtgcagcatggtattattggacaaaagaagaagaaccagaagaatttgatgattttccagaatacccaccgccttattaatgaaataaattttttgttgaaatgtgtcatgaaaaaacttggtttaagccatgtacattttttctgctttaaaatttccatttcaaatatctaagctttgaaaaatgttcaactcatccttttttgctgatgtcaaagaactagggcgtattccaacaccgaagggaaaatttagtgagaagaaaaatgaaactcaatttatgaaaatatttaggtatattttatgcacttgagttcgctaagctttatcaaacggttggacgtgaaatttctcgtgataaattccgacatatcatgaaaacagggaaaaaacaacatgaattagcattggttttcatggaaaaggctgggataaatacacaggagaaaacttttgggcttaaacacctcgaatttgtgcaaaacttttgggacaaagaattcccagatatatttcgtatcgttgcgtttgatatggtaaacgaacatttcctaaacttcgtgtga

SEQ ID NO: 62485 - DNA, 1220 bp, Heterodera glycines
atgggctcctccgtctctgctccgttcttctccgccatgaccattttggccaattcgaaattgttccccctttttttcgttttggccattggcattccgtctgccgtgctgtactgctcgctgttgctggccattgtcaccaacttcaaacatttttcttcaccatttttcatcctcattattatccgtgcaattttagtaagaacataatcaaaattggcaattaatgaatggccaataattatggcaattaatgaatggccaagaattaattgattttcaattattcagagtttgatcacttatgttgtcacctttttggccatccgattttgcaaaattggccttttcctgcccatttacctcaaatttccgcggattttactggcatttctttattttatgcttcattatgcttttcacttggagaatttgttgaccgcttttttgctattaaatcgactaagcgccattcttttcctgattaactacgaaaaggttttattgagctattttaaaggttatttttaaattcccatttcatttagttatggcgtgtcggcctgccctttgttgtcgctttctctttcatctttccgctgccttttaccgctccaatttttcgtttggacatgtacatccatatccaaaatgacaatgtcaccttcactattgacgatcataagaccgcaaatgtattgactttaataataattattatttatttttaatttaaatttatctaaattcacctttttaggagataaataacagcgaactcgccgctttctctgcccttatttttttcattgtttgccttttgataaatttagccacccttttggcctacaaattgcgcagctattaccaacaaaatggccaagatttggccattgagcgcaaaatgactatttatgcggtggccactttctttggccaactgctcatggcgatacatatggtcattaattaatgaatgcttaaaagctggaaatattgatttactttttttaaataaattcataattcaaatttaagcttttcagttttttgtcgacataactgccacaaattttgttgacgagcacaacaatcgcttttcctatgtccaagcatggttcagtgtctcattggagcaaaatgagatcctttttttcgcaaatttgaaccaaaatccgtgggttaatgacctttccacggtggtcattccagcctggtaa

SEQ ID NO: 62486 - DNA, 1637 bp, Heterodera glycines
  unsure (1)..(1637): unsure at all n locations
ggaccgggctttttaatcatncatttcctaatctaccacacgctttcacagctccacgacgntggccttggctcgccccattgttcggccgatcgggaggaatggcggaccatgttggaaaactcncaagacacatccatgttgtgccagggcaactgcattccgttcatccgatcgtcgacaccgcctgcaacagcgttgggcacaatgccaatgccgtcgtccgaccatggcactgttgttggggatggagcagttgaacatgaccagcaacagcagatgatgtacacgcgagaggagttgagcaacccaaacttggacagtgtgcaaatgttggtggattatggtggaaatgaattattagacaatacgccaaatgtgtccaagcaggcctattgattttggatgccaaataattttaattaacgcctttctcaaactgccattccccaatttaaaattattgaaaaattttgaaaagctgaaaaatatttaataattccataattaaattttacaagaaattttctgaaatttccaaaaatataatcatttttttaaattttaatatttttatctagaaagttccttaagaaaatttcaactttctctgtgaattttacgttgaaaatttttcatgcatttataaaatgaaattttctcaaaaatttttatagtattctcgaattttttcaagaatttttcctgttgtgaggatgcagttttaagaaacgcgccacacggatataaataataataatttttgatttatttaaagtctaatcgctttttcagcttgggcattgcgctgatgcaattggtccacggcattcggcgtgactgcttctacaacacatttatgatgactataaaaaagaataatggcacgggttggttggtgttggcatttttgcattttgaaattactcatggcttttcagtgctcaaaaggccgaccccctcatttatggaatggcaaaaggggctcaaagcgtgccaaagtccgtcggccgttgcactgttcgaaacgacgctggaatttgccatcaattgggacttcaaggcggaggatggcacgacggttagccaacagcaaaaagcggtgagaaaacaaagggaaaaatatccaagtattctattctatccggatttttccctggtttttttaacagaaatccggcggacgccgtcgacagatgccccgagacggaagtgccaaaacggacgacgaaaacaccgaaaatgaaaacaatgcctcaacatcggcggcgatggcacaaaagcagcagcagagacaacacacgcgacagagggaggtgaacaatttgttggtggaggcgggattcttgggcggcatggcgatcggagcacggacgcgcaagccggtgaccaaatacggtaattattcaaacacttttaggggcaaaacatatcaaaatttttattttccgaccattttttatatttacgtttgtctgttggatacatactaatttccggaacacaatgtttaggtgacgtggaaatggatgtggacaagctgaactttgacgaggcggaggaggaggaagacgagcaacagcagcggagagaagaaaacgcggaagagatggaggaggagtacaaggaggaacaaa

SEQ ID NO: 62487 - DNA, 451 bp, Heterodera glycines
atgttgtacatgacttatgcgggcgcggcaccaacattgctcaaatgtggccaacacgtgtttccggatgccgaaaaggcgaacaaacgatgcgaagcattggctggcatggccaagtaagacgtgaggggggggggaggctttgaattttgacgagcaccccaaaaagtcgccggaaaattttttggaaaaaaaaaattttcaaacagaaattttacaatgaaaaaatttttagaaaatttttcaataagaaaactaaaagaaaaaaaattcagcaatttttttttcaaacttttatgatgaattaattaccttgattgtaaatagccaaattaaaaaaaaaaaaaaattttatcattgcagaagcaaccaagcgaattgtaccagtcaaaacgctgaatgggccattcaatttcgcacagtaaatgtggaatttgatatgcattggtaa

SEQ ID NO: 62488 - DNA, 56 bp, Heterodera glycines
gctatagcgaagctattcccgaaggattcggtctccccataaatctgggcgcatcg

SEQ ID NO: 62489 - DNA, 268 bp, Heterodera glycines
atgaacagtcgaaattcgtcggcagttagctaaattaaatgttatgcattgactctcttgtcatagagttgaaaatcacaaaagcatagggaaaaaggagtttatgggaatgataaaacgagaatatttgacactcttccagcttcgtgtcgcaacattttcgcttgttgcaatggcaattggtctttgctttgtgacagtagcaaatgtcgtccaaatgcatttgcttactgcactttttgctgacgaactgactccaacgccttaa

SEQ ID NO: 62490 - DNA, 688 bp, Heterodera glycines
gacaaacattagcaacggaagagaacggggctacccgacttttggggatttgcaacttgtggacccgacattttgggacccgacttttggggatcccgacatttggggacccgacttttggggatcccgacatttggggacccgacttttggggatcccaacatttggggacccgacttttggggatccctacatttggggactcgacttttggggatccggacatttggggacccgacttttggggatccggacatttggggacccgacttttggggatcccgacatttggggacccgacttttggggatcccgacatttggggatccaacttttggggatcccgacatttggggatttaataaaacaaaaaaaaattttaaattttatttttatatccaaaattagacaaatttaagtctgctttagccagatttcattccattgcaagaaaaaaaataataatattttttaaataactctttttccggactgagattttctttgcaagtgagtcaaaaaaaaaattaatttaaagcaccgcacaaagtcactcgaaagataagaaacagaaaagatgatctcggcatttgttggacgcaattagacagcaaagtcgtctcgaactttttgaaggctcttgacgaattctgttcccgttggccttgggaaaggtattttaaataaa

SEQ ID NO: 62491 - DNA, 1213 bp, Heterodera glycines
atggcggcgatgttcttacccgctgacggacaataccaattatgcccgtccaaaccgacagaagggattactgttactatgagctttccggaggaacaaaattgcactcttccggtggaaaagcctccactgacggtgaagtcaaatctttacataccaattcggatttcgcgagtgtttcccacatttaaatgctggaatgtgacaacagtcacatgcaccgagtcttttctccgaatcatgacgttggatcatcctgacaagaaaattgaagccgaagcttcagtcgaggactgtcaggcctcaatacaccattcgccaatgaacagagtgagcgagacaagatgggaaagtttggcgccaattcgaaaagagtacggatggtacggcgtgaattgtttcaacaatgtacagacagtgattgaagaaggaaaagcagagattttggatgggaaaaggctgataacttcgtggggagactctttaaaaattgataaaagcctgggggaagacggcagctggatcagactgccaggagctgtggaattgctcatgtggaaaattccatcggatgaattttggcattcacattttgtgattggcccagtaatcacggaaatttggccaaaaaaggcagtgatcgtggacgagctccaatacacttttccaataagccgaaatcaggaaagaaaatttcctgtgtttggagtgcctgaagatgcgctaaaaacggacaacaatgtttttgtgcatgtcattggtaaagtaaactcaaccaagggagcgcgtccaagacgagagaccgcgagtctaaaacctggacaaagaaaaccaaatgtgccgagaattgaaccaacaagaaggccgaatttgcgaagaggtcaaattgctgaaatcgccatgacaacccgtccaactattactaccactaatattccaccgacaattcgtcccgtctctacaacgcgtattccatcgacaattcccataatcgccactcatactccaccgacaactcgcccaattattacgactaatattccttcgacgattcgcccaattactatgactaatattccttcgacgacccgcccaatcgctactactaatattcctctgacaatccgcccaatcgctatcactaatattcctccgacgattcgcccaattactacgactaatattcctccgacgattcgcccaatcgctatca

SEQ ID NO: 62492 - DNA, 2252 bp, Heterodera glycines
atgaccgaagaatctgtaatcctcagtttttcctgtctgtgagtaaataaatacctatttaatttacactttatatttgaaaacaaaactttacaagaaatttgccacttgaatgttctgatggctgccgattggtaattacagcgcgatcggataatgacgcaaattttgttgaggtgtctttttttgaatttaatttccttttttgattagcctacctaaaattgtttcgctgttcaaagattggccaaacagaaacacggaatggcattaacccgaaattcgaggcacgggtttcgttgcttctgcggttggacaaatgccaacagttgcgcattgttttgtgagtccacttgatttgcaatttacaattcttttttcaatttcttatttattaaatcaaaaatgcaggtactccgtcgatgttcagtctggtcttctgcggacactgctcgccgacgcgcatgttttgctgctggcattgctttgtgccggttctaagccggtcgctgtgccgctggcacttcacttactacaaaaagccctacaccaacagtcgttggtgctggccgaagccgtgcagcaggaggaggcgagcggaagcgccggcggaacgcgtgagacattgacatttttaaataaacatccaacttttaaaatgaaagtttttgtctcacaatcagttttccaatttgtcggccacaatttggaaacgcccggactgctcaccgccccttattttgtgttggaattggtgccaaaaagcgaaactgacgagcgaatgccagtaaaaattagtttttctaattctgcaatattttcattctatcatcagattttgctctatcgcagtgaagtggcgcaccaaaacgcaaatccccgctggcgcgactttgtgcttccgtccaaatttttccccagctctttggaatggatcttgcgaatttcgtgccacaatttcaattacaatcgcacaaaggacgaactgatcggaagcgcaaccaccaatttcttccaattgctcaattcgaacacaaaatatttggtcagcgacgagggaggcacatagtcggtgaaaaacgaagataatttattttttgaggcttaacttggcaatttgtttgaataatttgtcgtctttccccttcagttgaggccgggccaaaagagcaaagacccttccgccagcattgaacttgtccgcgtgtgcggtgcccccgtgccgacatttgtgagccgactgaaattggggtgcaatttgcttaatttagttcggcatttacctaatgctgtttcagtcagcaattccattgcacaatcgctgtcgacttcacttccaacaacggcggcccaaatgaccccaattccctccatttccgttagtttattttaagaagaaacaaaataagtaattgtcccttttacccttttcaagtgcatccccatgccatgaatatgtacatgaatgcgctgggtgccattgccccgccgttggctcgactcgaaaagttggagcagtacacacgacacaatgtcgctttgtctgatatttttctgattttccaggctgggcagactttcactgctcggattcggtgccaaagtgccgcccacttttgcgttttccaatatttttgctttggtccgtgtctttatatattttttattgaatgaatttctgatttttcagaacggaacattggacaattcctatgtccgtggagtgagcgacgcactaaacagttacaggtggaagatttccctgaaaatgtttaatgggtcaaaaaatccctcagaaaaatggcgatgtccgtcctcccatacgcacccactgaatacgcccaagtgattcaccacgtcgtaaagtgtgcttataatcaacccttttaatctgtgcaacaatggacggacgttttccaggttagcaaaagcatccgagaaggcacagactggccacttctttctgctggtcattctgacgaacggagtgatcaaagaccaccgggatacggtggacactatcgttgaggtgagttacggtacgacaccgtccgtggagaaacactcattttggcataatccatggggaaacttcaaggagtacaaattgtttgctttttgtctaggcctcttcgctacccattgccattgcatttatcgccgtaagcaacgcgcaccatccatcgcaggtaaatgctggagaaaaacgcccaatttttttttattttgattgtttttgaaatgactgacta

SEQ ID NO: 62493 - DNA, 503 bp, Heterodera glycines
atgggcgtcgatggaggcaaactgcgtgcggtgatgcgacacatcgaaataatgcgacgggaggaagcgcagctgcgcaatcaacggcactatcagctgcctgaaagaaaggtggcgcgaacaatcgatggattgggggggggggggaggaaaaggattctaaactgatcagggtgatggaaccgactgagaagaccaatgagcaaatcttgagaccgaaaatctccaaaacttgatattttctcggtccaataacgagactctcgaattgtaataggcacaaaaatgcaaaagtgctcaagatggtcagaaatgcgctttttcgcagaatcacacgccgtcagtgtcttttctggtcgaccgtgattcgtttcaccgttccgtcgacgtcatagacagcgagaaagtccagtcgaaaagtccattcgcagccaacacaaattcacacgcaaaatttcaaaggaatgatgacgggtcaaccaaactgatggcgagggaagagt

SEQ ID NO: 62494 - DNA, 259 bp, Heterodera glycines
gttttgcgccgttccctcaaactgtgccgtgcccatttgctcctctcgctgacaatttcctccgtttttgtcggcctttttctcggattcgctcttcgcattttccaactttcccctgaaaccgttcgtctcgtcaattttcccggtctctccttcgcctaatgaatgcccttttcaatccgtccgattaaaggcgaaattttcatgcaagtgttgaaaatgatgattttgccgttgatcttttcgtcgctcgtctccg

SEQ ID NO: 62495 - DNA, 133 bp, Heterodera glycines
atgggcgtgctcactttgaacatcgaatgtcgcgagaagggcgtcaaaaagacaatgcaattcgaaccgcgcactttggtgcacgacgcgtgccgactgatcagagacaaattggggcatatgccgggcaatc

SEQ ID NO: 62496 - DNA, 1336 bp, Heterodera glycines
acatcgcccgatgcatcgctggtgaagtccctcctctaaagaagcccaaacatcgtgccgccgatgcgagaattcttcgacttttgcaggaatacaatgccatcaacaataacccggctatccaaaatgaccacaattaccatgccaatgttaatcccgataatatcatcaatttgctcgttggtattctcgaaattatgaaatgcgcccgtaatttttcaatgcttgttatttttttgttgttgttaacacattgataaatatgttatgttattaattttaaacattttttcggaaaaaatcagtagaatctattttggacaaaaacagcttgccgtactaaactgaccctcgtactaaaccgaccctcgtactaaaacggccgtactaaaacggccgtactaaaccggccgtactaaaccggccgtactaaactgacccggtccgcctttttttgacgtttttttccgattttagtgcattttttggcgttttttttccgaaaattccatcaaataaaatacacctttaagaaatgacttgaaaaattttcagaaaaaacatccctaagaattgaaaaaatttcagaaaatacacccctaagaattgaaaaattttctcaaaaattgatcgccaaaattcattttttttcttgataaaaaattctcggtttaaaaattttccttattcgaaaaacattataaaatatttaataaccatttaaatgaccaaaattaagtttttggttaagttttacgtgttttgctccctaaaaaaccttagaaaaattttttaaaatgcctttttttcatgcctttttcgcgattttcgtgccttttcatgcctttttttcaattttttggtgcctattatagtgcctttttcgcgatttttggtacctttttatccgagctctaattataaaattaaaaaataacacacgattaaaatgtcttttttcaatatttttacattattttcagtaccgttaatttgccattaattcgacttttgttgcgtaagggccatgtctttcttccacttctgcaattgtcttgtcttggcttatgctccccatttcatcgttttccggtattcatcgctttccgaatataccaatatttggaagtgcggccaagcagcgattggtaaaattcttttccaattatattcctaattaccccattaatttaagtttatttaattactcaattcgtcaaaatggtatttttttcaatttttcaaataaaatgtacgtctttttcagttgacattagcaacattttttccaattgctgaaaatggcgagtacagtttcacttatgtaagtgcatga

SEQ ID NO: 62497 - DNA, 628 bp, Heterodera glycines
atgaagcgatgtgcggcggaatacgagcgaaagtactgcgttgagacggacaccaaactgaaacagcagacgacgaagaacaaggagaagaagcagcagcaacagcaagacgaatcgccggaggagtattacccgaccaattacgaggtgggcaccggcgaacatggacagataagaccgtcttcacatcaggcttttcctaggaccaagccatgatggtcctaggggggggggttactaacccccaagacccctccacacgaaattttatgcgaaaaaagcatcatatgcttaaaattttcgttttttttgataattacataaacgcttgttttttcttggatttaattttcttttttagcccgccttcaattatgacaaattgcatgtgtccgatataatccttccgtaagtctattgcaatctatttaaaaaacacacatattacgtacaattagacactaaaacttcattttgtagactgacaattcatcaaaaggataaatatcaagcccaaaatggaccgactaaatacgaaccgaaggcggaaggacagcacgtgacgagttcagtaacaaccgcaggtgttcaatacaataatatcctgacgtttcaaaacattttttga

SEQ ID NO: 62498 - DNA, 923 bp, Heterodera glycines
atggttttccggcaacgttcatcaccaactgaagcacagcatcaacagtctgccgaagatcagcaaaaggcaatcgaagaaaagaaggaacaaacgcggccagaacaagcgaaaaatgttccccccgaccaacaaaaggaagagcaaacggaggcaatttccaagcaggaacaacagcagcagcagaagaagggcacggacaatgaacagcaacaccaaacaacatcatcatcagcaacatcatcttcaacttcaactgaggtgcccaaacaacagtcatcatcgccgccgccacctcctcctttcactcagttgacggacaatggctcagcgcgacggcaccgtcgtccgtcccgctgtgtgcgcaaagcggtggagaaatgcagttcgttctccaggtgcgcggacggaacgggccgagtgcaaaactgttggcacaaagggaacgacatggtgtttgacgaaccgacgcaggaatgccgaagtttcatgacattgccggactgtcagagaggcaattttggcattttctaattttatgccattttgctgttgtcctttttagaatcgtattgtgtcaatcgtccgttgggtccaacttcgttgggcggtgtttgctcaaaggtgctaaaacgattaattatgacttgagtatctgaaattggaatacatttcccgttttcaggtggccatcatttgtgggattccgcggcagcaagacggcactgacaccgcgcccttcgtgtgccgtggcgtacgggtgctgcatccgcggaacaaggagagatgcgtgaatgacatcatggtgccgcaatgtgctgaactgctttcttagcagattcattgttgatcaattacaaaacagatttatcagtgatcaatcagattatgatggcacattaccaaatgtttttttaaccgga

SEQ ID NO: 62499 - DNA, 489 bp, Heterodera glycines
atgaaatcgttcggtaataaattttaaaatattcatgaaggataaattattttaggactgtcttccgctgatcagatcaatcgtcgcactttacgatcacttttttgtatcatcgctgtgaatattggtggatatttcatcaactcattttatatgaatctgatcaaatcctcaatttcatctccgatcactgcttggtttgatcaagtaatctccgcaatccctttgaacattggcgcggcatcaaacggaccaattttatacttaacgaggcgaattaaattttaattaaatttttaaatttagtacggagtatcgactggcattccaaacgcagttcccatttgccttcaaacaaatttccaatcaaaatcaagtgataccactccagcagcagaatggacatccacgcaattagtcactacaaattctcatttgatttccatttatcctgatatatatataaaaaatagagaaaaagttaattaa

SEQ ID NO: 62500 - DNA, 48 bp, Heterodera glycines
atgaaaatgattataaaaaagccatggaaaaacagagagaatttgtcc

SEQ ID NO: 62501 - DNA, 449 bp, Heterodera glycines
ctgataaattggcatgaactgtcagcatataaaatcgaaaagaataaaaaaacatatttgtatattgtaaagaaatctagctaccaagtggattgtaagtttaaagtaggaaaacatgaacaaaataaaagataaatacaaagtgaggaaattatggatttctaacaaaaaaaattattattattatattgagctacaaacagctgaaaattttattatgcgattatatttatcaaaattacataaatataaatattgctcaaatctggcgaataaaaatttaaatatcggatttaatatttacttttaggttctaattataatgaatgaaattgctaaatgtcttggatttaaattttttgcaaaaatgttcaagcacgacgttgagatccatacttttaacgaacgacacgaataacatcaacttcgagcgaatggttataaataaa

SEQ ID NO: 62502 - DNA, 1092 bp, Heterodera glycines
atgactgtggggcacagcgacccgctcgtgttcgacggatgggccgaagcggacgcggacgcactcggagtgatcgcggacacaatttgcagggtacaaaaaacaatttgttgatcagtggcgaggagacaatttgggcaccagaagattgagttccgcccccttcagccaatgaaaatcaacaacaaaaatgccgtctttcaggtcattcctcaagctcggggtgaacagccggagacggcgatcagttggccaacccgtgccaccagcgcgccaagcagtgcgacaacggtagaaaaaaaatatccagatttaatttggcattttataaaattgcgtttaaattgcgccatctttcaaaagagtgacggagcgtcgcgcgactgcactcgaattgaacacgcgttggacttggtccttgtggtggactcgtccaccttcagcgctgaacagttcgcaaaggttgttgaagggctggccacgttggttgacgagtcgttcgacttggcccctgacgttgttcgagttgggctcatcgtgtacaggtcgagtcgtcgatttgggaaggaaaatttaaacgaaaatcgacatttttcagtgaaatggtcgctgtgccggtggcacttggccattacgaggacaaaattgagctgttgtccaaaatggtgtctgccacacacaaaattaatggtcagtgtgtgctattttgcccgagggaattcgttcacctcattaggccaattaaggcacaatggcaattgccctgcgcgggttggaagcagcgcgtcaacagtttcagttgcacgggcggcaaggtgtgccaagagtggttctgctgctgaccaacggcaaacacaggtgggtggatggacattcgcattggcccacgtggtcttgttaattataattttaatctctcgaattcaaaaccatttcctaattgatagaggcaacgcggcccctgtcgccgccgaacttcgcgaacagctcggcgtccaaattgtcgccgtcgctgtcgccccatcgttggaccagctgaacacgctgacgcgaattgtcgccgacccgaccagcgttgcagcggcgacgacg

SEQ ID NO: 62503 - DNA, 231 bp, Heterodera glycines
atgaagtcaactttcttccaattaacattctctgttaaaaagggttttctcaattttcttcaacaaaattcttttgtatggcctgaaatcagcactctctcatttttgcgttgtgtaagtctcctgattttttagcgccaaaaatttttttaaaaatcactgcaattaattttttttcagggtcgcttctaggggggggggaagtttgggcaccaaattaaggatttaaaa

SEQ ID NO: 62504 - DNA, 91 bp, Heterodera glycines
agccgattgggacaacgacggaacgccatcgccgccgctcattcaaacggcgaccattgcgctccaatcgttgctccgacttttgcaacaa

SEQ ID NO: 62505 - DNA, 108 bp, Heterodera glycines
ggtgtgcaacgacccgtttggacgcgttcgcaactgccgccggcttttgtcgcaaaaatggaattatttgaacgccaacacgcggccattgcgaaggaatgcgaaagg

SEQ ID NO: 62506 - DNA, 813 bp, Heterodera glycines
atgtcttcagcagattcatcaattttgtcagctgcttcaatgtttgcgcacaacatttggaagctgaccatcagaccggaagtgtgcttaatcattaaatttgaatttaaaatttaataataaaatataaattctattaattaaattgggggctttaaattggtttatgtgtgaatttgaaattttaaattttttataactcaaggccagcgagcgtgaggtgatcatcatgatgcggttcggcataattgctgtcagcatattggccaccgtgatggcactgacaataaattccatctatggactgtggtatctgtgcgctgatctggtgattattttgatgcatttaatcattattgattggatcagttagtctcatgtcattttaatgattgctctaatccgagcataattacgtttgtctgatcactgaacaaatgcaacaaatgactgtctgtcatccatttttctctagtctcatgtgtatttgtctgatcccggacataattaaagtttgtctgatcactgatcaaatgtaccaatgactcacctgtcatccattttttgtcccatgtctttaacgattgatccgatccgggcataattatgtttgtctgatcactgatcgaatccagtcaatgactgactgactgcctgtcatccatttcccctttaatcccccttcaagatctatgtgattctgtttccgcaactgctttgtgtggtctacttcaaggagagcaacacgtacggatgtctgtgcggatatgcgagtatggatttttaaatatttgttttttaaaatttttttaa

SEQ ID NO: 62507 - DNA, 1090 bp, Heterodera glycines
tttcaatatttgtgcaaccagttgaaaaaggtgaagaaacaacggaagaaagcgcaactcaaaaaaaaaaaaaagaacaacactgagaaggatggagccgcggcacagcagcaggcaacgacatcgaaacctcaagccgacacacacgcgaaggaggaaagtgacgaggcaacactggtccggaacatggtcgatgagctggcgccactttgggaggagctgagcaattgcctgtcccttctcgagaaggccgaagattcgcaacctgcggttttgtatttccaaaatggtcgggtttttttcattggataaataacgcaccaaataaataaataattttgtcctttagctgccgaggcgtttttcctctcttattcgttggtgataccgcaaactgctcaattggctccatctgcactccctgaaactgcaccaactggcgattcttcacctcagttggcctcctctgctgcgggcggcaactccggcgaggatgagctgggccgataccagaaggaaatgttcacttttgcgggttagaattttcgctgccaattgattttaattacactgtttttattttttacagaaaaacattaggggaagggtcgatccccccgcttcgaattttctgccgaaagtttacttaagctcgccaatgccttcccataatccccccccccccccctcccttacaaagctcacgtatttcaaactagctcattttaaattggtattagatatcgtcacgaagacgttgcaatccgtgtgcgccggtctcatttgttcggtgacagttttcgcgagctctatcgattgcgcccgaatgattggaaggcgagactgtacatcattttcgaaggagagaaggggcaagacaagggtctaatttttttgcttttgtttttttgccttgtaataccccagaaattctgttgaaggtggtctgttgcgcgaatggtactcattgatcacaagggaaatcttccacccggattacgctctgttcatcactgctcccggcgaccgagtcacttacatgatcaacaagaactcttatgtcaatcccgagcatttgggcttcttccgg

SEQ ID NO: 62508 - DNA, 879 bp, Heterodera glycines
ccgctaaatttgccaagcccgttcccttggctgtggctttgctagatagtagatagggacagtgggaatctcgttgatccattcgtgcgcgtcggtagttagccgacgaggcatttggctaccttaagagagtcatagttactcccgccgtttacccgcgcttaatcaagtttccttggcttaacattcagagcactgggcagaaatcagacacggtcaacgtccacaaggaccatccgtctcctctgttttaattagacagtcggattccccgagttcgtgccagttctaaactggtcgttcagcgccaaccgaagtgcataccctgacgagcatacacgcagctgaagcgctccacaagcagctctcaccactagtccacgcaccatccccgaaagaacagcacgcagccacgggcaaaagccgcctgtttcacgcaacagcccggctgacccgacctttagagccaattcttttcccgaagttacgaatctaatttgccgacttcccttacctacattattctatcgactagaggctgttcaccttggagacctgctgcggatatcggtacgatcaggcaggagattcaaatagcttccctcgcattttcaagggccgtgtggagcgcacgagacaccacaggaaccgcggtgctttacgggcgcaacatccctatctcaggctgagccacttccaggcacgcacaccctaaaccagaaaagagaactctggctcggactccacacgacgtctgcgagttcatttgcgttaccgcgcaaaacagctcttgcgaaccgtcatttccctagcctggcgtgggaatgttaacccacttccctttcggcaaccggatggaccaactgcgcaagcacagaa

SEQ ID NO: 62509 - DNA, 267 bp, Heterodera glycines
attttctaagaaaaaataggagttttgggggcgcggcggtgccgataggcgccgccggggaaaaaaattggaaattttgatcatttataaacagtttttcactgaaaattagccaatttataggtaaaattttgaaaaattttatgggaatttaatccaattcttaggggtgtaaaagtcgcatttcgcgccaaaaagcgaaatgcgaaacgccaaaaaaatgcgaaaggcgaaatgcgaaaagcgaaacctaggcacatccctggt

SEQ ID NO: 62510 - DNA, 1304 bp, Heterodera glycines
ctgttcacttcatccgctggcgtgcctcttcctccaagcgtgtcgttgaaaaaggccaatcagttggatgcctctgcgttaaacttggcaatgcaaatgcatccgttcgatgcctttgccagcggcacttttcttccccctaacggtccttcgctgtcaaatgggggcgatggcgggtcagtcggtgccgtccttgcctttctgctgatgcgtccttttcagagtgtcccccacctccgctctgtccatcccggccctgctgatggcctgtgcttctggccaacttccccaaggctgtttggcctgtacttatcgtctgaaggatggccaattgtgcggctccattttcccaactgaggagcagttatttgctcactacaaaaacgcacacatcggcaagcagagttcccccaacgtggtcagttccacgacttcccaaggggaacagtcggctggaacggtgacagtgccatcgactgctgtgacgacttcggctggcaaaaagggcccggctggctcgccaagttcatctcgctccacaccgactcatcagacaaacaaagtgtcgcagaacagcgcaaagggcgccacgccaaatgcaaaaccacactcaaaccccggggcaatgttcaacaacaacggaaccgcttggccctcagttgggctgcccccaggaatacttccgatgggaccgccgctgtgcctgcagcagcagacggcacaacaatggaaagattgtgagttttgtgaaggggtgcgggtgaagagccttggcaacaaatcaattagcattaatgagttgcttggttttcagcctccccattgccttgccaatccgccggcggcggcgcttctgccagccatcgcttccatccgtatgctcagcagcccaatggtggcaagcagagttcacagactcatcagcagggagtgaccccaaatttacaacaaatggcgatggcaatcaacaatttggtcggtgttttgacttgcattgctcttcgttgatcaatagcttttttcagggactgttcgccaatttgggggcattgccaaccggcggctttttcccgccgggcgttgacttcgccatgctggcacagcagcagttggggcagtcgccggcaggggcccatccggcaacgccgccggccacgaccgtccaccagcaacagtcgcagctggcagcactcgcagctatggcaaattccattggatcgaaaggcggcacatccaatgggacgacaatggcacggcaacaacagacgggcggaattgcgactttagaggcggtcgacggatga

SEQ ID NO: 62511 - DNA, 1383 bp, Heterodera glycines; identical to SEQ ID NO: 32188

SEQ ID NO: 62512 - DNA, 146 bp, Heterodera glycines; identical to SEQ ID NO: 56264

SEQ ID NO: 62513 - DNA, 146 bp, Heterodera glycines
atggctatctctttttttgagaaattttctatgcaacaaacgctctcgaacatgaaacgaagtgcggtgcgccatggccattttatttttcaaataatttttatatttaatagatattccagaaaaatggctatctctatttttga

SEQ ID NO: 62514 - DNA, 146 bp, Heterodera glycines
atggctatctctatttttgagaaattttctatgcaacaaacgctctcgaacatgaaacgaagtgcggtgcgccatggccattttatttttcaaataatttttatatttaatagatattccagaaaaatggctatctctttttttga

SEQ ID NO: 62515 - DNA, 219 bp, Heterodera glycines
atggctatctctatttttgagaaattttctatgcaacaaacgctctcgaacatgaaacgaagtgcggtgcgccatggccattttatttttcaaaataatttttatatttaatagatattccagaaaaatggctatctctttttttggcaaatgttagggacagaaaattggacatgccaggttggcaaacacattttcaagcagaagttgccggtataa

SEQ ID NO: 62516 - DNA, 277 bp, Heterodera glycines
atgtcaaacaacgaaaatgaaaatgtgatgaatggagaagccgtgggaggggtggaaatcaaagtggaagccaatgaagaagtgaacacggaatcgcaggaggacggagaggaggcgaaaagtgagcggaaaatggcatgaaatcgcttacgcttaatttgttaattggaagttctaacaaattcgcaaataagggatgttttcagttccccagttcagcaaagagcaaatggaacgttcggtgatgtgctgcacaaacgaaggcgaaattgtcaat

SEQ ID NO: 62517 - DNA, 557 bp, Heterodera glycines
atggacaaatcggcagaagaaattcgggagatgctttgtctggaggatgtgagacttttcagtctcaacgacttcttttctgtttttgctcatttttaaaattttaggatttgaccgaggaagaaaaggcggccatcaccagggaatacgacattccgcgcgactttcccaccattccgttgccggaccaacccgagctcagtgacgtgccggggacgagcggaacgtcgtcaaattcgtcgaacaatgagggaaagaaaatgaacggctacgcgaaaaggtgaccgaagggaaagggcatcgaaactgaatgaatttctaagaatttttacatttatcgttcgcgtttttcgtgcgaaatttaaattcttttatttttagcgccgggggctcccgtcagtcgtaaattttcaattggatgaaaaaaggaccaaaaaacattttgattttgacgatttgtacaacagcaattgaaggacggcttggattctcttaatgactttgtattgttttcatttgtttctcattttgatttgcttcttcttaatttaacaaaa

SEQ ID NO: 62518 - DNA, 1570 bp, Heterodera glycines
atggcaaactttccgcctaattctgacgaagagttcgaccgtggcaatttttcatcattgtcgggaatggtcggcatgaaccaacgacacttggactggttaatgaagtgagtcattacaaagttcgggtgagcactgacagtttcaattcttcagaaacatatcccgcgaagacatggccgaactccaacaaaggacggggcaatgcgcccgaaaggttggaaatgtttttgcggcattttgagtgaccttacaattagcaaaaccatttgaattcgatttcaaaatgtgctttttttagtgacttgcgccttcgattgtccaacttttatttattttttcagtgtgctgtgacgtatggaggtccgatcgtcgtcgttaccatcggtttcctcgagtttttgcgccgtaaacagaaccttccgatcacagcgccgcgctttttgatcggctaccccattgtttgtccgtttcccttccatttggttttttgagttgctaagttttcagatgtgtctcacttcggtggcccttggctcttccatcggcttcaaaaggtcgggttgcggtgcggaaatgcgactttttctcgacaagctctacgccaaagttagacatccaaagacaatttttttatgtttaaaacatacagatggatatttcctcgttttttcagtacgactcccaaatgaatgccgctagcgctcagatggcgccaggcgttggcggtggcacttcgccaacaaaaacctacgcccaattgcgcgaggccaaccgcgccggtcgtccaattgaattgggacagttgaagcaacagcaaacgcgacaacagcagaagaaaatggtaggcaatcacacaaaaagatgagggagtagttgctaacaattaaggacctataaatgaatttcaaacgcaaaacagttttaatacattatttaccagatccatggcgaaggggagggtccccaaaatgcaatgttttttgggtcaattttctttgtcatattagccaaaaaccaaaatgtgttatcctcctccgaatactttctagttaggctcctttttctgtacccatatacttacaatcggtcatatttaaccaaacatatacattaaggaaagggggcgggcagccaaattttttgcgaagatggtccagttatataaaccaaaaaatgatgaaatttcgtaactttgaattatttttgaaagtttgataattgatgtatttttaaggaattttgttcaaaatttcctcataaaaaaacttaattttttttttaatgaaaatctaagattcccctccctccctcaatgcgaaaaggtcccacccccattttgggcatctgcggcgagcaacaaaccttttgtttggtggaaataaattaaccaaataaatgtctccaggacggcaggaaagcgacgacggaagggactgagggcagcggcggagtgccctccgacgagtggggccgtttcgggttggacggagtgttcgccccctctccgcccgcttcgtcttccgccgatggcaccgccccttctccaccccgtccaaaatcgttctga

SEQ ID NO: 62519 - DNA, 735 bp, Heterodera glycines
atggcagcgattggagacgaaaaagagcgagctcatttcgaaaggcaaattttgaacaacagcgaatttaggggagaattgaaaacgatggaagaaaaagaaaaagccatttcaaagggccagcggaaaatggagccaaatgaaatagcagaattagtggaaaagcatttcaaagtgatgggcgaacacaaaatggagggcgaagaagaagaaaaagcggaaacaaaggtccaatcgagaggggtggccaaatgagaggcaatttggccaaaaagaaacatttaaattatgaaaaataaaaccacaaaagcattttaaaattaacataaaacagctagcgattgccaccaccaccacaatttttaggtaaggcttcttctgctgatgctattcggcattatgccaaagaataagcacatggaaggcaaaaaaatatgggaagagaaaatttggggaaaaaaatggcaaaaacatttaaaagatttaatcaaaaaaagacaagtcaaagtatcaaacaccaagcagttgggcacggacaacttggagaaggtgaagaacacaacggtacacctcagttgggctgtcacgtttgggccggcacggttgggcccagcatgtttttccagtataactttctttaacttttttcgttgtcatccatcctccaacattgttgatatcattcggaagcataacatgtttagaagcttttctaagctattgagtcgcgattag

SEQ ID NO: 62520 - DNA, 81 bp, Heterodera glycines; identical to SEQ ID NO: 58971

SEQ ID NO: 62521 - DNA, 480 bp, Heterodera glycines
atgcccgcccctgggcaatgcctttgtcgccgtcttccgtttgctcttccgctgcttctccttttgctgtttcctccgcctctcattccgcacttgccaatttcttccgcttccgctgatcagtgccaagcgccgcccctccgcatcggtgtgctccttccggacgcataccggcgccgcgtggagccttggctggcattggcccaacggcacatccgccagttcagcgccgcaccgacgccaaagtgccgtaaatggggcagtgttttgcgtatcaattcgctaatcagtcagcttttcctcggcagttcgtctgcccattttcttcgtgcccattgcctccaaatgatccccaaaaacacggactgtcgcccgtcgttgggactgaaggcgcttttcgatctgatggccgtctctgaaaatgacaaagcattggtgggaatgggaagtgatcagtcggcacaaaaccatcagaattga

SEQ ID NO: 62522 - DNA, 1187 bp, Heterodera glycines
atgcccgaaacttggcacattctctcatgtcgtcctcgtcgtcgccgttgttttatttttttgttgtataaagcttatgtcgccgtttggagaccggcggcttttcctttgcttatcggcatggagagacagttgggagcacttttattggtgagaaattctggccaaatttggccaattttgtgccgcgcgaaaaatagcactctttggtgccgcctccccaattcatttccacgccctcctcccccatagaccacattcatcgaattggcattgttattacgtgtggtgcgtgtgccatgccatcaattcatttcttgggcaaaacaaacacactttaattggtgggttaaggaaattataaagaaattaatgggcaacggcattttttaaattcaatattcttttctttaattttacttttattgatcaatacaaatttacatttaatgcgataatagagatctaacagggatgggacaaattgaaaaataaaaagcgaaatgcgaaaagcgaaatgcgaaattttttctacaactttttaatagttaaaatcataaagcaaaaatcattttttaaaattttattccaaatttaaaaatcaataaaacgcttttttgaggcgcgctttttccaaaaaaactttttgggaagagggggcaggcgccgccgggaaaatttttgaaaatttgattaaaatttgttgacagattttcactaaaaaatgatcaaattttgtgatttttatcatttttctaatgagaaataagagttttggcgcgctgctgagaacagtttttcatcaaattaccaaattttgcgattttgggcaattttctaagaaaaaataggagttttgggggcgcggcggtgccgataggtgccgccgggaaaaaaattggaaattttgatcatttataaacagtttttcactgaaaattagccaatttataggtaaaattttgaaaaattttatgggaatttaatccaattctcaggggtgtaaaagtcgcttttcgcgccaaaaagcgaaatgcgaaatgcgaaacgccaaaaaatgcgaataatgcgaaaggcgaaatgcgaaaagcgaaacctcggcccatccctggtgtcgaactcataacaaaaaatactgttagttgtgaagcactaaccactaaaccacaaatattttataaattaaa

SEQ ID NO: 62523 - DNA, 386 bp, Heterodera glycines
aagcattgtacagcataattaaaaccgaaaataattttcgtatattttccccaatttatttcaaaaagccaaaaaaaaatgattaaatttgaaaacgaaatagtgcacaaaagggagggatggttagacgaaaagaggaatttttagaaaagagcgcaccccatctgatattcccatttttccgttccacaactggccaaaggcgactgtgctaattgacacgtagttgtccaataaggtacttggactttccacagtaaaatgtggtacaaaattttggaactgtcccgcctcacggcggggcttaaaagcattgtactgcataattaaaagctaaaataattttcgtatatttttcacaatttatttcaaaaagccaaaaaaaa

SEQ ID NO: 62524 - DNA, 362 bp, Heterodera glycines
gcttaaaagcattttactgcataattaaaaccgaaaataattttcgtatatttttcacaatttatttcaaaagacaaaaaaaaatgattcaattttgaaacgaaatagtgcacaaaagggagggatggttagacgaaaagaggaatttttagaaaagagcgcaccccatctgatattcccatttttccgttccacaactggccaaaggcgactgtgctcattgacacgtagttgtccaataaggtacttggactttccacagtaaaatgtggtacaaaaatttggaactgtcccgcctcacggcggggcttaaaagcattgtactgcataattaacagctatgataattttcgtatattttt

SEQ ID NO: 62525 - DNA, 405 bp, Heterodera glycines
atgagtaatcgagtttacattggccatcttgcttcgcgcgccaccgaccgagatgttgaacattttttccgtgggttcggtcgaattcgcgacgtagttcttaaaaatggctttggatttgtggtctgtttgttattgcttttattttttacagtctgttttaggagtttgaagattcgcgcgatgctgatgatgctgtttacgagctcaatggacgtgaactgctcggggagcgtgtagtagtcgaactttctcgtcgtggtggtaacaaatagtgattttataattaattatttttcgtttaggaccctatggcgggggtggcggatacagcggaggaggtggcggtggtggtgggtatagcggcggtgggggaggatttggcggatatcgcggcggtggggc

SEQ ID NO: 62526 - DNA, 1971 bp, Heterodera glycines
atggcattggcacggtgtccgccgtcgccgcagcagcagccgccgcctctgtgcgtgcccactcgcgccccgtgctgcagtccaacgacagttttgagcagccctccttgctggtggacagcatcacttcggcgctgaacaatgtgaatgggccgggcggtggcgtcgccggcggcggattgggcgccattgccaacgggtaaataaattcacatatagtcattgtactggtagcagtacttgtacaaggatatggcatggccagggcgtggtgtgcggctatgaaaaatggaaaatttttttttggaaaagtttgccgttaaaaagcaaaaaaaatttccatggcggtgccttagaccctaaattcccataaaaattaaaaaatttgattaaaaaattgccattaattggtcaaaatctgtttaaaatcctttccggcggcaccttcgccaccacctgacaccaaactttaattttttttaaaaattatttccctagaaaaatgtaattaaactcgaaataatttctgaaaaatggtaataatttttctttttgtagggcacgttacggtgcgccgcccacactggtcaacggaggcggtggtggacaacatggtcaagcagtagttgctggagggggcggtgccggaggactccatggccacacccattcccatcacggttcatctggtggcggtggcacaacgccaaccgttgccggaccgccgacagcgatggcaccgccgccgcaactgcatcaccaccaccagcaccaacactctttgcatgcccaacagcaacatcaggccgccgccaccatggggattggaggaggcggcggcggaggagggcatgccgccctcctcgtgaacaacaaccatcatcatgccgcccccgcccacaataatcatcatcaccaccagctgcatcatcaccatggcagtgcgggtgccctgtccagcatggcgactagctcaaacggcatcaacagcaatggcacgataatgccgtcgttgacaaacggtatcgtcagcggcaccggtgctggtggtagtggtgccgttgtttcgccgtcccttatgcaacaacagtcgcagcagcagcaccaccatcatttgatgccggtccagtcgatgccctccttcttggcacagcaacagcagcagcagtcgacgcatcatcaccagcaacaacagtcgcaggggagcagcgccggcgccgccgccgcctccactttgttgtccgctgctatgatgaacggacttggtggttcgcagcagcaacagaagccattgttcgcgttgttcgacctcaaaatgggtgtgtctgtctgtctgtccctctgcttacaattagtctttctttatctctctttttatttctatcgttttttccctcctcctcccctctctttttctttttttccctcataattctccttcctctctctttctctctatctatcttttcttaactctctctttcgttctttctcttctccctttctctctttcaatctctctctttctttctttttctctctttctctctctctctctctatcgctttttctctttccttaactctctgccgtctccctatttttcttttaatattttcattctcgccctttccctttctctctctctacaactcttcactgtttccagatgaccatcatcaccaactcacttcctccatccatcaggacggtgccgcttctgctgcttctgccggtgcttcgtccagtcttcgttcagcaacgaccggtgcagccgctgcttcagtgccgtcaattaccacagcgtcattgccgctaagcggtgccaatggcagcgcactgaacggcattggtggtggcggcagtgttgtgacaacgccgacaaatgtgtgcggcggtggcgccaacaacatttggacatacgggccgtcctggggtgaggagaaccgaaacataaaatgccaattttga

SEQ ID NO: 62527 - DNA, 2130 bp, Heterodera glycines
  unsure (1)..(2130): unsure at all n locations
ttccacaaactcgcgcttcctgttcccgcccacacccgctctcacggcaacgcggggcgacaacgngctggccgagtcgactgttccgccgccagtgagggaagcggcgccgctgcccccagcgccagcgccgccgccaatggngcaggtgccgaacgaggaggacaggacggacaacttgagcagctcgatgtctacgggaacaaagggggaaggaatgaaaaaaaatgaaatttcaatgaaaaagtaatgaattttaaaatctttgtaagttattccctggcagtgccaaaaaaatctcaaaattggcattttatgtttcggttctcctcaccccaggacggcccgtatgtccaaatgttgttggcgccaccgccgcacacatttgtcggcgttgtcacaacactgccgccaccaccaatgccgttcagtgcgctgccattggcaccgcttagcggcaatgacgctgtggtaattgacggcactgaagcagcggctgcaccggtcgttgctgaacgaagactggacgaagcaccggcagaagcagcagaagcggcaccgtcctgatggatggaggaagtgagttggtgatgatggtcatctggaaacagtgaagagttgtagagagagagaaagggaaagggcgagaatgaaaatattaaaagaaaaatagggagacggcagagagttaaggaaagagaaaaagcgatagagagagagagagagaaagagagaaaaagaaagaaagagagagattgaaagagagaaagggagaagagaaagaacgaaagagagagttaagaaaagatagatagagagaaagagagaggaaggagaattatgagggaaaaaaagaaaaagagaggggaggaggagggaaaaaacgatagaaataaaaagagagataaagaaagactaattgtaagcagagggacagacagacagacacacccattttgaggtcgaacaacgcgaacaatggcttctgttgctgctgcgaaccaccaagtccgttcatcatagcagcggacaacaaagtggaggcggcggcggcgccggcgctgctcccctgcgactgttgttgctggtgatgatgcgtcgactgctgctgctgttgctgtgccaagaaggagggcatcgactggaccggcatcaaatgatggtggtgctgctgctgcgactgttgttgcataagggacggcgaaacaacggcaccactaccaccagcaccggtgccgctgacgataccgtttgtcaacgacggcattatcgtgccattgctgttgatgccgtttgagctagtcgccatgctggacagggcacccgcactgccatggtgatgatgcagctggtggtgatgatgattattgtgggcgggggcggcatgatgatggttgttgttcacgaggagggcggcatgccctcctccgccgccgcctcctccaatccccatggtggcggcggcctgatgttgctgttgggcatgcaaagagtgttggtgctggtggtggtgatgcagttgcggcggcggtgccatcgctgtcggcggtccggcaacggttggcgttgtgccaccgccaccagatgaaccgtgatgggaatgggtgtggccatggagtcctccggcaccgccccctccagcaactactgcttgaccatgttgtccaccaccgcctccgttgaccagtgtgggcggcgcaccgtaacgtgccctacaaaaagaaaaattattaccatttttcagaaattatttcgagtttaattacatttttctagggaaataatttttaaaaaaaattaaagtttggtgtcaggtggtggcgaaggtgccgccggaaaggattttaaacagattttgaccaattaatggcaattttttaatcaaattttttaatttttatgggaatttagggtctaaggcaccgccatggaaattttttttgctttttaacggcaaacttttccaaaaaaaaattttccatttttcatagccgcacaccacgccctggccatgccatatccttgtacaagtactgctaccagtacaatgactatatgtgaatttatttacccgttggcaatggcgcccaatccgccgccggcgacgccaccgcccggcccattcacatt

SEQ ID NO: 62528 - DNA, 1339 bp, Heterodera glycines
atgtacaagaaggagtaccgattggcggaaatcgatcgccaaattcaattgatgatcgatgcgaaggccaaaatccaggaagaagaggaagaagaagaacaaataaaggagcgaagagcatattcggagaagatcaaacgcgagcggaagagaaaggaaaaagagcaaatggaagcgaagtccgaggccaagcgaaaggaagcggaagagaaggccaaagaaaaagccaaagcagaaaaagaagaatggaaacgggcactccgacgaccggcagccaaaccggaagaaaaggcgaggaaagaagcggaaaatgaggcgaggaaagaagcggaagaggcagtaaggaaggaattggaagaagaggcgcgaaaggaaacagaagagaaggcgaggaaggaagcggacgaaaaagcaaggaaggagttggaagaagaggtgcggaaggaagcgaaagagaaggcggcgaaggaagcggacgaaaaagcacagaaggaagcagaagagaaggcaaaaaaggacgaagaagaaaaaaagaagtcagagaagcaacaacaaaatgtggaaaaaagagcggaagaaaaagcagaagaaacaataatcgccaggggaatcaaaaaaagacgcctaaccgaagaggaaaaggagaaaaaacagagcatggaaaaagttgaggaagcacacagagaaataagggaaattgtgaagcaggcagaagaagatgcaaagaagagagaaataaggaaaaaaatcgaaaaattgacggcaaaattaagtggggaacaaaatggcaaaagggacgaaaaggacacagcggaattggaaagggagcgcgaggcattcgaaaaccccccggcgccgccaaaggatcgaatgcctttctattccagcagcgtggcacgctttgaatgccaaagcgaattggactcggcacccaaaccgagagaaagagaagaaagaagtaaccgggaaaggatgagcctcggaacgagcggaaaacggctgttcgaaaacacactgaagtcggcgacgcagacggtgaatgagaaaccatgcatacccccagaagggctggggctcaaacgaagagaaagtgccatggaggaagccccgaggggaagaaggccaacaccagtcccaggccaaagacagttggagaggagcccaatccgaaaaaacaactcctacttgaagcgagcattggccctggaaaagcctgaagagacgatctacaaaattcgaaaactgctgttggaggccgccgaccgcctgtcagaattggcagatttgctgtacccctacgacggacagaaaacgaagaaggaagagacggcggaagaga

SEQ ID NO: 62529 - DNA, 814 bp, Heterodera glycines
  unsure (1)..(814): unsure at all n locations
atgcgcacccgtcgnatctgcnaagttaagcaacgattgctgactagccaaaaggttcggtgccgtgatgaaacgaaccagccactgcttacnncgcggcaccnggcacggtcccccgaaggaatggatttaattaaattctctccttcggggattttttattaaggaagagagttcattatttatttgtcttttgcataattaattcataagtatttttacagaaactgctctgaaacgcaccaaattttatttacatgttagtttaggcactctgatgctttttctatcaaaaagggagatgaataaaatttttaaaaatttttaattcctttttaaacaggccaaaaagtttaggcttaactttttagtgaaaattcaatcactcatttttcgagtagtgatcagaagcgcaccagattttgcaggggcctaaaaaggtcaaggaaaggcgtctctgcgttgatttagcagtagtacctatgaatttaaattttctatgaatttttaaagttttttgaaatttttttaagtgcaaaagtggtggtgtctgcaaaaaattttcaccgggtttaaaaaatctaggaaaattagtaagcatttgtagtgttccgatacgtatccctgcaaaatttggtgagcccctgatcaattacaaattatttatggacgatcaaatttttagaaatttttatttatttttgcataattaattcataaatatttttttcagaaaatgctctgaaacgcaccaaattttatttacatgctagtttaggcactctgatgctttttctatcaaaaagggagatga

SEQ ID NO: 62530 - DNA, 92 bp, Heterodera glycines
aaaatctattaaaaaatttaaaaatgagaattcatgcgagattttctggaaataagcttaatagggcctagttaagctgtaaaaaaaatttg

SEQ ID NO: 62531 - DNA, 83 bp, Heterodera glycines
cttggttggatggatagagcacccatgggttcttaagaaaaatggttttattttctgccaaatgagcacgagtgccgagttat

SEQ ID NO: 62532 - DNA, 802 bp, Heterodera glycines
atgttatcgaacagtactaagtcttcatttcaaaaattaaaaaaaagaaagacccaaaaaacagaaactgtcagcagcggtagcagtgatgatcaccatcagcgcaaggacaaagaccgtccaaaaggtaatggtgccagtgccaatgccgaccaacaacaacggcgcaaggatcgtgggcccatggtcggtgatgttgagcaacggattcgaacgacgacggaggtggcggtggagcttgctgaagcggtgccggagggggacgaagcggctgtgacgacacgccgcaagcgacggcaccaccaattgttggaaagtggagaagttgaagccgtatcagcagcaacaattgaagaacagcaaatagtggaactgccaccaccaccgcaaccaccacggacaatgggatcaacaacaacaacactggaaactagcggtaaaatattttgacatttaaaaaaatggccgattgggaccgcatttcggcaactttttgtgccggaattccgtattctggcaatttcagttgccgaaatgcctgcagaattccggcaatttttttttttgcgtaggattcatttttctattgatttgtttcaaaactttctgggaaaatttctgcgttaaatgattggctcccgtggagaacagggcgaccgatggtgcctgaaaattaaactttaaaaggaaatttggcaaagcattaatcattatgcaattattttagccatttttagctctcggcctcttttttattagcatcatcggacgcccaattcgtttaactggaatttctaattaa

SEQ ID NO: 62533 - DNA, 1862 bp, Heterodera glycines
atgaggaaggagaacaacaaaagcagtgccgcctcagcagattctgatgccaatgccaaaagtggtggcgatgcttctctcaccgcccccactgaagaggaggcggaagaaatcagtgccaatgagcaacagaaggagcagcgcaagtcgctggacgcactgtacgctgcggcacgcgaggagttcgatttggacatgagccctttggacagtgcgatgaaaacgttgcgggagggccgtgagatacaaaagttgtccgtgctgcgcaacctggtcgagctggtggagggcgagccggacgaggcgttacaccgcctgttgcccatgatgcaggtaatgttttggaccagggccggatggaattaacggacttgcgaaattttatttctaattttaactgactttgcaccaaaggatctttcctcgtgggttttagggaaactattaaaaataagaaaatttaatatgaaaattttcataattatgtaaccaatttttaagtataaaaaaaatggcaaatgccataaattaaatttatcgtaaatattaaattctgatttgattcaaacccaacttaatcaaacggggttattttgtattatactgttaccgtaataattatcttggtaggaccaagattttggtttagggccacaaaagtgagcagttgtttcaattgttattcccaaattaggccataaattcatcaacattaagggacttttgtcggttacgccaagcaatttggacattcattgtgaagcggcaattgcctacaaaaattgcattaaggagaagaaactgcagcagaaatgcccgtaattatttaattgagcaatttaatacttttgaataattttttcccattttagagaactttctgatcgttttttggtggcaattctcgagaatattgaggcgcagaaggaaaatggtaagtgaaggtgaatgattacagagacaaatcttggacaaattaaaggaaaagagattaagaaaatcgcatttatgatttttaataaacaatttttttaaacaatcaaagaattaatattacacttaatgattttaataaacaattttttttaaacaattaaagaattaaaatttttctcatccgcaatatcttacactttacgataggcgttaaaacccaacactaattggtctaaaaaatattttagctggttttcttttgtgtcctattttctggctctttcacagaaatttttattcaaaggtcgagactcccgacttttaatttgcatatttaatctaagccgcgactctcctcgaagcgacgcaatcagtcaaagcatataaaattatgaactttcgatatttttggaaccgaaatcccgagacttttggccattggttgcctaatccgatttttttggtgggggagtggtgggtgaatcatcagctgctgactgaaatgtgtcatatgaataagtgaatgaatgaatgggtgtatccctcactcccttcacatattcccccgttttgaataatgatgcaagtggcgattagcatgtaattagcacgctgaatgatggtcatacgtttttgattttacaatcctttaagcatttataaaatgatattcggtgttggtttttttgctgttgttgcagcaattaatcaattgcgaaatttataagcaaaaatttaattttattatttgtaaatgctaaaatcaaactaacaaataagcttaggttttaaaaatttaattaccactacagtaaccgccactgcttggctggaatcgctggtggacattgccgactgtgtctccatgcaatccatcgtaaatatggtaaaacaaaaataaattaaaatttatttaaatgataaaa

SEQ ID NO: 62534 - DNA, 1143 bp, Heterodera glycines
gtggttccattggccgttgcacaagcggattccggaaagagggttcaacgacgggttatttcaactcggctaattgagaaattggcactgctggtgcccaaggaaatgtaagttgttgcaaagtgcaacaaaataatcaaaagtgtttaatattttgatgatatattggaactataaattaaaaaaagatgccattaaattacaaaaacgtttagcaatttttttaaaaatgagatatatgacatctaaaaatatatatattttttttgtttttcagtctccagagagaattgtcgccctgcgcccaaatgctgtgccaagatccgagtgccgcagtacgcacatcaatcgcacaaaagttgtcaatgttggcacaatcgctgaagtaagcttaccctctaaatgtttacagtattctaattattaattactgcctaattgttttagctaattactgtctaattgttttggaattactgtctaattgttttagcaattacacggattgttgcactttgcttttgccttgcatcatccaactgtgcaaggacgaagacccatccgtacgggaggccattctgagctccatggcccaatgtcttccacactttagcaaaggtagaaacaaaagcaagcagattgagcaacgatatttctgatcacaatcgcttggaagatgaattttcctatttggatcagttaaatctgatcataaattaaccttattagcctcaagaaatgacgaatctttcttggccctcattttctaatgatcaccttttattgccaattagatgcaaaaaagtccgtgttgttgccgttgttgcgcaaatgcactgaacaggcactgatcctgcgcgacgcttcgttgcccatcgtttcgcgccactttggctcgtggttgcattgtctacgcgacattttggcaccggcagagttgcgctggtggttggacacgtacgtgcgcattttggactttgcatgccaacataacgccatcaataatgccatccagcagcaggcgacggcacaaaaacaaggtgaaaagaccatgagcatggcatgaggacgatgctcgagaattttgagctgatcagtctcgacaagaaacagcatagccaattaaatatttttaatgtttga

SEQ ID NO: 62535 - DNA, 1751 bp, Heterodera glycines
gctccaactgtgccggacactgccgaagatcaagcagtatttgatgttcccgaacaatgacgagtcgttgtccaacttggagcgtgttgtgcgcgaattgctggcatccgaacagaacgcactttcacgacaactcatccaacaggtgggctaaaattgactctttttttaatcatttcggtgggaaaattcatgataacctccgatccaaaaatgcttatcatattcaattccattttcgtcctgtttcagttcgcttgtgaactgtcgaggacagaaatggacaagaaggagtgccgtgcaaaccgtgccaaattggccgaggaaaagcgactgtggaccgagcatgaggaatccacggacgaaactgatgaggctgaggcgggccagcagtacagtactgagcatacagtaaccgggagcgatgcgataggctcgcccgaaagcggcatcttcttcgaggaggactgttggcttggcactggggtcggaaacggtgccagacctaacaaccaccagcagatgggcggtcgcctgtgccgttcggctaccaccacaagcatatcgcaacacatggagacggaggtggacaaaacattcaaataaaaaaatattggcaaaatgataccattaaatttttaaaaaaactgaaaggaagcgaaaaacagaacccaaaatcaaaaaataaaaaaggtgaacggaactaaaaaataatgataaagataaaggaaggaaaaaatattgttcgatttcgaccattaattaattatttatacgtttatttcccaatttaaacgcatcccttaataattaattacctaatgccttagctcgactaagcttctgaaaaacattttaaattatatttttcaaggcccactccaatctcattaccgctccgtccgcttcctctgaaatgctttccgcaatggcaattgaaccctttgccgcttcatcgcccaaggtcagttacctgacgaataaaataatttattttaattaaaaaaaattaggctgctcgacgccgtcctccgccccctccgccaaaaagttggcgcaccaccaccacaattaaatcagcaaatggtccaaaattggccattgttcgtccacaacctcaagtgaaggtgagtgagcccatctgaacaggtttttagctggttttccctattttttgaaggtggtcaaccaacggtcaagcagtccaatgccatttgttgacgctgagcaacaacggaaaatttcgaacaacaaattgcccaatgagacaccgtcggcagcaacatcaaaagcagaagctaataatgaacaaattagtgataagaagcagcaccatcagagtgacactgatcgccattattcaacaacgacagccctcggggaaagaggaaaagcaccggcagaaagcattcgaaaatcgaaacttccattgtcaacgaatggaggtgagagttaaataaatttattttatttagtcttgtagaaaaatattcattaattcattttctgctttattaggccggcaccgctcgtcgagttcggcaccgccggtgccgccgcctaagcccaaattgcctctgttcacttcttcgtctggcaactcacctccatccccatacacaacggcggcctcgggaacaagttcagtgacggactcgatcaaactgaagaaataccgtccacgcgacatttctacgacaagtaattacttatacattgaaatggatcagctcccaatgccatcaaaatag

SEQ ID NO: 62536 - DNA, 291 bp, Heterodera glycines
atggtgccaagccccgtggtggtgcccgatgttgaggcggaggcattcaggacgatgttggtctttatttacacggacgatttgagtgggattgacggagacaatttgttcgacgtgctttacgcgtgtaaaattttaaaatttgcctattttccccgttcattttaacccccaattttagctaaaaagtacaacattgtcggcctggtcagtgcctgcttggacttccccatcccttcgctgcccaacgttttcttcgcctttgcacaggcgcgttttctcgaagaaaag

SEQ ID NO: 62537 - DNA, 882 bp, Heterodera glycines
atgaaacccccggagttgcaataccaccacatcctttcacgtggtggaggacttggtcagcgctggatccttgaccaggctgcaaaaattgattggcaaattgcaacatttttgcgtagacctgacatggacctgcggatcagcactccaaaaaatctgctgcagtatttggtcaaccagtacaacaggcagcaggcacggcaaaaccccaatgcccaacagaaaactgttgatgacattggcagtgttgttcggctttccgaacacaacgtaaattctctccaatattggaagaaaatgtatgaagattgcaacaccgtttttgcacggtgccatgacgcgaagaaagcgcgtctcttcattactttcacgaacaacagggaatggcctgagttcaaagagaatttacacaaaaacggtcaagtatttactgaccgttttgacatgtggatgcgtgtctggagcagcaaaatcgctgagttccgagaagaactttatgacaaaaagttcttcggaacaatccttggttacggtgaatcaatggagttccaaggccgaggaggcccacatgcccacattgtggcgcaaacagacctggacgcagttccatatgtcattcaggaatacatatgggcgcacattccatctttgcctgataaagatgacgacacgcccattgcaaaaatgcatcgcgaaatccgcgaaacaatgcatatgcaactgcacagatgcagtgacagttggtgtggtcctagcgacccaatttacgggcggtgcaagaaggggttcccagccccttactcaaaatgtacgattttgcgcccggacaggcccgcgatgtatttccggccttcaccatctgatggtggtgcccaattagag

SEQ ID NO: 62538 - DNA, 55 bp, Heterodera glycines
atggcaattcgtaacgcgtgtgatagagcgggtattgaccacgtttggggtcaat

SEQ ID NO: 62539 - DNA, 232 bp, Heterodera glycines
atcttttctcgactttctgggcattcccgtgatgatgatcacttacattgaccccaaacgtggtcaatacccgctctatcacacgcgttacgaattgccatttgtcaacgaacacattttcgacaacaatcaattggcggtccgtttcacaaacatttttttttgcaaatttcgaactcaattctttaaaattcaggtgcataaagccgtgggcgaatattgggcggaattg

SEQ ID NO: 62540 - DNA, 880 bp, Heterodera glycines
atggctatttgtgcgtgtccggccttcccaatcgaaatggcaatttacatgccaaacagtgtgctgacatgtaagaaatggcataaataaattcaaaaattttattttttaaattagggcattggaatttttgaaagcgttggaaaccttccgaatttcggaccattcctttgagcgcattcgtctccgcatcggactgcacagtggcccatgtgtcgcgggcgttgtcggtaaaaatttctttaaacacatttcgtgtaattaaattaaaatgggtaaattttagaatttgattcattttcctatcaaaaattttattggttgtaatttagggttagccatgccccgctactgtctgtttggcgacacggtaaacaccgcctcgcgcatggaaagctcttcaagccgttcgtttaaaaacattaatgaatctttttttctcattcagctaacaaaattcacatctccaaagaaacgtatatgctgctgcacaataattttgatggttacgcagtggaaagtcgaggcgaagtgataattaaggtgaggggggaggggcgataaatacatcattaatcagcacgaataattgactaaatgccgtgatctataagataaggcacccacaaaactgtcaatttgagagtcacatcacaggattattaacaaaatatgcgaataatatgagaatgctggggaaaaaataagcaccacttattaaccaaaaatcaaattaaaacgaaacaattagaaagccctaaaaaagacaattaaaaattaattagtgtgcacaatcttactctttttatagggcaaaggcgtaatggagactttttggctgttgagcaatgccgagataagaagcaacaaccaaatgatg

SEQ ID NO: 62541 - DNA, 49 bp, Heterodera glycines; identical to SEQ ID NO: 51181

SEQ ID NO: 62542 - DNA, 1665 bp, Heterodera glycines
atgccgatgattcggcgccaattgtccgaccatcagcttcacaatgcctcatccatttcagacctttcaaaccctgggattatggtcgtcggtggtccttcccaaacaccggtaattttttcatattttcggcattttttcaaatttaaattttttttaaagttttgtccaactcgtggcacggcaaatggtccttgttatgctccagcagcaactccagcggatgtgatctatgaatatgtggaccagggctccttgtcgttggcttccacgttgaaagccggcgattttttgtaaggaaataaatgtataggcattttatagatgaatcccttggaaatacagtaccctgaaatatgttaattttatggactgaatgaacgcgcaagaataatacagtgccctgatatttgaattttatggacagtatgaatccctgagaaatacagtaccctgatatttaaacttttatgacagtatgagttcctgggataatgcagagtagtagtctatatttggaatttgagctaactcaatgccctgatatttgaaattcaaggacagtatcgactactgggaaaatacagtactccgaatttgaaattttatagacaatatgaatcagtcagtggttaattcgttttgttaattatttaggcgctcaaggagtaaatttaatgtgtacgatccggtgccgccgatgagcaatggacagcagcaacaacgacaacaacaacaacaacaccgtcgggttgaaagcacttcaattggcacacaacaaattgctgacaatgatcatcaacaacaacagagacgggaaatttatggggtaaaatttaacaaatttaaaaatgctaatatttaatttaaaaaacctaattgcccaattaattattgaatttaaatattcatactagcctaattaattataggataatgaatatttgcaaccgaagagtttgacgagcaatgaaagtgatgacaataatttggcaagcagttcaacagttaggcaccaaaaagcattaattgtcccggtggatgtcggaacatttcgaggtggataaatgtcaaaaatttatttgaaaaataatgagtttaggatgaaattttgcagaatagaggaaaaattgggacccaatttaagtaaagcgcgaattttattgaattggtacttagaactgggaatttttgagtaatattattaaattaattgttattctatacttcctttggtgtatgcttttccaaaacctaagaatttaaaaaaaaatacctagaaatcttttcccaagaaattattaatatctaagccaaattttttttaatttcccaaacacaatcccacatttttttcaaaaaattttaaaaatcctgcaactggataacgcaaatttgatttgtcggtctctagttctaaatgggaatatgcctcctaattaagccatttcccgagaatgtcccgttgtgccaacgacaacgaccacatcatcatcattatcatcaccgccatcgatggcatccgcttatgagcacgtaatgccacaaattccgctgaacacttttcccaatcaaacaccacctcaacgacaatgggaggccgaaattttggcggagttgaagcagcgccaacaacaaaaacaacagcaacaacaacggcaaaat

SEQ ID NO: 62543 - DNA, 1254 bp, Heterodera glycines
atggctgatcggcaacaacaacaaccatatcttatcaacccaattaacaacagatacagcaggtaaatgagcaaaaacattgcagttcgtgaaatttgaatgttagacggagtttggcactcgctccattaatggaggggtactgtaatgaaaaaaaattcataggctcattttatcgattttatttgcatttttctttaaaaaattgtttggtttttctccaacttttataagccttaaaatacatacactaaaggtcaatcgccgatttggtaccactgggcctcaatggcacagctttgcccatccgcgcatttgaaagaggccaagccgactcgcccgagagaaggtcaaatctgggcataattaattttaaaagaagaaattgttataaattttcctaaaaaatattagaaaatttatttgaaaatttttctaacatttttacaaattttatgatgaaaatcactaagatttttttcagaaatctttccaagaaaagattttcgggctcttataataaaaaatgtttttttaagtaccatttctacaacattgtcgacaatgcaaggtgaaaacagtccgccgaccttccttggcggcgcggaagtgccacctccgatgggcacgagtttgctccggcaacggcttggctccgcatcggtggcacttatggggtcataaattttgaagttttttaaaaattttgattttgtaatttttttccagctctgctgattggaggcgaggcactttgcagtcagaagctgagcgatcattaggctcaagccgtgccgcgaccaccttcttgggcagtccaccagaagcagcagcaacagattttggacaaaccgtcaccaagacatttggccaaaatggaggaatggacaatgttggacaaagtgtcgaccagcaatttggacgaagaaagtttttcggacaaaatgacgtgtcaccaggcacagatgtgtgaaagcgaatgaacattttttgttgtggaatttcattttcaatatttttttttctcatttatccgacgacgggttattttcctatgattttcattatttgataatgtaatttaattgtttttttctcattgattaaaaatggattagggttaaattgataggggtggcaaaaatggtactttatttaaaaaaaagttctttaacattaaatattatagtacaaaaaatccaaaatcttaaaattactcagttcatttgtttttgaaacgttcaaaattcctaa

SEQ ID NO: 62544 - DNA, 898 bp, Heterodera glycines
atgaggaaaaggacgacaaaaacaggtcagcatggggcctggatttgggtgtgcccaaatatttgtcatgaaattcgggtttcggtctctaggtaagtaaaccaagacccttcttggagaagttcttgccgagattgagaaagattctaaaaaagtcacgggatcggttgtcttagcccggtctctcgtttcttaggtcgtggacaatttcgtctcaaggctaggcccaaaatttcctggacaaaagggcaaccatccaatttccgagaaatttacattggtcgacaaaaatggtggtcagcatgtgtccgaattcagtaccaacctcgatagctcagtggtagagctgcccacagattggatggggtgaacgtgtgggttcgactcccacccgatgcctaatattttgcccatttcttttttaattcgaaaatgaaatttttttttgagcagtagcgagctgaaccgcgataaacgtgaagaagatgatgacacaccgatgcatgacggagaggaattggacgaggagggcgacaaatcggacgttggcttggagacgacggccaaaaacgacactgaaacgaccggggaaccatcaacggacggagagggggtaagaaaatgggaaaattttgaattttttggcaattagccaaccacggaacaggctgaggagcaacaacaacaacaacaacaagagacagtgcaggaaaatcttgaaattgctcgaaaaaaacgtgacgaaaaccaaacgggtgagatttaattgattgagcaattaggaaaggaattttcgaaaaattcacagaaaacatggacggaggcgaacaagctgagcaaacacatgtcgaggaattatgtatgatttaacaaaataagacacatgattgtaacataa

SEQ ID NO: 62545 - DNA, 2139 bp, Heterodera glycines
atgaaaagaaaattatttaattcaattgttcttcatgacaattcaattcacatagtgaaaacattaaatttacttttttcccaaattgactcaataaacaattttcgttgttttggggagggcaatctgacgattggtactccaatttactgtcgagaacatgactgttttaaaaataattcattcaaacaaataaatggaacgaaattttgcttttacgatccatacgaaaaaatttaccttgttaaatctgatgaagaattaattcaaatcaaagcatggggaactattgaaaaaatattttacttgccaaataatttaaatcaaccattcattgaaaatagacggaataaaagagaagaaaactcttcaatcactgaagaatcaaccattgagtgtttaaaaggaggcattattattaaagcaataaatgatatacaagaattacaaatttccattgaaaactatacaattataaaaaagaaccctcaaaaagaggaaataatttatttacccccaaaacttacatcctttgaatataaacctgtcattaaatttataagtaacccagataaatcaaatgagaaacaaatcacatgtcaatcatctcccgtatgtgaattaattaactgtcgattttgtatggaatatcttaaaaacccacaatgtgtagaccagattcactgggcattaatgcttgtaattataatgataattttatatgttatttcattaagcctccaaattattcgaatactcacacgttttatccattggattttacaatttatttttaattgttttaaaagaaaacccaaagtaaatcgaattagaatttcaagaccaaagttaaaaagaccattgatttatttaatcacttccagtttaattttattcaaaatgatttttgcttgtgatgaagtgacaaatttagtcgctggaacaaatgactgtgctgtaacccaagaaggaaaaattgaatgttcttatgaccaaacaacccaactctctattacacctgaacacttaacctgcttaaaactcgacaatacaaaaactaacaccactatggaaacactacaaattacaatagaaactttaacaataatttgcaccgaaaaatctgattattttacgagaggttgcgaattatcttcgacatcacaaaaaagatgctcaggcgctgggaaatgtaccggccaaacttgtcaatcagtaaaaatttcagaccggaatcccgaagtgaatgatcacgctaataatcaaccaggttattcatactgtgtaccatcgtgcggaggatggcattgtcaatgtttcctcgcaactgatggatgtctattttacagaacttatgccgaatcagttggtgacgaaattttcgaagttgttaactgtccatcttggaccattcaggcgacaattaaattgtctatcaatccagaattaacctattctgttgacttgaaacccggaattttaacacacattggtgacgagtctaatagttctatatctatcacactgacttcgacttcaattccaccgacgccgttatttggttcgacatttattatagttcgcgaagaattaaaagcagcaatagttgcgaacggaaatttactcaaaaatatattacggtgtaaaaacaaagaagaagcgcaaagttttagttgcacttttccaccagaagcatgtcaatgccacggaggtgattccgttgtacattgtgaatgtgaaaaaagtccacttaccgaaatatttgctaggcaagagaaccttttacccattaaaacacagggaagttacgtatacttcgattcccaaattaaagctaaaatacagcaaacaacttctcttcaaatgcaagtcacacttaaaggacataaggttaaagctatttatgataaaatatttgtaatattgttaccatatcattggaaggatgttattcctgtactagtggtgctaattggactctatcatgcaaaaacatgtccccatgggtaaaactggaaatatttttgaaagctaatctggaatacatacacccaacaaaaaacaaaaatcattacccctaaacaatactaatgaaaaccccccaattggaaatttccttttgaccaaataactgaatta

SEQ ID NO: 62546 - DNA, 750 bp, Heterodera glycines
atgccggtttctgattttttgagggcgtcgtcacagatcccccaatttgatcaacacagaaaacaaagttatgatgatccaaaaaattgtccgtcgaatttttggggtccaccgaaaaattggacctctgccactgtatgggtcggacaaacgcatgcattgacgaacgggaaattcacagctgacactcatctggtaggagttgcacatttcaccctcacatgctttgcacatcagacagagcgcttttttttttaaaaaaaataattttattttaaatattatctttatcagaatttgttggaatttcagccctaaaatagaagcgtcccaagtttggtggtttcccccctattttggctttttgaaattattatttttaatccaaaaggcaatagaaaggaataatgaagttctaaaatcgcattttaaattttcaaaaattattccccaacggaaaatgaattaaaatgaaaattgaatacaacaattaattttcagccctatttatgagaaatcttaataattattctattaaaagagcttaccatctccaaatttataagccgccaaaattgaaaacattaaaattccattggaaaacatttcactttggcagaaaattgtggccaaatttaatactggccaaatgaaaggggacctcttcacagaagaaaagctcttaaagaagaaaagagcagaggaataaaacacagagaaagcaattcattcattcattgaacaaataaa

SEQ ID NO: 62547 - DNA, 565 bp, Heterodera glycines
atgggctgtgtgtatccgtatgatgagatgtgccaacaacagcgaatgaatgaacaaatgcggtgggttgattatatcgtcagcaaaacaaagaaaatattcaaatttgattggaattctggggttctaattaaggagatccatgtaatttttaaaaaacaaacccaggatcaggatccctaacaactcgatttaaatcctgaaatcctaccagcgttttgtttcgaattaatataaatagttaagctgttatacatgtgactacgataattgcaatgccatctccaacccatacggtccaggcaattctccatattccaacggaggctacgacccttacaataatgctcaacgatacggtccaaacggacggtacggctattattggaacggcgcaatgaaacaacgacaacaacaaaccgcaaatttattaatggcactaaccgtaacactaatgacacaaattgttctaagcattttttgatttgataattcaattttaaactaagcaattgaatactttgtggaaaaagttgcaaatcaaattaccaaagttccaccgcca

SEQ ID NO: 62548 - DNA, 1498 bp, Heterodera glycines
atggtgaccttctcagcttggatctcagtctgtacttcacggatcatttggtcaattaataattgccatggaagcggagaaagagaggccggggatgaagttgaagcggacgaaggggagaaagaggagcaggacgaatggggggatgaagcagaagcagaagtggaagatgaggaggaagcggaagtcggagggggtgaagaggaatggaagagggaggaggaggaagaaggggacaaagaggcggaggaagggaagagagaggaggaggaagaaggggacaaagaggaggaggaggaagggaagagagaggatgacggggacccctcggaaaagccgacggatgccggcaaaagacgcggggccccctgcgccgccgcacaccaagcgaactccgcaccttccgacgcggcacacttttcccactcagagaacgcacaactcgaggccgagaagagacattccggtggaggctttatgagcggaagagcgctgacgctgatggcgtcggaagcggcgatgatgacaacactgaggtgaagcacggcacggaatgggggcacttaatctcggcatttgcccacctttgctgctcctccccgcataaatccccgcaggaggccgcgcactccgcgacgaatggacgcgtcgggggttgaggcgacgaacttaaaaagacacttcggcccgtccgcaaacgtcgtggagcagcagccttcgacatcttcggcgacagtttcccactgcctgaggccgccgacgccgtgacgaacggcctacagaaattgggcaatcagcgagagatgagttaatcaacaacccccaaggcatcagctttaagccctaatttggcacaagtgccactccgtgggacagtcactcaccggcaagcgaggtccgaccgacacatctccttgttgtggttgggacgacgggtttccgacggtgaaattggccggctgattgggccaaaccgacgactgaagtggcacgcggaccgcggtggcgaagatggaggccggcacgcagaaaagagagccgccaaattccatcagcgcatacgcttcgtcgtccgtccctcccccgccgtccgaattggccatcgcttcataattcacatcttcgcaaatcatttgggcacgcgacatcgcaccacagccattttcagagcacaaatcggagcagctcagcagcacggaatcggagttgccgaagatgttcagcagggcggcatttctgttcacgtcttcgcaaatcttttccatgcgcgacatttttggatggtttaggagaggaaagtgagaagtggttaatcggtggaaatttggagatttaaaagaattgaaaagggatttggaaaagcccttttggaaggattggcaaaggacaaacgattgagagagaaaaggttttaattcaaaatcagcagaagaagaagaagtggaaggagttaaaaggcttagagagttttttagagtgtctaaatttaaaaaataaa

SEQ ID NO: 62549 - DNA, 2025 bp, Heterodera glycines
aaggctgctgctccacgacgtttgcggacgggccgaagtgtctttttaagttcgtcgcctcaacccccgacgcgtccattcgtcgcggagtgcgcggcctcctgcggggatttatgcggggaggagcagcaaaggtgggcaaatgccgagattaagtgcccccattccgtgccgtgcttcacctcagtgttgtcatcatcgccgcttccgacgccatcagcgtcagcgctcttccgctcataaagcctccaccggaatgtctcttctcggcctcgagttgtgcgttctctgagtgggaaaagtgtgccgcgtcggaaggtgcggagttcgcttggtgtgcggcggcgcagggggccccgcgtcttttgccggcatccgtcggcttttccgaggggtccccgtcatcctctctcttcccttcctcctcctcctctttgtccccttcttcctcctcctctctcttcccttcctccgcctctttgtccccttcttcctcctcctccctcttccattcctcttcaccccctccgacttccgcttcctcctcatcttccacttctgcttctgcttcatccccccattcgtcctgctcctctttctccccttcgtccgcttcaacttcatccccggcctctctttctccgcttccatggcaattattaattgaccaaatgatccgtgaagtacagactgagatccaagctgagaaggtcaccattccgccgagtgtggttggatttgccaattcccttttctctgttcaggcacttcgcttcgactgtcccaacttccaaatgcctcggaagcgttcgttccgtccggttcgcccggcttctcctcctccgcttcctccgcggtgctttcccttcccatcgctttttttctcacctcccctcccccttcttcagattgacttcccctccaattcttcttcgtcctcctccaattcttcgggatccccccgtccgtttctttgcttttcccaaaacactctgcctcaggcaaaacgtgccaaaaagaattcgctcctttcgctttctcacgaggaattggccgagcgcaaaaaggaacagaacagagcagcagcacaacgctaccgaagtcgaaagtcgaacgttttggagcaggaaagggatgaaatttggcatttggagacggacaacgcgaaaatgagggaagaaatggcacaaatttcggatcaaattgccaaactgcggacgaaactttcactagggagataaaaggggggcagcgggctttgtttgttcatttttgaccacattcattcgcaagtgtaaagtgtcgagccacacacagcccatttatttgtttaccgtaccccactccccccactaccgtatacctttgttagtttttgtcgattcaaaaaataaaatattcgtccattttgtttcgtttggtgctttttcttcgtccccctccctctctaatcccctaatttacctaatcgctcccttttatcttttcctttcccgctgccgttacgcatcgaccctcaaaattggccaacatttcccaccccgccgcttcggctgttgacaaagaataaatgaagccacttttgccctggagggttcgccttttggcttttcctcaccttttccggtcctttgcacttttcctccaaatattaacatttctcgtcattcccttcttccgaatgttttttcccagcttttccctcctcctcttctgctccaactttttgctgcttccaattttgagtaagcgaagtgaaaaagcattggctcagttcgcctctgatcactccgattgtttctcttctcagcttacagcaaagaagcatgtgacggggctcaattcgcgcaaatgccgtgccgttgttgcaaaatggactgctggtattccgtggcggggtcggccatgcaccaattgggccatgtgccgggcgaggcgggagagcgcgaagcattggccacactgcgactgatccgtgcgtgtatgatcgcggaatgcacgccgttatgtgcacacaatttgatg

SEQ ID NO: 62550 - DNA, 1453 bp, Heterodera glycines
atgcttgattccctccaattgaatgtgcccgtctctggcaccaatggaaatgctatttacggggtcggaatcggcattttgaatggtcagaaagaaactgaccaacaacaaaagcgatcggtgggtgattaagagacgagaaggaaaaaaagggaagagggagggggggggggatacacactaattagcgataataggccggggaaaattgggggggggggataggggtacgtaagagggggagaagcattcgccgaatgactctttaaacagtggccccaattatatgcccctttcttttgcccattttttgtgtgttctcttaagagtgtttttgctcgtcaaaagtcgtcttcggaggaggcggaccggaagaagcgactgacgatgccattaatatacaggtgaagtgaaaatgccaacccaacccaattggatgcttaatataaatcccgctttccttttctctctttaagagcagagaaagtgaaaataataataatttgttggcatttctataattgctttaaatgattacgtcatttccaaaaagagaaataattgccgaagtgcaattataattgaccaatcgttggctaattacttcaatgagttaaacttgctgaatatttcagaatgtacgaaagtcaaagtgacgaactttgcggcaccgtccgggggccggacgacgacgcgtttcacccggaggaggcatcgaaacgccttcgccacgccttagccgccggaattcgtaggggggggggagagggaaaaagcaaccgaaaactgtgcagaaagtgacgacaaaacactgatcgacgttctgttggagcacaacaatttccagcgtcagaaaatcgccacagcttatgaaaatatgtacggaaggtcagtgtttaatggggagaagctaaaggaatgaaatttgcaatttatttgaggattttggcggatgacattgaagaggaatcggggggccatttcatggaatccattttggtaagaagggcaataaagaatggggggaggtaattagtgggaagggggcaataataaaaggggaagggcactcagagagggggggggggaaaggacgtaattggcacagagaaaagccatccctcacttttgttcgttgaaggctcttctccaacctgcgcatgtttattctgcaaacactctctattttgcgatttctgtgagtcaatgaattgccaaaaacataaacaaatccccgccttttgttagggcaaatccttcgagcgaagtgccgcggtggaaattgggctgaccagtacggcatcggttggtatcccttttaagaagtgtcaattgttcattcattttctttccaattcagcaactcggcgtcatccgcgacacttaccaagtccgttttaccagagaataccgtaacaaccccacaaccaccgtaacacttttcacagaatga

SEQ ID NO: 62551 - DNA, 362 bp, Heterodera glycines
atggattcggacacggaggaagacctcgacacattgcaacgattcgacttttattatgaggttggacaggtccgtcctgtccttttaagcacaaatattgcaccaattcagcagacgctgaggtcaaacagagccttcgtttccgacctctcttccgaagaagacgacgaattggccaattttgtagtacattcagttgtgcgtttttaaaactgatgattgaatggacttttgaatgaatccgtcttcaggaatccgaagaggacgccaacgatcacgagtctttcttctcagaaatcaccagcggtctctactcaccgtcgccaatgcattcgcccgactcgcaatctgacgacaactga

SEQ ID NO: 62552 - DNA, 351 bp, Heterodera glycines; identical to SEQ ID NO: 53910

SEQ ID NO: 62553 - DNA, 346 bp, Heterodera glycines
acacccgctgaacttaagcatatcagtaagcggaggaaaagaaactaacgaggattcccgtagtaacggcgagtgaactcgggaagagtccagcgctgaatcgcagctcctctggggttgcgaggtgtagcgtatagaccgtgagcttgggttggcccgcttgttcaagtttcccttgaccggggctccagagaaggtgcaagacctgtccaactggcggtgcctacccatctttacgtgtcttggagtcgggttgtttgggatcgcagcccaaatcaggtggtaaacttcatctaagactaaatacggccacgagtccgatagcgaacaagtaccgtgagggaaa

SEQ ID NO: 62554 - DNA, 327 bp, Heterodera glycines
atgaggaaaaatacggcgcattttatgacttttattttaatcgctgttgcacctcttctaatcacttttgtacctcttttatcacttttgtacctcttatcaaatttgtacctcttcatcaaatttgtacctcttctaatctctggtgtacctcttctgatcactgttgtacctcttttaatcactgttgtacctcttctaatcactgttgtacctcttctaatcacttttgtacctcttttaatcacttttgtacctcctataatcactgttgtacctcttctaatcacttttgcacctcttttaatcactgtgaacctcttctaa

SEQ ID NO: 62555 - DNA, 346 bp, Heterodera glycines
atgaccacgtgcattttcggcatgaatgagtcggatggcattcggcaggacccggcaacagatgatgaagtcctttccggtgacgaaaaagactcaatgcgcagaaaggagagaccggtcggagttgtgggccgaggccgaggcgcaaaatggacagtggaagacgaagaaggggagggcatggggacggagaaggagcaggacggggcatggccatcgacgggaagcgcatcggcagcagaaggacgaggacggtgcatctgctgaagggacgaattcgatttctgatttccgaatgactcgatcagcacataaaattgagttattccttttaatggcacgaaaa

SEQ ID NO: 62556 - DNA, 393 bp, Heterodera glycines
atggcaactcgacgtcaggtccgtgtgttcacccgagttgatgacgcaattcggcacattcgtgacacaacgccacgcccacaggaacacgatgggcatcaaaatgccaacaacagcgccaatttgaattgtggcactaatactgatcagtcattggctgatcagcttaagcaacatgaaaagccgctgacaaatcaaaagcggaccgcattacggcaaattttggagaagcaacatttggtcaaggagcggaccagcatcaatttgttggcccatctgcgcgaggcggctgcccgtggccaacgcttggagttggacttggccgaaattcggcctgacggatgcatcagcatgagcattgatctgaaccagcttcgaccgcttgccaattga

SEQ ID NO: 62557 - DNA, 233 bp, Heterodera glycines
atgtcgtcatcatcgtcgccccagtcgcgctacgactacctggactttgctggcaaaccggaccaaccgcagcagcatcagttgcgacgacaacagcagcgagcagcgccgcaacaacgcgtcgctgtgccgccaccggcgctgcgacgtgctgctgcgtcagcagatgaaccgctctatgcgactgcgtcttcacaaatttactcgttgggcggcagcgaagacccgtacag

SEQ ID NO: 62558 - DNA, 1905 bp, Heterodera glycines
atgaaaaaggaattaataacggttgcggaaaacaaggacatttttgacaaaatcaaatttaggactaaatttgaggttcgtttcatcagtgaatgtctaacaaatttcattgcctctgttattttttaggtttctcacgcagtttggaacccgaaaatcagtcttattgcgcttgggtcacttgatggagaagtggtggttaagcgttacttgtggaagaccgggtggaaggtgctgcttttgaattcgattagtttaaacttttccctttttaattttagagaaatttttctcgtgatgattctgccaaacactttgattttcttggcgatgtttcgtccgttccgtcgtcctccaagtcgaaggatcagttgttgtttctgtgttggtcccccgatggccaagtgcttctcactgttttccaaagtggcttactctattatttggacactcaaactggcaacactcttttcgttaaaaaattgtcatattcgcctttttgcgttgaatggctaaaatttcgaccaagcattgcactcaaatttccgcgtattggcgagcagtcgtcgttgacagcggtaaaatggcaaagcattggaacattttcatgctttttttgcaatttattttaaaaacggattgcttttttgacagcaaaagcgaatcttatagggaactaaatatgcttttctgtttcaaaggtgttaaactttccgttggtttaggctgtcaattccaactccactcaaaatgcttctactgattgtgagcatcgaaatgtttgttgtgcaattgaacacttttaccgccatattttgccaaattcgctctcttcttcttttctttgtgttttatcttcgactggcactgacactttcgtggacattttttctggcggaattttgctcatccgtcgtttaagcattaacgaaggtaaaatgagtgggcatttttcttcttttttttaaacaaatttgttcataatcagcaaccatttgtcgttctctttcgaatctccaaaatgaattttttatttacgacgaaaaaatacacattctctcccgagactcgaattcgtttgaaattttgcgactccctggtgaatttggtcaggaccatttactcatctacgaacaacttgtggattggttggtcttttttatggtttgcaactcatcgatcatttaagttattgttggatgtcattctgtaatgtttaccgtatcgcttacgacttacaatcgaccaacaaagctctgatggactgtgttattctgctccgatcgcttttggttaaattggaggaactcaacgagagccaaaaatgggagactatttctgaacggttggacgtttctgacaaaaaatgaaaaaaaaaaaacatttacagacttctcgacactcttttgaagatttctgcagatcatccagcgtttgaccccaaagaaattttagatgaaaattgtgcaaatattttgaatgatttcgaaaaaacatttcaagttctcaataattatggaattcattcattgtaagttttgggaattttctgcctttctctaattcgtcgcttccctcacaaattagagtacggcagcccataaataaaaacaaatgctatgttttggcccccgatgaaaaagaagccataatccaacaaattggtcatcaaattgaagaaaatagcgaggaagagacttctgatgaggaaaaaatgtccgaggatgagaacggagttggacacagagaattggaaaatgatccgatcagccttcactcatttatcttcggacattctgaacaaaggataactgaagaaagaatggaatgttgatcaaacaatttcaattgttttatttaacgatttctgcctccattttaattttttatttcctaactattaaa

SEQ ID NO: 62559 - DNA, 408 bp, Heterodera glycines
atggtggaaagtggtgagagtgaaaatgatcataataaatggtatctgattttctgtgtttgtcccgtgtctttcttctctctgttcgttatggtagttccatcggccatcactagcgatggtgatgacgttgttgttccatacgactgcgatgatggccacggttggatgcccgagctgaagaagcggcggcggcaccatggccagtggaagtgccctggaaaatgagtgactgatgacccatcatcaatgacaagtataaaaaaacaaagggacaaagatagaaattaaacattggtgcatgccatgaatgcttaaattggttgcatttgttttttcaattttaatacaaataattgatttgttttgatgttacacacaccgtttcaaaaaacgagacatgaacca

SEQ ID NO: 62560 - DNA, 177 bp, Heterodera glycines
tcgagaatctgatttattaaaaatttaattctgagtgagtgaaaggcatcgtctgtgttcaaaacatggacaaaagcgtgaaagagacaaatgctgggagatattggaaatgatcaaatattacaaatgaaacttgcaaaaatggaacatttgtccataaggccaaaagcaagaaat

SEQ ID NO: 62561 - DNA, 90 bp, Heterodera glycines
taaagaaatagtacgccaaaatgagagaaatgtatttttctctgcactctctatttattggttcatgtctcgttttttgaaacggtgtgt

SEQ ID NO: 62562 - DNA, 607 bp, Heterodera glycines
atgcctgcgtgctcatcatcatcatcaacagcagcaaatgttcctcagccgtcgtcgtcgtcactttccgccgccgaagaattcgctaaacaaaaaaagcggaataagaacaacaaaaacaagttcaacaaaaagcaggtagccttgattaatattgaaaaaaaacttaaaatttcataacacttaaataactaaaaaatattaacctttcatagtcttttaaaattattataaaaatggttttaataattatttttaaaaatatcttccaaatttcttttctttttagccgccgcccccatcaatccgcattcctaagggcaaaacgccgaagaaggtccgtccacgccacccggaacccgaccagccggacgaccaatatgagctccgggcggtgttggcgaccgccgaagtggtgtccgggggcacgacacatctgtgtctgtatgtggatttccttggtataaaatttttttttgaatttttacactaaaatttctatttaatttcgatttaatttttaaatttcagattatcaagggcaagaggactggtgtttgtcaacgaaaagcgacgccctagaactgacgcacttccacgacattga

SEQ ID NO: 62563 - DNA, 525 bp, Heterodera glycines
tgaacgcttcaacaatgcatttgcctgaatttttaaatatttttggtcagtcttatcaaaacacagaaacgaggaaatgtgtgagatagagaaatgagatgcaaaaaacaatagggggaccaacacggaggaaggcctgcctaccgcttttcacagctccgaaataagcattgaaggggggaccaacacgagggaaggcctgcccatcaacacccagatattaggaaatgtgagagagaaagagagaaatgagaagcaaaaaacaatagggggaccaacacggaggaaggcctgcctaccgcctttcacagctccgagataagcattgaaggggggaccaacacgagggaaggcctgcacatcaacacccagactttatgaaatgtgagagagaaagagagagagagagagaaatgagaaagaccaatccacctttgccctttgcgctggcgtgacatcgacagaagatgaaaacacaaatggcaattgttgctcgaccacttgcggaccattttgctgctgctg

SEQ ID NO: 62564 - DNA, 882 bp, Heterodera glycines
  unsure (1)..(882): unsure at all n locations
atgtctgaacaattcccatcattttatatggccatcattttcggtgtatttttgtgtttgggctttgtgaaaatttatgaggtaagggacaaattttgaaaaaaaaccgttcttatgtcctttaccaagggtagcgttcgaaaatttctttaaataaaattctttattagtcagaaacttcaaaaattttttaaaataaagtgtttgaaatttaacccttttaatttttcactattagagaaaaatttaggttcacggattgacctgtccacacggcctcaaatccgagacggaaacacggaaaccgatttcggagagcaagaatgttcagtgctacatgatgaaaaactggttaagcatgagtgttatatgcttaactgctcggatggtatatattntaattgagtctntcttgagataataaataaactaattaataaatatattttagttttccagaaattttctttttatagttgcccaattaggctaccaccctccaaactcaatgataataaatatttaaattttaaatattattttaatgttagtaataatattttgaaaggaagaaagtaataaatcctataagcttaaatcaactaaactaaacatataattgttatagtagtgaaagttttgagctatcaaatttgtaaaataataataataataattgttattaattatttttaatataaaagtcgtataaattgtaattaagccaaaaaacaaatttttgctataatttatttaacctttttcaatttttataggacatcaaacgcgaaaagaatggggatgcgcttcagatttcacttccaatttggaggagattgcgaaaaaatgcggtaacgggcaggccggtttaggaaaattaaa

SEQ ID NO: 62565 - DNA, 537 bp, Heterodera glycines
atgcccaacattcttttccaactccattttttggtctcttcgctttgttctgcgcacaatgtgacatcgccagcagagctttccgcaattgcacctgtaaatttggaagaatctagaaaatggggttgggttggacgaaattttgattgtgactggacaacttaaaaaaacccaaatccgtgtttaaaggcagaaagaatttcggatatattaaagtttggtttttacaatagcatcttttcctttcctcgtaaaaaacaacttcttgttttgttcattttcagccgaacacaaatgatgaacgcgatgagggaaacggaagcgaattggaaagtacggtggacgacgacgagacggaggaggacttggagatggaggacgtggagacggccatggcacgccaacacagcgcggacggcgaagtcattttctaacattgataagaaaaatttttgacgagaggcaccccctggcgatctttttttgttcattggccaaagcaattttcattttctgttagccgcccttggtattaaa

SEQ ID NO: 62566 - DNA, 618 bp, Heterodera glycines
atgtttttactggtaccgtatgttctcattgtactgtataaattaatgttattatccaataaataatttcgcttaaaatattatttgattcatcatctacagtaatttaggcttggtcggctttaccggtgccagcgctcgttacggtggtccatttgttaccctttcggagttgaaaatttgcctagccaattacgtaagtgtcagcatatttattgcccatctttttatgatttaggcagtaaattcatacattttttcgtttattaattaatatatttagaggttttgagaatttatagtaatttcttatggaaaatgaaaaaattttcaaattcgtttttttaatgggtatcaaaaccaatttttaaacaaaaaataatggctttctgccttatttagtgctcttttacaatttattgcctaaaaagcatatatatattatatatttttatacatattttggtaaacatatttaagaatttttgtacttaaatatttcagtttgtatcagggttgttccgggttacccgatacccgaaacccggcatttttctcgacccgaaacccgacccgatgattttgggtcgggtttcgggtcgaaataagcactggtaa

SEQ ID NO: 62567 - DNA, 697 bp, Heterodera glycines
atgagcaccttttggcgtttagcattggtgcagaaacggctgtccgattatttcaatgcgatttgtgaattcaatgggaaaaagtaagttttggatgggaatgatcagtttcaaaggccgggaggaaatttcaaagcaaaatgaaagaacaaagatcactttctttgattttacttagccacattaaaccacccgccaaagacaaacattagtaaaaccttaatttatacctaaagggccttcattgtttgaataattaggaaccattaaattttggccatttcggcccggcatggctaagatgtctgctgatcacttgtgctttactctttgaagaaattccgcatttttagccctttttacgaccatttggcttttatgtgctgcgacagttgctgtgcttttttgttttggctttgaatgcttaaaatctgcctttattttcctggtgctgcttggtaaacttcgtgtttttgtgccccaaaaattccaaagttttagtcggattttgcattatctttttaacaaaatccacgcatttttgagtcgccggggaatttaaaaagaagtgttctaccacactttgccattattttgtaattgtttgaataattttatatattttccaaatttgagagccgacgacaacaccatcggcacaatgaggccccaacaattgtcggctgcatcagcctaa

SEQ ID NO: 62568 - DNA, 483 bp, Heterodera glycines
atggttggtgttgaaccttcctcaaatatttgtcattcataattatgattggctcctgcttctgctgatcattgttattttgttgtttttgttgtcaatgttttttgagaattgcccaattttcagagccaacgttaccgtttctttgcggataaacacttggaactgttgcgacgatatcacgaatggatgaaggattcgttgcttctactggagaaagaattgaatttgggtggtggggtgggcgatgaattggacaatcggcggagaaatggccaaacggagagacaaatcagcaaatttggcagaaaggatgggggagagtcggaaaagagccaaagagacaaatggcaacagaaagagacgcaaagagagcaaaacggagaggaaacggacaaaaggggacgaaaggtgagaataatcagaccaaatgagaaagtgatcaaaagggaggagggaagtgagaatgatcagaccaaatga

SEQ ID NO: 62569 - DNA, 307 bp, Heterodera glycines
atgctgacaagagatttgagggacagtcaagtgtggaaaacggtggtgacggtggacggaattagtggcggacaagcggaacggcgggggcagcggagcaccgcgaaagacgaaaagcggcacggggacacagaggcggttgcactgcgccgccacttttacgccgaaaagccaacaaacgaacaatggcagcagaacggacgagtggcattggacgaggacgggcacaacgccaaccaacaaaagttggaccgaggcgagaactgtttgccattaacgcacaaattcaatcctttagcgccgaatg

SEQ ID NO: 62570 - DNA, 910 bp, Heterodera glycines
atgttccattcttcgctgctttacggtgccgacagttccgtgcggactgccgctgtccgtgcctatgttgcgtttgtgtgcgacaatgaggagaacgacgctgtgatccgccaactgtccgacttggtccctgccgtcatcaaagtgtgccaacatgtcgtggacactgaggacgacgacggtgcccagtgcctccgatttcatctcattaatcaacttttaaagatgtgcctttgcaatgtttgggcgatttggcctccactcttcccaaaattctcgcccctcacatgagcgacattttttcgctttgtgcaggttttgcaaacaaatttcaagcagaacggcactcggatttacaaaagtgttttagggactgtggccaataaagaaaaggacgaatcgtacagacatagtggacaattttcccattttggataaagaataaaaaatgtttaggtggcctggaagtgatggtttccatctgcgaaagttccaacataatgcgaaaaaagggagcgctgtatttgccaccgctgagtgagtgaaaactttcatttggcccattcttatccagtccatttcagtccagcaatgtctgcagttgatgaccgagttggacgacgaattggacgagtggttgcaaatggacgacgccgaggacgaattggaggaggaaacggcaacaattggggagacttcactcgaccgaatcgcttgtgcactcggcggaaaggcggtgatgaaccacgcgttgcaatgcatcaacgaactgttgaacaacgaaaattggaagtgtcgtcatgcggggctttgcgctctttccacgattggcgagggatgcaagcgccaaatggaaccactgatccccgacattgtgaacaattttgtgctgccgaaaatggccgacccg

SEQ ID NO: 62571 - DNA, 2238 bp, Heterodera glycines
atgcaatctgcagctgttcatttttctgctactgaagattgtgaaattcccgatgcgccattagcacaagttgacgaattggaaatggttgagggcagtttcgctgctttctcttcgtcactgaccgatatttcagcgggagattggtaaagacaatttcgaaaaagtatttcttcttttacattttaagtgagaagtcgcagtcagacgagggccctggcgaagatttgtcgaattgttctgtcaatttgtcttcgtcgctgcaagacttagtcgagtcttttgacgacaaagtcgcagtcgttctgaaggacttcgaaaaagatgctgaaaaaatagcgccaattaaaattcgttctcaggaagaaataatgtctgaaagccagtgagtttgggactgaacattttgtagtaaaatattaaaagttattcatgttgtagtcaagggaaaataaaattaattggaaaaattaaagttttttttttactttaatttggaaacagaaaatcttggcagtctgtcattaaaaatgtctttctttcattttcagattttggtggactttgactggcaattatggaaatttgccgccgattgacttcgataattcgcaaatccgaaggaaacaattggaagcactgaatttcaattctccgaaagtcatttcgcctgtctttacactaataaattgttttttgttttttttgttcttagcagggaacgccaaccgatcgaagtgtcgtctccgactgcgactcgtcggaggacaccgaacgaatcgactttcatcgactcgcaactgcgcaaacacacaacgaaaacggcgaatccctttcctttaacgccgacaaagtcatcgaggaaatcgatgagattttacaggtaaatgttaggagatgacttttttattgtgcaactcaatcaggccccagaccagaaaaagcgtatgaggtggaacccgaagactttttgtttgctcttccctctttttcccgttgtattttaccttctttcgcgaaaaatgaatatttggattaaattattaaaaaaaaaaaattttttttttgcccttttggttatgggtttgatgcaatttattcgatctaaaaatttctattcaattaaaaaatatttatccgtttaactgttgaaataatagatttttttaatggattttcttcacttggttttcatccatttcttttgcgtttttaggccggcgatttgatgaatcagtcgttggccacaaaccgtacgattgagtcggttgattcgatgtattcgtcgatgcgttcgccaaatgtttattcggacattgaggcggagttcaagtccaaagagagggaaggcataagtgtgtctatcgaaggtccgccatttttgttaattttttcaaggtttctcccattttaagaaatgaattcgttcacccatccaaactgatcacaattgtcagtgagatggagcaaatcattcagttgtacaacgaggaattggtcagggaattggcgcggaaggacgaatttgaatatgagaaggaaatgcgcaacaaattcatcactttgttggtggcggtgcaggaaaggagaaggaaacagaacggagggggaggaggcaaaaagcaaaacaaagggacgacgaccgaaacgaacaacacaaacaacaacaacaacgtgggtttggtgtggagatgcattttgatcagttgggccattgtttgatttcagttggtctccgtttccattcctttcgatgattcgaccgatggtccgtctctctctgcgcttgaatggctcgtcaaaagtcgggattttcccccttttcacactttggtatttgtttttcagttcttcaagcaatgatcgacgacagtgtccatttgccgtctctgctcactgattacattctcaacggtcgttgaattttgccgtggggctcacttttaatttgcccttttttcagttgtttgcccttcaaaatttgccactgattgactttttctgtgccgattagcatgccaattctttccctcgactgctccgtcgttggctctttccattgcatttgcttgtggcctgcttttccgttacgactgtctttagaatagaaatggcgtcacattgcttaattcgtcaatattattgtatcatttccaatcgtttatcaaattgcccagactgtcctattacaattagtccgatctcatcgcatttaataatttcgatttttgaggtcca

SEQ ID NO: 62572 - DNA, 830 bp, Heterodera glycines
atgggtaattttggacgacaaatcgccagttgcggattcgccgttcttttgatggcgttgcgctgttccgtcggcgatggtacgttggaccgattggtggaaatgggcaaacatttcgggatcacttacaacggcgaactcttttccggttggttctcttttgagggtcatttaatttcgttgatctcaaatagcattttcaattagtacattggtcaacacttactacatttgaattcattttttaagctgattggatgtgtgaatttgtccaaaaacattggtcaaacgcttgcgaattgcgagtggcccaatttccatctccaaattccatcgtgcggcatttgatttctgggaaaaaagctcatcatcaatgtacaacgacagttttggtgccgtacgattgtgacaaaaatttcgagccatgcaatcggcagggcgttgcagcacattgggcaatcattgtgagttcaaaccaaaggcgtagccgaagtaatgaaccaactcaccgaattacaaaaatgtcaaaaattaaccattctcgaccaaatatcttaataaatgaaattctataatgcgtaaatctttttttgtgtaccgtgactccgccaaaggctatggctacgcctttaaccaattaattggtaatcgataaagaaagaagcaattaatttgagattggatttgttatttttgatgtcaccgctcaaaatgggccagaaaatcaaaatgcgaaagttattgcatttgacgaaaatgacttccgctgtgatggctttgacaacgaacaccttttgtatcttatagcgcttcaggggaaaagtcggtaa

SEQ ID NO: 62573 - DNA, 988 bp, Heterodera glycines
atggactatggacggaacgaaggcattctgcagattcgcgagttccaaagggtgcgttttgcgcgtgacggtgctacgatagtggcgggtacattaccttgttcttcgtagggcggtgccgtcagcaacattcccggccttgtcatcgctgcgcaggaagggctcgaagcccaacacgcaaaagagaacaaaggcggggacaaagtcaatctgccgaccaatgacataacacgtgagagagttgtcggaggaagggcatttatccatcagggctcgacttaactgattttcaattacggaaatccgtaattacggcggtttttataattacgaccatccatggcatccattcacagccattggctgctcaaatggaccgtttagtaatgcacgaggccattccctttctgcctttcccggtggcgttggcctgtctttttctcaacattgtcttgcccggctcaggtgcgtcaattgcattacaaaaagcggcaattacccaaaaataaatcgcaggaacaattttgagcggcgcttcggcactttgcatgggtatttggaatttgacgaattaatgaatcaattcaaaaagcgccagggaaagaatcccacgtaattttccatttgttcaattgactttttccaggccaaccacgggtgaacatcaaagaaggtcgaaagttggtgacactgctcgtgaatttgcttgtcgggatcagtcaattcttcacaatcacttttatgttcgtcggatggttttggtccatcgcttggggcggtctgatcatcatccacgcgagtccgtttcacgagtgcattatgctcccccccccccctccaaactttttaattttcaaacagaaatttaaaaaaaccttaggaaattttctaacaataaaaaaatttcaagaaaaaaaaagattcatttctttttcagtgcaatacagagaagcgttacaacagcgcaggcaagaggcagtggcaaccg

SEQ ID NO: 62574 - DNA, 1740 bp, Heterodera glycines; identical to SEQ ID NO: 6708

SEQ ID NO: 62575 - DNA, 680 bp, Heterodera glycines
aggaggacactcggagacggaattggcacgcgcatcccccgcggcattggtgcgacgcttaaaagccatttgggggaaaacagacgaaattggagatggggagggaaattatggcgaaagaattggcattggattaatttaaaataaattaaataaatccatcgaaaatgtaaaaattaaaaatattttttaaaaaataactcaacaattttcagattaacaatttgctcggccgcaacaacggaaacagcgcacaacagcagcaaagtgagcagctgacaatgggcggccgaggcaccaatggtggcaaaaaaacgaaacaataaaacaaaacaaaatgaaaaaccaaacaaaaatcgggcgctcccccgggggcaaaggggcgcaaaagtgtgacattaaaaggtgtcagttgttgcgacccattcattcattaattcatacggtcacttgagagaagagagagtgagtgagctgaaagtgatcaacgcaaaatacggtctatcgaagggaaatcatttaaaataaaatattttaaaaaggaccgattttaatgggattttcaatcgttcgttgttcagtgatcggacaccaaattgcgcagcattcggcggctggtctcaacggggcgttgctgcagggcatcgattttgccgcgaatcaattggccaattatgccg

SEQ ID NO: 62576 - DNA, 314 bp, Heterodera glycines
atgtctaacaaaacgaaggaaccgcttgctttcgtcactggtgtcgatgataaatgtgtgtttatttggtcttcagaatatccgttggaagaattacgctttccagtgaaattgggtgcacaaagggtgggtgtgatcccgtctgtctttttcaacttaatctgtttcagcccgaattgggtcaaagggttcaatatgtttgcacaaaacctccacatgaggttcaatatagcgggatactcaaaagaatcgcgaatccgtcacccataataattctgcgtgatggtgaatttgtggtaatattagggttttag

SEQ ID NO: 62577 - DNA, 167 bp, Heterodera glycines
atgacaaaatttgacgagttttctctttacagcattggaattgccgtgcccatcagcacttcctccactatttgccttgacggcgacggtggcatcaaaattgaggaggacaaacagccgaactcgttcaaattgttgttcaagcccgtctccatccagtccatgtg

SEQ ID NO: 62578 - DNA, 981 bp, Heterodera glycines
atgccaccgtcgagggttacatttcggcacttcgccggggctcacggctgttggaatgtcattgatttgtttttaatgaactgtttgatccccccccccccccatccttcgaaaaataaaaaaagaataaatttgtaaaaaatttcaaatttttacaaaaaaatttttttgtttataatttttcagattttttaaaaaatccaattttcagaaaattttgcgtcctcttccccgaaaaaacccaagaatttttgaacgaatttctaatcccaataaacatttttttagtggatgtgtttgacggtgaacatggtgagccacaaataacgcacaaacgcacattcattggggcgatcagtctgcgcaatgtgttgaaatgtgtcaagaattacgcatttgtacaaaatccgtacccagtgatccgtaagcaaatttttttttgaatttacggcttcaaaaaccattatttttttcccttttcggttcagttaccattgaaaaccatgtgggcattgtgcagcaacggatcatggccgacattttccaagaggcacatataaacataattaatattttttttgcacttaaaactaggttccgtgtcccaaaaatttaaattagcgtcaaaaaagtgcgcagaaaactattaaaattttttttctttcccccgctgcagattcttggtgaccatttgctgattccatcggacgacttgcacaccaagccattgccatcaccgcagcaactgaagcacaaagtgttgttgcgtggcaaaaccgccggtggtgccaccactgctgacataaacggcggcggaacgcacgtcgaaacgacagcggcgacaatggcaccggcgagtgttgccgcaaacaacggcacgccgtgcaccgcagcgccaccaatgggcactgattatgacaccagggaggagagggaggacagcccgaagcagtcgcaacgcaatctgccggtggacccaaa

SEQ ID NO: 62579 - DNA, 2574 bp, Heterodera glycines
atggctgctgctgctgctgatggacagatgatggtggagaacaacaaaaataataataataataacagaggcggtggagatggagaaaatgtaggagcaacaacaacggcggggaataattggggtgggaaaagtgggacgatgacgacgacgacgacaccgctgggcaaccaccggacagaaaaaaataacattaatggtggtggtggggtggtggtgccattcgatttgccggtccgtcgtgttaaaaatgggcgcatcagcggggtcagtcgggtggcgctggacatctatgaggatatgctcagctatggcgcaacgcgttcatcactgttgagcagcatcagcggatgcagaaaagggagcgctggggaaaggcgcaaaaaaggtgtcctcatctttatccaccatcaaccaggggcgcggggatgtcggctgagtttttgattcccgaaatttttggggaaaaaatcggtcttagaaaaaaaattttttttttttgtatatctaaaaaactagagctcgctcgactctgctggacctgttgtaacccgcaatcctatatatatatttttcttattttcggcgcgactcattttataattcaaaaatatgtattatttcgttttttaaaaataattaaatgtttatttttttatttaccataatttttcctaaaaaggagtgaccttccgtgcttcgttttctttttaatttctctcaaaaagggaaattttattgaaaatatcggaaatttatttaaacaattttctttttgaaatggcacgtggatcaatcaatagttgatcaaaattaattgggctttcgctttgccaattaaaaaaaaaccattccttttcaagtaattttgactgatgtgcttgaaattcggcaaggctaccgcaccgatgggctgcacaaagctgccaaggactacaaattccaacggatggcaccggtcaacaaatcaacagaaaaattaaatgaaacaaaaatttatcatttcaggaacagcgatgcttctccatcatttgcaaagtgtgtaatttggtggcaattaaaaaaaaagcccaaaaattttgatattccatagaaagtcgaaaaccaaaaactcaaattccggttttttgtccaagtcgacgttagggattcggatttggaattcactcaaattgtaaaaattgcgcaggaaattttttttcgcatttttttttcctcaatcacagcaccctcgctttgtgtgcaaatcgcttgactttgtggcggtggacttggatcagacaaccaactggttgaacctgttgcaggaacattttgccaatgtgttgcatttgtcccaaaatacggtgaccaatttcaatgagcaaaaatggctgttgcagaactttcgtcaagccgatttgaatcgaaacggtgctgtgatttacaaaaaaaaaaaaaaaatttaaatcgtacaaaattttttttttctttttttgctaaagatgaaatttcgttcggcgaactttggcgtctgctcaaacgtttgaatttgcagcttagtgaccaatatgttgaagcattgttcaaggtgggcttttttgtgttttggtaattcaaggaattttttcattttgaatttggacaataaaattggattcaaagcctctgcctgtgaattttttttttgttttttaatattggccaaatttattaagaattgctccaaatttatgaaattttaccactttaagtccacccaaatttcccaaactttaataattagttcgtcctctccttttggcactgaactctttttcaaaaattttgttacaaaacgaggaccaggcgagtttgattttttcaaatttttttaaaaatttggatttcgtctaacacaccccttaaccaatttgttatctcaatcaaatccgttttttaattaaaaacaaaatttataccatttttctttttgcaaggaaagcgtttcaaagagcggccggccgcgcaatgcgttgaatgagcaagaatttctccggttgttcagcgtgctcaccgatttgccggaatatcggagcgttttgcgcttggccaacggacagggcaatgactttttggacgcggacacactccgacaatttctcaccgaagagcaacaggcacaaaaaattttttgggggggcaacatttttgaaaaagcgtctattttcggcgtcaaaatattttaataattgaaaaaaaacaaattataacattgagtaatataagtaagtgcaaataaagattggataaaaaaaaggctccgtaactaaaaaaaactataggtactgttgcaaaagaggcactttagcagttttttcgccaaaaaatgattttttttcccatagtttagccactgcttcgaattttttttttaattgccgaaaaaatctactaaaaattaaaatgaaatttttaaaatttagttcaaagatgttgatcaaaggaaggcggaggcagtcatcgcattctgtgagccggccaattttcaacaggaaaaccaaaaggatggtgagccgtcgtcttcgtcgtcaccaaaagtgttgtctgtcagtg

SEQ ID NO: 62580 - DNA, 433 bp, Heterodera glycines
atgaaagttcttaaataaataaacaccagagactaaattaaaaaaggaagtcaatggatgtttagaatttttctatttcatttcgaaacaacgaaacaatggaacagttttattattaatgtaattgacgtaaaccctaaagcctaggaaaatttttttttaaataaaactgaacctaaaataaaaaaatttaaaaaaaacaatggcaaatctctgatcaattaaccggattcaaaatatattgctgaattacagacaattctgcttgctgctgatcatccgaccatattcatggcacagtatgcataattttcataccaatagtcagacatgttgccaaactcgaacagttgtgccacctggaaatccctgcagtgcaaatcgcagatgacctgagcgcaaaaaaacttttttgattaaaaattcaaataaa

SEQ ID NO: 62581 - DNA, 55 bp, Heterodera glycines
atgctccattcaaaaagtccttataatcttgagatcaacgaagcaggaaaaaaaa

SEQ ID NO: 62582 - DNA, 117 bp, Heterodera glycines
atgaaaagagtaatttataatttgccatttcccaattatcgccagaaaattgcatgcaagcgaacctcagtttgtatgctcttaattgcacacgctcttcatatgtttcttgacggg

SEQ ID NO: 62583 - DNA, 609 bp, Heterodera glycines
atgggttctccggacgacatggaccagcccttggtcaggggagagcttagtaacaaattgaaagggggtgtcgatgtcggcattgccggagtgcagctgctagcggtagtttgaattttaaaagggaggggggcagcagcagcaaaaattacgaataggggaatttagtatttttgtcctttttatagcattttttttgttgaacaaaagaagcgggacgaaatggtgcaagaaaaaaagcataaaatagaattataaatttagactctaataaattttttacaattttttgggctttttttatatttttaaaaagaagtaaaaatacatttttcagaaaatgctcaatgttcggccgaacgaacgaatttccgcatctgatgcattgaaagaagcgtatttccaaaacgcggaatcagatgcatagtgaaaatgaagaaaatttagaaaaacaaaatttctgctattatgtatgatgatgtttttatttaatgtttcaaaattaacttttatttaactaaccatgaaaaaatattaaaacgaaatgcaaagggttggacggacataaaaggggcaagcggttaaaatggccgaagggaaaataataaa

SEQ ID NO: 62584 - DNA, 632 bp, Heterodera glycines
atgcccggggtgaatcatattcagcattttgcccgagtgatcgacgcgaagaatggcgcgttgttgagaagcggagaaaggatcaaaataaaaattccaatcgacaaaacggacggatcacttgaagagttcaaatttgacattaatttgatgtacgaaggactcagttcgcatccgatcagtgagttcaaagtgccggcagatcaaattaaaaataccaaatttataaaaaagaaatattttaaattttattttaagttgggaaaacggtcatgaaaatggcgagtgaacaacacagaaagattccatttcagcagttttgccagtcaaaaatttagcgtaagttaaaaaggttatgttgggataagacaaaatagacatgcattaatttattgtctctatcttttcccttcgctattttccctcaatgtcttttcctttctctctgcccgtcgaagtgcataaatagtgaatgttccttacacatttcgttctctccccattcattcgcaatttgccttctctactcttctcttcattcactctctctcttctgacttttattattatttattgtcgataaatatttgtgttctttggacacaacattttggcgcggtcagcgaaggcaa

SEQ ID NO: 62585 - DNA, 1560 bp, Heterodera glycines
atgaaccgacggtaattaaattaaaagtcacaaattcgtcgtttatttgactaaactgttttcccatttcagttggatttgcaacgacgtttggatggacattttcccatcctttgaccgtcctcaactcggcctcaaattggcacttctttcgccacgtttcaatgcgttggtggataaacattttgatggcaaaagcgaattgacaatttggagaccaatcgaaattagcaaggacatcggaccagaaccgaaactatctgtgtggatggatgacaaatataacaaatttatggaatttccattgccggaccgtccgttgcccagcaaaatccgttttatatgccttcggatttagtaattaaaaatcagagagctatgacaataaaagcattccttccattttcacagttacattgatcattccgtcatcgtttttcttcgttcaaatcaccaaattttcgacaaaagaggcaccaatttacagttgttttggatttcttcaccacacaccacggatggccagcggatttgggatattttgacacgtgaaatttggcccattttttcggcaaatattcgccatttgtgcttttcccatcgtgatcatttggacaatttgcttcgtcaaatttcgccgacaattctcatcgatctcaaccaattggtttcaatccattcatttggtctgttgcccgctgcgtttggtgatggttttgatgggccaaattcaacaacttctgctggccaagcattgtccaaatggttgcacattccgagaaaagctggccaacccaagcgattgcgttgcgaagattacaacgcacaagcgaacactgattggatcaacagtttcaaggaggtgtggggtccgggggggggggggggacaacacgtagccgcaaatttttattttaattaaaaaaattatttaaaatttagttacctagcctaaatcaaaaaaaaatagataaattcgaaaaaaattattaagaaaattcaaggaaatgtaaaaaagtcgtttttttatttttctggaaattcagaaaattagtttttatacgagacggcgacgttttaggggtgtacccggtctgtggatggcattctgagttattttctgaaacccgaccccaaaaaagttataaatcgaaaatttctgaaaaattccgaattttatcaaaaatttcggaaatcggaattcagtgccatccctggtgtggccataattcgacaaatgattgatttttgttttccaatcaaattgtttagcattttcttcgtgccaatgccatttcttccgtcagttacgaaattcatttttctgttcgtgcgccgtcaatggaaatggtgccgtttgaattggtaaacgaatggacaaaggaaaagctgacattcgccaaagcaaagggatgggacaaggcgaaatgagtgacggacaaaagaacaaaaacagtgatcagccgcagaagaaatgaattaattaagaatgatcgatcgaccgatcatattcatcagtgatcaaatgcattttatgaagaaaaacctctcaattgctaa

SEQ ID NO: 62586 - DNA, 2891 bp, Heterodera glycines
atgcaaattgtgccatttgaattggtgaacgaatggacaaaggaaaagctgacattggccaaggaaaatgaaaatgaatggggcatcggttggataatgaaacgaagcaaaattattggggagacagcggcggttcattggaaagacggaaattgggacaacaattgtaacaatgtgatcatttggcttttcagtaccactaattgcattgggtgagcaataaaaaaaggcatttaattttgtttaaataattcaaattgcgcttaattaaggccattgtctccgccaccggcagaagaaacggtacaaagcagcgaaaaagggcgaaatgagtgacggacaaaacaacaaaaacagcgatcaaccccagaagaagaaatgaattaattaagaatgattgatcgaccgatcatattcatccgtgatcaaatgcattttatgaagaaaaaactctcaatttcggtaaataaatcggatgtataaaaatggtttggtatctatcgaatgtatgaatttctccttgaaacttgtgacaattaattttcgggattttgacgcgggatttacgacacacaaaattagcaattagcaccggcaacattaagtgccgatttgctgctgttcttttctcttttcagcttcattctctcctcctttttgcgccgaatttttccttttcctctctttctcttccgtctctcctccttccccaatgctatttccctcctattcccttgtttctccatttttgctgttgtccatcttcatctcgtttcccatcaaaatttcctgttcttgttgtactgcttgaacttcttggttttgctgctgttgttgggtaatcatcggttttactggtcccataaaaaaagaggtaaaaaagagattttgagcgattttgaggtgctcttgggggttttcgggggcgatgaacacgaatatgacatccatttcgacctatttcgaaacccggacccgaattcgaacaaattttttttttgcatttttcactcggaatttgcgtcaaccttctttattgtatgtaaaattaccaattttataatatgaaaaaataatttctcaaaagattttataagctttagttgattcttattttaaggagttgctaattagtttctccggtttttttatttagacatatgcttaatttttacaaaaaaatcacttttaaatgatcactttcggcctcagaagagcataaatcaaatcaattaattttgcttttcattttttggttgaggattaggttgcttttcccaaagtgccgttgtgcgagcaaagaaaatgccgtccgttcccattcactggcagaggagggcattaagccactcaaattaacccaaggaaaatcaatggacagattaatcaatggcaattaatctgagagaagagaaccaaaatgggaacagcagagatgggcagagaaaccatggcatataaaagcacaaatgaaagatgccaaatccattcatcaccaaaatccaaattagcactaaattctattttgctcccctatttattttatttatttaccgttttttaagaaaacataaattttttttaagcacaagggttcttaaaatttactagattttaacgatttatttagcattttacatatttattttgtattattttttgaaatcccttactctgatgcccaaatttcatgtcaccattggagcttcgtcactaaaatagtgaaaattcattattttggcgttttgtcactattttttactatttcgacattttttggaaaatttctcaacaaaaatgcaataaaaccaaaaaatacacccctaagaatctacttaaaaaattttacaaaaaattaggattttcttgaatttttaagtcttataaatcatagctttttggtgagatgattcagcgcttagcttctgcttaatgattacttctaatctcccaataattaagaaaaaattcatccaggtttcattgcctttttatcgaccgaaaattttatttttcggcattttcttctgtaaaactcaaactttgcctcaataagtcaaaaaaatcacgaacaaaagtcgcaaaaactcaaaaaagtcataaaaatccgaaaaagtgtaaaaaaagtcaaaaaaagtctcaaaaaaatgcatgttagaagtagggatcggatttttagtggcaaaaatcccaaaataattaactaaatagtggcaaaaatagtggcgaaaaagttccaaataattacttttaatagaaaacttttaagctctgatggggttttgaacaagcccaatttcgagaaagaattactcgattgagtaaatttcggcataaatttgaagagaaaaaaaggattttcgatgagagacctattttgattttggcagcaaatgtcgggacgcaaatgtccgaaaatggccctttaagaaatgggccacaaatgtccgaggcgcaaatgtcgggccgcaaaagacggaccgcaattgtcgtttttggctggtggccgcaaatgtcgtgacacgaaatcaacaacagcaaaaaggaaacagcgaagggggaggagaaggaagagaaaatggggggaaaagagagaaaaagggaggagaaaaaggagcagcaactgaagaagaggaaaaagaaaattgcagctgaacaccagcagaaacaacaacatcagcagaagcaagaacattggaaggaggagagacggaagagaaagagaggaaaaggaaggagaaaaaggagcagcaacggaacaagtattgctaatggatgtcggaaatcccccgccaaaatcccgaaaaataattgtcacatttttgaaaggaaaattcattcattcgatagatagcaaaccattttatacacccgatttatttagcaattga

SEQ ID NO: 62587 - DNA, 1010 bp, Heterodera glycines
atggacgacgaagacgaatatgaggaggaagaggaagaagccgaagggatgggtgttttggcataccaaacggtggagggggcacaatcgacggacaatgtgcaactgatcggcacctcctcaaacactggtgcggaacatgctgggatttttatccagtggagaagcgggggggggggaggcgctggtagccatttggtgaaaaatttttaggagcacacaattttgaaaataatttaaatagtaagaaatattggaaaattaaggcaccaatgagaagaaaaacgaggacagagtgctcgaaaatggcacgtttggccaacgttcgtccgtgcaagagtcggattatgtcatccgccaaattcgcactgataacaatccgcggctgttcaacgaagtgccaacagtgccgggggaattgtttttgctgcgacaccaaaacgaggaaataccgcattactgtatccgtcctcagggcatagaggtactgtaaaattatgcaaaatcagacgagaatttttttttttttttgaaaaatcttcattaaattaattatgctaaacaatttaaaattaaaaaacaattaatataaaaaaaattaattaaataattgttagaagattttcctagctttttaagaataattagttgcgagattaaaaatgatcacattaaattaattgttatgaaggaatattttctcaatattttaccagagttttctaataccatttttaaaacattgtcattaattaggctgatcgtttcatccaacagtccctctccgagagaaatcggtcggaaataaagaaatttttggagcgaaatgtcgcgccggatgacggcgactgtacgcttccaaaaacacacaaaaaatataattattcgaatgttttcagggtcatatttgtggatatcgcaagagcttaagttggaggtgtttattactaattagcgttaattaatgaaaaatttaactcttcagaattacccagtgttcatcttttcaa

SEQ ID NO: 62588 - DNA, 54 bp, Heterodera glycines
gctatagggaagctactcccgaaggattcggtctccataaatctgggcgcatcg

SEQ ID NO: 62589 - DNA, 420 bp, Heterodera glycines
atggccactctcgttgatcctcgattcaaaaacaatcctaacattttctcgacaaaagaacgagctcaaaatgaagtgttattgcttgacacagtagaaatgctaacgaatccatcacgtcgagggtctgaatcggaacaaccaaaaataaatagcgactctccaaatttattggaatcttttattggagccactcagtcgattgattttactgattctcaaacaaacaaaattcgtgatgaaattatgctctaccttcaggcacaaattaaatcatttttaaaaataaataaattatttagtcgacacttcaaccgttggaatcggacccactgcttttttggaaggaaaactcgcaatttcctacaataaaaaagcttgtcccaaaatttttatgtccacctccaagcagcgtagaaa

SEQ ID NO: 62590 - DNA, 650 bp, Heterodera glycines
caaaatgcacattcgcagtgccatgtctgttgaagacttgctgcagtgtttagcggtgcaaaaaaaaggattttaccgaaaataaaattgttttattttttcccaacaggactgcccagaatacgaggaaatccctgtccgtcacaatgaagaccaaatcaacaggtgtctcccagcatttgttcattttgatctattaaatccttaattcatgcgccaattgccattttactatattatccattcattttcaaaatttgacacccaatttttgcaaaatttcagtgaaattcaatcctttttgcccatccgattgtctacctccgattggggttcaccccatgtgaaggcccatcttctttaccaggcccacttttcccgcatgaaattgcccgtcgattacaccactgatcagcgttccatcattgaatcatgcattcgaatcatacaggcaaacagcgatcatcattatcatttttgccaaaatggattacatttcggtcaattctgttcaggcaatgttcgacatttgtctggaattcgcgtttgtcgacacggcaatcaatgtgctggtgctgcttcaacaaatttaccaagcccgatggtactctgaccatccgttgttgtgtctgccccacttcagttcacat

SEQ ID NO: 62591 - DNA, 490 bp, Heterodera glycines
atgaagcagagggatgaaacggcggacaaaggagggaaaggcacgaatggaagcgacaaaaagcggaaaggcatttgcgtgggtaaggcaatgaatggataatttagcggaaatggtaaaattaaagggaggggggacacaaaaccaagcgaagaagccaaaatgaccgactttgatcattctagttcgtaatcaaaaagtgccagaaatggatttcactaataatgggctgagcgcttgtcactcgagcaaacttctaagttgttgaccaaatccaaattaaaagtgtctcaattcaaattgaattcagtctgaaacaagcaaaaatcaaaccgttcttgacttggaattgaggccaattataaaagcaattatttcagttccagtcaacgaatgcgcagatgaaacactgaacgactgcgatcagaaagtgatcagttcaaaaaaagcaaataaatctaatggatcggatttaggcacgatgcattga

SEQ ID NO: 62592 - DNA, 259 bp, Heterodera glycines
cgagtcaacaaagcacgtccacggcgcccaacggcagcattgaggaggaaggcgacggtcgtgttggtgcatcatcatcggaggacagcgacagtggtagtgatgcatgatcggaggagcacaaataacttagttttccactcacatttggcgcctttgtttcactaattgaaattgttttatgcgcgggtgcttttcttttctcaaaaacctcattcatttcatgctttttttgatgaataaaccgagttagcacaca

SEQ ID NO: 62593 - DNA, 2062 bp, Heterodera glycines
ggaattatgacatttttgttggggccaaaatggcgttcattcttcgacatgatcattgtggacgcgtgcaaaccgtcgtggtttggcgaaggcaccgaggtacaaaaaaatataaaaataaaatatttgtttgggtgcactttatcccccccccccccccccccccgtaaatcatagatattttttcacacaacaaattttaagaaaaaaattttgagaaattttcaacgattttcggaaaacattttgaaaaatcttaataattcatcataaaaatttctcggaaattttttcatagaattttcttatgaaaaactaagattttttcttgaaaaatttctatgttagtaaatgttttttaaaaaaattttctcgggggggggggggacctcgctgctcccatttgtttagcatgtgcgaaaatttaaaatttttttgcttgtttatccgcttattcaaaggtcgatacggatacggatacactgaaaattggcgtcccaacaaatccgttgaatgaaaaaggcgccgtttattcgagaggtttggcaatttcaaattttgccaatatgttgttaaaacaatttttcacacaggttcatgggagaaattgcgccatttgttgaacttcaagggcaaagtgctctacattggcgaccacatctttggcgatgtgttgcgttcaaaggtcggccaaaacaaaacaaaaaaacactggccatatcattgttttgggccatgagcagggatggaaaaaaacatcgtgttggggtggccacaagagttcggttcaatttcgagttctcgggccggcaaaaaatgccgggttgagaaaaaaaaaggtttgcttgggccggcccaacggttcgattctgggtttcgagtcgagaaagaatcaatcggctttcgagtcgagttttaaaaaaattgtgtattaaaaaatcactcccataattcatcggttggttgttcagaaaaccacgggttggcacacctttttggtggtgcccgagctgagccgtgagctggccgtgtggacggacaaccgtgaactgtacgaacagttgcaacaattggagtccgagctggtggagctgcacaagcgagacaaaccaactgaggcagtgaccgaccccgtgttcaaggccatccaggcaagtgactattgttctatgacaaaaaagcaattcaataattaatcatttgaaaaaaatacaaaatggggacaccaaatttatctttattttacggcacaaaaccgggacttcggtactcaattgtccgtgtcttggccccggtctcgacctaccctactaaaaagtgacattttcttcatttttgggctcaatttataaaagtttttgatcactttttaaacgacaaattgagtcggtctaaaacaaattctaattgcaggaagttacacagtcaatggaacaacagtacggcggtttcggctctctgttcggaagcggaacgcgcacctcctttttcgcctctcaagtgggtggtgttggatgatgtgccgtggcatttgcatttaattagaaaagaaaaagtgcccttttcccatggttcgcgatgccatgccaactcattgggtttttatgataattccacaatatgttggaataaatttgctacttttttttggtattccaattgtttatggttagttttttaataaagatatttcttttttttatctagaaaaaaactttcaccgccgcctcaacccccccccccctcctccaaaaaaattgaaaaaaaattcattttaattgaaaaaactaattaaaaaatttacggtttttaaaaaaataatcagagcgaggagatgcttcctcaaaaattgactaaatccttaccaaaaaaaaaattttgtaaaattttttgtcccttttcagctggaacagtatgccgatttgtatgccggctcttgcttcaacttggtccattattcggtcttctatttcttccgcgctccaatggcactgatgccgcaccagtcgacggtggaccatggggccgcaatgccggacatagggtcacgccaaaacattga

SEQ ID NO: 62594 - DNA, 1149 bp, Heterodera glycines
atgaatgctgcccaagaaccggcatacgaccctgttgcggcttctcgaattcaaaaactttaccgccaaagtcgtcctcgtgcataccgagaaatcacagaacaatcatcaccattttgtcaaattgagggaaacgatcttttcaaccaattcagccaagtttttgaggagaatgctccgatcgacgaagaaatgccaccggaaataccaaggcatggaccaccaactgagcgaaacccgctgggcccacaatttacccaaaaagaagtgtgggaacgtcttaaacggtgcagcaacacggccccaggcccggatggtatccgttattcagtttggaaaaaatatgaccaaggagcgcacatccttacgactattttcaattgtgttaaaagatctaaacacatccctcaaagttggaccaaatcagtcactgttctgctccacaaaaaaggagacagaaacgaagtgtcaaattggaggccaattgcactctcaaataccatcggcaaattgtactcttcagtcttggcaaaccgattggcgatgtggtcaattgccttcaacagagtcagctcgtcccaaaaaggctttatgcctgtcgacggttgtgccgaacacaacttcgtactccaatcgatcattcaggacgccagacgtaccaaaaaacggtgctcaattgcgtggctggacttgaccaatgcttttggttcaattcctcaccaaacaatttttacagccctaaaatggtccggactatctgaccagtcaatcgctgtcattcggcagttatatgccacgaattccactcaaattcggcattcaaacggccttactcccgaaattccaattcgcgcgggagtaaaacaaggatgtccgctcagtccaatcatttttaaccttggaatagagcccatcctccgcaccattggccaactcagaactggctataagttgcaaaaaaaacgcattgatgtgttggcttatgccgacgatctcgtccttgtggccgaatctgccgaagaattgcaaagaatgctggacgccacctcaacaatagcaacttgggctggactttccttcaatgcccgaaaatgcgcgacgctggacatagatgggcggagaaaagcagcattaaacactgaattcacg

SEQ ID NO: 62595 - DNA, 1128 bp, Heterodera glycines
  unsure (1)..(1128): unsure at all n locations
atggcctacaccatttccaagcacatgttgaagctaaacggcacctattggatgcagcagccccgggtgaccacagtgcaaacatcggcaccgatggtgaacgcgatcaagcaagcgctattggcattccttgaccaaaacggattcttcccggaacacattttcgtgttccgggccggggcctcggaaggcgaatacaaaaaggtgacgaacagtgccaaggaggcagtcgaaattaaaaaataaataagattcacttaaattttatatctctttaaataattttataagataattttttttgtgtgtgcttataggcaagggtcttttacttaatttggtatatgtgatgaaaataattgataattttttcacaaaatattcttttttaaagcaggaaaaaaattttcatttaaaattttacaacttttttgagaaaatctgaaagaaaaaattgcgttcttaaatttaaaacattttgaaatttattttagtaatccttaagaaaattcttattagaattatctgaaaaatttgaaatattttatttattgtgaaggtcgcgcattgggagggcggcgcattcatgaccgcctttgccgaactgatggctgaacagcagagcatggccaaaaagccggcactgacaatggttgtgtgccaacgcaactccaactatcgcatcattccgaccaatgtgcagccgggcggccgtgcgcaggaacagaactgccagccgggcactgtgctggataaacaggtgagggaggaaactagggacggggtatgaacccaccacaggacttaccaaggttgacattttcatatgtgaagctagggtggcatgccacgggcttacgaagggcggaatttctcgggtggacagatgggcatgcacacgggttttccaaggaaggaagaggggtggcacgcaccacgggcttaccaaggttgctaatatacacagtttttcaggtcatgcattcttcgttgacggaattcctactagtcggccatcggactatcncaagtgggttgaggcttcggttgaccctcattccggctcaaacctaactggcatctaaccaccttttcccatctcaacgtgatcctaaatcagaaattaaa

SEQ ID NO: 62596 - DNA, 399 bp, Heterodera glycines
  unsure (1)..(399): unsure at all n locations
ataaatgaaaatgctcaaacggagcattcttttacaattaacaaagaaagagcggctgaaaaagctgaaggttaggtcatattttagtttggcgttctcattgattaaattcaggcggaaatgttgagacaaacaaaaacggagttttgttttcgatgactttggccagcgagtctaatttctgcacttcgacgccaatcaaaaaacaacaaaaagtcagcaattcgcccaaaagtcccatcatttcatcgcttgtaaatgaagaaattacgaatgaatttgaaagttgcttctgcaaatggttgcgatatgttaccaattttgaggacaaattgagacgtgaaattagtgcaggttgagaacgatccaaacgaagnngtctgatgnttagcaaaagac

SEQ ID NO: 62597 - DNA, 817 bp, Heterodera glycines
atgtcttcagctcgatgccggatggctttggggcccgcgctgttccgacttcggcaacatgtcacaacggccgaaaatttgctggatgagcccgtgagcaatgccgaaacgattgaaaaccttgaacaggaacgaggtcacatcactcgtatcctgtcaaggatggaagtcgagctggaagcgtggggtgctatcatgaacggacttcaaggcccagcgagagaggcggaggaagtgcttttcactgcctttattcgtgatgaccggcacttgacggagtggttagaacatgcgcgagaaatgctggctcacatagcggcagaactcgcagatgataaaattcacaatggaaaaagtagttttaaataatgtacgcatccaacaaaggttgacataaaatcaatattgtgagtttaatatttataaatgttaattttttttggcttttatttattatttttaattaaatttttaaatattttattacggaatttaaatttatataatatccagtatatattagtagtaataattttgatattgatagcatcaatatttttctccctcgaaatctaattttaaataatttgtttaaaaataattttttcaaattaataatcttgttgagggttgtcgtttctttccgaattgtttcattttattctaaaaaataattatagaccatagattactggtatttccatttttatttgttttatatgtatcacttcaagattacaatgtatatttggttattagtatatttttctacctttattaagagtattaaaaatactttttcccattaaacaataaa

SEQ ID NO: 62598 - DNA, 1707 bp, Heterodera glycines
  unsure (1)..(1707): unsure at all n locations
atgtcgtcatcatcgtcgccccagtcgcgctacgactacctggactttgctggcaaaccggaccaaccgcagcagcatcagttgcgacgacaacagcagcgagcagcgccgcaacaacgcgtcgctgtgccgccaccggcgctgcgacgtgctgctgcgtcagcagatgaaccgctctatgcgactgcgtcttcacaaatttactcgttgggcggcagcgaagacccgtacaggttggtgtgacatggcgagagagagaggggacgggttcttgaaggagcataaaaaatgaaaaaaagtgcgacgaaacgaatctaaaactagccccccccctcaacccccggaattttttttaaaatttcaaatttagtcaaaaaataggaaaatttttctggagcaacgatacggggaggaggcaggaaaggggggggngggggacgagctgctcccgatgnggggggggtgcttattttaatgagaaatcttcaaacagcaaaattatgtttaagttccattgtgagtattggtggtggttacggcagtggttcggccacctatgaccagcacggctattcacggatcatcaactccaacaaaaacggcaccaccggcctatcaaaagcgaccacagggtatgaaaataaatattttcctttcctgaaatttcgtttttccaaaaaaatttcacgggtcaagagaggcattggaatttttattttttggggtcaagaaatcggtgtcgcctttcagagtgccaccagcgacaacaatgttagcacgagcggctatgaacaaaaacaatgccaataattttgctgaattggaccaactctatgcaaaggttgtattgtatttcatctgaaatgagtggctttaattggattttcttaaattggaggtgtatccaacattttatgagtgaattttttttttgaaattttatagagaaaattagttgtttttttggttttaaaatttttgagcgagtcgttccccacgcaaaaatttacaaaaaaaataaaaaatttctagcaatgtttggaaaaaatattgaaaaacttaataattcagcaataaaatttttaaaaacgctagaaaaattgtttaattttttcttaaaattttctaacaataagattttttgggaaatttttaagtttgaaaaaaaattttaatttcgggggatgccattcccttaaaatttcggttataattttcaattttttttttgtagatcaaccggaagatatcggctgctgaccaacaacagcccacaacatcggcagccatcgcaaaacaactcctccgtcaacagtcattccaacatcagcaatcgacgacgaccaccgactttggtggtgagagtggttcgggcagtatttgcagcagtacgcagccgtcctatcgttatttgacggtccgcgaggatgccgcagtgattcgggaacgcattcgactcagggaggagcaggagcagcaacaacaaagcgaacaacagcaccagcaacgggcaaacttgtgggtgaagtgaattgttgctaggctaggggtgacttcttcataaaaattttttggcaaaccgtagggctccagccggctttggaggggatacaaaacctgggagtgttcctggtagcgccggaccctcctcatcctcttcgaccaatcaaaacacgagaattttttaaggcataaggggtaattaaa

SEQ ID NO: 62599 - DNA, 290 bp, Heterodera glycines
  unsure (1)..(290): unsure at all n locations
tttntttttctcataaatattatttttactttctaaatctttcctattaattgctgttgctaaccaaccgtttcatactcattcccgatggttgaataatatgcgtcatcacggtcctgttgttccaactgttgaccccttaaaaaatgcaccaaaataatttatatgttcgttgattgaggctttagcccgttaaatgattcggaacaaattttaattaccccttatgccttaaaaaattctcgtgttttgattggtcgaagaggatgaggagggtccggcgctaccag

SEQ ID NO: 62600 - DNA, 873 bp, Heterodera glycines
ggcaggacaagaaaagaatgaagttgatgcctcatgaaactcggaattggttatgttttgtcgaaaatatccttacataatactcataaaaaaatacaaataattcaacccatctattctatgaccacattctgaaaaaaatcccagaaatacgaggaaagatatgcttggtcacaataaaataaaaaatggctagtatgtaaaaatttgcggtcacaaataaaaaaaaatggctaatatgtaaaattggcgtccagaaatttttagactaatccgaagcaaagcacgaatgaattaaagaggcgaaagaattcacagtatcgtttctaatagggaaatattgacaggatattcggctaaaaacgggtttgatcatttttagcgcatttttaggtatacatttgagacaattgggcaggacaagaaaagaatgaagttgatgcctcatgaaactcggaattggttatgttttgtcgaaaatatccttacataatactcataaaaaaatacaaataattcaacccatctattctatgaccacattctgaaaaaaatcccagaaatacgaggaaagatatgcttggtcacaataaaataaaaaatggctagtatgtaaaaatttgcggtcacaaataaaaaaggatcgctaatatgtaaaaatcctgtccagaaatttttagactaatccgaagcaaagcacgaatgaattaaagaggcgaaagaattcacagtatcgtttctaatagggaaatattgacaggatattcggctaaaaacgggtttgatcatttttagcgcatttttaggtatacatttgagacaatggggcaggacaagaaaagatgaagttgatgcctcatgaaactcggaatt

SEQ ID NO: 62601 - DNA, 1792 bp, Heterodera glycines
atgcagctgtgtgtgttgctggtactgcctgaccgtgccgatgccgtcctcctccgccgccgccatcaccaccagcttggcaccaccacaattgccgccgccaccacccaacatggcgtcaatggagtgatgatggtatgcggtggtcgcccatgttgtggttgtagtcgttgtgccgaatcctgctgacgccgttgtcggtgccgtgccgggcaatgtcagcccgagggcattccggcttttcggacttcgttcgccgtcctgttgctgttgctggtgttcctgaaccagctccagcctgttgttgttgtttttcgtggtgccaccctcgcagtccgtcgtcgtcatcgatggcactgccagcacggtcaatgtggggggcgctgccctgacgctcatttataattgttgcatataattggaaggcaataaaaatataattattgtatgctaatgatccttaattgatggtagacatgcaaaaatttatccttaactgatgttaaacatgtaaaacacaattgttgtctgctaatgatccttcttgatgttacacatgtaaattgattgcaatttggctaatgaccattaattagtgctggacatttatattttcgttacctaattgcttcggataattgttgttccaagtacgttcttgaaaacaaggacaagactttcaaggacaccaatttaaggcaattaaagaaatttttaaattaattaataagcagaaatttttcgtgccccgaatattaagatgaataatttatatgtacttaatattaacaataaatggtcagaagacgggcttttgaagtcatatccgctttttcatcggatatccaactaattaataggccaatattagcggacaaaggaagtcaattaaattggtgaattttggaaataaatatttattaatttgtctaataaattttgcggatttaatttcctgcgccattcttcttcgcttaatctgaccccgaaatatagtgcttatcatttttcacagtaaattacaccgttgggaaaaattaaaagaatttagtgtttttttcgcaaacgaaatgccaaagaacgaaatttaatgggcaaatttgaggaaggaaaaaatggcgcatgtagtattaagcgttcatgctgttaatggcccgataatgggcaggtagaaatgcagctttaaaaaatcacgacgaacattaatttccggcacggcacggaaaaatgggccccggaggggagggcataaggaatttaaattcggattttggcattatccctgaaaaggaaaagccccgggggaggcggaggaggatgatgatttgattaagctttgagagtaaaaggtacttatgtgagactaaacatggacttatgattaacagacagcgaaaggctattagggcggctccacattcaattccattaaacaattgaactaattgattggtcattatagaacaacatacaattacatctaatattataattaattgtttcagagatggaaaaaagtgggacagattttcggggaatgggccccgtttaatgatatggtaaatcaattagtgattttgccaaaatgccacaaattgtaaaagaaattttaatgattttgccaaaatgccacaaaattataaaattaaaaataattttgtttatatttttttaaaatttctaaaagaatttttatcctggtaaagttaccctcacaatcagctgttaattcctagctcgttcttttcgtacgtgcctggggggataatttggacagattaagaaactggta

SEQ ID NO: 62602 - DNA, 784 bp, Heterodera glycines
  unsure (1)..(784): unsure at all n locations
atgcacacgttttgcgctcgagctatttatcatcgggcttgtcaatccaaaacgaaacaacaaagatgctgttttgaacgaataaagggcataggttattttgaagaagtgtcaaagaacatgcagcaataagcctgcaaaatctaataagtggaaaatacatgagtatagaatttattttcagaaagtgtccacagacttttggaaaaatatatttgcaatttatcaacaattttgagaagtgagttagaaatgataaacttcacgattcaaaccaattttcgttgctctaattaaccgcgataaaaacattcgaatcaattaaatagcttctgagataataaggtttatcataaaatttcatttaaaaataaaccctcaattattggtatgaacgatactttccaaacatgcacgcgttttgcgctcgagctatttatcatcgggcttgtcaatccaaagcgaaacaacaaagatgctgttttgaacgaataaagggcataggttattttgaagaagtgtcaaagaacatgcagcaataagcctgcaaaatctaataagtggaaaatacatgagtatagaatttattttcagaaagtgtccacagacttttggaaaaatatatttgcaatttatcaacaattttgagaagtgagttagaaatgataaacttcacgattcaaaccaattttcgttgctctaattaaccgngataaaaacattcgaaatcattanatagcttctgagataataagggttatcatanaatttcatttaaaataaa

SEQ ID NO: 62603 - DNA, 49 bp, Heterodera glycines; identical to SEQ ID NO: 60106

SEQ ID NO: 62604 - DNA, 505 bp, Heterodera glycines
caaaggttttttacaaccacttattgccaatctaatttcttgcagatttaaagccatccattgcctgccggttctcggcacagcaaagcactaatacggtgtttgactcacttcaaaaaataattcattacccaaaagttttttacaaccacatattgccaatctaatttcttgcagatttaaagccatccattgcctgccggttctcggcacagcaaagcactaatagggtgtttgactcacttcaaaaaataattccatacccaaaagttttttacaaccacatattgccaatctaatttcttgcagatttaaagctatccattgcctgccggttctcggcacagcaaagcactaatagggtgtttgactcacttcaaaaaataattcattacccaaaagttttttacaaccacttattgccaatctaatttcttgcagatttaaagctatccattgcctgccggttctcggcacagcaaagcactaatacggtgtttgactc

SEQ ID NO: 62605 - DNA, 847 bp, Heterodera glycines
atgacacggatgagccaattttccctagaaatgatcagaataagccgattgtgccggtggatgaaaatggtaaaattggcagaaaagggaattgttgaacagttactttcagatcaaccaatctttcctgtcgacaaaacgggaactttcatttttccggtggatgagtcaaactgtccgatccccgcgctcactgtctatggttgcatttggggagagggaggcttaagtaaccataattggtattcgatttaggcacgcgtgttgtaccgaaggatgagttcggtaacgcggtgattccgcgcgaccgcgacggcaaagcactaattcatattgcttcggacggcgtcacaccgctctccatgggcgaatggaagcagtggaagaagtactacaaggagcaggcccaagtgcgaaatttctaccaacaacggcagcagcagccggtggctgttgagccggcggcagccgcgggcattggcatcggcgcagtgaattattcggcaatgaactcggtcagtgtacaccgttggccaagaaagtgatggatgcgagcgaacctttcgcagtttggccaaatttcctatcaaattgaccgatggtccgcatataaatggagtttttagacaaaaatgcaacaaaacggttggacttcattataggaatcgtctaacaccttttccatgtgtaaagtagtccacttggctttcatcattgcccattttccgttcagatgtttcacccactgaatttggaacagcaaagtgcctatttcgccgctgacatggaaatgttgcagcgggttcgccgtgttcgacccgaagacgtcgacttaccgggtcaaatg

SEQ ID NO: 62606 - DNA, 604 bp, Heterodera glycines
atggttaggtttaaattatatggatataaataaccgattgtctttcaagtcaatcaataaccgaccaatttttgccatcgttcgatattcgactctacttttcaggcccatgttttgcatataaattataatggagggcggaggaagacgtctgacgagcgccacaggcggttgactgcgggggcccgaaggggaccggtaaatcagaagctgaagaatgatcagaagctgaagaatgatcagaagctgaagattgatcagaagctgaagaatgatcagaagctgaagattgatcagaagctgaagaatgatcagaagctgaagaatgatcagaagctgaagaatgatcagaagctgaagattgatcagaagctgaagaatgatcagaagctgaagattgatcagaagctgaagaatgatcagaagctgaagaatgatcagcccagcaactacggcgagccatctctggccggtgattttgatttcaaaaattaaaaaaaagttcaaaatgggacagagcaaaggcacgcgtcagccaatcatctcattggccaccctgagcggcgaaatccatagatttgctcataaaattatcctaaataaa

SEQ ID NO: 62607 - DNA, 1359 bp, Heterodera glycines
atgccgacggtcggcggcggtggtcgacggcaacgtgccggcttgcgcggcagacggcgggcgtcacgtgcaatcgccggccggatcagtcggtgaaggacgactcggcgtcggtggccagcagcagcgggtacggtttgcattcttgggattaaatcaaacatttatttagggagaaggggggggggggatttaaattatttgaatttaagtgctatagccaaaataaattgcatattttatgatcaacaacctttaaaatgtgtgtaacatgcttcattatctccaaaaaaaatttttacaaatcaaaggccaccctttggttttgtcgacccctaattagattttgtgtcgaaccttaatctataaaagagcagaaattttcaaaaaaagtcgatgactccatgaaaagtcttttttttcatttagaaatggaggagggttggctgagtctttaaaaatcgaaaactggggccaattttcagttatttgtggaaattatcggattagaatttatttttgcagtagaagaggtggccgtccaccgcgacaacagtcgtcgacttcggcgtcagcagcggggaggccaaaacggccatgggaaggcagcgaggacgaggaggacgagctgagcaaacgctacggattcgggcgcagttttctgttctccgaggaggaggaagacgaggaggaggaggaggaggacgaagggatgggaagtggtcagtttgttcaattattggggcgaatttttttttttttgaaatttgaaagtaaatattccctatacgaaaatcgttttttaaattgtttttgggatgaaaaatggactttgggaacattttagattttaactaacaaaatttgtttactaaaattgctcatttcatatttcccatacaaaaatcgcttttttgggatgtttttgtactgtaaaatttgaatgtgaatggacttttgggaaccctttaaaagattttaactaatttttttttatagaaaattgcccaaaatttttagagatattaaatgagataattaggtacaaatgtttgtttttgggtttttaattactttccattaccccacacagatcagaccgatttggacaccgatgatgacgaccgtggtagtgaagcgaaggcgcttccgtcttctgccgctgttgctccctcggcctcgtctccgtttggcccattttcttcgttggacgacgaggacgacgacatggaggaggaacttttggcccaactaccgcctgaccaaataccaccgctcgttctcagcgactccagcgtggacttgctcatctacaaggaacatttgatggacacgcttgaggtgatgggaagtctgtga

SEQ ID NO: 62608 - DNA, 1158 bp, Heterodera glycines
taattaaatccattccttcgggggaccgtgccgggtgccgcggggtaagcagtgctggttcgtttcatcacggcaccgaaccttttggctagtcagcaatcgttgcttaacttgccagatcggacgggtgcgcatgattccactgttccaagcaccccaccaaaagcaaaacgatataaccaaaatataaggaaaaattttttaaaaaattttttctccatcttcctttttgatactaaagcatcagagtgctaaaattaagttgtaaataaaatttggtgcgctttcggggactttctgaaaaaaatatttatgaaacaaaaaaatcgattttttcaagtgtccgtttggggtactcaaacatttatggggagcaaaaatccaacgcagaattaaagtacaggctatagggaagctattccggaaggattcggtctccccataaatctgggcgcatcggttcggggggactgccccgaaaacaaaaaaatcgattttttcaagtgtccgtttggggtactcaaacaattatggggagcaaaaatccaacgcagaattaaagtacaggctatagggaagctattccggaaggattcggtctccccataaatctgggcgcatcggctcggggggactgccccgaaaacaaaaaaatcgattttttcaagtgtccgtttggggtactcaaacaattatggggagcaaaaatccaacgcagaattaaagtacaggctatagggaagctattcccgaaggattcggtctccccataaatctgggcgcatcggttcggggggactgccccgaaaacaaaaaaatcgattttttcaagtgtccgtttggggtactcaaacaattatggggagcaaaaacccaacgcagaattaaagcacaggctatagggaagctattcccgaaggattcggtctccccataaatctgggcgcatcggttcggggggactgccccgaaaacaaaaataaatcgattttttcgagtgtgcgtttggggcactcaaacaaatatggagagcaaaaatccaacgcagaattaaagtacaggctatagtgaagctattccggaaggattcggtctccccataaatctgggcgcatcggctcagggggagtgccccgaaaacccaaaaaaaaatttttt

SEQ ID NO: 62609 - DNA, 456 bp, Heterodera glycines
  unsure (1)..(456): unsure at all n locations
atgtcggcgctcatttcagagcaagatactgctgtaccggagagtatcccagaccagatagccacgcttctggtcagttaccattaagtatgacggatcgaattttcactaacacagctaagactacatctgttggcatattataaaaggccattaagaaattgttaaaatgtaagactttgcctgcaccgaaggtactcgctcgggctcttcacggactcgtggcggcacctgtccgcccactgcgacgactgtcaaatggccgcgaaaaacccaacaaaggcacaaattcagccttggaaagcggcagacgaagtttttgagcgcatccatctcgactntgcgggcccatgcgaagacggccaaacgtatctcgttgtcgtcgacgcctattcaaactggccgggagtttgggagatgagtcgtgcaacagcgaaagaccgtcgctatgcttaa

SEQ ID NO: 62610 - DNA, 262 bp, Heterodera glycines; identical to SEQ ID NO: 60799

SEQ ID NO: 62611 - DNA, 197 bp, Heterodera glycines
tgccattgggacgacgtgccgttcattcagccggacagcgccacgtacatttgtgctgaaaatgacgcggtgcgagagcccggcattcgccaacagttggacacattgttgcgcgaaaagaaatatgagagccgaatgctgttggccaaaacgtatttgatggtgcagaacaggccgaccgccgccggctgtttaaa

SEQ ID NO: 62612 - DNA, 682 bp, Heterodera glycines
atgaatcagtggatattattctttttaattgtattatttttaattattcaaattgaaattggagcggaaaagaaaaaattggaacaaaaaacatttgacgaaatatttggagaaaaatgggaagaaaaagaaaatgaacagaaaaagagagaaattgttcaaaaattcaacaaaattaaagagaaaattttacaaaaagagagaaaatattcaacaaaagaatggaataaaattgaattgaaaatcggaaaaaaattgggcacaaatcgccaatatatttaccaatggatcaaagaattaaatcttcagaaaataaaatcttacaaatcaaaaacggatgaacaaaaaattgaatttgtgcaaaaatttattaccatgaaaaatgaatataagcaaaatggaagaaaatattcgagaaaagaatggcaccaaaattatgccgaaatttgtaagaaaattggagtaagttatggaacaattgaaaaatggaagaaacaattcggaatccgtgaaagaatgacggagaaagaaaaaatggaaaaagtgaaaatttattttcatataaaaagagaaaatccaaaaataagtgatgaaaaaattgcaaaaatagtgaaaattaatcgacggaccattgacaaatggaagaaacgctttggggaagaataaatgaggattggataca

SEQ ID NO: 62613 - DNA, 746 bp, Heterodera glycines
atgcttttggccgagttggaggacggcggccaatcggacggagcagtgccagcaacacaacaacaccagcaccagcaacaacagtcccaacacattgtggccatgctggagcgagcgctgcgcgagagagacgaatttgccaacggcatgatggaaatggcacaagaaatggtaggccgaaagtatacggtagtcaagtgaattttgtacggtaccgtatcgttaattattcgaatagcttattaaatgacagtaattttctttgcttgaaattaaatgattaagctatatatattaccaaatttcaaattgttaattaaggatctcttaatagttgttaaaatttattttaaaaaatttttaaaaagttaatccattaatattattttgccaattatttcatttttttaagaatttattgaatttaattccgattttaagaaatttgaataaataaataaattttgaaaattttttgaaaattcatttaataatttaattttcaacaatttgctatgactcacaattttttgaaaaaataaacgaaatatttcattttttgtaatttattcttttttaaatttatgaatttcaaggacaatgatgaaaatggtggcggtggttcgtcagcagctttaacaacgtgttcatcttcatgtaatggggacattgggcctgctgcgggcggcaaatctgtcaagcaacacaatgccattgcgtcaacatttggtccataatttgtgaaa

SEQ ID NO: 62614 - DNA, 354 bp, Heterodera glycines
atgaccctagggttgatcgaacatcgagaaatgaccctagagttgatcgaacatcgagaaatgaccctagagttgatcgaacatcgagaaatgaccctagagttgatcgaacatcgagaaatgaccctagagttgatcgtacatcgagaaatgaccctagagttgatcgaacatcgagaaatgaccctagagtttgatcgaacatcgagaaatgaccctagagttgatcgaacatcgagaattgaccctagacttgatcgagccgagaattgagttttatgaggctcgagaatgagaattgagacccccggggatatcgggcaaatccggctacatatttcaggagcaaataaa

SEQ ID NO: 62615 - DNA, 408 bp, Heterodera glycines
atgaccctagagttgatcgaacatcgagaaatgaccctagagttgatcgaacatcgagaaatgaccctagagttgatcgaacatcgagaaatgaccctagagttgatcgaacatcgagaaatgaccctagagtttgatcgaacatcgagaaatgaccctagagttgatcgaacatcgagaaatgaccctagagttgatcgaacatcgagaaatgaccctagagttgatcgaacatcgagaaatgaccctagagttgatcgaacatcgagaaatgaccctagagttgatcgaacatcgagaaatgaccctagagttgatcgaacatcgagaaatgaccctagagttgatcgaacatcgagaaatgaccctagagttgatcgaacatcgagaaatgaccctagagtttga

SEQ ID NO: 62616 - DNA, 934 bp, Heterodera glycines
atgcttgtggacctgcaggacgagttggagcgccaacgcgtggagatcggcaggcttcaagctgaacggttggagctggtcaaggacgcgcgtgcagcgaaggatttacgtgacgaaatggaatgcatgcagcataaactgaccaggctggaacggttggagaccgaagcggagaaaatgcgcacaaaattgggcgagttggacttctacaagagccgaatgaacgtaaaacaaattaattattttgacacttaattttataaatttattaaaattataaattaaattattatcccaaaatatcacgcttttcagaggagttcttaattatgagagtttcagaaaagccatgaaatttaatgaccctaagacttagggattataaatttgtgagaatttagcgccaatttttataattttttgttgagaaaaaaaggaaattttagaggaaaaaattcatatgattttcttcagattttcattcgagttaactcgtggaacaccaatcttagaagaaaataataatttgatttgaatcaaaatgcctcaaaaatatttccaatattcatttttggtattttaaaatttattcatgaaatttctaattaattagctcataaataaaaaataattattatattaaaatattttatttcttatagagtttgaaagaggacaatcggctggtgcaggagacgtgccgcgtgatggaggaacagcttgaacaatgccaacgcaaactgaccgcccatttggaggtggcaaattttaatatttttaaaaattgaaaatcaattaaattttgttttaaaataattaaaattaatatttgttaggtggagacgaagctgatcgagtcacaggccaacaacaaatcgctacaacttgatctcactaaggtcaattaatttctgtcatttggcaattttattta

SEQ ID NO: 62617 - DNA, 753 bp, Heterodera glycines
tttagcaattttttggttgcgttttaatttgcgaaatttaattttacatttattccctaaagtgtgaagggcgttcgtacaacgccaagtcggacatgtgggcgatgggctgctgtctgtacgaaatgtgcaccttgcggaaaccgtttgacgcggacaatttgacaattttgatccacaaaattataaatgttgcattaaaaaaaataaaattattttatcttccatttttggcaccgttttcagtgcgaatacgaacccctgaagggcccttattcgcaggacattcggctgattgtgcgcgagttgttccgcgccgacccggaacagaggccaagtgcgtctgacctgcttgaacaggtggacaaacaaacgaaaatcaggccgaaataattaatggcgataattgttgacgatgaatgacacaaagtcgtccattattttctggctcaaattttttatgttcataaattttcgagaatttaaattcgaataaattaattttacaattaaatcttaaaatatatcccctcacatttccccggaagatccgtcgtaagaatccgttgctgaacagcacacgccgaatgaaatgtttggcagcaaaggcggcgcggagcaaacggagcagcagccaaagcagttgctattcggcactgtacagattcgacacggaaaaattcacacttttggccatgtccgagttgccggaccgcgcccaaataaaacaggtggccaaaccaatgaatgaaa

SEQ ID NO: 62618 - DNA, 1214 bp, Heterodera glycines
atgaacgccgaacaaattcaacaacttttgaccgctttgctccaaggaaatgccgcttcaagcataagccaagcgaatttggccagctcaatcgacagtagaatttcaaagtttgtttatgaccccgagaatggtcaaacatttgaacagtggcacaaacgcttcggcatattgattgaagaggatggcaaagacttaaccgagcaagccaaagtccgactattgttgggaaaactcggagacgaagattacacgaagtacagggacacaatcagcccggagttacccgacaaagcttcgtgggctgaatcaatcaacagattaaaggagttgttcgctgaaacgcgctctcttttcgtccgccgatatgaatgctttcgaatcagacggcatccaaaccaagtcatcagttctttggttgctcaaatcaacgcagcgtgtgagcatgccaatttgagccttaccaaggaacagctcaaatgcatgattttggtgatttcactgagggatgaatatcacgatttgaggcagaaatgtcttaaaatgatggaagaagccgagaaaagtggcaccacagtcacactcaaaaagttggaagaggagttaaaagcgatccaaattgtcaaagatagtgctttgtcactcctttccacgccagcttcgacaaatgccatccgaactcgccctcaacagtggagagaatcaaaatccaaggccaattcagcaaatgccgtgcaacaaaaccacccggcacagcaaaaaccggccacaggaggaaaagcaattcgtggacaaccgacccagccgtgcggctcatgtggtggtactgatcactggagatcagattgtcgcttccgagaagcgacatgccacaagtgccaaaaacaaggccacattgctaatgtttgccgaaagggagcattcacgacaaagaaccaacgccgttcatttcacacggtccaagtcaaagcaacatgcctacaaattggcacgactcaaggacggtggtggacaattttggtcgaaattaacggcacaaaaattgaaatgaatgtcgacacaggagctcaggcgacagtccttaccattgaaacatggaccaaattaggacaacctaaattgttgccaaccgacattgagactcgcaactgcaacgacgtcacatttaaaacaaagggcaaatttatatgtcttgtcagcattgtgggaccttg

SEQ ID NO: 62619 - DNA, 1137 bp, Heterodera glycines
taattaaatccattccttcgggggaccgtgccgggtgccgcggggtaagcagtgctggttcgtttcatcacggcaccgaaccttttggctagtcagcaatcgttgcttaacttgccagatcggacgggtgcgcatgattccactgttccaagcaccccaccaaaagcaaaacgatataaccaaaatataaggaaaaattttttaaaaatttttttctccatcttcctttttgatactaaagcatcagagtgctaaaattaagttgtaaataaaatttggtgcgctttagagcactttctgaaaaaaatatttatgaaacaaaaaaatcgattttttcaagtgtccgtttggggtactcaaacatttatggggagcaaaaatccaacgcagaattaaagtacaggctatagggaagctattcccgaaggattcggtctccccataaatctgggcgcatcggttcggggggactgccccgaaaacaaaaaaatcgattttttcaagtgtccgtttggggtactcaaacaattatggggagcaaaaatccaacgcagaattaaagtacaggctatagggaagctattcccgaaggattcggtctccccataaatctgggcgcatcggttcggggggactgccccgaaaacaaaaataaatcgattttttcaagtgtccgtttggggtactcaaacaattatggggagcaaaaatccaacgcagaattaaagtacaggctatagtgaagctattccggaaggattcggtctccccataaatctgggcgcatcggttcagggggactgccccgaaaacccaaaaaaaaattttttggataaaaattatttaaatgaactgactagataatatttaaaataggttatttctcttcctttcagtatccctgcaaagtttggtgcgcttctgatcagtttctgaaaaaaaagttaagcctaaactttttggcctgtttaaaaaggaattaaaaatttttaaaaattttattcatctccctttttgatagaaaaagcatcagagtgcctaaactaacatgtaaataaaatttggtgcgtttcagaaccctttctgaaaaaatatttaagaattaattttgcaaaaaataaataaaaacgaaagact

SEQ ID NO: 62620 - DNA, 210 bp, Heterodera glycines
agtccctcgtcttttttcacgcttttctttggttgtggcactcacggattatctcaaattattatctctttgaattcgttgcttttccattttctcttgatcattttgaaaattttgatattgttcaccttctcttgctacaaattttccaataaattttcccatttcataatttataagcaaaaaaaaaaaaaaaatctttgaaataaa

SEQ ID NO: 62621 - DNA, 383 bp, Heterodera glycines
atgccaaaacaaaacgaaatcgttttaaaatattcctttctggacttgacttggtttcttgatatcgaagctgttttctacgctatttctaaaacggttataccaaacctcagatttttgaatccggttttcagaaaaaatgccttgtggtgaaaacaatatttcacatttcactccataactttgtgagttcggcacggatcgagaccgggataagaccattggaaagagcagctcgagctctacaagaaggtatggaaagaaaaaatagttatttctgggactttttcagaaatcagaattaattctccaatgtggcccaaattttaggcccccagccacagccccttgcttctcccagttttaagtcttggatttgtcaa

SEQ ID NO: 62622 - DNA, 1166 bp, Heterodera glycines
  unsure (1)..(1166): unsure at all n locations
atntttttcgccgtttcaatttcgttgaagaaggaatacaaatgcaaaaaacggnaagaacgtgcgaattgganaaagggcaaaaaaaacaaaaaacattataaactaattaaattaaatcatntaaatttttattcaaaaaatatcattttttaattattaggttggggaataagttttgtcatagtagtcgacaaatttaacatgttttttaaatcgaccccatagggttcttgagataaggggctttttcagaatttatttttagtttttcttgaaaaattgcaaatttgggtgtaggtaacgcctatgactgaacataataattgcatggattttttgaaatggtgccatattgaataagttataccaccatcgaaactctttttggaccttgttgaatcaacaatttatgatgaatcagagaaattttttttaacaaaattaatgttccatgagataaccaacatctagtccttacaatatacaaactattattattttatttatttttttgttgaatcccgcgattaaaattctttcaaaattttcgaagaatttcatttttgaaagttgtgtttaaaaaataaaattcatgaagtcaatttaaaatctgaaatatggcttattaaataagcccaaagttttctctttcgaatagtatatccaaatgaacaattatttgtttgaccgatttaaaaaaaatctgtaaacaagttcaagtctaagctatgacagaaattattccttattttgatatcattaacacttatcttttcgtatgattttgtagattctgcttcgtgtaagcggtgccgactgaacaaatgcttatcggtcggaatgaactcgttaagagttagcattaaatcaaaacgagtgagtgggcaatcggcaccagcaaaatcatcaaatctgggagaaattggcacagatttgtcagcaataaccaccttgaacaatgcaccaccaaaatgggccgttccgaactcggttggttgtccgagacagggaatgtttcttggttcggagggtgctagaagaacctattgtaaaaatgattaatggagaacctgaagaagtatcaatgacccataagatttttaattcattagtattttagttatttataaaattgcgcaaaaatgtacaaagtctgtaataaa

SEQ ID NO: 62623 - DNA, 788 bp, Heterodera glycines
atgtttttcaacccatcttcacagtttcggatgcatgtgaactcaatcaagcgttggcactgtgcggtccacttgcgccaacgggtgctgatactgctcgaacttgtgctgtgtgccgttgtgccattgccgcttttgcgtttgccatgcggtggtgacgcgttcgcgtgcgcactgatgttcctccggctatactggttaccacgcgtgttgcatttgcgctcacgcctcagcacggacgcggcagcaaaatccatcgcgggactgaattgtgtgaagacggacacgcgcttcctgttgaagcgtatgcttttcctccacccaggtgggttctaaattttttttgtgaatttttattttaaataattttcatttttttttttttgctctatgcgagggggcagaatactgattgctaataaattaattttaaaaaaattgtaatttaattttggtatattttctcttttattactctacgagagtgatccgagattaaattagaattagtcacctgtcaatctatatgcttcttaatttctataaagttttattttcatttttaaaactaactttcgaaatggttcaattcttaataaacttatataaaatacaaatcattattatttaggcccaactctttctgcatttgtggtcagtacatttatttaaaatttaagaaatttttggaaaaattgaattttagttctgtttttggcttattggtgcctatattcttcgcttatgtgaaaggtgcattcattgtgcttaaaaaacttttaaataaa

SEQ ID NO: 62624 - DNA, 63 bp, Heterodera glycines
aaattgggcttcgccttcggcttcggcttcgagtgctaagccgagcttcgcccagccctgatc

SEQ ID NO: 62625 - DNA, 355 bp, Heterodera glycines
atgacggatggaaaggaaggatgggagggaggggggggacatcatgcaagcacgacaggaaggaagacaaaggaagaattggaaatgagaaacgaacggatggggaagaatggaaacggaaggaaagatggtgaaaaagagaaaaggaagagaaaaaggaagagagaggaaaaagaggagcaagaggaagagaaactgggaagaacaatgaaaaaggaagaattaagagaaaggaataaggagggaaggtctgatgcctttgatcaatttttggggaaacattcttcctgatgatgcccctcttcattcattgagaaaaggttttttgaattggctaagatttcagattagccaa

SEQ ID NO: 62626 - DNA, 105 bp, Heterodera glycines
atggccgagagttggtcactctgtcgagaatgttggctgtccttgccgtgctggtggtcatgcttgttttgtgtgcttgctcttccgaactcatcaatcggtgaa

SEQ ID NO: 62627 - DNA, 798 bp, Heterodera glycines
atggagccgaaaagcgatgtctgtgcggacagcgacaattcgttggtctcgggaatgggcacgcctcagacggaagtgatccgagtgggcggactcgcgaacgaaggccgaacggaggcgcaactgaacggcgccggagggggcggcggcgcaggttcgaacagagaggagagagtccgttttgttggccaccctagccatggccacaagcatttacaaagggttgaaaatgcacaaaatcattcaagcttagcctccatgtctgtaatccccgatggggtgtgatattctgctgaataattgccatttccaaaatgtttgtccgaattcgtcctcccattttcagatcgattggccgccggttccctggacgcccaaccgtcgccggtcgtaatggtcaaccatattctcgtctggagttccatctgcagtcagtcgccccctcagaagaccttcatcatgtgcaatttcctcgactctgatcaccaccacttcggcctcaaacccggcacttccgcttcgctcacttttgtgctccaaaaactgtccgcgaagaccgagccgtccggctgtatttccaccccttactccgttaacgttgtgctggacgaactgtccgcgttgggctaccgagcgattggaatggtcaacaaaagggcggacgaagtgctgtggacacttgcaaaatgagcggagggggggggggcaacaaaagtcatttcgagagagatttgcaacaactctaaataattatattatcaatcgcttgtcgggggaccggcttaattttgcaaatta

SEQ ID NO: 62628 - DNA, 555 bp, Heterodera glycines
aaaaaggaaacggtaaaaatcaaatccaatttcagctttcactcgccaacaatgcactggtgagaagcattttgtaattttaatgccattagtgtgacaagggcctcattaggcaaccgatcggtgtctttgcctttgattgatgctttaggccgttgcacgattgtctgatgctcgaaccgacagaaagtgaagacaaagcggagatggacagatactgtgaagcactgatagccataagagaggaaattgaggacattgccaggggcgaattgcacatcgatctgttcaaagtaagcggcgatcactcgcggcactgtcggcggagtgccctcaaaacaaagtgaatcgatgccaatcccaaagaatgcgccgcacactctgtccgtgttggccgcctccgtttgggaccgcccctattcgcgtgagcaggcgggatggccaaaaccatggtgccacacgtcacgaaaagtttggccaactgtcggccgaatcgacgactcatttggcgaccgaaacccattctgttcatgtcccccggtcaaaggggacgaa

SEQ ID NO: 62629 - DNA, 1108 bp, Heterodera glycines
atgagtactcgttgtgaaccaatcggagcagaattaagaccaattgacaatgtgtcaactttggcagttggcgatttgtctgccgaggccgccgcaataatcatacagtacccaaacacggaggggaaactgtacgaccatttggagcgactgattcgcgcagcccatcggcacaatgtcacaaagcttattctctcactttcctctctttctctggtcttttgtctctcagttctttattatcttttgtctctgtttcccttttttctctgatttttttcactctatttttcctatttttcagattctcgtcattctcgtctgtgatcttttgtcccttacgcttatccggtcgccgggtgacctcggcgccgacattgccgtcggcacttctcagcgcttcggacttccgttgggctacggcggaccccacgcggggtttatttgcgtcaaggatttggcattggcacggcaaatgccgggacgaattgtcggagtgtcgaggtgatttgatgaaaatggtgcaacagttcattcgcatttaggcaattaattcattcattatcattagtgaggattggcaggcaattagggcaaaagtgaattgcactgatcgtccgctgttcgttcattttccaagtaaatcctttcaagggatcagcagggaaagcccgcttaccgggtgagccttcagacgcgggaacagcacattcggcgcgaccgggcgacttctaacatttgcactgcgcaagtgcttccggcaaacatcgctgccatgtgccgttgttttgcctttcaccattttctgatcacttcgccattttctgatgttttaggtacgccgtttaccacggtccccgtcggctcgtccaaatcgcaaaaatcgtccataaatcggccgcttatttggcacaaagtgagcaatcattttgaaaagaaaattacatttccaatggtttcagaattaaaagcgaatggaatcgaagttgagcacaaagaatttttcgacacaatcaaagcaaagccaaaggaaatggacgactttcgtaagcgttgtgaggagcaacagatcaatgtgatccactcatgctcctctgatttaaactga

SEQ ID NO: 62630 - DNA, 340 bp, Heterodera glycines
atgggatcaccaacaaaattttctgcctcactcacacggacagcaaggagaaaatggtcatcatgccgcgttgcattgtcccggctatttgccgttaattggcagcgacgaccaaagctggtaatttgcttcgtaataagcgaattttggtcacccgttttgcatttgcttcgccaacctttaggggatggaatttggtgaacaatacaattgcgcacaacggcgaattcgtggaacgatacccgcgtctgaacaagaggaggaacgacgggagcaagcagcggaagacagaacgaacgaagaaagtgatcaagacgccgacatcgatgtcgttgactga

SEQ ID NO: 62631 - DNA, 170 bp, Heterodera glycines
attaactaaacacggcgtccggaaactgagctgctgtaccaaaaaagatttgtatgtgtggcgaagtggtttgtgagaaggtcaccaaagggggggtcccaggttcgatacccagtgcatgctattgatgtatttcgatgattttaatgaataaataaaaggaaaagtga

SEQ ID NO: 62632 - DNA, 1046 bp, Heterodera glycines
atgaaaaatgtggaaaacaatggaagtgagtgaccttgacaaaacgcatgtgggagaacattcgacgcactttgtcagcatttgcggcctcgcgaagaaagtccaattcttgcggaaggtttaattttgtctcgcggaccaaccatttcaatttgagttcgggaaaaacaaaggaagcgacattgacgaaaaactacgataaaaaaaataacagtaaaaatgtcgaaaaatttagaaaaagccctctaacaagcgatttattctattcgcattgtcaaaaatttgtttgaactgaacctccatcgtggccatgtcaacaaaactgcggtctttcacatgcaaatgttgtattttgactgccacgtattcgtcgcttgacttcagcttggccctgtgcacttgcgcgagagaagcctaaacgaattcgaagaccactcagagatacggaaaacaaaaatgccattataatgcaaaattaatctttgttaattgtatagaaatgaacaattaggaatatgaaagtaaaacgcacagcgccacatggacgggggtcgaactcgtcgaaaacatcgtcaaactgtaaaattgtagtgagtgagtgaaacacggcaaaaaaaatgaatttacatttttgtgcaaactcctgtagaagaccgtcttcatgtcgtccaaactgctctccggcgctttcgagtggagaatggaaagtgtggaagtgtacggctccggcaaaaggtattgcagcgaggcgatgtgttgaccaactttgatgaacactccgccattccttcgtgccaaactgagcagtcggtctgccccccgttgatggcattgccaaatccgttctttgtactccgcggattcgctgtccacacctaacaaagacaatttgtaatcgacaattgttgctgaagcctgcaaaaggaaagaataaatgaaaataaacgattaacaaaaaataaaaaaaattacagtgagtccaacacgtgcaaatcgaacaatgccaatgtgtgaaagtgaataatcgttttgatgcaaataataaa

SEQ ID NO: 62633 - DNA, 1610 bp, Heterodera glycines
gcttcagcaacaattgtcgattacaaattgtctttgttaggtgtggacagcgaatccgcggagtacaaagaacggatttggcaatgccatcaacggggggcagaccgactgctcagtttggcacgaaggaatggcggagtgttcatcaaagttggtcaacacatcgcctcgctgcaataccttttgccggagccgtacacttccacactttccattctccactcgaaagcgccggagagcagtttggacgacatgaagacggtcttctacaggagtttgcacaaaaatgtaaattcattttttttgccgtgtttcactcactcactacaattttacagtttgacgatgttttcgacgagttcgacccccgtccatgtggcgctgtgcgttttactttcatattcctaattgttcatttctatacaattaacaaagattaattttgcattataatggcatttttgttttccgtatctctgagtggtcttcgaattcgtttaggcttctctcgcgcaagtgcacagggccaagctgaagtcaagcgacgaatacgtggcagtcaaaatacaacatttgcatgtgaaagaccgcagttttgttgacatggccacgatggaggttcagttcaaacaaatttttgacaatgcgaatagaataaatcgcttgttagagggctttttctaaatttttcgacatttttactgttattttttttatcgtagtttttcgtcaatgtcgcttcctttgtttttcccgaactcaaattgaaatggttggtccgcgagacaaaattaaaccttccgcaagaattggactttcttcgcgaggccgcaaatgctgacaaagtgcgtcgaatgttctcccacatgcgttttgtcaaggtcactcacttccattgttttccacatttttcattttttagatccccaaaattcattacaattactcttctgacaaagtcttaaccatggaattctgcgaaggtggtcaaatcaacgacttggactatttccaagtccatcagcttgacaggcacaaagtgagtgaacggtggcgcttctcctgactaaccatccccgtttttgcactcaccaaattacccaacccgaaatatctattttaccgatgattttacgaaattgttttttggactctcaacggaattggcccatctctgagctcatgttctcccactcctccctctttttcagatttgtcgtctcttgggcgctttgtacagcgaaatgattttccgccgcggctacgtccacagcgacccgcaccccggcaatgttttggtcagacgaagtgccaacaccgggcgggaggaaattgtgctgttggaccacggcctttactgtgtaaaaagtccgtttggaaatgccaatgtcaaaacgagcgccaattgtcagactcttcccgacgaattgcgcattgattacgcgaaactgtggctggcgctgatgaagccggaccaggacgaaattcggagggtttgcgaacggatgaacatcggacagaactacggactgttcgcctgcattgtcacaatgcgctcttggaagtcagtcactgcgggcattgcgcggacagaaattgacgacagagag

SEQ ID NO: 62634 - DNA, 927 bp, Heterodera glycines
gctccctccgctcaactgccggccaaagcaccgcagcagccccaagcgccaaaagcagcggttgccccggcacagcaacaacaacagcccaaagcggctgcccctccaccgccaaaggccgccgcggccccgcaacagcccaaagcgactgccgtcgctgcgccgccgaagcccaccgcccctcccgcggtggcgcctcaaaagcgcgcgcctccgcccgttgtgcgcgaagtgcaactgcccgaagcgccgacccaacccatcttacgacacgcagaatacacgccgaaattggtggacgcatctgtcaacaaactgccgccagggcaagagccggatgaggaacaattggaggcgagcgcagtgccccgaaatccgatcattgtaagttagacggacgaaaacaaacgaagcggagggggggggggagacggaatatgctaaggggggggatctcggcgggagtcccaatcatttgcggatagcagcgatctttccgcgcaaaccgaccaaagggggaatgaataaaatgaaggggggggggataaagcccttttcaattccctataaaatcggatcggttgaaagtctgtcaaaatttaggaggacaatgcgtggcaagtgcagcggcgtgtgcagcccgaatatcagccggtgagtgaacgaattggcgagggaagaagaagacgagcgaaggaaatgctcattggcttatcggagaccatttggcctttgtttttgcaggtccaacccgccaaattaaatgcgactggcgactttttggtggagagtgaggcaaaggtcgagaccaattaaacttatcatttatcggttaattaattaatttggtgtcagaaatcgattgtgcccgaggcggtgggctattcgaagacaaaatggaacgaattcccagaagaggaagagaaa

SEQ ID NO: 62635 - DNA, 254 bp, Heterodera glycines
aaaaataaatcttgccacaaaaaaagacataaacagaaaaatattcaaaatttttaatttacttttgtatgcaatttcaattgaattgtcgagaagagcacggaaaatgtctttgacaacgttcgggtggggatagcccacacatttgtaaatgttttcctcgtctatttcagccgatgttgacaaagccgtgctctgtgatcaattcgcatttgatgatgccatttcatacatttgctaaaaacctgaagaat

SEQ ID NO: 62636 - DNA, 298 bp, Heterodera glycines
atggttctctcaaaaattccaattcgtcgctccttgcatacttcggccccgttatgtaagtggtgttcccattctcatttcgcactttaccttttaatacaattttaggccgtggagccgtttctcaacccggatggtacccgaggtgagtgcaccccatgtctttgagttgcccctccgttgccttccatttgcatttgaattcagagatcatatgcctgggccttacccgcgtaacgaagaagaacgaagggcggctgccataaaatacggactacgacccgaggattacaagtga

SEQ ID NO: 62637 - DNA, 131 bp, Heterodera glycines
  unsure (1)..(131): unsure at all n locations
gctgaaaaaatcgtcaggcattgaaaaggngaagaagtaaaaaaagattagcagacgatggaccaaagcagacgattgacgccttatttttctctgttttattctccctttgataaacaatgattagctaa

SEQ ID NO: 62638 - DNA, 297 bp, Heterodera glycines
  unsure (1)..(297): unsure at all n locations
atgacattctatgcttctcttgttggatacacgggaagaaataatagttagtccttttgttgaatttttagaaattctatccgtccaatcggcttttggaattttaatgagtaaatcaggaaccgtaaatgaaattctatgcttctcttgttggatacacgggaagaaataattgttagtccttttgttgaatttttagaaattctatccgtccaatctggaattttaatgagtaaatcagtaaccgaagatgccattctatgcttctcttgttggatacncggccaagtagaatag

SEQ ID NO: 62639 - DNA, 300 bp, Heterodera glycines
atgacattctatgcttctcttgttggatacacgggaagaaataatagttagtccttttgttgaatttttagaaattctatccgtcaaatcggcttttggaattttaatgagtaaatcagtaaccgtaaatgacattctatgcttctcttgttggatacacgggaagaaataattgttagtccttttgttgaatttttagaaattctatccgtcatatcggcttttggaattttaatgagtaaatcaggaaccgtaaatgaaattctctgcttctcttgttggatacacgggaagaaataa

SEQ ID NO: 62640 - DNA, 614 bp, Heterodera glycines
atgttcatgtgccacaactcccttcaaacggacagccgcaaaacccatggaatgttcatgtgccgcaattcccttcaaacggaccaccgcaaagcccaaggaatgttcatgtgccacaactcccttcaaacggaccaccgcaaagcccaaggaatgttcatgtgccacaactcccttcaaacggaccaccgcaaaacccatggaatgttcatgtgccgcaattcccttcaaacggaccaccgcaaagcccatggaatgttcatgtgccgcaattcccttcaaacggaccaccgcaaagcccaaggaatgttcatgtgccgcaattcccttcaaacggaccaccgcaaagcccatggaatgttcatgtgccgcaattcccttcaaacggaccaccgcaaagcccatggaatgttcatgtgccacaactcccttcaaacggaccaccgcaaagcccatggaatgttcatgtgccgcaattcccttcaaacggaccaccgcaaagcccaaggaatgatcatgtgccacaactcccttcaaacggaccaccccaaagcccatggaatgttcatgtgcccccactcccttcaaacgaccaaccgcaaaaccatggaatg

SEQ ID NO: 62641 - DNA, 153 bp, Heterodera glycines
atgagtcgaaatcgtctcccaccagaacttttactagaaattgtcctctgcgttcgcaggggacacaacacgcctaacatttgtttctcttctcgcattttacgaactttcatggagcctcgagttgcactgtggcggagagtttggatttct

SEQ ID NO: 62642 - DNA, 1160 bp, Heterodera glycines
atgcaaactgctttgttaccagtcggtaaacgaagccaattcacgtcaatcaaatgcgtcaattgcaagcaggagttggatgccatggatggttatgcactggtagattgcagtcataaatggcattttgagaagccctttgctgattggtccgtttgcacaatgatttttttgcattttttttttgtaggtatgcagaatcatctataaaaaaatgcatgaatgatgcttgcaagaagaaatttacaaaagttcggtgtcgagaatgcaaagaaaacttgggggccggtgttttcgagacaggatgttactgttctgtcacgtcggcatcacatttacacgctgatgaattggaaataaagtagaattatgtaatttttttgcatatttgtcaatattttgaggctacgacaaaacactggtaaatgtctcgaatgcaagagtcagcatcccggtttttgcatgctttgtcagcagctgttcaaattgcagccaactggaatccgccaaagcaaagtttttttgcgctgctgttcggcatttttccactatgaatgctggtaaacctggctgattggtgttccttttaaatcctttttaaaggtattcggaacaaccaagagtaagttgcccatgtcagtgcaaaaaattatggcaaggaatcatggatttgcattatcagtaaggcttatattatataaaaatatagtactatatgttatagtgaggtttgtggggtgaagaacgctgctccgctgcgaaacattggcaagaagaggggcgttattggcggccgacctcagaaagccgacatgtcagcatctgctgtttctgattcaaagaattctgccaaagtttcaaaaagaatcgtttccggttcggttgatcaggcattgatggactcacaactcataccacgtctttccttggttccttgccgcagttcaagaattagctatgcagggatcaagcgtctaagcggccagtacagaatgtgtccttcaagaggagggggagggggtggcgcatgtaccgaattttgctcgtcgacaaagagagttatatttttgagaaaaccagttttaaaaaaaaattttttttgaggcaatacttttgcacctgactgtagttgctattattttgattttctttttaataaa

SEQ ID NO: 62643 - DNA, 381 bp, Heterodera glycines
ggaggatatctttcctcaaagattctcaattttctgctgttaaggtattaccaacccgacgaaattgccaaagttggccttccattgggtgacattgaaattgccgaactttcttcagaagaagaaaaggaagcaccaacaaatggtgatttctttgtcagcattctctattatgccttcttaatcatttaatttccattttcagttttgccaactgtaagaactgacgctccgtcttcgcttttgtctcaatctccgaaagtaatcgcatcgccggtcgatcggcgcctcatccgcgagtatggcatagatacggtcggactgaccgggtcgggcagagacggacggattctgaaggaggacattctgaacttggcacac

SEQ ID NO: 62644 - DNA, 456 bp, Heterodera glycines
atgctggtgtggtaagtgtgaagaactgtgttcctccaggcaaaaaattctaagaaaatttataagcatttgtagggttctcagcagtttccctgcaaaatttggtgagcttctgatcagtctagaaggttgggtgataaatgaaaaaaataattaaaaaaaaataatacttgtgtggtattaattcataaatattttttttcagaaaatgctctgaaacgcaccaaattttatttacatgttagtttaggcactctgatgctttttctatcaaaaagggagatgaataaattttaaaaaatttttaattcctttttaaacaggccaaaaagtttaggcttaacttttttttcagaaactgatcagaagcgcaccaaactttgcagggatactgaaaggaagagaaataacctattttaaatattatctagtcagttcatttaaataatttattca

SEQ ID NO: 62645 - DNA, 380 bp, Heterodera glycines
gctgatgctgaacatcccactgatgctgctgttgtggacaacttcgagacgcgcgctcgccgcttcttcgacctgatcaacgacggcaacatccaacaacttcgtgtgctgatcgatgcgctggacgccgacgagctgaacattttgctgcggtggatggttgatccagtggagcgcgactacacccgatcacgatcagcactttggagtgccttttttcgacaacacatcgacattgttgatctcttggtagtgatcaaacaaatttatcagtcggcactaattttgtatggcattttcagttggagaagggcgccgatccgaatgagccggtggttggccgtgagaacgacattaacacgagtgggtggtgttgttga

SEQ ID NO: 62646 - DNA, 2257 bp, Heterodera glycines
atgttcaaccatccatccattgctgagagacaaataaatattggtttgttctctcaaaagggtcaacagaattcggtacaatttgacaatccatcggcgaagaagacaaaaagttatgccgaagccgtgcgattcgaattggctgacggaggaaacagtgacgaaccaatgatggaatgggaggggccgcagaatcagcgggaggactcaacgcatgacgacggcactctatcggacaatggtaagaaaaaatggggtatttatctgtcaccagacttcaaaaaaatttatacgggtaaactggtttggggtttttagggtcgggaaaacgattctttcggatcctgaacccaaactcgaacaaaaagtcgaaattaccccatttggtttatgctgacaataattagttttagtgcattctttgcaacccgttgcgccccccgtcactgaatttggaattgatttgtttccgattgtttctgcaaaacaaactggagacgattttggtgcgcggaatgttcagcagcaggtaattcagtggccaattgttccagtttctaattaaactaaacgtttcaggaccaaagtcgtcgcaacgacggatcagacattggactatttgaaaaaaagaaatgtgttgcctcattggaaatccatcggatggacaatccaaacgaacgttgtgtagtcaaaaagtacgaattcttcatggtgacggacaatgagcagcatcaaatgaattccgctgcttttgcaacttctgagcgttgtaacccaacggttggccaaatgacacagaagattttgtcggagcattttgaaacaccaattgacaaattaattgcacaattcgacatgcaaatgcaaatttttgatacggattttgctgacggacgttttgtcgacatggaaaaaaattggtcagctgaacttgttcaaaacaatggtgcctacaaagtgctgctccattcaaaaatggacgccagaagtggacgtggatatgaagatgtatccaccagccaaatggccaaccgtggaccacgtcagcaacgtgaaatgtttggcaatcaaacgtacaatgaatatgagtccgacatgtttgatcaacaaactgttggaaatcgtagtaaatgtgggcggcccattggtgatccatcgttttgtgactccaacttggaacaaatgtaagttgaaaacattattcatatggatattccgagtattctcttcatacatttttagtggggggtcgagcccccctgacttcgttcgtatgaggggccgaaagaggggggggggggggactttgtattggttgggacaaaaatctgaaaaaaaatgtggggaaaggtcggagacgaaggattaagatagatgcgacttcgtaaaggcgaagagaatttaaataatttaacatacaaaaaaatttacgaaaccgagtaatatttcgtattttttttatcaaataggtatgatttttaacaaattgcacttcgcgaaattgtttctggttacgggcctgaaggacttcgtaaattttcgtccgacccccccccccccactatttaatgtatgatttaaagtaattgtcttttaaattcttatatgtttgttgttgcttctttttttctctaaaatccattttatcggatatttagcggtcgctttcttctctccgaggtgaaggcgcctctcgccaatctttacgatgtttcaacggacaatttcgtcactttgaatgatcatggatttgtcaacaaaatggccaaaaacgacgaaaatttgacaatgcaggacaggccaaatatgcgcgaacaactcattgaaattgaaagttttgacgatttgaaagaacgcaccaaaatattggactttgatcagaaagttgctaatacaattttaacaaaagctatttacgcttttgttatagttgagtgtgatcagccaacttgcgcattttgacgatgccaatccccttggccagtttctgcagaaagcggcagctcaaaccgaacgtggcaactcatttggcttcattaaaattgtgccaaaaacggtagaaatcggcactcactttttactctcatgaaacttgtctatgttttgcagacaatttcactgaaattggtcctcccaaaaatgcgtgacatcattctgcagcagttgcctgtaaacaatgccacacattttgtcatgtcggcatgctatgggtcaattgtggcagggatcgtgacttttaatgagcgcagtgccgcca

SEQ ID NO: 62647 - DNA, 1615 bp, Heterodera glycines
atgacgcctcttttccttgctgtccgccatgccaatttgccgctgtgccgtgtgctggtcgcgcgtggtgccaacattgacttgggcacggactttgccacaacgccgctgatgcacgcttgcaaaagatcgcaaacggaaattggtagagagacgaaattttgaaaaaatgtgtaattttttcccgtcttttttccccccacagtcacatttcttgtcgagaatggtgccaacatcaatctgcagaatggtgatggggcaacagcactgatgtacgcgtgttacaagggaaatctagggaaaaatttccattggcgaaatgttttccaacatttccatttgaatttaggtggacattgtgcgcttgttgctgacacatggtgcaaatgtcgagcaaatggatttcgaaggtgggggattactgttacagtacccaaaaataccataccacaaatgttgtcctaatttcaggattccatttcgcacttaagagcgctgccattggcggcagtttggaggtgtgccgtctgctggtggaggagtgggccgcagatgtcaaccaacaaaccatccaagagcgatacactccagtgatttgcgctgccagtaaaggacatttggccatcggtgggagagaattgtggcaaagtgccaaaaatgtaatctccctaattttcagtgaatttcctcatcgaacatggcgccgaccttcaacatgttgacgtggttggaaacaacgctttgatgtgggcagtgatcagtgggaagactgaaatggcacggcatttggtggccatcggcgcggacattaaccaacgggacacggccggtgagcagcagcggaagtggccaaattgaagcgtttagttcactttgttcccccatttcaggcaatcgagcgcaggatatagcggtactgaccggacatgccgaaatgatggccatttttcgtactacggcgacggacaatgggcaacacgcggaaggcaccgatgggtaaagaaaaattgttatttttgatcaaaaataaatgttttttcccatttttcagacagcaaaatgatcagcaacagatgtgacagcagcacagagagagcgaatcgctggccaaaagcggcggatggatttattcggaagacattaattgatcactaatgtattgtatcttattatgcccaccatttctatttgatccgatttgtctgtaatatgttccaaatatctctgattgtacatataatttgtgagtcgctgtataaatgtcgaatgaatttgagaaaaactcggaatttttgtaacattttgatttaaatctgccagcctttgtgtttttaattgaagctattcagtcgtcgtcgatttaaaaaagcaaattttcggaatccgaaaaatttctgggcgccaatcggttggtaaaatggggtcgatggcagttcgtacaatttcaaatgggaattgccataactagggctcgaaattatatggactaaaaaacgtcaaatatgacataaaatatggactaaaaatgcccgaaatatgaagaaagctacaaaaatggccaaatatggaccaaaatatggactaaaaactgccaaattataaaaagtacaataaa

SEQ ID NO: 62648 - DNA, 452 bp, Heterodera glycines
atgagtaaagacgaaatggaagagaaaaaggaagaaagggaaggaaacagagaatgcggaagaaaaaaatggacgaagaaaaaaaagggaattatggaagatcgaggagaagaagaagtaatagtataagagaacaaggaagaacgggaagatgaagaaccggaagaagaaatagaagagtaaaatgaataaaggaacgaaaatgcggaagaaacaatggaagagaaaagaaaaagaagacaattatggtgaagagaagaggaaaaaaagagtgaatgataaacaagtgtaagaggaagaagaaatggaaaatgaaaaagaaagaaagagaagacgaagaagcgaagataaaatggaagagaaaaaaaaggatgaattatagaagatggggaagaggagaatggtgaagaaaggtaacaggaagaagaagtggaagaggaaaatgatgagga

SEQ ID NO: 62649 - DNA, 665 bp, Heterodera glycines
tgaaataaaaaaatcgattttttcaagtgtccgtttgggggtactcaaacaattatgggggagcaaaaatccaacgcagaattaaagtacagactatagggaagctattcccgaaggattcggtctccccataaatctgggcgcatcggttcggggggactgccccgaaaacaaaaaaatcgattttttcaagtgtccgtttggggtactcaaacaattatggggagcaaaaatccaacgcagaattaaagtacaggctatagggaagctattcccgaaggattcggtctccccataaatctgggcgcatcggttcggggggactgccccgaaaacaaaaataaatcgattttttcaagtgtccgtttggggtactcaaacaattatggggagcaaaaatccaacgcagaattaaagtacaggctatagggaagctattccggaaggattcggtctccccataaatctgggcgcatcggttcggggggactgccccgaaaacaaaaaaatcgattttttcaagtgtccgtttggggtactcaaacaattatggggagcaaaaatccaaggtaaaaataaagtagaggtatatcgaagctattcccgaaggattcggactccttataaatctgggcgcatcggttcagggggactgccccgaaaac

SEQ ID NO: 62650 - DNA, 573 bp, Heterodera glycines
atgcctatcgtggggtaagcggcgggggataattgacttacgtccacgccctctctctctctctcccttcccttattctttctattttctcagcctctcattttgtcactgtccgctttccctttctccccaatatttccacctttccctatctctcgtgctggtcctctccgtccctttgtgccattggccaaatgccgtcccccgcggccctttggcactgcgccgcggtccgtcgctcgcttccccccttaattactcacaatgcaatggcacaccccggccgggcagcacatcgacgacgaacacttaaaagcttcgccgccttttcagatcggataataaccaaataattctcggctttatccgcacggattatccattcggagaacaaaaagcgcaacaaaacggaggagcaaaatgcgatgcgaaggaggagaaggaaaatgggaagaaagaagcagcaaaaaatgaaaatgtgagtaaaaaaagtgaaatggcaaaagaattcacttaatttgtttatttttatggcataaaaaatcattggcatttttaattgccctaattaaa

SEQ ID NO: 62651 - DNA, 803 bp, Heterodera glycines
atgagaaatggatcttatgagaacaaattgacacttgccattgacgtcactttgaaagaagcagaagcgatggacaaaaaggcttctgctactgaacaaaacaattcattcggcacaatttcgatggaaattgaaaaagtgtccgaattttcgcgcgaaattttgtacagtgaccgtataagcgaaaccgtgcatttgaagggatttccatggcaattaatggcaaattttaatccagacccaaacggcgtaagcagcacagacggcagcacggaattatatttgggcttttatctttggtgtaccagtttgaaaagaggtgaaaattaagaatattatggaatagcatttttcaatggcaaatatttgagtgaaaaatattcaaaaattgtattaaaaatatactcgaaatttgccatcctcttggggctaaatttccagaaatttttttaaccgtatttcgtttccgtttcggtaaatatccatcataggtcccagactcaaaattgcataaaaacacttttataagttttcttaggtgctgaaaacgcctaaaccatcaaaaaaactgcgcgcagagcgtttaaaccggtttttgaacatgttttaaaactcgaaaatttgagtgaaagggaggcaactgaccttttaaaacggtcaaaatcacacaaatttggtatccttcgaaagctcttgatgagctaagtctaaaaaacaatgtatacattggaaccgacgccatttgagcactggggcaactgagtcccagtgaaaatgaacatttcagtaccgaaaataataaa

SEQ ID NO: 62652 - DNA, 836 bp, Heterodera glycines
atgaattgcactgtcataaataagttgacgactctgtcgaaagtgcgcgacgcctttcggatcacaaatttgctgatttgtatagcatttatgattttgtgcgcttttccaatgtacaggttggctcgagaacgcctgacattgtacatggtgatcagcaaggtatggtataatcagaatggacgcgatcagaagcgatcttgatcacgcgggttttatcactcaacctgtgaaatgttgtatattgagtaaagaaaaccgtgagaaaagaattttctagacacacctaaattaaacattattagtatcattcgatagctcaaagtgtcatccattcgtatacgaagttaaaaaaaaaatttcaccaatgattcagatgtcaaaaagtgggaaaaagtgaatgtttcaatttttttcgtcattgcttttctgaaacggattaaattttttgaaattttataattcttataaaggattcttaggagctatagaatgtaaaaaagttatggtctattttggttaacagttatgaaaaaaagttttggtccaaaaaatgaatcgggttttttatattaaaattgaatttccatgtttctctgtttagctctttcccggaatattgttctttttatcaaaaatcatttccttcccatcaacgggttttataattccaaatgttgtgttggatattgttgcaaagattgcatttatttgccagaattacggtgttatttgtattcgtttgcattacgttgtgatggctgcaaacagagcacatgcggtgctgttcccattcaattatgcacaaaacatcactaaaaagtaaacccaataaa

SEQ ID NO: 62653 - DNA, 430 bp, Heterodera glycines
atgtggcatttttcgattggcattgctgtcatttttggtacgctctgttgctcaaacggaaacggttcgttcagtatatatagttaacaactatgatttttaaactatttataccattttcaataaattgcactaaccaaaattgagaatgatttttctaattttttttcgaaatatatgaaatttccttgtccacgagtcaatcatgttcattcccggcaattaaatggacaattgttccttttttaagtgttcaatgacgtcgaaggtttcgtgtccgagttcgcctcaatgacggatgcgggggcagatgtgctcgaaaaactcggccacattggaaaggggacattcagtctcttaaaattcgccggctgttaaaattttttcagatatttgcaccaagtggttgtttgtcctgcttggcaacaaa

SEQ ID NO: 62654 - DNA, 571 bp, Heterodera glycines
atgcatttaaattataaaaacatttttcatattttaagtgaagccgagcagttcgacaaggtcctggacatgctgcagatgcccaacatcaacaacatcacaaccaacagtttaagcagtggtacagactgtgctgctgttggtggtgtgctcggattttattcaaacaaattttatgtgcacggtaaaacggtggacgaagaagcccaacagcattgagcgggacggcaaagttggaagcagataaaataaaactgtgttcatgtgattaatgccttggcatgacaaaaacgaagactaagtttcatctcccaattattcttctttgttataatttttaaatataaatcaaaagcattaatttgtattagaaattttataagatattttatcctttcaattatactaaaataacaatatgaaactgattgattaatattgtttgtctaaatctacaatttttagggaaaaatgtgaacacacttataataaacacattgcttacaaggctttttgcccactttgaatcataacaggaaaataattttgtatttattggcaacggaataaa

SEQ ID NO: 62655 - DNA, 207 bp, Heterodera glycines
atgccaacattgtctaaaatgattgttggtgtgtgtacactaattaggtggcaaattttttcattattaaaataatttttttcaatttaaatcagaaatgaataataaattttaaggtaaattttttaaagctgatcagttcaaggcaagacaaattgaatatcaaaacaaatattcaaaaaattgatcatttgttttttaaataaa

SEQ ID NO: 62656 - DNA, 281 bp, Heterodera glycines
attttctaagaaaaaataggtgttttgggggcgcggcggtgccgataggcgccccccggggggggaaaaatggaaattttgatcatttataaacaggtttttactgaaaattagccaatttataggtaaaattttgaaaaattttatgggaatttaatccaattcttaggggtgtaaaagtcgcatttcgcgccaaaaagcgaaatgcgaaaagcgaaatgcgaaacgccaaaaatgcgaataatgcgaaatgcgaaaagcgaaacctaggcacatccctg

SEQ ID NO: 62657 - DNA, 830 bp, Heterodera glycines
atgacaccaataatattcagaaaagtgagagaagaattcaaaaattctgccaattatattaaggagctgcaaataattatgagacgaactaatacaaaaaattttttgagtgttcttatagagattaatcaggtataattagtactaatgatgcaattgataggtggaacttgccggcatttcgcttgccgagttcgtgcatccggatgacgcgaccttgctgcataatcagcttgcactaaatttgcctgcaagcgcgttgcttgtcctgcaacccgagctgcgcttcacactgcgcttccgctgtacgccaggccggcgcgcaatgatgggatgcaatggcattggcatgcagcccggctataagccaattcactttgtcggcacgctgcacgctgacgatgatgggagattcttggtaaaggcatggtaattatggaaaagagacctaccgtactaggaaggaaaaaaaatgttctcaaaagtagggtgttgaaaattttttgtttgctgtttttaaatctctcaattaattgtgcgttaattttcatatataattcaaaagagaaagctttggaaaatttttataagccatatatttttatttaatttcaagtttgttgttttttacgtttttttaatccaaattccgaaatgaaattttttccaaatttttttgagtgatttttaattctaaaattaagtgagagagtgagtacatcaatattatgataaaccttttttaattattttttaatttgttatatgggttaattacaaattttttgaaattaaaaatttgtataaaaacctatggaatataaaataaa

SEQ ID NO: 62658 - DNA, 76 bp, Heterodera glycines; identical to SEQ ID NO: 51235

SEQ ID NO: 62659 - DNA, 1435 bp, Heterodera glycines
atgaccatcgaacaattgaaacagtgtatggaagacgcaaagcgctttttggccgaggtgcgttggagttcatcgacggaattgccaattttgcactaaaaaggaacgcgctaaacgcccgagcccgcacttggacaacaaaatactgaccgcatggaatgcccttgccatctcgggcttttgtgctgctgctcaggtggtcattttaatttggattgatataaatgggaattcaaattctatcaaattaaatgagagaattcccttttttgttaggctgtcccaacgcgcgcggccgagttccaaaaacgtgctgaaaaagcggttgcattcattcgcagccatcttttccatgggggcgaattgctccgatcggcttacttggacaatttgggacaagtcgttcaaatgtccggagtaatttgccggaaaataataacacaacccttgttttagaagacatcccatcaaagcgtttgccgatgattatgcttttcttatcgaagcccttctcagcctttactcgctgaacttggatgagaatttgcttcaatgggcgcataatttgcagcttcaaatggacgaacttttttgggatagcactttcgactcgggctatttcatgtcgagggttggcgatccgtcgataatcgtccgaatgcaagacgaacaggacggggctgaggtgacaccaatgttagccactgttttactattcatcgtttagccctgcaccaattcggtggccgcttccaatttgctttgccttggctttcttctcgattccgctgactttcgtcggcgtgccaacgattgttttgccggcgcagcaaaacgaattgagaaataccctttcataatgccacgtatgctaatcgcattgcatgccgcaactcatccgccgtaccaagtgaccaatttgggaatgaccgacataagcagcaaatcttttaattaaaggtaattgtggtcggacaaagcactgacgaggcgactcagaaaatgctcaaagcgattcgtgcgaagtttcttcccatggcaacacttatttttatcgacaaggatcgccctggttagcaggatttatttagccatttttgataatgctttgattgtttcacatgcttagatcaatggattttgcggcaaaattcgcatttggcggattatgcgagtgcctacagacccggacagccctcagtgtttatgtgccgtgagatgtcttgtgaaatgccgatcgcaactctcgaggaactgcaaaagcgactggcagaactgtgagggagtctctgccggcgcatttgttaattattcactgccctatgggaattgaagccgctatttattattttcattgtttcgtttcgaaatttcccgatgggaacagtcacaatgtgaccattcgctatgcccgagggcatagtttaattgatga

SEQ ID NO: 62660 - DNA, 109 bp, Heterodera glycines
ttcctgtgtctgtcagttatgcggtattttgtggccattagtgctgctttctcctggccattatccgtcgactcaaatcattcctcgggtatatttatgccccccccct

SEQ ID NO: 62661 - DNA, 1301 bp, Heterodera glycines
atgccaacagtgacagttccaactgtatcacagcctacagtaacaccacgctgcttattcggtccagatggaaaatgcctaccgactccaagctacagtactgcagacccggtcacaaacacatacagcacacaaccagtcaccaacacatacagtactgcagatccagtcaccaacacatacagcacacgaccagtgacattcagcacacaaccggttaccacttatagtacacgacctgtcacttacactaggcgaacatacagtacaacagatccaccatcgtcacgttcgacctacagtaatctggcttaaatttaatgtttgtaatccacacaacttttaggtgacgatgagaacaacaaagagacggtaacccctgctggaattgcaagcaatatttcggcaaatttgggtactgtaaatggaaaaacaattaattttagttttgtaaaactaaattttattttagacaaagtagcggagacgaatttccatgattcgccgattcaagtacagcttgacgatattgatgacattgagctccaaactgggccagacaattatgatgtaaagctacgaagtccactcgaaaatggcggtaaaacaaagttttaaataatgctaattaaaatttgatttttattcatgaatatttaaggcaaatatttaatatttaattaaattaaattaaaaaattgggactacgactttggtacgtcggcttttttcccattaagatttagcgatgcaatttcgacacccaaaatttttcggaaatcgaaattctgatgcctaaaagattccaaaaattggtcttttgagccgaaaaatttttcggaaatcgaaattctgatgcctaaaaaattccaaaaattggtcttttgagccgaaaaatttttcggaaatcgaaattctgatgcctaaaaaattccaaaaattgatcttttgagctgaaaaatttttaggaaattaaaaaattccaaaaattggtcttttgagccgaaaaatttttcggaaatcgactaccctaaaaaaacggccgtgtcgtacaatcaacgccgatctgatcctatcccaattcaaaattgtgtaaaaatgaattttttcatataaaaagttgtattatgaattaagtaatttttataaaaaacgattttttattaaaataaataaatgcaatttcaaaaaataaattcagtgtgtcttcaacaaattgacaaggacagaatggcaccgttaatttacaatgcccatcagccgggcatcaccacagtgtccgcctcattacccagcgaaca

SEQ ID NO: 62662 - DNA, 737 bp, Heterodera glycines
aagggacgcgcagtactcatcggagcggtaaggattttacgactaatttttatgatacctaaacccggtgcttgatatacgactttaactgactgatccggacaatttacacgacgaaccgggctttatcaccaatttatgttcaccagaaaatacataaatttatttatgaaaatgtgctaaaactattactgttatctcaagagcctgccgagattaaaaaaatttcttgagttaaaatcacaaacatataataaaaagacttaaatggcgaatgatatgatatttttgattgtatatgaccataaccaaaagaaaattaaaaattatgttgataaatccataaaaattaaatggttttaaattcgaattccaactaaattttgtcaatgctttcaggctgaacgtcaaaaattggtgtatattctgaacagagatgcccatgccaatttgaccatcagttccccgctggaagcccacaaaaactacagcatttgcttcgccatcaccggcatcgatgtgggcttcgaaaatccgaccttttcatgtttagaaattgattatgaggtgggttattaagaaataacacatttaaacgattcgtttatttaattgaaggactccgaccacgacccaacgggcgatgcggcgaaacaaattcagcagacactcactttttacgagttggacttgggactgaaccacgtggtgcgaaaatatgccgagccactggccga

SEQ ID NO: 62663 - DNA, 87 bp, Heterodera glycines
atggacaatcagcagggaaaggatgatgtgttgtcgtccaatgcatttgcatatcaacaaattgttgggccacagaatataacggca

SEQ ID NO: 62664 - DNA, 371 bp, Heterodera glycines
atggaaaagcaaagaattggagaaaagtgcgacgacgaaagggagaagagaatttcgggaaaagaagaagaagcggaaatggcgataattaaggtaaaaagagagaaaatggggaaaaaggaaatgaaaaaataaagtaatatttaaaaaagcttaattgattttacctaaaaaaataggcggaattgtgccgcgaacgggcggaaaagaatcggagacattcggaactgagcaaagtgcaccaggaactgatgcaatcgctgcaaaaggcagaacagttgcaaaagaaattggacagagaaatgagagaacggacaaaagaaagagaggcgacggacattttgcaaaaggcaaattcaaacggacaataa

SEQ ID NO: 62665 - DNA, 662 bp, Heterodera glycines; identical to SEQ ID NO: 54633

SEQ ID NO: 62666 - DNA, 604 bp, Heterodera glycines
atgacaaacgaagcaaagggaaatcatcgaaacgaacaaggagagaaagtgagtaagttgggatggagttggaatccgaggatgaagagttggcgatcgaacaacggagaaagaagcgagaggaactgcttgaaaagctaaagacagaaatgggcctgactgatcatgtgaatgagcagcagcaaaacgatcggtataattcgacgcgatgtttttatttaaattttgcattttcttcttcaacacagtatccaagaaaagacgagtgctgcttcatctccaaagcacacgtcaagcagcgactcttcgagtgattcggaagacaatggcagtggctgtaacaaaagcattggccctggaggatggtgaaagggcaggtgatgaagtaatagagtgtgaaacaatacatgttgcagactcaaacgaacaaaatgacaaatttatgtgtgtctattattaggaatgagaggagcaaagctcaacatagcataggcggcaatgcataataactaaatttcaggattataattcataatcaatacctaacttgcttttattttatatttacgtgtatattcaattgtctggtaaaatatttttgtaa

SEQ ID NO: 62667 - DNA, 131 bp, Heterodera glycines
gtgttaaagcgcgtgttgaactgtcaacgagccgttctcgtcgcgatcgggatgagcggggccggggaattagtcgcgagaatgaggaaaaatcacgcaaaagggaacataagtcacccaaaaagaagaaa

SEQ ID NO: 62668 - DNA, 3556 bp, Heterodera glycines
atggaaaatgccaacaatgcagcaaccaacaacaacaaaatgccaaaaacggcgggggcaccggagcagaaaaatggcggcagaaaaacgaagacgacgacaaaaggggcaaaaaatttgagcggctcttcgtcgccggatgggctttatcccaaattggctgctgctgctaacaataagtcgtcgccggacagaggcgagctgtgcgtgtcattcaaagtgctcaaaacgagggacgaactgttggtggacgaggagcatgaagaagaggaggaggacacaaacacattgggtaggttcggttgggatgaacaattaaaaggacaggaatttatgaataaaatgtcgggatcaagaattaggggataattaagcaacacgaaggacatattgttttattggctattttttaaaaaaaaatttcttggagagaaaattgaaatggttgctcgagagtcgaaattttctgtgactcgagaaccgagaccgggaattgacccaccactgagagttgcgcgagctcaaaaaaaaccggagaaatttttcgactcgcgagtcgagaaaggaaatttttttttcaaaaattttgttgtttacacaaaaaagaatcaaaaaattcatcccaaaattaattaataaaatattttgaaatttttactgctaattattgttttcattaattttaaatgatttgatagtttgcggaatacaatttaaaaaatctttaacacaacccatttacactttttgtacattttacggattgtttccaaattttgcagcacgtctcttctctgaagacgacgtgcactttagcgattcgttttgtgcaaaactgaatttggccgatgccaacgaacagcaacagaaacagcagcagcagcaggaggaggatgaggagggtgaagaggaggatgacgaatcggacaccagcgacagcaccgcaaaagcgggcccatccacgggcggacttgcggccaaagacacattcatcaagtgggcatcattcattcataatccctatttgttcatattcatgttagaccccaacgaaatgaagaagaatgtgtatctcttgggccatcaaaatacaaagaaaaaattcgacgggcccagccctaactagaaaaacgaaattttttttttgataggcctgggaattgaaagtcttcccccccccaaaaaaatgagtatttcattgtcattttgtttaagcatttaatttatttcaattttttttttttgcattcgccctttctccatggttatggatgggcctgcaatcaaaaattgaacgaaaacggaccctaaagaaagctgacgaaatctccctttcgctctctccggcaattacaaatttaagaaatcgaaaaattttctcgaaaattttagggcactaattagtattcatgctacctatttttgttgtttaatcagtcaattaattaatttgccacagggatttctccttctcccccgcctgtttgttgcgcattgactacgaggcaaaacgcgtgaaaactgatcagcagggcgcgctgatcggctttttgatcggaatggcaaatttgaacaaaacggaactgacgctgaaggaaatgcgcattgaacggggctttcttggcattgaaaaatgtgcacaggtaaaacaaaaagaatgtgaagagacgacaaaaatgaagctgaagcacaaaattctgttgtttaaatataatttttaaagaaaaaccattgttttaaattaattaaaaaaaaacacataaaaaactatgttataaaaagtttcgaaaaatcacttttcccgaattttttttcaaatttttaaaattttcaaaaaatcatttaaataaaaaaaagatttttgaaaaaacttagatttcatcttaaaaattgaaaaaatcattaaaaaaaattccaaaaaaaattttttttcttaaatttcaaaatttgaaaaaaaaaatttcaacgcgggggagaaacgtcatgcacccattttagccttctttctcttatttacagtttgtcatcaatgaatgggtgaaggacataatgaacaaacaattcccaaatgtggtcggcagtttggcgccaattaatgcgctcgtccaattgggtaaataaacaaattattttatctaattagggtaattaattaattatttttatgacattttaacgctttaagcgcaaggctttcacgatctgttcgccctgccctatgatgagctgagaaaagagaatggccagctgatccgcggcattcaacggggcaccaccagttttgggctgaacgccgccacggcggccattgacgccacccaacgggtggtcggactggtccaggcaagtgttttgcggcacattttgttgcttaattacctctttgatggcaatagcataattaaaataatttgtgatttggtttttaaatttcaaaaattaaaaaaaaaacaatgtccagtgaaaaaatttcactttccgtcgggtggatccgaacccatgtcaagaataaagtcaatttaaaaaaaaaatggaaaattagttataatgagacaaatgtcgattttactagtaaaacaaatgaggggaaaaactcattaactttgataaaccatttttatcgaattttctgaacatatttgtgcgccatttatagtcactgaaatgaaaagaggcaaatttgccaattttactttcccacaaaatatgtttaatttgtttaaaattgttaaggcaataaaaattttcaatttattttttattgttgtcttaaatgatttctttatttatttttgtattttattaaatattattagttattaattaaatcattcataataatcatttgcagaatgttgcggagttggcctttgacattgtcaacccgaacttccaacgccaccggcgcctcctcagcggtccgcagcgtgtccaagtggccggcgacctccgtgaaggcttttcgttggcctacaacgccgtcagagaggtgggtggtgttcaaattgttgtttatcccgtttttggacgcctaaatccaccgcctaagtcttgcccaaatccgaaaatttaaaaaaaaaatttaatttattttaaagggcgttttggacacggcacaaacactgcaggcggccgctgctgaagaccgggcactcggcgggctgggcatgggcgtgctgcggcacatgactccgtcagcaatcaaaccgtttgtcatcgccagcaaagcgacctccctcgtgttgggtgtgtgcatttgtttttgtttttggatttttaaataaataaaaatattggtggtaaatttcggttacactttgctaaaagtgcgcccatctccgaaaaactttaaaaaaaaggatttggaaacttttcagagaggagaaggaaacgagaattggacaacgaaagaaaaattatttggagaaaagtctggacgtgtctggttgaattttatgttggtcctcatctgcacttggattttccgtataaaaccgtgaaattccaggcccaggaaaaatccagaggttgccgaaaatggcctgggtccagcagg

SEQ ID NO: 62669 - DNA, 985 bp, Heterodera glycines
aaagagttcgcgattgatcgggcgaccacttgtgttgcgaccattgcgttcggaatgggcattgacaaaaaggacgtccgacgagtgattcattacggaggtaagaggagggggggggggggaaggaaaagctgattggtcactttggtaaatgtgcaacaaatttagcacccggatgcattgagagttactaccaggagattggccgtgccggccgcgatgggttccccagtcggtgcttagttttttatgccgtcagtgatataatgatgcaaaagtgcgcatgcaatttttgaacccgataacccatttttctgtccaaggcgccggattatgaacaacaacctttcgaaggaatacgaaaaccacaaattggaaatgctgcgccgcatggaacagtttttgacaacgacgagctgtcgtcgctatctgatcctgtcctattttgacaattccatccaacacccggacgtgccgaactccgactgctgtgacaattgtgaaaaacggtgccaaattggagggaacgacgcgaaaatttacggggaaccgacgacggtcgactttggagaggaagccaaaaagctgttcaatgcgctcgaattgttcaacggacggagcggactgaaaaagcccattgattttctaaggggcagtgaaaatgtaaaaaaaaagagaaaggaactaatgacaattatttaatgttacagaagtctctccttccttttctgaagagcaatgggcttttgggccacgaattattcggaagtggcaaaaataaatccgaaaattggtggacggaattcggtaaaatgttgcgcaacaacggtttcttgtccgagtccaagtcgacgttcgcccaatactgctatctgaccaagttagcaccaaaagcgattgaatggctgagcagcgggtcaaaggtgggttgaggggaaaggggcatacatgtgcaaggggtgtctcgacataccccccttcatcg

SEQ ID NO: 62670 - DNA, 248 bp, Heterodera glycines
ccgctgacccacaaaatgtccagcccacgaaatgtccaagtctcgaatttgagttttttattattcagatgggcctaaggttaggcaaggggtaatataaagggtatattcgtattcagcgaccccgaaaaccctaaaaatcctaaattagactcattttgtttttataaattttgaaaaattttggacatttcgtgggtttttactcttttggacatttcgtggcttggacactttgtgggggtgcc

SEQ ID NO: 62671 - DNA, 1547 bp, Heterodera glycines
  unsure (1)..(1547): unsure at all n locations
atgcgcttggagtgctccactttcacnaacattctcgcactttacctgaagaccaagggcgacgtggtgctggtggccgatttgatgcgttccgttacggtgctcggctacaaagcggtcgactcgactttcgaagagttggccaggtgttgccatacaaatcaaaactagagaccggacaggtggggttggaaggatcccaaccaaatcccgatcccgatcaatcccgaagatttttgaaaaacgatcggaacggactccgaggtcgggatcccagtctggtctctaatcaaaaaaaaaacattaaaataatcgcttttttctatgttgagggactattccacggaatggacgagtgcctgtgaaattatcgactcggagacttttctcgcggcggagaacaaccacaacatttactgctgcaaaatcgacgtgaacgccgaatcggacgaggatcgatcgcggttgaaggtgtccgttagtcgcaagacatcaaagggtttcactatggtttttgtcctcttttatagcaagtcggcctctattaccttggcgaaatgatcaatgtgttccgtcgcggctccattgtttccgcccagcaaagggaaagggattgtggcacggcgcatggactcatggaaattgaggacggaggagcggcaacgttttgtgaaaatggtggcaaaactggcaggaatgggacaccgacggcgacgtcggcaccgcttttttcgaatccgataatttacggtacgctttggagagtcaatgagtttatattgagcggggcgggagaggagaaatagttttaccgtcgtacaatggaaaaatgaaatttaaccataagttaattgttttccaactgttttatttttttttattaaaaattgaatttacaaaaaaaaatttcaaaatgaaaaatgaggaaatgttaatgcgccagactccttttacaaaagggacgttttagggacgagtgacggcggtttgggtaccattgtgcaagtgcctccccacatttacaggtgatttgaaacgtttgatttattaagtcttacggattgggataatcattaaaacgtttttgtttttagttttctccatgaattgcaaaaggcaatcacaacaaaaacacacaattggcaagttgttttgccattcattccgtcgtacacaatgccttctttttcagccttcgcgttgaccacaacatttaccgttcctttttcaccgaacggcgcaatgagcagcccattgggttcattgacggggatttggtggaaacagtgactgaaatggtcggactttcttttgttaggcccttgtgacaactaagggttaatcgagttcaaattgtttattcagccgcgtgaaatgttggaaattgtcgtcgatgggttacgcctttggagggaacccgacacaatggacgaaagtgagaaaaaccccaaacaaggcacttatttgttagatatgttttttcaggcgttacggcaaggcccgaagatgtgctcaaactggtggaagatctcgcgcaaatacgttaa

SEQ ID NO: 62672 - DNA, 184 bp, Heterodera glycines
aaatttttaaaatttttttgaatttttaaaatttcccggttggtcccggtcccggtttttcttgcggtcccggtcccggtcctgaaaaaaaatcgaggtcccggtcccggtcccggcttctcaggtcccggcaagtcccggtcccggttttggcaaaaattcccggtcccgtggcactctagtt

SEQ ID NO: 62673 - DNA, 794 bp, Heterodera glycines
atgctttttctcctttttatatttgtgttcttaatcataaacaattcaactgacaaaacattgtcagttaatctgtgtaaaaaatgtcgaccaacttttgctgaaatatttggcgaagaatggcaaaatgaaataagaattggaggagatgaaaatgaaaatgagactgatcaaaatgcaaattttcatcaaaatgatcaaaatgaattaactgatcggacagatcaattggatgttcaacaaaaaatcgaaattattcacaaatttcatgcaattagagaagcaattaagaaaggaaaatattcggcaaaaaattggaataaaattgagcaaaaaatagcggaaaaattgggaattaatcgaccaaaaatttataaatggaaaaaagaaattggattaaatataaaaaatgaccaaaattattacgaaatgaaaaagaaggaattcattgaacgaatcgatgagattaaaagaacgtccgaaaatggaaaacagaaacaatttgcgaaagagttgggcattagcaaagtgacattaagaaaatggaaaaaggaatttggcattgaaatgagcaaaagtaaattttaaattaattttcaatttaattattaatattaaattttattatattcttaggtcgaattcgattcaccgatgaacaaaaaatgagcaaaatgaatgattattatgaaatgaaaaaaggaaacccttctttaagtgacaaagaaattgctgacattttgaaaattggaactgccactctaacgagatggaaaaaggaaaataattcgtaa

SEQ ID NO: 62674 - DNA, 968 bp, Heterodera glycines
gtttatctgaagactttggcggtgatgagtcagcagcaatttgcggagagaaaagtgatgccgaagagggaatatcagaaggaactgtgagtggtcgggggggggggggaatttgtaccaaacactgatcagtgatcacccattggcatcgggagggggggggggacttttattgccggccatccttttttaccgtacttattttctccatcattccattacgcattaccgtaactcattccccaccattcattaaatcgtatatttcagtctttcttcaaaattacccgttagttcattacagttttcctcgttctttaccgtattctttttgcttctcttacagtacgatggttccctcatggatgatttccgctagcacgacgacaacagctgcggcgtcctcttcgaccagcgccgccagtggccaatcgtcgcccggccccgactcgcatctgccgcccttccaccaacatggcgacgtcggcttttgcgagttgccattggaggtcgaaggcaccagtaaattgggcagcgcactgctcaaacacaccgccacccgctcgtacagctccaacccacgggttcgtttcgcatttttatgatcactcatacaaattctgatcagtttttgattgtgatttcctcctttccctaggaattcttcaaatttggccgtaagccaaccattgccaagtcgcgcggcgtaatcgaacagcaacagacggacgcggtcacaggcggtgccgtcggtgcgagcgtaggcgactccgcggcgggtccgtctggcagcagcggcggtgtttcacagttgcgctaccgcaagtcaggcggaagcggcatgggagcggggcggtctggcgccgtttcaaaggacgcggagagcaggcgcaaatcgctgggcgcggccgccgcagccaatgctgtcgctgcgggcacaattctgcacagggacagccccgtgggca

SEQ ID NO: 62675 - DNA, 1552 bp, Heterodera glycines; identical to SEQ ID NO: 32361
  unsure (1)..(1552): unsure at all n locations

SEQ ID NO: 62676 - DNA, 837 bp, Heterodera glycines
atggccctcacgcgaaaatggccacgcgaaaacggccacgcgaaaacgaccccgaccgcaattctcaagtattaccataattggaatatacaatgaatgaagaatttaaaattttaaggttgcgaactcttcaggaagtcagttccaagagtaacactgtcgtacgagctagcgttgtgctgctcggtcggtgttttgtaattgttctaacagtatatgctaatgacctcatatgaaccatgataaacaaattcattgatctactcatttaaaaatttaacttttttaaaaataacttaattttttctaagccaacttttataaaaatataaaaaaaacgcttttatgttgtgatttaataggtaatttttccagggaatgagcgttgtggaaaaagtctgttggcgaatcgtctgacgcgaggtgaacgatccggacagagctcagtgctggagtacaattacctgcaaattcaagcggatacagacgccagctatgcatatcagctgggaggttgagaagacaaaaagaaactacgaaagtatttggcgtatcgctgtaatttttgtcgttttggaggtggtgccgcgaatggcctccttggtccgaccgactcgacagaccttccgctttggatacttgacgggaaggacgagtgcgctccgctgcttcgctttaccttcccgccgtctctgtccaagtgtgtggtgtgcctttgcgcgtccatggaacagccgggcaacataatgccggcattgtccaaatggtatcggctacttgacgagcaaatccgattacactaccagccggaggaaattgtccaggcgcgacaagcac

SEQ ID NO: 62677 - DNA, 374 bp, Heterodera glycines
atgcacgcgttttgcgctcgagctatttatcatcgggcttgtcaatccaaagcgaaacaacaaagatgctgttttgaacgaataaagggcataggttattttgaagaagtgtcaaagaacatgcagcaataagcctgcaaaatctaataagtggaaaatacatgagtatagaatttattttcagaaagtgtcaacagacttttggaaaaatatatttgcaatttatcaacaattttgagaagtgagttagaaatgataaacttcacgattcaaaccagttttcggtgctctaattaaccgcgataaaaacatccgaatcaattaaatagcttctgagataataaggtttatcataaaatttcatttaaaataaa

SEQ ID NO: 62678 - DNA, 374 bp, Heterodera glycines
atgcacgcgttttgcgctcgagctatttatcatcgggcttgtcaatccaaagcgaaacaacaaagatgctgttttgaacgaataaagggcataggttattttgaagaagtgtcaaagaacatgcagcaataagcctgcaaaatctaataagtggaaaatacatgagtatagaatttattttcagaaagtgtcaacagacttttggaatatatatttgcaatttatcaacaattttgagaagtgagttagaaatgataaacttcacgattcaaaccaattttcgttgctctaattaaccgcgataaaaacattcgaatcaattaaatagcttctgagataataaggtttatcataaaatttcatttaaaaataaa

SEQ ID NO: 62679 - DNA, 1140 bp, Heterodera glycines
ccagaatttccgaagccggagtttgagaagccgtcatttccgaagccgccgccaccgcccgaagtgggactggtgacggaaggacgacgctccgattgaccgaatccgccgccagaagaaaagtcgttgttggagaagccaccgcccccgtcgctgtcctgacgattctgtcgaccgaatccgccgccacctccgcccccgcggcctccaccgcgtcccccgcctccgccgtcgttccaacgattgcctctcccaccgcgacggttgccatccgactgattctgtgtgtcgccatctccgaagccttgaaatgacaataatcaatattttccaaggcaaatttcaaaaaaatcttatattagaaaatcttttacgaaaattctttaaaaaaaaattttttgaaaatttttttagcgattttttgaaattttatggcgaattacatacactaaaacattaaaaaggggtggggtgtgaaaagttttttgcgaaggggggtcggccgctgagattctgatgactttttttttcaaaaccattttttgcggcgcactttttccaaaagaaaattcggggacatggggccggcggagccgataggtgccgccgggaaatttttgcgattttgagccaattttttttaagaaaaattgagatttttgggacttcgttgaaaaatttttcaatgatttttttcttgaaattttctcataaaaagaatattttaaaaaattcgggggggggggatgaagtgcactattttagtttcaaaaaagattgaaatatgattcgaacgaatagtttaacattggctacttatggcgaatttaatggtaccagaatttccgaagccggagtttgagaagccgtcatttccgaagccgccgccaccgcccgaagtgggactggtgacggaaggacgacgctccgattgaccgaatccgccgccagaagaaaagtcgttgttggagaagccaccgcccccgtcgctgtcctgacgattctgtcgaccgaatccgccgccacctccgcccccgcggcctccaccgcgtcccccgcctccgccgtcgttccaacgattgcctctcccaccgcgacggttgccatccgactgattctgtgtgtcgccaaagccttgaa

SEQ ID NO: 62680 - DNA, 122 bp, Heterodera glycines
ctgttgacattttgctgctattcgctgtcttgatgagcgacacaagagcataccgtatatgctctaattatagcccagtctctattaagcccgcagtctccaattatcccccagtgtacgag

SEQ ID NO: 62681 - DNA, 1351 bp, Heterodera glycines
atggggcagaatgggagtgaaatgctcggaaaaatgacagtgttgactgatcactcgacaaaggtagctttttaatatacaaaaaattggaatggagaaaattttaaaaaaagttaataaattattttcaaataaagaagaaaattttttttcaaatttaccaattgataaaaaattatttttaaattaaaagaaattttttgggttttttttaattttaaaaaatgattttgtttgtaactgttgttttttatataaatcaatgggttgtgccgaagtacattaccaatctaagcatgaacttgtaccaattttctatcagcatattttcataattaacatttttgtgaatttaatatacaaaaagttctttttattattaatcctttaccatagggttcagccccgaccccgagctccccgaccccgatccccgacatttttgggcttattccccgccccgacatgtcgccccccgaggtccccggcccccgactttttgctccccgacattaattcggggaattggggactccgagcattgtaaaaagttaagttatttcaacaaatatttaaattttacccaaacactaagccaaataaaaaattttcatatttcatatttttttaattaatagatattttaaaacttaacttcacatatttttcaatttttatgtgttaatagatttcatccaattaattacttctaatggcttcaaaagcatctgatatttggaattttttcacgaaaatttcttcagaggttgctaagtgccggctttgtgaaaaccaattagcgtgtaaaaaatcgtgcacaaaaggattgtgggggcattttaaagcgaaacacgctaaagaatttgaaaactatgcaaaaatccgacccgtcaacggtaatacaagcttccttttttattgaatataaaaaaaattcagaaaaaccaaggcattacaaaattttttggcaatgaagacccacaaaaaaaggcggatgaacaaattgcaaggctgatgataagaacgaattgctcttttttatttgttgaggcaccggaattacagaatttgttctctttggcctacccgaaactccaagtaatattttttacccatttttactattgtcatattttttaagcttcgccgcaaagattattttcggaggaatgtaattcccaaaatggccgatgaaattcaacaaaaaattgttcagggaattggtcaggattttttttctgtgacctctgatggatggtcgcaaattacaaaatcaccagcgctcttaaggttctataatccttttcatggattatacaaacagactttagcgttaccgtacatcatataa

SEQ ID NO: 62682 - DNA, 438 bp, Heterodera glycines
aaaatggtgtaagtaaaaatcgtaattacgctcaaaaagcttctcaaacaattttagcgcttccaattccttctacaatcgcctttatacatcccattatgagcgctaaaattatcagagtgccgaaaatcgcatgtgatctaagcctagcaaaaaatggtgtaagtaaaaatcgtaattacgctcaaaaagcttctcaaacaattttagcgcttccaattccttctacaatcgcctttatacatcccattatgagcgctaaaattatcagagtgccgaaaatcgcatgtgatctaagcctagaaaaaaatggtctaagtaaaaatcgtaattacgctcaaaaagcttctcaaacaattttagcgcttccaattccttctacaatcgcctttatacatcccattatgagcgctaaattatcagagtgccgaaaatcgc

SEQ ID NO: 62683 - DNA, 885 bp, Heterodera glycines
atgtcttcaatgaccaaatcttttaccaacaaattggcttcagaaaagtcgccctatttattgcagcattcgggaaatcccgttgattggtcagtgttatgggtacttaaggagtttaaggttttaatttaaaataactaggtatccatggggtgacgaagccttcaagaaagccaaagaattaaaccggccgatatttctttcgggtaaatatcaaacatttttacataaagtttcacttcatttagtcggctattcaacttgccactggtgtcatgtgatggaacatgaatcgtttgaggatgaagcaattggcaaattactaaatgagaattttgtcagtatcaaagttgaccgagaagaacggcctgacgttgacaaactctacatgagctttgtccaggtgggtttttaggtaatttattttataaatttgttgagggtttcattcagagtcttacgggaggcggcggatggccaatgtctgtctttctaacgcccgacttggagccgatcaccggtggaacttattttcctccaaaagattcaatgggtcggctcggattttccaccgttcttcgaatgatttccaataaagttttttctttttgttttcttatttatatattttaattatgtcagtggaataataattcgcaagaagtgaaagagcaaggccgggaattggccgaagccattcgcgaaggcattcaacaggcaaagtcgtcgcagcttccaattgcggacgaagccgtacagaaaagctatgctcggcttgttcgccaatttgacaaggaaaatggcggcttcggttcagcgccaaaatttcctaaagcaggtcccctaaaaacattcaattctactgtaattgagcattttagttga

SEQ ID NO: 62684 - DNA, 1271 bp, Heterodera glycines
gatggaaaggtgcaccaatctgtgacgaggacatcgatgaatgccaagatgaatcagtgtcatgcccaaatgaacagcccgattgtatggtaaaactcgaagatttttttcatcacacattttccaatttttaaagattttttgcagttgataatttcaaaaaaatttatttcgaattaataaaacttaactaatgaattttattaattttatttgccttattataatataaattttgtacattttccaacaaaattccatgattcctttaacagaacacgcctggtgcctatctttgcctatgttatgaatacgacaattccactggaaaatgcatgggtaaaaattcaaatggaatttttttgtgctacttaataattttaactttaaagagagcctgtaaaaagtgccatgctcaatttttgaaaattgatcacttgattaaaaaattttgattctaaaaccatttaaattcttagaaagaatttattcatatgcacaaaaatcacagaataagatctatggattaaataatctaaatttttaacatgggatcccggttgacaattttcaggctcatccgaggaagctgatgatgataatgcggcactttcattgtcttcccaacgacgaataccagtgccaatcccatcaatggttctaacgcctcagcttggacctttgttggacaaaatgtcgcaccaaattagcacccaaatgccaaccaaagtgacacgaccatcggcacccaaattgcttttgcttggcactgaaaaggcggcaccaatgcaggcttgtttccttaatcgaagaatattgaaaaattttatgtaaggaagcagctgaatgcgtggtttaaaacatggaaaacccttggatttggtagctcaatgggagagctgctgcccatggacagggtgggagcgtgggttctatgcccacccgaggcctaacatattttgcctatttattattttagttaaatactaattttgaacaatttatctatcaattatctttaaaattcaaaaaaatttcgttaatttaaaaaaaagttacgacaaaaagtgatcgaaaaaacttctggtcataactttttttgaaagttaacaattttttttttgtttgcagattattagataaatctaggatgaggaggacaatttctaagccaaaaattcttgtcaaggaaaaaaaatttgttgggggtattatgtgtattaagtgcgcagaaattctaggcatttgcctaaaacgaatcttaatattta

SEQ ID NO: 62685 - DNA, 478 bp, Heterodera glycines
atgaaaaaaataattaaaaaaaataatgctggtgtggtaagtgtgaagaactgtgttcctccaggcaaaaaattctaagaaaatttataagcatttgaagagttctcagcagtttccctgcaaaatttggtgagcttctgatcagtctagaacgttgggtgataaaatgaaaaaaataattaaaaaaaaataatgctggtgtggtaagtgtgaagaactgtgttcctccaggcaaaaaattctaagaaaatttataagcatttgtagggttctcagcagtttccctgcaaaatttggtgagcatctgatcagtctagaacgttgggtgataaatgaaaaaaataattaaaaaaaaataatacttgtgtggtattaattcataaatattttttttcagaaaatgctctgaaacgcaccaaattttatttacatgttagtttaggcactctgatgctttttctatcgaaaagggagatga

SEQ ID NO: 62686 - DNA, 54 bp, Heterodera glycines
atgtcctcaacaaaattaaaaaacgggcgcgaagcgcccgtcttgaggccgggc

SEQ ID NO: 62687 - DNA, 76 bp, Heterodera glycines; identical to SEQ ID NO: 53709

SEQ ID NO: 62688 - DNA, 180 bp, Heterodera glycines
aagcaattaaaaaattttttaatgagaattcatgcgagattttctggaaataagcttaatagggcctagttaagctgtaaaaaaaaatttggggcgatttgaaagagaatagaaagaaccaggttcgatgaagttttggtaagccaaaaaaaatccaaacatttaaaaatctataaaaaa

SEQ ID NO: 62689 - DNA, 1356 bp, Heterodera glycines
attaccgtaaatgcaatatttgaatgcccactttctaatctctgttgtacctcttttaatctctgttgtacctcttctaatcactgctgtacctcttctcatcattgttgtacctcttctaatcagatttgtaccccttctaataatgctgtacctcttttaatcactgttgtacctcttttaatcactgttgtacctcttctaatcactgctgtacctcttctcatcattgttgtacctcttctaatcaccattgtacctcttctaatcaccattgtacctcttctaatcaccattgtacctcttctaatcaccattgtacctcttctaatcaccattgtacctcttctaaccaccattgtaccaaaacatgtctttaggggttatttgggccgctgatcacgaatacgtgatcagattttacttttgacatcgttaagacctcagaatccctgtgtgattggggattctgaggcatcattttttgggggggggggcaaagttcgaagccggacggtgtacattatttttctttatattttttgggttaattttcattacttttaataaacttaaatgtttggttttattaataataaatttttttagtttaattaaattattttttgatgaataatgattttcatttaaattatttattatatttaattaaagaatttcagctattattttaaaatttaattgtaaaatctttttcatttcaatttaaataactattcaattattatacatttcataatttgtttttcattaataaaaagtgtattatattttaaaaaatgaaaaatataacacatcgattttttatctattttgattaaaaacaattccttaattaccataaatgctctatttgaatgcccactttctaatctctgttgtacctcttctaatctctgttgtacctcttctaatcactcttctaatctctgttgtacctcttctaatcactgttgaacctcttctaatcactcttctaatctctgttgtacctcttctaatcactgttgaacctcttctaatctctgttgtacctcttctaatcactgttgtacctcttctaatcactgttgtacctcttctgatcactgttttacctcttttaatcattgttgtacctcttctaatcagatatgtacctcttctgatcactgttttacctcttttaatcacagttgtacctcttttaatcactgttgcacctcttctaatcacagttgtacctcttctaatcactcttctaatcactgttgtaccacttctaatcactgttgtaccacttctaatcactgttgaacctcttctaatcactcttctaatcactgttgtaccact

SEQ ID NO: 62690 - DNA, 300 bp, Heterodera glycines
atggtggttagaagaggtacaatggtgattagaagaggtacaatggtgattagaagaggtacaatggtgattagaagaggtacaatggtgattagaagaggtacaatggtgattagaagaggtacaacaatgatgagaagaggtacagcagtgattagaagaggtacaacagtgattaaaagaggtacaacagtgattaaaagaggtacagcattattagaaggggtacaaatctgattagaagaggtacaacaatgatgagaagaggtacagcagtgattagaagaggtacaacagaga

SEQ ID NO: 62691 - DNA, 946 bp, Heterodera glycines; identical to SEQ ID NO: 32378

SEQ ID NO: 62692 - DNA, 399 bp, Heterodera glycines
atttggtgtctcgcaatctctgctcacaattttatataatattattttgcaaactgccgaagaatttaaggaaattgctgaaccaaacataacgcgccgttttttgacctttttaatgaaattatttgccaatatgctccattttttgccacaaaataccaaggcttcattggcggaccataaagttttggcccatggatgggattggactttccattttttgacaactgctggccaacaattggcacagttggaccattatttagcagcaagtgccaaacagagccaaaatgttgccaaaactgatactgaacagagtgccaaaagaggcttttggcataaaaattgtactaatttcgcatcgggcagcggaacaaagcagcaaaactgatcagttga

SEQ ID NO: 62693 - DNA, 775 bp, Heterodera glycines
atgtctgggccaatacaaaaagggatcatcaatgcactcaaagctctggacaatgccaaaagcgccacctcactccttctacaccccgacccggacctgtcaaactgggaaagtgccgtcaacttggaggctcaatttgatcgggtcgtcaaggaaatccgcacaatggaaatgcagatggacagtctacgagattcatccaacgcttggattgaacttctcgcccgcctgatcggagacgacaaagacaacggcgaaaaagaatacgtcaaattcgacaagaatgagaaaatcgccggcgatacgacgcagcgattgtttttatctgctgaaaatacaattaataaaatagagtttaaattgtatggactataatcaccaaatatagacataaaatatggattaaaagctcaaaaatggccaaatattgaccaaaatatagactaaaatgccgaaccgaaatataaattttaattctcaaattttccaaaaaaatatgtttatattcaatatttaatatcagcagacgacagctcttgtctctaataactgtacgatgtacgaatgcgtaaatttatgttgttgttgggaaacattccctaaagagatacagacagatccgggattctggagtgttcaaaaaatgaaaagaaatttaaaaagaaaattatatctttttttatttttaataagtaaatcaaacgcatttaacatggtgttggatgtgaaatgacatttaatgtggaaaagaagaacattgttttgaaaaaggtca

SEQ ID NO: 62694 - DNA, 511 bp, Heterodera glycines
atggaaactttggttgagcaaattgacgagttgaaacaacttcaaagagaaggagtcaccaaattgaaaggtgtgaaaaaggggcgcacgtgtggaaggaaatttgaaggtatcagaaataaaaggtattcaggtcgtctgaaggtcgattcaacacccattcattggctaaagagaaggaaggtgaaaaggacggacaacgccgaacagaaaaagtgcgtaagtgacaaaggcagggggagaaagggcaattggggaagacgggacaatgagtctgtgactcatccatggccgttttcgtcaataattaaggcatttgatcaaaaacagttttccagggccggacttcgctggaagcgaataaaacggtggacaaaacgcacccactgccaacaaaatggggaggacgatgaatgaagacacgtgatgatactcattgtgctaatattcgccattttcgcattcggaaaagaaagttttgtattatataaagttccactgatttaataaa

SEQ ID NO: 62695 - DNA, 610 bp, Heterodera glycines
atgtcccgagtgattgtctcctattttcgtcagtattcgctcaaggattggcgcaattattttctgtccacccatttttggggtccggtggccaattggggccttcccctcgcggcgatcgttgacttccgaaaggttttttgacagtttgccaattccgaagtaaatgcatttttcaggacccagagatggtgaatacttttttctgataaacaaaataaatgctgaaaatgctctcttattgtaagatcagtgggccaatgtcctgcgcactgacaatttactcgtccgtttttatgcgatttgcttggcaagttcaggtgaaaaggaaggaatttgggaagggaagcgaaagaaatgacgccaaaagtatttttagccgaggaatatgctccttttcgcctgccatttgacaaatttcgtagctcaacaaattcaggtccgtccctttcctctttttggcttcctttcctctcaatgcattcacttttctcagatcgttcgcttctccaattaccatttcctccatttgtacaccgaccctttcgccaaaacggttaagaaattgtaaaggggacaaaatacgaaagtcgagcaaaggcattgtgca

SEQ ID NO: 62696 - DNA, 2060 bp, Heterodera glycines
atgggtgttgagtctcctccgcataagcgtggtcaccggtacatttttgtcgacaatattggccctaacttttttgacgacgatccgaacgcgtggggtgctcaagaggacattcatttgctcaactcgctaatcaaagcgcatttggaccaatgggccgagctgagtaaagactttggcaggaaaaaacctctcatggaagcacttgaacgattggaccgctgttttctgcgcaacgaaattggcaaatgcgtcttggccactaaaaaccggtaaattggggaccaacgaaaacatcgaatttaggtaaattttggtttttcatttccagtggcattgtgaacatttgtggcgatgacagcgatgttaaggaagaaaatgcgaatggttgggtgaaattcacaattttgtttcacttctttttagaattcagttgcaatgggtaccaaagtgaattcaaagtatgccattggatatttgttcaatttgggtgcatagataattggttattaattaaaagtttaattgaatgaagtccaattctttttgttgtctaattatttgcagtttatagttcaatcccgaattttgactttttacccccccccccccccctcttattcattctttttaatatattccgctaattaattccctttgaaatgttcagacaaaccacgaagaccatcctcctcctttggatgtcgcttcactgagtttttccgctgcacccacccaaaaacgaagtgcaacattttttgacgaagaggcaacaattatttctgtttttatactaataatgaaaattttgttaggacgactcggacagcgacagtgccatttccaaacagaacagttccgactccgtggcaattgacgagcttcgattgcccccgcgttctgtcggagaaacttcgaatttgacggaaaatcggcgggttgcgttttaaatattttttgttttttaaaattattatttttgagaaggcaacgcgaaaagaacaattgctggctgtggctaaaaatgcggcggtggaggcattccgtggacaaagaaagacatcgctcgaattgtctgaggcaatgaattcagtggaaaatgctgggaaaggtaaggccaaagtgacccatgttaccagggaaacgacttcccttcccgaaatttaacaaaatgggttaaataggagtaaagaaacgcaaaaaatccatgcttgtcggagggcaaacgcagaatttggagttcctttttgaattcactttcttattcttggtcagatttttggattattcttttcagtctcatgtgacggtgtacacaataattcagcgatttgtgacgagaaattggccgaactttacgcctcttctgcttgcagtccgtacttttacaatgcaaaagtgccgctgatgaaaccccaaacggtggccaaatttgacgaggaggacctccaattgctcacttatttgccattccgtgacgaattcgaaaatgttcaaccaaccttttgctttttggtgtttatttattttttgaataggagtacaaaaatgatgctgagcagctgatcagccgaattgtattcccacgagaaggagccgatttgggagaagtcgacaaattcatcaatggtgagtttccacaccttctcattctcaagtgcattagtccataaaatgtatctacaaagtttcgagtaatggctttttgtatgacaataaattcccctttcggcaaaacaccctaattcttttttcggattgactcggccctccaatcccttaatgtactaatccaatttcatctgtttgccattattgtatctgttttcagaggtcatttatgccaggttcgatcggtacaaccgaataatgcgaattaggaccaccaaaaaagcgatcatccgcgagcacaatttgttgaacgaatacttaaacattgttaaggtgatgagcggttattcaagcaaagtataaattgattctttttcagacaaatatgtcagaaaagggaaagtacgccgtttttgaaggcaagtaaaaagtattctattttaaataaa

SEQ ID NO: 62697 - DNA, 1046 bp, Heterodera glycines
acgccgccattcagacgccgtgtacgcccaacctttacgcggaggaacagacgaaacggaagtgccggaaggataagtgccaaacggcatattacaaaaacagtgccggaggggaatacgcggcggacaagcgaaagggtgggccaaccaattacctaactgaacattggtcaatttgggggctattagaacatcatatttcatctcttttcacattttttcgttaattatccctaattacccctctttccactaattacccccccccccccaccctttttaaggttccttcgcttacactttgttcccccgcaaaatgagcgtcgaccaggcgggcaatgaccgcgtccttttgccttcagtggtcggccatttcaacaaaacgtcgtccgccggccctctgacgatggaacaaattcggacgatcatccgcaaggagctgtttctgtacgggcccaccactttggcactgccgctgaccgaagaatttttgcattacgactcgggtgggcaaaaggggcgcaatacgtaaaattatttgaatattttttaaaaatattaattcaacataaaattttgaaaaaatcgctgaaaaattaaaaaaaactttcgcggtggggggacaagctgctccggggcaaaagcctacaaataaatggaacatttggaattgaattcatttcccatttgtgctttcttcaatttcatttcccaattccctcaggcattttccaccctttcccccgccaacactttgacgaccgtatcatttattggcacgtcgtgcggctcatcggctggggccatgacgaagacgatcatctgttttgggtggcggtgaacagtttcggagagcaatggggcgaaaacggtcggatttgccaaaaattagggaacgaaaatatcgggaatgaattttggtggcaattggagggcattgtcagtcttaatgccctgttcaccgatccctcccatggccaggctttttccgcgtggacacttctctgctggaggactacggactcgagtacgaagcgggaatgcca

SEQ ID NO: 62698 - DNA, 441 bp, Heterodera glycines
atgactccgccccacccgcaccatcgacgccagcagcagcaaatgccatcggcacagtctgtcggcagtgccgcccaatttggacgacaaccattcggagccggcggtgggccgataatggcgaacaatgcaatcgcaaatcgaaaaaagcgcagatttgccgacaaaatggtggcaccggaggtaaaaatgggctcggatgcctaataatgtcattatttgcaattgccactgcttattgctcatgttttttcacagattcgttctttgatgcccgaattggatgcttacgtcggccttttgtcctacgagcagaaattggacgcgataatttcgcgtaaaaagatggaaattcaagaggcactgaagagacccatgaaaatcaaacgaaaactgcgcatttacatttcacactcattcattcaagcacgggaacccgag

SEQ ID NO: 62699 - DNA, 252 bp, Heterodera glycines
  unsure (1)..(252): unsure at all n locations
atggagaaggcctgcaagatttggagagattatatcgattttaatgcgctaggttcgatgaaactttttaaaatataagcctaaactttttggcctgtttaaaaagggattaaaaatttttaaaaattttattcatcttccttttgatagaaaaagcatcagagagccttatttaacttttaattaacatttggtgcgtttcagagcacgttctaaaaaatatttatgaattaattttgcaaanataataaa

SEQ ID NO: 62700 - DNA, 234 bp, Heterodera glycines
caaattttctgacgccgccgttgcccaaaatggcgacgatgagccgcaacagtcgccggctgacccggaacaagcggacggcgagtcggagcaggcacagcagcacaacccgctgcagtaccggccgcgaacgcatcgccgacgcattcgaatggcggcgatggctgccggcgccgggggcaatgaatgaaacgctaattaaccgacagattaattaccaatattgactaatta

SEQ ID NO: 62701 - DNA, 234 bp, Heterodera glycines
atgttcaaaatgtatgagggcgaagtatgtcagataaattagttttttctttattttttgtctatttattattacttataggtgctgaagaagtttcctgtcgtacagcactttctttttggtagtctcttttccattacggagcgtaaggatggaaagaagaccgactcgtcaggattggataaaatttcccatggattgcatcccgcgaaactcggaattattccagaatag

SEQ ID NO: 62702 - DNA, 1139 bp, Heterodera glycines
atggacacaaaaaagttgcaacaattggcttcaaatccgacggtggtggcgcaatccaacggaccaaacgaaggcaccgcaaaagacacaaacaatgataacacttcgatcacatcaactcgggagaaaatgctcgaagtcgtttatgggaataagctaatgggaaaggagaagcagccgaaatttatgtgttttgttgtggatgcgcaggaaagaaaaattaggataatgagcagagaggagcagaaaaaacaggtaaaaaaagaccggtcgtgagttttttaaatatgggcaaaataatattttattaaacgcgttttaatttattttaggagagttccgccatcattttggaagaccttacggatgaccaattttctcggtttggcaaatccgtcaaggacaaagaggctgataactccgacgcattcgtccattgtgaaaaatgttctctgttctacgaattctgttgccttgatcatccgctttatcagtgcaaagatcgggtgccttcgtcttctcccacagaaattgaggacagagcggcggccactcttcctgcctttctttttattcagaattcttcaattccctccgctgggaaaggtgagaattaattaccttcatttattttaaatattctcgtgaattgttttaaggagtgttcaccaaagttgatattccaattggaattgtgtttggtgcgttgtttgttttgttggctgtcgtttttgttctttcgacattaaaagtttccattttcaggtccctacgagggcattctcacacaaaatttgtcggaaatggaattcggtgcttacacatgggaattacgtgtaggatatggaaaaccttcctattacattgatggttagggaccgtcctaattattcttttatttttcctttttcagccaaagaccctcgttattccaattggatggtaaagtttattaggtaattaatttgtctacttttctctttcgtacagcgctacatcaattctccgaggaatgagtcggaacagaatctgatcgccttccaataccagggcagtgtgtattaccgcgtctttaagcccattgaccgatcttcggaactattggtttggtaaaatatgcaacttcgggaggaaggcaa

SEQ ID NO: 62703 - DNA, 1817 bp, Heterodera glycines
atgagtggtcagatgtggaaccacatccgtggcccgccctttgtgatgactcacccccaaacgcgtgaaacttcgctggtccacggcagcactcagtaccaactcattgccgagacgtacatcgttctctcattgtacgccgccgtcacccttggcgtcgtcgtgttaaatgatgctgcctccagcaaaacggaccccgggaaaagaaagcgtggggatctttcaccatttggcaccgttttttattgattcaattcagttatggcatgcatcggaataggactggttgtggtcttcttcagccttttgctttcagtgtttcgcagcaaacatcacggatatccgtaccattttctgtttagttagaaagacgtgggaccgatgttatgtgaattttgttgggttacctaatcttgtcttatttattgtaaaattttaattttattcatttgtttatttgggcctaataaatcactttctgtctattcatttttgtccgtggcaaatttctgattattcgtgtcaatttatttttcattttttttatctacccaattcttgttaatcatttcgatggatgtgcaactcaattttctgcaacacgaaccgaccgccaattggcttgattattttttggagcggaaaaagctttcagagctactcagacgaaacccaattggtcttacattattgcatttcactttaatttggcttttttcagaccgaattgcagcgatttcgttttgtgaccaattcgttgaacaggctttggtcggtgaaagagatttggcgacgatggagagaaacaatgcaatagagaaaggtgggggagggacatatgggggcggggacgtcttggcaaaatgtacaaagtccaacatgtatcgtatgttttgccattgccctgagatgggaattatgtgttttacacatatcgactgcgtttaagatgatttcatgagcacacattacaaaatcgaagacctttggctgtgtgctctcagttgttttgcagcgtgtgattgggacttgtcgttgctgatcaaaaagtcagtcggagagagggattggttgggatttgaccttttcaataccaatagcagcagattatcccttttcagttcgaatgccatccgagtgggcgctttgttaagccgtctcatccgatgggcttttgaatccgatttgagttcacagagcagaactctctttgcggaagagcctttcaaatttctgaattctttcgaccgagttggcgcctcgagacttttctccggatggctttacgctcgttgggttctcaaaactgatttggatggccgattccctgtctgttcatttatttattttgttctaactcattttaaaggttcctcccgcacggccaacagtcagcaacccgtaagtttcaagagcagcttaacaaacatgaagataagatagctacgcaatataactaaactaacaatttaacggcccctaaaaaattcacatgaaatgcaatttgcccggcaccgaaactgatcagaaaataaggattctttgagttaatatttctttggcttcccccccccccccgcccgttacggtcattcgttatttgtcacctgcttgtttctttcagttatttttctgttgatcagtcacttcttcaagccgaacggttgtcccaagtgactttggaagtgcgcagtcgaatgggcgaagcagtgaactttttgagacgaattgtcaacgaccggcgacttggagacgacgacaaagtggaagtgcccggaatgatgtgttttttccaaaactttgacatcacaacgaaa

SEQ ID NO: 62704 - DNA, 619 bp, Heterodera glycines
aaagccaaattaaagtgaaatgcaataatgtaagaccaattgggtttcgtctgagtagctctgaaagctttttccgctccaaaaaataatcaagccaattggcggtcggttcgtgttgcagaaaattgagttgcacatccatcgaaatgattaacaagaattgggtagataaaaaaaatgaaaaataaattgacacgaataatcagaaatttgccacggacaaaaatgaatagacagaaagtgatttattaggcccaaataaacaaatgaataaaattaaaattttacaataaataagacaagattaggtaacccaacaaaattcacataacatcggtcccacgtctttctaactaaacagaaaatggtacggatatccgtgatgtttgctgcgaaacactgaaagcaaaaggctgaagaagaccacaaccagtcctattccgatgcatgccataactgaattgaatcaataaaaaacggtgccaaatggtgaaagatccccacgctttcttttcccggggtccgttttgctggaggcagcatcatttaacacgacgacgccaagggtgacggcggcgtacaatgagagaacgatgtacgtctcggcaatgagttggta

SEQ ID NO: 62705 - DNA, 78 bp, Heterodera glycines
gtccaatgaaatcatgttcctcatcggcaagtacttgttcgacaggtgacacaagcagtaacacagaggcagcagaag

SEQ ID NO: 62706 - DNA, 690 bp, Heterodera glycines
atgtccataaaagtgccaactttggagggtgacatcattccgttgaacatcaagcacgtgaccaaacctggcagcacacaacggtgggtttcatttggatttctatcaaggaatttggctaatttcgagctcgatgtatgtgaacttaatttcctatcatttcaaaataacaaaaactcccaaaaacaaacaaaaaacagaccaaaaaaataaaaatacatttataggtttctcaagttttttaaaggtaacttctttaaaagtgttgaaaaaaggaatcttggaaaaaattatgtatcgacataaaaaagtttaaattgaaaatgtagacggcccaggtaattaactgacaaacaagcgttttgataaattttactgaatttatggacttaggtaaatgtaaaaaggtggacaaattttgtttactttgcagcgcccttatgagatgaatacaattaatagtggagttttccccccccccatttttcgaaaaatttcttttgtttttaaaaaggacacgtatactttcccttatcattatttcctttttccagaatccacgatcgtggcattccgaaccctaagacgggcaaacgcggcgacttggtggtggagtttgacgtgcgcttccccgattcgatagcgcctgccgcgcgggaactaatcgccaatgcattgccaccaaactga

SEQ ID NO: 62707 - DNA, 1316 bp, Heterodera glycines
gcgccgttcggtcgattacgacacgacagagacgggggcggatggtcgccttttgattaatgcgggaaagcccgactcggacccggaagtatttgtggcagaacatctcacaaatgttcttcagcctcatcaaattggcggtgtcaagtttatgtaaggggttgagagaaaaggcacagaaatatgtggcatttaaagcgagtcagcttttgctttcttaaccaataccaaggtttaccaaaaaatcgttactcgattcggcacttttgctgtttagggccccaaaaaaagttcaaaggagcgacccttttgtagagatttggaattggttgaaatagcggtatttatcccttttgtgacaccctctaaattttttttctacgataattataggctctgaaaaggaatctgatccatgcattttacgtgagaacatgaaaatgcgtgttaatttaaaataaatttcttgttcgttttcagcgcaaaaaattaccctaaaaaaatttaaaaaaacttccgaaagggattcttgtttttatttttgttcttagaagcaaaggcttttctgaaattggctctcgttaaggtacgacaacatcatcgaatcgcttgaaacgttccacaagtctgcagggttcggatgcattttggcccatagtatgggtcttggcaaatcaatccaagcgatcacttttctcgaaattttgtttgttgaaggacctaaaccttcgatatatattttttgttttagcattcgaattaccggcaaaaggcacgtgttgcttatttgtccagtgaacgttctgcaaaattggcacaacgaattcaaccgatggatgccagaaactgacgcggagacggcgcggcccattcggcactttgaactgtttgtcattggtgactcagtgaaaacattggaaaacagagcgcaaatgatcggtgcgtaggaaaataaataacattcattttaaaattatttattcagagaattggtatcagtcggggggcgtccttctgctgggctatgaaatgtttcgtcttctcgtccaccaatgtgaacttttgggcgaaaagagtgcgcaacggaaaaaggcatccaaaaagcaaccgttgcggacgatgtacgatttggcggacgatttgggcaaaaccaacgagcaggaaaaggcacaaatgacgcagaaggacgaattgcagaggaacatccgccaggctttgttaagcccgggccccgacttggtcatttgcgacgagggacaccgtatcaaaaacctgaacactgaagtgtcatgtgcactctccgcaatcaacacaaa

SEQ ID NO: 62708 - DNA, 691 bp, Heterodera glycines
atgtcattattttatcaaggaaaaataaggtttgtggcaaagttgtcatttttttacagaaatctgttaacaattcgcattaacaattacaatgtttttccggtggagcctaacggcaccgccggaccctatcccctcgcccatttcccaagtttcttaaaaaatgcgccgcaaaaaaattgttaaaattttaatttgttgaatgcactaaaatttacgatttactaatttcctcccaaatcggaagcaaaaaatataatatttaaacagctttattataaataactcatgcttttttgttgtacgtaagctatttatattcttaaatatttaaattatttgtgttttttttttgtttagcataataaataacactctcgaatttattacaatatattatattcgtttattaagtttttttatactgaatttataataataaaattaaaatttctatttttgggtaaatatgttaataaatttatattaatatttttaaattccagtgccaaattatttttattttttatctctaagaaaacacttaaacataactaataattgagttttttaataatataacttaaatctgtccagagtttatgaacacattttgaataacttttaaatttttcatattatttcaaaccaaaaattaatcatttttaatatttaattattataagaaata

SEQ ID NO: 62709 - DNA, 897 bp, Heterodera glycines
atggaaacgagacatgcctacccattaccatgtgatttgttggcgagcactcacctggtcgagttttacaatgcacacacaccatctgacggattctttttgcgtttattagaacacgaaagtcaattgaaacacgtggaatcagaattgaggctagtaaaggctaatgaactttgaacagagtttacactacacttctgtccatttcacatctttcctctttttcaggcgatttgcccgatttccccgggaagaaagagaacgctatcgacttcacaagaatttcatctttgagggcacttgctgtttggtggttttcgaccacaatgtgttttcaacggacagaaacggtgaacataaattaatggaacgaacaaacgatttggtggtgtgcaaccgatgggtccgtcgttgtcaaattgttggccaaagtaacggaatggcaatggtaagtcaatgtacaagaacaagtaccggtcttaagttgctttaaatttttttcctgaattcagatttctttttgttcaggtccaatgcgtggattacccatacatcggacttgtcgatttgaagaatattttccaggtgacaattaaggtatgttccattaaactctgttttaatctcagattccgccttctctgctgggcatttaccaaaccggggtttatgccgttctcaaagactgtcaaatggcttctcaaattgaggtagcaagacatttatcacagtttcttttcacaacagtaatttgttagtgcgagcattggaggagagcggttgaggaattggggtcggaagattttcggttggtagcacgcttttttgagaaagcagcgcgaattgactacagcggacgcaaaagatttggaatttttaccgcgactgtttcggtaa

SEQ ID NO: 62710 - DNA, 60 bp, Heterodera glycines
gctgaaattgatccaaatggatgtcataaccgtgttcagcaacctcaaaaccccctataa

SEQ ID NO: 62711 - DNA, 900 bp, Heterodera glycines
atgaaccgagggccgcttgcttcggtgtctgaccctgtttcgccagcatttcgaaatgtgtcattaataactggacattgacctcctaataatttactaaaaattaaacattatagtgctttctatttttgtattctccaacaatttcaaatgttacgtgtatacaattaataaattgttcagcatctcccaacgaggtggtggacgccgcgcaccgtcgtcatgctgcacataatgatccggacccacacccgttccagcttgagagcgcccatgtgcagactggcaatgcgctcccacaacaaactgtttctgttgaatctacgcaacctgttgcatcccaaaaaatggaaaaaatccccagactttcatccgaagttttaaacgcttttataaaaagtaaaaaataaataaataaataaatatttacaaaaatgtatataattattaagaaaataaaaataaaaaaccattaaatacaaataattaaattaaaatataaatttaaataaatattaaaaataatttaaattaatttaaaataacaattgaaaaataataataaatggcgttttagccgatttcacaccttttttcgactacacctctgacatttggatggatagtataaaggagaaggaaaaggaggaagagttggaggaaggggacaaagaaaatgccccgattggaggttgtgccaaattggcacaaacaaagtgcgcgaaagggggacgaaggcggcaaatttatgagaaggatgtgcaacgcgtaattctcgccgataaaaaaatgcgagaaaagaaaaaaaggaaagagagaaaaaagagaagaaaattattgagcaatttatggggaaaaagaaaggttaaaataaaaattaattagatatttaaaaataaa

SEQ ID NO: 62712 - DNA, 588 bp, Heterodera glycines
atgcgtttttgttgtcggaggagccgtagaagcggcggaagagtaaacggaaagagtcaaaggtacagcgacaaaatgcaaaaggcgaagcagaagaagcaaaagcaaaaggacaaactgagaagactgaaaacacagagagcgcagggacacatcgatgacgagcagtacagggagaagaagaagaattacaagcagaagaaggacaagcaaaagctgaaggcacgcaaaaacaaacgcaaactgaacaatgggcaccaacaaatgtggtgaaaggagagaaaggaagagaggaaacaaaagttggagagacaaagggaagtgaagagagagagagagagaggagagtgatcgcatggaaaagtgacaggacggaagagtaaccggaggagagaagagtgatcgcatggaagagcgtttcgacagatgcaaagggagtgacagaacggaggagaggagtgatcaaaaaggaggcaaatgaatgttggaaaattttatcgttcggataaatgtttcacagtacaaaaagaattaatacaaaagagaaacgaacgctttgatgacagataaatgggtaaagaaattaaa

SEQ ID NO: 62713 - DNA, 1013 bp, Heterodera glycines
atggacgataattttgatgtgaacaactttggtcaggttgaatcaggaattgaccgtacatttgctgatcaagaattgagtccaagcagcaacgagagcatagagaaatgtattgacgattgcatcacataaatactttattttctttttagatgatatctgggcccaacgaaaatcaccatgtggtatttctattccctcaacaatttccggagatcctgactctgattttttatcaaaaattgaggctgaacttgcttgttttaaggcaggccaaaggatggaagtgaacggagacttattttcctggtggaatgaaaacactggccgtcttcccgaattgtcaaaacttgcaagaatggtccacagcattcctgctacatcagtcagttctgaaagactgttctcaaaagctggacttatttttgccaattcacttcgaaataggtcagaaatcaataatgtattaatttattttataatttaaggctttccggcaatactgtgcgccaaattttgattgtgaaggccaatttggacgcacttttactggcaccaacaaatgaatatgaatcagatgaggaaagtaaagaaaaagacgatttttgagttttgaagactttatttactagcattgaaaaagaaaaattattattttttggttaaaatataaatttgatcatcccccgaccggggtccccgacccccgacaattgagctcccccccgacccgacccccgacatgtcgccccccgaggtccccgacccccgactttttgccccccgagggctcggggcttaaccctagtttattcaaaaacttacaaattttcatttttatgagctttttaaaaaatgaggttttaaggagtcgaaacaaagattttttccattatttaattattttaataatttatttcattttttaaattagttaattttacattttatttcttttttttctaattttttatgttattttaaacaattaaataattattttaattaaatta

SEQ ID NO: 62714 - DNA, 1255 bp, Heterodera glycines; identical to SEQ ID NO: 32408

SEQ ID NO: 62715 - DNA, 46 bp, Heterodera glycines
atgtggggaggttacggtggtggttactacgacggctatggctacg

SEQ ID NO: 62716 - DNA, 1680 bp, Heterodera glycines
atgcctatggagcatcgggcattgcacttctatttgtggtgtttttcgaagtggttggcctggcgtggggattcggttagtttttttcgaatttactaaaattgatttcatttccgatcccatcgaattaattaattaattgacaaatgtttaatgaattaacaggcgcacggcgtgtccgcgctgctctgaaggaaatgattggcatttatccgctatccttttttaccttactctggaaatacacagccccactgagtgcattggtaataattagagctcggtattttgaaaaaagcctggacctggacctggatttcctggacaaattccaggtccaggaaaaatccaggctcttcgagacctggatccaggcctggacctggattttttgaaatttgttctaaaaagcaagcaaaagtttgaaaaaatcaattaattgcttgggaacatctaaaaatatctaatttacactaataatctgtttttaaatctattaaacattttttgaaaacttggaaaaaacatcggtcacttaaaataataaattctaaaattttgtccaggaaatccaggtgttttcctgttttgcctggacctggacatgggtttcctggacaaaaatccaggaaaatccaggtccaggaaaatccaggcctgggtccaggtccaggccgagctctagtaataattaacttttattgccgatttaccattgtttgtgacaaggacaaagccgagtttcggccatcacaaagttttaacggctcgagtgaaaaagccaaaatttggctgtgaagatgtttgcctaatttatgaattgaatgaaattttttgccatttttcggcgaattctccacgcttcaaaccttatgcctcaaccccaaattggggtccaggcacaaattaaattgtaatgggcttcaaaagtcgaatttttgttgcttgaatttaaatgtaaagaacgcattcaacaaaaagaaactattaattaaacaaaaattgctcagattttgttcatttgctgcttggtgatgtatgagcctctccgctaccccacgggtgtcgactaccccttttgggccgaggcgttcggcttcttcttgtccgcctgctccatggtggtgattcccggctacgccctctactacatgtgctgtgctggccaagacggggaccgtcgtctcagcccattacaagtcattaagaattaaaaaaaaaattcaaaatttcctcacattctctctctctctcattctctctctcattcgctctctctctcattctctctctctctctctcattctctctctctctctctcattctcgcgctctctctttctttctttctttctctctctcactccctctctcttctctctcactctctctttctttctttctctctcactctctgtctcattctcgctctctctctctctctacacttaattaagcaataatttttagaaatcccaattataatttttaatgttcatagttcatcacattttttgacttggtccatttattgacctttaaacattcagaaatttcgtcagggcattcatccgcctcaagagtttgactttggccagagttcaagacgtcgtcctcaccatggccaacatgcaaacgacgaagaattggaatttattgataagcgaccaattaaataaa

SEQ ID NO: 62717 - DNA, 1946 bp, Heterodera glycines
atgccaataaaatggtttacgaaaaaccggaaggcaattaacgaagaaatttcttcaactgatgggaaggaaaacactgctgcgttggaaggaaagcatgataaaggtgaaaaagggaagaacaaacaaactatatggggaattaattattgaaacgcaaaacatgcttaattattgccaaatttaaaaaggtgtgaacattcccgaaattgaacacccgacggatccgccgtcggccaggaaaatctctgtgcttggcgctgaatcggttgaccggggccaatggacgggtaaatctgataactcgaacttctatagtggcaaatttattacataattatgcctattaagtgaatgaattaattgccactaaaaactcggaaaatgaaaataattaaaaatggcataacaaaaatatttttggaaatataatttgttttacctcttaagctttcaaaaatgaatgaactgaaaaagtaaacgtaacttttgaagttttcatgccttgttgtttaatctacttggaatataacagaaaaactaatttaaaaaataaaaataaataaaattttaattcattaatttctgacgcaatacattgaaattttcattcacatagcacaactcatttcggatattaagaaaaaactcaatccactcttctgaaattttatgaaaaaaaatcccaacgaaagatcaaaatttcaaaattatgataaaaaataaatttttaatcttcttctgaattaattttgttactgattgtgatcatccttttctcttttttataggacaatttgactttctgatgagtatgattgcgtacgcagttggcctcggttaattcattgttttatttttttccggtataataaattattattttaaggaaatgtttggcgctttccgtacctttgcttcaaaaatggcggaggttaattaattactcggaataattaatttaactctaaaaattatttaatcacatttgaaaatgctcataggctcgttcctcgttgtttatgcacttttcttcacttttggcgctgttccaattttcctcatggaagttacggtcggtcagtacctacagagaggtaaattacggtatgccttggtgaaacattttttgttaaattactttcaggagcaatggaaatgtggaaaatgtgcccaattttcaaagataaaaatttcattgaattttaaatttttttcctaaaatatattatttatacatttttgcctttttcaggtgttggcattggcaatgtgatgatcgcttttatgtgcatttcctatttttgtgtgattgtttcttgggccgttttttacatgatcagctccttcaattcaacatttccgtgttcgttatcattttttacaattattaattaactttttttttttgtatttaaggggagacgtgccacaattggtggaacaatggccaatgtgtgacggggaaggaaacgcactcggagattatgcgaattgcgtcaaatttgtcccgctatgggatgtccattgagtcatccgtggaacaattttgggagtaagcggcggaaggaaacatatttttttaaataaatgatatttcgtgatcaccataaaagggcttttgaatatttttttaaacgctgaaatttttgtttattttttacatcaattgagccggcacaacaacatcttaaatttttgttaaattaatttttttatttttattcaaagcctttcccaaccaatttcacgcaaaatgtaccaaaacactgccattttttctccattaaatccaattgttttttttcttcaggcgacgtgtgctaaagcaaacgccgtcaattgacgacattggcggcatccaatgggaattgctcggattgatgtttttggcatgggttgtcgtgtatttcgctttgtggaagggcatcacccaggcgagaaag

SEQ ID NO: 62718 - DNA, 270 bp, Heterodera glycines; identical to SEQ ID NO: 57108

SEQ ID NO: 62719 - DNA, 65 bp, Heterodera glycines
atggacgccgccgcctacggcactcatcggccgtttcgttcggcttccgccttcagcacttccac

SEQ ID NO: 62720 - DNA, 555 bp, Heterodera glycines
atgccatcactttggggtagggcatgtggaaaaataggacccctacacttttagcggtgccaatgccaacgcattttgtaatcaaaaaattttgggtataaaaatgccatggaatgccgaaagtgccgagcaaagggggaggatgaggatgccaaagccactattggccgattatttgatcgcaaatactgaaattaaagaacacggactggggcgaggacggattcttccgcattttgcgtggctccgacgagtgcggcattgaaagtggcgcggtcggcggagtgccggacttgggacgtaagtgcaaatgaagtcattattgtccaacataatcgagtttccattcgtcaaaattataatctttttgaaaatttgaattttttaaggctctccgtccgccggtggccgtgaggaaacgaacaacgaaattgaggagcaaatggacgacgaggagaagggaaaagaggaggaagaagaagagggggacgaatgggaggaggaaatttgaaaatgcgaaaaatgtacaccaatttcattaaaatgaggaataaa

SEQ ID NO: 62721 - DNA, 168 bp, Heterodera glycines
atgtgcccttgtttaaatggtgcgtcgacgctgcaaagtctgtgccgtgttggacggagtgaatcatatagcgtaattgtcccaattaagcaacgcgggattggacggcacatcgtctgccatttgcgggtgtatctccggattcatacagtcggcacttgccctcag

SEQ ID NO: 62722 - DNA, 851 bp, Heterodera glycines
tttttaacaaaggtctttctacgctttttccgctgtttatgtgaactccgccaaaaatgaagcgcaaagacacatcgccagagggtaaaagtaaatcattgatggcaaaattgaattttgcatgaagaccatgaggagttttgctgctccgtcgtggacgctttgctcttttcgtgcaatccgacgaattgccaacgcgttttgcagaaatttgtggaccattgtttcgagaagatcgaccgagccgtggaattgtttctcaaatacaggcacttttctatccaattttaattaataagaaaagaaaaacatttcagtgagaaagtgcgacggtttgagacaaaaatggagcgtcgaatggcttcattggctgaggaagaaaagccggacactgaggaggtaaataatgataatattcaaaagacgaattgaacaagtacagtttttcactcttcgggtttcgaatgtccttataattagtctcttgttcgtccttgtttataatctgtgatttcagctttatttggagaagttgaacaacggattgtacactttgcagagggcggcgctgattttagccgaaatttgcagcaaaggagcgcccgggtgccacgaacgggtggagaaactgttcaggttgcgactcggcgacggatcggtcggcaaacagttggagccggtcagttgcctccttctctgacttatttcgacgctacaatttttttttcatttgtgacgcggttttggattttcagattttgcgcgagtttcaccgttatttggactccgaggcggacactcagaagcaaagggttgagctgctaattgcgcacttcactcaaaaatagaca

SEQ ID NO: 62723 - DNA, 1245 bp, Heterodera glycines
atggcaattaattctaaaatatctgaaaaagaatgcaactttttgggtagcgataaaccttttttaagtaagtaactaattattacagccgcaaggattttagaaatgtataaaaacaaggaaaataataaaagatgaattttcggtagccaatactcggctctccggtagtcagtacctaattaagctcggccctccggtcaccaatacctcacaaggctcggatttccggtagccaatacctaattaaacttggcccgccagtaaccaatacctcgtaaggttcggcactccggtagccaatacctaattaagcttggcccgccagtaaccaatacctcacaaggctcggctctccggtagccaataactgagtttgcgatggtaaggagcaataatgaccgaatatgtgttggagaggaagggcagagttgaggaaaccaaataagtgaaggagagggggtgaggtcactgcgtcatcttatcctgtaaatcgattcctctaaaaggaacaaatggaaagaggctaacgccaactgttttcttaacaaaatcctatatttagatattttggtttcgggtttattttaattattttccttttctccgtaatacactttctctactcttctatatctgtttactttcactgttattccttattaatttcagacctacatattgtctaaataatcgtttccattagctatttttcaatatcttttcttccaacactatgttttattctcgaaccgttatcttccaagtgttcgtattcttgttctttatcaaactattctcttccctatacattacctaatgtttgccttactaactcatattaaattctcactatttaatattgactctcttcaaccacatttctgagttctctatctctatctcttacacccattattaattgtccttgattctatggtgcagtacaatatcctcatatgatttcttcatttattcctattacaagacctgcttcacgcatacatttagcccttatctaccctttctcgtcacatacagtcagttagctgtttgtcaaacctactttctattctcggttcaatcttagattcaaaattgtctatttctcttgtttcctttgaatattacttattcaatggaattgtaaatgttccttattataattagaattattttacgttgaattaggcaaggagcattgtttgtgtttatgattaaaattaacaagttttatataagtta

SEQ ID NO: 62724 - DNA, 1401 bp, Heterodera glycines
atgaagctactccacacagctaagccgggacaaaaaatcagctacaaggacttcaccagcctctacccgtttaccaactttacgaccgactatcccctcggccaccctaaaatcatcagtatcccaccaaatgagcagacggtcaactggcgctctccatccgacaacccctacaaaggtctgctcaaagtgctacttctacctccaaacaacaacattaacgtcactgttatgcccataaaatttgatcaacgcctcctcttccctctctgtgagaagtgcgccaaatacatcacagcaaaatatcccaatggcctcaaagacaacgactattcctgtccccactttaaccctaacgaccgggccttcgtgtccacttgcacccatcttgagttaaacgcagcattggaggccggctacacagtccgcaaagtcttccacgtcctccaatacgaccaatggagtaacaatgtcttcaagtcttacgtgagtgaaatgatggccctgaagatccacgcaaccggcttcccgtcatggtgtgagagcgaagaggagaagagtgaatacattgaggagtgctggatgaaatttggaattcatctggagaaggagaagatgaaagctgaaccggggaagcggtacatcgccaagctctgcctcaactcactttggggccgcttctccatgaggaatctactttcgaaggcggtaatcaacaatgacccttgtgttctccgccaatacaccgacgacaagaaaattgatattatggacattgagctgatggatgaggacaacgacgtattcatgctcacctacaagccgaaagaggagtttgtcgacgaaaacaaatactccaatgtcgtcatctcactctacacaacatcaatggcgcgtctatacctttacgaagtgttaaaaaaagtggccgacactcccggatgtgaaattctctactttgacacggacagcatcatctacgttcaccctgaggacaacgacccactcccgacaggaaaaggacatctcggtgagctgactgacgaaaagccggaccacgacattttggagttcatcagcgctggctgcaaaaactacgggctgaagttggaacgtaaggacaatggggaaattgagtacgacttgaaaataagagggataacactggatgaacaaactgtgcaaacgatccattatgacagtgtgaaagatcaaattatgcgttatggttccgatgaccccgcggaccccattattgtaacatatccccattttattcgccctaatctaatccaaggcaaagtgtacactcaatctctaactaagcattatcaacctgtcttcacaaaaggtattattaatgattcattccaagtcctcgaatttggttatcgcaaatga

SEQ ID NO: 62725 - DNA, 1821 bp, Heterodera glycines
atgaaacgtttttccctctctcaaaattcttcctcctccttccccaaaaaatcccaaccaaataaatgcattcgtaaaattgataacctcacttcaaaaagtaaaaaatatcaactggtgcgctcaaaatccaagttcgtcattgaggaaattgacaaatgtgctgaccccgctgctgagctccgttcatgtgtgcaccattcgattgaggaagcaattttagatggacaaaacacacttggcgctgcaaataaggtgggggttataatttcatcggaacttttagaccagggtgacatcatcctaccaattacaccaattaccgcaaatgtcgtggacgccgttttcaaccagttttgtaaagtggagcagagcaaatcgaaacacgtcaacttatatggtgctccctttataattaccgtcactgtcctaaacaccaatggactaccgcgacaacggacaacaaagggaaaagggcgaccgcctgtctcctcacaatcgcacattttcaaagtcaacaacaacgacaactactgtcttttttacgcgctggaactgatgcgctactattcactgtacaaacgcggaattataacagaaaagcgatggcgatggattaacaacaaccaaaccacggttttacgacaaaaggcgcagcaactgctccgcgatgcggggatccctacaacagagacagagtacgacgcggaagtttatatacatcaagtgcaagggttgtggaacgtcaagtatcccggtgagtacaaaatatttatttttaatgattaccagatgcgcccaatcaccaaatccgatatcaccgattaccaattccccattcttctctaccacaacaacaaccactttgacggcatcaaaactctttcaaaatttttcaacaaacgttactattgcatctcctgtgaatctgcctacagccacaaatttgaacactcttcaaaatgctcttcactctgtcacaggtgccgtgaggtgggcgttgactatccctgcgatccccagcaaggatacgtcaaaaactgtgagcactgtaacaacaccttctacaacaataactgctatgggcgacacctccacaaggatttgtgtaccaaatttcaacgctgtgaagattgtggggtaatttataacataaaggttcatgggagtgttgggcataaatgtggggaacagttttgtaaactttgcaagcaatttcatataaaagaagacgacgacgacgggatgaacccctgtacgaaatgtttcatccagcccctaaagcaacaacgaattaagtcatacagtatcatcgcatacgactttgaggcgacacaggacaagaaggtggagaaccggttcgagcatgaagttaactttgcagcggctaccatcatctgtaccgactgcattatcaacggctactggaacaaatcacttcagggaaaaaagtgccaaatttgcggccctcaccgctcaatcaccttttcaccctttgactacacggagacaacagtcgaccaaaaaatcatcactcaacaaccgctacgcgaattcgttgaatggctcctttttgaccacaacaaaaagtttccaacagtcgcctttgcacactttgggggccgctacgacatgacgatgatcatcaaggaggttttagcgcaaggaattcacaacccggacatcatcaaacaaggaaatcgcctctacgagctgaaaatcagggaaaacgagcacggcccactcaccatttttcacgacaattacaacctaatgcccatcaaactatctggcctcatcaaatctttgggcttcatataa

SEQ ID NO: 62726 - DNA, 349 bp, Heterodera glycines
atgaaattattattcgatagtattaagaattctttatttatggttaaaatttcaaaaaatttcatcgagtattaaaaaaggtaggactgtagccctgcaaatcaggactacactggatttacaccattcaaattggtaggaaaaatagaaattgttattttaagtaaataatttttaacatatttaattttacttttaggtacgaaccggtaatgcaccgttataactgcagtaaaacaaacattgctggtcagtcgagcaccaatggtgacttggctggttcgcataaagcagaaacaaatagtgaagcaaaatccgattataagaaatgataaaaaaaactaataaa

SEQ ID NO: 62727 - DNA, 880 bp, Heterodera glycines
atgcgaaaacggaggaacagcagttggccatgtcatctttgctcccttctcgtgccaatttcacttttctggttcctttccctttttgctatttctcctcccctgacaatggcactttcgcttttcccacggcaaaatgtgccgaaaatgttacattctccgtttcttcaacaacatgacaataataataataataataataatgtcagaggaccattgggttacagtgatcagcttgaactgttggcacattcgggaagaatggcaaagaaatgtcggcacgactgttcaatcagcgaccccaatgccgaaaaatgctggtggttattttgaatcctatcaatgaaaactctaattaattaccggtataagacagaaggtaaggaacgaaactttggcattttatgagcaaacgctttttcgagtgttaagacgtgtcattttggttgaagtgagtgggtgaatttggggacgaattttaggcatttaaaatcaaaacactttccctcagaccaaccgaattttatggatgaccggccaaaatgaccaccgacacggttcggtgggggtcaattacgagagacttaccagcgattccttccgccggtttttacaattgcctcggaggcaaattgtggcagataaaaatgattgggttggcattttataaaatttgaaaaagtttaaaaatgaaaaaatttagaaaaaggcgtcattcgtttttgagcaaatttcgccggcgattatggacagtgtggggcgattggtgaacaaactgcaccactattacagcaatggaaacggaaaactgaacgaaccgccgccttttctccgcttcgattgtccaaggccatgcgaacggtgccaaaaattaaataaa

SEQ ID NO: 62728 - DNA, 71 bp, Heterodera glycines
atggaaggaaccatcgctggagcaaatcaaaacaatgatcagacaagcgatggacgaactgcaccaaaacg

SEQ ID NO: 62729 - DNA, 873 bp, Heterodera glycines
atgaaaagccttctttggcctttcctttgtcttttttcttttttctctttgaatattttccctttcatttcttccgcatcactcgcaaataaaattggagaaggtaattaattaattaatttaatttggaattaaattttgaataaaaacgcaaaataaataaactttctcagactctcatcacaattcgtcgtgttcgacaaaagttcaacaaaaatgccaatgcggtaaacattttcgtaatttaacgacaacacgaatgattgctggcaaaacgtacgacactttggtgccattgggcgatggaatggacggaaaggtcggaaatgggaaaaaattaccaaaaataggagaaaaatgggaggaaaatcaaaaaaattaacgaaattataaggaaaaaggccattcaatttgcattcctctttttgttttgggttttaaatttgatttccccatttttctcaattatttgcccacttttcaggttgaacacgccttttcccagtcgcttggccgttgtgtggcgatcaaaacttgcacggaggacccaacgcggttgagcaaatgcacgcgggagctgaaagtgttggagcggatgcgcgacatggcaccacacattgtgcgactcgaaaattagtgagtttcgggggggggggggggagcggataattacaataattaagaaaaatattaaaattaatgaaaaatactatttacagtgagacaaagagtggccaaccgtgcacggagggagcagtgatgtccgattttatcagaacagttctaattgggagcgaaaagcgcagaaaaaggcgaaacgttggcgaagagagtgagaaaaaaagaattaatattatggaaaaagaaaaatga

SEQ ID NO: 62730 - DNA, 475 bp, Heterodera glycines
caatttccgagaggcgttcgccgtcaaaaaggcgcgaaaaaaggcgcaaaagaggacgaacggaagaggaagaggaggaggaggaagatgaggatgagatggatgaaaaggaagggaaggaaaaggaagaagaggatgaagacgaggaaggggatgagaaggaaggggaagaagaagggaaggaaaaggaagaagaggatgaggaagaagaagaggaaggggaggagaaggaaggggaagaagaagggaaggaaaaggaagaagaggatgaggaagaagaagaggatgaggaggagggggagggaacatatgatgaataggaagaagacgagggaaaacggagtaaagaagaggatgaggatgaagaagaggacgatgcaaccctcaccaaaactgaagtgaaaaaaatagaaataatttgtgaaagagttgtgccgatttgcgaagctctttcaaatttacaagtcatcaaaaa

SEQ ID NO: 62731 - DNA, 1059 bp, Heterodera glycines
atgcaatggcaaagtgagtttaaaaatacttctaatttttatcatttcagaaaaacattcaaaatttaacctttaatgaaagtttaaatgaatataattttaatgattttattgtcattataaaaaatttcttcagttcgcgaccccaaaattccttatcaaattttatacaatgaatttttgtttggcgccgatacaaaattaagaaaatggagggcaaaaattattcttgaaaagtttctttacgacgaatcggcacaaaaattgttcgaagacgaaaaagcaaaagcaattagaaaaggcaaaagaataattaatttttaaattcattttaaattaaataaataaatgtaaatttattttagagaaaaatttaactgtttttcatgagagaattaaatttattggagaaatgaaacaaatttggacaatttattcggagaatttttggtttaacgaaaaaacaattcgggcaaaaattgagcatttggtgaggagaaacaaaggcaaaaatttggaaatggtaaaagaaactcttttggcacatcacaaagaaatgagtgaaattgaacacaacgaaaaggcaaaaaactttttaaattggatttaaataataacaaattgacaattaaggacattgacatgctttggggaaatgggcccgaagacacggcacttttcagggcacttttcatttgcatcggcgaatcattcacggaatgtgccgaaaaaggtggacaaaagtctgccgaacatttggaagaattttcggcgacagagcaattaaaagcgattaattgtgtggccaaaatagtgaaaaggaaggcgcggaaggacgaaattgtggccaaattgcatttagagaaaatggaggaaataattggcggcgaattcaaagagaaactgaagaaaaatagtgggcaatcaaaaacaaaaattaatttaattaattaattaatggaaatgattaagttacattttttagctaaggaattggcaaaacttttggatggaaatggcattaacaaaatgaaagaattactgacagaggcatattaa

SEQ ID NO: 62732 - DNA, 683 bp, Heterodera glycines
atgccaaattgccacttttttacattttttgtaatcgttgccccaaaagtgcgtcaataaatcagaatttcttatatttttaaatttttaaatggaatttattttcttaatttatataatttttaaaattaaaagatatatatatatcaggggtgggataaattttcatgttttgaagggtaaacgatgctcaaattcgtattgatgagctcaatctgcattttgtgtaccgtttgggggtgatgccggataagcatttgctgatgtaagtctggcgtattgtttttattttcaaattaaattcaattaattaataaatgcccttttttatttaaacatttttttaattttaaggtattgccagaagaagttcgacatgctgtatgtttaaagagcaatgaatttttattttcccaatttataggaaattgaacatttgtaaattcaagccctcaaaaattttctttttaaaattttccaaaattattggcttaatcggtaaaagtttttgtcccaatttttaaacacagccttggggccaacttgctgtttgcccttaaattgaccatcgaatatggcgaacgaggaatcacccgcaggggcaaaattgccaaatttttaaccgaagaagaaattcggcgcgaaatggaggacacctactgaacaaacgaaagaaagaatga

SEQ ID NO: 62733 - DNA, 574 bp, Heterodera glycines
atgctgaaattaaatctcaacgaaaaaataaaaaactcgaacatgaaggctgcctgtatgtcttccatttgttgaacgccgatggtgacgtaaaattttggcgctgtgaacatcagcacggcgaattcaaatgtcgagggcgcattcacacaacgctcaatgacgtcgttctgaagacaattggtatacacacgtgcaaccacagcgcggcaaatgtcgtcgcacaaaaaatcaccaccggcattaaactcacgtgagaattttttaaaattaatttttaaattctcaagacggccaaggcgatacaagctcgcctggccaagaaaagtgagttttttcaccatttttactcaaaattttttttttaatttcagccgctccacagctgaatcccaatgccgaaatgccaccgcaggacgaagcagggccgtcaacatctgctgcatcggccgaagaagcgatggagccaccaccaccaactccagcaccagtgccaacgccggagatggacgaggaaattttggaatttggcttttcgctgccatcgacatctgtcacacctatcggcgatttg

SEQ ID NO: 62734 - DNA, 113 bp, Heterodera glycines
atggcattttcactaatgaacacaataatcttcggtggaaatggcataaatttgtcgaaatgcccaccaaaggaggaaacggcgagtgcaaatctgccaaaggaacaaaaaca

SEQ ID NO: 62735 - DNA, 284 bp, Heterodera glycines
atggttgcattttttttggcttaccaaaacttcatcgaacctggttctttctattctctttcaaattgccccaaattttttttacagccacgaggccgcgaagcggccgagtgagtaccttgggcgcaggaaaattattaaggaggaaggttcattatttatttatttttgcaaaattaattcataaatttttttcagaaactgctctgaaacgcaccaaaatttatttacaagttgaataaggcactctgactcttatattatcaaaaagggagatgaataaa

SEQ ID NO: 62736 - DNA, 284 bp, Heterodera glycines
atgtttgcattttttttggcttaccaaaacttcatcgaacctggttctttctattctctttcaaatcgccccaaattttttttacagccacgaggccgcgaagcggccgagtgagtaccttgggcgcaggaaaattattaaggaggagggttcattatttatttatttttgcaaaattaattcataaatttttttcagaaactgctctgaaacgcaccaaaatttatttacaagttgaataaggcactctgactcttatattatcaaaaagggagatgaataaa

SEQ ID NO: 62737 - DNA, 906 bp, Heterodera glycines
atggtgtgccgtgaggaatggcatcgtcagttggacggcgctcgactgcccccatttctctaccaacagattggacgatttgccggtgcactgatcacttcattgtctgcgcccggcgggagcagttcagcggatttgctgggcactgaacgtgttcgggtgggttggcatttttaggtcaataaaagatttttaaaaataaataatccatttaaaatgcttttgaattgtgggacgatcatggcttgagtttttcagggtcttggttatgtacataaacgagaaataaattttcagtcgccagcttaaaggtcgtggaacatttttttaaaaaacaaaatttttttaactttctctgaagttttgttaaagatattttgaaaagacttatttaagaaaattttcagttttttggaatttttgggtgctataaaatttggcaaatcaaaaaaaaaagatcggataaaattttatttttttttttgaggcaactgctggagccactaatgaaacttgttaagaaaaattcaataatgtttttttaaatgccattttttcttaaaatataattttctaagagaatttcttttaaaaaaaaatattattttttatttataaagatttttcagcaactgctcgacccattaatggccaccactgcacagctggagcagttgactacggagagttgcgccgagttgggattgcccgagtgtttggtgcacggaaacccgatcggacgcaatgtgttctttgacctaacaattgcggaacagcaacaacatcaagcagtagtagcagcagcagtaaatcatagtactgacgatgacggcattaagcagcagcagcagcaggcaaagggcggcggtggcggcaccactgttcgggcactcatcgactggacac

SEQ ID NO: 62738 - DNA, 1370 bp, Heterodera glycines
atgtccatcagtttggctgatcggatgaagcttttgttgaccaatggcgatggggcggacattcaatttttggttggccaaggagaggaaaaggaggcacgtattggaaaaaaatcaagaaattcattaaattttttgaacttttcttttattcgaccatcaaaagtttctcaaatcgtaaacattgttgtttttaaggttctaaaagcacacaaactcattttgatggctgcttctgacgtgttcaaagcaatgttccgtttcgacgctcaaaacgcaaagacaaaaagtaaaaaatgaaaaacaaaaaattaaaaaattttaaaaatttttagcctcctcttccgctgaacagttacaatccgtggagatcactgacatcgacgccaatgtgttcaaagtgatgctgagctttatctacgcggaagattcaagcggattgaccggagacaatctcatcgctgtgctttacgcgggtgggaattttttttattgaaattttagccataattagagaccagcagtaaaattttcaacagtctagtggattaggaaagtcattaaaatcgaacgaaaaatttttcaaaatttctccgacggtgccgaccgtaccctaactcttcagaaattgtttggaaaatgtgacgaaaacataagaggcctaagagcaagaaaaaaaggaaaaggccgtcgctcggaagagtctgtatcgtttcggcgccaaaaaagcagactcaaaacacttttatcgtattgagaaagcaagatccatttgcaattgtgaattttcggcctttttgctacggcgccaaaaatgatcaggaaaaagtgatcaaagtttcaaaagccccaaaaagatcattttttaaaaatttctattaaaaaaggaattgagccacaaaaattttcattaaattacctgaaaattggtgggactcaaatctatcatatatttttttataattttttgtttacaaatgattactttttagctaagaagtaccacatttctttgctggccaaggcttgcgcggactttccactggaaaatgaattgcccaatgttttcctcgcttttgaccaggctcagcttctcgatgagaaagtaattaatttaaggccataaaatttcagagctttttatatttaattagtttttgattttgttttttaatttggcttcgcttttttaggatttcgcaattcgttgcttggattacattaatcgaaaggcggaaactttgtttggttcagaagaattccttcaaatcggccaaaatttgttgtctaaaatttttgcgagtgaccaattgaaaatcagtggcgaaatcgcactttggaaagctgtaataattattatgtttaaataa

SEQ ID NO: 62739 - DNA, 399 bp, Heterodera glycines
atgtttttaaaagtgaatatgccaatgaatttcagggtatcacaaaaagcaaaacaggagatgaattcgcgcactgtatcccatgcaattttaagccttttgaatgtaaaaatggtcgccaattgtctcaaaatcgcaaaaattgataatttttgatgaaaatctgttaacaaatcaaagaaataagaaaaaatttttccggcggcgcctatcggcaccgccggacccacttccctccctcgttctccaaaatttcttggaaaaatgcaccgtaaaaaatttattaaaaattatatttttttagataaaaattacactaaatttgctatttttctcaccaaaattgttaaaaatgatcatgggaggtggaaaatataatatttaatgcatttcgatcga

SEQ ID NO: 62740 - DNA, 105 bp, Heterodera glycines
cgtccgtttggggtactcaaacaattatggggagcaaaaatcccacgcagaattaaagtacaggctatagggaagctattcccgaaggattctgtctccccataa

SEQ ID NO: 62741 - DNA, 729 bp, Heterodera glycines
atggtgcaactgactagaaacaaaagtttgacttcgggcggtggcgacgatgggaaaaatggattgctccgcggcgtttgttttgaattgatcaagttcgtgcacgactcgacgcagggatttggacaagcggtaattccctctaaatcgcattcaccatttaccttcattttaggcacaattcgtttacgacaaccgtaaaatcttattcacgaacaaacgaatcgaacaatttgtttgctttttgtcttttaacattatgtaactatataattttaggcattggaaattgacacggaaaaagtccaaggaatcgttcgcgatttcctgcgtgggtctccagtcaaaattgaggttaggccttgtcagactgataagcatgagctggatctcaacggcattgtttcttcgatttcgcaccatcctgatcaacaatcggacagatctttgcggactttccttgaaatgctgtcttcccagccatttctcaatgcgtaattagcagtatttaatttttttaagtttattcttagtgggacacatgacatcattggcgctggtcgactttttaagcgtcagatctgcaaagagctcgaagatggcattgtcacgcgcgagggtattgctaagggagttcgcgtcattgacaacaatggtgaaccaaaggcggctttgtttgctgacggtttactttgtattttgttggttgagtgcttaagaatcgcttga

SEQ ID NO: 62742 - DNA, 154 bp, Heterodera glycines
atggagaatcagctaatcagtcagctgcaagggtacatcagaaacaggtcgcaaatcagaaataatcaagtttgcaatcaagaacggtcaggatcagactcaaatgtcaggatcttccagggatgcagttacagacatagggttcagcagctcg

SEQ ID NO: 62743 - DNA, 744 bp, Heterodera glycines
atggcgttaatatggtccaaactcaacaaagatataacagatgctccatctgttgacagtttcaaaaaaggtatgagtaaatggattgagtcaaacaaaaaattttgtctgtaaaagcgctccttggacttgactaatttactaattaacgtgtaagtggtcaccccttcgttggatattttatttcttctgaataaacaaataaaaacctaaaatttagtggtgtaaaacgacaaaagctattcaaaaaaagtagcaaaattaagccaaatgtgtattgagatacagtcatggtcatatgtttatggcgacttgctgctaacaaacactttccttaataattagttaccaagaaacgtatgaccagaagtgtcataacattttttgtagcattttttgtgggctttcaaatgataccaatcattagtcgaaatgagaattttttgtcagatcacttccagacttttggtggtacaccccattttcgcgtggtcatatgtttatggccatagtgcattttacagtagaaatgatgaaatcaaaattgaagtacccatacctcagcgggtataagtcatagagacttacggtcttttgcatactgtagaccgttttgtcctctttctgatgaacctaacggttttttccagaaaatttttcccaaccccctaggattttttttgaaaatttccccgatttccagtgtattttggggtgccagatcaccatgaaggagtgatctga

SEQ ID NO: 62744 - DNA, 753 bp, Heterodera glycines
atgcgatacatcatttgccgagagatgaagaatccgaccgaagcgaagaatctgctctcacgtgagtgttttgacagaaaaaaataatgggaaaatttaattaattaatttatataattaaggtgtctcagaatatctccaacaacaccacaactttgggcccacccctccgctcgacgtctctttcccgaattatgtgagttaacacttaaatttgtaacacaaacatattcaattcattaaattagggttcctccccgactcctcgggggggggggcaaaatgtcgggggccgggaacctcggggggtgacatgtcgggggtcgggtcgagggtgagctcaattgtcgggggtcggggacctcggggggcgacatgtcgggggtcgggtcggggggctcggggtcggggaggaaccctacattaaatattcaaaacaatgggcagggaggggttggaccccaactttttggagagtaaaagtcggggaggaaattctcggggataaaattgtagtcggcagctttatgaattaaaaaatgccagcaggcagggaaattccgtaaaaaagggtccctttttcttttgtcaaaagcctcggggagtgcccccggcttttggtctaaattttaattaattttaaatttaaaaattttcagttgaatgaaaatgttacttttgctgctcggttggtcacccaatttgccgcacagcccactaccacggtggaacaaatgcgtaacatcgggattt

SEQ ID NO: 62745 - DNA, 1108 bp, Heterodera glycines
atgcctccgatccacgatcaatctcgaattgagtggtgccaatgtaaggtttgccaaaatgcgccagccattcatgaactcaaacggtgccgcgttgacaatagttaaaaaggggtgccgaacgtaaactggcggaatgagtgccttgaatcggtgcttcgtcgtcatcccgtccaataaattaaaactgcccattcatcatttgtaggaatgctgggcatttttactcgcttttgcactcaagtatttcgcgaacagttggcatttcttattagaatctgaattttcttctgtttaggaagaaaattagaaaaaatcacagccgggaataaatttaaaaaattttcaaacagaaattttaaaaatcttagaaaatttttctagaaaactgtaaaaaaaattttctagtgatttttttgaaaaaacttattctcggctgtgttatgtctcgactgtatttcggcggcagtgttttgtcctgttccgcgcctcaattttcttttgacattaattccttaatttttttaaattttatgagtgagacgaagcaacaaattatgtgctttcaagtggaaaatttttgacagaaaattattcataacttagcgaaaatgaataaaatttttgatatttttagatagcctaagtgtttcctattatcctgtaaaaatcaattaacattcaaaaaaggtacaaaaaaccaaattttttttttgcacattttggtcataacttctttgaaatttaacgaaactttttaaaattttgtaggctaatagaaaacacatagatctatcgaatgatatcattgaagtgggaccgggccgggaattcccggtcatccgaggtcccggtcccggattttgaaaagctcaggtcccggtcccggtaaagcaaccgggaaccgggaaaaacaagcactggtaagaatgggtgtctgagtgaaaaattagtgaagaaaattggagttaaaaggaaaaaattttaaaaatatattaatatattctttaaaagcagttctgccaattgtgcggatggcctagtggctagtctccatgactttcccttcttctttccattggttaaatctctctacacagaaattaaa

SEQ ID NO: 62746 - DNA, 354 bp, Heterodera glycines
atgtcgggatatttgcggacaaaaatcgcaatagagctaaaggctcttgaaaaggcgaaaactgcaacagaattgtatgctgagccggaccaaactctgacctcattggaaaatgcaattctcctggaaagcgcggcagagagaataaagtcagaggtggaggcagtgaatgccaaaattgagcaaatttggataaccgcaagcaaatggcatgacgtcatacaaaaaatggacaaggacgaaagaaaaagtgagcagacagcgtatgaacaatttcaaacaacggagaaactgaacacaaaaatggaagcagccaacacaaagctaacagagctgaaggacctctggagatga

SEQ ID NO: 62747 - DNA, 318 bp, Heterodera glycines
atgtcgaagtcaaatgcagaagcagacaaagggaatagccgagcgagaggcaatgaaatgactgccgcattgtaccaattgccaacactaagaattaagccgtttgggggagacaaacgggaatggcccatgtttgaagaagcatttaaagtggctgtggaccaaaagccaggaagcaaaacggagaagctaaatttgctgaaatcgctggttgagcgagaggccgcattgctcatcggaggcctacgcctggaagagaaaaattacgaaattgccatgaaactgttaaaagacacctatggggataaaggcgaatac

SEQ ID NO: 62748 - DNA, 1501 bp, Heterodera glycines
  unsure (1)..(1501): unsure at all n locations
atgtcaaggcacaacaaatcttgtaaggcacattgtgtgatgtgctcacgtgttggaccgcaatttccgtgtcagccaacagatggattcgtcaaggagtgctctaaatgctataaaaggttccgaaactacgactgctaccaacatcatcttcattccaacttttgtatgcggtcaaagatgtgcaaagattgcggtgctgtttgggatgtagcagataacaaaagaaatgacagaaaggggcatgtgtgtggcgagaattattgtgggctatgcaacaactaccacaacactgagcggggatgctacattcaacccattgagccgaaacaacatactccctatcgtattgttgcgtttgacgtggagacaatgcagcatatgttcattggggaatctgaacaacggaaccatttgcctaattttattgctgcgaaattaatatgcccgggatgcatcgagaatggagactggcaaagaggaacaaaagggtgtgaggtgtgcgggccaaacagaacggtcgccttttgccaacgcttcacagaaacaacagtcgacaagcaagtggtcgcagacaatcctttggaggaatttgtcgattggttagtcttccaactcccgctgaagtatgacacttatgtttattcgcactttggtggccgcttcgatatggtgttggtttttcgtgaacttttccggcgaggattcaatccgagcatgttgaggaagggcaataagctgtatgaaatgaaagtgggcaatcagaagaaacgcaatccaaacgtggtgttccgagactcgtataatttgatgccctgcgctttggctgaacttgttccatccttcggcttggatgtggaggacaaaccattctttccgcacatggcaaaccaaccggataactacggaaagcagatataccccacgcctgaagactacttggccgatgggatgatgccggataaacgacaaaaattcaacgtctggtatgaacaacatcagcataaacccttcctccttgacgaagcattggccagctactgcacaaacgacgttgaaattttaacggcagcgctggtagcgtttcggatggaattctttgatgtgtctcggagggaagaaggctttgtagcggaaagggcacacgaaggaattgatgtattgagggagtgtatgacgatcgccggcgcctgtatgaagcatttccggatcaaccaccttccagctgaacacttggcaattgtcccggaacgaggctatgacaatgcacaaaatcaaagtagactggcccgccgtttcttacagtggtacacggaagaacataatgtggaagtgaggatggctaattcacccagaggagagaaaaagtttggtcaatattctgtggatggatgggtggaagcagagagaaaggcaatagaagttaatggatgtgtttggcatgcatgcagtgagtgttatccagacgataatatgatgnatgccaatggaaagacagctg

SEQ ID NO: 62749 - DNA, 982 bp, Heterodera glycines
atggaaaaccgttcacctaaacgtccttcgaattctccattcgttgaacttcttcccaaaaaaccccgccaagacttagtcatcaatcaaattttgggtgttgtccaacaaggaggaggagagacatcaccttcaaaagaagctccaaaggattacgtgcagaaattgggtagctctgttgaacatgtcgccaaattccactacaccaaaatgaaatctcgcttcagtatttcggatgttccttctaaccccgagaggcttttggctggaatatttcaacattgtattgatagtgctacaaaagacagccgtgaacgtgggatcgagccaactcaccttggatgtttgataagcagtcctcttttgtcggaaggagctataacaattcctactcgaaaaatctccgacaacactatcgataccatcctcaatttgtttctgaaggtggcgcagtccaaacaacagaaaaacgtttcactgtggggtgatccgttcacggtgacaataacaacagtcgatcgctccggacttcaatttaaacgacgtgtcaaaggaggaacacgccgaaaaatagctgctgtccatcaccgaattaatgaccagtgcctgattaaaattcgtaataacgacaaccacttctgccttttctacgcgctccaggcaacaatggtcgacaaaacatgcaattggcctcgctggaagtttttcgactatgtgaacgacagacacggacaacagggacaacttcatcatgatgcggttgagctcatgcagcaggtgaaagctccgatggacttggacggttacgacgcggatacatttgtgcctcacgtcgttgactactggaacaacgcgcagcgacaacaccgctttgctgtgttcatctttggctcgttgggacagtataagccgctgtacaagtacattgacaacacctacgacacaccattgctgctatatttcaatgaggaccatttcgatg

SEQ ID NO: 62750 - DNA, 121 bp, Heterodera glycines
aaagtgacatttgcggggaaaatttaaattttgctgtgagttgtattttgatagatcaccaaactgacagctgagggaaattcatttttttgagttgtagtaccacttaatgacctattag

SEQ ID NO: 62751 - DNA, 104 bp, Heterodera glycines
atggtaattgattctcagatcaacaagcatataatgtctgaccagaaacaactgtttttattcggtcaaactcttcccggcaatcagagtggacttcttgaaag

SEQ ID NO: 62752 - DNA, 903 bp, Heterodera glycines
atgatccatcatccccagcggcatttcgctggtgttaccgcactgtggaaagaggcgcgaaagaagattaaacatttacggaaaaaggacgtacagcattatttggagggacaccgcacgtacactctgatgcgcccccgcagggtgcactttccaagggcccgaaccgttgcggcggggttcatgaccgatgttcaagtggatttggtcgattttcaggcgctttcgcgccacaatcggggtcaccgatacctgcttgtagcggttgatgtgctctcaaaacgattgtttgttgttccgctgaaaaacaagagagccgaggagatgttggaggcattcaaacaactcattgaccaaatgcccatggtcccgcatcgcatcttctccgacaaaggcactgaattcaagaaccgcttgctcagggaattcttcgaggagcaggaaattgagaaacatgagccagtgcattcgttcgtcaaggcatcggttgctgagcgggccatccgcaatgtgaagcagcgattgtaccgctattttgcggaaaaggagacgctgaattgggtggacacagtacagcaaattgtggacggaattaacagctcgccgtcacgcgttcacggaatgcgccccattgatgttaacttttcaaatgcgcaaagggtgtggaagcgattgtacggacacccagcccttcaaaggcggacgccacgctttcataacgaccaatttgtccgcatgagcagagagaaggggcaatttgagaagggatatctgccaaattacggggacgaaatcctggagattgacgaggtgttgaaagcggtgcgcccgattcggtacaaactgcgggatgaacacggagagaaattcaagggcagcttctatgagcaggagttggcgcgc

SEQ ID NO: 62753 - DNA, 634 bp, Heterodera glycines
gtgaaatacccgcagctgcaagtggaccaaaccaacgaatgcgaaggcgtttatttcgagcgcaacgaattcgtggacataattctgtccaatgttttgtcaaacgccggccgacggcgcattgttttctcctcttttgacgccgacatttgcacaatgtgcggacgaaaagcagggggaaaatatgaaatcgacgaacacaaattattgggaattaggggcaattaatttattggacagttagaattggcattttgccctcttaatgcgccaaatcatttcaatacgtcgttaaaaatattctcgtcatttaaacttgaattcttcaagaatgagagagcattttttcaggttgtcggtcaagcagaagaagtacccggtgctgttcctgtgccttggcgattcgagtcggcacgtccaatacgcggacgagcggacgcggttgccaatgtccgcagtgaaatttgcacatgccatcggaatagtcggcgtgaacttcaacaccgaagatcttatgaaggtggacagtgaatcatttgccatttttaatacggcctgattttgtcccgatcaaaccaattacgcgtaattattaccgattttcccccaggacgcgtcgccggtggcaaatcga

SEQ ID NO: 62754 - DNA, 304 bp, Heterodera glycines; identical to SEQ ID NO: 51570

SEQ ID NO: 62755 - DNA, 101 bp, Heterodera glycines
aaaattccctcaaaaataaaaggtctattgcgcaccgccctccctatcatgctcgagagcatttgtatgtgtataaaatttatcaaaaaaagagatagcca

SEQ ID NO: 62756 - DNA, 1812 bp, Heterodera glycines
atgggcgaagcggagtacaagcggtactgcgacagcatcgcaccaaagacgcagaacgatttcaactgggacgagacgaccgcaaaattgaaacatttgttcggagaaacccgatcattgtttctccgccgtttcgactgtttccaaattcgtcaagacgcgcatcaggacgtgcaaagtttgatcgcattgatcaactcgtcctgcgaaaatgccgatctgtcgctgagcaaagaggagctcaaatgcatgatactgatcattgcattgcgggacgaattcaccgatctgaggcaaaaatgccttcagcgcttggaagacagtcgaacgagcggacggtcaacctcactgcaagagcttggagaggagtgccgaaaatatcaaatcctaaaggaaagcgcgctctccctcggctcaaatccctgcagcaccagtgccatccgagccaaaccgcagcaaatcagggacaagcagaagcccaaaacgaagccgcagcaaagccacaaaggccaaaatttcctgccgaaaaattcaacggcacctaaaggaaaagtggaccaacgtgatcagccatgctattcatgtggaggcaaaagtcactggcaaaaagactgctggttcaaaaactcgacgtgtgaaaaatgcggacggaacggtcacattgcgaaagcatgcaaaagcggcacagagatccgacgtgttcgtgcagtggccactgattccgtgaaggacacgcacattcacaccgtctcaattaagctaaaatgtatggctattgaaggaagcagcaacaaatggtgggaagtgatcatccaaatcaatgggatggatcacccaatgaatgtcgacaccgctgcccaaatcacggtgatcaaaacggactcatggcaaaagcttggcaaaccaaagctaggcaaaacggccatcaccgtcaggaattgcaatgaaaaagcattcccaatcgaaggcaaattcaaatgccaagttttgtacaaaggacgaacggcaagcctaattgcttacgtcagcgacgaaattcaccaggatttgcttggcatgccttggattgaagaattggaaataatcccgaaggaattgatgtttccaaattcgtcgcaaatcgtcaattcactgccaacgaagccaatttcatcacaaatcagtgatgaaaagtcactcatttcggcacttcaaaccaattacgccaacacttttggacctgaacttggccattgcaccaaattcagagctcatctgatcctgaaaaaggaggcgaagccggtctactgcaaggctcggcctgttcctcatggagcattggatgaagtcaatgccgaaattgatcgtctttcgaaaattggcgcaattaaaccgattgagttcagccattgggcggctccgattttggcagtgaagaaaaagagcggaaaaacgcgagtctgcatcgatttttcgaccgggctaaacgatgcgatcgaactgcatcgtcatccactgccaagacctgaggacatctacaacgcagttggcggcgctaagtttttctcacgggtcgacttgcgtgatgcctatctgcagttggagttgtcggaagcccgaaaaatctttgcgtgctcaacacgcaccgaggcctgtttcagtgccagcgtttgccgtttggagtcaaatcggcacccgcgattttccaaggattgatggacaaaatcatcgccggaattccaggcgcattcgtctatttggatgatgttgtgatcgccaataaatcactgaccgatcacacctcaacaattttcgcggttttcgacaaaatca

SEQ ID NO: 62757 - DNA, 1332 bp, Heterodera glycines
atgaattatcaacaacaacaacctcaatttttttcttcctatcctacagaaaatagcggagatagtaagtaaattagtaaattagccaaatatgaaggaatacaaaagaggagatagaaaaggacgattaaatttagaatcaaaataaataatttcagtaaattgggctcaacttgctcaaagatggattcagacgcaacattcgcagcagcaatcgtttccgccccaaccgccgcctcctcccccgccccctccgtcgcgtttgccttattctcaaggtttggaaaaccagcaatttgttgtttatccacatcgggtctatcctcttaaggagtttcttctgcacctgtgtttcttggaatgccattgtccacacctcccccaaatcgaacacctgggcctggattgtttccaacaccactttcccatgtgtctgttggaccaccaaactggcgacctctgcagaattgtgcccatccatcatttaacattggctaccgatctcatgggatcgcttcggctgctaattattcatatttttctcaatcacagggaccgagtgaaaggcatgatgatgaagaggttttctacagtttactttctaaagcgatactaaaattctcatttgaatttcagtatcaggctcattatgacccgtccctcgagcaagaagaatccacggaccaaaggcctccagaaatgtgttctcctcagggggccatgactcaatggatggctaatccttggaatgcggcgatgtatcctccaaattacatgccaataattggttttcacttttttttttgaaaattttaaaccttcgcttttagacactcaaatgaggaagaaacttcccgcgtggattttggagggattagaaaaagctgagagagaaaaacaaaagaagatagaaaaggaagaatatgagaaaaaacgcaaagaaatggaggaggaaaaacaaaagcaaagggaggccaaaggaatcggaaaatttgtatatttttatttaaaagacataccctcgggtggaatatttttgtacccgtttatggaatattgaatttgcaacatttaggatgacgacagtaacgatgaagaagacgaatgcggagataatggaattgttacaccgaataatgatgatcatcaactcttaccaatacgaaaatttcgcgaatttgttgaccaaaacaaaaaggatgaagcaaaaatttacgaggaaccccggacggatgagcaacggacgcaggaagcggtgatcattttatgaatgtttttattttcccaaacaggttcaaaagtggcaaaattaagatttacatagacacaaaa

SEQ ID NO: 62758 - DNA, 1548 bp, Heterodera glycines
cttaagttggccaccgttgagagtgtaatggccgaattgccatttagcgttttggaccgtttgtttttcgtcggagtgccaattgtggacgcagaagtcagagagcgatttcgaagactatggtaattggaaaattataaaataaagattaattctcaaattaattaaggtatgatcggccttattggaaatcatcaggcaattttgaaggggaggagcaaaatgaggagccaaaaatgccaaatgagaaaaatggtttaaataattataatttgaaagtctatttaaattctcaaaattattttactactttttaatggcactttttgccgtgcctttcttttcagtggtcgtcgacactttgccaatgtttttgaatgtgccgcagcccgtcctccatgagcccgtgggacgcgcctcaatccgttaccagcagcaccaaatgccaatgccatcgttcacttctgccgatatgccgcactttcctcccccttcacccgtagcggtgccaatttcgtcgaaggttttacgtaaaaaatttgtttataatacagaattttgctcaattaacggtgccaactagtgtaacaattgacgagcattacaatgtcgcggcaccgccagcagcacagcggagccgcggtctgtgcgcggaatgcaacggaatcccagatgcaatggcatcgctgtccaacattatgggcagccatttggctggcccactaatgccaaaggcaaatgcgatcgaaaacagtgccgacgctgatcagaagaatgaaaatgatcaacgcactgaagtagcagagttggcacaacatcaccaactgaagcatggaaatgcggctgaacggagtcccatcttcaaaatgccaacatttggaaaaggaaaaagggccgatcagcggaatgaacaggacgggagtggcagtgagcatatggttcatcttcagcatcagcttaataagcatgttgaccgagtacagcatttggggacaacaccttttggaggaggagaaaatgcagcggacggaggccggagagggacacaaatccgagtgccatcgtttgttcccgaatcaaacggatcggtgcagcagccggcggcgccaattacgggggaagaaacgggcaacggtaatcactagcaagcagaaaagggatttgttttgaattctcacaaatataccgtattactgaaacagaactccacttaatttgaaccccagcccctgaaataaagtccacctttggaggggggttgaaatttggaacccccgagggctctaattcataagtgcggtatctcatttatgccaatttttttttgtaaattttcctttgttttagtcattttgagcgtgccgagcagtagcgaggccaaaccatcgcataataaaaatgatgatgtcatggtaaagtcaaacggcgacgaaaagttggagcaatcggaggaggaggaggaaaagcggcaacaaattgggaccaaaattggcaagagggaactgctgacaattgacggggaacagcaacggggacaattgagcacca

SEQ ID NO: 62759 - DNA, 56 bp, Heterodera glycines; identical to SEQ ID NO: 52733

SEQ ID NO: 62760 - DNA, 661 bp, Heterodera glycines
gttttcggggcagtccccccgaaccgatgcgcccagatttatggggagaccgaatccttcgggaatagcttccctatagcctgtactttaattctgcgttggatttttgctccccataattgtttgagtaccccaaacggacacttgaaaaaatcgatttttttgttttcggggcagtccccccgaaccgatgcgcccagatttatggggagaccgaatccttcgggaatagcttccctatagtctgtactttaattctgcgttggatttttgctccccataattgtttgagtaccccaaacggacacttgaaaaaatcgatttttttgttttcggggcagtccccccgaaccgatgcgcccagatttatggggagaccgaatccttcgggagtagcttccctatagcctgtactttaattctgcgttggatttttgctccccataattgtttgagtaccccaaacggacacttgaaaaaatcgatttttttgttttcggggcagtccccccgaaccgatgcgcccagatttatggggagaccgaatccttcgggagtagcttccctatagcctgtactttaattctgcgttggatttttgctccccataaatgtttgagtaccccaaacggacacttgaaaaaatcgattttttttgttt

SEQ ID NO: 62761 - DNA, 444 bp, Heterodera glycines
ctattcccgagggattcggtctccccataaatctggcctcatcggttcggggggaatgccccgaaaacaaaaaatcgattttttcaagtgtccgtttggggtactcaaacaattatggggagcaaaaatccaacgcagaattaaagtacaggctatagggaagctattcccgaaggattcggtctccccataaatctgggcgcatcggttcggggggactgccccgaaaacaaaaaaatcgattttttcaagtgtccgtttggggtactcaaacaattatggggagcaaaaatccaaagcagaattaaagtacaggctatagggaagctattcccgaaggattcggcctccccataaatctgggcgcatcggttcggggggactgccccgaaaacaaaaaaatcgattttttcaagtgtccgtttggggtactcaaacaattat

SEQ ID NO: 62762 - DNA, 407 bp, Heterodera glycines
agttcgatgaaactttttaaaatataagcctaaactttttggcttatttaaaaaggaattaaaatttttaaaaattttattcatctcccttttgatagaaaaagcatcagagagcctaatttaacttttaaataacatttggtgcgtttcagagcacgttctgaaaaaatatttatgaattaattttgcaaaataataaataattaatgaaaaagtcagaatttcgaaaaattttaaaaacaacaagcgttggcattttttcaggttaagttagtcctttacaatggagaaggcctgcaaaatttggagagattatatcgattttagtgcgctaggttcgatgaaactttttaaaatataagcctaaactttttggcctgtttaaaaagggattaaaaattttaaaa

SEQ ID NO: 62763 - DNA, 678 bp, Heterodera glycines
atgcgtcacgcaatgcgaatgtttctcgtcccggaggacgtctttcagtcggtatttgttcaaccccaagcagcaacagcagcagcagacggtgccgacggtacaccaattgggcttttgcgctcacgcatccaacaaattgagcgtagcagggagctgaacgaagagcagaaggccgcgcaataccatcaggaattcaaacggctcaacaaactggtgcgcgagcaggaggagcagccgatcaatgttcgacttcagcacgaaaaggagagagaaaaaaatgcagcaacgccgccgccgccgcaaacgatcgatcattcaacgccaaaaagattggagaaaaacattgtaccatcagcgtttgggttgaggaggcaaagacaccactacacacaaaaggcgggggcattatcaaatcgcagacctgcccaaaaacaacaaagaaaagcagcagcagcagcagaaacaccaaacagcagtggaaatggagaaacggaaaaagaagagggtgatgtagatgatggggaacagtgggacgacgcacaatcatcatcatccacggcgtcaacaggtggtgtcgcaccaaaaagaatgctcagagcaagagatggggaagcaggaaaaggaggaggaggagaaacggctgatcgccttcaacaaaacacaactaccagatga

SEQ ID NO: 62764 - DNA, 336 bp, Heterodera glycines
tgtaaaaaaaatttggggcgatttgaaagagaatagaaagaaccaggttcgatgaagttttggtaagccaaaaaaaatccaaatatttaaaaatctataaaaaatttaaaaatgagaattcatgcgagattttctggaaataagcttaattgggcctagttaagctgtaaaaaaaatttggagcgatttgaatgagaatagaaagagccaggttcgatgaagttttggtaagccaaaaaaatatccaaatatttaaaaatctataaaaaatttaaaaatgagaattcatgcgagattttctggaaataagcttaattgggccttgttaagctgtaa

SEQ ID NO: 62765 - DNA, 1054 bp, Heterodera glycines
atgccaaacattcgccggcacatttatgctcatcacccggcggcacgcgaagcattggacaaacggagtttggtgaaaatgatcagtcgaaagaagccgaaacggaacgacatcacttctgggattgccggagtcttggaaagtccgtcggcacgacaccaaacacgggtaagtgacacggcactcattataagaaaataaaccaaacaacgccaaaagtgctgcatggaagagtaaatttgtacagggtcagcgccattttgtaaaaccttcagaaaagccaaaatgcatggtaaaaagggagaaattttaatgaaatttagaaaacagcaactaacaaatctgttaataaatttaacttaaagcttttcagatagttttcgccactcctgacgatgttttcgccctgcttgaacatctctccgtccgcatttcctcctcctccccctcctcctctcctccgtctccccccgctttgttcgacgccgtcgttttggaggacgtcgccgcgttgaaaagtgcggaggattggcgttcctttcttccgttggtctgtgctgttttccatattctttgtccaatttttggctttccactattgtattttgtcccattttaggcaccccttttgcgggtgttcagtgacccccaccattcgattgcactccctccgtccgccgatagcgaagagacgccttttcagtgttccgttgtgcagcaaattgcgcccaacagagaagaggtaaccctaaaatgaaaggttatttgcactaattgttgtgcaaattccacccaaattcagtcgaccgttttcatccttgaccaacaataccgtagcaatatgaacgcccaaatttggtcgggtcgcgccttttacgcgccgctttacaaagagctcgacttagcaaggccagtggcacacgctcagcaggaattgcgactgaaccatttgatggatcgacttgtgctggacgaacggacggtgaacaccgacacactgacgctggtggacaccggcgcattggaaggccactggacggagacaatgttcaaa

SEQ ID NO: 62766 - DNA, 1201 bp, Heterodera glycines
accaacagtcggcacaggcgaccactccccaagtgccgtgcaatccgtccctttgttcggtggagaaatttgcggtcaaagtgtgcccgcgcacgtgcggacgatgcgtggactatttgcgcagcatggagcaaaccaaatattgtgacgatacggagaatgttgacaactgtatgatgctgaaggtggccgggggaatgaggacgaatttgaaaatagtggcaatggcatttagcaaaaaaaaaaaactcaaaatttgaatgctggcaatgacaataataaaaaaacctaatttgaagatggcaatggcattttgctgagaaattgagcaggcacttgaacaatggcatttgaaaaggacaaatggcattttgccaaaaaataaatgggtgtgatggcattttgccaaatttgtcaaaattttattgtcaaaatttttaatattggcaatgcatggatttgaaggagatggcgacggcattttgccaaaaaaattgaaagttgagcccatatcaaaaaatatcgaaaattgaaaaatggctttggcactgttgaacgaaaactccccgaatattagacaaaaagttgagaatcttttttggaatatctttagatttatcttaggctaatatgctttctacaggaatcgggcctttgtgcgtccgccgacgcggccgaaatgtgcgcgttgacgtgcaacgacccggcgaacaaccagctttgcgagcagtacacgcgcaaagtgagcgccgctgtgaccgcaatgacgggccaacccgggggcggtgagcacaaaatgctataaaaattatttattaattaatactatatttttattaatttacggaaatacttttaattttatttaattttttttttgaattttcaggcggctaaaaaattcttaattaattaattaactttcaattaaactatttttttaatattaatagtttaatgaaaaggcataaaaattttgaattttataaatattttaattttttattctttacaaacttattttaaaatattccaatttattattattttattatatcaatttcaatattctaatttattaaatattaatttaaatattctaattaattttaattatgtaaatttaaattcagccgccgctcgggtaaacggcgatctgagcgacgattgtccgtccaacaaaaatttgtgcaacaatgag

SEQ ID NO: 62767 - DNA, 541 bp, Heterodera glycines
atgagcgcacatcaaagtttgcttgataagctttccgatcagcaacagaacaaaaaggcggcgccttcgccttcgtcgcccgagcgaaaagtgtcgccaaatgcatttccaaaaatggaaattgaaatggccaaaacgctgtgcactcttccgacgaatgtgcgcgacgaaatggcagaggtggaaaaaacggggagacaattagcaaaaggggcagcaattagtcggagtcaatggaccaattaagggacaatctgagagagggggagatgatcattctgagggcatggaataaacatttttgtaatttgtcagccaaatgtcaaagaggaagagagcaaacagacaaaaagcgaagggatggaagtggtcaaattgggagaatgcgagcgcgacgacggcatctgtcggtaatatgattgtgacttttttttgacttttttatatttttgggatttttatgaaatttttgcacttttttttgactttttcgtgactttttaaggcaaaatttggattttagtgaagaaaattctgaaaa

SEQ ID NO: 62768 - DNA, 1309 bp, Heterodera glycines
  unsure (1)..(1309): unsure at all n locations
aaaaaggaactcacttntgcattaaacaaatattcnttaatgaatgaggaacaaaaaagaaatttttgattgcgttaaaaatgtttntgaccatcctgaaaaaaataaaggaaattgtttntacattgatggaccaggtgggacgggaaaatcttttgttcaaattgctttatttcacttagcccgtggttttggtaaaaaagttacgaacatggcttttagtggaattgcagcaacactattaaaaatggacgaactgtgcataaccgttttaaattaccattagatttaaatagcaattcttattcatcaattgaaaatggttctaatgaagcaattgaaattcgaaatactgatgtgttcatttttgatgaagcccctatggcacctaaatatgttattgaaataattgacaaaaaattaagagaattacataataatgatattatttttggaggaaaaattttgattttaagtggagactttcgccaatgcttacctataaaaaataaagcaacgaaagaagaaattttagatttgtgtttgcaaaaaagtgatttatggattcattttaaagtatttcatttaaatcaaaatatacgaacaaattctgaagcactaaatttttctgagcaacttttagaaataggaaatggtaaaagaaatgaacaaaattatatttttcttccagaagtctgtgatatcaaagaaaaagatttaattgaagagatctttggcgaaataattaatacaaaagaattttctaaattatgtagtcattgtattttagcaccgtataacagagaaattaacatttataacgaacaaattttagaaaaatttcaaggagaggaatatgtatttaaaagtattgatgaagccgaaagcaaggaagcccctattcttcctgaaatactcaataaactccaaacaaatagccttcctgatcatgagcttaagcttaaaataaattgtgttacaaaattaataagaaatttaaatgtaaatatgggattatgtaatggaacacgtttacaaatacttgatattgaaaagaatgtgttaagggttatgattttgacgggtgatagaacaggtgaaatcgattttatcccaagaataactttgattgaggataaaaaacttccctatgtgcttaagcgccatcaatatcctttaaaattagcattttgtatgactattaatggtgcgcaaggacaaacatttgaaaaagttggaattgatttaacaagagacgttttttcacatggacaattatatgttgcattatcaagaacacgaagctggg

SEQ ID NO: 62769 - DNA, 80 bp, Heterodera glycines
  unsure (1)..(80): unsure at all n locations
atggtcanaaacatttttaacgcaatcaaaaatttcttttttgttcctcattcattaangaatatttgtttaatgcanaa

SEQ ID NO: 62770 - DNA, 3067 bp, Heterodera glycines
  unsure (1)..(3067): unsure at all n locations
atggttcgaactaaacaattatttccctctgagcttcaatgttcttcatcttctttacaaaataattcctcagaaatctctgaaaaccaaacgggttccaagctcccgtctaaaaaagcggttaaaccggttcaaagctccggaaaaaagcggacaagaacaatgtttgattcttttgaaagaatgcatatgaatgagaaaaagaacattgggaatgaaatgaatttggaaaatgttataaatttggatatgattgattttgaagaagttaaagaaagcgatgaaatagaaagaaaaagaaagaaaattggaaaagatatgaacctggaaagcgttataaacctggatatgattgatttagatggagtaaacgaaaccactcaaacacaaaaatctcaaccaaataccaaacgtataccgacgggttttttgtttaaaagtgcagcagaactaaacaatgtaaaaaaattctctttacaagagtttaacattgaatgtatattttgcaaggcagtgcattttatagaagagcaatcaatcaaaaattcaaaagtgaatgaattccattcatgttgcaattttggaaaatcaaaaaatttgttggaattatttgatgaatatccatttgaattaaaacagttgtttacagaagaaaatgaaacttcgaaaaattttacgaataatataagaaaatacaataattcattcgcttgcgcttctttagcttgcaatagatttggttttacaactccaggcccaagttgttttaaaatatcagggcaagtctatcataaatataatgcagtagcacaaccaacagaacaaaaatttttgccgacaaatggacaattgtattttttggataatgatgacgcacaaaacattcgattacattcgcataatttaaatataaatatattagataaaatcgaattaattcttagaaaaatatacccgttcgctaaagcctacgaaatgatgaaaaatgtaatcgatgaacaaaacaagtcaacagtgagaaataaaaatgaaaaacaggaagtaaaaatgttaatgagtttgcgaaacggtttcgatccaaaccgatacaatgttcaacaatcaaacgaagtggccgcaattatagtagccaatgcaagcgatgagataccagcagcaaatataattgttgtcgaaaaggggagtaagcaaatgaaaaatatctacccattagaccccaatgtcgaaccattaatttatcctttgttatatcctttgggaacgaaaggatggaatttcgatataaaagatcaaaaaggcaaaaaaatttcattttgtgattttataaaatttaaattattttacagggaaaatttttttttacctcatcattttgcaaagaggctttttcaacagtgggtcgtagaccaagcggcccgtgttgaatgggatagattaaatttcattaaaacacaccaaaaagagttaagagcatgtagctataaaggattagaagattacctttttaacaaatccgaacaaacaggagcagttattggaaaacaagtcattttaccttcttcttttttgggtggaccaaggaataaagaccaaaattacattgattctatggcaattgttggagaaaatggcaaaccggatttgtttttaacatatacaattaatcccgaagactcagatataaaaaaatgtttattaaaaaatcaaaaagcagaagacaggccggatatagtagcaagaatttttaagttaaaatctgacaaattaattgaggaagttgtaaaaggtgaaatttttggtaaagttgttgcttattcttgggttatagaatttcaaaaaagaggtttaccgcatttacatttcttaattactttacatccaaaagacaaatttaaaaatacaaatgatattgatcaatttatacgtgctgatcttccgaataaagaacaagaacctattttgcggtcattagtaagaaaatttatgttgcatgggccgtgtggagaatcaaataaaaatgctccatgtatgaggaatgaaaaatgtcgatttaaatatccgaaaaaatttagagaagaaacccaattaggagaagatgggtatgctttatataaacgcccgaacaatggtgattttgaatttgttaaaggccaacgattaactaatcaaaatgtagccccttacaatccgtatttattattgcgttttcaatcacatattaatgttgaaatctgttctgaaataaatgctgttaaatatctctataaatatatttacaaaggatacgatgcagcaacagtagaatgtgtaaaagaagagccaaacggtgaaaaaacatttttgaaatatgatgaagttggtcaatacttggaagcccgttatttaagccctgttgaagcatgttttcggttgttaaaatttgaattacagggtaaatctcattcaatagaaaggcttgaggttcatttagaaaacgaacaaacaatttattttgaccatgatgcaaacaacgataatatagaagaagcgatggaaaaagatagtaaattaactgcttattttatttttttaaagaaaatccaactgctccaaaattcaaatacattgaaatgccaacatattgcacttttgacaaaaaaaaatagaaaatggaagtggccaagaaaaggtccacacaaagtgattgggagaatctatacgataaatccaaaaaacaaagaattatattatttacgttatttattaattcataaacatgcgacaggctttgaagatttaaaaactgaatacacatcatattcagatgcctgcttggctttgggcttaactagagatgacttagaatgggataaatgtttaaacgaagcgagccaatttaaatttccaagaggccttcgctcactttttgcaaatattctcattaactgtgaaccaaaaaaaccaggcttattatgggataaatataaagacgcattaagttatgaccttaaaaaattacattctgaaaatactgcttatcaaatggctttgtcacttattgataaaaaccttttanatcatggaaaat

SEQ ID NO: 62771 - DNA, 1563 bp, Heterodera glycines
  unsure (1)..(1563): unsure at all n locations
cttgatgaattgagaccgacagaagcatacatgagcataaaactggtaggaaaactaattgctataattaaaatttaatcatttttatattaaattttttaaatataaatttgaattacagaaagctgacgaccctctggcgggtgtttggtggaacctttatatcaatgaaaaaaatgcaaaacgaatcagtgaacgatttaacaaaaatattttgaaaaaacaccctgaaatttttcgtaaatttcccatgcaagtgttttacgggagacaattctcgcattgctattcaaaattcatgattgcatgggctgctgggaagctgaaggaatgcccaggtaaaaataatgaataaactcataatgaacgaaaagatttgaagaacactctgttaaaaacataaaattttgtaaaagctaaaaattgtctcacatttttttcatgaataatattcccgtaagaataatttcgttgaaaaatggtatcagtatttttattattattgtttttcaattgagtaaatgcataaaataggcactaaaaagtggaaaagaggctcaaaaaagctcaaatttaaggggtgtaaaatggacaaatttttattcaaagcagcnaaagcaaaatgagtattgaatatatataattnnnttaaatcaaaattatttttactaataaattttgngcataacgccaaaataggcaaaaatagctttttaagatatttttggctttttggctctaaaaataaaaaaattagaaaataggccctaataactcgaaaagtagcttaacaaccaccaaaaaacatgtttttggtgcgcttcaggtcaatgggagctcaggaaaaaataggcaaaagcagaaaaatttcgatcgatcatataattaaaaatttaaatttccagggccacatcactgcgaaatccagccgattgccggattgaattgcacaatttcaaaacgtatatttgtgccacataaattgtcacatggagtgactttatacgttgcacctaatgagggcgtttttcaattgtccaccacaggatgcacattctgatcagtcgaaattgatccgcttcaaatatcacttggtttctcaatgctattaaaaattttggcgcttattaaaattggcaattttttaaatgtttttaattgatttatccattagcactgtgctcgctctgttctgatttctcagaaatgttctggttataagaatattcagattatggggtagcgactagagaccggaaatttcaaatttgcggatcccgctgcgggattggaatccaaaatttttttgcggactgggatcccgcaaaatcccgcgcggaatccgtcccgcgccggtctctactagccaccaaattttttattatgatttcttaaaaaatttataattttggcgttttgtttcgttatttttggtcttatctcaaaattttatttatttgggacttctggactttggttttttttgttttgtgattttggatatttttgtttctcaaatcgcctcccattttttctttattattgtgcttcacttttaataaa

SEQ ID NO: 62772 - DNA, 767 bp, Heterodera glycines
tcaatggaatgatgtaaattcccccgtaggcaaaaaattcatcgccgaagcaatgccatcggcgggggggggggaaatgccgcacgtccaaaattgaaaaaaccgaatgaacaacgaatgaatgaatgaatggcaccggccgaccattttaatgggttttttttctcttgggagaattttattgcccgaaatggccttagccgccttttcaaccaacagcttaattaattaaattattgatttggctttggcaagtaaaaggttgcatttttaacattatttttacgactctttgctaattccatcagaattagcttaatttttgttattcatttcaataccgtatcccccctaattgtcactcttctccttttttttttaccgtattagcagtgcatttggataatttattttttttcttttacttattttcgcgcacccattaattattgtcagtgtcgccggtgacgtgcatggacgagcgagtggtgctcaacgttggcggaattcggcacgagacgtaccaggtaaaggaagtgccggagggatatgccaatgccataatttgttgggatttgtcctaattattcgaatcaaaaaattgttaggattgacaaatttatgaaataaattgatgaatttgttcttcttaggccactctgaagaagatccccgccactcggttgtcgcgtctgacgcccgctcagtccaactacgacccaatgcttaacgaatactttttcgaccgccatcccgcagttttcgaa

SEQ ID NO: 62773 - DNA, 554 bp, Heterodera glycines
gttggtggaagttgtatcgcgtcgcttcggcccagcacgccgcgcatcagtgccaatggcatgcaatttgctggcggtgtgcaccaaaatcgtcaacacggcagtggcagcgaatacagcgccgaatggtggctaaactgatattttaaaatttatacatcagaaagtgagaatgaaggtgcctcaaaaattctcgggcaatcattttaaaaaaaaattcatgcagcgctaatttgtttacaagttttatgcctgccataagatttttttaaatattttattcagaatttaattatatattaaaattctgaaattctacctttgtagggaaaaacagaagataaacatagttataatttatataaaatgaaaattatatagatgttgaaaaaattgttaagtgccgcgcagcaaaattatgccaattttgtgatgccaaatttgaatggaaaatatcgcaaagaacagacaatggacgaagcagcagtgatccgcccaaaaagagcctcctctttggcaatcagtgtactgcagaggtggaagcaattaataaa

SEQ ID NO: 62774 - DNA, 597 bp, Heterodera glycines
atgttaccaccggtggtcttttattggtatcaagaaatataatatgaaataataataataataattaaataacataaatcataaacaggttcacttccagcacatttgtgctcggatattgtgttccattggtgcttatcatttatttcaattcacgcctaatccgaaaactgtacaggcacacaaagtgtgatgtggaaattatagaattgtttcttttcctcaaacaaatttaatttttaagacagctcagaagtggaataccactccgtcaaatcactatatatacatcgtattttaatattttaatttataaattaaattattatttttatttgagtctgatcgccgctttgtatttcatttgttggactccatattggtgagttaacattaataagtttgaaattgtatcaaatttcaatttctaatataattggttattaaggcggatttcgcaacataattttcacaaaataaggaaaatttatttgaaaatattatcgtcaaaatttttttctaaaaagtaggcgaatttatgtcaaaaataagccaaaatttgttttaagggaattatgacaaaatttttctctcaca

SEQ ID NO: 62775 - DNA, 1362 bp, Heterodera glycines
atggttcacagtcacaatcaaaaagttggaagaggagttaaaagcgacccaaattgtcaaagacagtgctttgtcactcgtttccacgaaatctccaacaaatgccatccgaactcgccctcaacagtggcgataaacaaaacccaagaccaaattgccgtgcaacaaaactactcggcacagcaaaaacccgtcacaggatggaaagcaaatcgtggacaaccgttccagccatgcggctcaagtgggggtactgatcactggagatcagattgtcgtttccgtgaaacaacatgccacaagtgcctaaaacaaggccacattgttaatattagcgaaaaggggcattcacgccaaagaaccaacaccgttcattccacacggtccaagtcaaagcaacatgttcacaaattggcacaacgcaaggatggtggtggaaaattttggtcgaaatcaacggcacaaaaaccgagatgaaggtcgacaccggagctcaggcgaagtctttagcattgaaacatggaataaattaggactaaccgaaattgttgccaaccgacattgagactcgcaactctaacccgatgacatttacgcagccttaagcggcgccgcatttttcagaaatttggatttaaaagacgcatatctacaaatggaattggatgacgaatccaaaaagctctgcgtttgaacacgcatcgtgtcctttttcagtgccagcgtcttccatttggcgtcaaatcagctcaaatatgtgctggtattcctggagcatttgcttatttggatgatgggataatcgcgtccaaaacccttgaagagcgcttttcagccatccaccaattttttacgcgcttcaaagcatatggattgcgcattcaacttgaaaaatgcaaattcttacagacagaattgcctcttcgctcatttctcggagcccttacttactacagtcgttcatcaaaaaggtgcgtgaactcagggcaccactggaccaacttctgcggaaagaacaactttggaattgcggtgaagaccagcaaaaagctttgaaaaagcaaaagacatcatgttgtcagatctgcttttaacccacttcgacccctcgcttccgataatcgtcgcggctgatgcttcaaaagatggaattggagcgaccataacgcgaattatccgcgaccagaagaagatattttgatagcaaaaatttgcacagaatctgaatgtttcatcgacaattttgcagtcacaaattgatcatcttcccgtcactgccaccgactcaaaaagatgaaagtctacaaaaagtgataaaattcacaaaggaaggatggtcaccaaataaacagccactacaac

SEQ ID NO: 62776 - DNA, 108 bp, Heterodera glycines
gatttgaagaaaggagctcaaaaaacgcatttctgcattaaaatttttcgattctgatgtcattatcggtcactagaaatcactattttggcgactccgtcactaaaa

SEQ ID NO: 62777 - DNA, 1353 bp, Heterodera glycines
ttccgacatggagcagccgtgcgccgagggctgctgtacatccatcttcggcttctggcaccaaatgagtttgacatcagacacggccaaattggccaaggaggtgggcaatttagacacgcccgagggcagtttagaatgccggtcaatatgattgacgcgagaaggggaaaaggcgagaccaatgaatgcattgcgttcgactaaccctgaggcgtgtcaaagcatttgcgcaacggacatttttgccccatttcttagggctttattcggtcattgagccccattcgtaaggattttttcggacatttgcgccccattcttaaaaaacctcaacaatgctctttttgtgtttaaattttaccaaaaaacccgtatgcttttaaaatatagataaattttgatttttctatttgtgactttttttaaattttatttttctgtttttaacagaagcgaacaccgttcagcatggccgatgatgatgggcttgacagcagcgggcattcctcgtccagcgcaagtgccggcttcataccgaaggtccaacatggcggcggtggtggcaccgtcggcactgctgccgctgctgcacaggcgtcggcctcgtccaccggggtggcaccggtacatccgttgacagtcacctacatgaaggcgtcgtggaccattgacaatcggtgaggggtggacacacatgaaaataaggtggggaggtcaaccggaattttttcgaaggggtctggggggttgaggagggggaggggtcatcggccaattttgcggaaagaggaagagaaagcggaagagaaaaaggatattgccggccattacaaaatccaattgccctttattaaagtttttttgcgcgaagtgccctctagagacagtgttaaatagcgaagctatttcaatttttttttaattaattaaaaatcttttacagtgcccgtagggtactggttgggaaaataaaataaatatatattttattacagggacatttgtttggtgatagcggaagatgttcaaaaggcacacattttctacaaaattttgaacaacgaggcgttgaagatgttcaaggtttgtacagtgaatttttgacgtataattttggatttgttgaacaaaatttgtctcatttagtttggtgacggaggcttttcatcgtccacacaatgttcaagccgtacgggcggcagcggcggcttgagtgcgaactccaacagcaacaaccagcaacatcgacacgcttatgcatcttctacacaacgtgcagccggcaaaaagcattcgacgtcggcggcagcggtgcgcaaaatgaccgccaacaacaacactgaagtataa

SEQ ID NO: 62778 - DNA, 531 bp, Heterodera glycines
ggttcgatgaaactttttaaaatataagcctaaactttttggcctgtttaaaaagggattaaaaatttttaaaatatttattcatctcccttttgatagaaaaagcatcagagagccttatttaacttttaattaacatttggtgcgtttcagagcactttctgaaaaaatacttatgaattaattttgcaaaataataaataagtaatgaaaaagtcagaatttcgaaaaattttaaaaacaacaagcgttggcattttttcaggttaagttagtcctttacaatggagaaggcctgcaaaatttggagagattatatcgattttagtgcgctaggttcgatgaaactttttaaaatataagcctaaactttttggcctgtttaaaaaggaattaaaaatttttaaaaattttattcatctcccttttgatagaaaaagcatcagagagccttatttaacttttaattaacatttggtgcgtttcagagcagtttcagaaaaaatatttatgaattgattttgctaaaaa

SEQ ID NO: 62779 - DNA, 160 bp, Heterodera glycines
aaaatataagcctaaactttttggcctatttaaaaagaattaaaaatttttaaaaattttattcatctcccttttgatagaaaaagcatcagagagccttgtttaacttttaaataacatttggtgcgtttcagagcacgttctaaaaaatatttatgaa

SEQ ID NO: 62780 - DNA, 779 bp, Heterodera glycines
atggactatctgttgttcagcagcaacaaggtggtgcgtgccatttacccggagatcatgcagaacgcattggcggaagcaattttgccaatttcgccgtcctcacagcgtcgcattggctacttttttgcggttgaatgtgacgtacacgggggcaggttagcgggcgagacattgggcatttagcgaaactataccattattaatgtgaatttgacgagaatatgcattattaggggatacaaggtcgagaattataccatattagggcgaaatggccgagaattatgccattttttgcacattgatcgagaactatagtaccgtattattgtaatttaatcgagggttgcaccgtattaggttgtactattgagggcgcattgatcaagaatcataatatattagggttacggagaattacgtatttatctaaaattttcgtataaaacagttaggtaattatcaatgttgggaatttataaaaaatttttaatttagccaatttatcaaaaatcaaaaaaaactaggccgaaattaagatatttttgaaaaaccagcacacttcgcgcaccataaaaaccatttacagcttcttctacgccgacatcatggacaacacgctgtaccgggtgaagccggacggggaaggggcagcaccaattctggtcacccacaacgacggactggtctcaatggcattcgattggatgtcaaaacagttgtactatgtggacaatgtgcgcaactcgttggaggtggtcaaggtggaggagcag

SEQ ID NO: 62781 - DNA, 304 bp, Heterodera glycines; identical to SEQ ID NO: 51570

SEQ ID NO: 62782 - DNA, 280 bp, Heterodera glycines
aaaattccctcaaaaataaaaggtctattgcgcaccgccctccctatcatgctcgagagcatttgtatgtgtataaaatttatcaaaaaaagagatatccatttttctgggataacctctaaatataaaaatcctctgtgaaataaaatggcgattgtgcacagccctccgtctcatacgcaagcgcttttgtgaggtataaatttctcaaaaaagagatagccatttttctgggatagagtataaattaaaaatccctcaaaataaaggtctattgcgc

SEQ ID NO: 62783 - DNA, 630 bp, Heterodera glycines
atgcgacaccaaatttcctggtccgatgaggctgtccttcatgtactgttccccgttctgctgccgctgctgttgctcaccggtgtggtcagaagtgggcaacccatctcgggattgccggacgatggcggattcgacatgccggagaggtcggacggggccaaagtgggccatttgagacacgcattcagcattttggagccggagttggcccagtcagtttggagccgagagggcctgaaaaatccgatcagacggaccacaaccattccaatgaatgatcggttggacattggaaacaccggcgaattgcaaccgaaaggtcgtttttctgatcagagattaagagcaattaccttcttgatcactcattcactgtcagcaggcgccaataagccgatgaagcgaaggccgagaaaagccgagactgtcagcgaatacgacacactgaacgacgactttctgacggagtacgacctgctgaatttggacttcagtttggacgaaccgcaggacgggaaaaagagtgccaaagaggtggaagtgccggagaaggaattcgaatgggaagaaggcgaaaaacgaaaaggggaggagaatttccctcccaaggcgagcaatgaattttaa

SEQ ID NO: 62784 - DNA, 374 bp, Heterodera glycines
atgcctctatttgccaattgcgtcaaagcatcgttctgctgctccttcagctacaaaatatcacagcaaacggaagaaggcgtcacacgtggcgacattatggagaagatcgtcaacttcaagctgatgcaatttgtgctcactttggcattcatttggcaactcatttcaatgcgccaattctgcggcacttttgccgacccaaaagtcaattcatttaaatttcacaaatgatcaaaatgttgtgattttcaggccttcatccatgaaaacatttcagttggccattgcaaacgttttacgctcataggaaaggactcaaaaactggcgatttcggcgctgtgttcgaccaggacaaatggcacaaccaaat

SEQ ID NO: 62785 - DNA, 736 bp, Heterodera glycines
aaacaaaaaaatcgattttttcaagtgtccgtttggggtactcaaacaattatggggagcaaaaatccaacgcagaattaaagtacaggctatagggaagctattcccgaaggattcggtctccccataaatctgggcgcatcggttcggggggactgccccgaaaacaaaaaaatcgattttttcaagtgtccgtttggggtactcaaacaattatggggagcaaaaatccaacgcagaattaaagtacaggctatagggaagctattcccgaaggattcggtctccccataaatctgggcgcatcggttcggggggactgccccgaaaacaaaaataaatcgattttttcaagtgtccgtttggggtactcaaacaattatggggagcaaaaatccaacgcagaattaaagtacaggctatagtgaagctattccggaaggattcggtctccccataaatctgggcgcatcggttcagggggactgccccgaaaacccaaaaaaaaattttttggataaaaattatttaaatgaactgactagataatatttaaaataggttatttctcttcctttcagtatccctgcaaagtttggggcgcttctgataagtttctgaaaaaaaagataagcctaaactttttggcctgtttaaaaaggaattaaaaatttttaaaaatttattcatctccctttttgatagaaaagcatcagagtgcctaaactagcatgta

SEQ ID NO: 62786 - DNA, 849 bp, Heterodera glycines
atggaaaaatggtacaatttacagccaaaagtgacaccaaacaaataccaagaaggcgaacgcgtcatggttaaatttccgggcacaaaccaacgatcgactcacaaaaagttgcgatggaatatatttggtccttatgaaattaccgaaatttcaaattcgtcggcaaaagttgtgccaatagacaaaaggaccgctgaacccttaagtgtgcctttagaacgattaattcatgcgcctaatggaatcccaaatatttgcacagctccgcgcggcagaaacgcttataaaaatgtaataaatgtgatggccatcttagaaattttggaatgtggaaattttgagaatgttgaggcggaaaatttagtggaaaattcgaattcatcagagacgatgaaaattttagttgccggtgatagaatggagattgacgaggcaaaaatcagctggacaagcacttgtgaaggcggagagcatgtgctctgcaaaaagctacttgccgcagatttggacccgattctcgacaagtcccaaggcatcggcgcgatgacaatccaaacgccgctccaagggctgctcactcttttcattctccgggcaaatatcgccatgtcagcgagcaaagaattgctcaaggtgttgttaaagtggaaaagaacggacggaataagtaaattgcaggcgattttaaattcggacccggacttcgaactgataaaatatgtcgaggagaggggagacgcaatccgatccggaagctgcccacgcaacgaagaagtcaaaacaatttggcaaaaatggacaaattgctgtgcgatggttcacggaaacctgaaaatgtccggctaa

SEQ ID NO: 62787 - DNA, 56 bp, Heterodera glycines
taaagcactcgtgttgtgctcttcaagattctccaataaagcactcgtgttgtgct

SEQ ID NO: 62788 - DNA, 5666 bp, Heterodera glycines
atgcgattaaggatgaatttgttgcacagacgacattccaaatcctccactcggcggttggcggagtcgtaaattggtagaccggaagagcgggagatgacgttgttgttgatgttggcggatggaagattgcagccaaaatattcaggcctccgccgctttctcacccccaaattggcctccatttcgcgcatttgctgctcataaatctgttgcgctttcactgcagttggtccgggagtgtttcctttggtgcccagcaattgcattgacatttcttggaccatgttgtacaattccatgcttctgtcttccatcatttcggcgtcaacttttccgtgcgctttcgactgatggttttccatctgatccttccgatagtcttgcactttgcatcccgcatgtttgcaacggaaacgataagtattcatgtctttgccaaggtggtagaacatgtgcatctgacgagcgccggcagtgatcggtttgtcgcattcggcgcacaaccccaacacgcgtttcttggaggtcattggtccgggtctgttgcgcacaatgcgtcccaagcaatcgtcagcattggcaatttgcttcaactcttcaactgcagcaatttcttcgttttgtttcaaaattactgctttgtgtgaaaaatttgtgattgccgtaatcacttttccctttctgcctttatctacagaagactcaaccctaattctgtcattctcttcttttggagtgatcaaaacatttttgtcgtcaaaatccggcgaaattgaaagttcaacaaattttgttgaatatggttcaaccaaagtactgtaaattacacgcatagaatcagacttgttgtccacacactcaaattccactaattcgccgttgggagcatcaaaaattttgaacccaaggagcccaagtgcatttgttccaaacaaaattggatgtccaataggcgcatccgtaatgtggaacataatttcaactgcttcacaacctcttctcacaactggcaacaaaataattccataacactcgacacgctttccattaatgtcaacgacattccgggttttcggccaaattttgagatttgtgccttccaatttctgactttccaaaatatttttaagaaactccgccttaataagtgaaacttgtgcaccgccatccatcatcgaaatagcgggctgatcaaaaattgtaacattcgttgtcattattttgccgattaggcacagttcctttttgccagcagcttcaaaattgtcttcgtgctcctcccaaaaacttttgaaaaattcctccatctcgggttcattgttcagaacacctgtgcatttgaccgcgtcctcattgtctttcacttcttttctttcaataaggaaattttgtttcaaaaaatttcttgattgaaaatgttgaggacggtgctgattagcattttgttcgggtttgctcataaaattcgtatttgggttactcggcattggggtacagtttgcaccagtcgttgggatatgttcgaagtttcgcatttggccattttgttcggcttgacgcctgaagcaatttctggcaacatggcccaattttccacaattgtagcattttgggcggttgtcgttcgtttgctgtgtttgcgaattgttgaaaaatcctcccgttgaattcgcttcattttgcctccctctttgtatagcattttgcgatgccatccgacgggttgccctttgagtcgcttctgctctcgccgccatcccgacaaaatgatcaaatgtcattccgggtgtccttcccaattccaaactgagtgccaattccgaattgtcgaatgttcgaatcaaatgcttgatagcataatcatcgaccaggtgatcagtcaaacctgggtatgcgcgtcgtaccagggtgatgacacgttcagccaaactgtccaaatcctcgtcgttttttcgtcgaataccggtcattatctgatcaaaagcactccattcacgggcatccgtttcttccaactgccgaaacatttctctttttatggactcatatcggtacggttcggtggaacacgcagacttaaaagctctctcagcccgaccaaagagttttgattctaatgaggtaatgcgttttgcattggaccattcagcggtattagcgtcaaaacgcttgaaaaactccttaattttttcagcgccttcatttccctttaaataaggtatttgactcataatcagagcatatgcgacttggtccatcccgggaccacggatttcattttcagtttgacgaatttcagcacccgcattttgagtaccaaaattgtttggacggtttgtaatcggagggttttgctgctgggcaacaggttgaagaacttctctctgctgatttgcttgtacaattggctgctgttggctaggtacacccattgcataatttgcatgctgcaaaactggtggcggaaattgctgattaaaaatcggcggttgttggaggtttgggtttacatagccaaaattttgctgtggagggtagccaaaagcagttggataaggaccgtaaggaaattgtcccggataaccccagataaacccaggaaatccttgttgaaaaactggttgggctggcatgggttgggatggctgttgtggttgcgtttgttgaattgggtgcggatgaatttgctgaggatgcgactgaagaccggtgggtgcggtaactctttggttctgcatagctacaccattattcaacatgttttgaaaatttgcttgtaaattttgattgtgcggtctgcattctacggtgtgctctacgcgcaactcttcaaacatattttcgtatggggttgaagtcctaggtctaacattttgcggcgcgggatgtaaaatgcgatggccatcattcgaattttcgtttctaatttgccattgttgtccgttatttctcccaacgttttgcaatcgaattcgcaaacctccatcaacatgctgttgctcgaaatttcctccgcctcgtcccgcttcatttcgaactgcttgttggccattctgttcatccggtgccgcgacgtccaaaagcgcattgcgaatttcgttggatcccatgctttcttctgactctaaaagttcaccatcaacccggttattcaacgaaacatttcgattttatgtgttagcggtgttattcggcctgcttaaattccctacaactccgttttgctgttgctgtaatgccgccgcatctcgagctcgttgtctggtgaatggtggagagcggttaatcatctttttaaaacaacacgagttttattggagaatcttgaagagcacaacacgagtgctttattggagaatcttgaagagcacaacacgagtgctttattggagaatcttgaagagcacaacacgagtgctttattggagaatcttgaagagcacaacacgagtgctttataattcggtgggatgcatgaagagtccaacacgaggacagaaaaaatgataatgtcgatatatgataatgtcgataaaatccaaaatccaacacgaggattatcgcaacttatatggccgacgtaaaagttttccgtttagtcgtcactaagcaagccaaccttttgttgcaggagcgccaagttgaaaacaaaagcttgtttgcgtccacttttcccaattcaaatgtcaaaacggcgattgtcaacagttctctgcgatctgtctttacaaaacaaaacaaaacacaaataaatttataccaaacagttaaaatacgacgacaaacaaaaataataaattcagcacaatttcttctccaaaattaaaaactacataaaacaaccaaaaacatcacaaaatatattgagtctcttaaaaatatacgaaacgccacagaaattaataatttaaaattgaaatgaagtcaattagcacatcaccgcccactagaaaagacggtcccctcggcttacaataacaaataaaataagcaaaaacaattcggctaccgatcggtggggttcaaggttgtgctgcttaatgacgacgacggctgatcatctcgtttccgcctctgtgagcctgcgagctataatggtgacgaacagcataggggtgagatcgagaagtgcgagaatggctgagagacaattcagagatgtgatcagatacagatggaattgagcgagatgaacgacgaagaccaagagcattatcatcggggaagtttgggatttgggtaaaaatccaagcgcgaaaacatttcaatccctcagacaaaattttcccatccgaacgaatccgtgtcatgtcgaacgtctcgccaaaacgccacatctccaccaggcttcttccgctcgtcgtcagtgcgatgaaccattcaccagcgactgtttccagggtcggcaggagttcattgtacaggttgtgctgctctcggacgtacggtggtggcaaccaaacaaaatgaacatgtttgaatttggcacaaatcccacgaatccgtccacattcttctgcgatctgcgccacggtttcgcctcgtagcatggcatcccgtcccaaaatgatcagtgccgccacaactttggaagtcagcaccgccttgtccagtgcccgaataatatcgccaattgatccgttgacggtcccgatgaaatgtgccgggatttggtttcctgctccaccacagagttgtgcaccagtggagtcgccgattacgaccctcggttgttccaccaatgtcgttttttcatggacaacgactgcgcgtacttcttcaatggcccaactaccatagtcaaaaattcgcttccaggcaactctgtcttatcgccgatgtactttcgcggtctggtggcctgaagtcagatgaagttgaagattctgttgtgatcagtgaaattgtcatcagaaaggatggagaaaacaatatccatgatggaacaccaaaagctgaatgggttgaagcgacacggaaaagcgaattgcactatatttatgatttcctggaaaaacacaaattgccagaagatcataaagataggcaacgaatctcgggcacaattcaaaaatattcgctgttaaatggtcttttgtattttaatgaggcaaattcggaaaaattttcggcttttcgtgccacaaaaatatcggcaaaaatttgatagctgaaagggcatgaaggaaaaatgcgccggcccattttaagtcacaaaaaagttattggcccagctctccgaaaaatattttttggccgaacatgcgagcggattgtgttaaagctgtgttagaatgccgaatttgcgcccacacgcgaaacccgcggtcaaacacaccagaattacggccaattattacaacagaaccattcgaattagtttgcatggacattctttcgattggcatgtccgaacgggggaataaatatgtactagttatggtggaccatttcaccaaatatcttattactgcagcaatcccgaacaaaaacgttgagtcagtggcaaaagcatttgttgaacaattaatcctcgttttcggaaacccgaaaaaaattcattctgatagaggcggcgaatttgttaacaaaactgttgctgaaataacaaaaaccctcggaattgaacgaagcacaacggcaggctatgacccaaacgcaaa

SEQ ID NO: 62789 - DNA, 371 bp, Heterodera glycines
aaaaaatcgattttttcaagtgtccgtttggggtactcaaacaattatggggagcaaaaatccaacgcagaattaaagtacaggctatagggaagctattcccgaaggattcggtctccccataaatctgggcgcatcggttcggggggactgccccgaaaacaaaaaaatcgattttttcaagtgtccgtttggggtactcaaacaattatggggagcaaaaatccaacgcagaattaaagtacaggctatagggaagctattccggaaggattcggtctccccataaatctgggcgcatcggttcggggggactgccccgaaaacaaaaaaatcgattttttcaagtgtccgtttggggtactcaaaca

SEQ ID NO: 62790 - DNA, 606 bp, Heterodera glycines
atggtggaagagcggattaaagagcaaatgtttaaggatgaaaagatcaaaaatgacaatttattacgccatatttttaaaaaaatccaaaagcaagccaaagacatgtttggacatcttttatttgagtaagttttttgttggaaatccctttttttcaaaacaattacaaaacataattaaaattttaaaattaaattataaaaacctttttttagaaaccaatcaaatgaaactgacaatgagaagaaaaataatgctcatgcagaaattctgttcttttttatgcatctttacaataaaatggtcaaattattaaaaggcgaacactacggaaacaataaaaatgctgtaaatacacatacttttttaaatttaaattattgaattaaaaaattatttaaaaaaacgcatttaaggaggatttgcgagtggcgcttcataaatggattaaagccgccaaagagcgagttggctttgagttccaacaatttttcaagaaaaatgttacgatctgagcaggaatatattggtatagaaaaacattgcgatatgtacatttgtttcttttggcaatttgtaatattaatatacataagaaataaa

SEQ ID NO: 62791 - DNA, 309 bp, Heterodera glycines
atgggtacatacgtacaaagagccgaagaacgaagcggcggcggcggaggacgacggaacggaggaggacagagcggaagaggtgggagacggacagccgacggaggacgagacggagcagcaggaggaggagctgagctgcaccatcaaagtgcacaaggtgggcagcagggacaaaagcatttgcagacaaatggcaaaaatgatggccctaatcgcgccaaatttgctcatatcggaaaatcggggtcccatccaaaaggaaagcccgacccgggattcccgagagaaaatagcctcaatttgtaa

SEQ ID NO: 62792 - DNA, 233 bp, Heterodera glycines
tttttgcccctccgttgtcctcgtcaacgacaagcactaacagcaccgccagcagcacaaccaccatacccaacaccaccaccggtagcagcagcaattgcggcgattactgctcgagacccggccgtgttgggtgccgtgccgcatcgagttccgcaccccggccgacttccccgccgtggaaggcgtcgcggccggccgtttccaccgccctggccgcactgtgccgcgtt

SEQ ID NO: 62793 - DNA, 642 bp, Heterodera glycines
atgttggacctggatttcctggacaaaaatccaggaaaatccaggtccaggaaaaatccaggctcttcgagacctggatccaggcctggacctggattttttgaaactcatcttaaaaatcaaaaaaaggtttgaaaaaattaattaattgcttagaaacatctaaaaatatctacttaataataataataatgtatttttaaattaatttaatctttttttgaaaattaaaaaaaaacatcggtcacttgaaataataaattctaaaattttgtccaggaaaatccaggtttttcgtgttttgcctggacctggacctggatttttttttcacattggacctggacctggatttcctggacaaaaatccgggaaaatccaggtccaggaaaaatccaggttgccgaaaaatgacctggacctggatccaggaaaaatccaggcctggatccaggaaaaatccaggcctggatccaggtccaggccgagctctatgtttacattaaaatatgattgcaattagaatgtttttttaattctttcctatcatttttatttaaaacaacacgagactgggaccgagctggaaaatccataccagatcccaaaagtttattttatttaaatttttcttgataaata

SEQ ID NO: 62794 - DNA, 883 bp, Heterodera glycines
atgactcaattgggaaacgcggcggcttctgtttcccgcaatcgcccaaatttttcatcggcaaaaacgccaacggcactttcatcgaacgcatcgatggcaagcagtagcagcaacacaggcgaatgtgtcaaagttgcggtgaggtaaggcggtgagagactataattagaaggaccatttgcattttacttttttaatttgccgtgtcattttgggtgtcggcctctctcttcggctgagattgcccagggccattcgaacattgtccgggcggacgtcgcccggggctttgtcgagttgcaaagccccaaaggcccgtccaaaagctttttcttcgactccgtcttcggggaaaagtgcagcaatttgaacaatttattgggagtataacaattaatttagcgcgaaacaattcgaaatttacgatgaaacggtgagaggaattgtggattcggtattacaggtgaagcgaaatgggaaagggaagaaagaaagaatggagggacaaaacaaaacgccaagggattcaacgggacggtgttcgcttacggacagacgggcaccggcaaaacgcacacaatggaggggacgaggggggagcccactcagcggggtgtcatcccaaatgccatccaagtgggttttgtgccctttccatgccattcgatgcgccccttcccgcaattatttagcacattttccaacacatcgcccattctccgccaaatcagcagtttttggtgcgcgcctcttttctggagatttaccaggaagaaattcgggatttgctgaaccgaagtgccaacaaacggttggagctgaaggaaaggccggacattggagtgtacgtgaaggatttgagctcatttgtcaccaaaag

SEQ ID NO: 62795 - DNA, 2484 bp, Heterodera glycines
atgttggtcaaagacgcacaagtgaagccggacatttcgaagccgcgctgggaccagtcgacgttcagtggtcgcgcacggcacttcttcaccgtggtcaacccactgaaccttttggcatcgaacaaccaattggaaaacagtcgcaaaatcgtcaccgattacgagtgggtgcccaaaataaatggcattaaaaacagtcgaaaatcgtcaccgattacgagtgggtgcccaaaataaatggcattaaaaacagtcgaaaatcgtcaccgattacgagtgggtgcccaaaataaatggcattaaaaacagtcgaaaatcgtcaccgattacgagtgggtgcccaaaataaatggcattaaaaacagtcgaaaatcgtcaccgattacgagtgggtgcccaaaataaatggcattaaaaacagtcgaaaatcgtcaccgattacgagtgggtggccaaaaatggcattaaaaacagtcgaaaatcgtcaccgattacgagtgggtgccaaaataaatggcattcttcttttttcaccatcagacaacagagtacagccaaattaccaatgttttaatacaggaaaacaatgaattcagaaatttcaattgggcttttgcgaatgggtctgtggggggacgcctaattttgcgaaggggtccgattttgttgaaaatcttattgaattttgagttttcatttgttaatccccatcttacttttttcagtggtgccctaaacagcaaagttccgcaaatctttttggttttgtgatttcgatgatttgaattccgtcttaaaaaaattttcaccgaaaactctgaaaatcatactggaaaacatgaattcaaaatttttctgtcgtgtcaaccctacctggaaaatttcgtttaaaatcctagtgaattttgagtgagccctgaaattctttgttttaacccattttttccaggacaggcaattactccgaggatttgtccgtcgatgagctttggcgtgccaaacatttgtacgactcggcattccatccagacactggtgaaaaggtgctgctgttaggacgaatgagtgcacgagtgccggtcgtcacattaatgtgcgttaagtcccccaacgaaattcttgaaaataaattttgaaaattttttcagccttggcggtatgctaactttctacaagtcagtacagtgctcttcatttatttacattcgttcaattttaaaaatttcaggtctgcccctgcagtttttggctggcaattcgtcaaccaggtggattaaaaaaaaatttcagaaaattttcatttttccatgattttttcagactttcaacgcaattactaattattccaaccgttcgggcgatgcgttgaacaactcgcaactgttgcaggcgtatctgatggccaccggtgggaaaaaaattttacctaggcctacccaaaaaccacaaattgaataaaaacgttcccaatttttaggcggtgcgacgggcgtagctctgggactaaatcgtgcagtaacggttcgaattctttaactctatcaacaaattttcagttttttctacttttccctaattttttttttttttttgcagaaattgccagcaatttggggtcgcctggtgccattcgccgccgttgcatttgcaaattgtgtcaacattccgatgatgcgacgaaagtgcgggaaaaaaatgatgatagatagagagatagatatatggcatttcttttggcgtattttaaataaggattgtgttgaatgattggtcggatctgattttctcaaaaaaagaatcggaatcgatgacctttttgattttcaaattaaaaaataacgcctaaaaaagtgcccccaatttttgcaacaaaaatttttggcctggaaaaaaagccaaatctacattcaaaaaaacattttacagggaattcatcgacggtgtccaagtggttgatgcaaatggtgtgccgttgggccaaagtcgcaaattggcatggatagcagttccgcaagtggtcttctgtcggattgctatggtcacgccggggatgggtgagagaatggcacaatttttatttccgaattccgttggcatcaatttgttttttttggactaaatctaccaaaattctgaatttttagccccaattaaataatttcccaattccgcagtttgcactccaatactgatcaatcgccttgatcagaagcaatggttccgcgcacgtccatggctttctccgttaattcaggccgcagtttgcggatttctgctcacttttacaataccattgggttgcgcagtgttcccacagcttagtccaatgaaggtgtaattgagaaatgaaaaaaaactaaatttttaatggattttcaggtggcgaagttggagcccgaattgcaggaacaaatccgtcagaaatttgtggccaaaaatgtgccagtgcctgaattggtctattacaacaagggcttgtga

SEQ ID NO: 62796 - DNA, 83 bp, Heterodera glycines
atgcctccaatttggggtagtctgatgccgttcgccaccgttgcatttgcaaattgtgtcaacattccggtgatgcgacgaaa

SEQ ID NO: 62797 - DNA, 146 bp, Heterodera glycines; identical to SEQ ID NO: 56264

SEQ ID NO: 62798 - DNA, 146 bp, Heterodera glycines; identical to SEQ ID NO: 56264

SEQ ID NO: 62799 - DNA, 146 bp, Heterodera glycines; identical to SEQ ID NO: 56264

SEQ ID NO: 62800 - DNA, 146 bp, Heterodera glycines; identical to SEQ ID NO: 56264

SEQ ID NO: 62801 - DNA, 862 bp, Heterodera glycines
atgggaagaaaagaagaagaaaaacgaaatgaagagaagaaaagggaaataattagcaatttctataaaataaaagagaaaataaaggaaaaaggaagaacttattcaaaaaaagaatggaataaaattaatgcaaaaatagcgaagaaattggggacaaatcgtcaatatattgctgaatggatcaaagaatttggtcttcaaaaacaaattcataaaaactataaatcaaaaactgatgaagaaaagttagaaattgtacagaattttattgaaatgataaatgaatataagcaaaaaagaaaatatacgagaaaagaatggcaccaaaattatgccgaaatttgtaagaaaattggagtaggccatggaacaattgaaaattggaagagaaaatttggcattcgcagtaaattaacaaagaatgaaaaaatggaaaaaatgaaaatttattcgcaaataaaaagaaaaaacccaaaaatgagtgaacgggcaattgcaaaaaagatgaaaattgatagaacgaacatttcaaaatggaagaaactgtttggataaaagaatcattgaagattgaaacgatgattataagaaaaattggataaatttgccgaaaaaattatcagaaaaactatgacaatttctagttttttttcaaattttttgtatttgtattaaaaaattattttaaataccctaaattttgaaatttttcttagtgaaaataagtgaaaacagtcaattcaaggattgggagggtatcataaaaaactgaacaatgttggaactgggctcccagtatgcgtaaattttcgattttagaggccctgtaaaactccttggggttttgctagggtgaaaa

SEQ ID NO: 62802 - DNA, 180 bp, Heterodera glycines
atgacgaagtcgaagtccagtagcggaacgactcgtaccaagaagcgtaccgctgaccaagttgtaaagacggtgttccgtcgcaaaatctgtctgttctgctttatggcctcactgattgttttcgcgctggtccttggtttggccatcactttgacagttatcacagtgaacaattgg

SEQ ID NO: 62803 - DNA, 138 bp, Heterodera glycines
atgtcgacgcaacaacaacaacgtaagacgcgttccccaattgtattggagcgtggagtctctggtcgtgtcaaatggttcgacttctggaaagggatcactccttccattgcaaactttcaattttgtcattacgtc

SEQ ID NO: 62804 - DNA, 415 bp, Heterodera glycines
atgagtgccatcggcgacggcactcacagcgatggcactcagatggaaaaaagtaaaaagtgtaaaaaggatcatgacgatgactcagtcattaaaggtaattgcgacgacgaataatattgggtggaagattttttgaatttcagctgaaaattgtggctgggaagagatgcgatgtgaccatgaaattgaagctgatttgacattgaataacaggccaattgaggacgaaaatggacgaacggaaagccaaggacaaagggacaaaggggaaaacagagacagttcgtcacccgctgctgatcagttgcgccacactcacagcttcgagtgccaacagtgcaacagccaattggacagttttgagcagtttatcagtgagtgtttacagcgaatgatcaatgcatggaaatga

SEQ ID NO: 62805 - DNA, 408 bp, Heterodera glycines
atgccgctgaccaatttggccaaagtgctcggcccgactgtggtgggcaccaactcgcggctgctgacggtgcaggacaaacaccagcaacagggcaccgcgtacatgacggaggccaccaatcagatccaaatcatgcaggcactgctcagcctggaccatgtgggttttttttttggggggagtgggaatttcagtgcaagggctgaaaatggaattttctcaaataaatttgaaaattgttttttgtcgcaggcctattggacggaaatgtacgatgggccggctgctcggttggacaacaatggggcagtgccggtggtgccgaaacaccagtggcagacaacgccgacgtccactcgcggggccgagaggggcggacacttggtgcagtcgattgtcagatga

SEQ ID NO: 62806 - DNA, 182 bp, Heterodera glycines
atagtgaggtcagagaatcaaacaagaaaaaaaacggaacgtaaagccataggaaaaattatgaggaaattaaacgtttatgaatttacagcaaatgatcgcatggatttaaagttaggttaggccactctctacacacatatttcgatcgcctcattgccccattcatctgacaatcgact

SEQ ID NO: 62807 - DNA, 1752 bp, Heterodera glycines
atgtccgagtcgaatgtgtacgagccgccgacaagtgaaaatctgcaacaacaacaacagcagcataaggcagcgatgtcggccaagcaaatcagcacattgaacatgtaggaatgaatacaaaggcaaatccaggtccccaaaaattcagccattttggtccgccccgtccgtgtgtcggccgcggttggaccaagggcaaaccgatcaaccaatgtgtgcacacttacgtgcccgtcagcaacctgttcagtgccgcgttctcctgttgcggcgtgtgcgcccgtgggctcggcattcgcggcttccgttgttccggtggaggcattatatatatatattttgcgaaattttgaaaaaaagccttttttggggaggggaaaatgccgaaaatttcatgcttaccatgctttccttccggcagaatgcaaactccaggttcatgagcactgttgccagttggcaccgccgctgtgtgtgccaatggtgccgacgcctcaacgctgcaacaatcgacatcggccaacgttgggcgacctggcaccggtgctgccgccccgtatccctggccaaatcatccgttgcgtgtacgcgcttgagcaaggcttcctcgacaccgtcgggttgtaccgagtgccggggtgtgttttgcgtactgttaccgtatttgactcaccaattttttatgatttccaacaaaaattgaattaaattggatatatattttttgttttagttgtgactccgaagtgaagaagttgaaggaccaattcaactcgaaattcgtgcccaaactggaccaaactgactcggagaccatcaccggctacatcaagaaattcctgcgcgactgtcgggttggttgatgggtttttgaaaaatggaaaaaaaaatttcgacttttgcattttggaatattttttgatgcaggtaaaccacaaaaattttggatggcttttaataatttaattcattttttaatgctttatttcattttgccaggagccactcatccctctgtcctcctacagggaatttttgaaggcggccattgagggagacgaagcgcagctgaagacgttcattgaggaattgccgatgccacaccgggacacggtgattggagtggaagacggagacaaattggacaaaaaagcatttcttatcttcgatttcagttggcttttttatgtgcgcattggcaaagggtggcgatgcattccaacgaaaatcaggtaaaattttgggtttgcagacaatttcaaccccattttcataaatcaaacaaagtcccatccctttaacatttctcacagatgccgctgaccaatttggccaaagtgctcggcccaacggtggtgggcaccaactcgcggctgctgaccgtgcaggacaaacaccagcaacagggcaccgcgtacatgacggaggccaccaatcagatccaaatcatgcaggcgctgctcagcctggaccatgtgggtttttttttgggaagggagtgggaatttcagcgcaagggttgaaaatggaattttctcaaataaatttgaaaactgtttattgttccaggcctattggacggaaatgtacgatgggccggctgctcggttggacaacaatggggcagtgccgccggtggtgccgaaacaccaatggcagacaacgccgacgtccacccgcggggccgagaggggcggacacttggtgcagtcgattgtcagatgaatggggcaaggaagcgatcgaaat

SEQ ID NO: 62808 - DNA, 389 bp, Heterodera glycines
atgcctccaccggaacaacggaagccgcgaatgccgagcccacgggcgcacacgccgcaacaggagaacgcggcactgaacaggttgctgacgggcacgtaagtgtgcacacattggttgatcggtttgcccttggtccaaccgcggccgacacacggacggggcggaccaaaatggctgaatttttggggacctggatttgcctttgtattcattcctacatgttcaatgtgctgatttgcttggccgacatcgctgccttatgctgctgttgttgttgttgcagattttcacttgtcggcggctcgtacacattcgactcggacattgaccggttcttcgtcagacggcccggcacagcctttgacggacgacttcgctaaacccaa

SEQ ID NO: 62809 - DNA, 1028 bp, Heterodera glycines
atgtctgacgataaaaaggtaaaacgaatctggggcgggtgcattcttatggcattgtgccataacattcatttttgtacatttgcttttcagcatcaagcattcaacatggcacgcactttggtgaccagcagaaaagacgtaaagtaaagggggagcaaaatttaaataattttacaatttttagtcacccaaattctatgcaacagttttggacgacatcggctcgtatttggtccgcgcagtgcctttgtacatcaagaaaatcgcagacgaaccttctcctcctgcggacaatgagaatgacacaattacgaggaaaagagtatgtgtgccaattttggcagctttcccccccccccaaaaaacagctttttattttgattttattgaaaagtttttcgatccataattagggactttaattagtttttaatagaagtttcctttcgcattcatttacatccaaatgtttttccctcccctccaggcacatcaattgttagccaaatttgtgttcatcctcggctggttcttccgaattgacggtgctgaatcgtccacggtgggaaaatgttgccgttttcaaatcgtaatcaactcaatacaaacagaacgtcatcaaacaagccgtcgcaacgacagccgtcggttctttggatgagcaaacgatggtggaactgttggccaacgaaggaatgaaagtgcgcaattttggaggcattttactaataaaccaataatggaatattaaggaattgcgcacttctctgaagatgcacggtgccatccaacagtggggcggtgacaaaaaagtggcgcataaatttgtggcggaattgggccaaaagttggagacgaaccaagaggaggaggaggaaacggacgatgaggacgaagaggaagaagaaggggacgtcgaactgggggaggaaagtgatgatgagatggaagatgaagaggaggaggatgacgacgaagaagaggaagaagccatggatgacgacggggaggaggatgacgaatga

SEQ ID NO: 62810 - DNA, 56 bp, Heterodera glycines
gctatacggaagctattcccgaaggattcggtctccccataaatctgggcgcatcg

SEQ ID NO: 62811 - DNA, 707 bp, Heterodera glycines
atgttccgttttgacgcacaaaatgaaaatgcgggaaatagtaataaaaatacaagcaaacaattaaaattaattattttcaatatttatggtaattatcctaattattttcaattagtttccgataattgccctgtggtggtggtgcccgacgttgaaccagcagcattcaaagttatgttgagcttcatttacgcgggtgatttgagtgaattgaacggagacaatgcaatggcagtgctttacgctggtgaattaattccgataaatttaaatttaataaagtttttaattttaattagccaaaaagtacaatatccccgccctggttgccccatgtttacaaattcccatctccgaattgcgcaatgttttcttggcttatgctcaggcccgtcttttcgacttggaggtgagcacaattcttatttagtgtaaaaattaattttcgtttcagccaaatttaggtgccaccacttaagtagttcacaaaaaacttagcacttgaaaacaacaaaaattcaaaattttgtttttgttttttacttcgcttcctcctcctggccggtccggtttttataaaatagaaatttttgaaaaacaactttataaatttttataagaaaatttcattaaagaaaatcgcagaaaaatttttcaatgatttttaacttaacatttattttaatgttctaaacaagaataaa

SEQ ID NO: 62812 - DNA, 1167 bp, Heterodera glycines
atgaaatgtaagtattttatttatatgatttttttttattgtattttttaaatttatcctgaatttgattttattataaatattaatgacgaattagattttaaattaatgtgtttatttttgcatttataaatgctttttgtgattttaatttataacttgaatttggataccccttgatgatttgcgcaataaacacaacatttcctaaagcgactttttttctttttaaattgcttatgttttttttaattttaaaattatttattattttgcttttatttttttaacttctttgaaaattgatatgtttttatattaaacaccagttaaaattttcctggtgaagggattgattttattgctacttgttgttcatcgcgtctcaaaggcattggcggataagagtgccgattttattaaatttccaaattcacaacaacatgaaatcgcaatcaaatgcgattttctgaattattgcgatttgccattcgtgatgggatcaattgactgttctcatataaaattgaggttataagaaagaaatattgagttaattatagttcttaagggtcccggatccgcgaagaaagttatataaatcgaaaagcattttattcattaaatatgcaagccgtttgcgacatgaggtgcaaatttatgaatattgatttgcggtggccaggaagcacacatgattcctttgttttgaggttcaaaagaataagctttaaaaaaataattaatttaaagcaatcagatgtatgggattattttgagtccggcttggcaggcaattcaattttgctgggagatagtggctatccattaaaaaaatggctagtggtcccatttcgtgatccaaaaagtgttgccgagaagcgtttcaacactgctttatgcaaaggccgttctgttattgagcacgcatttggaatttttaaacggcgattttcgattgcaaagttattaaagattttttaaaataaaaaacgctatttcagaacatcatgccgcttgcaacttaaacggatcgcaacttccattctagcagccgctgttctacataatattgccattgaaatgtgtttgcctgaaccaccggcggtggaagagtcaaacgaaaatgatgatttaaacgaaatcaatgaggatgaaaatcggaat

SEQ ID NO: 62813 - DNA, 1221 bp, Heterodera glycines
atgaccggcttcgtcacctgtctgggcttgctccatctgatttttgtgctcaaatacatcaaagatgaacaaattcgcactgatctgtactggctggtgtttatgccatcggtgagcaattcattaattcattagtaattaatcaattaattaattattaattatggagtatctatttttttgacaattttgagacggaaggaatgaaattgaaacccatttaatgtaccacaaatctcagttcagtttagcaaaaacccattgctcgtttcctatggtctttaccattgtcgagattcaccccctccctaaatgttcccttttaattcattaattacttaattaccctctcccccccccctcttttcctctcaggtgatcgccgcttgtggcctcgtcggcatggttttgccgagggcggccattttcatgtacgcaattgcgctcgtctattacatgatctgcatttttgtactcgtctgtttgatgtgcacggtcagtccaattaaaaattcggcaaatgcaaatttagttcaaattttatgtttttataattcagctgaacggttcccgcaaagcgatgtgccgaaaactgatggccaagggcaagcgaatttcgattagagtttgcccgttgggctgctgtttgttctgcttcgacaaatttgagccgacagagtgcgtttggcggggggggggaaattggcaaaagggactgatcagagaatgtccaaatctcgacaatgtatgctgatcaatttccccaacatttgatcagaaaatgtcgaaactccacaaagtaatctaatcaaaaaatattcaaaaaggacattttgatctgctgatcagagataacgacaaaataagcagaagagatgaaaaatatttgttaacaaagcgaacaaacgcataaatgatctgatcaatgggataagattacagagagtcctctgcttatcaatgccccaaaaataattgctcttacaattgccgcttcattttgttcgaccagtcaaattaagctataaaactgatcaaaattgtccatctttttgctgaccattttctgatcattcgttttgaatacaacgaatttatgaaccaaaagccacgaaaaaacaaagttcaggaagaatttccgccgctttgaatggctcgtgttccaatcgccgattgtgcgcattctgctcgaaattctgaacatcaccgtgtttatggtga

SEQ ID NO: 62814 - DNA, 219 bp, Heterodera glycines
ttttttgcttctgttccgtctcgtagacttctgccaattgttttggtccgtgcagaagttcatcgccgatttcatcggccccctcaatttgatcccgagtacggccgacgtttccacgccgttgccctcctcggcggtggcacaatgtgagcggtgaaagccccggcgggtgccaatcgcaaaaccccaaaaatccggcattttttggaaaatttatca

SEQ ID NO: 62815 - DNA, 1027 bp, Heterodera glycines
atgcttttcgcctctctgttggccaccgtttgctttcggccctcgcgctgtgccttttttgaccggcatcggagtgccaatgccattgcaaatgcaaattccctcgaggagtgtgccgtggatggcggtgcccattcggtcgcctctctcagcgcctgcggcggtgccgaggacggagacgagtcgcgcaacacatcggtggagtcaatccattgtcggtggcgaaactttgatggggacgaaaatggggacgaagcgattagagggggaaaagggcaaagaatggcaaacgaatggcacggcaaaacggcggacagagagcaaaagtattgatcagagaatgaatggggcggacgattgattgatcagcagcaaagagtgattggaaagaggcagcagcagcagaaggatcgaagaaactcagcgattggaaacaaaaaaagtgatcggaaaaagtgatcgggtagattttgacgaaaattgataggaaaattgctcaaaatgaaatgccaaaatttgatcaacgagtgatcgctcgaagttttgaccaaagtaatttaacaaggccattaatttttgtgttaaatttcccataaaaatacttaaaaattaattccaatttttagatatttttgcacaaaaatttgctcaaattaaaaaggccattatttattttagaattttccaaattaatttttctttttgctttactttctcacataatatttatgtgtttgaattaatattttaaattaacattttttcattggatgttaatgttttgcttgtattagtctcggttataaatgtttattttgatgaattttgatggcaaatttatgccattgccaaccaaagccaaagccaatcaatttgttgtcgttttattccattttcatggaaaattctccaattatcgatgtctattattaaaagcaaaatattttttgtcgaaactttaaaaaattttaaaattatttaaaaactttactttcattttttggactgtgaatttttacggttctta

SEQ ID NO: 62816 - DNA, 1117 bp, Heterodera glycines
atgccatcgtcgtcctccacccttttgtttctgttactgctccaatttgccgttatcctccgctgtaatttcgtcgcccgtccgtcgtcggcgccgcccgacttccgcgacgcgcggagcatcgtccgctcggagggcgaatggacgcggcgaatgggcgaggaatttgtacggcacaacgttttgccgttcatccgccaattccgacggcagctgaaaccgccgcggaaccttgtgagaaaaaattaataattttaaataataaaaatttaattaaaaatttaaaaatataaaaataattaaaataaaaattaaaattaaattataaaacatttactaaaaacaaaaaattgtactgtaattataatccaagagcataaaatcctaaaaataggttttaaattatttttaaatgaatttgaaaatgcatttaattaatttgcagcaatgggcgcccggcgctggcaatttgttgccatttggcccaaatcagcggaacaatcgcaacagtgccaaatggggcgacgatgaaagcgtacaattcacgcacgtcgatttggacccggcggagcagcgaaaataccgaaaaagtgaggaaaaaactaaaaaatggataccattttaaacattttttattcgtctgtttaccgatcgatggccaaactgattggaactcaactgatcacacttaaatagaatacaaattactaattaatcagttccaacattcatttaatcactggtcctttttcgtcaaatcagtttattgtgtccatttttgagcaccttttttcgctcctatttaatcacttcgtccttgatcacttttaccatttactcactgctttttgatcatttatttgtgtgtctttttggccacagttttcccattttctgccgcttcatttgatcactttcttttccttctgatcatctgatcattcttttgatcactctctctctctccccttctcttttagaccattctgtcgcctcattgttcgacttgggcggtctggtcgcgcgcgaactgtggaaacagacgaagcaccggtgcatccattgcgagaacggcgcctgcgagttggcggacccgcagtgcggctttccgtaccag

SEQ ID NO: 62817 - DNA, 438 bp, Heterodera glycines
atgagcagtaatgggatggtgggctacggtaacggtggcaaccgtaatttcaataatgtgggcggaagagagtgggacgaccgcggaagagagtgggaggatggcagaggagggagagagtgtgcaaacggaggagtggcgagatggagagacgggcagagagtgtgcgaaggggcggagagtggaagagaaagaaacggaaagcgaaacgacagaaacattaatggggacagaggaaaccaaaacggaatggacaattttgcatatgataacccgtattatggtggaggagggaacggattgtttgatgagggcggcgaaaatcaaaggaattattacgacggaaatgccaatgccgtaaataatttcaacgcaaaggcaaaaaggtatgaagcgattggggaggattttaagggaaactaattaaaaccaaatcaa

SEQ ID NO: 62818 - DNA, 49 bp, Heterodera glycines; identical to SEQ ID NO: 51181

SEQ ID NO: 62819 - DNA, 431 bp, Heterodera glycines
atgcaccgccgatgccctgaaggaacatttaaaatttttaaaattttatgcgaaaatcaaattcaaaaggtaaattttgtcgaaaattttattaccaaaatctgccaaaaaaatttttttaacctaccatcggcagcgactgttttttaaagtaaaatagttttttttgacaaaaattttcgattttccttattcgtatctcgcaaagaactcagtcattcaaaattttcaaaaattttagttaaattaaaaaaatccacaaaattagcatttttaaatataaaagtttgtttttttcattaaaaatcttaattttaaggattttaaaggtcgaggatctgaacatcggtcccattgtactgaacatggaaaaaatgtaaacagtgatttttaaaaaatagattataattttgtttatttttaaaaagtaa

SEQ ID NO: 62820 - DNA, 1027 bp, Heterodera glycines
ggttctcaaggcgttcaactgtaccattcgccgttcgcttatgtgccgttggacccggacgatgtggcggtgcaacggcagtcgctgagtcggctcgaatttgtggacattttgtacgccggatatgacagtaccacaaaaaatgtcaccccagcactgtatgtggagggcgtgccgccgttgatgaacggtatccgagtggagcgcagtgcatacgatggcatttacttttgggagccggaagtgaggaaaaaaaataataaaaatcataaataataaaaaattattcatgtataaatatattaaaaaaattttatttactttttaaaaataaacaaaattataatctattttttaaaaatcactgtttacattttttccatgttcagtacaatgggaccgatgttcagatcctcgacctttaaaatccttaaaattaagatttttaatgaaaaaaacaaacttttatatttaaaaatgctaattttgtggatttttttaatttaactaaaatttttgaaaattttgaatgactgagttctttgcgagatacgaataaggaaaatcgaaaatttttgtcaaaaaaaactattttactttaaaaaacagtcgctgccgatggtaggttaaaaaaatttttttggcagattttggtaataaaattttcgacaaaatttaccttttgaatttgattttcgcataaaattttaaaaattttaaatgttccttcagggcatcggcggtgcatgtgataagtgccactggaaaaattttgaatttttatatatatatttttttgctgtaaaattgttatttttccaaaataaaaaatttattttgccctcaaaaattgagcacaaatggaaaaaaaattataatgaaaattttcattttaagaaaattttgaattaaaaattctatttttcaaaaaaagcataaataatctaattttttttttataattttcgaatttttagggtcccgttttaattgccaactcaacaatttcacataatcgtggccatgg

SEQ ID NO: 62821 - DNA, 660 bp, Heterodera glycines
atgcgcacccgtccgatttggccagttaagcaacgattgctgactagccaaaaggttcggtgccgtgatgaaacgaaccagcactgcttactccgcggcacccggcacggtcccccgaaggaatggatttaattaaattctctccttcggggatttttttccattaggtcgtccgttagcgttcgattgctctagtcaatttttcaaaatttttgttgaaatatttgtcgtgctctgaagggcgtgggagggggggggggggggcgaaggcccaccacgaggccgcgaagaggccgagtgagtaccttcggtgcaggaaaattattaaattttaaaattttttaattgctttttaaatatgccaaaaaatgtaggcttaacttttttagtgaaaattcgatcactcatattttttgctaattgagcagaagcgtaccaaactttgcagggatactccccggtaaaggactaacttacactgaaatgagcgccgagctagctggctcaaaaaaatttttcgaaaatctgagtctttcgtttttatttatttgcaaaattaattcataaatattttttcagaaagggttctgaaacgcaccaaattttatttacatgttagtttaggcactctgatgctttttctatcaataatggaggtga

SEQ ID NO: 62822 - DNA, 544 bp, Heterodera glycines
tgaaaaaaatatttaatgaaacaaaaaaatcgattttttcaagtgtccgttttggggtactcaaacatttatggggagcaaaaatccaacgcagaattaaagtacaggctatagggaagctattcccgaaggattcggtctccccataaatctgggcgcatcggttcggggggactgccccgaaaacaaaaaaatcgattttttcaagtgtccgtttggggtactcaaacaattatggggagcaaaaatccaacgcagaattaaagtacaggctatagggaagctattccggaaggattcggtctccccataaatctgggcgcatcggttcggggggactgccccgaaaacaaaaaaatcgattttttcaagtgtccgtttggggtactcaaacaattatgaggagcaaaaatccaacgcagaattaaagtacaggctatagggaagctattccggaaggattcggtctccccataaatctgggcgcatcggctcggggggactgccccgaaaacaaaaaaatcgattttttcaagtgtccgtt

SEQ ID NO: 62823 - DNA, 146 bp, Heterodera glycines
atggctatctctttttttgagaaattttctatgcaacaaacgctctcgaacatgaaacggagtgcggtgcgccatggccattttatttttcaaataatttttatatttaatagatattccagaaaaatggctatctctatttttga

SEQ ID NO: 62824 - DNA, 146 bp, Heterodera glycines; identical to SEQ ID NO: 56264

SEQ ID NO: 62825 - DNA, 146 bp, Heterodera glycines; identical to SEQ ID NO: 57274

SEQ ID NO: 62826 - DNA, 66 bp, Heterodera glycines
atggctatctatttttttgagaaattttctatgcaacaaacgctctcgaacatgaaacgaagtgcg

SEQ ID NO: 62827 - DNA, 473 bp, Heterodera glycines
tgcggtgtgctcgactcggtgtccatccatttgtccaggcccgggccgggccaactccatctccaggttcagctgcagcaaccggtcgagttggtctggtcaccggtgctgcatttgatggtcaacgacgtggtcaggtcagccgctgctgtttcacaaacaaacacattcgaagtcgaactcacctcctcgtgaaatttcttttttttatggccaggcctctaaattcggaaaaaaattattccttcctgggaatgtattataattttttaattaaatttatttttaagtgtgaggagcagaccacgtacggattcggggacaccatttaccgcccattaatcccgcggcttgaaaatcatcgcgtgttgacttcctttatcggtgaaatatccggtgctggccagtattttcgttacgacgacgacagcggccgtttctgtgtcgtgtctatcaacacgcatgaagctaac

SEQ ID NO: 62828 - DNA, 764 bp, Heterodera glycines
atgccatcggtggaagacgtgccattgattcgcgaaacgtgtcttgccattgaagccattctgagctgtgctcgtgatgagcggggttattgacctgaccacatccatctaacaaattataaaatgttcattattgattcagaaagggtctttgtcagtctcatcgttcgctctttggtccaatttttatgtgccgacgacgacgaactcttccaacaaaagggccccttgagggaacttcacgaattcgcatttggccgactcaatgcgattttcgcgcaacacccagaggtgattttggcaacgttatgtttgccttccacttaataattttgttcgttttcagactttcaaggcattgcttcaggcggcgccggacattcggcagaaaattgaaacggccacaataaaacagcaacaacaaaaggggcgcactcagcagaagagagtgagcagaagcggcgaagggggagcagcacaacagcaacagccgaccatcaaattgtccaccgatttcagcgcttttgccgcctcgggcggcggaagcggcaaattgcccgagggttgaaaagcatggaatgtttgtattacggtgcatttacagggattcaattattttgttttaatttgacggaatttcataacacttttccaacatttactgattgtctccttgtggtgcgtgaaatctcttcgttcctaatgttttctaatttttatttttatttgtacaaatgaatatatatatatatataaatatatga

SEQ ID NO: 62829 - DNA, 5019 bp, Heterodera glycines
gtgaatttgcgcttgtccttcgcggccaaatcgcgcgagaagagggcgaacttcgcgaatcggtcgcttggcattttaattttcaattccattgactcctccctttccccctccccttaaggtcggttggttttcgcgtgccctccgtcacaacccaaacagtgccaagtccgtccgtcggcccttttatctttcatttgccattcgaatttttcaattttcccggcagaattctactcgaactcggaaaaagccactaccttttggcggaacatagaaaagcgattgaactgttcacaaagtcattggaacaaaatgaaaagagaaatggcaacgcaaattgggtgagcaaagaaagaaattcgaatttcgggggaaaaaagcggcgagaatctcgacaaaacgacagttgcagctaaatcacagtcttatcagcagtccttggtaaactgataagtctgttagtctgttgtacccagtgatttgattcgcccgtccaatacaatccgatcattttgaattgagatattcctattaaaatctgatccatttaaatccatttacgttttgcgtgttgataattgataagacttccatgatatttacctgatcaaaatttgaataacaatgctcaatttttagaaattatactattggcaatcgctcgccgtttaccacgtttttcagccgccggaatgtgccaaaaaagtgccctttttcggtcattgatcagttttccattttgatttttaggcacaaatggccttgctttcctctcctcaaatcaattccagcgccgatatggtcattttttacccaatttaaattggagtgactcaaattgacttttgcctctccccattaagctgatgtttttggcgcgtttactcgacgagcaaaacgaaatcggcgccgccgtcgaggcgtacaaacggagcattgaaatggaaccagaaaatgtggacataatccacaatttgggaatgctttacctaaaggtgggtgggcgatttgaacagaaaagtgccaaaaatggaaatgccattgccgctgaaaaggccgaagaccaaccgaacgcatttacaacttttggcaaggcgcttagctacgacccgaattttgttccttcggtgctggccattgcttccataatgcaaacgaacggcgattgggacgtggcactcacaaaatacaagtgagagagagagagagggcggagagagactatgtgggagagagagagaacagagggaaagagaccatggaggaggaggggtacggtaaatggaagaatgatagaaagagagagagagagagagagactatgggagggggggggggaagcgaattttcgttcgatcgaaaatgccgacacattccgatgattccgatcactgataataacagttggaaatttctcttgctgcctttagggcggccacttctgagtttgaccattcgtgtgccctttggaataacattggcatgtgtttcttcggcaagggcaaattgttggctgctttggtcggtcattcattcgttcactttctttttttccccttccaatttcacattcgctttttaaggtgtgtctgaacaaggctaattatctttgcccgttggattggaaggcattctctcctaattacccctaattacgtaattattgtgactgatctctcccccttgggcaggttctgctcaatctttcccttgtctactgcactctccaccaattcgcctccgcctatcactttgtctccgccgcatttgcgatcactcctcagaatccgttggtcctctgcacgatggccggtgattacgagttgaagatcagtgaaatggatcattttcccatcgattgcctttgaatttcgattccgtttgggtgcccgagggcatgggaaagtctgatcagttttaggcatttaacttttgcccaatcgaagttggcaaaatttactcaaagagagaggggacggagatcaaagaaagggcccccagagataacaaattaattaattaattggggttaattgtttacaaattgttttcagtgattctcaccggcctggccgactttcggaatgccaaatcggcctacaaacgcgcccttaagttgggcccctccctttgggccgtccgtttcaatttggccattttcgagtcgcgtcgggcgaattatgccgaagcgactcgccgtttgacggaattggagtcggacggatcattggcgatgggctcgacgcatggcacggcataccccgaggtgtgccattcattggggtgccaaagggaagctaacgctttccaggaactgcttcaactcgtcgtacgcattcgaaagcattttgaaaagttggaaaagcaaaaggaaaagaaagagggaggagaaaatcagcgaaatgaatgaacatcatttttctcaccccaaaaaagataaacagatttttcttcaatttgtttaaatatacacgaaaacgaactgagtcatcagtagggcggggaattatatggatataaaatcgcaaaatatggccataaaatatggaccaaaaatcgcgaaatatagacataaaatggcaaaaatatggacataaatttttcaaattgagggtataatttccctaaatttctttaaaatttggcgaaaaaatgattttttggaaaattttccggtttttgggctcaaaaaggccaatttagctgctggaggccgttctaatagaggttttttggaaaaatgccaaaatatggacataaaatatggataatgccataatatggacaaatatggacataaatcgcgaaatatggaaaaaatggatatggaactccatcctaggagcttcaaaccaagctaaaaacatggatttccatataattccccgccctagtcatcagtgtttcaataaaaattatttaagccgtttttagctaaaaagcaaaatttgaattttcactttttgttcaaattctggtccgaaattgatcgaaatggacgccggattcgtaatcagcaacttcggaaacttgtttttatgttaaattacacaaattgtacgtttcgtaaaccgccaagtgggcattttaaatattttgtttaggttaagttctttctctgtcagtcttattttttccttcctaagcagaaattaacagtccgatcaaatacccttttaatttacattttggtgaagaaatgaaatattacaaaagaataaaattcctaatatgctaataataatggatcggtatggaatacaaattattagtacaaatatataggcatttccatgaactgaggaataatcaagcggtgttaagggttgtcagttaaataatcctaaagcaaaacaatcccatcaaagtgccccattttcggcgtcccaatccgcccattcgtcgccttttgaattgttctttttccgtttctttttgagcagcgtcgccagaaaagtgtccggaggactgaattcgttcgcctcgtttttcacttggacaattttcgtgcaattctctccgtcaaccgctaaaaataatggaaaagagaaaatgagtaaattcatggatttattagagggttaaaatttatcgaaccgatcccttcttgtaattctttttatttagaaccaatgttcgaaatttctcgagttcactataagtgcaaaatttagttttaaccgaaagtcgattaggtaaatatctccggattaacaaatcattttcaaattatgtttactctcaatgtgaaagataaaaatgttcgaatacttttcgaattcaatcgcagaaattgggccaccgcgtgcaaatgaaagcgtttcacgcgcgaaatgatttcctccgcgaaaacatcggccggcgattcgccaaagaattctctcaaagcgaattccattctgtagaggcaatcctaaaaaattaactattaaatccaaaaatccaaagaagaaacataacaaattggacgttccgtcgtttgagcaaacagtcgcggaattttttgtcgagtcgctgaaaacaatcggacgacgatttgccaccacccgacgaaggctgaccatctaaggaagaaaagaccaaaaagggaaatgacgtggcaataatcagaaaaaaaaataagtggatggcccatcaaaaaattcatttgtttattaataatttgcctttttatatgtttagtccccattttttttggttggttcattgatttttccatgtatataaacaatttcattaagtttttttttaagaaatgcatttttcgtagaaagtcactcacttttattgtgcggctgactctccgactttttgatgtccgtatttttgaccgattgttgcgaatgctgcgccttcgaagcgtcgcgtgccatgagaatttcgtattcgaattgcaaaagcatctttttctgtcctgattcgtctttctccaggaagtcattccaaacctaaataaaaagtgcaagactcactcaaatgggacaaatgcaatagtaagccaaaaaccttcatttttgcctcatctcgcaaaaggcgtgagaacgcagaaatcgtctcggggattaaatcggaaccatcaaagcaaatgtcctgagtgtcggcaaaactcgtcaaaagcctagctaaaagcaaagatacaaatgaaaagaacaaaagacaaactaactgttttccacacgacgccacttctgcgcccccatgtttcgcttcaacggaaatccgtccacaatttcaatcggccgatagcttttcgtctttttgcgtcggtggcctccgatgggttggctttgaatttggaccgacacttcgttttcctcttcggcattgtcgctgtcggattggtcggaatcgaagagatagcggaaaagaatgggaaattacggaattaaagggatgaaaataactactttgcataatcatcggcaaatccattttcattctcagcacattcttcaattcgaattggaattctattgatcgaacggttgcgcaaaatacccatggtggaatgattta

SEQ ID NO: 62830 - DNA, 1228 bp, Heterodera glycines
atgcttttgcaattcgaatacgaaattctcatggcacgcgacgcttcgaaggcgcagcattcgcaacaatcggtcaaaaatacggacatcaaaaagtcggagagtcagccgcacaataaaagtgagtgactttctacgaaaaatgcatttcttaaaaaaaaacttaatgaaattgtttatatacatggaaaaatcaatgaaccaaccaaaaaaaatggggactaaacatataaaaaggcaaattattaataaacaaatgaattttttgatgggccatccacttatttttttttctgattattgccacgtcatttccctttttggtcttttcttccttagatggtcagccttcgtcgggtggtggcaaatcgtcgtccgattgttttcagcgactcgacaaaaaattccgcgactgtttgctcaaacgacggaacgtccaatttgttatgtttcttctttggatttttggatttaatagttaattttttaggattgcctctacagaatggaattcgctttgagagaattctttggcgaatcgccggccgatgttttcgcggaggaaatcatttcgcgcgtgaaacgctttcatttgcacgcggtggcccaatttctgcgattgaattcgaaaagtattcgaacatttttatctttcacattgagagtaaacataatttgaaaatgatttgttaatccggagatatttacctaatcgactttcggttaaaactaaattttgcacttatagtgaactcgagaaatttcgaacattggttctaaataaaaagaattacaagaagggatcggttcgataaattttaaccctctaataaatccatgaatttactcattttctcttttccattatttttagcggttgacggagagaattgcacgaaaattgtccaagtgaaaaacgaggcgaacgaattcagtcctccggacacttttctggcgacgctgctcaaaaagaaacggaaaaagaacaattcaaaaggcgacgaatgggcggattgggacgccgaaaatggggcactttgatgggattgttttgctttaggattatttaactgacaacccttaacaccgcttgattattcctcagttcatggaaatgcctatatatttgtactaataatttgtattccataccgatccattattattagcatattaggaattttattcttttgtaatatttcatttcttcaccaaaatgtaaattaaa

SEQ ID NO: 62831 - DNA, 2343 bp, Heterodera glycines
atgtgccgcggaagtcaaagcggcggtcgtcgtacacgacgctcattatcatcatcattagcagcagaatatgcaccagccattgaatttgacgacgaattagttgggcctgaactgttcagcagaatggccagagaagcggcgccaattaacggtaattaaaattccaaaaaatattttttattttttatttttacagagttcaatgaaacgacggcaattccactcaaaggcattagtgttgtgggcggtgacatcaatggtgaacacgacaaaaatttattcgggggtacggtattatatattttatacagtcaaaaattttttcaattatggtaattagtagagtgcagcgggaccgggacctgaacacggacaactgagtaccaaggtcccggttttgaccgggaccgggaaattcccggcttttttcccggttttcccagccaaaaagtcccgggttttcaacccaaaaagtcccggtcccggtcttgccaaatttcccggtcccgctgcactctacaaaaaaggcatttaccagtgtaattttgaaagagcgcgcaaaaaattacgccatttacgctatttggcgttatgaataataagagaaagcaattaagaaaatacataatgtggaaaaaaattatctgtccttattttcgggtgttcacaactggaaaagtattcaatattttaactattttttataatagagcatggaagactcccagcagaatattactgaacagtctgtatcggctcccaccactgatcgcgacgaatatgaagatctttgcaaattggtcaacccaatctcaaaagataagagggttgaacaggaaggagccaaaaaaggaagtgatgaggaggacattggagacgaaggagccgaaaaaggaagtgatgaggaggacgttggagacgaaggagccgaaaaaggaagtgatgaggcggacgttggagacgaaggagccgaaaaagaagatgatgatggagttgaaaaagagggaggaggcgatgaggagggtgttcaaggggaaggagtcgaaaaagatggagatgaagttgaaaaagaaggagacgatgaggaaggtgttcatggggaaggagtcgaaaaagatggagatgaagttgaaaaagaaggagacgatgaggaaggtgttcatggggaaggagtcgaagaggagggcgttgaaggggtaatttagtatttttacgatgtttctaaaaaaacaaagttaagacttcaaagcaaggagaggtatctcagcttatgcaggacatttttggtgacaatgaaatgagcgaggacgaagaggttggaatgtttaatttcgttagctcatatcaatttgcactaggacaaagacaaaaaggctgaatttgaggacgaggatgagcccaaactgatcagagttgaaccggctgaggaggatgtggagcagtaagcggaatgaaagtggaaggaattcaggaattgtttaatggtcctccttttagggatagcctcggacgcacatgggactttgacgtgatgttggccaagaagaagcaggaaagacgccgtcgtcgcagaaaggacggctccattgacctaatggcggacgctgacgaccaaatcagagaattggtggaggcgatgaatgaggcagcaaatgtgagcaaaaagtgacaagactctttttattgcagcgtataatcatcagcacattctataaaagaccgacgttgggcccccccccccttccacaagcctttttgtaatggtaggggttttccatttaactagataatccagggttttggtatggctgttactaaaatataccgaatgccaaacgcataatcttcgtcaaaaatttaggaagaccgaatgtcgaacatggataggagaccggcagttaagaagcgaaagatgttgcaagttgtgaagaacactttgttgaagactgacttattcgaagcgatgcttgacaacggtgcaaaacatggcattaactgcttattctaagcaaaaacctgaatttagggatgattagcgccctctccgaatggcttgccccactgcccgacaagtcattacctgccttggagatcaggcgagtttaccgcctttacaaaatatttctcattgtcagtttttccttttattcagatgcacgcttttgaaaattcttgaaaattggcccaatttggagcaggtaatgccaaactgtccctttaatttcttgctggatctgacaagctttttttgcaattcataaactttccaattcgaatgaccatactccgtttcgatttgcgatatttataaaattttattagaatgggattgaaaaacca

SEQ ID NO: 62832 - DNA, 1163 bp, Heterodera glycines
atgaataggcaattcaaattagacaaaacccaccgtcaagacaccgtccaactcaggatcattgtcaaaaagccacttgtcaaattcattgatccaattcaaaaggacgtttttcggcgcaaaaaccaacactttgtgaatattttcggagatgcgtgtgtgagacaaaatagtatgtaaaaaagcaatgatttgcagcgttttgcccagccccatgcaatggccaagaattgctaaaacaattggctggcatttgaacaatacgacaattaatttttatctacttacctcctccgcccggctcgttcaatcgcgacagagactcaattgtgcaattgtagagaaatttgatgccctccgcctggtgctttttgagaacgcgcaccaacgacggatgcacccgcaccgggtccggactgtcgttcccactgtccgggtccaatatgattgcctttagtgctggttgactgccttcccctgaaattactttcaatttagcaagtgggaagcattgcgttttatcgtttcatagccggagaatggtggtggtacggagtgttaggatggggagtacacgaagtaaaaattccaagccaaaataggccgttgacaaaaaattcgtttcgattggtaaacccaatgccaaatcatggaaactccttatcttactgaaaaggggaactgtctaccatccatcccactcacctttgtcgaccaatgtcgtagtcttttcaggaaggaaaaagaaggaaataagccattggatggtcagaaaaatgccaaacagccaaaaggggaagacgccgttgagggaacggaggaattgcaccaaggggacggacaaactgccgaggcaagcaatcacattgcaaagggcacttaagcggggagagaatcttggcaccaccgcaaatgccaaacaaagtgccgaccgaccaggacatgttgcagacgggggtgggaaacagctccatggacaacaggtgtatgatcttccaattcgggtcgattgccgcggtgatgaaaaggctgagggcggcggtgagccaatgtttggacagattgaagaagagccaaacaatgatcagagtccagcacgccaaacctggacaggggatgggggcattggaaaggaaaagcatttggcaatgacattttcctaa

SEQ ID NO: 62833 - DNA, 3801 bp, Heterodera glycines
cgttgtgctgaccaatggttgtgttgcgacggcggaggaacagcgagcggaaatgtggtcagatggcagcagcagtgactttggcgtctaccaatgcctgctgtttctgttcacccaactcggctatttggcggtggccccgtcaatgctttccaccactttcttcgagccatcctcggtcattttttatgatggcatttaatcttggcccgatccttcggttgtccattttccgatcaatccccatttttttgtcataattttgccagtatttttcaggctttttgcgacactttccgcctcagttctccgaatggttcttcttctgtcttcactttgtcttcttcccctccgtcggttgagtttcattctctgctgatggagtggggcgagcattgtcacttttccgttcgtactgtttggatgtccagtgccgtgatggtcggcgcggtcgttggcgctttcgtcgccggttttgtggccgattgtttcggcagaaagccggtggttgtcggtaagcagtgggcacaattaaatggaatttctttggaaatgcttttcatctcccaaatacccaccatttctaccgcatttctctcatcccctcccgaaggttccatggctctgatcagtgtggccaactctctgatcgccctcttcggcgcctcctcccctcctttggcactttcgctgtttgctttgctcggcttggcctgcggtgcttacatggtcaccaacatggtgttgctcatcgaaatcctccgccattcctccacccgtcttttggccgtctctctcaacggttggcccctcggaatggtcggcacggcactgctcgcgttcgccgtgcgccattggcgcttttaccatttggcggtttctgtcgcgtcgctttttctcttcattataattgtaactttttttcagcgtttgttttgtcccgttgtatcaaatgcaaattttccagcattatttggccttcgaaagtatcccttggctcattcagtcgggaaaccatcggagagcgcattcggtccaacagaaccttttcaaggtgatttaattttgaaagggaattcctgagtttacatgactttttaaacattttttgaatgtcaatggatcaaaaattggcaggtgaattcctttttggccacaaaggacggcaaaaagacggcgatggcaccgtttggagtgaatggcgtcgctgcgccgatgacgcgaagttcttcccccctcaacaactgttcgttgaacgaaaacactgacgacgcactgttggaggaggtgggcgggggcagggaagaaggcacggcacagaaattggctaattgtgagcattggagggagagtttttgacacttcgccacagagagccctcctccagggatggtaccaggatttcggcttacaatagatgggaaacggctttcaaaaacttctactttgaaaattttctgggaagtggtggggaattgatcgtctccaatcttatataattttgctaaaattcctcattttcccgactctttcctcccctcccccgccctttttaagcctttacctttcccttaaagtccgaggagggcactcaaccagcagcgcatcgtcaacgtcagcgcatttacacctatttggacctcttccgtcaccgttcggtgtgcgtccgaatgctcactttgctcttctgtttcggctcctccgctgtcatttcgttcggcctttacttcaccgccgaagtgctgcccggctcgcgctacctgaacatcgccatgatgggccttggcaaattggtgctcggctttttgccctttcttttgtccaatcgcatcggacgtcggcccattctgctcgtctctgttggtgagtgttttgctgttaattaggaaaatgtcattgccaaatgcttttcctttccaatgcccccatcccctgtccaggtttggcgtgctggactctgatcattgtttggctcttcttcaatctgtccaaacattggctcaccgccgccctcagccttttcatcaccgcggcaatcgacccgaattggaagatcatacacctgttgtccatggagctgtttcccacccccgtctgcaacatgtcctggtcggtcggcactttgtttggcatttgcggtggtgccaagattctctccccgcttaagtgccctttgcaatgtgattgcttgcctcggcagtttgtccgtccccttggtgcaattcctccgttccctcaacggcgtcttccccttttggctgtttggcatttttctgaccatccaatggcttatttccttctttttccttcctgaaaagactacgacattggtcgacaaaggtgagtgggatggatggtagacagttccccttttcagtaagataaggagtttccatgatttggcattgggtttaccaatcgaaacgaattttttgtcaacggcctattttggcttggaatttttacttcgtgtactccccatcctaacactccgtaccaccaccattctccggctatgaaacgataaaacgcaatgcttcccacttgctaaattgaaagtaatttcaggggaaggcagtcaaccagcactaaaggcaatcatattggacccggacagtgggaacgacagtccggacccggtgcgggtgcatccgtcgttggtgcgcgttctcaaaaagcaccaggcggagggcatcaaatttctctacaattgcacaattgagtctctgtcgcgattgaacgagccgggcggaggaggtaagtagataaaaattaattgtcgtattgttcaaatgccagccaattgttttagcaattcttggccattgcatggggctgggcaaaacgctgcaaatcattgcttttttacatactattttgtctcacacacgcatctccgaaaatattcacaaagtgttggtttttgcgccgaaaaacgtccttttgaattggatcaatgaatttgacaagtggctttttgacaatgatcctgagttggacggtgtcttgacggtgggttttgtctaatttgaattgcctattcattttttattattttagtattccgaaattgactctctaactgacaactccgacagattgttggccatcaaacgatgggccaaatcaaaaaagccttcagtgttggtcatcggctacgatatgtttcgtcgactcaccggatcagatgaggacagaaatgtcccaaaacgcgggggaaaagtgcgatcgcaaaagccgaagaacaaatcgaaaactgagaaggagctggacaggctgaagccacagtttcgcgctttgttattcgagggtaattcagtttattttttgctttttgatgtactgcaattttagccccccatatgatcatttgtgacgaaggacacaaattgaagaactacgaatcggcaatttcaaagacaataaatcggatcgttgcccggcgtcgcgtttgtcttaccggcactccgctgcaaaacaatttgagcgagtactattggtaaaaattatccattattttttatgatatattcttggaatttatgttttttagcatggttaatttcgtcaagccgaatttgctcggcaacatcaaagagttcaaaaatcgtttcgagcacatcatcaacagggggaggacggctgacgcgagcagggaggacgttgtgtttatgaagcggcgttgccatgtgctccatgatcgtcttcgtggcattttggaccggagagattacactgtgctcaaggagtcgttgccaccgaagcaggaatatgtgttgatgatccgactcacccaggcga

SEQ ID NO: 62834 - DNA, 3928 bp, Heterodera glycines
atgccttctaagcaacaaatgctgaagaagagaaagaaagaagagcacctgcggcgggcggagcaatctgtcagtccaggtcgctcacctatcccaaattgccctcctcagggcaatcaaaattgtcctcttcaggacaacccattgagtgcagatgggaatggggcggcatcaccccggggttttaataccccaaatataagtgctttgcaattgagcaccccggcctcttccattggaagcagaaggggcatacccccaaaagccggaacggagtcaataacgacttcgcaaaacagtgtgtcgtcagctggcacacaaaacacatcggccactcaaaatgttgagtcgccgccaaacagtaaaaaattgaaggtcgaagatgttgatcgaccactgtctgttattgaagcaattacttcaacgcctgtttccacacaaaaaagccgtggtgggcggccggccaaaaaaagaggcggcccaggcaggggcaaaacaaatgattcaatgagcgaaagcttttcaatggatcagggctctgaagctggcataaatgcggcggttttacccaatgtgcctgaaaaaataaatttcagcacagtgcaaattaatttcgcaaccacgcggaatttagcctgtaaaatttggaaatggggagcaactgctctttacgaatgcgatgcaagaaggtcaggcccaagattcattgaaacgtgctggaatgatctggcacagtttctgaatgacgcctttattgtcgaatatttggcatacttggcaagcatatcacaacgaaaagtggtcattgttgatccagctgtgtggcaaatgggcattgaccgtgtcattgaatataaaaatatgacatttgggtatgaccctaatgttccggccgaagtcatacttttgccagtacattttcctggacactggactctcattgtccatgatgtgcaatatggtacacattttgccgattctttgcctaccccatatggaaggttggatccgcaactgacggataaaattagaaagatcatttctgacattttgccgtcaacagtgctgaccggtattgttaatgccgtaaatcttacagtacaacatgatggaaacagctgcgggtacttcgtgtgcctgtatgctgaatcatggcttatgaacaatcgcacgtttgttctgccagacttatccatcaattatgaaaagaagcgtattttatggcacattaacgagctgtatggctctgataatgtgccatatcatccaagggaaggggtgccaactccttgcccaattgtctatcgacatacggatgaagcgcagtcgaaatccaaggccgctgagccaatggaaattgatgagcatgatgacataatgatcatcgaaccacagacaagtggacaggctgctaatgccattctcacccaagcccaagtggatggtgaaaaccaagtcgacacgcttggtttggtttcggagtcttgtgttccgcaagagccaattgctcaggctgacgatgcaatatttgtcagaccgaagacgcctccgaggcgatcaacgcgcataggcagacggcaatccacttcgattagccgttctccttctcccgcaccgagacgtcgctcatcaacaaatcctgttgagaaagtcacagcatttacgaagcgttgctaccttgtccacaagggttggtgctgtgctgccgcagcagcaaaacattttccggaatactccgattcaggtaaacttggcgaaaaaaagtgcgctcattgtggggcactgctcttcccgcatgaggacagcagccattgctgtcgacagggaagggttgttttgccaaagcttaacccgcacccaaaagagcttgaagagctcatcgtgtgcgacaaacaaccccgccaagggaaggagtttgttcggaatatgtcgcgttacaacaatttgctccaatttgcgagtgtttcggcaggaaataagccttgccctgcaggcggacccatggcagtaattctcaacggagaattccatcgccgcataagcagcatgcaggctggcacgacccagattcctggcttcggtcagttatacattctggatccagtcgaagccatggagcagcgacgaaaaaatcccaccttcacgggagagaaaatcacaaacgataaagagtttgtgcagggtcatcagcttaatgatgagacccttgaaattttggaacaaatgatccaagaaaatcatccagctgcttctgcttataagcaggctcgtgaacagctccatgagttgttaagacaacaaaggactgaagagcttcggttcttcagaatgactttgttgaacgagcgctcagctccgggtggtatgaaagacccaaagttgcatccccaccagataatcaccccatcaacgggtgaagggatgtttgcaattcatgcagatcctactggtgccccggcacctaaagggatatgggtcgaaaacaagcaagggcagttaaacgaaatagccccgttcagtccatggactgatagcttgacttatccattaattaagcctaagggcgatgatggatatcacattggtattccatatgccaaacccgcacaaaaaaagcggagaagcgatcaatgtgtcgatcaaatgtttgacactgatgcaatgtccgacgatggctcatgcgagactgagtcaattgctgcatcagatgctgagtcggtcgcatcgaccgaatcattgattgatcgcattgataagacgagaaaattcatttctctgcgagattactgcaagtaccatctcgcaataagggatgaaaatttggagtggcaatatcaccacattctgtcatgtggcggtggtcttggccagcgctgggtcttagaccaagcggccaaaattgattggcaaattgccagttttttgcgccgtccagacatggacctgcgcataagtactccaaaaaatttgttgcattatttggtaaaccaatacaataagcagcaagctcggcaaaaccctaatgcacgacaaaagactgtcgatgacattggtagtgttgttcgcctttctgaaaagaatattaattctcttcagtattggaaaaaaaggtatgaagactgcaacaccatttttgcgcgttgccacgacgcaaaaaaggcgcggctcttcatcacattcacgaacaaccgtgagtggccagagttcaagcaaaacatttacaaaaatggtcaaatgttcactgaccgttttgacatgtggatgcgagtgtggtgcggcaaaattgctgtcttccaccaagagctctacgagaagggtttctttgggactatccttggctcaggagagtccatggagttccaggggcgtggtggcccacacgcacacattgtagcccagactgacctggacgcagttccagaagtcatccaggaatacatatgggctcatattccatctttgccgtgcaaagacgatgactcacccatagcgcaaatgcatcgcgaagtccgcgaactaatgcatatgcaactgcacagatgcagtgatagttggtgtggtccacgtgaccccaactttgggcggtgtaaaaagggcttcccagccccgtactcgaaatgtacgatactacacccggacaggcccgcattgtattaccggcctagcccaaccgacggtggtgcccaaattgaggtgaacggcttaatatacgacaactcgcaagtcgtgccgtacaacccatacattttgctgcgttaccgagtacaccacaacgtgttattcgcatacggtaacaaagcgaacatcaaatatgcactcaaataccctttcaaagggcctggacattgttatgtcgagtgcaaagaggagtccggcagcaaaatcggtatcgatgagccggctcaatatgccaaaatgaaaaagggtg

SEQ ID NO: 62835 - DNA, 2611 bp, Heterodera glycines
atgtttgaaactgatgccatgtctgatgatgactcatgcgagactgagtcaattgctgcatcagatgatgaatcggtcgcatcgaccgaatcattgattgatcgcattgataagacgagaaaattcatttctctgcgcgattattgcaagtaccatctcgcaataagggatgaaaatttggagttgcaataccaccacattctgtcatgtggaggtggccttggacagcgctgggtcctagaccaagcgtcaaaaattgactggcaaattgccacttttttgcgccgaccagacatggacctgcgcgtaagcactccaaaaaatttgctgcagtatttggtgaaccattacaataagcagcaagctcggcaaaaccccaatgcacgacagatgactgtcgatgacattggcagtgttgttcgtctttctgaaaagaatgtaaattctcttcagtattggaaaaaaatgtatgaagactgcaacaccatttttgcgcgttgccacgacgcaaaaaaggcacggctcttcattacattcacgaacaaccgtgagtggccagagttcaaggagaacatttacaaaaacggtcaaatgttcaccgaccgctttgacatgtggatgcgtgtgtggtccagcaaaattgctgttttccaccaggagctctatgaaaagagtttcttcggaacaatccttggctcaggcgagtcaatggagttccaagggcgtggtggcccacacgcacacattgtagcccagacggacctggacgcagtcccagaagtcatccaggaatacatatgggctcatattccacctttgccagacaaaggcgatgactccccaattgcacaaatgcatcgcgaaatccgcgaattgatgcatatgcaactgcacagatgcagtgatagttggtgcggtccacgtgaccccaactttgggcggtgtaaaaagggcttcccagccccgtactcgaaatgtacgattctgcacccagacaggcccgcgttgtattaccggcctagcccaaccgatggtggtgcccaaattgaagtgaacggcttaatatacgacaactcacaggtcgtgccgtacaacccatacattttgctgcgttaccgagtgcaccataatgtactatttgcgtacggtaacaaggcaaatataaaatatgcacttaaataccctttcaaagggcctggacattgttatgtcgagtgcaaagaggagtccggcagcaaaatcggtatcgatgagccggcccaatatgccaaaatgaacttccgtggagctacagaagcttttgcagttgtgcattcaatgccgtttgcaaagctttcccaccatgttgttcatttgtcaattcatttgccaaaccagcagcccgttgtatacagggcattccaactggtgagcaaagctgaggaaattcagcgaggcgaactcccagagacgccatgctctgcctattggaagcaatggcaaaacgaatggcagcatgttccttcgctcaaggacatgctttttgaaaaagtcccagagcaatttcgatgggcaaaagaccgatgggttccatataaaaagaagcctaccaagaggcccccaatcggtcgtgttgtacctgtccctccaacggaccgggaaagatttgcactttatgtgttgatgacgcactttcccggcgatccgtaccacttaaaactggtcaatgggcagcagtgcaacaccttcacagaggccgctctacagcatgggcttcttgaagatgaccaaatttggcacaaaacgctcagcgaagcatccttgcatcgctggccggaccagatgagatttctctttgtgagcatcctcgtctttgggcagccgagcaatgccctagaattgtggaacaagtacaaagaccaaatgtacaatccacagggcatcaccagtgcggctatacgccaagcacgcgagcagcaagccttagccgacattgattggcgattgcactactttaatttaagctgcgtgcactgtggtctcccagatccaccaaattcaatagccaaaaataccaatttggcagttgaagaatttttctttggtgatgatgatctgaatacgccgcctggccagccaaaccaaaggccacaacaataccccccacctccactcaacagcgaccagcaaaaggtctttaatgctgttgtgagggcaataaagtctgacccgaaggaccagactgtgcctcgccgtttcttcattttcggcgatggaggtacaggaaaaacattcctgtttggccaaattatcaagcgcttgcgaaagcccccatacacctataaagtgcttgctacagcatccactgggtgtgcggctatcttgctgccatatgggaaaacagcccattcaacgttccgtctcggcagagaagtctcgctagacaagcttccaagcattccgcttgagagcttctttgcccgacggatacgtgaggcccaactcatcatcattgatgagatcaccatgcttcacaacacggtgatagaggtcatcgaccgggtgtgcaaagaaatggcagttcgccagcacaaggacctcctcttcggaggaaaaacggtcattttcagcg

SEQ ID NO: 62836 - DNA, 141 bp, Heterodera glycines
atggcccccaaatgccttccgctcgaacttttgttcgaaattgtgccttttatccctgccgaaaaagccgtcccgaatgcgctctcttcctgtcggctgctgcacaaacttttgctgccacgtgtcatcaaatggaaagag

SEQ ID NO: 62837 - DNA, 447 bp, Heterodera glycines
atggccttggcctgtcctggtgccgccgctgaacttctctaccatgctggtgttgatgcaactgttccggcgtcgatcagggtctgcgaagaagcagttggtggcgccgctctccagcaagaaacggtaggacgaggaaagtcccgcgctgctttcgccaccggcgtcgttccattctgccggcgactgatccccgtccttttgatcactttgatcaccgtacccggattgattaaaattcagctgattatgatgttgattgcccgagtcgttggtgttggtgttgctgccgtgccgtcctggctgcgagcggctgctaatccgaacggaacggcgagcgtcgccgcctcggcccgttgttctgttgtgatggtcaactgctgaaacgacgccgacagttgtggcactttcgagcactgaaaatgataatttttgggaaggggagaa

SEQ ID NO: 62838 - DNA, 714 bp, Heterodera glycines
atggttaggaaggcccagtttttcaatgaaaaataaatagttttattttttcaccgcttaatacgagacggattttcatatttttaattataaattaaaaatgatgaatatccaggcatgagtttttagtgggtattctctggtcaaacattaaactaggcccatgcctatcaaaaaggctgatcattagttgaaaatacattttttgaaatttatattatcggaatcgcaaaatttaggccccctgctgattggaacagcggagtgatcggcttgcacacgtcgtttggcatcggctgcatcgtttttgccctgttaattgcctccattctttccggtgaagaaagatgcagtaattaaaaacataaacggaattgggcttaacacagcgccatcttaaaaatgaaactctgtaatatatcttctacatatgtataaataaagtcaaatgtacagaagtgattaattcggtttttccaaggcttaatgcaaagataaaagttagaagtattactgatagaaaaaatttctgtataaacaggcctcaaattgtcgaagacaaatataaaaattaatcaaaaagaaaaaaaatatattttcatttttcagatggatttttcaattggttcaaatcaaattaaagaaaggagaagcaaagaatggaaagaaagaataattactaaattatttgtcaattaaaaatgggaaaataaa

SEQ ID NO: 62839 - DNA, 741 bp, Heterodera glycines
atgaaggaagcgagaggtcatttaaagaccgacatcgctaaacgtcttgaacttcccgttctcgagagggagaaatgttacctcaccagttttggggaacggaaccccagacattactcgagcaacgtggtcaagatcggattcctgggaatgaatggagacgcatacgtttgctctttgaacgaaatggagttcatggtgaaggcaatgccaatcgtggcactcaattcggtggatgaggaacagcttcgggaaagaaagctgagattcccgacgaagctacaacaaccggacattatgctcggaatggatatccgacatgacttgaacatacgggatgaagtcgaaaaactgccaagcggatttacactgtcaaattcgcgcctgggaagaatgataagcggaattggacaatgggagaaaacaatttcgccgtgggctcaagtgacgttcatcggttcgctcgctagtgccgtcctggaccaaagggaagaagtccatgaaccagaaaatgttctggaagaccaaatgaagtccttttttggactcaacatcatcgggatggatgatgacaacactcagttggatcgggacgaagtcatgaaaaccttcagaaaaaatctgacattaaaaaaaacggccgttatgaatgcggactcccatggaatgagagagtcaatgagctcccgaccaactacaagcaagcacgagcaaggctgtgcagcacgatacgaaagctga

SEQ ID NO: 62840 - DNA, 613 bp, Heterodera glycines
atgaaaaaacctggatggataaattttgaatttgttatttcaaatgaccgatgttttttcaagttttaaaaaaatcatcaaatctttttttaaatccaggcctcgaggagcctagatttttcctggacttggatttttgtccaggaaatccaggtacaaatggaacccaggtccaactcaaaaatggaatccagtctcaggtccaggcttttttcaaaagtgtcgagctctaattttaactgttttttccattttcagcaaaaagtttcatcaccgcaacactcatgggaacaaatagaagacgaaagaagcgtatggataatgatcaaaatattcgagtcaatgaaatatatcgacaaagccgtagaatccataaacaaagacgggtggcaattgttaagtgtatttggattgccattttttttgttttttgggtatttgttatgcatctgatattagtaagagaacaattatgggttaaatgggtcattgtaagcacagttggtttatgctatgtgcgtttctttgtgtttgaatgtcgctatactatttacaattatgaacccattttacccactgtaatcacaggcccgtaatcaaaaaaaaaaataaa

SEQ ID NO: 62841 - DNA, 572 bp, Heterodera glycines
atggtttcattcaatttaccgccaaaattattgtttttctttgctatggccatgcttttagcgaggaaaagcactcaaaaagtgccaaattcgaccaaaactcatgccaaaattggtaaaatttgattaaaataaacacactaaactttccatgtattacagattatttcaaattggcccatgaattggtggacaaggcatcaaaaattgaaaataccgaatcggaaattgcatggtggaaaaagcatacttttggccttttgtgcgatgcaaactttgccaaatttgaattagaaatggatggaaattttggaaaattgcgcaaaaatttttgtgaattgatgagaaaagacttttcaaatgaaaatctgctgaaaatgtttgtcaatgataaagaagcattgggagatttgatgggatttgtatcaaatgataagcaaatcattgacacaaaaaccattcttcaaaaaatcaaaaattcttcaattctcagcaacaaaaatgaacaaaatcttgcgacaatgtttgagtatttaaacgcgggaatagcgataattacaacaaataattaa

SEQ ID NO: 62842 - DNA, 1395 bp, Heterodera glycines
gactccaataaagtgtattttgaatcgctttcccgcctcacttgacccccagcaattccaccatccccgatcgaccgtcaagcgtccacccccaatcgccccagctctcgccaaatccgggccgttgccagccaacaaactcccattcagtaccggccgctcaatctccgaccgactccccgactcgccctcttcatcccgtcccccccatttgtccatcaccgattgcggaaaggacaaagtggtgcacgacgacccgggacgacgccctgtgcacaacgacgacccggcattcgacaacaaatcgtcaaatccctcaaacagcgaaaactcttcgtcccgcagccaatcttcaaaagtgagaaatcttcaaaagtttttgcttcaaaagggtaaccaatccccacactcaaagacaaaaaagtttttaaagggataaaaccctaacctaccaaaacacacacaaaacagtcatttttctcgaacaaaaaccgacaaacacacccaaaatcccattacaaatcaatcaatacccatcccattcagtgaaaagaacaacccgatcggcatctcgcgcaccgacaaacccaaacgaagttgaagaaaaagaaaagaaagagcattttcggaccgaccaacccaaaagaaacggagacgaaaccaagcaaatcctcagacggacaacagtgataaaagtgaccactgtgatcaaaaatttctaaactgtgatcaaacccaatttaattttgtgataattgtttacctcaataaaatattaactgattaaatcgcagaagggaataaattggccaaccaaaattaagaaacaacacaaatcatttttaaaggaaaaaatgtctggttttatcaggagcaaaatccctctcctcaatcgagtgctaagaaaagaaatccagtcgaccaaaacaaaaatcgaggaaaacaaattcgaatttgaccaaaataatctggacgaatgcacacgggtgttcaataaaacaaaggaaattatacaaaaaattgagccaaactttgaaaaattaaaaactttgcataaaaaatggcaaaatttgatgagaaaaatggacaaagaacagtggaacaccgaatggaaaatccagaaaatttttcgcgaaaaacatgattatttaaagacaattaaggaaacagacgaaatcctcgacactctgaaagacataaatttggaggtaaaaagaagactcaaagtaatcaaagcaaaaccctcttcagacactgaccaagaggatgaatcaaatgatgatgaagaagaaaacgaagacgaagaaattgaagaagaagatgaagaagaaaaagaatacgacagtgaccaggaagacgattcaccggaattgacctcaaatgatcaaacaaacc

SEQ ID NO: 62843 - DNA, 2673 bp, Heterodera glycines
atgtctggttttatcaggagcaaaatccctctcctcaatcgagtgctaagaaaagaaatccagtcgaccaaaacaaaaatcgaggaaaacaaatttgaatttgaccaaaataagctggacgaatgcacacgggtgttcaataaaacaaaagaaattatacaaaaaattgagccaaactttgagaaattaaaaactttacacaaaaaatggcaaaatttaatgagaagaatggacaaagaagaatggaacacagaatggaaaatccaaaaaatttttcgcaaaaaacatgattatttaaaaacaattaaggaaacagatgaaatcctcgacactctgaaagacataaatttgggtgtgaaaagaagactcaaaacaattagagcaaagtctctttcggacactgaccaggaatctgactcaaatgctgatgaacaagaagaggaagatgaagaaatggaagaagaagacgaagaagaaaaagaatacgacagtgaccaggaagacgattcaccagaattgacctcaaatgaccaaataaaccgtaaacaaacaccttttgtcaattatcgatcgagaataaaacttccaccccaaactctgacacacttctccggaaaattctcccaatggcccagcttttgggacgatttcaaatcatcagtccacaatgaccaaaacttagagaacatacaaaaactgaaatacttgcgaggactcttacatgacgaaccataccgaattgtgtcccctatccgactaaaactgagagaaaaattcaaactttactcgacaaaagaattaatgaattttctcaattcacacactcaagctcgtgaagacatagaacgaatggaagattcaaacagacaaataagaaatttcccccctcaccggccacctcaaaacagaccacaaaggcaatcatacccaaactattcccaaccccagctaaaagcaaaccaccgaaaccatcaaaatctgcctctctcgccctatcccatcacttctgcattaacaaccaaatcaaaacccgtccgtttggcagaatttaaaccaaaaccatcgcaacccaaaccacaaacaaaaataatattttgtcgattctgtgaaagagacaatcacttgagcaaagaatgcaaaatttattcaaccacggaaaaaagaagtaatcgagcgcgcgaattaaaactttgcctaaactgtctgaaaaaaggacatcatttgaaggaatgcaaatcacctttttcatgtttcaattgcaaaagcaaacacaataccctcctatgtacccgaaaaacaaatcaatttaatcaaagagaacaatttaccaacgtaaacgtcacgcaaaaccccgaagaattcgaagaaacccaaaattttatgtctttagattgcgatcaaaatgatgaaattttacaaaatagtgaagaagaattgcttatgactacggaagcaccagtattaaatcctgaccaaaacaaaacccaaaaagaaatgatattcttcgataatgggtcacaaaaaagttatataacagacgaatgtgctgattcccttcaattaccaacaattgacgaaaaattattggcaatatccacctttaaccaaaataaacccaaaatcatttcatcgagactagtcaaaattggaatcaaaacactaaacggtgaaatcgagtacgtaacattacagactgtggaaaaaattactgatgttacaaaaatggtcaacagagagactgttgatatacgcaagagaaaaataccaattaaccatgcctgtccacaaattctgattggtatagaccactattggcactttatgctaccaaactcacaaattcaaatactcccctccggattttactcaatcgatacaaaattaggaaaaatattatccggaaaaggtacgattgaagacacaaatattaatcttgtgaaagaaaagcgaaaaaaggatgagacaaacgaaatccttcaaaaattctgggaattagaaaatattggaattaccgactctccacatttgacggacgaagatacagctctcatacactttgacaaaaatgtcatttttgaagaaaatagatactacatccgatggccatacaaaagagaaacaccgaatttacccacaaattttggattatgtttgggaagattaagaaatgtagtcaaacaattgatcaaaaacaaacagttggaaaattataataaaatactgcaagagcaaatggacactaacgttaatgaaattgctgaattcaaatccaaaaatttaattcactatctcccacatcaccccgttataaaagagagttcaaacaccacaaaaattcgaccagtttttgatgcttcagcaaaattaagaggaagcaatttcctcaatgacgaaattcaccaaggaccaaaattattacctgatttgtgtggaatgattctccgattcagactcaaaaatttcgtcttaataggcgactttgaaaaagcttttctaagagttggattaaatgaaatagacagagacacaacacgctttttatgggtaaagcagtcatatttggacgagataaaacaaaattaccgagaaatcgaaatgagagacgtagaattaagacgtttcacccgaatacccttcggagtcaatgcttatcggtttttattaacttctgtt

SEQ ID NO: 62844 - DNA, 82 bp, Heterodera glycines
gcctcagaatccccaatcacacagggattctgatgtcttcacgatgtcaaaagtaaaatctgatcacgtattcgtgatcagc

SEQ ID NO: 62845 - DNA, 828 bp, Heterodera glycines
taattaaatccattccttcgggggaccgtgccgggtgccgcggggtaagcagtgctggttcgtttcatcacggcaccgaaccttttggctagtcagcaatcgttgcttaacttgccagatcggacgggtgcgcatgattccactgttccaagcaccccaccaaaagcaaaacgatataaccaaaatataaggaaaaattttttaaaaatttttttctccatcttcctttttgatactaaagcatcagagtgctaaaattaagttgtaaataaaatttggtgcgctttagagcactttctgaaaaaaatatttatgaaacaaaaaaatcgattttttcaagtgtccgtttggggtactcaaacatttatggggagcaaaaatccaaggcagaattaaagtacaggctatagggaagctattcccgaaggattcggtctccccataaatctgggcgcatcggttcggggggactgccccgaaaacaaaaaaatcgattttttcaagtgtccgtttggggtactcaaacaattatggggagcaaaaatccaacgcagaattaaagtacaggctatagggaagctattccggaaggattcggtctccccataaatctgggcgcatcggttcggggggactgccccgaaaacaaaaaaatcgattttttcaagtgtccgtttggggtactcaaacaattatggggagcaaaaatccaacgcagaattaaagtacaggctatagggaagctattccggaaggattcggtctccccataaatctgggcgcatcggctcggggggactgccccgaaaacaaaaaaatcgatttttt

SEQ ID NO: 62846 - DNA, 647 bp, Heterodera glycines
atggtgcttcttacggaaaaaatcgccaaaattttaaactgccgtatcagcgagctacgtgatcggcttaatcatccttccgattgtgaaacggttgtgaaagcgttgaaaggacaccgtgttaaaacaacatacaaagacagaaatggatacaccaaaagctttgcttttggtggaattacagcacaaggagctgctataactatggcctatggacgtctgggtcgtcctttcaatgttaatgtggccgcacatttctacgtccgtcaccacattaaactccgacatcctttcctccactgtgctgttgagagctttccggaaggacaagaggatcgcttctatcctcttgaattatgcgaaatggaggatggaccaaacgaaccagattggcttggtcgtattttcacagaaattcgtaatgacaactacacagacagcatgagccctgcaaaccgagaagttttaacgccggaagacacgtcaatgtctcgtgaagggcgtgatgagtgcagtcaaaatatttcttacaccttatggtaattaattttttttttcaaaattgtctcttctcttccttaattttgtacttttccagccaaaaagtactctttcctatccttaattttttcgaaaatgtgttttag

SEQ ID NO: 62847 - DNA, 495 bp, Heterodera glycines
atgtccacatcctctaataaaaattatttaccaaaaaaccaatgcccaaattgtgatggtaattacaatttttccttactgtacacaaaaattttttaattttagatgaagaagttgacaatgacccttcacccgaagaagttgagaagtggacgccggaagaagtgatcgagtgggaccgccgctgtgaaggacaaatgccagctgaagaagagctttggcaagaattcctcgacaaaggagaggcaaatgtcagtaaataaaatttttgatccattttttaaatgatttcattaggttctgcgtgagttctttggcggaaaaggggcgcttgaagttgagaagagccttcgagaatacgcgaagaaaaaggaacgccgagacgcaattttgattgagaaaagaaacgaatacaaaaaaatgatggaaaaaaaggataaaaattgagtgttcgaatttcaccatccgctatatcaatggcttttattttattca

SEQ ID NO: 62848 - DNA, 311 bp, Heterodera glycines
aatttatttaaatattcaatttttttagctttttttcgaaaaattttttgtcttttttcggcaggcactgcctctgacaatgttttttatttatttagaaaaataaattgattttttttctttttgatttattttaattatatttcatccttaaattttttaataaacattttcaaactttcaccttattaatgtaaggcgaatttgtccttttttaataaattctcttgtgaaaaggcaaaaaaataggctcttttaaatatgcctatttaaattactttcattgctttcctttgcttacgaccatacca

SEQ ID NO: 62849 - DNA, 356 bp, Heterodera glycines
ggaatcgaaggtgttgtaagctttttttccttttttcacttgtaaatttatttaaattttcaatttttttagctttttttcgaaaaattttttgtctttttttcggcaggcactgcctctgacaatgttttttatttatttagaaaaataaattgattttttttctttttgatttattttaattatatttcattcttaaattttttaataaacattttcaaactttcaccttattaatttaaggcgaattttgccttttttaataaattctcttgtgaaaaggcaaaaaaataggctcttttaaatatgcctatttaaattactttcattgctttcctttgcttacgaccatacca

SEQ ID NO: 62850 - DNA, 320 bp, Heterodera glycines
ggaatcgaaggtgttgtaagcttttttcctttttcacttgtaaatttatttaaattttcaatttttttagctttttttcgaaaaattttttgtcttttttttggcaggcactgcctctgacaatgttttttatttatttagaaaaataaattgattttttttctttttgatttattttaattatatttcattcttaaattttttaataaacattttcaaactttcaccttattaatttaaggcgaattttgccttttttaataaattctctttgtgaaaggcaaaaaataggctcttttaatatgcctatttaattactt

SEQ ID NO: 62851 - DNA, 340 bp, Heterodera glycines
atgttgactgcgctgacgcctgaactcagaggcactttgtccaaggatctcatttttagtggtactttcttcatcgtcctaatgattttgtcatcactatacaattcccttctgttccaggacttgagcagctgctcagagacccggacgaggatgttcgtgttcagacggtgtccgccatcgctttgctttacgctttcgcatgatttggtggccatcaaaaacaaaaatacaaaagagagaacgacagcctagtcacaatgagaattgcttaaacgcacgggcttcccctcacttcgctatgtcctgttcaaaaatgacttttaatttaataataata

SEQ ID NO: 62852 - DNA, 902 bp, Heterodera glycines
atgtccgaacgcggcagaggcggcggttttgtgccgaaaagacgaaacgtcgtaaaagaaattgtcatcgatgaaagtcaggagaatttggtgatgattgtgcagaaaaaggtggaggagtcggagaaaacgaaggaccatcagtcggaggaggagaagaaaaaagagagcgaaaagggcgacggggcggagaaagaggggcaaacggtgggcacggggacaatggcacaacagcagccgaagaaggagccgtaccacgcgcaacaccaccactttaccagaaaaccaagttggactaaagaccctaaaggaatgccaacatgtaaaatccaaaattaattctcggacgggtacacccccccccccccttcgggattgtctctgaggggaagggcacattttggcaaatggaatggcatagaaagcaattaatttgcattgtcattttccaaaggcattcgatgggaaacctttataatattttgctcttttagtagtttgctattattgcaaaactgagggtcacgtgttggcggaatgtgagaagagaatgcaagcggaggcgagaaagtcggcagcgaacaatggcaagcgaaaattaagaaaccaaaattgaaattggggaattcttttggattttcaaatttgtttatttgtccgttaatcccttttcagtgccacgtgttgtcaattacacattccgtcacacgaagagcgatcagcgacatcagcagaaggccaaagaggaggaggaggagcacgtggagttggagacgtacaaggtcaaaatgggggaggaattttccaattttaaaggaggacaaaacaagcaagtcggttttggaattgagattcgaatttgggtcggaattgaggtcgagatcggattctcctttcattaa

SEQ ID NO: 62853 - DNA, 173 bp, Heterodera glycines
atgatttacccgatagttcagtccggtccgagtacggctttggaaaatgtttgcggcatcgcgaaccctccagacatgccgcgttgcagtcgtgcaacatcattgatgtcacgtagtgccagaggcgacgctgttggtgtgcctccggtgattggtccgaagattgcggaagg

SEQ ID NO: 62854 - DNA, 827 bp, Heterodera glycines
atgccgaaaaggcattattattttgacgccattcggcattgttcccgcttcatcaacaattacccaaatggcattttcactatcccttcaccgtgcctctcgtacaaactttgcgatttaccgaaggcaaaagtggaatgtaccgtaaccaaaagcaaatattacagaagcaccattatgccaatccaagtatacagggtaattagtggaaataattaatttattattgcgcactttttaaacattcaggttcacgttttgaagagaacgctttttgtgaagagaaaaggcggatgctttgccagaaaattgagattttgacttttatttattgggaactatattttttttacaaaattggaaatcttatgcagaattttaattgaatttgaaaaaaacttcgaattttcgtggaaaaattattgtcaatttttttttgttcatttggcattaaattaaggcaaaaacgagaaaatgttttaacaaaatgccaaaaatatgtcgatcaatttaaaagtcatttgtgctgtagtgacgctagagagtagagtagagcggtactggtactgtacaactgagtacctagtaccggttttggccggtaccggtctagtaccggttttcccagccaaaaactaccagtttttcaacccgaaaattaccggtaccggtttttttacaattactgattaccgctctaccctactagagagagagtcttggtctcgagaaaagtctcggatttttttgctctcgagtcttggtctcggatttttcagtctcgcttttcgagactctatttattgtttttggtaaaattatattta

SEQ ID NO: 62855 - DNA, 758 bp, Heterodera glycines
  unsure (1)..(758): unsure at all n locations
tggttgtagggaaattngagatgtcaatatggtgaattgaatttaattaatactaattagttaattgattaattaattaattaattgtgtaggggacggtgtggttggcactaattaaccactaattgccatacatttaccaaaggtgtgcctactcaacaatgtccgatgtgtggtcatacggtatcgtactgtgggaattgctgacgcgtgccgcctcgccctacagtgatgtgccaagcactgaaatacggtagttttacacttttactaaacatttaaggttgtctaatagggttaaaaaactttgagaaaacgtaagacattttttaatctgggaattaattagtgtttttgataaatcaaaaattttttggatgaggtttaccggctcaagtccctaaaaatgcataccgtatcgcgcatttaacaatttaaatgcttttcaggcattttttggagaccggcaaacgcctcgcgcagccattgcattgccctgacatactgtaaccaattgacccaaaaaataaataaaaaatttccaattaaatccacagctttgatctgatgctctcatgttggcgctcacggccctcggaaaggcccgactttgtgacaattgagcaccaattgcgcggcattttacaggcaaaatgaaaagcatggaaatgttcccgataatttgtcaggattaaaaatttgttagcaccaaaatttcccaaaaaatttcgcgaaattttcccgaaaatccacacaat

SEQ ID NO: 62856 - DNA, 828 bp, Heterodera glycines
  unsure (1)..(828): unsure at all n locations
atggcatcattggggacgacgacaacggaacaaattgcaaaaagacagcccgaaactgtcgcattgcgtgccgcattcgctgaagtgagtttcttttgttctttgacagaaccaacagctcattgtcaaaacagtaggagagtttaatgagaattcggtcggaatttaaaaaaaaagaagaaatactgcgattattaatgccgtgaaaatggcatttttagtctcattggtcccctactgggatatgtgccgacgcactcaaaaaattacgccaatcggagaccaattccgatgggctgaagaaatgttggaaaccgtaatcacgagcccaaaaatgtcggaaaacggcattcagcattcagaaaacggcattttcgacaaaccctggaccctaaactcagctttttttgtcccgtgcttttgggaatagtcaaattttgtaaaaacgtaaactcccgccgcgttacagctccgccaccatgtgcccgcgcatccgtcggaccgaaaaatgagcaaattggaaatactcagaggtcgtccaaaaacggcgggaggggacaattttcaaaaaaaaacatatgcaaaatcaaatttttgtttttttttaaattttcttttgtctcattgtcagccgcgatacggtacattagcattctggagtactgtctgggcatgcgacagacgccaattggtgtcaaattgcacaaagaatagagagagaagaaaaagtgatggaagtgattgcaaaaagataaaaacttggattagagaaattccatgaaccaatcaattgtatcggattgataaagaatgatgctttanattgga

SEQ ID NO: 62857 - DNA, 454 bp, Heterodera glycines
gtggtgcatggccgttcttagttcgtggagcgatttgtctggtttattccgataacgagcgagactctagcctactaaatagttggctcattgcttctgtgggcacaacttcttagagggattttcggtgttcagccgcacgaaattgagcaataacaggtctgtgatgcccttagatgtccggggctgcacgcgcgctacactggcaaaatcagcgtgcttgtccttccccgaaaggggttggtaaaccggtgaaaatttgccgtgattgggatcggacattgcaattattgtccgtgaacgaggaattccttgtaggggcgagtcatcaactcgctctgaatacgtccctgccctttgtacacaccgcccgtcgctgcccgggactgagccatttcgagaaattcggggacggttagtgttccggcttcggtcggtatgcagactggaaccg

SEQ ID NO: 62858 - DNA, 111 bp, Heterodera glycines
atggttaccgaaatgggctccacttctgtgggcggcatttcgccttcactgagtgccaacgcggcaaagtcatttttggaagccaccgacaaagagaagaaggaaatgcag

SEQ ID NO: 62859 - DNA, 2009 bp, Heterodera glycines
atgtcaaccgccttggacgagtcacagcagaacgggatcacaccggatcaattgggcgctacaatctcttcagatcttctaaatcccagcatatggattcctatacgccgcatttccgacaacaccgccgactcaatcatgaaccgcttccttgaggtggcacagtcaaaatcacgggagggctctctgtggggctcgccgttcactgtgaccatcacaacgcttgatgttgcgcagctacctcagcggcaacaggtgcgtggcagtgggaaaaggacaacaaattcagtgcaacatatcgtcaaagagagtgcactcctgcgaatcaacaacagtgatgatgcctattgccttttttacgctttggaggcaagcagaaaataccacatcaaagagatgagccgaagaaatttctgttattatattaaccatcagaacgggcgacgactggaagacgtgtttggactgatgagcagcgcaaacattcgcaccgatctgagagaatatgacgcggttgtctatgtgccgattgtcgtggactattggaatcggaaatacgccacagcaaaccagcgatttaaagtgttcatttttggcgctacaggcacctatcggccaaaatttcaatacgggccggacaattacaacgtcgaaatcccgctctaccatcacaacggccatttcgacggaattcggtgcggggtgggcaaagcggtgtttgggcgtgactactactgcttttcgtgcgaatgcccctacgataatgccaatgatcattcactgcagtgtaaagcaaagtgcataaactgcggtcgcataggagcggggcgaccgtgccgagcggatgacaacaacgacaattattacagagaatgcacagcatgtggcaaggatttcatgagccaagactgcttcagtcatcatttgtcgagcaatgtgtgccgacaattcaagaaatgcaaacagtgcggagttgtgtggaatgtcaaacaaaaccgacgaaaaggacgcagcggacacgtttgcggtgagaaattctgctacacctgcaaatgttaccataagccggagcggggctgcttcatacagcagttgaaggcgcgccgccccaaaaagtacaggctgatcgcctttgactgtgaaacaacacagaacacgcgaattgagggcgaccgcagagttcattccgtcaacttcatctcatgctatgtcgtctgcaccaagtgcataaacgaaaatttatggcgaaattctctacaagcgccatgtggcatttgcggtcggcagcgcaccgtcacattctcccaccgcgtctatgaacgcacccaaaccgatgcccaattcatcactccgtgtccaatggcggcctttgctcaatggctgctcagcgaattcgatccgcgctatcccacaatgctcttcgcccatttcggtggtcgctttgacaacattatgctgtttcgacagttcttcctcaacgggttttgtccacagatgatccgacgtggtaacaaattatacgaaatgaaaatttcgaggggcgaaaaaaacccggaaatcatcgtaagagacagctggaaccttatgccggtgccactaggcgctctgcccggagcgtttggactcaatgtgcaggataaggagttcttccctcatttggcgaatgttgaggcgaattatgggcacattctgccgtcgctaccgtcaaaagctgactacttatacggtggaatgacgcccgaccgacagcgcagattcgaccagtggtacgcggaacaccgccatcaacagttcgacctatgtgaacagctcgcagcctactgcaccaacgacacgcgcatactaattgaggcgttggtcgcttttcgcacggagttcttgacgatcagtgacccgctggagcggcatggatgcttggatgacgacaacgacgacgaagatgaagaggaggaggaacagcaggatgacgacaatgcatttgaagtgatcggcggtggcattgacataac

SEQ ID NO: 62860 - DNA, 1024 bp, Heterodera glycines
atggccttaaatgggacctatcttttcaacctgagcttgtactgctccaactccttgcatgaagttcgagctgtacaggtttgttgcgatcccagagaccaaatctaagaccatattcgaactcaacatacccgatttaccttgtttaattaaattcagaatttccaaaaccacttttaaaacattatgttacttggtggtcttgaaaaatgccgtttttggagaccactttaagtctcggctctccaataattcaatttttgtaattaaaattttatatttttgtgttcttatagtcctaactttgctctatttaatcactatttctctggctctgtatctcttttatttttctttaaatcagccatcaaaaatacctacctctaaaatgaccatttttacttacttaactctaactccctaaatacttttccattggtattgatctcttgccagaataatggcaacatattattgataataatggcgggtattttgaatcatgattgtgttttgttgaaatttaaaaaaaaaatttttaataaaaaaaatttgggtatcaaaaattatgttccaccctaagtaaaagcaattgtattgggaaagaaattaaattaattatttttaaagaatgtggcaattgaaaattttataaaatatatgtaaaaaacgcagtttagagaaccaaacgaaaacaaaacaaaaacattaagtaaatgtgagaaagttggaagaagccattgtaatgaataaataaataaataataaatatggagtgaacatttaaacctaatatttcttttaaaattataattaagagaagcattcttaaactgaaaaggtcctgaatttccagatgtttgcattttacggccatttttcatgaagtcaattaaatcagcaacacgttttaaattaaattaattattataaataatatttggacattcgcataatgttgaaaaatgaaaaacaaatgccaattggttttatatttaaggagaaatagccgcgtctattataa

SEQ ID NO: 62861 - DNA, 767 bp, Heterodera glycines
atggtgtatatagagaggtttgaagcgaattcttacgaagagctcaacaccgttttggaaagattggcgcgcggtgatcgcattttcaacggtggcgtatttattctgttcgcgatccctcgaaggtagacgaattgccgggggtggagaaggcgagatttgcttttcgttttctcattttcgactctcatcaaaaagcttttcctcagactttaattctcttttctttttggcttttccttttcatttctttcagattctattgcaaatttgcgcttagcactgtcaacacaacaatcgacgacattaatcgtatggccaaaaccatttgccggagctcgtcattgcgtacattcactgctccgttggagtttggaaagagtgagttcgaagtgccaaaataaaccaatgccttttcaaattgtcagagtttgggccgtgccgaacagtccctacaaaattgacaagacgttggggttgcgacagttgccgacgctcatcgaatattcgcttactgatcggcgccgaattgagggacggatggtttacttggacgagcagtttctgagcgtggattacatcacccgattcttcctgaagcaaccgttgaacgtcttccagtgacgagctcaccgcactgttatttattaactgatgttgttgtacatactgtctattaacatattgttgtaaatatatgtatattgtatgcactaaatatgcccaaataatattatacatatgtacataattatgaataacaaaga

SEQ ID NO: 62862 - DNA, 564 bp, Heterodera glycines
atggtgtatatagagaggtttgaagcgaattcttacgaagagctcaacaccgttttggaaagattggcgcgcggtgatcgcattttcaacggtggcgtatttattctgttcgcgatccctcgaaggtagacgaattgccgggggtggagaaggcgagatttgcttttcgttttctcattttcgactcatcaaaaagcttttcctcagactttaattctcttttctttttggcttttccttttcatttctttcagattctattgcaaatttgcgcttagcactgtcaacacaacaatttgacgagggaggcgactttcacatggagtggcaaaggattcgaagagatttggctgtttttggactcggaaatcgaattaaaatgcccaaaatccacaaaaagctttaattttccaattaaacagtaacgtttgcctttaaaatattccaaatgttgggttcaaattttgaatttttttccaaaaaatagagtaaatgtttaatcggattttgaacaaaatatgattcctagtaacattttgttgtctcaaaaatcgacagaataaa

SEQ ID NO: 62863 - DNA, 974 bp, Heterodera glycines
attgagaacattcgacggacagaagttggagcagtgcctgaagctgatccgaaagacatccatgcctgtattttgtcctgtcccttctgcgaaggctatggtggagaatgcccgaatactcttcatttttgggtgtgcgacgattgttgccaaacattgacttttgtgaaaatcgaaaaagtaatttgctgattggctaatatcgggggcataaaagctaattacccacatacacaaattacacatttcttttgcgcttgtggaaaaacgccggtggacgcattttcttttcgctgttccgatgtggcaaaacatggaaccgatttcaagcagtttggctctaaagcatcgctggacaaggaattggatcggttgaacaacaaaggaatgctaaacattttgctgctgggtgagacgggcataggcaaatcgatgctgatcaatgcactcatcgcttacctgaaacatggtactttgcaaaaagcgcttgaggtgaccgagtttattgagtactgtatttataattggcattatttaaatccaaaacaggcaaaagaaattgactgggtgatcccggcccgattttgtacgggtcgttatgacagcaaaaagatccgtcatagaattgaagtccaactgggcgaggagagcaaagaggagcgtcttgaagctggcgaatcgcagaccaaatggccaaacgcatatgtgatcccgtcaaaaggtgggtcccaaaatggttatgaattctgaaatgtgtcggtcgtcattcgcatttcagatggacacaaagtccgaataatcgacgcgccgggaattggtgacacaaaaggcgtcaacgaagacaaaatcaactttgacaagacgctcaacttcatcagcacattgcctgaacttcacgccgtttgcattctgttgcgtcccaacaccactcgcgcaacgcccgcaatcacatattgcattaagggactgctcac

SEQ ID NO: 62864 - DNA, 54 bp, Heterodera glycines
gatggaaagccatccattgcctgccggttctcggcacagcaaagcaataatagg

SEQ ID NO: 62865 - DNA, 594 bp, Heterodera glycines
cgcttcgaattgcacttgggcttttggtgctcattttgctgatcggattcttcccctccaccgacgccatccagtgttattcgggcaaccaattttccatcgtcgaatgtcccagcctttactgtatcaagcagacacttgggctggatacggtaataaaaagcattttgacaaaaaacaacaacacaattccattggtttaggtgcgctattgtgatgggacgggcttttcctcaatttgctccacctatcggataatcgattcttgccaaactgtgccgagtctggtgagccattctaagcattcagcgcaatttacggtgctgctcgagagtctcggaaattttggtctcgagcagcactagcaattaccaatactgatcagtttattttgtttcgcaacttttagggctatgtttgctgctgtcctgatcagttgtgtaattcggcgcagaaagtgccaatgaatgccctttttggcatcactttgctcggcatcgctttggcttcattaaacgttgccatgcgaacaaccgaaagaatgttctgatgaatggccaagccgctcatttgagaagttccatccacttaaga

SEQ ID NO: 62866 - DNA, 538 bp, Heterodera glycines
  unsure (1)..(538): unsure at all n locations
atggaaaaaattctggcgaaggctccaccacgaggccgcgaagcggccgagtgagtaccttcggtgcaggaaaattattaaggaagagagttcattatttatttgttttttgcataattaattcataaatatttttttcagaaactgctctgaaacgcaccaaattttatttgcaagttattttaggcactcagatgctttcactatcaaaaagggagatgaataaaaaatctaaaaatttttaattgctttttaaatatgcgaaaaattttaggcttaactttttttttataaactggtcagaagcgaaccagattttgcgagagcatcaaaaagacaaggaaaagcactgctatgatgctaactccagtaattctgaatttaaaattttttattaatttttaaagcttcactattttatttttttagcaaaatcaattcataaatattttttcagaaactgctctgaaacgcaccaaattttatntacaagttattttaggcactcagatgctttcaatatcaaaaagggagatga

SEQ ID NO: 62867 - DNA, 460 bp, Heterodera glycines
  unsure (1)..(460): unsure at all n locations
attaaaaatttttagattttttattcatctccctttttgatattgaaagcatctgagtgcctaaaataacttgtanataaaatttggtgcgtttcagagcagtttctgaaaaaatatttatgaattgattttgctaaaaaaataaaatagtgaagctttaaaaattaataaaaaattttaaattcagaattactggagttagcatcatagcagtgcttttccttgtctttttgatgctctcgcaaaatctggttcgcttctgaccagtttataaaaaaaaagttaagcctaaaatttttcgcatatttaaaaagcaattaaaaatttttagattttttattcatctccctttttgatagtgaaagcatctgagtgcctaaaataacttgcaaataaaatttggtgcgtttcagagcagtttctgaaaaaaatatttatgaattaattatgcaaaaaacaa

SEQ ID NO: 62868 - DNA, 779 bp, Heterodera glycines
ggggataaatgggggacaaccaatggggaatggcacgggagcagaggagggttaaatgggggacaaccaatggggaatggcacgggagcagaggagggttaaatgggggacaaccaatggggaatggcacgggagcagaggagggttaaatgggggacaaccaatggggaatggcacgggaacagaggagggttaaatgggggacaaggggaatggcacgggagcagaggagggttaaatgggggacaaccaatggggaatggcacgggagcagaggagggttaaatgggggacaaccaatggggaatggcacgggagcagaggagggttaaatgggggacaaccaatggggaatggcacgggaacagaggagggttaaatgggggacaaggggaatggcacgggagcagagggggttaaatgggggacaagggggttaaatgggggacaaccaatggggaatggcacgggagcagaggagggttaaatgggggacaagggggttaaatgggggacaaccaatggggaatggcacgggagcagaggagggttaaatgggggacaaccaatggggaatggcacgggagcagaggagggttaaatgggggacaaccaatggggaatggcacgggaacagaggagggttaaatgggggacaaccaatggggaatggcacgggaacagaggagggttaaatgtgggacaaggggaatggcacgggagcagaggagggttaatgggggacaacaatggggaatggcacgggagcagaggagggt

SEQ ID NO: 62869 - DNA, 1249 bp, Heterodera glycines
atgccaaggtctctgactggttcgtttgcgggatttttaggaatttgaaagtcatcaataaaataatttattttttgatttttgtgtcctaaatgtaaagttaaacatttatttgatgaaaattttgaattttcgactttttgttcgagtccggggttcggaattgaccaaaacatgtgtcattttcgggatcagcatccccgaaaatttagagcttttacaacagtaaaatatattttatttggttgagcgatcaatttccttttcatggatttttcaaggatgaaatggggcatgatctgttcggttgagagtccggaattaatccctgatttcgagtaaggtttatttttgttgatttacatttgttatggtatttttaagaaagttcggtcaatggatggtggcagaattgcaaaaagctgccattgagcgcagattttggcattatttcatgccttctcctaattttctcttgtaataaatggtccttttttgaatacgtttgtcctttagatacgccagccctggatcagttgaggaagtgaccaaatgttacgaaatgataaacctttcttttccggacgtccgtttctcttttctgtccttttggcattgtccagtttaggtcagttatgtcattcatgttctgccttctaaggattccgttgagcaccaattgctcaaagaactcactcacaacggagctttgataggccaaggtcattttgaattttcatccgtattgcaattctcaacacctttcttctttcaggtgttctcgcgtacaacgcactcaatcactttgactgctacgatttgaacgaagtcatgttcagaatgaaccaatggattgcccgtcggctgacccaaattatgtccaggcccaagtgagttttcttgcaatgattggtggattttttactatttcattttaagtgacaacgtcaagccaagtcgtcgaaagaaggatattttccgaattgtcgtcgccaattccgcggaagagcctccacccgcaagtcttttcaacaaggaaattcactcgcagatgcccttaaattcgaacaaagaacgcttttcaactcagcaggatatcgactattcagttggagttgttttgcataaaagtgagaagaatatttggcaaaattgcatttattcgtttttatgtatattttcagaattttttcgcgttgaggtgatttcggtgagattgttcaagtcaagtagccaccggaggagatga

SEQ ID NO: 62870 - DNA, 449 bp, Heterodera glycines
ttgccgtcggcggacaacgcgtgccgttccatcggtgcggcatggaatcgcaatgtgaactgtgcctttggcgcgcttcgttccgcgacgcattcggcgcgcgaatcggtgcaaaaaatggctgccgaagcgatggcattttttgacgacgacgaggaaaacaaaagcagcagagggaggagaacggcagcagaacagcgccaatgatgagaaatgagaggaggacaaaatgaattgaatctgttttaatatcattgtgcatttgctaagggtgctctcttctctcagtctctctgattttgggccgaacgaacaaacactcagttaattattaagtgtacacaccaggaatgccatttcgaggccctgaaaattccgaaaatcgaaattcctacctcaaaaattttaatggaaatcggaattcagaccacaaaaatatcaaatcggaa

SEQ ID NO: 62871 - DNA, 3527 bp, Heterodera glycines
atgtttgccgctgagccgatttcggaccgattgctcaagtcaagtgaccaacagacgaatgaattaactcaaaacggcggagatgggaacaaaggggaggtccaagttattgtgaaaggtgagaatttggagtgtgttcaattaaattttaattcgtcagtttggtcggaggggggatttatgacaccccaaatgaaaaatgtaaataatttttatcgagtcacatgaatttgggtaaataaatgtagatttaatgagcaaagtattaagcttgtctatgaaacgattttcttttttgttcagtgatttctgccaattctcaggtttccccacgactttcaacaaatttcaaattgcttctcttttccccgactttcgtcctttgcacgtcgaatatctctccggtggggaggctgtcgttcaatttgcgaacaaataccacgcagctcaggtggtccgcaactataacggactttcgtttgagaatgaaaattttattttggaggtaaaaatgctaattgtcagattattaatctattcttccttttttattttaggttcgctctgccgggaattatcaacgccaatttttgcaagataaactcaacaatttgtgtgttggaacgaaatgagattttttgacttttttgaaacaaaatatttattcagatgtttttttgttgccaaagtgaacggcttttatattttatggttaagcagcattttaaatttgagaaaaatcgaaagaatcgatcactttagccaagctcagtttttgcattcactttcattgtttgcttataaattacaacttttcgatattacattcttttataatgaaatgctcgtcgtttcatcgccaaaaaattgagccgtttaagtaaaacgcatttggcaaaaatggttcatgaaacgagaatcacaaaaagcttattacaattttatttgatgcaaatacatacttaaatattaaattgagttttggctttccctctccccctaattttctttgtttttgttattggtgctttcccccccccccccccctccttcaacttttctcaccattccatcttatacaatggcattttgttatttggagccaaatgcgaaagtcccaacggaaggatgggttggcataggaaaaaattgaattagccatggggaagagagatggcattcattcagtgccctccggcgagtgatggaaagtgccccttttgctgcccctcccttcgctcgtcttaactctcagcttctctctcttcgcccattcatttcgcttttgctgctgcgtcttttcattgcgcatttttttctcttccattttatgtcactgaaagaggggaggaaggaattgttttatttttaggaattgaaaattcatttagaagaaaggcccacaccagggatggaattccgaggctcaaaaatttttcggaagtcggaattccgagcccaaaaatgtcggaatttttcaaaaaatataataaacaaaattttttaaatatttaataggctaaattttaaaattcttaaccatgtaaaggtgatatcaaactgtttttagtatatttctatattaatttaattttttttaatgattttcaaaatatttttatgtaattttacatttttttgaatttttttttgggacagttacacccttttttgcggcgcgctttatccaaagaaaatttgggtaatagggggagaggtccggcggtgccgataggcgccgctggaaaaattttagtgatttttaatgcgatttgttaacagatttgtccacgaaaatggccaaatttagcgatttcgagcacattttcaagaaaattaaggatttttaggtccggcggtgccgataggcgccgccgggaaatttttaaaaatttcaatgcaatttattaacagaaaattatacaaaaattgctaattttttgaaaaaaaaaattcaaaaaaattccgactttttatcaaaaatgtcggaactcggaattccgtgccacccctacaatgaaccacaaaaaaattataaatgtttatttctaaaaaaaatttcctccgttgccattttcaaggagtacaagcgcgagaaggcgtccgccgaacggacacgccatcgccggaacagtgtgctgcattttgcgtcgtccgccggcaccgccgtcgcatcggtcgcgtgcagtagcagcaacggcactggcggtgaacacgcgcagctgcagcaacagacgacggcgataatgatgccacggcgcaaggccgttctgcaggcaaacttttcatttcttgtgctgccagaaaatgcattaataaggccatcgagaatgactcaattcccgcgaccgatattcgggactgaccgagaaattaacgcatgaatcgaacacccccccccccctaaaggaagtcgagaccgacagaggattgtttcccgatttcgtcattccccctcccgaattcaaataagataacaaaaaaccaaaatttttaaaaaggtttttatacgttttccggcgtggtggtctttgcctttgtcacttgccgaaactcggtcttgggttcgaatcccattgtgtgtgttaaatttttcaaacatttatttttaattagaaatggtaatgcatattttgttgctttttcagaccggcgcactcaattttcggccacctctcagccgttcgcgcagtgtgccacgcctttgttccattgacgaggaagaggcacgggccgaggagcaagaggtacggtaaatgcctgtttataccgtatgatatgcttctctctctaccgcttctcctatacttttaaacagtttccctctattctatgatcacataatttctttgtttttattttctctttactcattgcttattcctattctcggctccctttttattttggttctctctctttctctccctctgtctctctctccctctcttctctctttccctctctctctctctctctctctctctctctcgattgtactcacttatttctctcctcctctccctctccctttcgctttgttttttttttattatctttctatacattttttttctcaatcttcctttctctcttttggtttttttcatctctgatttgataagagatcacttcattgtaatttccaaatatataattacatcatcattatcacaggatgagtgtgacgagactgtgaaggatgaagacgaagagttgcagctttcatcgtctgatctggactcattgaacaccgcggatcattaccaaccagtgccaataccaaccgcgaccacaacgatggcaaacgcaatggcctcctttgcctgtgttgctgctgatcagcagaccatcaccgactcgtcatgtcgttcaagtgcatgtggagacgaactcgaagacgaggacgacgatgctgaggatgaggaaaggaggcatttttgggcagagcatcatcatcaatttcaccgtaatgatgatcaccatcatgccaatactgcgccgggacgtggtccgcattaaaataa

SEQ ID NO: 62872 - DNA, 302 bp, Heterodera glycines
atgcaaatttttggaaattcaaactcacttcagggttggacaatgttagtgaataaagctttaaaaataattatttccagaaattctggaaatttgcgattttttagaaaaattcagaacgccttttgaaagagcgttttcacaaattaaaatactaggaaatccgatattttttgattattatgaggtattttctcttttatttttatctcttttttttgaagaacgttttactaaacattcaaacgaatttcaaaatcaatttttattaaaatataaaaagaaattattttttagaaaaa

SEQ ID NO: 62873 - DNA, 711 bp, Heterodera glycines
atcgccctgtgcagtaatattgcgatgccattgtattcactgttcaaaaatttctactcagtccaacaaaattgtgacatcgtttgtaatccttctggggtgcttaccataaatatctttgcaaatacatattacaatgaagatccagtgtaagtataaatggtatcggataggcggaagcattttgctttaataaagcaatcaatttaattttttgtattttctaaaaaatttggttcttaaaacattttttaaaaccattcttcccggataaaattataaaatcgcttgactgaaatccctgttctttttggccaaaattactttttatctccatccgttttattatgagtgaagaaaaaaccactaaaacttcattttataaaattgaaacaaaattaccaaatttatcaatttatgaacattttttaaattaatttattttcaatattttttcaacagcgcctatcggcaggtgggtgaggctaatcctcccatcttaggactttatttaaaatattttggtgcattataagtcaaactatttgaaaaacccaaatataaaattataaataaatgaaataacatttaattgcagtgccatgggaatgggtgacacattgttgtgcaaagccatagaaccattccgccgtttaaaactgagcaccgaagaatttgtacttattcgagcaatcatttactcccatatgg

SEQ ID NO: 62874 - DNA, 1067 bp, Heterodera glycines
gtgttaagcgaaggccctcacggtccgcccgtttattacgcaacggttggccaaatggtaaaacaatttaaaaaaatatgttttggtaaatcctatttaaattgtcattttcgatttatcacaaatggacttgcgaagcgaatgggcccaaccaattttgcatgactgtggtaaaaataattaaacaaatcattcatttaattatccaaaaatgagttgctctcacagcattcatgctttgccgatgatggaaatggagacaaagtgcaattaatcgacgaaaaagggtgggggaaagtggggggggggaattaaaaaaataaaataaattattttaagtttaataaacaattttgattatttttcaatggaataaataaatttaaatgtttattttaaattaaatttattttaaattaaaaaatatatgttagctgcgcccgtgacaaatatttgttacaaaatttggagtacgtctcggatttgatggtcggcaaagaagcgcacgtctacaaatatgcagacagacaaaagtatggagaataatttgttgggactaggatttttgctggcaaaaatgccaccatattttgaaaaatatttttcaataaatttgaaaattgagtgagttattcttttacactggtaaaaatgccaaatttttgatcatttggtattaaataataattatggatctggttgaagccgaaaatctctgtaacagaaattaaaaatatttttttcaaagcattttaattaactttttattattttaaaaaatatttgacatttcaaaataagaaatgaattatatatattataaaaatgagattttccatttgaattcaaatttattgaaaccaaaaaaatttaaaattatttttaatttttagtatttatttcgattgcaaaatttcgctgagcgtcaaacgagccgttctgcgaattttgccccgtgccgaactgtgcggaccctccgcgccgaaaacattacaatttcattagcagaaaacgaaagctaccaaagagacatttggaggaagaagaaaagagtgataaaaacaaaa

SEQ ID NO: 62875 - DNA, 441 bp, Heterodera glycines
atgtccctccaattctctctctctctctcagacgtggccgtctccaatctcaacgaattccatcgccgacatgaaaagcgtcaatttgcgccggtcggaaaggtttggcgccgcttgcaaacggaccaatgtcccattttgaaggtgatcgacggagtaaaagtgctcattttggatggacagacaatgaaacgggtgccaatcggagtcccaggcgaagtaaacggaggaaattgcaaggaaagcaaagaattgacagatttacgtcgcgggtccgactttggcaaggggttatatcaaccgccccgagctgaacagagaccgttttgtggaagtgccggccgaactgcgcaaagaagtgggcgaagagcgaatgtaccggacgggcgactggggctatttgatgccgaactcagtgctggaaatatgcggacgctgtga

SEQ ID NO: 62876 - DNA, 109 bp, Heterodera glycines
tcaattgagttctgttgctgtggggaaagcgcttcgcgctcagggacgcggcttcgccgcgtctctagaaagtgatgtaatttagcaattcatcgcggcctcaggacgg

SEQ ID NO: 62877 - DNA, 630 bp, Heterodera glycines
atggccctcccatttaaaaaacgattttacataaattccgcggcatggataaggtgggaactttttgttcgaattccggtccggggtgaaaccctcggaaaactgatttctaagagagagggggtcagtcactgctgaacaaaattggtcacatttctaatatcccctacatttttgtccttttttgggtatcaaaataaaaaatgttgtcgtattggaaatacgaccccgaattttcattaaaattccttaatttcccccctcattttcagtcaaattgagccggtgcaggaccatgtcatgaaatcttctatgttcgttttgcgctgttttgtttcttcccattttcatgatgaattccttaattttccccctcattttcagtcaaagtgagccggaggaggacagtgtcaactattttatgttcgttttctgctattttttcttcccgttcattcaacgcacacttagcttttctcatattattcgataaccacgttagttgaaaatttcaaaaaattgaattcaattttaaaaaaagttataaaataggaaattgcaaaaaaaaaaatcgtttttcggcaataattttttgataaatttatgaattttttggaattttgcaggcta

SEQ ID NO: 62878 - DNA, 1025 bp, Heterodera glycines
  unsure (1)..(1025): unsure at all n locations
atgaatttttctgaggtaaaagctttgaatttatttaacaactatttattttggtgtaaaaccagtgttcccaactctgcttatttgtaagcattttgctgatttctaggggtcaaagatgatttttttgttagattctgatttgctgctttttgagaaaatttgctgatttttggaaaaaaatcagcaaaaatatccgtttttatgtaaaattgctaccaaaaagtaccaaattttcaaatttagggcgatatgttgatttttttgtgtgtgactttttattccctagaaattttatggcttcattgtttattaactaattattttctcgattttaagtacatttatgactgtaatgcgcaaaattttcaaaatttgctgatttatgctgatttttggaacaaatctcaaaatggctatttttaggctatcggtccaccggtccctaaaattccactgaaattttcaaaatttgactaataaattcccaattttcagtgaaaatctgtttaaaaaggttcaacatttccaattttttccacggcggcgtctatcggcaccgccggaaccacgccccatgtttccaaaaggttttttttggataaatcgcgccgcaaaaacctttttattatgttttatggaataaaatttaccaaaatgctgatttcaaagcatcaaaatttatgccttttttgtggtgaagcaattaaatcggtaaaattgctaattaaaaataattaagaaaaaaataataattaggtggaatttgttagatccatcgtcaacacaaaaagcagcacaaacacgagtcaatgagttgacaaggattaacgaaattcgacagccacaattattccaaaaaaataataaataaatgaaataaaaaatgattgcagaattattaaaaattanattcgcttgttttttacaaaatatttctaattcgtgcaatatgccttanacaaatttcatttttcatggaaaagtcttgttaatgaaattattaatcacttccccataattaa

SEQ ID NO: 62879 - DNA, 48 bp, Heterodera glycines
atgaccttatcaaaaaagtttttgccaagaccatacgtttcggcatcg

SEQ ID NO: 62880 - DNA, 137 bp, Heterodera glycines
atttgataggtaaatttttttttaaaattatttctcactgacgaaatcaactactgacgaaatcacttactgacgaaatcactcactgacgaaatcaatcactgacgaaatcaaccactgacgatatcaccggggac

SEQ ID NO: 62881 - DNA, 1862 bp, Heterodera glycines
atggagcaactccaatcctcacatcaactggaatatccgcccttacttgtctcacaatatttcgacttgtgggaaaatctgatcgtgcttcattgcgaagccgttcattggcttgtctgacctatacccaggaaaaatccatttcgaacaaattaaaatcccggatccgaacccagggacggtcccaggattttggtttgggggggggggtaccaacccctcgggcgacgacctttttttgctcttcggctgcataattttttgcgctcgattttcaaaagaataaggtggtcttgccccccccccccccaatgggaccgtccctgtccgaacccttaatacaataatttgaacccacgtgtaatgagccaaaaatgggatcgtggttatgttgcgcagttacacgacccattctgtaatttgaaccatcatcaccgactaataaatttgactgcacgattgccctcccagggcaatagggaggacgccgagggcatttccagtaactccagccgtcttcagttcgggaatcggccttagaaaactattaattttttccatttaaaagatttcacttcgtaaagatactcatagtcgccatgagtgatcagctcacggccacgattggatttgcatacagaaaaacggattaaggccattgaagacaaaaaaaagatcaattaatggggagaaattcggaaacgaagtctcgaggtcaatggaaatgaccactggcgagtctcgaaaaacgaacaactaagagacaaaaccgcaaaagcgacccattatcactgataagagtgaccaataggcaatgaaagggcaaacaaataattttttctcgaaagacgaacacacaagatacaaaacggcagaggcaaccctcaaaaagaattcttttctctgataagagtgaccaatagagagtgaagaggcaaataaagtttcgtattttaatgtatgaatatattttcattatttattgcatacaaatgtattatagttcatatgaaattataattagttcatatcacttgcgtttttgaatttattttaatttttgataggtaaattttttttaaaaattatttctcactgacgaaatcacttactgacgcaatcacttctgacgaaatcacccactgacgaaatcacttctgacgaaatcacatggcaccggggggccggtaccccccccacccccaagccgaaatcctgggaccgtccctgccactccaagacgaaccctcatataattatttttttatgtttagccaaaaagtataatcttaatgcattggccaaagcgtgtttgaatgttcccatttccgagctcggcaatgtgtttctcgcttatgaccaatctcgccttctcagcgaaaaagcatgaaattttgtttccattttatcattaaattaaaatcaatcaataatttttgtcatatacaaattttaattttttctttgaagtttggtacaaaaaatcagatcaaatcgatctcttattttttttcttttttttgaggatttctcttgtcgctgcttggattacattgaccaaaatgcggaatcgctgatccaatcggatgcctttttggaaatggaacaaaatttgctgtatgaaattatcgaacgtgaccagttgaaaatcatcagcggcgaactcattatttggaatgctgtactaataatgtacaaatttttgaatgaaattcattttcaggcactccgttgggctgacgcgcaatgccttcaaaatggcaccgaatgttcggcagagaatcgtcgtgttgtcctcggcctggcactgtccaaaattcgttttccgctcatctctctttcgggtttagccgactatgttg

SEQ ID NO: 62882 - DNA, 389 bp, Heterodera glycines
atgaatttggaccgtgtttttcagagcgattttagtaatggagttgaaaatgatgagttattaggaaatgaaaatgtttttgttattgaagatgaaaatgagattttagaacaagaaattgattgtcatgttttgtctgaacataattatgctaaacgagcaagagttttgaatgttgccagccaggcatctctgaattcagatattggcgttgcaggaccgtcacgtgtgagtgatagtcaatttgaagaaatgagaagagatgagtatttgaaaagaaaaagagaacgcgaaagattgagaagagaaaatgaagcacaaagtcaaagggctttgcgtttagaacgaaatagaaatagaatgagcagtcaaagatctgaagagaatgt

SEQ ID NO: 62883 - DNA, 102 bp, Heterodera glycines
atgtctctatttttatttttattaaatctcttgttccggcacttccgcctcggcgtcctttctcttccatatataaattattcagaattattttctttcctg

SEQ ID NO: 62884 - DNA, 1396 bp, Heterodera glycines
atgacaaattttttctgtcctcctgttttgatttgtgttctttcacttctaactgctgttgtcagctcattgaaagttttgcaaatcgcgccaaactttttggacaccaattttgagctgagtgtgcgttttgccaatcttttgggcgagaacggtcatcatgttgtaagttagcgaatttgaattgattcctaataatttcattcaattattttcaaatactttttaactaacagggttgtcattcgaatcccagcctttttctcgtccctaatctcgaatcatgatcagaaaatttcgggccgccccaacctaaaaccatggctaaaaagacagttttttttgatgggataattacgactcttaaaattgaattttgcaaaatatgcccaaataaaacaattattttcccccaaaaaaaaataaatattttccattaaaaatatcaacaaaaaaaaaaaaatttagtatcaaattcatctcatttaatgaatgatttcagcattttctggtcccattgagcaagccaaacaatttgcccgctttggagcagttcaattcgaatgtgcatgtgtaaatttgtcatctgtcagaagcaactttaaaattggtggaacaaacgccagaggataaagattacataaatcctgcaccggaaagcatccaaaaaggtggttggacggcacggcactacaagcagagcccagcaatcgcatttgtggaaggatttgaagtgattgcaggtggtaaaattggtgcttaaaatggtacaaattaaagcacaagcactcctaaaaatggaaaattgggtcctcgttaattgacattaattgggaatggatgaccgcaattaattacccagattttgtagtactccacaattctcattggcatgaacattgtgtgtttgtttatatatgccaaaatccaaaaaaacgcgggcgaaaaatggggcaattattgttgcgccgccgggggggagggctggcatttttatgaaatttttggaatttttatgaaaattgttaagaagtcaaaacgcggaaaattcagcgtttccgcggcaacatagaaagaatgagctgatttttaaagtccaaaatgatggaaatcattagaaaatcagcaacactatcttttatataagtaaaaaattaattatttctaaagacgaacaaatttcgaaaaatagttaccaagatttaaaaattttaaatttgtttaaaagatattagtgaaaagcttcgccaaaaatccttggggtttacacagaaaattatcattagggatgtcaaaaatatgtacagaaattggtaaaaatatgtacataaatatgtaaaaaaaatcccgaaatatgtataaaaatccaaaatatgtacgaaaatatgtaaataaa

SEQ ID NO: 62885 - DNA, 495 bp, Heterodera glycines
atgaaacaacatattgcttcatcttcaaacagcgtagataaatgtgatgaagaaaatattaaaaattatatcaaggtaaatgaggaccccgaaaaaattaaaagatttttttttaatttagaaaattcatggtattatttcatcaaaagtgttgaatatttttaaacgggatttcatggaatgcccaatttgctatgaatttgtaatgtatgatcagctctgtttttgtgatcatttaatgggcgacacaatttttggtagcagttcaaacaatgcgcaaaaaggcaaagcaattaaaattaaaaattgtattttaattaataaattattaatttttaagaattgcacatattttgccatgaatgccttaagagctacacaaaagcggcactcgaaacgaaatcattcgcgcgcggttggctgggactgaaatgcatggcggagaaatgtgaaaatccaattccatggcgtaaattataactaattattttatta

SEQ ID NO: 62886 - DNA, 798 bp, Heterodera glycines
atgccattggcaaagggcggactcggcctccgatgcatggccgccgattgcaacaatccgatcactcttcgtgagtcaaacagttttttaaattttttattagtattttcctccacgcaaataaataaaatttatgccgttttgaattttcaatattgtagaggaacttcaagcctttgtgccatcttcgacagttacaaaattggaagaacgttgcgctgagctcagtgtggtacaggccaacctcaaattcatggaacggtgagcgtgaaaatatatacaaaaaagtatatttttattagtttttggttacccaaaattaaatctattgtttaaaaattaattttaaacgattggtttttaggggtattccgtttaattcgataatggtaatcttttcattagaccaatatgtgaaattagttttgttatatgacattctctaattcgtttaattttcacttattttgttttcctttgtcagttgtcgtagctgtaactgtgccgttgaattgggtgcctcccccgatgttctgatggtgttcagttgtcccgattgtcgtcttaagttttgtcgtttgtgtgacgagccatggcaagacgaacacaagggcgtcagctgcgagcagttcgccaagaaacagaaccgcgaacgattgttgtgagcgaacaaaattatatttggtctttcagcaatttttgttttttcctttcagggaaaagcgtctgtctgaagctgtggtgcactgttgtgccaagtgcaaaatgtccttcgtgaagcatgacggttgtaacaaa

SEQ ID NO: 62887 - DNA, 1685 bp, Heterodera glycines
atgaatgcaccaattttaatgaacgacaaatcaatcgatttcgttttggacagcggcacagaaataattgtcgtcaccaatcagacgtacaaagatattggacgaccaccaattcaggcgtgtcaggaagaagggaaattttttgacggaacgcgctgcaaattccttggccgcggtgttgccaacttccaattcaacggaatccgaacggagctaccatattatgtggccaaaagtggaacaattaatcttttgggcctgactgctttggaccgtcttggatttctggaagaaatgaagcggctgatcggcaccaaaaatattaatcagatttggtccactgattcaaccaaaattcgggacacaattgcaaattttgagaacaaatatgagcaaattttctctgagggccttggactctgcaccaaaatgaagggccaattgatgctcaaatccggcgcaaatcctatttttaaacgcgcccgtcctgttccttacgcaactctgccgacaataaatgccgaaatggatcgattggagaaattaaaagttatcaccccggttgatcacaccgattggtcagcacccattttggtggtcaaaaaggcaaatggaacagcaagattatgcgcagatttttccaccgggcttaaagactcgctccaattgaaccaacacccgcttccgcttccatccgacatttttgccacattaaatggaggaaaatatttctcaaaaattgatttgtcggatgcatatcttcaaattgaattagaagaaaattcgaagaagctgtgcacaattgcgacacaccgcgggcattaccaatacgaacgtcttcctttcggcatcaaatcagcccccggcatatttcagtcgataatggacaacatgttatcagatctgtcattcgcattggcatatttggatgatctgatcattgtcagcccaacattggaaaaacacaacgagcatttggatcaaattttctccaaaattcaggaatggggattcaaaatccgaattgaaaaatgttcatttttccaacccaaaattaaatatttgggagtgattatcgaccaaaacggacgacggcctgatcctagcaaaatttctgcaattgcggaaatgcgaatgccttcaaacatcagcgaattgcgttcctatttaggaatggtaaattattaccaagaattcgtaagaaattttcgcacaataagacagccgctcgatgagttgctgaagaaggattcaaaatgggactggtcgccgaaatgtcaaaatgcattctccaaaatcatcgcaatgctccaatctgatctggcatttacgcattttgacccatcattgccaatcgtcgtcgcagctgatgcgtcacaatatggcattgatggagtgatttcacacaaattcagtgatgggacaattaaggccgtttctcatttttcccgatcacttacaccggcagagcaaaataatggacaaattgaaaaagaagcccttgctcttgtgtaagcagtaaaacgttttcacaaaatgattctggtcgataatatactgttctggcggatcatcatccattatcgaaaaggtattcatcaaaaatgatgtcccaatatactccctcatccgccttgtccgatggtctttaattatgaatgcctatgacttcgacatccagtaca

SEQ ID NO: 62888 - DNA, 628 bp, Heterodera glycines
atgcaatgtctttgtaaagtgttgccgccgctcattctcggacacttgcaaggcggtaaatgagataaattaaaattttggttttactagcagggatgtaagcttattcaaataatgaaattttgcgttgtttagttaaatttttataaaaaacagcaaaatttttaacaataacaaaattctagacaaagttagattttgaaattttttatcggctatgctttctgccacgccgccctcacaccatttaccgtgagttggacataaatttagtaaataaagtatccattcattgaaacaaattaaaaattattttttactaatttaataaaaaaaaagacgtggaaaattctatgttgaaaaaattttgtaattcacaaaacttccgaattttttttaccatcggcttatatccttgtaatatataaaatgtcaaattcatattttaagcgatttttttttaaattacatttaaatttacaaattcagtaactcaaccgatcaagactacaactgaaactgagccgatcatcagcccaaccgaaaactacaccgaggaaccgaaaaccgctgtcactttgttggcaagcaaattgtttttctgttgataaatctaattttaaataaa

SEQ ID NO: 62889 - DNA, 817 bp, Heterodera glycines
atgaaatggggattggcaattgacgcaaaaagaaggccggcaatgtcgccacatgtgcacgggtcccatgttgtgccgatcatttcgagttctcatgctgcacgacagagcaggtcgtccccccccccgcgaaattttttttaaatttttcaaaaattataagtaaaatttttttgaaaattttttcttataaatttttgggcaaaacagattgcattaaaaattacaaaaattttccagacggggcctatcggcgctgccggactcccatgtgttgttccccaaatgttcttggaaaaggatcgccaaaagcggtaaaaaggtcgtcgccatatggctcaaaatcccaaaaactggcctttatagaaagatcccgaaaaaatatttgggattgatcgggattcggtcgggatcccgggtatctgtcccggttgcttttcaaaaatctacgggatagatcggtatcgggattcgatcgggatcccagttattatctgtccggatcgcttttcgaaattcttcgtgattatcaggaccgggattcggtcgggataccaccgattccagctgtctggtccctaggggggggggggggaatgtataagtaggatggcaaaacttgataaacctcgattttaaaaaattatagcggacccgcccccccccctaaaaaaccgaatataaggcaaatccgccgtctgactctgtccccattttttattttaatgttcaaaaaacattttttcattttaaggtcacaatcccatcacaaagtaagttcaatttgagaattagaccggagatcatatacagaaaa

SEQ ID NO: 62890 - DNA, 408 bp, Heterodera glycines
atgcaagaaatggtacaattgctgggccatgcacttcttgaaaaccaaaaattcacatacttttgtatgtacatattcactaatgtaaaaaacattcgattttgagacaattccttttgttttgccaatttttaaatgttttgtcattaattgcaatggaaaaacaggaagaagtaaaattgttttttctgtgttctctttggcaaaaatggtttagccaaagactcacaaatcaacgtcatttcaagtcgttaagaaattcgtattttgaaaatctttaaatgcttccaaatttagcattttggcaattacaaattttttgtgttttgttcgaaaattttttgttcaaaaatgtatttatttttagtgcaatttattgggcattttttaataatattggttgattga

SEQ ID NO: 62891 - DNA, 622 bp, Heterodera glycines
atgctcagaagaagtgcagttttatgtctgaagagcggcacatatcttgctaaaggaaaacgagttcaaaaaggccaaatcaacaaaataaaggtcttttctgaactttttggaggtgccttgaccgctaaattttcgccagcaattcttttctttacaaaaaaaaaaaatttacaaggcccaatttttaaaattttttttttggccgattttgaaaaataaatatggttctattatacttcactttatgagtttaattgacatttatatcctatattttggtatcatttgaaagcattgacaaatcataaaattcggatggactcataatagaattataaattgcaggatccctacgccagcgctgacgaggagacgtgtgcagaattttttgccggaccaaccattgaagacagaaagagcaaattccaagcatatgtggccaaagttgaatcaaaagaccaggtgctgctgttggctgctcctttttgtgaaaaaaaaattgtattttctacaggtggatttccttttgaccaaaatcaaaggtgtaggaaaaattgcaagagccacacacaacccatacgcttgggcgttttctgatcactccagcatcgaaaaatga

SEQ ID NO: 62892 - DNA, 698 bp, Heterodera glycines
atggcattgccggaattggtactcaaacggttgtcaagcttgaggaaaaaggatggaaacaaaattatgccggctagtccaagttcgaaggatggcaaaagtttagtgggaagcgcagaattgccaaaaatagcactgctacgatcattaagcaaacagcgttcaaacagtgttcgaagggagagtgaaaagtcgccatttgatagcccaaaaccccaaaaaacaaaattggcacgatctttgagcaggacaatgttaagccttatacggtagtccgcatacgtatatggtagatttttacctgacacaccgcttttatgttcaattggcaccacattcattcagctttaagagataaagtaaaatttagttctaagaactagatacaaaaatttttgacaatgttacactggctaattttataataggttttcttaagtttacaaaaacattattgaaaattagccgcaaagaaaaagttgttttaaaatttctaaattttcaaaaaaaaaaaaaaaaaatttctctcggctcataagatggtgttaatttgtaaaagaaaattttttttagttttgaatgaggtgcagaaattactggcgacctaaaattttagctttttactgttgctttatatatttgtgtttgaatttaaggtcttaaggcaattttatagtttaatgggaagaattttctta

SEQ ID NO: 62893 - DNA, 155 bp, Heterodera glycines
aatattttccgcgaatatactttcttcattttcacaatattcctgtgcctgttcattatttttggcttaaaatatatgcctgaaacgaagaacaaaacattggcagaagttgaagaagcgattgggcaaaagaagcaaaatgaaaattaaataaa

SEQ ID NO: 62894 - DNA, 141 bp, Heterodera glycines
atgctttcccgttccgatgagcacattgcacatgcaaaaaaacttcgcgaaatttatctggaccgcccaattccgcccatggatgaaggcgtttttgcagttgaacatcacatttttggccaaaaacatggcaacggttgg

SEQ ID NO: 62895 - DNA, 1146 bp, Heterodera glycines
ttgaacgatttctgatgccgaacattgcgaaatttggtgtcccaaattttaattggttcgaatttttatggcacagtgaaatgttctttttcgaaaatatcgacagaatggggatgccattggctggtaaatgaacaaaattaataaattaaaaatagaataaatatatttttaattaatttatattttagttggggcagaaatgattgccaccggagcacattgtgaaatgaaaaaaaatttacaaaaacttcctggcgaattgtctacctttatggagaagccgaactcgaagggtaattaaataaaagtcaattaaatatgtttaataataaattattaattttaatttctgaaatctaaaatttatttagcttaaaaaatagattttacagtcaaaataagaaaaccggaagcttatccatcgtaaaaatgggcttttaatagaaaaattattcatgaaattagggaaaaatttagggtaatattaatttgtttttttttttaatcttcaaataattgctcgcttggcctattggtatggtagcttgcttttttggtttttcatcacaaaatattttgctttttcgaatgttgattcaattacttatttatcaatccaaccgtattaattagccattaacaattattatttaattattgatgcttaaaaatgacaaatttttaatttaaggagtcctttatgttgcatttggaacacatgttgattggaaatatgcacctgagcatctattaaatgcattttttgatgcttttaaccaattaattgattatcaaataatttttgcttgcaaaggatgtgaggaaaaaccgaaaaagtaaattattaaatataattttttaaatttaaattgcttaaagtttgaaccaaaatgtaatgattgtcaaatgggctccgcagaatgaaatactcgcacatccgaacacaaacgcattcattacacatggcggctttaagaggtaaatgaaatattaaaaatatttttgtataataaaattttaattttttttaatatatatttaattgggtaattaattttcagtgttcgcgagggcatttgtgctgccgttcctctcattataatgcctgtccttgcagaacaggtggaaaaccggtggacataa

SEQ ID NO: 62896 - DNA, 1014 bp, Heterodera glycines
atgtcaaacaaagattttgggcttttattgtcaaatcatagtgaacaggtgggcaggcaaaaaaaaaaaagtttatttgttcaaatttactatttatattttaaaattatgtatcttgatgaaattattccaattaaattaataatatttaattaaaagatttatatattagtgctcaatttttttaaattcagaaaaaaacaaattttttttttgctataagtttttttttgaaacctgatgattttaaaaataacagcgaactcttaaatgtaatttttttctgagcaatgttttgaatttctcattgaaaaatatacaagtggcgaaatttacgaaaactaaaaatgtctactttcgagagccccacattttgattaaaaagcatggacctgggtttatgcttatcatgggccagtaaaatttttgtgtaaattccagctaaattttagttttaagaactcctggaacttggcctgagctcaaaagtccttaacccaagtccatttccaaaattactcaataaaaccagtaaaattaaaatttctaaaagtcttggaacttggcctagcctgggctcaagaaaggacccaaatccaggtccaaaattacccaataaaaacccagtaaaaaaaatttaaatttaaaaaaatccttgaattggtctagacttccttgacccatgtcaaggtctaaaataatccaatctttttacccctaaaatattcaaaattcttgcttactcttcaaaaataggttactgaaattgtgagcacggattgggatttgattgtggtcgatgacattttttggtccttcggatttgcactcacaacaatgagacagcgattgtgggaatcgagtggaggaggccagggacaacgaaaacgaccacattatttggtctatgccacgtcagggaccagtgtcactgtgcacaattcgatcagagcgacgggtgggaaaaattaaataatattttatatttaaaaaatatttaaactatataataaa

SEQ ID NO: 62897 - DNA, 1730 bp, Heterodera glycines
atgaatcaattaaagctgttttgttcatacctacttattacaactgtgttactgcttcaaaatgttgtcaatgccgagaaaattttgtttacttttttccacgacagtggcagccattttcaatcaatgctcccaatgattgaaaagtgaatttttattttatttttgttttttattttaaaatattcataaatttattgacggttcaggttttacttatacccctcccaacaaaaaaaagattttgtatatgaatagggttcgaatttttaagggcgaaaaagttcaaaataaggcagtaaataagggcgaaaataaggtcgaaaaagttacaaatttaggggtataatttttaaattgttgtttttttaatgaaaataatttaaaactgtaaggaagaagctggctgggcggttaaaacgcggaaagcgggcgttgataagatccattgcccatttttattaaactaaagcaaacaattttattcattgattgcagttacagagatacatttcaaaattttcgggggtaaaagacatatgattattggcctaaattgatttctaaagttcagaggtgcaaaataaattttggagattgaatttttaagaaaatttttcatttcttattggtctatttttgaaaattttacggtcgattcatagggatacattttcctgaaattgtttggacgattcttggggggtgtattttcgcttttattgcatttttgttaataaattttggacaaaatgtcaaaatatgggcaaaaacttattttaagggcgaatatttaattacggattttatgggctaacatccaaaataaggatttctaatttcgaataagggcgaaaaacctaaaattttcaaacaaaaaatgtgtttttcgtgcatttctcgtcgagttaaagccggagaaaaaataagtataaacttaaaaccccggtcccaaaattatgaattaagtggctttcatatggtctctaaatcatgtaaataacatttgttttgacatcttttttcatttgcttgttattagatgaattgttcaggattttatgaatatttttgcatttataccccgtctgactcatttaatgatttattttaattttaaattttttcgaaaaatcatagagattacatacatacaacagcagatgtcaaaacaaatgtaaataatattcgtgatcaaaaagacccacattttttaggaaagaaaaattaaatataattattagattaatataaaaataaatatataaaaatattttatcatttttaatatttctccaaataaagcttctgccttatttatttaaaaattgtttcttagatttgccagccgtggacattcagttgcaattttggacacaattcttccagtggaaaaacaaaaaccgtttattcatcatattcgcgccccattaccaattgttccaagcaatgatgaggcaaaattaaataataattattacaaaactatacgatacatacagtacagtagaacagcagtcagttcttaattaggcaggaatgaaacagtttaattcatcagctaatctttgattgattggttagatggatcagaggataattacagattctaagaaaatgtttttttttattattattattatttgaacatttttttttgttgattgtttatgaaaaaaatgtttgcctttcagccaaaaaaaatttatttttcaaaaaagttgaataaa

SEQ ID NO: 62898 - DNA, 943 bp, Heterodera glycines
tcaattttggtttcctctttgaggtattatacgtctaatttgtatcacaaccgaagttggagagaaggatttttcaagtatggaaagtttgttcgccatctccccgagggcgttaaaccgacgcacatcgttgtgggcgcaggctcagcaggctgtgttttggtgggaaggtaccaacaaatagaaagaatagtttacctaacaattaggccaatcgtcttactgagaatccggacaatcgcgttttgctcgtcgaggccggtccccaagataattggtggaattggaaggtgaattctgatttgtgagaggttagcactgacaaataaacaaaatacactcagattcatatgccagcggcactgatgtataatttatgcaacgataaatacaattggttgggagtcgctgcactttgagcttggagtttgttgattccacattccaggatgtatttcacgatgcctcaggagaacatgaacggacgagtgctttactggccgagaggacgagtttggggtggttcaagttcgctgaatgcaatggtttacatccgtgggcatccgaaagattacgaccgatgggagagagagggggcgaagggctgggcacacaagtgaacaaagtcatcccagtattggtccgagcctttaaataccttcaggaactgtcttccttattcaaaaaggctcaagcgcatgaactcgccatcggtcccgacgacccttacaggggacacgacggaccgctctttgtgacccaagggaagtgcgagcatccgctccaccaagcctttttggaaagcggcaggcagcactggatcggggttacagaagatatgaacgggtacagacaggagggactcggggagatggacatgacgattaaagacgggagacggtggagcgcatccagcgcatatctgactaatgtgcgattcttt

SEQ ID NO: 62899 - DNA, 140 bp, Heterodera glycines
tcggttcatggtgctcccacttcctatccgactggtcatcgtgtgaagaaatgattagattagatatatcgtgagattcggtttttaataggagtcacatatgcatatgtatatttctgcgcgataaaatgcttttgttc

SEQ ID NO: 62900 - DNA, 1073 bp, Heterodera glycines
atggcagaagaccgaaaaggaaaacaaaaagctaacattgcaagcgctgttgtttggcctgctacaatagtgccaagaaatttgtgggtctcgagagtcttgacggaaaaaaaaattcaacttttattaggccaaaatagaacagcagcgcaacatggtgagaaaatgttaaaaaggcgtcacaaagtaatctctctctagtgattacataattaagtgtctgtgattagaagaaacaaacgcaatttggacggcctaatgagtgagtgttatccaaattgttattagcattaataccccgccggtgagggaatagagacacaagaaagggcaaatataaatttgaattgtgagctgccgaggcggggagagactttgggagacgtcgggtagaaaataattaatgatcattaactaatgagggaggcttgttaataataagcaaatgaggtgttggtataaatcatcaatcagtagcgcttgaggaggggggggggaggggcggagggccccccccagagaccgagaagaggccgagtgagtaccttcggtgcaggaaaattattaaattttaaaaattttttagttgctttttaaatatgccaaaaaatgtaggcttaacttttttagtgaaaattcgatcactcatattttttgttaattgagcagaagcgtaccaaactttgcagggatactccccggtaaaggactaacttacactgaaatgagcgccgagctagctggctcaaaaaaattttcgaaaatctgagtctttcgtttttatttattttttgcaaaattaattcttaaatattttttcagaaagggttctgaaacgcaccaaattttatttacatgttagtttaggcactctgatgctcagttcatttaaataatttttatccaaaaaattttttttgggttttcggggcagtccccctgaaccgatgcgcccagatttatggggagaccgaatccttcgggaatagcttccctatagtctgtactttaattctgcgttggatttttgctccccataaatgtttgagtaccccaaacggacactgaataaa

SEQ ID NO: 62901 - DNA, 556 bp, Heterodera glycines
  unsure (1)..(556): unsure at all n locations
atgatagcccttctactaagaaggtatttagttgtctgtgctgagccgaacctaaaaaaatctcaataatttaaaaacttaggaaaaattcataaaacttgtaaccaagaattttttaatgtcgagaatcgactgtaacttttttagaccctacttttttttattaaaaattatggagtataatataaaaatagagaaatcttatgctattgaattagataaaaagttatggagataaattaatgtgtcattttttatggaaatacaaaaatttaatgacgtttaaatacatgaaaattgtgaccggaaaatgcgtcagtggaaaatgtgttagtatagagtagtataaaaattttatcagaacttcgttctggattccgaactccggacctcaattttaagccgtttttaaaccaaaaatgctaaattcgaaaatctggtctttcgactttttgttcgagttcgggccggccggggttcggtattagcctanatggatgccggattcgtgatcagcgaccaaactcgaaaacccaagaaacttgtttttatggca

SEQ ID NO: 62902 - DNA, 175 bp, Heterodera glycines
aaaatctataaaaaatttaaaaatgagaattcatgcgagattttctggaaataagcttaatagggcctagttaagctgtaaaaaaaattggggcgatttgaatgagaatagaaagagccaggttcgatgaagttttggtaagccaaaaaaaaatccaaacattttttataaaaaa

SEQ ID NO: 62903 - DNA, 525 bp, Heterodera glycines
tataaaaaatttaaaaatgagaattcatgcgagattttctggaaataagcttaatatggcctagttaagctgtaaaaaaaatttggggcgatttgaatgagaatagaaagagccaggttcgatgaagttttggtaagccaaaaaaaatccaaacattttttataaaaaatttaaaaatgtgaattcatgcgagattttctggaaataagcttaatatggcctagttaagctgtaaaaaaaatttggggcgatttgaatgagaatagaaagagccaggttcgatgaagttttggtaagccaaaaaaaaatccaaacatttaaaaatctataaaaaatttaaaaatgagaattcatgcgagattttctggaaataagcttaatagggcctagttaagctgtaaaaaaatttggggcgatttgaatgagaatagaaagagccaggttcgatgaagttttggtaagccaaaaaaaaatccaaacattttttataaaaaatttaaaaatgagaattcatgcgagattttc

SEQ ID NO: 62904 - DNA, 527 bp, Heterodera glycines
atgtcaggtaatttaaaaatttttcaattcattgtcagtgacaacaatttttggtcggatattgactaatcatttgggcagctgcccgatgtcgtgttttgaaagtaaaaaaaattcagtacccctctccaaatagcttaaaaattagggtaaaaaccttgttgtttgccgggatggcaatgtcaacaaatttcaacggcgagtccgtgttggccaccgcaatcaccggtgtgttcacgtaggacgcctcacggaccgcctggtggtccaactgtgggtcggacaccacgagcagacgcggttcctgtacaaacaaatggttgtaaaccaaggcttttatgaagtgcaaagctttgggtacttttccgtttggctgccccacatttatttaaattaaaaacgttaaaaagcgcgatgaattttcaaaaacatcgcttcagctatttgggagtcaaaaagcaacaaattggcccagagtataatcgaatggatcagcatggcggttgacgttttttaaactaaataaa

SEQ ID NO: 62905 - DNA, 1655 bp, Heterodera glycines
atgcccgacctgtacttcttccgtgacccgcaagaacaggagaaggagggcaccgagggtgaggccgaggcggacatcaccgtcaaggagggcggctggggtgccaccggaggcatggacactatgggcggcgacttccccggagtacaggttcgcgtcaaaaatttatgccaaattgcagagtcttgaaggttttagccaaaaatcactggttttaaggatttacattttttttcaatcccggatggcttaaagagttgtaagcgataatttgatcgatagcaaagtttttgaaaatataatatttcaaacaatagaattattgttcctaaaatcaaaagagcacattttcttaaatttaatgctgcttaagacctctaaaattgaaaaaatgtaactttggacccgattttagacataggcgtaaatgtccgggggcgcaaatgtctggacacggttaatgggcctggcctgggtcgtctagttcaaaaatcctttttcggtcgtcccaacttcagctttttcacaattatttaattctaaatgtttcaggccgagccgatcaagctggactttgaagtgccgcacatcaccgactgggccgccgcttcgtcggattggaacgcgccgcccgcggagcagcagccgccgcaagcgcagcaaatggttgtgccgtcgcagccagccgctcaggcgccgtccgctgtgcctccgtcggcgattgcaccgccacaggccgccgctgttgcaccgccgccgccacagccgattcagcagcaccaaccgatgccgactcaggtgaaatgcttggttaattgtagcgaaaattgctcaacatgcatttgttgatgacctccttttcgacaaaaattacggggttattcgaaatgaatgttatttgcctacgaaaaagtacaaataatccaagacaaagtaatttatgagtgtacgaatttgggttttgttatttctgttactgattgatcatttgggttttgagtgtcacaggaaaaaaaattgttgctgtttgtcagcacacggttctcgagcagtacaccaccgctcaattatacctttcaatttgtgatttttcctatgtttacactcaaattcggttgcttttttgcagaaagtgtcgaatttccatttgattcaatgacgaaaggaacttcatcgtttggcaagcgccacaacaaaacccacacgctgtgccgccgctgtggtcggtcctcataccacattcagaagcacacctgctcgtcctgtggctatccggcgaagcgaaagcgcactttccaatggtgggtttttggcaggagcctcggcatttgcggccccaacctactcatttaaaaaattaactttgttccatataattttaaatcgaatctactatgcatgatatgttctatatttaactattttcttatcagtacaagaataattccagacgttttttgttaataagcgcatacattaatgggattggcatggatttcttcgatgtatcactggccgatgcagaaattcaggattagtagaatggatagaaatttcaagctttgttggggccttgagcaagcccaattttgttgaaaaaaagttagaataatgttcatgtaaattttaaaaagaagaaaaatctggtaaatgaa

SEQ ID NO: 62906 - DNA, 1079 bp, Heterodera glycines
ggcactacaacaaattcgtcaatttgtcaaaaatacattgcctgaacccaaaaattttcaacaaattgaaggcctggacagtgacaaattcacacaattttatcggcgccgcgacgacatctcaatcgtcaaagactgcctgatgttcggcgaccggacaatcatcccaaaatcggtgcagaagcaaattttaaaaatgcttcatcagggccatccgggagtcaaacggatgaaatctttggcccgaatgcatgtctattggccactgatggacgctgaaatcgaggcgttcgtccaaaaatgcacttcatgcgcagctatcgccaaaaatccgatcaaaacgacactgcagtcatggccaaaatctgatggcccatggaagcgcattcacatcgattacgccggaccatttcatggaaaaatgtatttgattgtcgtcggctcattttcaaaatatccggagatatttgaaatgaattctacaaatgcatcggccacaatctccaaaatgcgctcattgatcactcactacggcatcccggaaacaattgtttccgacaacggcactcaattcaaagtcaccaattccaaaatttcgtcaaatcgaatggaattgaacacatttttactgcgccgtacatgccacaatcaaatggccaagccgagcggatggtcgacaccttctagaggacatttgcgaaaataaaaggggagggagttgacggcaatgtgctcgacacttttctactcacctatcgcaccacgccatcagaactcttgacggaaaatgcccggccgaattatttcttggccgaaagcctcgaattggcctcgaccttctccggcctccgccgtcaattccaatcataaaggacggtaaaatggaggaccaattcaacaggaaacacggcgccaaattccgatcatttgacattggacaattggtcttcacacgccggcacaatacagcggattggcgacccggcaaaatcatcgacaaaaagggtgtaatttacaccgtcgaattgccgaacagttctcgcggtcgatttcatgcaaatcagatccgcacacgtcaa

SEQ ID NO: 62907 - DNA, 280 bp, Heterodera glycines
caatctaatttcttgcagattgaaagccatccattgcctgccggttctcggcacagcaaagcactaatagggtgtttgactcacttcaaaaaataattccttacccaaaagttttttacaaccacttattgccaatttaatttcttgcagatttaaagccatccattgcctgccggttctcggcacagcaaagcactaatagggtgtttgactcacttcaaaaaataattccatacccaaaagttttttacaaccacatattgccaatctaatttcttgc

SEQ ID NO: 62908 - DNA, 1624 bp, Heterodera glycines
atgatcacaaattttggttcctgttcctctgttaaacacaaagttggacctacaacgaagcgtaaaaatgtgcaagtggtcgtcagaacacgtcctctcagtgaaatggaacggaacgagcggtgtaaaaatattgtttcatgtgattccgtctccaaagtcgtttcattgaaaacaaacacatgcgacaaatacagcactggtcagcgccaatttggagtgttcgataaggtcttgataaactcgaattgaatatttatcattaacttataaaaaggcagcttttaggtttatggccacgaatcaactcagatccaagtctatggtgatgtggttgctccattgatgaaagaagttttgaatggctacaactgtacagtgtttgcgtgagttatttaaataatgttacttttagagggcactttttaccaaaaaaaaattctcagatatggccagaccggaagtggcaaaacctatacaatggaaggccgccacgacgaaagtggagctttttcttgggattcggacccgacctctggcattattccgagagcactgcatcaaatattcacagagctcagcaacgaagtctgtctaatggagaaaagagtgtaatatttgcgttgcaattatttcttttttttgcaggacatcgatttcaccgtccgtgtctcttatgttgagctttacaacgagcagatttacgacctgttgagtctcagtgaaacttctcagtgtgaatcgctgcgtatttttgatgacaaaaataaagttttttttccaaattttggcggcaatttattttcccttagggggtttctattgttggcgctgaagaagtcattgtgcgcacacgcgacgaggtgtacgacttgctaagacgcggtgcagacaaaaggcgtactgctgccactctgatgaacatttcttcaaggttttgcttattttgttgcccattcacaacgatcattcgtaatgccttttagtcgctctcattcggtttttaccgtttcggtgatggtccgcgaatcggggctggtcaatggcgaagaaatgttgcgtcaaggaaaactcaacttggtcgatttggcgggctcagagaatattggacgctcgggggcaactgataaaagggcacgcgaagcgggtgagtttttgtcttcgaagtatttttatgctaacttcagtcgcttgatttgtgttgcttcaggcaacatcaacacgagtttgttggcacttggcagagtgattaatgcactcaccacaaatgcgccgcatattccttaccgcgaaagcaaattgactcgaattttgcaggattcactcggcggcaaaacgatcaccacaattattgcgacgctttctccggcatcgtcaaactttgaagtggaaataaatcggaggcaagcaattaattggcttaagctcatttcaggagtctgtcaacactcttgaatatgctcaacgtgcgaagaacatcaaaaacaacccggaagtgaatcagaaaatcacgcggcgtggacttctcaaagaatacaatgaggaaatcgaaagacttcgtcgggatttgttggctgctcgagaaaaacacggaatttttttggacaaggaaaattatgagtag

SEQ ID NO: 62909 - DNA, 872 bp, Heterodera glycines
  unsure (1)..(872): unsure at all n locations
ctcccgtcggccaactcacggaatttatcgtcgatgttcttccgtccgatgagggagacgacactgcttcagcaccagtgattgaacagttaccgaaagtgcaaattacggtaatgtaaaaatatttaaattaattcaagacaattggctggtaatttatcacttgctctcaccaaattgnatcacttttaggaccctcgtggtgatctgttgcccgtcgacgttgcggcctatgaagaagagccgtcgcgttccgttgtgcgttatacaccgcaaacagtgggcaatcatcaggtaaaatgaatgaaatgtttacactttatttaatacatgattttcaatatatttaaataattaaaacgccaataattcaaatcctccgacggaatttttggcaccgctggtgccatcaaacacactcaaacaccaataattgggagaacttttttctgtgaaataacctagtctcttcgtctttgtttgctatgccaaaaataatttttgattcattttttcgttaaattctcaatttataaaattaatttttaatttgtttgttttttccttaaattctttttcacaaaaatttctcttttttgtttagatttctgtacaatttgatggtcaatctgtgcccggttcgccttttacagtgaaagcttttgatgccgaatgtgtcaaattgacacttgaccaaccagcaaaggcaattagtcattaattgtttcgtatttggatttaaattacccaatttaaggtcggtcgctcgtgcacttttaccatcgatgcggcaaaggccggggcggggaatatgtgagaaaaaaggatttctaaatcaaaaacgaaaacctaaattctattttttaaataaa

SEQ ID NO: 62910 - DNA, 398 bp, Heterodera glycines
attactggcgttagcatcatagctgtgcttttccttgtctttttgatgcccttgcaaaatctggtgcgcttctgatcagtttataaaaaaaagttaagcctaaaatttttcgcatatttaaaaagcaattaaaaatttttagattttttattcatctccctttttgatagagaaagcatctgagtgcctaaataacttgtatataagatttggtgcgtttcagagcagtttctgaaaaaatatttatgaattaattttgctaaaaaaataaaatagtgacgctttaaaaattaataaaaaattttaaattcagaattactggcgttagcatcatagctgtgcttttccttgtctttttgatgcccttgcaaaatctggtgcgcttctgatcagtttat

SEQ ID NO: 62911 - DNA, 848 bp, Heterodera glycines
atgttcagaatgatcattgacgcatggccagccttctcaccagcgtccatcacaatggacttcgaacaagcggcgatggacgctgcggccgcagtgtttccgggcgctcagcttcgagggtgcctttttcatttagtgcacaacatgcacaagcgcctgatttccgaaggacttcaaaatgtaagtttcagtcccaaaaaaaaagaaatagtctcccgtttagcgctatcgaagtgaccccattttcgcagaaacggctcgtatgatcaccgcgctcgcatttgtgccaattcagcatttgactggtgcaattactgcgctgaacgatgttgtgggacaagaactcgaccaaattctggggtggtaagttttgtcggaatttgccaatcatatggttattaataggttcctcatcaactacaccggtgttcctttgccaaatgggacccgcacacgtccgcgttttccggtgaattattggaatgtgcatgaacggactgtcaacgaagagcagcgaacaaacaacatcgcggaagcagcgcaccgtcgactccaaacaatcttcagctgtcgctacccgtcaatttggcgattcatcgatgtccttcgaatggatcagcgtgcgcgtgacgccgattatgtgagctgcgtgaacggtgaagaaccaccgatgaagaaaaagaagttccgaaacgcggacaagcgcattttgaatattatcgaaaattttgatgcccaaaatattgttgaatttctccggggaatttcaaataattgtgttatggacccgtaatttgattttgttcatttgagattgttaattttttatgaaaaaggattttaataaa

SEQ ID NO: 62912 - DNA, 436 bp, Heterodera glycines
atgaacaacaattttgtcaaaatggtcaccgaacacacacacgaagcaaacattgccaatgtgaaagcaaaaaaaattgtcacggggatcaagaggcgtgcggcggaatgcatggaattgccttcacaactccgtgcaaatgcaatggtcaacgtttcaacaccggtgcttgctcagttaccaagtgccaatggaattaagaaggtaacgaaaagcagacacatactattattttttgctttgtttttagattgtcaaacgtgtacgccatgaaattgtagctgcaccagcggctccaaattctattcacgacctccaaattggccaagcatatcaggtgtacaagcgcagtgaaggagttgaggaggagcaatacctactatctgactctggcgttttttcacttaatgccgacaattcccaacatcggtattaa

SEQ ID NO: 62913 - DNA, 213 bp, Heterodera glycines
acacatcgatcagtgaacattcactcatcaaaggaacagcagcaagagcgcaggtgacagactcagcggaagcaccgcttaaccatccgttcagccgcttcacctccccccccattcggttcagacttcaacaatgacgaggtgtagtgtgttcgtgcttacccttttgggcgtcggaatggcccactctctgctgatgagcggcggttcgga

SEQ ID NO: 62914 - DNA, 143 bp, Heterodera glycines
gtggaattgaaaatggaagaattgtgagaaaaacacagtaaaacattagaaatttataaataatcaccgatatgattttggtctattaaaaattttcatttttttgtctaattattaattgtttaaagataaattaggacttc

SEQ ID NO: 62915 - DNA, 972 bp, Heterodera glycines
atgggactcgcgaagcaactgaaacaagagcttaaatattatcataatttggccttgatccgaaattggaacttttggagttcctctgccacaattactttgggtgaaaagcaaaaataataataataataataatttgatttttatttttaatatgtttttttcaggtgtcaccccgaccaaaatcaattctgtccgcgccgaaaagggcttcaataataaaataaacccagtagatatagcgaatgcacaaattttccatgtccacatgctcctgtgagttatgcgataaattcatgaagaatctgttagcgatttttagaaaaaataaattgattttttcaatctgagtaatcaatagagcccgggttttactgcagcatttgctgaattttttgctaactttgggcatgaaaataagcatgaaaaacgcatttctagcagggtttgaggcttcctaagtcatcagaagggcgaaaaccacttctctgacgaatattcagataaaagtgtctagagtaagtaaaaaaatgtatgataacagaaaaaaataaatatatgaataaaataagagtcaaatgggtagtagtgaaagaagacattgatattaggattggagaagaaggcagaaaacttgaaaagtccgatctctatcaaggaaattttggtattaaaaaatacacccttaagaatcgaccaaacaaaaaattttcgcataagtcatgtacattttttcatgcatattttgccattttttgttcatattttcagattttttgcatattttgccatttttcgtcaaatattttccgatttgaatatcccttaagaaaaattttgattatgccaaaaattaaatccaaatctgaatgaatgggcgagtgagtcaagagtgaacttcactgccgaaaaacttgaaaaatttttgatttgaaattacaaaaacaatcgataaaatttatgaggaataaa

SEQ ID NO: 62916 - DNA, 1133 bp, Heterodera glycines
atgattgaagacttagcacttgaagtacgcgaaatgaaaggtaataggaatttttcttaggaaatcatcagtaaaataaattcttttaaaattttgagggttcatttaaaggttgaggtaattgtgttgtttttttaaccctaatctccctattccatttcagattgctggcgacactgagcgaatgaacggaattggtgggactcgagtggttctattacagaaaacaggcctaacacccctcttcccattttcaggactgccggccgaccattggaaggcaagcgactggcgacggaggacattggaccggcaccacgacgcgatgaaaattggcgaagcacaagctggagacaattcacggggacgacattcacacgcggcggacgaggaggaagcgctacaaagtgctacaattgtggacgaacgggacacgtggcatgtcatgccaagaaagacggcgagatgaccggagttgattgagaggaataagagatagtggaaaagggggctttggcaaggaaaatgagtgtgttttgatttgggggtctaggttttaaattaaaataatttcgctaatttacataggtaattaaaaatgtcaaaatttcatgcttcataggcaaaatttgggaattgttttttcatgtgcttcggcagtaaaaatgaaaaaagtcctgatcagttctcgcagacaaaggttgatggctgggcactttgccagtgatgcctgagtcttgaactggatcagggacgatccaatgtacggttgggagtgagtgacacgaagcataaaattttgatttaaaattggaaaaagggcatgaaaattagcaaaattatttttgaaataattttctttgcttaggcaaattttgaagcgaaaatcttggtaagagaccagggacggtctttggtaaggttggaggtgtaaggtagatccgggttttcttgtttgccggccgaagccctatgaatttcacattctcacatttatttcatttcgcatttaatttcccttttgcttattgtcgcccctttcccgacgataattgatcgatcacatttcatttttcacgtgtatttaatgttcgccatttcaagcgaagtatcttcagtctctccggaataaa

SEQ ID NO: 62917 - DNA, 259 bp, Heterodera glycines
agtagcgcggccgtgcgcggtggacgtgctggcgttgggactgggcaatttgggagggcagatggggaacattgggaaggaactcataaactcccgaaggaagggccccatgggatgatcaagcccagggatcccatcccgcctttgatggacacactgggataagtggctttattccggagagactgaagatacttcgcttgaaatggcgaacattaaatacacgtgaaaaatgaaatgtgatcgatcaattatcgtc

SEQ ID NO: 62918 - DNA, 54 bp, Heterodera glycines
aagcactcgtgttgtgctcttcaagattctccaataaagcactcgtgttgtgct

SEQ ID NO: 62919 - DNA, 597 bp, Heterodera glycines
cggtgttattcgccctgcttaaattccctacacctccgttttgctgttgctgtaatgccgccgcatctcgagctcgttgtctggtgaatggtggagagcggttaatcatctttacaacacgagttttattggagaatcttgaagagcacaacacgagtgctttattggagaatcttgaagagcacaacacgagtgctttattggagaatcttgaagagcacaacacgagtgctttattggagaatcttgaagagcacaacacgagtgctttattggagaatcttgaagagcacaacacgagtgctttataattcggtgggatgcatgaagattccaacacgaggacagaaaaatgataatgtcgatatatgataatgtcgataaaatccaaaatccaacacgaggattatcgcaacttatatggccgacgtaaaagttttccgtttagtcgtcactaagcaagccaaccttttgttgcaggagcgccaagttgaaaaaaaaaattgttttgcgtccacttttcccaattcaaatgtcaaaacggtgattgtcaacagttctctgcgatctgtctttacaaaacaaaacaaaacacaa

SEQ ID NO: 62920 - DNA, 960 bp, Heterodera glycines
atgtgcaactcaatccgaagtgagacggccattcccgaattggccgaactgaacaaccgcccgggacattcgttctgcatgcgcagcaccagcttctggcagaacgcctgcggactcccaaccgcctcttgcctcttttacaggtgggcggcggtaccgacaacgacgacggtgttcgaggagttcacttgcctcgaatgggacatgcagatcagcgcatgggttgagctggaaacaaacagtggccaagtcgacacacatcggctgactctacacccgggagtctccgagcagtggggaaatatgaccatcgcggtcgtccccacctccctcccgccaatgccggcactttcggcacatttcattacggacggacgcgctgtggcaatggggaaatcactcccctcggatttgcattgcttggatgaagagatggcacgaagcttcgataagtgccagctttcgatcggcgcatgccaaaaatgtgcgccggatcacgacaacggcaccatccattgtcattgccgcgacttggacgtgggccgagtcatgaacaacccagagcaacgactcccgctcgacgtcgcccgtttgcatctccataacaacggcccgaacgtccgaggcgaatttcagtactcacctgtgcaggtgcatgtccagctcaacggcctcgaattgatcagcgagtacagcaacaccaagtgttgggtgacttcacccaaactcagcggatgctatcgatgcgtttcgggcgcaactttcaacgcaacatgccgaaccgactacggcaccgccttggccaagatcaaatgcgcggacggcacgctttttgcctttcactgcggcggaaacgaatctacgacgaccgaggcaattccgttcgaccgggccgaggtgttcgccgagtgcaaaagtgaagtgccccggcggggcacagacacacatatccgaacgtaa

SEQ ID NO: 62921 - DNA, 1414 bp, Heterodera glycines
atgaccattgtgcgtccgatggtcggcgttgacactggtgaatactcttgcgttgcgcagaacgaatttggccgtgaccgatgcgcctgcaaaagcatttgcggaggtacaaataaccgaaattccaccgagattttatccccaggcccaaaaaacccagaaattgtattccattttcagatgcccctgaacgcccttcaaggcccgacgttgagctttcctcagacaccgaagtgtacgtctgttgggaagcgcccgaacgcctgccggtgaccctcgaaggcgtcatgtacaggtcggtgtagatggcatacgaatttgggaattaaaagaattttctattttttctagtttaaaccttttagactcgaatgccgcccggcgggggaaaaggatgccttttcggcatggactgtggtcagcaattgcgtggaggacgaagcagccgttgtaaagcatttgataccgtaagagaaacaaacttaaaattataggaaaaatttgtatgaaggaaaacatcattatattttatctgggagctaattaggcctaattccaaaatgttctatccacattatcaacattctctcattttcagaatgggcgtctaccaattccgcgtgacggcacacaatgaattcggctggggcaccccttcgatcacttcgcgcattattcgcacccatccgaggggtaattaaaggaaacaattaaattaatttaaaataattaaaggtatcccgaaactgaatttggatgtgctcaggcgggaaggacgacaatttacagtggtgacaatgccacagaaaacggggcgcaggggagccggcctaacgcaaatagcggaaggttgccccaggggaaagggtttaattagtaaatttacttatttatttatattttaacatttaatttgtatttaaatttaattgactcccaaaattaaaacagattttatggaggaacaacgtgaggaagagggaagggaagaagaggaagaaaatgatgagcaaatgggggatgaaagggcggaagagaaaaatgggaacgaaaacaacggaaatggcaaacaacgaacggtgccattgaacaccacggaggacccgctgaagcgctttcaggtcaacaaaagccactaattgaacttaattaatgttaattaacaccctttcaaattcgactcccccccccccccaaatttcagttggaatcggaattgttccgcggtcagttcagcgtcatccgttacgcggttgactccaaaacgggcgcccattgcaccgtcaaaatccgagcggcgcccagccacgggtcgctgatgttcgcggcgccagcggaacgcatgcgagccgcgcgcgctgagtacgaaacgctggcggaatgccaaagtgcgaatgtggcacgccttatagcg

SEQ ID NO: 62922 - DNA, 1347 bp, Heterodera glycines
  unsure (1)..(1347): unsure at all n locations
ttantcgagcaaaccaaaggcacattagtagctcttatatctttaaaaaaagaaacaaacaaataaaattgatcaaattaaaactacaaaaataccgaaatataaatgaaaataaaataaatcaaatgttgaattcacaggtgattataaattgtaaatgtggcacagaaatttcctactcagaactcattgcttttagtaaatccctgaattcctttgccttattaatttgcaccgctaaaactggaaggttattccagtttcttactatcctatggaaaaaattattttgagttttggccgtgtggcgctttactcgtaaaagtaaaggcctcctgggcctttctgagaaaaaaaaattttgctcagcatcgaggctggtgaaccctttgattattttaaaagctgttgttaaatcattgatttttcttctttcttccaatttgtgtaaatcagtgattttaagtctttccatatattttttgtacacaaatccacattttcgaaaagcttttcttgtgaaaaatttttgtacccgttcaatttaatcgtattaatataattaattaatttgtttcgttaattggcttcggctgccactttctttcccttccctttttcggttgacttcggccgcgcccgtcgcttgggctcccgggaaggcgccgccggcgatggccaactgatcgccgaatggacggcgcccgaattgcttttggcacgtcaaaacaatggcacaaaagcaaagatcactgatgagggtgagctctaaaaaagggtgagaataattggctcagtttatggcgctttttaggcccaaacggcgcgggcaattggccaaacgcacagacggacatgtggggcctgggactgtgcacattttgcctgtaacgaattggccattcatcaaaaatttatgacccaaaaaatgcgcacaattcacagattggccggctttcatcccttcgcggacgacgacgacacggagcaggacatccgccgccaggtgcttgagcaccgctgtgacccgaatctgatccctgtgcaagcgtcggaagaagcacttcgcttcgtcacgtgggcactgaaaaaggacccgcggtaaaaacggatgagaggcaaaaaaacagattttgacgggtgtgccagagatttaaaaaaaggtttgtttagtaggcgaatgcgccctgacgaagcgttggaccaccgtttcctcgcctccgacgcggcgatggttcgtcgtcgggagaacattcgctacgcgtcccatcggctcatgcggacggtccaacggcgagttcggcagcaaacgcaattcgcgaggaacggaggagcggcacgggacgg

SEQ ID NO: 62923 - DNA, 1659 bp, Heterodera glycines
atggacattccaactttcgctgccaacacaacagcagaaccagcagaaccgaacgaaatgagtacggtagttgaaggtggagcagagaaaacggtaattaaaggcggaacatcccccccccccttcccgcgccccattcccgcgccccacgccttaagaaatgcaaaatctaaaaatttccaaaaaatcgggttttatgaatttttacgtaaattaaaattccatatgttttaagcaaatgttctctaattatgatttataaatgatcattatccaaattcaaccttccctcccccaattatcagttgttcctcccctgttggtccgtgcttttgtgtgccgttgtgattgcttcagttgccgccgtcagcattttcctcaacacttttctagttttcgtcaccgtccaaactaagtgtgtctttggtatatcttttgtgccaaatttccccaatcaaaaggcaattgcatggctctgccaacgcacttttggcactcaattcgttgtttgaagtgttccatgcgttcggccacttcgtctttctttgcgtcgccctctccgatcggtgctctcccctctcctaccgtaactcctaccgttcgttgaccctttcgcttttcggccttttcgccgcttctttttctatgcttttctccggcttcgatcgcctcttttgcgtgtttttcccattaaagtcaatatttttcatctgttttattgctttatacctttttttagttactttcgcttctcccatttttggcgctgttttgccattgctttttccctttgtgccattccgagcgttgcgctgaccgtcgcattttggcgccggggcgaagaagtgccaacgatggaagtgaccggaagcattggcgacttgatcatcaatgttctgttaaattatattgagttttaaaatggttttgtgttcatttttaagggtggctttgccttcgctttgtacagcttcgcaaagttcgcctgcacaagtggaactgtccttttgtacgctttcctcgccatttggctgtggcacaaacgcagtgcgccgttactttatttttttactaaattaatttattaaatttgacttttttgaagatgaccaaattcagtcgatggcacattgtgccaaccgtcgcattttcgtctctctgttcgtcatcgttctgttcaatgtcggcggttattttctgatcgccattttctaccttttttggcctccttcggcccatccctcggcacagttttggctcgttcgaatggttctgtcaattccggccaatttgagcggtgcgtccaacgtgccgattcttttcatgacgaggcgagaaagagacaaaatgccatccctattcttactaaattttctataaatttcacagctcggactaccgaaaggcattcaaaaagcaatgccaaaatattttgcttttactcggccaaaatcgaaacagtgccattcatccgacgaccgtttttgtgttgccacagaggcaaaaccgacaaagacagcgacagaatgtgtttgccagcagaagatgatcaacggaggaaaagaagcagtggccaaaactgatcagagaatggatcagcagctgagggcaaaaagtgatcaaaaatttatcgaatcgatttgggataaataaaaaata

SEQ ID NO: 62924 - DNA, 964 bp, Heterodera glycines
atggactttgtggcgcttcgattgtcgcgactttccgaatcattgcacagtgaaaacatgtgcattttgtgtaggaaatggaaaaacaattaattaattgcaattttctaattgaggccgaagtgaacaaattacggccgaccgccaaaaacattgtcaacgaaacgcacgcccgctgggattcgtatttgaagcgcgagaacaccgatacatttctgcccagcaaattgacgaaaagtgtttgtgagtaaaagttgggcaattaaataaataaattaattaattaattttaaataattaaaaaaatatatataattacaattggcattttaaaaaataacattctcacgtttaaaattgtcaatttttagtattttttaaaatttatttttcagttttcaatcataaattgggcgtcgcaattttccgcgacgaaattccgccaaaattcgaaagtgtcgaaaatctctccggcggcattttccaattgtattttcacggcacttcgggtcgtcaaagtgcggtgaccgtgcaaaaactcgacgctctgttcatccaaactgtccgctcgctgttcggaatgccctctccaattgcgtgccatgtccacggattgttctaccgatgcgaaattaacccgggcaatcgccgtgatccgatatcctatggcaacttgttggacttgccattcatggccaaatttgaggtgccattatgtgcgaggaactttctgatcagacagaattggcaaaaatcctttaaactttgataatcagagtgatcatttaagatttggattgatgacgtcgtgaacagacgactgatagagcagtcgttcatcgctgaattcaagaatcagatcaaagcggaggaaattcccatccgattgcccttccgattcaatccgaacaatttgcgggcgaagaaaattgtcaaaagtgtggaatcactcagcaaaaaatga

SEQ ID NO: 62925 - DNA, 429 bp, Heterodera glycines
atgtatattcaaaaaacatttgaagcgtcaaacctaaatgagttggaaaagcgtaacaatgcgatagtaatatcaagaatgaaaaaaattaaaaaatgcacaaacgcagtgaaaattattttataatttaaaagaatacaatataatagggtgttattacagaagagtgaattttaaaaaatttgcgtataactaaatttatagcaagacacgcacgtcgatctgaaccgtgcaattggccaaccgctcgcttcagttcttcgaagtttggcacaaattgcttattcaaaaatgcaaaaaaatatagtcgataaattaaataaacaaataaaactttaaaactaaaatttgaaaaacaatcatttctaaaattgaactgattatagattactagataaataagtctagagcataagacaaatcaataaa

SEQ ID NO: 62926 - DNA, 661 bp, Heterodera glycines
aaaacaaaaaaatcgattttttcaagtgtccgtttggggtactcaaacaattatggggagcaaaaatccaacgcagaattaaagtacaggctatagggaagctattcccgaaggattcggtctccccataaatctgggcgcatcggttcggggggactgccccgaaaacaaaaaaatcgattttttcaagtgtccgtttggggtactcaaacaattatggggagcaaaaatccaacgcagaattaaagtacaggctatagggaagctattcccgaaggattcggtctccccataaatctgggcgcatcggttcggggggactgccccgaaaacaaaaaaatcgattttttcaagtgtccgtttggggtactcaaacaattatggggagcaaaaatccaacgcagaattaaagtacaggctatagggaagctattcccgaaggattcggtctccccataaatctgggcgcatcggttcggggggactgccccgaaaacaaaaaaatcgattttttcaagtgtccgtttggggtactcaaacaattatggggagcaaaaatccaacggagaattaaagtacaggctatagggaagctattcccgaaggattcggtctccccataaatctgggcgcatcggttcggggggactgccccgaaaac

SEQ ID NO: 62927 - DNA, 923 bp, Heterodera glycines
cggattcggactcgggaaggccgagaacagaattggaaagtgaaccaattgttggacaagatgaggaggaagaaggggaggaagaaaatcatctttttgttgaggatgacgagaaagaagaggaggattatccggaagaaccggaagaactgcgagcattgagaagagaagcggaagaggaagaagaagaacgagagcaagagagagaagaggaagaagcgagagcggaagagggaggagaaagtagtcaaaagaaggaggaaggaaaagatgaagaggaagagagaaaaagaggaaaaggagaggaggagcaaaacggtgaagcaacggaagaagagaaaggcgaccaaaacgaaatggaaggccgaactgaactcgatgaagctgctgctgatcaggacgggacaaacatggaaattgatgccaaaaaagaagccttagttgaacatgaacaacatggcaaagaaaagaaaactgaacgggtcgcagatgaacatggcaaacttgggcatgaaaaatcggcacaccagcagcaacagcagaaacccttcatgttgggcgtgtattcggacgaattggaacagattctttacggcgaggcagctgtcaaaattcagagtgcatggcgagggtatgccgttttggattttcggcatgactaatgactagggcatccaattatgcatatttttttcctggactgtgggaggcctgaaacgcacgaaaaacatgtttttagcttggtttgaagcttctaggatgactttccatatgcatatttgtgcatatttcgcgatttatgtgcatatttggacagtttttcaacaaaacctctattaaaacggtcccctctattaaagccgccattttggcctctaatgaccgaaaaattttcaaaaatgtcattttttgggtattttcta

SEQ ID NO: 62928 - DNA, 1685 bp, Heterodera glycines
atgacacaaatggttgcaaacattgtgactgtgatcttggcggctctgaagtcagtgcctttaattgaaaattaaaaaaaattattattaattaatcattaaaaatgaaaaagtttattattattattataaaaataaattccgaattttttttttattaataacttaaaaattcaccgcattttttattttatttattaaatattttgtcaatccctttttgaagagtacccattgcactgctgaagaaggcaaatgcaagtgcaaaccgaactttgaaggacgccgctgcaatataaccaccagtggttattattgcccaaccatcgacgaattcactttcgaggcaaaaaaaagcaaaacacaaaaacaaatttccaattttatttaattaaattgatatttaaatatattttagggttgcttcccgaccgaccctccgggagagaaaaaaagtcgggaaacggggagggaaattctcacaaaaatttgtcggggatggctgtaagaacttaaaaaaagatatcggagaacgacagcaacagtgttggggaataatttcataaaaagttgaaaaaaagagaaccagaaataatttatttaataaatttctaatattatgtatgattaaagctttggtaacaacctaccgtgatcttgagtcgagagtttcggtcttgactcgaaaaaagtctcgaattttcagtctcgattcccgagacttttccaaaccacaatatttggctgttttcagccaattaaataatttaaaaaaaacaaattatttttccaattttttatttgttttcatcttcttcaaaaaaaaacatttgcaggcagaatccatcctgtcaataccaaacaatgccgaaagtgtggtgcgcgaatcttcgccggatcggcctcggacatggacgggcgaaggttttgttcgagtgcgcgagaacacccacctaacatttgtggtaaaaaatgaaatttaacaacaaacaaataaaaataactgatttaaaacaaactttgcaaaatatttaagtattttttaaatttaatacaaattagcacaattcccaattaaaaggtggacggtctgacgaaaagtggccactacaatttggttgtgcgctatgagattgcgccagacggtgttttttctaattttttacttatccaaattataattcaaatccgattcatgttttcagacccaatcggatgggaggacctcaaaatcaccattgtccggcccggagaaccgagccctgacagtatttgtgccaatgccttgccatcggacgatttcatatcggctaggtgtatacaaaaaatacacattttaattttaaaaaattctttttttaagactgcctcctcggtcccgcttttacgaaattcaccctgccatttgtctggaatccgacactcgctacgaaatacggctttactttggcgagaaacggcgcaacgcaccggacattcgtgcgcatgtaaattttataacctcgactatttatccaccaacttgtccagggtcaataatttttatccaaaaattcttttggattcgtatattaattacagactgcgaagaattgttcgatatatttttcgaccattcctccacttttagacattggatagtcccaaaaagatttttggccacttcattcctctggatcggataa

SEQ ID NO: 62929 - DNA, 832 bp, Heterodera glycines
aattgaagttgttggggaagtttcaagtgtgacgttctgttcagaggagtcacaatgcggcttgaactttcagtggcagacaccgaagcgccgagcatcatgggattggattggatcatccctttcgagcgtgccacccaacagccagtttcaaggcttccttcccgaaggtgtttcaacctggcttcggacattgtgtgaagacgaacgccacgctgcattttaagcaaaaggtgaagccagtgttctgcctgtcgctgcggatgacagccaaagtggaatcggagccacgatcagccatgtgtttccaaacggagtggagtgcgtcatcgagcacgccagccgaacgctcacccccgcggaacgaaattacgcccaaattgaacgagaagcgttgtctttgatcttcgctgttcaaaaattcacaggatgatttacggtcgtaattttactctgttaacggatcataagcctctcttggctatattcggtaataaaaatgggatcccgatctacacggcttcccgattgcagcgttgggccctaattttgtccaattatgattttacaataaaattttaaatctgcaaattttggacatgccgacgttttgtctcgactgatttctgagcaccggacagactaagaagtcattgttgcccacacatcggacaacgacgtggacagcactgaagaagtcgaatatgctcttcttgtcaacttggagcggctgccggtcgatgcaaaagaagtgagcgaattgacgatttcggacgatttgttgcaggagatggcacaattcgtacgttccgggtggccaaacaaatgccca

SEQ ID NO: 62930 - DNA, 997 bp, Heterodera glycines
atgcttttaagtcccaccgtgaggcgggacagttccaaaatttgtaccacattttactgtggaaagtccaagtaccttaattggacaattacttgtcaacgaacacagtcgcctttggcctcttatggaacagaaaagggtggatatcagatggggtgcgtcccttcctaaaaatttctcttttcgtctaaccatcccccctttttgtgcactatttcattttcaaaattgggaacattttttgtttgtttttttgaaactaaaatgtaaaaaatttaataattatttttgatttaaataatgcttctgtttcgaatcttttcgctttaagtaattaaattgtaaaaatcaaaactaaaaattttcctctgaagttttgaacttggctttaccctgcttttaagtcccgccgtgaggcaggacagttccaaaatttgtacaacacattttactgtggaaagtccaagtaccttaaggactacagaagagccaatgccgcagtcacctttggacagttattaaaaagaaataaggaaatattcgatggggtgcgatcagggctggccgtgatcacggatcacggctcacggatcacggaaatcacggggtttttggggtgccgtgatctcggatcacgggtcacggattttttcaaattttccgtgattttaatccgtgattggcatctaatcaaaattttcagaaaattttcccaaccctctaagaattttttctaaaattttcccgactttcagtatcttttggggtgttcagatcgtcatgaaggactgagcatgttggtccaaaagattttttccgcatcaaaagttagcttacaaattagaggaaatttctctacataaatagatttttggttaaatttaagaaaaatttgaaaaatttggaaaaggtcgccgcaaaaaaagcggtttatatgttttggtttctttaaaacattttttgggaatttttcccgcgattaaattccgttttttaa

SEQ ID NO: 62931 - DNA, 757 bp, Heterodera glycines
attaattgaaaatattgatttgtattccggttattcttccgtaaaaaatgacgccaccttagccattaggcctagaaaaaagagctctttcgaatggtaccttcaaatcaaaaaacgactgtcagggagctgagctacagaaaaaaattccaagccaaggccaagccactatagcagtatagtgccaaaaattaattgaaaatattgatttgtattccggttattcttccgtaaaaaatgacgccaccttagccattaggcctagaaaaaagagctctttcgaatggtaccttcaaatcaaaaaacgactgtcaggaagctgagctacagaaaaaaattccaagccaaggccaagccactatagcagtatagtgacaaaaattaattgaaaatattgatttgtattccggttattcttccgtaaaaaatgacgccaccttagccattaggcctagaaaaaagagctctttcgaatggtaccttcaaatcaaaaaacgactgtcagggagctgagctacagaaaaaaattccaagccaaggccaagccactatagcagtatagtgacaaaaattaattgaaaatattgatttgtattccggttattcttccgtaaaaaatgacgccaccttagccattaggcctagaaaaaagagctctttcgaatggtaccttcaaatcaaaaaacgactgtcaggaagctgagctacagaaaaaaattccaagccaaggccaagccactatagcagtatagtgaca

SEQ ID NO: 62932 - DNA, 630 bp, Heterodera glycines
  unsure (1)..(630): unsure at all n locations
atggcaaatgtgaaaaaatggttggtgagataaataagaaggaataaaaggagaatagtaaaatattgaaaatattattcgaagaaaatctctgaattttgtttatttttttggggggnggggggaaattatttattattattattagggcttccttttttaggcacaaaaatcgcgaaataggcacctaaaaaggcataaaagaatcgaaaattaggcattaaataggcacaaaattttttttattaacgctttttaggtagcaaatcacgcaaaaacttaataaaaaaaaaacttaattttgcttatatttcaattgttttagttttgtcgaataaggcattttttaaattaattgaattttggggatcaatttttgtgaatatttttttcaattcttaggatgtatttggctctactgcattttacgcgtccaatcgacttttacgcgtccaatcacagtttgcgcgtccaatcgacttttacgcgtccaatcaaaagtttacgcgtccaatcgacttttacgcgtccaatcaaaattttcctaaatcgaacatccttttgacataaggtaccaaccattgcaaaaaataatttaaatattaaaaacgtaacaccaagagaaataaa

SEQ ID NO: 62933 - DNA, 481 bp, Heterodera glycines
atgattagttagtacaaatagttaaaactagataaaagtttttctcgaatgataacccaaaaagaattaaaaatcaaaactcatgaattaaattacagaaaatggaagaggaacagaaagtggaagagaaagtagaagagtaacagaaagtggaaaaggaacagaaaatggaagaggaacagaaaatggaatagaaagtggaagaggaacagaaagtggaataggaaaagaaaatggaagaggaacagaaaatggaagagaaagtggaagaagaacagaaggcgtcgttttggtgtgaattttgttgatcactggtcactaagataatccgatcagcgactaaataacgagatatttaaaatttaatcaatagccctcatggagatcaatattttaaaatggattataccaactttgtcattaatatgttagataaaactatgctttttgaaagtgatgaaatatttggtataaaaataaa

SEQ ID NO: 62934 - DNA, 58 bp, Heterodera glycines
tgccctaccgggaccgggacctgagcttttcaaaatccgggaccgggaaccgggaccg

SEQ ID NO: 62935 - DNA, 986 bp, Heterodera glycines
atggacttgactcggccggcgactgttctcggaactatcgcaacgatgagaatgttcttcaggtagtgtaaattaattgtcgtttgcttctgttctgctccgtccgttcattgccgcttaaggactcttctcgtgtcatctcatggaccagaaaaagtgccactgttgttgctgctgctaataatgatgacaatcaaaacaacatttctacctcctctccgccggtcgactgacctcgtaaaacgaccaaaaaaaaccacaatattttccttaacataggaaaatttttaattttccgtactactcaattgttttaaaaaaggtactttgcctagtttacaggacagatttcatatacatttttagattcatatatgtgttttagaaattaatgaaaataagtttttaaggggttttcgaggtcgctgctgatcacgaatatagcacccatttttgtcaatttcgaacccctgacccaaactcgaacaaaaattaaattaaaaaatttgtatggatgatatcctcattggcatctcacccatgagggtaaccttggtacaggaagcataaaattcgaaaattgtatggatggtatcctcatgggcatcttgcctatgagggtattattgctacaggaagcctatcaattctttgtccctgtacagctcatgtactgatctgagcccggatttctgatcagcgaccccaaaaacctcataaaacttattttcattaatttatataatacatttatagaatcttttcaagtgtacaaatggtccagtggttaatcttcctgcttgttttctacttctttcccttggttcaatccctcttctgtaattaaatatattttattttatctttttatatacttatgggtttcatatagacaaaatatgattcttcatatacttttttaagtgccgataggcgccgccgggaaaattttttgaaattttggctatatgtttaacagattttca

SEQ ID NO: 62936 - DNA, 1711 bp, Heterodera glycines
atgccccgcggggatgcggcgactttcgccgaacggcgcgcacaattggcccatgtcaaggacaaacgaaccgacagggaaaattgctggaaaagggtggggggacagcagcataaactgatgacaacaacaatttggcaatatgtagtatcaacaaaaacaatgatgggacagaagaagaagcaaaggatgacaacaacaaatgtccttaaaactaatgactgatgagtagggctatacattgtatggattaacatattttttctgtgcatatgctatgaagaaaggggctcaaaaatagcatttctatgttaaaattttttgatttggtgaaggtttttggtgcatataaagcatattttgggggttttcgaaatgcatatttggccatttttgggcttttagagcatattttggtcatttttggcaaatttcataagaaaaatgcgaaaaagcgaaaatacaccccctaaggatcgactttttttttgcgaaataaaaaaaatacacccttaaaaatcgaaaaatttttaacttttgtaagaacttttggaaaaaaatttatttatataaaaatgtacctttgttttagcatataataaaaattttaaaatttggaaattcaatatttttgcaattgtctaaaaaatgctccttagcccttgttttttttgttttcaaagtcaattcttaatttatacatacacaattgttggcatttttttcagagttaaaagccatctttggcagttttaaggcatattttgcatatttgggcattttcagggtttttagggcatatttgggggatttttagttgcatgttttatgcgcatgttttgtatttttagtgcatacaacttcgaaccctaatccagtggggttaatcccgatttcggattgggatcgtgcaaaatcccgtgccgggctctagttttccaatcacatttaatttgcttctgtacacaattttcaataaattaattaccccctcaagaacatatgaagagcgtgtgcagctaagagcatacaagtgagttttgcttgcatgcaattttctggcgataatttggaaatggcaaattataaattttttttttcattttttaaataaaattaataaatattttaaatatgatgaatattaaacattaaaattgtatgtaattctaacaaatccctggggtaatcggcacggcactgctggcgggaatgccatacttttaaaaaaatatattgacgatctttgcatgcacttaatattataataataaattcaaaaattttttgtttacaaaattcaaagattttcaaaaaattgcgataatttttttttctgacacagaaaagctttccattttttttgttgttgaaaaaattgtcaattttctaggttatcattatcgtttttttcaaatttgttaggcgtgcatggtacgccctgtgggcatttgtgttcgccatcgccctgctcatttggctgctcattgtgtgcgcggtgtgccattggagtcggcggcacaacggccgatcagcgtacgacaacattgttgttaatcgctgatctgagattaaattgatattattttgagcactaattattactatttggattaaatatttttcctccaactttatgtgtatttacgtaaatatttcggcattttttttatagcaatttttgtaaatatttttgccggatttaaataaa

SEQ ID NO: 62937 - DNA, 2302 bp, Heterodera glycines
atggcattttcggattttgctctcgagacttggccaatttgccaaacagagttcattcccgtcgctcaacaacagcgaacgcgctttcaggtggacgcgtatgtggccagcggcgtgccagcctttgtgtactccttcgactttgtgccacggggcgacgtggtggaagaggaccggcgcttctacccaatgtttggcgagcgtccagtgggcgtgcggcgccgggaccggaagcgaaaaggtgagccggccacaaaaatgcttttgtaagcaattcaactataattagtggcaaatcgaacagtttaccggttacagcagagtttacttaccgtaaccgggttgggtttttaacgaaaaaaggggaaatgacgaattttcgttttttaccatccacctcaaggccatgaacaggacgcgttccacggattggaccatgcgttcatcttcaccgaaggctactcctccaacttccatctcgagccgtacacacgacgggacaaggcaatgtcgcgactgtaagtgtactatatattatttgtctacttacagtaagaaagcgtccaattcaaatcaatcatattaataatattggcaatcgattgatcagggtaaaaaaatattaacaatcagcagtaaaaattttagaacatttttataagaaaatttcaagaaaaattttttttagattttttctgcgattttttttcaaaattttatggaacctttcgatttttgggcctacttttgaattaaaaaaataacaacaaaggacacgtagaattgcattaaataagcatattaatgtcacaatttaagcaaaaaacttttttttttttgaaactttcttttaaaaaaattctaagatttgaaattttaatttgggtttaattacaaaaaccctcaccattaatcaaattttttgtttttctaaaatttacgaaattggaaaacattttttcaagttgtatttctttctaatgaatgaaatataattaattaattaatttttattttctatttcaaaatttgtgaatatttttgcctttttttttggttttagccaatttaatgaatttgaaagtttgtccatccttttaggttttttgagtaatatttcaatgccaatatattccactgatcaattgatggacatattttttgtgatagttcagatcaacactgacctaatcatcaaaatctgtcttcagtttgactcggatgatcacaaattttgtggccaccggagatccgtcgacgaggaatttcagttggccaccatgcggcaacggcacaatgcaacacgcttcactgaacatgccgccaaagtgtgtgttgtgccaaaaattgtgaacaacaaaatccgagaccacctccaaaaaaaaaccccgatcatttatcattagggaagggatttaatatgttttcccctatattttccatgctctaaatattcgcagttttttttggcacatatttgcggttctgctaaatattttgagttttttgagaaagataaaaatttattataaaaaaatttaaaaaaaaaaacctaaataagcgaatttttttaaatatataagaaattgttgtactttacatatttttcaaggttctcaaataatttttgttccataatttgtatctctcgttttttgtacagttacgatatagcaaattacagaatggtctggatgttgatccttaaaaaaatttttcaaaaaaaacattaagaaattgcccctaaaaatcgggtttttaaaaatacttttaaaaagagctgttttgtttcatagttttgctctttttttttaccatatcccctttttttgtacggttactgtattatagccagcaaattacagaatgaaccggggaccgatccatttcccgacgccgaccttttggaatgacgaggtgcgaatgctgtccaagtatcagatggctgacccaagcggacgtgccaacgagcaggcggtcaacgaattgtaagcagcggttgttgtgtgatattagcgacattaattaaccaattaattaattggctatgagatagtccctgcctcgaaatttttccaaaattttaagccttccaggggtaaattcgcagaaaaattgttgaaattttatcatttgttgttatacgtagggttcgaaattgtgtgactttgcatattttttctgcgcatatgcaatgaagaaaggggctcaaaaatagagcatttctacgttaaaatttttttgatttggtgaaggtttttagtgcatataaaagcatattttgggggttttcgagaataaa

SEQ ID NO: 62938 - DNA, 955 bp, Heterodera glycines
atgcgccaattgctggcaaacattttgatttttggagcaacagagaattgtcttatcgacggcgcactgctttgggataaatttctccatcatatgtgtgatttgcgttgtaccgatgccgaacgtcctgcgagaattgaccgtgcattggtccttttagaaaaacttttagtaagactaggaaaacagtgtaaagattatggactcccaacccctactatttcaattatgaataatccccagctcgggcttgatgaatttttctttccacaacacgctaatgatgatgatgcagatgatattgacacaagctcctatgagcgtggaaaattgaatattgagcagcaaaaattttttgatttggtaaagactgcatttattgactcacgatgttcaagattgttttatttgtatggtgacggtggaaccggaaaaacatatttgcttaattatatcctatatcacttgcgaagaattggcgctaaaattattcccaccgcttccactggtatggcggccacccgtttttatgctggtggcaccactgttcattctgcctttaagtttggaataaatgtcgaacctggaaagttaccttccattccatttgatagtttctttggtcgaagaataattgagtgtgatataataattattgacgaaatgacaatgttagagaggaccgttttggaaaatattgatgctctttgtcgtcttatgtgtttgcaaaaacagcacttaccctttggtggaaaatgcgtgattatttccggtgattggaagcagtcactccccgttgtaaccgattcttatggaagccctgcacaagtatccgcatgtatccaatcctctccactttattctctttttacgaaatttaaattgactcagagcatgagagttaacccaaaagagattgaatttctaaagtggcttgatgatgttggaaagagga

SEQ ID NO: 62939 - DNA, 618 bp, Heterodera glycines
atgcttattttgtcattttttattctttttgccttctttggcttcgctgatggttagtcaaatttagggtcattactagggatgcgacttttagtgacgaaaaattccaaaataattaactaaaatagtgagtaaaaatgccaaaatattgaagaaatagtgacgaagtagccaaaatagtgatttctagtgaccgatagtgacatcagaatcgaaaatttttaacgcagaaatgcgttttttgagctcctttcttcaaatcaagtgagcaaaaaatttagttaaaacctaaaaatcgcatccctagtcattacatataattaattggttttttagttgtcggaacaccgatacaagaacaaggtgattaagttaaataaaaaaaatttaaaataataatatctaggtaataattctttttgtaccgacaattttgaatcaaattgtttagaatttgcaaaattggtggcaaagcgtgccgatgggtttgatgagtgcttgttggcagcagggtaattcaaattataagcattttgatcattttatttcagtgctacaaattgtgctggtcgtttagcttgttgtgaaaagtatggacaacaaagttgcatttgttga

SEQ ID NO: 62940 - DNA, 490 bp, Heterodera glycines
  unsure (1)..(490): unsure at all n locations
tttttgcctggaggaacacagttcttcacacttaccacaccagcattatttttttttaattatttttttcattttatcacccaacgttctagactgatcagaagctcaccaaattttgcagggaaactgctgagaacccttcaaatgcttataaattttcttagaattttttgcctggaggaacacagttcttcacacttaccacaccagcattatttttttttaattatttttttcattttatcacccaacgttctagactgatcagaagctcaccaaattttgcagggaaactgctgagaaccctacaaatgccccgnnnttttnccagaattttttgcctggaggaacacagttcttcacacttaccacaccagcattatttttttttaattatttttttcattttatcacccaacgttctagactgatcagaagctcaccaaaatttgcagggaaactgctgagaacccttcaaatgcttataaat

SEQ ID NO: 62941 - DNA, 604 bp, Heterodera glycines
cagtgtccgtttggggtactcaaacaattatggggagcaaaaatccaaggtaaaaataaagtagaggtatatcgaagctattcccgaaggattcggtctccccataaatctgggcgcatcggttcggggggactgccccgaaaacaaaaaaatcgattttttcaagtgtccgtttggggtactcaaacaattatggggagcaaaaatccaacgcagaattaaagtacaggctatagggaagctattcccgaaggattcggtctccccataaatctgggcgcatcggttcatggtactgccccgaaatccaaaaaaaaattttttttggataaaaattatttaaatgaactgactagataatatttaaaataggttatttctcttcctttcagtatccctgctaagtttggtgcgcttctgatcagtttctgaaaaaaaagttaagcctaaactttttggcctgtttaaaaaggaattaaaaattttttaaaatttattcatctccctttttgatagaaaaagcatcagagtgcctaaactaacatgtaaataaaatttggtgcgtttcagagcattttctgaaaaaaaatatttatgaattaat

SEQ ID NO: 62942 - DNA, 516 bp, Heterodera glycines
atgaaaaaggaattaataacggttgcggaaaacaaggacatttttgacaaaatcaaatttaggactaaatttgaggttcgtttcatcagtgaatgtctaataaatttcattgcctctgttattttttaggtttctcacgcagtttggaacccgaaaatcagtcttattgcgcttgggtcacttgacggagaagtggtggttaagcgttacttgtggaagaccgggtggaaggtgctgcttttgaattcgattagtttaaacttttccctttttaattttagagaaatttttctcgtgatgattctgccaaacactttgattttcttggcgatgtttcgtccgttccgtcgtcctccaagtcgaaggatcagttgttgtttctgtgttggtcccccgatggccaagtgcttctcactgttttccaaagtggcttactctattatttggacactcaaactggcaacactcttttcgttaaaaaattgtcatattcgcctttttgcgttgaatggctaa

SEQ ID NO: 62943 - DNA, 1333 bp, Heterodera glycines
atttgaagtgatcttcaataatacatagtcattgcatttaatcccaattatacaaatttagaaaatcatcgaaagatggcattgagagctgttcaatgtcaaattgtttcaatttcagcaaatgtttagcgccaaaatcgatgaaaatttacgtgtacagtgatggatcgccggtgagacggagtccgttgttcacaaaaatgttgaaagtgatcaaagaaagtcatttttacacggagagggcggaggaggcgtgtttatttgtgttgagtgcggatacaacggacagagaccgaataaggcaagcaaacggcgaatgacaacgcgaaaagccattttaagtgagtattaccagcaaattgggacggagcacaccaaaacggagttatgggacgacggacggaatcatttggtgtttaatttatactttggcactttccccgactacgctaacaccgacttgggcttcgactttggcaaggcaatggtcgcgtgggcgagttcgaatttgcaggtccaattgataaatgggtttatggatgtaattattgttggtttataacaggattatacgaataattttgaaaatttagaattttcgaccaaatttcgacctttcgttcccattatttaacaatgagcacccgtttaaggacgacaaaccatgggtaattttctttatttatttttgtttctttgtaatttgccattgcttttcctttcgccataaattctttcatttttagcatttccaaccgcattttcccaaccatgacaaatacttggccagttttaaaggaaaacgatatgtgtacggagttgggtcgaagacgcgcaacattttgcaccatttgaacgataaccgatccattgttattgccaccacttgcaagcacaacacggactggaagaagttcgaggacgaacgttgtgaagttgacaatgcgaattatggcaggtgaaaaggacggaacggggaaaggaaatcgaattccaacgccaaattgaaggtgggactatgagcagttgatggcgaattccaccttctgtttgattccacggggtcgtcggctcggctcttttcggtttgtgcttttgctttgtcctacaaacaaatgactgtcccaattgaatgacagaaaatccaaactcgtccatccattcagtttcctcgaggcacttcgttctgtttgtattccggtgattctttccgatgaatgggtgttgccattttcggaagtgattaattggtccgaagctgtcatttttcgggaaagaaacgtaccgccctaattgtaagtcgcttattaaagccattaaaagcggattttgc

SEQ ID NO: 62944 - DNA, 248 bp, Heterodera glycines; identical to SEQ ID NO: 62670

SEQ ID NO: 62945 - DNA, 875 bp, Heterodera glycines
atggacgtcggcccaatgattgaagaattggagaaattggcctatttttgtcgatcgcaagaaaagtgggcattcggaaatggtttagggtggaaaaagagcaaaattcagagactctgtgatgaaccatttgcgggaaatgcccgttggccatttcgcgctgcgactgtccggcacgaggcgaaggtcaacggcattcgatcattgccatttaaaaagtgaattatcgaaatttccttttgcagatttttggcactgagtatccgagtggaaagggatgagaagaatcagaaagggattgcccactatttggtgcttcgcaatgagcatgggtttcgcatcaaagtgagcagtcattgtttgcttcctttgtgccacttttcccttggcaatttgatcattcattcctcagggttccaagcgttacttccaatcgcttcccatgctgatcacccaccactcagtgatcactgaccaattgccgtgccgtcttttgctgtccgattggcgttggacacggtgaatagatgaactgctctttgatggcccataattaaccaattatttgttcctttaggggagacgcaaatcaacgacgacgtcaaagcagcgggggaagcactttggcagtgctaagggcaaccgaagagaacaaagcggggaatccgagcggaggaggggggcaaaggcaaaacgcagcggacggaacgacggtgaaacggcaaattgaagaaaaagcgatttaaacacacattcagatccgctggcggaaggatgcgctttattcgatggcacggcgacaaaacggcggacatcgccgaacaaactcatccactctcatctcttcccaatcctctacatttttatcagcttaa

SEQ ID NO: 62946 - DNA, 462 bp, Heterodera glycines
atgcaaatttcgctgggaaagtgtttttcgcatttgcaggcgcctccgccgctgctcagccattctctgcgcaaggtttgctgcgccgtgtgccgcgtccgcaccgcgcagttggcgtacatcactcgcgagcagcactcgcaccacgggcaccatgtgccgggccgcaagttgtgccacgtgttccgcgtcagcacaccgctcaatgcacagcacatccaaacggcacttgcggacgcattccgacagcaaaaacagtgggaagaagccgcgggggaggcggacgaaatggccaactgtcacatggagaacgggaaaaatgatgacgggaccacgacgatgctaatggcatggcatcccccggacaatgccatggcaatttgccggggaaaagccaatttcgggtcggatggagggacagcagcagcgggagagcacctgctgaacactccgactaagcgg

SEQ ID NO: 62947 - DNA, 99 bp, Heterodera glycines
  unsure (1)..(99): unsure at all n locations
gtcgctatttcaacgaattttcnngcggcggttcctcaacgccaaagaagcaatttgctgatgcgngaacgtcatgcagtccagcaaagaaatgatgac

SEQ ID NO: 62948 - DNA, 78 bp, Heterodera glycines
tggcaacatggaaaatcctactcagaactcattgcttttagtaaacccctgaattcctttgccttattaatttgcacc

SEQ ID NO: 62949 - DNA, 716 bp, Heterodera glycines
atgccacgaatttctgccttcaattcatggagatccgaacggatgtccttttcaagattgcggacatccgaacagagatcttggttggctctcagtaagaaaccaccaaaagtaagcatagtgccaacaacagtgaccgtcatagtaacagtaacgtagacaatgttcgctaaaagcaaaaatttaagatcataaaattttaagtggaaagtcaaaataaaaattcgattttcggccagaattcaaaatccgcttttctaaattggggtcaatggcgccaaacggccctattcaataaaaggacataaatttgttagtaaagaagttacagaaaactttacagcggctgtccattcaaacaaaggtttcgcaaattccaaagccaaagcccgaatttgaataagaagtcaaaactcaattttcgtattttatattttggcttagtttgagtttttgattttgtttgaattcgggtaaagggtttggaattggtcgaaatgtatgctatgttcatgttcagtgatcccggaaacccttcaaaaaatgtttttttcatttaaaaaaattgaaaaatgtgggagttcgggttcaaggcccgaattagccaaaaaggaggcctgcttcttactcggcaccccaaaacactcataaaaaggtgtttttggcatttacagaaaagtttcaaaacagatgattgtccaaccaaaaacaataaa

SEQ ID NO: 62950 - DNA, 3673 bp, Heterodera glycines
atgtacgtagacaacctcctcatcgagtgcgagacggaagaggaggccatcgacaagtcgtccaacgccaaacaaatcctcaaagacgccgacatgaacctccgggagttcctcagccactccccaaacgtcatgggacgactccccgaggacgaccgactcgacaaaacgccggccaaagttctgggactgacctgggacaccccccgcgactgcatcacctttagtctcccaaaggacacagacatcactgctacacggcgttcagtattgagcatcatcgccagcacgttcgaccctcttggactagtcgggccatgtcttctgcccgccaaacggctcttccaacgcctgtggggagaaggaaccgcctgggacacacccctccccgagaccgaggcggaaacttggattcaaaccctgtccctatggcaaaaccaaacgattgtggtcccgcggcattccattctcggcaagcaaagccgcctgcaactccacgtgttttgcgacgcttccgaacacacctttgccgctgccgtctacatccgaagcgagactgctgacaactcccaagcgaacctgattttcgccaaaaaccgcctccggccacgaacagcaaaccagcgcttcaccatccctcggctcgaactcctcgcaatcctcgtcggcatccgcgccatgcgtttcgccgagaaagagctccgccgtccgatcgaagagcgacatttatggtccgactcccaaattgccctctcatgggtgaagtccgaggagcccaaagctcaattcgaacagcgacgactcgtcgagattcggcaaggaccaaccaccaccttccatttcgtcagaaccgaccaaaatcccgctgacatagcgacgagaggctgtactccggccgagctctgcactcgtcaaatgtggtggaaagggccggagtggctcacgaacctggaaaccgaatggccggacgagctaacgttcgcaacaccagccagccatccctctcccgattttccgtgtgaagactcggaacccaagactctcttggtcaagcaaagccaggtgccccctcccctcgttgacccagcacgcttcagcacaatgctcaccctcctcggaacgaccattctcatcctccaattcatcgggcgctgtcgtccaaaatggctcacgattggcgcctccaccatcccaaagagcggccccccgactggagatgccttccgagccgctcggaccttcctcatccgacaagaccaacaccgcttactcaacggctacgataagcaccctaccgttgtcaacgaggacggcctgttgtgcctcaaaacccgactcatatacgcaaccggcccgcccactctcgcctcgccagtcctcctcgatcggcattcccccctgacccggctaatagtgcaggaagtgcatgccgatctcaagcacgccggcgtcgattggaccctcaccgagtttttgggccgttactggatgccacaagcccggcgaaccattcgcggaatcctccaaggctgcccgtcctgtaggagaatcacggcacccccctttgcgaggccaaccatgccccccctgccccccatgcgcgtcaaaccggctaatccttttgagttcgtcggtctcgactttgccgggcccacctcctctcgactaagcgacggatcgctcaccaagacctacttggtcatcatcacctgtttcgttacccgagcagtgtatctagaggccaccaccgatctgtcagccccaagcttcatcaatgttttacgacgattcatcagccgtcgcggccgaccaaagcgaattctgagtgacaacgccccgacattcgtccaaacgagcaaggccctcgacatcctgaccggcccttcggccaaaaccgaccccgtcacatttgccgcgcgccgaggcatccagtgggacttcattcccgcctacagtccatggatgggagcttgctatgagcgcctgatcggcctcgtcaaatcgtgtatcaaaagaacaatcggccggcggattcttgactacgacgatctgagtgccttccttgccgaaattgaagctagcgtcaacagccgcccgatcacatgggtatcagatcaaccggattcatcgaaagcccttactccgaaagacctcgtccaacccggcctcctcaacgacctggacatcgccgactctgatcttgactacgacgggggcatctccggtcccgagcgtctcgctgcactgtggaaggcttaccgggaagccgccgatcacttttggctcaaatggagtcacgagtacctcatcgccatcagagaacgcgccggatggacccacaaaggcccccgcctacgggcccccaccgcaccccgcgtaggccaagtagtcattatcgaagaggacttccgccctcggaacttatggcccatgggggtcgtcgccgccctaaatggttcccctccgaatgtgcgaagcgttcaacttcgactgccgaacggacaaaccatcactcgaccaatcagccgtctttgccccttagagacagaaaatgaggctccggaaccagccctggacgcgaccaaatcgacccccaccaatcaaagaagcagagacttcaaaaccgccgaagtgtcggtacccgaaatgccgactgttccggcaccttccggagaaccgatggtccatccccaccatcacggcatgcttacgcggcgaaaagcgcggctcctcggaattgctcccaacaccacaatggccttcgccttcctcgtcaccttcctctgggcccaagtttccccgacccaaggcctctggccattcccggaccaccctaagccgtcccccggatctgattgtgtcgggaatcacctcaactgcaccctaagaggggtcaaaatctcgtcgaactccgccgtccagaaggtgaccatctgctgcttcgactcatgcttcgaccgattggcggccgctacgattgattatgagctgtcctctgaccttcttgtcaatgaatatagttgctccaccacctacagtctctcgtcaactcgcaactgtatcgacgagatcacttgcccggccctagatgagtgtgaactcatcgattgtgcactttgcgtcgaacaactcgtcaattggcggtgtaacccccggctcgccctcgctctgtttctgctcaccggatcgttgataagctgtctgatcggctgggtcgtctgcttctgctcctcggttcggctcgggatcaaactcggctatcggatcatcgcactactcctctcgtggccgctacgggtagcattcttcatcgccggccatccgtggacgcgagaagatcgagaacgcgtggcggaacggctcgagactggagtccaaagggttcggcgacagacccgacagagaattcagaacgcacgtcaacacggcaagcgggctcagcgagctgccattcgcctcatcggcatccttctcgccactcctgccctcctttgtaacacggagaccatctcagtcatcactcagactgagtcgtgcctcaagggaccctccgggctcacctgccgaatcaacaccgccaccaccctgactttgcttccggccgggcaaacgagtgcgctactcctccgaaactccagggaaacaccctcgggaccgtcaaactacgcctaca

SEQ ID NO: 62951 - DNA, 515 bp, Heterodera glycines
ccaaatgtaaaactgttcaatgcaacggcggtggaagatttgattataaaacggcaacaacaatcagaaacaggcgaaggccctggcaaaagcgtacaacaacagcaacacgttgtcggcgtggtcaccaattggttgacaaacaatttaattaattaaatataaaaattttaaaaattaaaatttatatttatttatattttttgttttatgatcacactaatttgattatggagcactatttatatggaaatacaatagaaaataaataaaattttttgatttttttatgtattttgcacaggatttttgagagtttataaaagattaaattcttcacaatattataaattaataaataatatttacacataattttgaaattaattaaaaaaatgttttgtgaaaaatcccgttaaaaataaataaaataattgaccaaatattaaaggactctggtggcactgaatcatcacagtcaaagttgtatggacccaagcacagtgatggccaaa

SEQ ID NO: 62952 - DNA, 329 bp, Heterodera glycines
ccaggactcaaatgtcccgctgaggccaaaaattttttctatttcttgaaaaaaatcgaaaattttccaaaaaaattaccaatcgatagagctcgaaaaactatgttttggaagtggtcttcgtttttctgggaaaattcgttaaaaaatcctaaaattcaaaaacccgaaaaccgttttttaggcctagctcgaaaaattttgaaaattttcgaaattttaaaatttggaaaaatcgggcttttaaactctacaataagtctgctggccaccctgcgctcaggtcaaaccctaatgagttattcggctggtactgaagtgggaaaaaa

SEQ ID NO: 62953 - DNA, 162 bp, Heterodera glycines
atggattcatttgatcataaaacggcactcccaacgaatggaccttctgctgctgatcagcagcaccagcctccggcagaggaggtgaagccatcggcagaagaagcagcagcgaatgcttctcccccgtcgccctcttcctccgcggacagtgccaaaggc

SEQ ID NO: 62954 - DNA, 224 bp, Heterodera glycines
atgcctgccaacgatggtgttctggcggagagcaatgtaacaaaaacggatgatgattgtggagggagcgacgaggacattcaaattgtggagacggatgaacagcggaaaactcacgacgaattaagacaaaaggctgccgaagcactgatccgtgaggcgaaaaggtcggcgaaaggagaaaaatcgaatattagaaaaaattcggcgctagttaaaagaag

SEQ ID NO: 62955 - DNA, 2021 bp, Heterodera glycines
atgtgcgggtttagcgctgctgtgccggataagggcgaccagcgactgttcatttcgggaccaggagtttggtattggcaggtgagcattttccaaacatcgccgacaaaggcattcgaatttcgagagtcgccttttcagtctcgacttgtgaagagtttggaaactcggcaatgagttgatattctcttttaattgtcgatcgttttcatttccattctttcccatttcgaatgatcagttaacttatcaaagtttgggtttttcattgttttctcttttaggggtctgtcttctcccaaaacattcaaaatttgactgatcggccgggcaccgccgatggacccgcgcacaccgaccaccaccaattgggtaaattaagcaagacccaaatgaattagacttggtcgcactttcgttaggctattcaaccgccaccggcgattttgacggggacggaaaggacgacattgtggtgggagtgccaaggggaaacgaactgatcggaatggtggggagaggaaagtggggaaagtgatcgggaaatggaaatggttgaggtgtccatttacacacgagagctgaagccaattgtgaacataaccgaacgggacggacagaggtgggcatggggcagaagaaattgttaaacggatgagccgagagtgggcgagaccaacttggcattacctcttcaggggccaatacttcggcggttcggtggccgttttggatttgaacaacgacggactgcacgatttggtggtcggctcgccgctgttcatcgattggatgagcaacgactcgaaaacgcaggagcgaaagccgcgttacgacgtcggacggatcagcgtttacctgcaaacggaaggggtcagttgggttggaaaattgagagctgatcagagcaagagcaaagaaacgaatgatgacaattccatcgttttgcgattgagttgaccgcttagccaaattcaaattcaaattgcagcacggcttccgtgacccggtgcacatcctcggccacgaccaatggggccgttttggccacgccgttgccgctgccggggacctaaacggagatggatttcagggtaaaaaatcactgtcatttacaacacaaacttttatttcactttttggatctgttggtgggtgcaccatttgacggcgaagatgggcgcggcactgtctttgttttccatggctccgaaaatggcatccgggaacggcacgctcagcgcattttggcacgggacattggcagggacatgctcaccttcgggtgggcattggccgggggcagagacgtggacggcaacggatacccgggtcagtggggctgaacacttatttggatggacgggttcgaattcagacattgccatcggcgcccctcacagtaaccaagtcgcccttttgcgcgcccgacccgtcgcccaagtgcagggatcgatcagaacgacgaggaaagtgagcaacagaaaaggtcaaaggaaacatacccaatccccccctactattaagagcatcaatttggacgacaaacagtgcgtgacggagttcggtcggatggcatggtccgtcaagggccattagcacttggcaattgcttttccctccagtgaacgtctccgcgtttgtctgaaactgttggtcggcaaattggcacaaaacgccgtcgaaatgcacgtgcaaatccaattggactcgcgcacaaagggcgattcgccccgggcctttttctcccgcaaggatttggacaaaaagcgcggcgtccgcgtcgacccctcgggcagccgcgagcagccgtcgggtgttgagcaaattgtcacactgagcaaagggcgcgaggtgccgaaagcattgggcattatttaaaaacattttttggatggaatgcttctcaatttgaaatttggggggggggggggggtgacagtttggattaatcaattgaatttgatttattcattttgccaggtctgcgagacttacgacgtttacgtgccggtccgtga

SEQ ID NO: 62956 - DNA, 869 bp, Heterodera glycines
gcatccgcaaagtgtgccagggaagactgtggcaaaacggtgtaccctttggaggaattgaaatgcctggacaaggtgaacagctctttttctatgaacgtatttttgttttttcaaatcctttttattttttgacaatttaggtatggcacaagacctgctttaaatgcacaggttaattactaataatctaaaaaaataatgtgaattgtgtcaattttaatttctaaaatcattttggggttttcagactgcggcatgattttgtccatgaaaagctacaaaggctacgacaaaaagccatactgccaagctcattaccccaaaacggttccgtcggccgtggccgcaacgccggagatggaacaagcgaagcgaaacacggcctatcagagtcaggtggaggagggaaaggaaaatggcggagaagggaagagacggagcgaattttaggtgaaataccacgaggcgtatgagaagcaaatgaaaggcacgaagatggaagtggtgagaaagttatgaagaaacgaaccatcaataaagttcaaaaacatccgtcaccaaaagacaaagtttcgaatttaaattgcaaaattcgaaaagtaatccattaaagctttatgataatatttggtctgtgccttaggacatacgaaatataaaaaatacgaaaacgataaccatttactaattgtaatgcttacgttaggccgatgacccggaaacgatgcgacacaaagccaacatggtaaaccaatccttggcccattaccacggcgaactgcagaagaaagagaaacaggactcacagagggacaccactgcaggttcagccccgtctggtcagtcaatcctttgcagtcctaaca

SEQ ID NO: 62957 - DNA, 267 bp, Heterodera glycines
atgattaatgatgaaaatgccaataacaacgccaataacagcgctgagcaaagcggtgagaacgccgccgcttccgagctgagaagacgaagaaatgcgacgcggtcagaagagtcggctgaggagcaaagggagacagcgaacaccgcaagagatgcagcaaatggggcacgagacggccatggagaagtggcagacgcagaccaactgagcgaacctgaacaggaggaggaacatcaacaacaacaacaaagtatgaacaagtga

SEQ ID NO: 62958 - DNA, 208 bp, Heterodera glycines
atggtgggggctgagcatgaaaattcggcaccaccaattgatgatgaacagcacaaattggttgaggaggaggaggaggaagataacaatgatgaggatgaggatgacaataatcagcaaccaaatggtagtgatcaggcgctgaatcggccatcgccgactgatcgtcgccacccgaccgcccaatcgccccaaaaagatagcgcaa

SEQ ID NO: 62959 - DNA, 277 bp, Heterodera glycines
attttcatttgctcctttttcaggtcccatttattttgccacccaaaataacttcaaagtgccgtttttcttttgcttttccatttgccatttcccttctctctcctcagattcaactcacttcgctttgcatggcaatcgcattgagcggaacggtggcattggcctgttttttctgtccaaaagtttacatttgtctgttccaaccatacaaaaatgtgcgaacgcggagttcagcagtgggaaaattggtcaatcagcaaatgcgatttataag

SEQ ID NO: 62960 - DNA, 1005 bp, Heterodera glycines
cttaggctacggcgacgtcgtcccgacgagttattgcggccgtttcctgtcaattaccacgggcattgtggtcattattgccccctattcccctatgatttgttaattgccttcctccaatgtttccttctttttagggtgccggcgtttcctccgcattaattgcagtaatttcgcgcaaattggagctgtctcgggcggaaaagcatgtgaacaactttatgtaacagcaaacgaaactctttttcgaagaaaatgaaatcgaaactttcagggccgactcaaaactgacaaatgcgtgcaaaaatgccgctgcttcagtccttcaacacacttggcaagaaaagaggaaaaaagagcgaatgggggggggggaaagccaaaggaattggaaaagcattgattgttggcactgattgactgatcactaactgatcacaggttcatccacaaataccagcagagaaatggacaaaagggagacgaactcagactgagacagcaccagagaaagtgaggaacagagaaagcacaatcggagaataaattactaattaatccgatcaaaaaggtttctgaatgccatcaacgaattccgacgaataaaatgggaccaaaggaagttgcaggacaaaggcaatttgttgttggacgtgggaaaggttacgaaggaaacggagagaatttggaggaaaatgcaattttaccattcatttagttgcacgcggaaatgcacgaaacattatgggaaatgcaccgaactcaagagaccttcgctggaatgatcggtgagtgccaaaaaaggcatggcattgccaattcggcacttattttgaaatgggcattcaaaaaaaattgcttatttttctgaaattgtttaaagggtggcatatgccccccccccatggaaatgtgcctgacaaagagtccaattgtccatttccaaatggcattctcttcttagaagtgctcaccaaacgcattgttgaacttcaaaacatcgtc

SEQ ID NO: 62961 - DNA, 1285 bp, Heterodera glycines
atgccatttgtcagcttcatcgaaatcgccgtctgtgccgtgtgtccgttccccggtcagtcagtcggcatttgtccgtttgtctgtcccccccccccctcccaatttgtttcttttttttacccgccgctctcaggcagtggaaacatttcatggccttatatccatgaacgaagaattgccaccaaaactgtgcctttggacgtccttttgtccgtgccaatgtttctccgggcttatttgctttgtcgcttcatggtcctccattcccgacaatttcaggtagttttttggcttactttgaactgatctgataaacccacaggacgcggcaactcggtcaattgcaggtcgcttaattaccccccccccctggcaaattgtccaccctttcgcagcactcaatcggatttcaatggacttccgattcgtcataaaaacgatgatggccgaccatccaatgacagtgctcgtaagtttgcatctaaaaacatacatccgccgaccatttgccattcattcgattgtcccgtcattttcgatcattttcaccgcttcctattgggtttgcatgtcttggatgttcactcaatgcgaacggtacaacgaaggctatacgggcagcacggagatggtctactccaactcattttggttcattatggtaagtaattatggtaattgccattctttttgttttgtccctttaggtcaccttcatgtccatcggtacccttccaatccgtcccaatcattcgattagcaattcccccgccacttaggctacggcgacgtcgtcccgacgagttattgcggccgtttcctgtcaattaccacgggcattgtggtcattattgccccctattcccctatgatttgttaattgccttcctccaatgtttccttctttttagggtgccggcgtttcctccgcattaattgcagtaatttcgcgcaaattggagctgtctcgggcggaaaagcatgtgaacaactttatgtaacagcaaacaaaactcttttttgaagaaaatgaaatcgaaactttcagggccgactcaaaactgacaaatgcgtgcaaaaatgccgctgcttcagtccttcaacacacttggcaagaaaagaggaaaaaagagcgaatgggggggaagccaaaggaattggaaaagcattgattgttggcactgattgactgatcactaactgatcacaggttcatccacaaataccagcagagaaatggacaaaagggagacgaactcagactgagacagcaccagagaaa

SEQ ID NO: 62962 - DNA, 246 bp, Heterodera glycines
atggaagaaaaaaaaattgaaggttgtagtataaaaagaaaatggaatgaggtgaaaaagataacggaagagaaagaggagaaaaggaaaaaggaggaagagaaaaagaaaacagaagatgagaaaaagaaagcggaagagaaagaggagaaaaggaaaaaggaggaagagaaaaagaaggaggaaccgaaaaagaaaaagaaagcggaagaagaaaaaaagaaaacggaagaagaaaaaaagaag

SEQ ID NO: 62963 - DNA, 235 bp, Heterodera glycines
atgttgcatcggcgctcatcagactcgcggcttaacgcctttctgcgaggggaattagcgtaagtttggtatttccaacagtaactatttgatactgtaaaaataatatccctttatttttaatccaggcccagcattgtgcccgacttttgtgacacttcagtgtttaagacaattgttgagcgggcgagaaaggtgtgcgaaatttacctgtcataaggctattagcaaaata

SEQ ID NO: 62964 - DNA, 135 bp, Heterodera glycines
atgatttataaagcatgtgctatgtttaaggcgccaaagaagccgcacaatgacaggttcagcaatttgagaacactacaacaactcaagggaatcatgtccaaaaagaagcagctttctaataagccaagttcg

SEQ ID NO: 62965 - DNA, 664 bp, Heterodera glycines
atgcgtaccattctcttcatggccatggtttgcttggtgatggctgtcctaatggaaatgggtgggcaaaaatattttattaaaattataaaaaatatatttttatttatttattttagcaaattcaaaggctgtcaaaaaagacaataaaaaggtaaaaacaattttaaaaatttattaaaatattactttaaagcagcagtggcggcatctccagcaaaaggaaaagcatcgccaaaaggatttgaaacagcaaaaaaagcaaagccagctaagaaagtcaaagcggcaaaagcaataaagggagagccgaaaacaggcaattaattaattgaataattaattaattatttaatttagtcaaaagtcgcaattgccaaaacagcgcaagtgaaagacaaaaagtcacagggtaaaaacatttaaattttatcacatcaatttctgcacaaattaatccctttaaaatgtctatttagccaagccaatggttgtaaaagcagtgccgcaccatcaaacggatatgatgaatgagaaaggtatgctgaaagtgtcaatcgattcatatcttaatttccccaaaattatgggaaatttaggttgcaaaaatataattcgaaaaagaaatttagaaattgaattttatttccaatttttaattaaa

SEQ ID NO: 62966 - DNA, 380 bp, Heterodera glycines
atggcaaacgcatatatctggatgattttctgcgtcatctacggcattacgtcttcatctttaccatcccgatcattttcaccggggtgtacggcatggtttttcaacccacactttggctacatcaatgacccaaaaagagaaattgtacgaaataaattgcaaaaaataaataaattttaattgcaataatttacttttacagtatcgcaacaaattgcttactatctacgattataccatggctactgtactcacttcatatatctgtcctttttgcttgttctcctcatcaaaattggctttaaatacagcaaagttggcttatcgaatccaaccaatggcttacaaacggcgaaaatggtaattaagaaatttaa

SEQ ID NO: 62967 - DNA, 350 bp, Heterodera glycines
atgcaaagaaatgaaaatccaatccaacaattaattaaatgtatggtgtgtcgccgaaccctcgggtaagaaattctagtggaacgcctgggaggacaggtcggtaaaattgttcggttcggggaccctattggggaatggcaataatttaaacaaaaattttttaaattaattaatgacttaagtttgggcagtggcgggccttaaatataattttatagggaccagcaaaattggttactcagatttatgaacatatttggggatcccgacctttagggacccaacaaccgggcagtagatggtaatatcttcagcatttttgagttttgcttaattttaaaaataaa

SEQ ID NO: 62968 - DNA, 875 bp, Heterodera glycines
atggtctattgtgagcctggtgatatggttcaaggcgaagtatttttggttgcttctcttatcgtggttatttttactttgcctacaattgtcatttatattataatggggattatgttaaaggtaattaaaattaaatgacttacggtggttgttaaaaaaatgcattttgatttcccagtgatcagaagtgatcagaacaacagcaacaattcgtcccagtcccaaattgaaatcactcgtcgcattttcaaatcattggctgtgatcatggcagtgatcttttgcttttggttcaccagttgtctggtggttaacattgtggggcgcggactgatcacaagtgatccgtcatctcaatttctgatcacacgattagtggtacaaatggtcacaattgcaggggcgatcaatgcaccaatcctatatatttgcaggcaaatttagaattaatattaaaaaaacttttttaataaataaaggttttttagcaaagaatatcgtgatatcttgaagagtgagttcggttgggtcattaaattgtggtcaatttgaaatcgaatttcatttgctcatccgaaacccaatcaaaatgcttccgctgttatggttgtgtcaagaactttgaaaaattcaaacgacaatcgagtgcatgtcagatgaaagaaaagaaaaatgttttaatagcaaaaaattgagcgttatttttacaaaattagattaatttatgcctttttagaattgatcatagaatcaaataattattgataaaaaatcttgtacgtcatttgtcacttgtgattcacacgggccaagtaccgtaagccatccagctttttcagagtgtacagaaactgcgagtcccttcgaatata

SEQ ID NO: 62969 - DNA, 507 bp, Heterodera glycines
atggcatttgcgcaggggtcgcatacgatgagcaacaaaaagtgtgtgctgcccgacggttcccaaagaacgcagaagaaaagctacgagagcatttatgttccgccattaaaaccaaaaccttttggcgaaaatgaggttcaattgaattatcgatgtttatgataaagcatatttctttttcagaaactcatcgaaattgaagaccttccgaaatgggctcgtccggcctttcagggctaccgaaccctcaaccgaattcaatcagtgatcagtcaaaaggcgcttcacaccgatggaaatttgcttatttgtgcacccactggcgctgggaaaaccaatgttgcactgatgtgcattcttcgggagatgtctaagcatatgaatgaggacggaactgtccgaaaggacgagtttaaatgcatttatgtcgcaccaatgcgttcattggttcaagaaatggttggcagtttcaagcaacggctggaagaggcgtacggaataact

SEQ ID NO: 62970 - DNA, 687 bp, Heterodera glycines
  unsure (1)..(687): unsure at all n locations
atgcgctaccgaatgatgaccgacaaatccctggaaccgatctcttcagagtttcctgacgccgcactttggaacaacgaaattgaccaattgaacaaagtgagagaggagggggaaaattgcatttttatgattaaaaagggacggaaagaaacgcaaagcaaagccaacgaaagcgacggaagtgccaattggtacggatcgccgtggatgttcgtcgagtgttacatgtacaggcgaattcggcagttctttcagcagagtcagtttctccgcgagttcgacccgttcaacgaagacaaagagaaaagttacaaagacaggtgaaaagcaattttacttaatcgtccagtcaaagaccataacacttggtcaatgcttacaattattttcgtatcaatcgaaagcttaaagtctataggctttttgtaaaactaaatctgcttaggctaatggttctagtcggttttatgcgtcccaatgaccatnacccagtttcttaggccataacttttttcttacttggtcaatacccatattcttggtaccaagcgaaagacaaaagtctcgagattttttaaatgcaagaaaagagcaaatactggcattaaaaaagaaattacaatgaaaaaaacgaaattcaacttttccgagcataatttttttgtctattgcatttagatataa

SEQ ID NO: 62971 - DNA, 152 bp, Heterodera glycines
atggctaataaggttgctgccgacggcattgagatgaagcgtacgccgcccgacctttcgccgcagtcgctacgagtactatcagcggcacgtggaacacgaccagggcaagccgggactacgcgtgacggaaagcatttggcacgaagggg

SEQ ID NO: 62972 - DNA, 344 bp, Heterodera glycines
atggctctggacccaggaaaaaacccaggcctggatccaggtctaggtcgatctctaattttaatgttattgtttgtatttataaaccaaaacaaaaagaattaattatgggtagaaaaacgaattttccttacttcttattaattaattaaaaccacaaataattaaacaataattttttttccaattttagggagtgccaacaatttcgacgtgttcaaaaatttgtgcctatattttggctttcatttgcatgttcacctgttccatttgggcatttcgccaagtgttgcaaattgaaatggacaaaatgtccatgccaattccattggatcgtatgttga

SEQ ID NO: 62973 - DNA, 466 bp, Heterodera glycines
atgactgtttttgaccatgtgtgagtccacggggtacgaagtgttggcccaattcggccggcgcatcaaaatcagcgtgaaattgaaggcgatcatatttgagcaaattgtggtcaggcacagtacagtgatcagcaaaattgcgtagcgaaagccgccattactgcagcaacagcaggtggtacggttaccgtaagacggcgcatcgacgcgcgatggtcgtggcgcaacggtagtggaacaacgctttttgccattcattcggtccattcaaattattaaaaagaaataattaaattccttaaagaaaatttaattgattctacatcgattgaaaattaattttatgttagtactaattattaaggattattttaaaacaatttttcagaccaattctctgctcccttttttgctcatttagcactttaggaataataattatgcatttaatgcattaaataaa

SEQ ID NO: 62974 - DNA, 1095 bp, Heterodera glycines
atgaaatttaaaattatttttatttttatgtttaataaaaaatttaattctgagtttgcttctctaaaattatttttggctttgaatgtgacacagaatttggttgggtgaaccatgctgaaaataagcacttggaaaaaattttaaattttcccatataagttttcaacgactatttccagaatatttcttcccccgctgatttcaccgtgctcaacgagtcatttgtgatcccgcacaccgtaccgtactccagtgtggagaagtcgcgcctactttacgcggtcggattggccagcatggtcagcacatttccgttcagcgcactgtatacgcggtacggtgcgcgctacgtgttttttgctgccggcgtcatcagcacattagccaccgcactgttgccgctggccgccgcccatggcatggccgcgttcatggtcatccgtgtgttccagggtcagcaaacaaaccattgcattaccaagatgggacatgggccatcgaattgagagccgaccaatctcgcactgggcaatctgttgctttataatgacgaggcttaaaaattataagaaaatcccaattttcataaaaaatatctttttaccaggttttagggttcaagtctatttcatatttgtccatactttgacagattttcaacagtataatgttttctatttttttttattctaaaaataatttttattacgtatttagccatttctaaattttagccttcataacgaattgaagagttttgagaaatttgcgatcaatttgtgtgtccatatattgtaatttttatgtaaattgaattagccgtcataataaaattgctaacatttgagggcttgcttatggtgccaactttgctgccattggctttgtgtgccatcgatgggccacccttagacaacatggctttttcctgtaatttagttaattaattattaaagataattatgcgtatcttttcaaaaaaaatttaagtgcttgcatgactaattttacttcaattgcggtcacattgacaaatccgatggcagcatttgtaagtgctaattagtatttgttattattctcataacaaaa

SEQ ID NO: 62975 - DNA, 704 bp, Heterodera glycines
atgagtgttgttctgctcgtagtaagtcaattagtaataattacattatttaagccgaaaataaattaataaatcacaattagccagagttatggctaaataacttattttatttattgtacaatggtaattcttttcataaaaattaaagtttaattaaatgaagttatttactttaattaaaaataaattatttatttgtgttatctagtttaaagtaaatttttataattatttgtgtaattcaatttaaaataaattttatatctttttgtttttctcttgcaatcggaaattaataattttttaaaaataattaatggtattgaattgaacaaatttttgccaattcttaaaatacaaaactaagacaatgttagttagcactaaatttaaaaatactgccaattcaataaaatgaaaacattttttaaatttaggctaacattttcttttggttttttgcggatgatcagccagcaaaattcaccaaagaaaagatgaagattcgaaagcaaaaccaccaaaacaatttggaagcaccggccaaattggcatccgcagaaaaagcgaaggacggaggagaaccaatcgggagaaaacgaattgcacaacattggatttaggaccaacaaaatcaattgatcagacaaattagccccaataatattaattgttaattaccaaaaatggaaaaataggaa

SEQ ID NO: 62976 - DNA, 513 bp, Heterodera glycines
atgttagttagcactaaatttaaaaatactgccaatttcaataaaatgaaaacctttttttaaatttaggctaacattttcttttggttttttgcggatgatcagccagcaaaattcaccaaagaaaagatgaagattcgaaagcaaaaccaccacaacaatttggaagcaccgccaaaattggcatcggcagaaaaagcgaaggacggaggagaacaaatgggagaaaacgaattgcacaacattggatttaggaccaacaaaatcaattgatcagacaaattagccccaataatattaattgttaattaccaaaaatggaaaaataggacataaaaagtcacaagggagacgggctaatccacaggcaatcttcagaggaataggatttaatccgttcattaaatttaaaacattttcatcctaagacaattatttggggatccgtttttcgttggtttcttttcaaaatctgggaagttggttcattttttcacaccctagaatatatta

SEQ ID NO: 62977 - DNA, 330 bp, Heterodera glycines
  unsure (1)..(330): unsure at all n locations
atgttccgttttgatgaacaaaatgaaacccgtccaccggctaaaaaggtcgcaaaaattgcaaattctgatactgatgcgactccaagaggtccgattttaattgaattcttcaaaattttcacaaattacttagaattcccaaaatgtataaaatttttacatattttcatgcctaaagtaccattcagaattatttacatacaaaaaaaaaattttatagtgaataataaattatntanggttactttccggtgtttggctaccccccataaaaatgtcatgatcccgataaaggaaaactctttcttgggtagttttaggcgctga

SEQ ID NO: 62978 - DNA, 865 bp, Heterodera glycines
attgtcgagattaaagacatagacaagttttgaagaggtggaaagtgaatgggaaattgagagagaggcatgagagagagagagttgatgggatggcgcaggccttgttaaattaattaattcaaattcactccagctgcagatgccaccaacaatggcattttctccgtaggaaaaatgccatggcgcagacattccgttctattaaaatctggcaaaatcatgcgcaaacaaacacatacagcgcgacaaggaagcactttttaattttaatttaaatttctgtgccaatgattcttaaacaaccctaagggcatttgtaccgtatattttttgaatgataatacagtagacgtggctaattaaatgctttaaaaacaattaaggaaatgtgagaaggatgaacagcagaataatgacgaacagaaaaatcacgatgatttataacaactgttattaaaatccttcttctatgatgataatgtccaacaacaaatttgtgccattactaccgtatgcaccaaacgacagtagtgccacggaccacaacaacaacaattacagtatccatttcacggcggcgccttcttcaccaattgttgccctcccggaacagttgcctttcccaattgtgctcatcctctccgtgccggccatgctgatcattttgctcaccatttttggcaatttgctcgtcctgtttttcaaggcgcgcgtcgggcgcacaaacaccacactgttggtgtggaatttggggctcaccgacttcatggtgggcatcctggtgttgccgatgggcgcctattatttgctcaaccgacgctggatttttgggccaatgctgtgccggatttgggtgagagca

SEQ ID NO: 62979 - DNA, 796 bp, Heterodera glycines
  unsure (1)..(796): unsure at all n locations
tctgatctcncactacggcatttcgtcaacgccggtgattgccctgtggcaggacggcttcccgcgctaccgtctctacgacgactacgcccggctggacacactgttgcgcgtgctccgcacacacaccgatctgacgccagcagcagcagtgggcgacagtaacagcagcagcccatcgccttaccatggaactgtaggacaacaacaaagtatgttcaaattttagagatcatgacaagcaactttaattagtttggctttgtgtctggacaacagctcgtccccccccccccccgaaataaaaaaaaatcaaaacggttttctaaagtttttcaaaacttttctgtggaatatttgtatgttttcaaaatttgttccaaaaatcatttgttcaattctttgtggagttcggagtttcgtgtcgttctcacgtgtcgtgtcgcttgccgagcccaataacgcgaaatcgctggcatttgaaaatttgtctaaattaaggaaaaatgctgccccgggaacaccagcaacagcaaataaatgaaaaggaggctgaggaaaaaagtgccgtcatcgtcgacggcagtggcggcgacgacagtgttcaaaatgagccaccgcaacagcaacaaaatgatgggggaggagaagacggaggaggaggagcaacgacgacggcgccgtcggaggaggccaaaggagcggggagcagcagcaacgggcaacagcaaccgccaccacagcagcagaagcaacaacagaaacatcagtggcagcagcactcgccgctgccgtg

SEQ ID NO: 62980 - DNA, 119 bp, Heterodera glycines
tgtgcgtgtggggtactctaacaattatggggagcgaaaatccaccgcagaattacagtacaggctatatggaagatattcccgaaggattctgtctccccaagatctgggcgcatctg

SEQ ID NO: 62981 - DNA, 597 bp, Heterodera glycines
atgcatccaatcaaaaaatttttatttttgtaccttatactttaccaaagtgtcaaagtcgaacaaaaaccagtacatcgtcgtgctatcctcactgttttagcaattggaggtattgcagctctcgttttgataccaattgtggtcggatcggcggtggttggatatttgatatcctatagcatacatggcgttaatggaaaatgttagtcagtttacctacctactcaaaaggcttatatcataagaatttaaattcccctgttaaacagatgtccaacgactgaaagttttttttccccttaaaatgagaattgacgaacacacaatcacgatggatgttgagacttttaataatgagtttttattttccaaaatcgaacaaatttggcgcactccaaatttagaggagatttgttttaccggttagaaaaaatgactatttatctaaataaaatttttagaccatgaaggaaaccgacaacgccacgcccgctcagcccaaattgagatgtttttatattttgctgtgaaaaaagataatttaaaaatttcaatgtgttgatttttagtgcttgttagtccttaagcaagaca

SEQ ID NO: 62982 - DNA, 1257 bp, Heterodera glycines
atgaatattatgaaagcattattttttattaggcaatttgtgaaaatttgttgccgtttggccactgtcggtgctttagacagcgccaggggcgcagcggcacgccctgggaaaagtaagtgttattttttatttctttaatttcctttttttcatattaatcgaaaatattagtttcttcctttaaattttattaatattttaagtcatcattagggctaatattattaggctctaaatacacacaaaaggcacaaaaaaggttataaaattacaaaaacatgttttttgtgcgtttttggccactgggtgcacagaaaaaataaataaaaattaaattaataaaaatttgcaaattaacgtatagataaaaaagcacccacaaaatcattgcattaaaaaattaataacagttaaagaaaaaatattttaacataaataaaaatatataataaagactaatcgagaaaacaaagagctaccgaaatataaagattttaaaatttattcattttcacgaagttatgataatttcctatcaaaatttttcgtaataattatagaaaattttcaaatttttaaattgaaaaactgctaaatataaattgttttaaattttaacttaatttttctttttgtgttagaagaaaacatttttgttaaatttattttttttatatttcatttttttttaaataaatgaataaataatttaatttattcttatccgttactgatattttgattccaattgattcaagtttatatgccctatcgaaatcatgctgatatgaattacaaaatccaaatgatcaaattaaaattaaaataattaatttaaaaattaaaagcgaacatatattttaattaataataaataatattgaaatatttgctatgttgacaaggtcttcggtcaactctcgatttttgctaaataattataatgaatgaaaaggtttacagtttatacttttgcaaaaaagtgcatcattaaatatactataaaatgaattattaatagccatcaagtaaacaaacaaatttattaataatactttatttcaatttaaaaaactaaatttcatttattaaataaaaatattatctcataatttaatatattcagtaatatattatatatatattttttataaacaaacacataattaatataaattaaatcgtaagaaatatttcttccaagtataccacataaacattaaatattaaatttattatttaatatgtatgata

SEQ ID NO: 62983 - DNA, 93 bp, Heterodera glycines
acattgacgagaatgccgacactttgatcgaatcgaagggatttttgcaaattgaccaaaaaatgttgtgcgaaattttggaacgcgacaaat

SEQ ID NO: 62984 - DNA, 93 bp, Heterodera glycines; identical to SEQ ID NO: 53399

SEQ ID NO: 62985 - DNA, 726 bp, Heterodera glycines
atgcattattttgatattgcttgtctacttggctatataatggataaaatccacacatggctggtcaacagaagattggacccgacttcgttggccaaaaatgcctggtccaaattcaaacagtacaagggtatcaaaatggaataaaatcgatttaattattatttaaaattgaattcattgaatgtttcaaaattgattatttatttacccaataagtttttatttattttttcagttacaaaagcaatcagcagaattacagagcatacagttgaaaatgatgatgatggcggttgcgcaatatgcctaggagcttatgaaatcggggataaggttcgcacattgccgtgtgaggtatgcgatttggaattttttagctgaataaataagaaactgtaaattatttaggttctaaaatctcaaatagatgttaaaagtggaaaaatagttgcaaaaaactttgatttaggggtgtaaaatgatcaaatctattcaaaaaaatcaatcaatcatttataaagaaaattaagccaaatccgcattgagatacaatattttcttctagtaatagttttaaatatctttgtttagccaaaaatatcacatggaatgcataaaccttaatttatttagcaccaattccactcggaatgcgttgatgaatggtaacgaaacttggtaaaatattttctttaatattttgcctgttttcacaggattaaa

SEQ ID NO: 62986 - DNA, 558 bp, Heterodera glycines
atggtggttggtcagcaaaatttattattattttgcatatattatgccgtttttctgatcaccaaaaaaaggtgtgttgatcatttgggatcggatgtttggcacatttgaggccgagcgcaaggatgatccgccggtgtacgggctgatccggccggaacggagcttcaaccagttgtggcttcaggtcgtccaactaatgggttttcaaatcgagaaattaggcatttaggtacttaaattccagtacaacagagtgggcattattttgtcagagtacttatattcaagtacaaaagggttcagtgcaaaggctagccatttgttcttagattccagtagctaatgatggccatttgccaatgtatacacttaggttccaatacaaaaggatggccaatttttcaagttacaagaacagaatgatgaacattttgctgccaatgcacttagttttttcagtacaacagagtggatattttgccaaattttgattcaaactgaaacctatttttgcctattttggcgttttgtccaaaatttgttaacaaaaatgca

SEQ ID NO: 62987 - DNA, 1416 bp, Heterodera glycines
atgcaccccgggattcagtttccggagccgttgcaaaacttctcgcccgagccgttggacctgatgtacgggttggtgatgctaaaggacctgagcttggagcagttgctgttgtacgtgcagccaggatcctatttctacccggattcaccgaccgacgaaagttcgttttgacaaaaaaaaggaggtgggaggcagatgcccaaaatgggttcaaacttaagtttttcaatccctgatagcctaaaaagcattatataagttatagaaaggagagcagcttatttcctccacctcccgagaaataataaaaaaatttactaacttagaaatttttcataaaaaaatttttatggtgaattacaaagatttatgaaaaagtagagccaaaggagaggcagtttttcggacttacaaataatagacgcggggtttaattggcattgaaaatgaaaatttgaataaatggcctaaaaatctatgccttttcgtgataaagtctcggattataagcatgccctttttcagtaaatgagatggtccagcagtccaagtgggaggagaaggaaggacggcgctacaattggactgattccaattccatgccattcgccgattgggaagtcggggcgaaagtgcccaaaacgacaaagacgccgcctccggcacaaccgccgccgctgccaatttttgccgagtcacagaaagacaaattgtaagcagtcaaagtcacactactgcaaatttatgcaactttccattcaaaaacatttagtgtgaaaaaacaagtggaaaaggaaaagccgacggtcgaaaatgaccgaaaaacgacggtgccggagggggcgccggaccttccgtccggtttcggtggcattttgcgtcagaaagcagcggtgaagcccaagaagaacgtacgctggtcgacgctgatgatgatgagtgacggcaacaaagtgcagctggtggccagcggcttccaaatggttgacaatgaaagtgttcggatggcgatggacgctccattggacgacgacggatgggaggacctttgaaagtggcgaaacaatggagaaatcgatagggagtgccaatgcgacaattgtgccggagtttcaacattttttgtccgttttatttctcattatggtttttcaattaaaaatggaaatttcgccccgttttaatgatttttcattgttataaattgtgtacttaattctaagatttgtactggttttgccataaaattataggattaattaaaaaacttaccccccccccgcgaaattaaaaaaatttataaattaattaaaattttctaggcgccacctgatgccatcgccggttcctcattttaccatttctaaattcgaccccaaatacaaaatggcattcaattataaaaattggtaa

SEQ ID NO: 62988 - DNA, 860 bp, Heterodera glycines
atggccgtgctcatcgaaacaacccttggtgacttggtcatcgacctttttgtcgacgaacggccaaatgcgtgcaagaatttcctgaaactttgcaaaaccaaatattacaatctctgccaattcttcaccatcgaggttggctttgcttattatcagggcacggatttatatgtggtcaaacttaagtttttactatgttggttttaggcatttttccttttcgttgtccccgagaaaatttcaattttattgcttttttgttcaaattttacgattttttataacctaaaaattaaaaaaccttgaaattttcaaggagctaggctttatgtcaatgtttttccagcaaaattcaactgttctgataacccgcaacatatttataaaaattctacggcgatttgtgtaattttaatacatacaaaatgcgattcaattgtttttttcctagtcgttaattttactgtatttcattttttagccaaattacatcgcccaaactggggacccaacgaactcgggaagaggtggcgaatcaatttatgggtcggtttctcccttaaacaatttctatattatagtactttctctttcagcactctttttggggagcaagcacggttcattgaaatggaaaatgtgcccaaattgcggcacagtcagcgcggcattgtgtcgatggtgaacaacggcgatgggatggtcggctcgcagtttttcgtcactttgggcgacgaattggattatttggacggcaaacattgcatttttggccaagtgggcgaaggcatggacacagtgaccaaactgaacgaggaattagtggaccgaaacaaccgaccctaccgggacattcg

SEQ ID NO: 62989 - DNA, 708 bp, Heterodera glycines
atgccttgccaattgcctaatgaaattgcgacggtcactgacgacgtgttttcgtatatgtgcaatttggcaatggaaaagtgttcgaaaaaggccgataaaaagaaggcctcgtgtggtggggcagcaatgcggaagaggtgagaggcaaaaggggacgggggaaggcaaatcgggtgactaagcaatgtaattccatcatttggctctaaatttactatttttgaattccagtcaattcaattgcttgtactaatttcgtatttaatttgctctctttttttagacttttgatcaaaaacttcgtggcacaaatgctcgcgcaggatcgccactcgcgagagctgtcttcaccaacttctgactgttcctcccacttgaatcaggtgagctaatgagtgtaattagtcaaaaaaggcggtcagcccatttattatttcacgtaaatgattttttgtgttataaataagcgacagcaacaaattaaatttttagaccttcgacgagtcgttcgactttccgtcgtgtcaaagcggtgcgaatgcagtggaccaatttggagacgacatggaaatggacgccatcggagaggaagttagtgaacgattcttgtaaaaatatagcaaatacaacttttggtgtttcataaaaaaccggcagaaatctgccaaaaattttcacttcaccgccccgcccccccccccccca

SEQ ID NO: 62990 - DNA, 525 bp, Heterodera glycines
gttccatccaatgcgacaaacgatgcctttctgtgcctagaccagccgtcgtcattgttgaccgacttggacgacgtttcgtgcgaccctcagcagcagtgccattcatcgcgcaatcggaagcggccctggtcgttggtgttctccgccgatgccaccgccactgctgactctatgccgatgccgtcgctgtgttcgatgggtgtcgtcgtcgaccagtacaaccaccaccacctgagcaacaccaacaacagtgttgtcgacatgttcacggctgcaacttctgctcagcaccaccacttcatcaactccaccgcaaacaacatcaacaacaacggcgttctccactcgtcggctcctccgctgttgtcgccgctgtgctgcggcatgctgcagatgagtccgttcgggtcggccactgctgctggcgaggccatgctgttcaatggtgctggtggcggtgccggtggtgttggcacgggcggacgtgtggagcagccgatgctcaagcgggtcaagctttaa

SEQ ID NO: 62991 - DNA, 995 bp, Heterodera glycines
atgccacaattcaccaaaagaccatttcgggtgccgagtgcgcattcggtggacaaatttgtggacgaattcctcaaatcggacggggtaaaactattggaattgagcagagaatgccatttaaataacatggaaggagtgcatttttccaaaaattccaaaaatatatgaaaatttttcatactttgtcatggatcgtaattgtatgatacggtggtattacagtaggattgtccagttttttctacaatttttgctcaacacccttacaaattcagctgttcattctccgattggtggccacaaatgcgggcgaattggtcgtcgttgacattgtcaagtgcctttggaggttcgaaattcggagaatttgggtcaaattattattagcgatcggaatttgtgcccagccggcgccggatttattatttatgtttatgatttgccaaaaccggacggtttcggctacaaatacccggtggtgcctgatatcgcatttctgttcctttttaaaaatggcattcattgaaattcgcgcttttcagagagttttcttcccgtcagtttcatattcgtccgttggtctatgaaaacgaactgagcgaagaacggaggcgcgaggatgaagacagtcaccacagccttctgctgaatgtgtacagcagcagagggaacggaccgacccatcaacagcagcagaggaagcaaagccaacaacttcggttggtggtccaaaatatttggaaaacgaaattcgaacttttgtcagatattccactaatggcaacagcctcggccttccactcccgacaatgtctcggccgccttctgtggtcgcattggacgattctgtcggcacaccgtcgcccgtctgatgaggaggagaaagaagcaaatggccgaagacattctcaacgaatggatgcgatgccatcagattaagaacaacattattattttaatgcgaccttttcacattttgtacataaatgtaa

SEQ ID NO: 62992 - DNA, 1098 bp, Heterodera glycines
atgaaaaaaggaattgccctgcccccagaaaatttgtctgaagtggtcaattcacttcgttttgacatctgttgggcgaaaactcgggtttcctttgactttgactattttgtattggaaaggcaacgaatttggattcgaaaacaaaaatgggtggaaaaatagattattaatattaaagacgaaattattttcttttagaaagcacgggtcgacttggccaaggcgaaggaacttttgggaaatttggcggcacacatgcttccagtccacctcggacaattgcgcaattgtaagttcatttgtctatcttaaattaacgcttaccgactaaattccctttagtgatcgcttcattttttgaggtggcatacaactatggatttcctcaccacgaagacagtcaagctccaaatgcaggacatttcgagattcagtttggaagaattctcaacctgctagaaaacgcaaatgccacccaaattaacaagacttcgcagtgttagtcgtaaacactgtctattaattatactaataatttgaatcttcattaagttctgttcgcactctatgaaacctttgctacctttaatcagttggcgattgataggaccgacagtcagaaccaaaacgtcgccgttcggggtgagaatgccggccttcgggcgctgaatgtcggtcttcgtgatgagaatgtcagtcttttggcggagcatgtcagtctgcgggcggagaatgtcagtctgcgggcggagaatgtcagtcttttggcggagaatgccggccttcgtgatgagaagataagccttcgtgatcaaaacgtcgccgttcgggctgagaatgccggccttcgtgatgagaatgtaagccttagggctgagagtgacgttcttagggctaagattgaaactcttcagtcaatgatttgaaagactctgacgttaaatgttttttgttgactattgttaaagaaaccatttgcacattttttggataaaggtcattaaatcagtgaaaagcttagtcagtgggacaaacacagggttgtgagagaaaattttccaatgtttttttgaaaaggcgcactgcaaaaataaa

SEQ ID NO: 62993 - DNA, 907 bp, Heterodera glycines
  unsure (1)..(907): unsure at all n locations
atggcaaaaaaaggaatagatagggcttgtaggaaagtcgcctttaaaacgatcggcatattcaaaaatgattttgactccggtaggtggttttcttctgccagtcccttcgaaattttattttattggagagaaatttgttaacaaatatttcaatgcacaaaaaataccaggattaagccgaagtaaaatagtccaaataagagatttaacataaataatttgtacaattaaaaaaaattgaaaatgaaatatcgaagagaaaaacacagaaacattggtgggggagggaaaagcgtttggcaattggcaaaatgccggggctggcattatgttccgaagatatcgccaaaatgggcttttgcttactatgcaaaatacggcacacaatgtcataacacaagccaattgatcagtggtcacgtcaataattttaaaattgaattagaatcgatgactgctcagcatgcgttattaaaatatttaaaataataaattaaaacctttaaatattttacgaaaagtttttaaatattattttgtattaaaacaatctttttccatttcatgttgatttcccgtaatattcaatccgtaatttttttgcataatttatgtgtaagaatttatttattttttaatttgtttctttcgtacattagcgaagagatattttaaattttcaattattttttattataaaattaaaaataattttttagtttaaatcaattattttgtaattttctgatatttttaaatattttacctaattagttctataaattttcctttttanatttataaaatataatattttttataacttaaaaataccttttaaataactttctcttaatagataaaaagacaaaattgtttaatccatattgctgatttataaaaa

SEQ ID NO: 62994 - DNA, 469 bp, Heterodera glycines
aaacaatcagtcgtggaggaaagacgggagaagaaattgaaaaagcacttgttgaaatgtggaagcgattggaatcagatattccacgtgcggacaggcaatgttctaattctgtgattgattgagatttttgcatgaatattctcggttctttgtttgaagaaaactcattttccaacaagcatttgctttcatctttttttatggtttgatttttgtgcattttttgaccaaattcggcttctaaatattcttattcttaaattggcctctctttagttaactttgacccaaaccccgaaaacatcgggaatttttttatttgacccatctttcaaaaaatatcaattggttgttttttactggcacagatgcatcttaaatgctgttgtggacggcgaggaatggaaacgcgatgaagtctttggcactgtggaatttttcaagaatcaacttttgataatggtaa

SEQ ID NO: 62995 - DNA, 1968 bp, Heterodera glycines
  unsure (1)..(1968): unsure at all n locations
atgggaaaaagatggcgaaaaaacttcaatcataaacaccaaaataatgggaatgatcgcagtggacctgcagccacttgttggagttctaaagatgcagcgcactctcttctttcagttacctgtcacttcatttacgagggccaactaaaattcgttgtcttggctgctaagccaattaaaggttaacaaatgtcatcatattctattaaattattaaattttaggacggcataacgctactgtcttaaaggatttattaatgaaagtttttgttgaattttcattagaaaagtcaaaaaattttgtcgttttacgggatgctgcagaggtgatggtcaaagtttgtaccgaccttggcttaaaatcaatcgattgctttgcgcacaaatgcaatttggttaaatatagtttatgcattatgtaaccttaaattatgtattcaggccatttgggacggtgttcgaaagttgaatgatgacgaatcgacaaaaagccttcttgaacggattaaaaaatttgtcagaaagcttaaaaaatcgcctgtacagaaagaacaatttgagaatttacaaaaacttctggaattgccgaaattatcattaactaaggacactgaagtgctgaatgaattatatatatcaaaaattgtatttttcaggttcgatggtcatcaacctttcaaatgatcgatcgttttttggttaatcgacaggcaacaaatttgttatgtgcccaagacactgatttgccacggttttcgtccaacgaatggacggttatttcggcattgagaaaagtagcaaatacctagtttaatttgataaaattgttcttacagattctttctcaaattcattcggcaactaatgacttacaaaaacgtggaacgccaatttctgcaatgattcctttgttcagagtgatttgctttgcacttgaagaagaaggcgatttgaaacatgtaaaaaaggcaattaccgatgggcttaagcatcgaatggatgcaaaaattgatgccagtggaaacgttaaaagattttcgtgggatgaaagcagagagcttgttctgtcgacaattttggaccctcgtttcaaactttcttttttgaatgcagaaaagcatgatcgatataaaatttggcttacaaatgaagcagaaatgtccaaaacattaaggtgctttgtataaaaattttttatattttaatagttttcaggatttaattataactgaagtgtgcgagactgatcaaattcaatcacaaggctcaagtgaattccatgatcttttctcccgatgtgaacaaaatattgccacagaatgcggattagacattactgcgcaaccgttacctagtccagaaacactgaacaaccgccaaaaagcggaagtcataattattaaattttcaaaatctatttgtttttaattaaaggttgaagtcaatgattatttgcatgacaaaaaaattcccaatcgactctgacccatacgggtactgaacgggggacaatgctgtaaaatggccccttcttacatgtcttgcgcatcgttttctttccgcgccggcgacatctgcagaaagtgagcgcctatttagcgctgcaggattaataattaatgatctgagaaaaagattgactccggaaaatgcagagattttgttgtttttgcatcacaactcanaaatgtatgattttgactattcgtaaaattttttgaaaaaaatttggcttttcgcatttcgctttttttttcatttcgcatattttggcttttcgcatttcgcttttttttcatttcgcatttttcagtttcgcaaatttcgcttttcgcatttcgctttttatttttcaatttggcccatccctgtttcacaccctgcgatgaaatacgtacaataactactattgaccttatcttggataagaataagcgattatttaataatgaaaaaaaataaa

SEQ ID NO: 62996 - DNA, 680 bp, Heterodera glycines
atgctttttttgctgctccttttttcctccgccccttttgcccttttgtttttgccgttggatatttttttcacccaaattgtgcccgcaaaagggggaaacggcggtgggaaggggggctgttatgtgagttaaaaaattaatttcattatttaaatgtgattattataagaaacgttgcccttttttgttgaataaatttaaggaatttgatttatttattttttataaattgattaatctctctaatttataagggatattgtgaaaagtttaatgcgttggaagatgacttggagaaaatgaagcaaataaaggcaaacgctgaatgttttgttgacgacatgggaaaagtcatcaaagggtttgagaagaaactgaacaaattgaggaccagcgtaacgaaattggaggaagaaaatgagagtttaaccggggattagcagggattaattaactaattgaagcgtttaactgggattaattaagcataaccttggctaattaaattaatcaaagggtatccttctgaaaagagacgcacaaacgatttatcatttcggaaaatattttttgattttcaatttaattttgtaagaattttttaaccaaaacttgtttttggtgttcctttaagggttcttttacggttgactttgctcttttaaaatacttcaaaa

SEQ ID NO: 62997 - DNA, 192 bp, Heterodera glycines
atggaattgtgccatcttttgcgcagtttcgccaatgttcgccccgacggactacggccgactgatcgaatgcacgacgccattcagtgcccaaggggacaaccaactgagtttggcgatcggggagagagtgttgctggtgaagagcggaacgaggggatgggtgttgggacggagcacggacggagtgag

SEQ ID NO: 62998 - DNA, 958 bp, Heterodera glycines
atggaacccattagtggaaaatcggcgtttcaagccaatggaagggcatttggaggtgtggagggaaattgcaattttaatattgcttacatttttctgaaattgcaaaaataattatttattttttgcttagtttcaaaaataaatgaaatttttaaataaaaataaaacttttttaaattttccattgcaaattctcagttattcaatgagcacgtgaacggaacagatgagacatggaaaagactttactttcgcacaaaggatggccgttttcaatggttcgcggtggggcaatttaatcataattacctaaataattgaattcctcaaaaataaaatgctcaaaattgttttcggtactaataatagatcaataattggacatatagattaatggattaaaaaaagaagtttccagctcgatccaaattcaaatgactgtttgtttttccaagtttttttcttcgtctttttcttctttacagaatagtcattgcccttcataaatttaaaattaacagaaataaaatatgatttatttaaaattttttagagtcattgtgccgatgagcatccaatttcggaccttttgttgaccggcacccatcagtgccaacaaagaggcattgaccatgcaaatacgaggcggcaaagaggatgctaatattgttgtccgtgtgccttcaaatgtattcgagaaatggcatcaggggggaagagaattagtaattactgaatgattagttaaagagactacaacaaaataataattaaacaaggaatacaatttttaaccaaaacagagagaatttaattaaagattaatttgaaatcaggctttgtttagccatgccagctcctcaaatattattttttgagctaagcgtaaaagcatagaaaacaaaacatattaaaaaaaattatgaattttaatttacaattttcggaaaataaa

SEQ ID NO: 62999 - DNA, 1202 bp, Heterodera glycines
atgttcgttattcaaataatttttattgcaacgattttcactttatgggtaaaaagtatttaaaaatatataattaatatcaatttccaattatttatattttaacagtcaaccatttttgcctgtcaatcatcacaattggtaccaccaatttcaacttttccattgccagcagatgtgccaatacagcgaggaaaattattgtaattattttctgatttaaaataaaagtcatattgaatagtttcgatccattgaaataattgatttaaaaaaatgctcccagattaagctaacccttcaaaaattttcgatttttcggtttccaagggtcgctaatcacgatttaacatttcacctcatgtcatctgatgatcatcaattcgccggaatacggacgaatttaatgagattttgccaacgtgatcagcaacatgaaaccactaattaaattttataaaatttttgacagacggtagtggacattataagccgcaaataccaaaaaaaaaaccacccttccaattctcaacataaatttgcgttatccccgttccagtaaattaatttatttgaaacaaaaatttagcgcatcggctcgaaaagaaagtgaacaacaccactttgacaaagatgagcaacatttatttaacgaaacaatggtaaaaacaaaaattttggccaaaatcgaattatttaaaaaatcgttcaacatttcttttaaaataaaagggatgccaagtgttcaggtttttcagatttgtcctgcatttgagataggcaatctaagaaactgcaaataaatgccctaaacttttaagatttgtctaaatcttgatgttcaaaattttacatacaaaaaatctcgttaaaaattcctattttttcctagcgacgcctattggcatcgcaaatattttaaaattatttttcaaatactatagaatttacaaaaattctaagtaataaggaacttgttgcgatgaactccgcttcaaataccacaacattggcaccatcactaattgtttcaacaaaaatgggttgcacgagcgcttctgttactgccgtgactaaccaaccgtacaacgagcatactgtacaagctgattacatctcattggtgacaaaggtgacaacaaaataattgatgtcgttttttggcactactaaaaagaaggcgccttttgaattttattaaa

SEQ ID NO: 63000 - DNA, 1524 bp, Heterodera glycines
gaatatctgagccaaaagggatttgttcatcgggatgtggctgctcgtaacattcttgtccaggacaaaacttatgctaaaattggcgattttggtctgtgccgtttcatttatgcggacagctccaattataagagccgaggagggcgtttgccaattaaatggtaattttcataaattatttaaattatattataaattatttgtcatattttcaggatggcacccgaggcaatacggcattacgagtttaccaccagttctgacgtgtaagcatttgaagagagaatgcccggtgctgggactttagtcaaaaccatcaaatgaaaaatttttgacaaaaaacaaaaaccaagtttttttgagcatttttggtcataacattcttcaaatttaacgaatctttttgaaattttgcaggctaattgaaaaagataggctatcgaatgatctaaaattaaaaatttggttacttttgaaagaagttatgaaaaaaaaattccctttgatggtttttgactaacgccataactgactaatgaatgttcgagcacggcgaagcaattcactctcacttaaaaaattctataatttttcacaattttttttttgctaaaagagaaaattaatttatttttaaatatttttgaaataattatcatttttagggttttctaaattaaaaattaatttttttaaataattttcgaaaagacactttaagatttttaaatgcttcttcaatatctcgtcaattgcaagaaggaattaattctttttttcaatgtttgtttaccatttcagctggtcttttggcgttctgatgttcgaaatcattacattgggcggcacaccgtaccccgggatgcaacctgatgaaatgctactgtatttggagtctggaaaacggatgatacagccagacaattgtcccgatgactagtataattttcaaaaaaaagaatattgaaaatgttcaaggtggtctgttcccaacccccccccccctaccgtagttctttaaaaaaaattcaaacatagaaattttcaagagaaaaatcttcgaaaattttttaaaaaactcaagaaaacaaaattttttgaaaattgctgagttttataaattttttttaagaattcatgatcaatgaatgggtttcaagaaaaattcctgatccgggtgcatttttgaaatatatccggatcaggttcatctgtaaaagtcttggtaaaacccgcccacggtcctattcatgtctctaaaaagtttgtgaatatatatatatatatatatatatatatttaagttatcgtgtgatgtgctcatgttggactggtgacccacgaatgcgacaagattttgcacaaattcggcaacaacttgcgcttcagttggaaaatgtcagcgatgagtaagtgaaaatttagaaaattttaagaaattatttttttaattttgtcgttttttcagatatgcatatctgaagcttgatgccaaaaaagattattacaatgtcagctacg

SEQ ID NO: 63001 - DNA, 256 bp, Heterodera glycines
atgtcggaagtcggaactcggaattccgtgccatccctgatcggtatgttaaatttggtgtggatttaacgtgcaggaaaaaagttaaagtcacgaagtaaatgttgctctttacagcttttttttcttttttaccgtccatgatgcagggactttccccaatcaaagacgcttccaattaacgatcatcctcagtttaccataattttccatattaagtcgaacatacgttcttggcataaaccaaaagattaaa

SEQ ID NO: 63002 - DNA, 963 bp, Heterodera glycines
ttttacaaatcattgaattaattttgcgaaattggcttttcctttagcatcactcttagcgttgcgtgcaatttggagctgtctctgtacccaatggacagtcagaagtgccgaatcgaaatgctaagctgtaacattggcaaacgcctcttgaaagcactgcgaaatttcagatgcctatgtggaaagacagttgctcatccgttggtttgaccacgtcgacccgacccggcacaatccgagtttataaatgagaacaataaattaattaggcttaataaattaggctaggcactttcagacattcagttgcccgaattccgcatctccaacataaccagcggatattgcagcggaaattaccaatacgcaattatggaacacacgtacagaagaggcatcatcataattattatcattaatgaaatgaactttccatttagacaatttcagctgtttggtggcaataatccatctgaacaggcaaattgggtaccacgtggtgcaaacgtatttgcccacgggactaattgtgatgatctcatgggtatccgtccaattagcactcattagcgattcatttattgtccaggtttccttttggattgaccgaaggtttgtggcgcatttgccaattaagcgtccgtcgtcttttaattagggctgtgcccgcgcgagtgaccctttccttcacgacaatgctttccctttccactttggtaaggctgaagcaaagatcaaaatgtcattttaatttatgtgtgattacataattggtttatcaaagggcaatggccttcgcttcggactgccccaagtcgcttatgccaaagcgattgacttttggtttggcggtaattaacgtttaattaccctcgtaataagttcaattaatttttcccttttcccctttttattagcttgtatgtttttcgtatttttgagccttttggaattcgccgc

SEQ ID NO: 63003 - DNA, 52 bp, Heterodera glycines
atggcattaagtggcttttggactgaactgtccactaaaaacgctgatactg

SEQ ID NO: 63004 - DNA, 271 bp, Heterodera glycines
atgcgtaaagctgatggttctttgcaaaaaccggtcgcgtatttgacttgtaacttcaaccgcccggtaaatggtaaaccggcgctgttcactcacgacgaagtgatcaccctcttccacgagttcggtcacggcctgcaccatatgctgacccgcatcgaaaccgctggtgtttccggtatcagcggtgtgccgtgggatgcggtcgaactgccgagtcagtttatggaaaactggtgctgggagccggaggcgctggcgtttatctctg

SEQ ID NO: 63005 - DNA, 326 bp, Heterodera glycines
atgcctcaagacgaattcactgtcaagttaccaaattttaccgctacattaacggactggtacaaattgtatctacggataagaaaaaacgcgtattttcatctatttctatcaggaagaggaagtaaaatatcgagccccttcttcttatcaggggtgggttatgaggactgaaatagactttgacgagattattacgacttatttggttaaaggtagattgtcttcatttgctcaaataatcatagaatcatttgtttgtctctttgaaaggtattttcttttttattttttaaaattatctttattattttacagagaaatga

SEQ ID NO: 63006 - DNA, 687 bp, Heterodera glycines
caaaacccattggaaatctcgaagaacaatgtgcccagctcagcacagatctgtaccgtctggtccataaataccaggcacttcgttctgctgttcgtgaacttgctcgtgcatatcaacacacccgattttacccattagttccacgctataatttggtaattaattaattaattaccatttaattttaaatcaaaagatttgtgttgtaaattttaaatatctatatagaatttttaagttaaaagcaatgatcaagaggttattgagaacgccggcagtggtggaattggattcaaattttgagtgatttactacgaacacatatcaattgcacaaatttgtattcattttatttaaagaaaatttttgaaaatggtgaattgcaacaaaatgaataagcatgtctcaaaattttgcattaattttcttcaacctttttttttgttgaaatttgatttttttacagtaatatgaaaattgatttacccaattaaatataacatgatttccggaaaaaattcactttaaaaatcaattgaaaagttttttttagttaattgctttataaatttgctcattaatattaaattcattggaaatttttttttatatgtatatatgtaccacttgtgacccattttttttctcaattggccggcataaatttcaaaaaattaaaataaa

SEQ ID NO: 63007 - DNA, 239 bp, Heterodera glycines
atgtacaattcgttgaaattaatgtggttcacaatgtaaatttacagatggcaaacagacgacataacagcagcagccataattatagtcaagcagcttgtcatggcttggtacagttttgttgatgcgatggcacttttaaatcatttaaatttagcaaaaccggcacattgggcgtaatatcagaagtcggacacgaaaaatgccgaggaaccgctcggaaatcaatttttgtgtga

SEQ ID NO: 63008 - DNA, 2107 bp, Heterodera glycines
atgcaatgtacggtcaaacgtgggaacgagaacacgacaattgaaaagtcggtctgcaaaagctcaaagaaatgtgtggactgtggcgtattataccgtgtggcggtaattcgtgtttttaaaaattaaaaaataaagaattcacaggaccaagacaagaaaaatggtcatatttgtggccaaaaattctgcaaggtctgccttggatttcacgcaccgcgcgactgctacatcccctatcggcccaaagtcaagaaggtgaagcgttttgtgttttttgactttgagtgtacaacgaacttcaagccggacccgcaactgatgcgattcaagcatcaggtaattttttgagtgggtaattaaatatgaaaaattaaaaggtcaacttctgcttcgcccacgtgacttgcaccaggtgcattgaaaagggcatatgggaccaggaattggagatggcctgcgcgctttgtggccgattccgaacttatgcctggtccccgttcgaattctggcacacggacgtggaatgccgcaaggtcgtcgaagacccactggcagccttcaccaagtggttgctgaacttcgaaacggaagtcctcggcatggagcccggagcgaagaagcgcagaaagaggaagaatgccgaaaacaccgacggcgaggctatggaatgcgaagaagaagaggatgccgtagatgaggacgccgagaacaactggatgctggggtacgaagaagccggggagaagccggagtcggtgacaacatacgcgtacgcccacgccggtaattattttaaaaaaaacttggaataaataaaatttaaaggttcccgctacgatcatgtgctgatttatggtgaaatgctgcgcatgggtgtccgccctgaactcatccgccaggggaaccatctcctggaaatgaaggcccgcaaaacaggagtctacacaaccaccgttttccgggacaggtaaatattttgaatattaaatatttttaaaatttttgatcacttcagctacaaactgatcccaatcaaactggccaactttgtcaagacgtttggtctggaaattgagggcgtggaaaacaagaaatattttccacacaaattcaataaggtaagggtggtttattgaaaaattaataaaaattaataaaattacaggctgaaaattacggcactgtattggacactcttccgccgatggaggactattacccaggtggactctttccggcagagcgcgcaaagtttgaacaatggtacgacgagaaccgggaaactgggtttgagctgagcgaggtcattgcggactactgcaagacgggtaaaaaattataaaaagaagaaaaatttttaataataattttgaagatgttcaaatcctggcgcatggtatggtaaagatgcggcagctgttcttgtccgagactcggcatgacatcacggattcggtcaccatcccgtccggctgcatgaagtattgggtgcagttggctcaccacgacaaagagcgcgtcgccatcatcccacacttgggatacgagaagcgcggcaaacagagctccatcgccaggaaatatttgaaggtgtatccaaattattttaattttacattttgtcgactctcagtggcgtgccgaagaagaattgcgggagaatggccgagtcctgcgccatgtcgaaagccctggaggggagttcaaattcggcaactacagcttggacgggatgatggagcgccctgatgaagacaaaaacttggccatcgaggtcaatgggtaaggaaagaattcgaaaaatgtgccaatttacccattcaaaaggtgctattggcatggatgcccaagctgctttcccgacgatgcggcaattgtgggcggaggagaaacggccggagccctcagggcccgtgatgccaagcgaacccgggacattgcgcgggagttcgaggtggaaatcatctgggagtgccacctgaacgcaatgctggaggacaacccagccatgaaggcgtacttcgacaactgcccggactccggaccaattgacttccacgacgccttctttggcggtatttttgggtttaaatttgcaaaataa

SEQ ID NO: 63009 - DNA, 855 bp, Heterodera glycines
atgagccaatattccgacaattccctcccccctaccctcgacggaccgtattcccctgttggggatgacggcaccgaattgatggacgaagcaccgccattggatgaggttatgaaacgccttccgatctcggttagtttttacgaaatgtttttctaaaattcttttctaattttgggagacattttcaggttgtgccatcggacaacaatgagcgcaaggcccagaaggagccgtcaattacccgcgaattggaggcggaattgttcaacggcgatggctttacatgtctctctgccgaacaggcggaagcgggacgttttaaaggtgtggttgtaaataatacatcatataaaattattatttaatttatctatgaaaattatatttaaaaaaatttttttgttgtgctttgattgattgaggtatttttttttttaaatggtgtttagcgttccgttttattgggcaatttttgatgagcctaacgtttggtgctgtttttccggaggacattctgcgcaatttattcaccatgtgcctttcttatgcctccgagggggccaaatcaatgaaaatatccgcggaccacttcattttccttctgacgtcaaaacaccttgactacgaagtggctgtacactttaaaaagctggacaactcggcaacagaaaaaatcctgacgcgttttgaaatggtcgaccaaagcaacaaagcgaaggaaaggccatcactccttgaagaaccatttataattgacatcacggcaatcgagagcaagtgcgccaaaccgaaaatggctggaaaagggcgtaacgacttcaacatcgactaccgtattgccgatggtgcaac

SEQ ID NO: 63010 - DNA, 504 bp, Heterodera glycines
atggctggcgctcagttggcccgcgctcacttggcggcgctcaaatggctggcgctcagttggccatgcacccctcccacgcctatggggggctaccgtaatccggtgaaatctacaagggtaactactaagattaatgaatattttaatactcattttaaattaaattaaattctcttaaaggactttcaatggaaagcataaaaaatgttaaataataaaattaaaaaataacataattaaaaatttaaaaaaagtggtgaatcaatagaatacacagattttttagattacccgcatataaacgatataaaataatccgaaattagttacaataataacattaaaatcaagttatcaagttccaaatagcaatcattgggctaaaactaaatattttaatgaatagtgaatttaaacacattaataaaaaaattaaaaattaagttattaacagcatcattaaatgtggacaaaatattttaattaaaccaaaagcataaa

SEQ ID NO: 63011 - DNA, 223 bp, Heterodera glycines
atgtccacggaatgttcggaagggaaagagaacgaaaatcggaggaaaagcgcacaaacagcagaagcagtagcagagaaaatcggtgggtgagcagagagcatggggaggggagagaagtgccgaaaaacctttccagtgagccagacaatggcatcctttccatcgaagttgtgccgagtttggctggaaaccctttacacggctatcgcttcgtcgatcg

SEQ ID NO: 63012 - DNA, 310 bp, Heterodera glycines
atggaaagtgattttgtaagaaaatttttagatttttttgtcatgacaccaattccgaaggttacaccgactccctcccgccgaacttcggcattccttcaccttcaacgacgtcgacagtgtcgtcggcttggtgtgcaaatggacagtacggacttctacagagcgcctgagtatcgtaggggcaccgagttgacgagaacgggcttggctcagatggcgaacgaaacatttgaaaatgcaaaacaaagctaaaaaatgaaaatgcgcaaatttatgtaaaacagtaaaaattcatttttttaataaa

SEQ ID NO: 63013 - DNA, 71 bp, Heterodera glycines
tgtccgtttggggtactcaaacatttatggaggagcaaaaatccaacgcagaattaaagtacaggctatag

SEQ ID NO: 63014 - DNA, 49 bp, Heterodera glycines; identical to SEQ ID NO: 51181

SEQ ID NO: 63015 - DNA, 98 bp, Heterodera glycines
tggagccaatttcggaggacaaaattgtggacaccaatggggcgggcgatgcattttgtggaggtattgtaaaagtgaatgcattaagttgtggataa

SEQ ID NO: 63016 - DNA, 169 bp, Heterodera glycines
atgaaaaagagtttttatgagcagaaaaaggtcaaattcattgaacgatttggtgaatttaaagaattatatggccaaggcaaacagaaagaatttgtgaaagaattgggcatttgtaaagaaacatttataaaatggaaaaaagaattactgccaaattatcataaaa

SEQ ID NO: 63017 - DNA, 331 bp, Heterodera glycines
ccttctaagaatttcgcccagaatttccgccaaattttttcaggaatttcataaaccaaaatagaattagtatatattactaagtttaatggttttatttatttataaatgaaaaccaattttaagaataattttcctttaattcgatttcacaaatcgtttaatcatttgtaagaaccagcattttgaaaaacaatctttttaccatgacataaaaagaaacgaaaaaaaggttagagtctcaactaaatgatattgtaaatttcgaaactattcatggtcatcaacaatcatgatcaaataaaaatcactgatcaattggatgagagca

SEQ ID NO: 63018 - DNA, 990 bp, Heterodera glycines
atgaatttatggcctttaatattcattattttttgtatagcttataaaattgaatccggcaaaatccgaccaaattttgatgaaatattcggcgatgaatgggaaataaatgaaagtgtagaaaacggagaagaaaatgtaatcaaatcaattggtcaaatgcaaaatgatcaaatttttaaaaatgatcaaaatacgaaagaagaaccaaatgatgaacagaaaagacaaatcatccgaaaatatgaagccataaaagaaaagttgaagcaaagaggaaaatttcaacggaaaaaccaaagcaaaattgagacgaaaattggaaaattattaggcgaaagtcgctacaaaatatacaaatggaaaaaagatttgaatttaaataaaaagaaaaacaacaaaatgaaaaagagtttttatgagcataaaaagagggaattcatacaacgatttgaagaatttaaaagtttatatgcccatggcaaacagaaagaatttgcgaaggaattgggcatttgtgaaaggacattttggaaatggaaaaaagaattggcaccaaaataccataaaagtcaaagtaagaattattttagtgaaattaaattgtactttttctttaagaacatcataccaatgaggacaaattgatgaagatgaagcattatttgcaaataaaagaagcaaatccaaaaatgagtgacgaattaattgccaagaaattgggaattggaagtgcaactctgaaaagattgaaaaaggaatgctctcatccaattgatcagtgatttttatttgatcatgattgttgatgaccatgaatagtttcgaaatttacaatatcatttagttgagactctaacctttttttcgtttctttttatgtcatggtaaaaagattgtttttcaaaatgctggttcttacaaatgattaaacgatttgtgaaatcgaattaaaggaaaattattcttaaaattggttttcatttataa

SEQ ID NO: 63019 - DNA, 371 bp, Heterodera glycines
atgccggacgcagaccaaattttgcagcaattggagcaccattttgtcaacaattggctcctcgacacgggcaaaattgatgaaatgaagcaggtctgtatgtttggagggggtgattgcgttaaacttgttttattttaaaatttatatataataattcagagacaaagtgatcggagggaagagcatgatgagttcgatcaatctgaagaggaaactgacgaaatttcgcttatcaatgtcatttattgatggtgatttagaaaaagaaattggtgatcgacgggagaagaaaacaatggagaagagcaattcgattttgaatagacacagttcgataaaaggttttcttcgtttttacaggaaataaa

SEQ ID NO: 63020 - DNA, 919 bp, Heterodera glycines
atggaatgtcatgcagtggctggccaacccgtacctcaacgcggtgagaacagaggagacaatgcaaaattggcagaaagcaaaatgcgttcccgctcaaaatttttggattttttaaaatgaaaattgcaaattttaaagctgacttaagtataattcaattgctcccattcaggaaaaggaggcgccatatttggagcgttatgggaacatcaacgacgaatggacacagcgaacggtcgaggcgaaacatcgcaaaatgcccaacaaaccgaaaatccggcaaattgcatctggcgaagtggagaagagacgtgccaatgttggcaatttcttacatgcccatcggacggtggaggacgaactgaagaatttggagcgcagaaaccgatgggactgaacaatccatcaattcaatttccttgtcatttcaacaaatcattgttttagctctacttatatttgctggccacataaaatggggttgttcgtttggatttgggtagttttttgacaaacggcggggggatagcgatgattaggagagaaatgcaaaaaaacgggacaagagagaaatagcacatggaaagacagtgaggggaaaagagagggtgtctttttctgtcccgagcaatgaaatgctacgatctcactaatttgaggtcaaaatggatacatttttttatccaaacacaatacaccacatacaatccgcataacatataatacacacgtatgagcgagaaatattaatacataacacatgttcagagaaaaacatcacatatatgatcacaacatcttagtcttctcttctcgcttatgcaaaaatgagcgccagcacatgcagaacgcgtcccaggagcttgtacgggcccagcaaggcgaagcttctgtttcgatccacctaaaataacga

SEQ ID NO: 63021 - DNA, 906 bp, Heterodera glycines
gtgtgggggggggggggaaacccatggaatgttcatgtgccgcaattcccttcaaacggaccaccgcaaagcccatggaatgttcatgtgccgcaattcccttcaaacggaccaccgcaaagcccatggaatgttcatgtgccacaactcccttcaaacggaccaccgcaaagcccatggaatgttcatgtgccgcaattcccttcaaccggaccaccgcaaagcccaaggaatgttcatgtgccacaactcccttcaaacggaccaccgcaaaacccatggaatgttcatgtgccgcaattcccttcaaacggaccaccgcaaagcccaaggaatgttcatgtgccacaactcccttcaaacggaccaccgcaaagcccatggaatgttcatgtgccacaactcccttcaaacggaccaccgcaaagcccatggaatgttcatgtgccgcaattcccttcaaacggaccaccgcaaagcccaaggaatgttcatgtgccgcgacgctcatcaaccggaccaccgcaaagcccatggactgtgtctcgtcctgaccatttgattgaacatgcgcatcaactaaatgtggtgccttcagcgtctcttccgtcagatcaaggtggggctcctcaacttagactttaccatagcattaattgattttccttcagtgcaaagttcggcgcgtcaatttgtgtagccgcggttgtcttgcgggtaggaaaatcgttttctttatttttgagatatttattcgttattttaggtggatcgaaacagaagcttcgccttgctgggcccgtacaagctcctgggacgcgttctgcatgtgctggcgctcatttttgcataagcgagaagagaagactaagatgttgtgatcatatatgtgatgtttttctctga

SEQ ID NO: 63022 - DNA, 272 bp, Heterodera glycines
ttgtaccaaactatgtgcaaggcagtcagaccattgaagaaacagttccaaatattgtcgaaacaacaccggaacggaaaaggccattaatgaccattcaatgtcaaatggcaccgaaacttcggacattgaaaatgccattaatgtcgattcaataccaaatgtcatcgaaactttggacactgaaaatgcccataatttccattcaatgcaaaatgttagcgaaaacaatggacaatgaaaatgccattatttacaataaaaatgaaaat

SEQ ID NO: 63023 - DNA, 450 bp, Heterodera glycines
atgcattggtttattgttttggttttgattttgaattcaatttacaattctaatgcgttttttcattcgctggattcagcaactccgggaggtaaattcaaatgaattaaaattattttaagcattgattgtttttaaaatttttaaaataaaatccaaaaatttagaaatttttgcttttcagcttgtcctctcctcgtcccagccccttgggtgtgcgtgtgcggttgccagaaatcagatataaaaaaaatttcgtcgagttacggtggcgctgatcacagtagcagtgatggtgatggaggctacggtggaaatgagagcggtggtggaggggaagaaaatctgaagctaaagattggcaaagtgaaggagtattgcggctgccaaacagtgaatgtcacctgcaaatcatgcgaatcggagcaggaaaacccaatacatattgag

SEQ ID NO: 63024 - DNA, 258 bp, Heterodera glycines
atgattgctcaatctgtgccgaacattggccattattatgaggaggaggaggaagtgatggaagacgaggaggaatattcatacgaagagattgacgaagaggaggaggaagaagaagaggaagtggagaaggaagagaagcgaacagtcgccgcaagggcactgccagcggcgcaattggcggaggacggcggacagaacggcactgcccagggcaatgatcaacttgccaatttggcggatgagtgccgcaggaaa

SEQ ID NO: 63025 - DNA, 60 bp, Heterodera glycines; identical to SEQ ID NO: 52045

SEQ ID NO: 63026 - DNA, 291 bp, Heterodera glycines
atggccattaatattagtgacaaaaaatctttgatggagaatattttggctgccgttgagattagtcagactgctaacggtataacagttagcagtgaacgcatagctatgccaaggacgattcagtttgacatcctgggaaagtgccgagaatgtaagggcactgaatgtgaggcggagtggtgtgttaccaaagaaggagtgacaatttggtgcacccgcttcaaaatcagtcctcgatttgtgccttttgatgtaatttatgatttgccaggctacacatttttcaag

SEQ ID NO: 63027 - DNA, 2900 bp, Heterodera glycines
atgtatttttgtgttttgcctggacctggattttttttcacatttgacctggacctggatttcatgacaaaaacccaggaaatccaggtttcgaaaaatggcctggacctggatccaaaaaaatccaggcctggacccaggtccaggtcgagctctagctaattcttatttaaatttgccctttagctgcaaaatgtgaatgtgagcacaattcggagcatcgaagatgctttggtgccgttgatcaagttcactttccaatttgatcaaaacactccgatcgatttcgacattggcctcgtcacttttgatccgaatgagcaaatattcaaatcaaaaatgccattaaaatacgagcaaagcaacgcattgtcagcaaaaattgccaaagaaattggcgagttatctgaacagagaaaacatttcggaggaggagaagttggagagaaaaacattgatgagaagctgaagaagaagctcagatcactttcaagtgggcgacattttttaattaaaggaaaataagaaaattttattaaattaatattcttactaaattcgttaaaagccctcggcttcgaaatttttctggttacgccttaacaaagaaactgtaagtctgaaaatgcatatgtgttatatactattggatagagaaaggtcgatttctgacatattaaaatgtttaatattacgggcccataggcaaatattaaaaaagttatggggcctcaaaattcaaaattttgcctgtgttttcccttcagcgataatgcccaataaaaaatgaattttaaaactgttttcttttgctatggactaataaatttatttatttatgttgagtttgaacccggacctccaaaaatttgaatttaaccaactgagccaatgattttgctcatttgcctcacttggccaccttcgctgaagggaaacacagacaaagtttcggcttttgaggcccataacttttttaattcttgctatggcacgtaatattaaaaacgcatagaagtccaccctgctctctctatacaatggtatataacagctatgcatttttcgacttacagttcgggtggttcccttgtataagacccaacctcctgagattttcatattcgctgttgacaataagctatatagagtttaatttttttctttttttaggtttcgaagtcagctcaataattttaaagcgaattttggccactgaaaatacagaaaatggaaacggaaacattttacaaatctatcgcacttttttactgatgatcaaattttgggcaagaggtaataatttaattttcacagaaagtaataataaattaacaattcttttgccattggcactttcagagcatcacatttatgacaacaaattgggcttcttcaatggcattagtctctcccttttggtggccaaagtgatgcttctttacccaatggcatcacttccttttctcattgaaaagttcttcttcaccttctccacatggtcattttgttttaataatttattttttaaaaatttttaataaaattaaattgtcacttttttttattttaaatgtataaattattctatgcatttttttaggccttggccaaccccggtaaagctgacagatttgccaagcttgtccattcttcgctggaacgcatccgatgagagtgacaaacggggggtaatttactcgagacggggcctaatgcccggactgacaatgccaattgtcacgccgggacatattgaacaaaatgccactttcaatgtgaaccgatccaccgcaacaatcattcagcgggaattgcaaaacggtgaatggaaagtcgggacggaattagccgcgggagagaaatttgttagcggaaaatccgggatatatataaaagccgagaccgggagcagcagtcaaacccatatccctcacaaatcagttttgtataaacaatgaaaaacaattatttatttttagctattaaaatcattcgaaattggccgatggatttgcaaaatttgcaagaagaaaaatgggaaaatctgttaaaagataaaaagtttgaagaaaaagtaattttaaaaaagaatatttctacaaattaaaattccaaatattttttcccgcagttttcccatttcattcgcattaattgcaaagccttcgctttggccgacttttacgacttttgcggctacgtggagacgcgaattcgtctccaattgctgatcgatgtcgaacgatttgatcgcattcgattggcccatgcgaagcaaatcgttgaaaagggacaaattttgggagagaatgaaaagggcgatgaaaatgaagcatttccagtgtcaaaaaggtaacggtgggatggcacaaattgaaattggcactattttaagcggtggttggtgggtgaacggcttcaactatattactgggatgttccaattttttatctgaaaatcgttagaattcgcttactgagaaacaaaaactgaacggcacaaaatcggcacacatttggggatacactacacacaaagggtaccaaacattttggggaccgtacatttatggtcccttctctaagtcggactaatccaaaaagtcactctccaaaaaaccgaatttcacaaatagcaaatcgtgtaaaaattcaattatttggataatattaaatttaattaaagtgaacattatcaaaaaatttggctaattgggcttgaattggacgataaaatcgcagcagtgggagatgagtggattcagagattaaactcaatgctttttcatcaatttgacgcgaccattgagaaggcgtaccgaataaagaagaatttggcaaatgaattgatacaaattgaactaaaatcgaaatatgaaaaagatgaaaattattaa

SEQ ID NO: 63028 - DNA, 215 bp, Heterodera glycines
attctctcccaaaatttgtcccttttcaacgatttgcttcgcatgggccaatcgaatgcgatcaaatcgttcgacatcgatcagcaattggagacgaattcgcgtctccacgtagccgcaaaagtcgtaaaagtcggccaaagcgaaggctttgcaattaatgcgaatgaaatgggaaaactgcgggaaaaaatatttggaattttaatttgtag

SEQ ID NO: 63029 - DNA, 159 bp, Heterodera glycines
atgctcacccatttgtctctgccgccgatggcattgcctttggcggtggcgaaattggaggcgcaggcaccgatttttcagccaccactttgctgttgttgaagaagttcagcggagagccgttgaagaaactcaagcgcaacgcagaagaagaagact

SEQ ID NO: 63030 - DNA, 694 bp, Heterodera glycines
atggtgaaaaggagaaagagaaaaaatcgaaaggaacaggccgaacctaaccatgaaaaggaagagcagaaggaaagggacgaggaggacgaggacgacaacctcccaaccgccacgtttcagcctcgaaattctgtccgacccgggccgaatggacgcgtacatccaccaactgaaggaggttggaaaatgcatcttattttttaaattttatccccattcccacgcagtttgtgtacaacgtggaaacccttcggcgcgacatgcacggccccccgccgttgccttcctcaatggccgccgcacttcgccaccataccaatgtgctcagtccgataccttcctcaacttcttcctcacttttgtcctcaatcggcacaagccaacaacagaaccaacaattgtcagcaatttccatcaaagagttgaagccgccgattggcaattcaataacagcaaaaacggaggaaggaaagggcgaaaagcagcagccgaagcaaacagttcgacaagagaacacgaagaggagcaaagggacagaaacggccgcgccgacacggacaacagccaaaagggagcgtattgaagacggaggtaaattggagagggtacactattcttcaaaaattcgaatttaacaaactaattgtaagccacttgggcactaattgtaagctgaagagaaaacaataaa

SEQ ID NO: 63031 - DNA, 311 bp, Heterodera glycines
atggagcaaaaagcggggtggaatgccactgttgtgatccccgaatcaccacggatattcggcatcccttttgtggaccttttcgctgtaagaaatttaattattaattttttaaatttctatttataataatttaaattttaatacaaaattagggcgagttcaattttgaatttctgttggaaacggagggaaaagagattgcgcatttggaagtgccgacgaatttggcatttgtgccaatcggaatgcaaaatgaggaggacgaagacgaggacgacggaaaagggcaatgttagcaaaaaaataaa

SEQ ID NO: 63032 - DNA, 626 bp, Heterodera glycines
atgcgtcgtctgttggaagccgaccagcttgcgctgggttgtctggacacatggcttatgatgaagctcagcggctgtgatgatcaaagctttgtcaccgaaccttccagtgcttcttccaccggaatgttcgacccgttcacggtgattgctcattcattttcccagcgtagttaatcattggtccatgcatttaactctaattatacattaattgattttgttctacattaattaggccgagtggggccgtcccattttgcgtctgctcggcttccccgacccgggcgcggtgctcccgtcgctggtcgacacgacgcggctcggcgtgcacacggcgcccgagctgttcggccgcgcaattccaatttttgcatcggtaaaaaacgacggatattttttaaattaattttattagtcctatcccacagtcaaaaacaataaaattgaattaattagtgtacaatatttttttttagctcggcgattcccaagcggccgcgttcggtgccggatgcattcgccgcggggacctgaaaatctcactgggcaccggcactctgttcgactacgtgagcgggcccgaaattcacagtcaatgcatggtcgggcgggaatggtattga

SEQ ID NO: 63033 - DNA, 556 bp, Heterodera glycines
atgctttatctgccaattattaaaaatatgatcaaaaagttttttggcccattatttttcgacttggctgcaagcatgctgttcactggcttaattgtgttggtgcttatcaaaacaaattttgagtggctccttttttatgatgtggtaatttgaatttgaatttgaattaaatttgaatttattttattttaaattttaattttatgcaacaatttggctcatgtggctagcaattgcttttatggtgaacttcatttgttatgtgcactcatcagccgcagcagcgcaaatccgccatacagtaaccaaaaataattaattgtatccataaatgacactttaaatagttttataagtgtttgttttaatagacatttttatatatttttaaaaatatttttagagtccaattgccattccgcatccgacatttatctgcgcatttgcactgacaatttgtgtgacaatcggatattgttacatttttgtaatattttttcgttattcaaatataaattgtttataagtaatattattttatcttattttttaa

SEQ ID NO: 63034 - DNA, 1116 bp, Heterodera glycines
atggcactttatggatgcgataaagccgtggaggcacaacattggcacaattatgaccttggactccgtgttacgcttaacaatttctgcgttcgctttggtttcgttcatttacataatccaacggttatttaattttaatatttttattacaaataattcatttttcggtaaatgattatttacaaaattcagctcttacgtcggcagtttgcgtgacgattttgatccgattgccagaaacacaattaattttgtgttcggtgtgatttggtgccgctttttgctcctcaaggcacttttcataatcgaggcataaataccaagtatttaaaatgaaaatttaattcaattcagcaattttgtcgcgataacaccgaaatggactccgtcatcaagaatctttgtcctccttacatgtaaaatatttttgaaatatttttataattttcaattgataaatttattaattgtcctacaatttgttcctgaaacaaacaaaaatgatctttaaaatctcaaaaatctcttgctatattgggtgagtgcataattattgaacagctcacaaaacagcaaaattcggttcaaatgcttcacacaatgagtaatcgtttgcattgtatgcgtaaaagctgagatattccataatttatagaggacagattttggcctagcaaaataatttcatctttggaaccagcaaaccaatatttaagagtatttctaaattccttaaaaaggataaaaaaaatgtgaaatatataaaaattaaaatgaaatccaaaattattttaaaatttatttatttttaagcaaaaatggcttccattgcaacaatgcgtcactgaacaaacagcaacagatttggtatcggcttcattatgggcttttaaagtcggcaattgtcacttgtgccgccgaactggtccccgtccttctcgtcggacattggtcagaagattaaaaaaaaaaaaaaaaattaattttaaataaatatttaaattttaattaaaattgcttttaaggattgcctgtggacatgcaaaaaaaattgcccagcaaaatttgacacaccgggcaattagcaaattcaaggtgaagggagagcaatga

SEQ ID NO: 63035 - DNA, 923 bp, Heterodera glycines
atgcttacgctaatcgtgtcaaaatgctataaaaatgtgatgaaatggcaatccgttttgatctgtgtccttagcattttcctgtggctgttgtgctttcacaattacatcaaagacgacgagcaaagtgttgcggtactcagccaagacattgccgaagtgtttaccggattagtgcaactatgcttcttcataaatgtaaacattatttaaaaaatatatgtttactatactttttattatttgttatttaaatttttaaatgcggttttttatttttaaattcttaaattttcagaaaatttagaaaaaataacttgtttagatccataatttaatacaaaataactaattaattacgcattgtattgtaactttcagcttttcattctcacacgggaaattcccaaggaagggcttgacacggcacgtgctgctcaatcacgtgccgaccacgtgctgctgcttggctcaaccattcttttgacggtggaatgtgtttgtgaggtaaataaaaggacatttaaaaatattgttcaaatttatataaaaaagattttaaatttaaataaatattcaatttttattttttagtgcatagaaatactgcacttctcacacaagaagcaaatgcgcttcctgaccaaatgtttggacattttttacagtattttcacggaggtaataaataataataataataaataattaaaatgttattagattttttagttggccaattggtttgagatttattgtttgaagaagattagtgcgcttaatgatgatttggtccgaaggcttcgcgacactttgccatttgtcgccatttgcggcatcactttgaatttgtccgttttcgtgatgacatatttttacattgaggccgaaaaacaccatttacaggtgaactaacaaggaga

SEQ ID NO: 63036 - DNA, 327 bp, Heterodera glycines
atgatcacaagtttgcccaatgattactttgtgttggttggcgttgttgcacgcattttggacaccgccaattacgtgtacacttttaccagcgcactttgttggctcgaagttttgctacggtaaacaaaaacaattgtttaattttattaatttatttaacatattaatttagttataagaagaacaacaacttctttatggttggtaataattttgtgaaagaaggcaatgcaaatcacgcatttgaggaaacggccttttaaaaatgatcaatcccatttaatttaatttttgcatcatttataatatttttataaaaaaata

SEQ ID NO: 63037 - DNA, 478 bp, Heterodera glycines
atggcccaaaaacccatttttaacaaaacaaaaaatatattgggtataatatttctatatttgcttgaaaattttttagtgattttcatcaaaatcttttccagtgcaatttattaacagaaattttttctaagctattgcttcgctattagacaatttccaaaaaagttatacatgaaaattgcgaaaagtcgaaatttttgaagttttttcgtaataaaattttttccaggcttgaaaatcttttcgcttttggtaaggctaatagagcatgttaagagctttcgagtgataccaacaatgttgtatttggatgtcaaagaaaaaagctatcgtggaaaaagagctggcgccgaaacgcgagcgccgaaacgcgtgggtcccgtttgtacagtctttctaaaatattttatgaatttaaaaaaaatactatttttttcagaaaatttttgtgttttaaaagtatttaaaataacaa

SEQ ID NO: 63038 - DNA, 912 bp, Heterodera glycines
atgaataattttctgtcaaaaattttcaatttgatactttttgagtaaggtcatagcacctaattgtcactataagctgattggaccgggataagtgtgatctaactacgagagcacttaaatattttcatatatttagaaaaacaaatctcttaagtttaagtgtgtgaaaaatccgagaaattcctgttaacttaactttggatactgaacaaaaaagggacaggaaggaattttggtaaaaaaaagcgccctatttgactgtttaagttttcttacagtaatgactgcgcattataattaggaaaatataaatgatttacacaattgtttctttcaatttgcatttttttttctaatctaatggcaattttcagctccgtccaattcggattcgccgaaaaaccgttaccaattcgaagacgcaacggcacttatgcttatgatagtgatggccagtttttgattgacggttcaccccaaggaccaaaagccaattcttataatgccggcgatgttgtcggaattggcattaatttggccactcagcaaattttcttcgtcaaaaatggccttcgtttgggttggtgaatagaaattttacggcacaaatcacttagaaactcaatctgcggatagcattttactaaaaacacaaaaaatcatcatttcgctgcctatttctaaaaaaaagtagaggaattcggccttttagcaacaataattgcacagttttcaaaaattattaaaaatgcattaaaactcaacaaattttttgttggcgcgcctacaaaatataatcgtaaaatgaatatttgaaaaaacagcttcaaaccagggcttccatctgtcctggtttgtcagatttgtcttgatttggagataacgaccaaaatttgttctgatttctta

SEQ ID NO: 63039 - DNA, 569 bp, Heterodera glycines
gaatggggagcgggtctctgtaattattgggcattttaaattatttactgtgactgtctttcgaagatcattcgttttcacagattgaagatgcgttcagccgcgccttttccgaagctttgaccgcgttcggtgatggttcgctgttagtcgagaagtacaacttccgatattcggctatggcaataacaaataagcatgtttgatgtttcagattcgtggaaagaccttggcatatcgaagtgcaaataattggggaacattacggaaatttggtgcatttgtacgagagggcctgttctgtgcagcgacggcatcagaagatcgttgatctggcaccggctcctgttttggatccggcaatacgtcagtgaatgttggacgatcctttgaaattgacacgccatgttgggtaactagaacgttggtcagtgtatcgaatgaatcttatcaagaaatgattctgtaaaatcataataattttagtacctgtcgagtttttgctggactataaggggaatcatttcttcatggaagttaatgcacgtcttcaggtggagcacaacgtc

SEQ ID NO: 63040 - DNA, 49 bp, Heterodera glycines
ggaagctattccggaaggattcggtctccccataattttgggcgcatcg

SEQ ID NO: 63041 - DNA, 466 bp, Heterodera glycines
atggatctcagcttggtgttgaggaatgcacgcaaaatgcagccaaatgtgaccaccaattccacggtgcacttctccacagaagcgggcctcgccagccaatcgctccctccgcaatttttggtggccgacgacggcactgtcctcaacggtggcggcgctacagttctcccaccgtctccatccttcgtccccgacgacattggcacggctgcgtcgacgtatgccgctggcgtatctgcgcccctgcaacttggccacattatggacgtggtgagtgagtgtgggcccgaaataaaacattaaaatttcaaaaaaaaattcaggcggctttaacggctcctccataccccattttaccattattttttggaaatttgactccatttcgacataagttgtaacttttacgttataaaaacacttcgggtcttctcaaaaaattgtcaagaaaattcgaaataaa

SEQ ID NO: 63042 - DNA, 3424 bp, Heterodera glycines
atgcccaactcatccatagcacgatacgagtcgtcgccgtggcatttaatgccacgaccgagaccgcataatcaaaaataccacggccaagaccacataagcagaaaatgccatgacacggcgatgactcgcagcgttatggatgagttgggggtgactcatcaaaacagttggaatatgccaaagttgtttttttttaattgttaggatggcaaagtgacgagcaatcagcgcattgtggccgctctgccgacaatcaaagtcagtttttattgcttcatgccttcctctattaaaaaaggacccctggtttttttgagaaaaatttatttttggcatgggcgcctgaaaaatcgggttttttttcgtttcggtggtccgtttcgtggtttggttttgcatttttagatgagtcttcccccttccctggtgctcgccagtatttatttcattcgtatattgggtcttgtttttgaagaaatgaattttttaagtcccccccccccctctttccattcactaacctaaattttttgaaaattcgtccctccattaaaaatgctaatgtttctttctccctctcaaaccagtatgccattgaccatgaagcaaagtcagttgtgttgatgagtcacttgggacgaccggacggccaagcacaggcaaaatattcgatgaagccggtgcacgaggaattggagcgactgcttggaaagtacggtctaattagaagcaccccttaattacggaaacggatttccgtaattaaaaagcaaattgtatccgaccccatggttgggaccccgcgccgacatttttgaacagtttcaggattatcatcgacatttccaagcccgaacatcgggttctcaacttttatttctaaatgaatttttcatttttccaagcctgacggcttagaatggtttcaaaatgattttgagtgttaaatttggtccgtagaaaaacggaaattcgacccaaatgagtgacgttgttgtgtgctaattattcatgtttcgtggtcctttttgaaaaaaaacattttttaggacggttgtctttttgactgactgtgtcgggacagaaattgaaaatgcgaccgccgacccaaagccggacaccatcattttgctggagaaccttcgttttcatgtggaggaggagggaaaaggcaaaaattcggctggcgaaacggtaaattttttggcattttacgactaatttttatgggattctttcaattggacccatcgaatttgctgatttgagttcgggtgcggagaacaaatttcttgataaacgcagtcaatttgagaccaactcagtgcctaaacaatttttagaaacaaaaatctcataaaaatgggacggacccctttttcttgtgaattcaatttccatttccgattccaactcaattttagtaaattgcttagcactgatatacaaaaatgcgtttaggtgaaagcgtccaaagaggcggtgaacgcctttcgtgcatctctctcaaaacatggcgacctttacgtgaacgacgcatttggcacggcgcatcgagcgcataggtgaggggtcaatgatggcacattaccactccaggatggggccacctctttaacattccgagttttttttaatacatttttcggggttaccaaacatgaaatttgccatgtaagtattttagcatacattttttcggcttttggaattcaaaaaaacggttgaaagcgcattttgatgtgccgaaatggaaaaaatgtacaaaaaatagtctatttataagatacaatgtattttcaaatcctggttatacaaatgtgagtcctggaaagcttagtatcagcgacgccgaaaaaatgaaattttattcgaaaattcggcgtttttttccagttcaatggtcggctgtgcgatggagaagagggcgtctggttttctgatgaagaaggagttggagtattttgccaaggcactcgagtcgcccacccgtccattcctggccattctcggcggtgccaaagtggcggacaaaattcagctgatcaacaatttgttggacaaggtggacgagatggtcatctgcggtggcatggcattcactttctacaaagtgctcaccggcaaatccattggcaaatcgctgtttgacgaggaggttcatcaaattatttttgagttaaaaaaactcacattcttgggactgggctgtccggtcttcaaaaaacaggctcatattctgtaatccgggattggggaccgggcacgccttgggatgtcgaattttgtgtccaaaagtgcgaccctgaaaaatttggagccatagatatgtgcataattctttggaaattaatgttttttttaggacgattatgctggatagatgcaggaaattattattaaattgcctattaaaaatgttacaaaatcgatgaaaattttaatttgttttttgtatttttagggttccaaaattatcaacgatttgatggcaaaagcgaaggacaaaaatgtgaaaattcaccaaccggttgattttgtggttggcgatgagttcaaagagggcactccattcgccaatgttgacgcaaaggatggaattccggacggaaaaatggttgagtttaaaaaaaagaaagaaaatttttatacaaaaaatgcgattttcttagggcttggacattggtcaggaaactctcaaacaatttgccgaagtgattgggcgtgcaaaaactgtcgtatggaatgggccggcgggtgtgttcgagtggccaaactttgcgcatgggaccaagggcatgttggaggcggtcattggcgcgaccaagtcgggtgcaacaaccataattggtaccttttttggattttttaaaatatggacatttcatttatattttctaaacttcggatacgggcctttcaattaattgggtttactgtgagtatagtatcacaaatgcagaattgtagcaggacgatacaattggaaaattgaatatttactattttttgaggtggcggcgacacggccaccgcggcggagaaatggggagcagaggacaaagtcaggtgagtctcccaaatgtcgtaattttttgttgctttggtttatttaggtgtcatttttcctaaaatttagacacctcccacctaaaataacgacccctttagaggggcaagttgccctctaccaagctttttttaacgattattgggacttgcggtaaaagcaattcttggcacttttcggtttcattgaacatcttatcccctcccccccccctctgattttttatgaaaattttattatttttttttgccacaaatttacagccacgtgagcaccggtggtggtgccagtcttgaactgctcgaaggcaaggttctgcccggcgtcgccgctttgagcgatgctccgtga

SEQ ID NO: 63043 - DNA, 1277 bp, Heterodera glycines
atgcgggtgacggtgtgcattacggctcaaaacaacggacaaaaactcaagccgtatgtgttggtcaacagaaagcgatcggtgcctcaaattgtcaaccaatttgctggaaaattggtgatcaatttcgctggttcggtgtggatgaatgatgaaacaacggaggactacttgtacaaaatcatcggcgcaaagctgttcgttggcgaacacctcttggtttgggatgcgtttgacagccacaagtagaacttaaacggtatctcgcccggtgggactcgaacccacgaccccaacaatccgtgccgtgctctatccaattgagctacgggccggagtaggacaaaacgtcgtcagccgaaacgtcgtcgaacgaatttttcgaccataacttttttctttctcaaccaaattaaacattcttgggctcggggtcggtttagtacgggccgttttagtacgagcgcaagtttttggctataacttttttctttgccaaccaaattcaacaatcttgatatcattcgatagccctaagtgtcctctattagcctgcaaaatttcgaaaaattttattaaggttcaaaaaagttatggccagaaaaattcaaaaaaccaaattttccaactttttggctagaactatatgtaatcttgactaaattttttggaatgttgcaggttattaaagaatcagaaagtctttagaatgatattaagagtgtagaattagtttagccctgagttcatatgtaataaaaaatatttaatatgatgcgtatgaatcatgtaaccgttatcttgaagaccatcgttagctagttagacacatcgcactctttgctatttgcattatggactaatgcgaaatatcaaatgatgtgaaggaggttagctggttcatataaattattattagctgggaggctatgttacttgattaagtaaaaatgggatagttattataaaattttttatattatctttcatttgaaaggattataaagattctttgcgaaaaattttttaaaaatctatatattctacagtcagggagcaaaatgtgttagccctgactatataccaactatgcccattgttaatgcctaaaaacgcacaccacatgttgggctgtcgaatatgtcaaaaaaaaggaaaacgttgaatccatgctctggctttgtgctagctagaaagctgcaacaaaattaaacaacctaaaaaaaaagagaatagggaaaactaaaacaggaaataagttgaaaaatgaaaataaa

SEQ ID NO: 63044 - DNA, 621 bp, Heterodera glycines
atgtgcgctgcacttttttgttgtgcgtttgcgcttttcattctctgctcgcacttgagaaagtgttcatcgccatttgtttgtgtctgcccgttttggcgacaatttggagcaggtggacaattaattggtttaatttgtggacaattaattagtttaatttatggacaattaattggtttaatttgtggacaattaattggtttaatttatggacaattaattggtttaatttatggacaattaattggtttaatttgtggacaattaattagtttaatttatggacaattaattggtttaatttgtggacaattaattagtttaatttatggacaattaattggtttaatttgtggacaattaattggtttaatttgtggacaattaattagtttaatttatggacaattaattggtttaatttgtggacaattaattggtttaatttatggacaattaattagtttaatttatggacaattaattggtttaatttatggacaattaattggtttaatttatggacaattaattagtttaatttatggacaattaattggtttaatttatggacaattaattggtttaatttatggacaattaattggtttaatttaa

SEQ ID NO: 63045 - DNA, 88 bp, Heterodera glycines
ctttttctatcaattggcagatgaataaaatttttaaaaatttttaattcctttttaaacaggccaaaaagtttaggcttaacttttt

SEQ ID NO: 63046 - DNA, 359 bp, Heterodera glycines
attaatgtcgaataaaaatgaaaaaaatattatgttcaaatttattaatattaaaaagcttaaaaactaatttggatatgaaaaaaaaacaaaataattatttacagggttggggaattgaactttagaagaagaaaaaagtatggaaggcacaaccaccaggccaccgacgctcacattggctttacattctttgaaaatgatattgaaaaggcaaaaaggaaaagcttcatatctcggccagaagcttcatttagcaaaaataaaaaaaaatttataatacaaagggggggtaatctacctaccctgaaagtttcattcggaagtcccatggtcacttgggtacctctcctttgtaa

SEQ ID NO: 63047 - DNA, 289 bp, Heterodera glycines
atcggaaaataaaagtcatttattgactcttatgtggctctttggcttttaacagaacattcagcacaatgacagattccgtgttaggtcaaaaagaatgtttgttatacagtgtcatttcggagggtcgggtgagcggtcgcatcggatgcctttctcttcttgaccaggctgacgttgccgttcttcttcagcccattcagcaattgttccttcacatgattatactcaacgacacaagttcggcacaacgctctgtacaattcttgacctctgatcatttctaact

SEQ ID NO: 63048 - DNA, 330 bp, Heterodera glycines
atgccaccaaattttttctacaagcttctgctggaacggctgagccgatcaaagaagtgggagcaggtacagctgaacctgggcatgaacccgaacaacagtttcgccattgacgggccgggcggaggtggcggcggcggtggcgccgcgtgggacaaacaaacggaagcgaaaacgggcgccggcggtcaacaaatctcgggcggatttcagtcgattactggcggaagcaattactcgacgctaagtgtggcgattgaaagccgccagtatgatcagagcggagtcagcggactgaacggaggaggcggtggatcggagatggtagtg

SEQ ID NO: 63049 - DNA, 657 bp, Heterodera glycines
atggcccttggaatcagtgatattgggcttcaattcaataggaaaggtttgggtaaggctcaatgtttccgggaattcggtttagaaacaccaccgggacggggatcagggtcagagttccccaatttgatcaataccgacctccagttcccgaagaggttgcggaatggtccaaaaatacgggaatttagggtctgatacatcatagggacagggcggggatcagggtcagaatacctccatttgatcaatctcgtcctccaatcaccggataggttggggaatggcccaaaaattccgggatccgggaggaaacatcacagggatagagcaggattagggtcagagacttccccatttgatcaatcccgtccccctaatcgtcaaatcccgtccccctaatagtcaaatcttgtagccctaatccacctctcgttcagcaccactcaagaatttctcggcatttcactgatcgcacccatccctgtgctgttcccgctgatcaacctgttgtgcctgaaggagttccgcaacatcaccagccaaattgtgttgtgcaaaatttggatgcgcaaaaagcgacaggaacgagcggcagcggaacgaaaagcgcaggaaaacattgacgaagacttggtatcggcaagcaaaaacaag

SEQ ID NO: 63050 - DNA, 734 bp, Heterodera glycines
atgtgtacaagttatccctataatacagtagcatttggggtaatttttcttttttccgctaatcctttttcacataaaaaaggcgatgaaaataattgtaaatttaaaaatatcatggaaactttaacattctttttcattaaaaatgcacaattagaaaattaagggggcctctattagcctgcaaattcaaaaatatttcgtcaattttgaacaaccttatgaccaaagtacatcagaaaccaagttttcattcatttttggccatgactttttggaaccttaatgaaattttttgaaattttacaggctaatagaggatagttagggctatcgaatgatagcagcaatgcttgatttggttgacaaagaaacaaattaaagtccgaggcccaactgaccgagtccgtcaggtcataatacacttgtgttattgggtggatcctcgctgatcagcaggagaagtgaaaactttatttgagtgtgactgatcaaaaacagaaatttcacacagatcagatagaactttaggtagaactacaaactatgcatactgatcagaagcattagtcatagacaccacagtaaatgatagggtagaacaggttgcactgaggaactgatcggaggcttttggaaaaggaaaacgccataaacgcattgatcggatcgatttggcaaatagactttcaatcaataagaaatccatttgagtatctattaaaatacagtta

SEQ ID NO: 63051 - DNA, 967 bp, Heterodera glycines
  unsure (1)..(967): unsure at all n locations
cattttaaaaccgtacnaactgcgcatcattngcatgatgccatgcgaaagaagcacgagncgagcantngggcaaggggaggggggaatttgnagtganaattcattcngaaataattaaggccgaagttacgcaagtcattgctcccattagcaacgaacaggtgacagactaaattcaaattgcaaatttaacattttaatttaaaattcataaattaagcgtcaagcattggctttggagttcaaaaaacaattcggcactgatctgattgccatgctgaaaaaggagttcaaaagcgactttgaagaactgatgtaaattataaaatgcaaaaacagccatttaaatttaaatttacaaagcatttctttgatgcaaacgcccgccgtttacgatgccaaccaaatgcgtgccgcattgtccggctccaatgagtgagtacatttacaattgaattgggataaagcacatggagagaacttcaaaaaggaacgccagtagctcaacaggtttaagtgatagattacggtataaacgccataatgaccacaggagaaacttagctatttgttttggctaaatttaatgttcatataagccatcgaattgatggtggattctggttacagtttacctcatggcttaccgtatgtacatttaattacggtgtctaccgtagggcggtgctaatcgaaattttggcgacgcgcacaaaccgacaaattacggcgctgaagcaggcgtatgagcagttggacagaaggcatcagcacaatcagctggaggagaacatcaaagcgaagacgaagggacccttccaaaatctgttggtgtctttgctcagctgctctcgcgaagaaagtgcgcccgcaagcattgtattggcacacgacgtaattaagtggcaaattggaaaaaattaataaaataatcaattaacacatacataaacaacatcattaa

SEQ ID NO: 63052 - DNA, 229 bp, Heterodera glycines
atgccgattgaggaaaaagaggacaaggacgtctacagaattgtagtttgggtaagttttacaacaaaacaacaaaataggtcttgttttacaggattcggaaacatcgcaggattcgatttataagggggaccagaaagagcatgtgatcaattatatttcggtgagagttacgtgtacggaatgttgtgacgacaaaaataggacgaattgcaaaatttgtggggag

SEQ ID NO: 63053 - DNA, 644 bp, Heterodera glycines
atgccacttcatttaagatatgcgtatgaggtaatatttattgacttaaaaattgattgaaattaaataaattcattttttgcacaaatataatttttaatataataatgcgtaaattattgaaattttgcagaaaatatatataattttaaattcgaaatgttctttaaaaatagggcacgaaattaaacataaaaataacaaataattacatccttatttattagaataacattttattttaaaattacaacacacatagaaaacccgcattttttattttataaaggatgaagaagtttaaatatttttgttttgagcaaagttatgtgaattatttaaaaaaaatgtaattttgaaggcttatcaaaaaaacttattgatccaaaaaattaagaaattttatttataaatagggcgttctaggtcatctcgtaaaactgtcaattttacagatttttcgagaaaaaaccgtcataactttttttgacacaaccaaaataaagaaacaacttcctgaaaacggaataaagcttatttcatttggctgtgtttatgaaaagttataacgggtttttctcgaaaaatctattatatttgcactttttacgaaaggacctattaacacttaagtaggcacggaa

SEQ ID NO: 63054 - DNA, 476 bp, Heterodera glycines
atgttgaggacggacaaggacgagctgaaggaggagaagcagcggctgaaggaggtgagaatggacggcaataaaaacaacagcaacaacaataaagcgatgaaaataaacattttgttggcacatttgtatgaaaaaaactttattttttaaaatttttcgggcgggggacagtgaattaattgtgtacgggaaatttcggcattttctttggcatgcaaaaaaaatagcggttttaataaaaataaatttcaaatattaggttatttttaaaaaattccaggtctttctgtgcgccaaccaacagggctgggccagtccgaacgctgttgcgcatgtgaaccgttgcaatgtgtcgctgggaatggacatttggctgcactgttggcttggccaaatgctcaaccagtttgtcctcaaattcatcattttttttattaccattttcaaaaaaaaaatcaaaaattaatattaaa

SEQ ID NO: 63055 - DNA, 525 bp, Heterodera glycines
atgaacgccgaacaaattcaacaacttttgaccgctttgctccaaggaaatgccgcttcaagcataagccaagcgaatttggccagctcaatcgacagtagaatttcaaagtttgtttatgaccccgagaatggtcaaacatttgaacagtggcacaaacgcttcggcatattgattgaagaggatggcaaagacttaaccgagcaagccaaagtccgactattgttgggaaagctcggagacgaagagtacacgaagtacagggacacaatcagcccggagttgcccgacaaagctttgtgggctgaatcaatcaacagattaaaagagttgttcgctgaaacgcgctctcttttcgtccgccgatatgaatgctttcgaatcagacagcatccaaaccaagacatcagttctttggttgctcaaatcaacgcagcgtgtgagtatgccaatttgagccttaccaaggaacagctcaaatgcatgattttggtgattttactgagggatgaacatcacgattag

SEQ ID NO: 63056 - DNA, 2560 bp, Heterodera glycines
atgcaatcaatacctgtgttaaaccctcggaagcaattcgcttcttcatacttctcaccaagtgaaaaaaagcagaattgcacacgacaaagtggaaagactgtgcggacagcagcgaccatcgcttgctcgaagtccaacgatatggtgtcaggtgcaaaatttggccatctttggacaatcagttgaagcatccgtgtgtatatcacttcacattttgaagtgagaaggcagtacgcaatcggaaaaacccatttatcacgcctaaaaagacaaaaaaaagtggtagaaaattaaggttttactttgcaaggagaacataaatttgactgaacaaaagcggcgccaaactgaaagtgccatctgcgtacgcatttttcataataccggcccattccgaagtcgaagcgcgagcaaatatcaaaattcttaacacggtatttttaaaaattaatggttttattattttaagtttttacttgtaaataattgacagaaaaaaaaacatttgtaaaaacgacttgccagactaaaacgaccctctgactaaaccggaaagactaaaccgaccctctgactaaaccggccagactaaaacgaccctctgactaaaccggccagactaaaacgaccctctgactaaaccggccagactaaaacgacactctgactaaaccggccagactaaaacgaccctctgactaaaccggccagactaaaacgaccctctgactaaaccggccagactaaaacgaccctctgactaaaccggccagactaaaacgaccctctgactaaaccggccagactaaaacgaccctctgactaaaccggccagactaaaccaaccctctgactaaaccggccagactaaaacgaccctctgactaaaccggccagactaaaacgaccctctgactaaaccggccagactaaaacgaccctctgactaaaccggccagactaaaacgaccctctgactaaaccggccagactaaaacgaccctctgactaaaccggccagactaaaacggccagactaaaacggccagactaaaccggccagactaaaacgaccctctgactaaaccggcagactaaaccgaccctctgactaaaccggccagactaaaacgaccctctgactaaaccggccagactaaaacggccagactaaaacggccagactaaaacggccagactaaaccggccagactaaactgacccagtccgcattagccattgttttggagtttttaaagtcaattctgaatttttacataatttttggcatttttttgaaggttaaaagccatttttgcagtttttaaggcatattttggtgcatatttgggcattttttgggtttttagggcatatttgagggatttgtagtgcatattttatgcgcatatttggcatttgctgatgtgtgtgcaatctaaccaaattttaaagtttctccatttgataactgtaattattatttacttttcagatttagctagttcactgcgtcaacaacgcaccgaggacaatcacatttcaattaatggacaaaattacgcggttgacggacctaatgttaatgttggtgttgaagggcatgatttgagtgtgaatgggagagtttatcaaaacagggccacagagcagtatctggaaattatacaagacaaaaacataagaaatgtaattgtcagtgtgccattatcgttattttctcgcgaaaacataatcgatgggcaaataaacgctaaatgcaatggaaatttatacatcgatcaatcgtcagatggatgttctcgcataatatgcgtcgacgataaaaagaatggcgttgaaaataactttggacagacacgtgatattttcctgaccggtgatgtcaatatttttgagtctgcaaatggaattatctacaactctatgatgggaggaactttacatatgcataattcgtcacttgagtgtgctaacattgaatgtgatgcatctttaaatgtaactcactcaccaatagaacgtaatgcgcaaatgaaatgtggtgggagtttaagtattgatgagtcaccaatgggaaatattcggcttaactgtgatggatctttgcggatcgaaaaatcgaaaatggaaagcagtcagattgatgttggtggaagcattgggattgttaagtcaccaatggcaaatattcggcttaactgtggtggatctttacggatcgaaaagtcgaaaatggaaattggcaacctagacagtggaggaagttcaaccattgtagaatcgccagcgcaaagtctaaagttaaactgtggaggaagtttaaatatgaatgagtgttcaatgaaaaatgttggcattaattgtggtggaagtgcaaccattaagaagtcgaaaatggaaagtggtcgcattaattgtggtggcaatttttctattgatagttcgccaacgggaagtgttcgaattgattacggtggaagaagaattaatttatgaggtcaaacgaatgatcttgttcggaactgatcaaaagttctgaatttctaacataaca

SEQ ID NO: 63057 - DNA, 1628 bp, Heterodera glycines
atgaaggcacggcgaattcctttcattcaactgcaaattctgctgctgaagctgatcggagacattgtcaccactgatcaacagagagaagaagcgactgacgcgaatggcacaacggagggggaggcggcggaggaagcgaaagacatggcattggcattggcaatgagcagccgccaattttggcaccaaatgacggacgaatggaattacaaaaatggcaaatttcaaaagccaaaagaagaaatgttttccaaagtttcttaccatgactttggtgagttttgtgaaaattggaaaacaaaggcgacggcagtgaattcttttgtgaaaagttggcaatgcaaaaagggagggaaaagcggcgacggcacaacggacggaacgccaacaaaaaacgatggtaatggaaagcggacattttggtgaaaacccattttttccttctgtccgtttcagtgaataggtacatattttttgatttagttttggaatttgacggaacgaattcaagagggactttcaagaattaacaattcgttggaaggatggcattacatttggggatcagttcttgagccaaaaccgctgtttagcaaatttgcaaggtggcaacacatcgttgatgattatgaaaatgcgccagcaaatggcattagagggaaaggtattaggcgaaatccctctttgttgatcaggacaacaatttgcgtcagattttgctgaatttgagcagcgagcagcacaataccccattcgttatctaagagcatgtgcataccatttggggcagaataattgaaattttaaaatatatgtgacattttgccaacattttttaaaaattatttctcatttgtcagtgacgaaatgataggtaaccttcatgtctgccattttttaatgtctaacttagtttatattagggttgcaaccccgacgtcggggttggaaaattcggggttcggggttgtcggggttggaagtgtcggggttcggggtcggggttgccaaatcgttcggggttcggggtcggggtcggggtttttcaatttttgccttatgccaaatagtcaaaatttttttaatattttttcggaaataatatttattaatttccataataatatttgtattgtttttatatttttttatttcttttttatcagaaattttgtatagaattaatttttttttcttgaaattttaaaattttttattacttttttgttttccaaaacatctttttttcacgtcgctcttttctaaagacttaaggagaaagggtacggcgtccggcggtgccgataggcgccgccgggaaaattttgaaaatttggttagatctgttaacagattttgtccaaaatatgctaaatttttgcgattttgagccaatttttttaataaggtttatgactttttgggccctgtgatgccgataggcagcgctaaattttggaattaagctctattttctaagatttttcaccaaaaaaatttatgaatttcggtaaatttttgtttatttatttatttatttatcgataaagaaaaattgccatcagaagggcggagaccacttactctgatgactgatcacagtaaaatagtctcagagtaagtga

SEQ ID NO: 63058 - DNA, 1207 bp, Heterodera glycines
atgtgtgctaaaactggacgaatatcaaaatttccggtaaaagttttgccaaaaacaaattttctttgtccagagataaaaacttacaaagccagaagtttatcctgcccttaaaagttaaaggtttaggcgggagaaaaaagcaagaaaccatttatagtaacaattttccaaaaaattttgcttaattttttctaaaatccaaaaattaccaattttttatgaaaatccataaaattgggaattttttgatgaaaatctactaaaaacatggtaaaattctccattttcccccggcggcgcctatcggcaccgccggaccctattttgccaggttggacaaatgagcttaaaaacatcatttgaatttcatgccaaatacagtcatggtcatatgtttacgaccacttgccattccaataaagaacctttcataaattttttaagctatttgatagacgtacattctttccatttttggtagcctttttaatgggctttccaatgctaccattcattaattgaaacatgggttattgcccgaattacttttgactttgtgtgtcgctacccattttcgggtggtcatatgtttacgaccactttatgcatttcatcctgctaggctaatgttgaccatttctactgtaaaatgcactatttccttaagaaatactgtactttttgtagacaccgaaattgaagtgcccatacctcagcatgtttggtcatagagacctgcgatcttttgaatattgtagagcagtttgttctctttcagatggagataatgatttttttcagaaaaatttttccagccccctaggaatttttttcgaaaaatttcccgattttcagtatatttttgggtgtcccgatcactatgaaggagtgatctgatcaagtttgtgtaaaagacttttttgatcagcatcaaaagtcaaactagcaggaattttttcggaatttttctgtgcactttaacttgagatacaaaaagtggtcgtaaacatatgaccacccaaaattgggcgtgaagtagactttttgttttctaattagtattttaattaagaaatagttcgtgaatgggttgctaattttttgactaaatcaactcataacttttctcagacgcaaaaatgaaaaaattgtcataacttttgaaaaactttatatgatttttaaaatttagcaagctaataaa

SEQ ID NO: 63059 - DNA, 612 bp, Heterodera glycines
cagaaacgcgaagcggcagtgtctgcgccacaagcgttggccaatcaaccgactgacgttcgcagcagccggaggagagaatctggctgttgaagaatgtaagtgatgttctcataggggagcaagcaggtcgtggcccgacccagaaaaataatttaaaatttccaaaataatgcgcattaactagacaagtagcagtttttttccaaaacaatttcgcataaaatgaccaaatttcgcgattttgctcaattacaaaaaaaaattagggttacggcactgccttggaaatttagtagatttttacaaaaaaaatagtaattttggtgaggttggtcttggaggggcaaatcaacaaggaaacccgaaaattttcgacaaaatactatttttcccttaaaatttcagcttcgtaggggtcttcccgccccccttgggaccgtccctgccaaaccgatacagtattttggaatattttattactgttaccatatgaagtgtttgtttgtgtattcagacgagccgctaacgcccaccctggagggcatcgtgattcttcgcgaattggccaaaaaaagtggcggcgccagcattggcccaacaaccgaatga

SEQ ID NO: 63060 - DNA, 1188 bp, Heterodera glycines
atggtgtgcctgcgccgcaaattccccggcggtcaccgactcgaccgtcatctcgatgtcgcgcaagccgcctgcccggctgttgcgtcagccgatcacttgcaactgcagcttggaggtatgtcaatgatccttttatgtgaaaattctctccccaaaagtgaaaattccctcctcaaaaaacaaaaacttgataaaaaaaaatgatgtattaaaaactcaagtgtaatacacccgttctacaacggcaacgggaggactgctcggcttctaatgaatttcgttctgatgcgccgttcattgcaaccgatcttcttaccagtaatgcaaagcggcggtgtctgcgccacaagcttggcccatcaaccgactgacgttcgcagcagccggaggagagaatctggctgttgaagaatgtaagtgatgttctcataggggagcaagcaggtcgtggcccgacccagaaaaataatttaaaatttcaaaaacaatgcccattaactggacaagtatcagttttttcccaacgaatttcgcataaaatgaccaaatttcgctattttgatcaatttttaaaataaattagggtcacggcactgcctgggaaatttaatagattttcctcgattttaatagattattaccaaaaaatttggtacttttgtgaggttggtcttggaggggcaaatcaacaaggaaacccgaaaattttcaacaaaaatactattttcccttaaaaatttcgggtgcggtcttcctccctggggtatatttgattgttttactactgtgaccgtatcataataatgtttattttgtgtgttgcagatgaacctttgacgcccaccctggaaggcattgtcatccttcgtgaattggccaaaaaaagcggcggcggcgccagcgttggcccatcaaccgactgaccgaacacagcagccggcggaggggactgataaattaaaaattgttttttttttgtcaatcgcgtgtttattttgaaaaagttttgtgctgttataaaaatggaaacacatggatggggcggggctggtggtgggtgggtgggtggtcattattgtctaattaacattgcttttcgagctcctcggaaattttcggtctcgaatagcgctacgaatttgctcgtatgattgggtaaaactgcaattaattgcgatcccgcca

SEQ ID NO: 63061 - DNA, 472 bp, Heterodera glycines
atgatcacatctttggcttttcttcctgtccaccatcttcctgctggcctcaatgctttggaggcacaactccctcaacagcttattggcgtcttcgattggtgaatttttaggaatggaaaatcaacaatattttttaaaggttcacggacaattacaccggaaggccgcggttcaatggtggtttgacagcgcctcggttcgcaccggatgaatggagtgtgcatcaacggacgttggatcatcaacacaattcgatgtgagcaaaaatcaattgatgcaggcatcgcccgatgcatcgctggtgaactccctcctcaaaaggcgcccaaatatcgtgccgccgatgcgagaattcttcgactcttgcagagctacaatgccatcaacaataaccaggctcaccaaaatgatcacaattaccatgcccttatcaatgttaacccctataacatcatcaattttctccttg

SEQ ID NO: 63062 - DNA, 1672 bp, Heterodera glycines
atggctttattatttactcgattgatcagaaatgtaattcttgttattgtgttttttaatgtcgtaagtttgcaaaaccattttatcttttgtttattaatatttttaggtttcctattatctccgctggaaatcttacaacatcgctgctcgggacttcaagaccgcttcggttaactctgcgagtaagttctgtctgttctcattttcatgttatttcgtttctttataaggtaacaatgcgctttcggcggtgtctaagtttcagtctgaactgaaacgcatcacaaagggacaatcggtttccagtgattcgacctgggtctgcatttattgcttattccgattggtctgtctttcatttgcttccttttcagattccactttctgttggaggattgcatttgcgtcttcagatcgcttatgccacactgttcgaagcgtaagtatttccattttcttgtttttgaatgtacttcgattttcctcacagtgtcactttattggtcgctccgtcgccgaccgtcggtcgttcgggcatccactgggccaattcgacttgtactgtgttagtgggggaagtcgtgcgccattccgatgcctacagcggactggtgaaagagacgttcacttcaggtttgtgtctttgttcatccatttttttacattgtggcaatagtcccttattatttttgttatatttttagcccaaaacttccgtcacggtcaatttgagagttacgtctacgagttcaaggagggcactcatgtcgtttgctactggcgtgggttcatccccgccagcggtttgtccgctttggtcggtgccgttgcttccggcgatttgctcggcgccgctcgtcttgtcttttcttattctaaggtccttcattattgcttttgtttaccaatattttttctttttttaggtgacctttgaaaacacctccgttttcttcgtggacactttcaatcacctcaaaaacaaagcgatgaagatggagttgtgagtgttcggatttcgacgttgtcacttctctttcatgtccgattcattttcgactcatcgcctcgctaacaaacgaaatcactttggcattaattcgatcattgggcttttgacttcccctttttatcaattgcacacctaactaaattgtaacagtacaactgacagtagtgcagaaatcaatttaaagaaatttaaaagggacatcttttggttgttttggattttcatttgttttttttattcttaaaagggttttgatcagcatttatttaattctgcccaactgcccgtttcctttggctcattgacattttttgtcattccaaatttgtattttagctcatcattaattatttattcgtacaatccatttttcaatctgttaaagaattcgtaataatgctcagttttaattggtaatattaactcctgaaaattatttcttagcaagtgattaaaatgccaaccgttattttattaataatttcccttttcgttacatttaattaattattttggttcggatggtttctgtggtcgctgggagagtgcatcttttgccgcgtgagttccataacatttgctaaattttaaagccaggaaaatgtagggctgctgcttcccccaccttttggtttcaacgaacacctaaattattaa

SEQ ID NO: 63063 - DNA, 1802 bp, Heterodera glycines
atgggcgcgagagccgcttacatttacatccgaggcgaattttacaacgaggcgtgcattctgcaagaatcaattcacgaagcttacaaagtgagtgcttttgacgaatttctgattttgacttattaaatgagaatgattgtggggaaagttgtttttcttcaggcgggttacattggaaaggactgtcttggcaccggctacaacttcgacattttcgtactaactcatatttcagttccatcaattttcttttttctttcctttggcaggtccatcgcggagcgggcgcttatatctgtggggaggaaacggtagaagaagaagaagaagaaatagcgaagaattaaactcggaattggtccgtttccaggcactcattgagtcgttggaagggaagcagggaaagccccggctgaagccgccatttcccgcggacatcggattgttcggctgtcctacgaccgtaacaaatgtaagcattgagaaagtgtgcgttttcatccttcggatcagaaaatctgtcttttggtaataaaaagcgctgtttttagtattttctccagttttttccttttcattctgtgccttttccttattgttaggttgaaactgtcgctgttgctcccgcaatttgtcgccgcggtggcgcatggtttgccagttttggcagggaaagaaaccgcgggacaaaggtaagaaaaaagtaaaataaatttcatatgaaatacttaaatttgccccgctcagttgtattgcatctccggccatgtcaatgatccgaccaccgttgaggaggaaatgtccatcccattgcgcgatttgatcgaaaggcacagtggtggagtgatcggtggttgggacaaccttttggccatcattcctggcggttcatctgtcccattgttaccgaagaggtgtttatttggcattccgacaatggccctaaagattcgtcttttagcatttgtgacgatgttctaatggatttcgatgcgcttgtccaagtgaattcggggcttggcacagcggcggtcattgttatgaacaaacaggttcaccgatacccttgaacacaatgccgcctcttcaagtctattgcactcgtcgaattaaattttaaaaaaacagggacaaaggaaaatcggaaaatttaagaacttttattttaaggcctttaaaaatcttcatagaatttttgtgagaaattcatgctaaacgaactgccctaaattgcgagtattgttccattcccatttcagtgtgacgttgtcaaatgcattgcgcgtcttgccgagttttacaaacacgaaagttgtggacagtgcacgccttgccgggaggggtgcaattggctgaacaaaataatgtggcgcttcgtccagggcaaaggagtgcccagcgaaattgacatgctgtgggaactgacaaagcaaatagaggggcacaccatttgcgctttgggagacgcagctgcttggccagtacaggtcaaaaaaaattttactgtaaatttcgccaaaaagttggtggtaattttatttttataattacctgaatgggaaaaacatcaacggattttggtggttttcaaaatttttataattttattttatttttagaattactgtattacaatatgatgtattttccgggtgtcagattttttcacgagagggggagaagggtctttttaatttatttttgtgttcttaatgaatttcttaatttagggactgatccgacattttcgtcctgaattggagaggcgcatggcgaaatatgcggagagtcatcccgaa

SEQ ID NO: 63064 - DNA, 1943 bp, Heterodera glycines
  unsure (1)..(1943): unsure at all n locations
atggaaaatgaaagggaatttgggagggaattcacaaaggaattcgtggaacggcacaatgaactgcgcaaattggtgaccataaagggagagtccccgcacattcacccacactattttttaagcacggatgccccgaattgacgctctgcgaggaactcagcgaaatggccaaagaatgggcggaccgaatcgcatggcaaggccatgtgtcatttgccgaaatgagcggtaataaatgggcagttgggaaggaatggcactgtcagacaacaatcaaggagtgggtgaaaatgtaactgttttccccgaggggaaatgcgcccgcgaaatggtcgactattggtacgcggagaacagaaagtacgaatacgactccncaggctggcaagaaggtaatttgatggaaaataattgaaaaacgattacaaaaataaagggactaattacttcacacaaatcgtatggaaatcgaccagagaggtattctttttgcaatggtaaaaaatgcatttgggcaattctaaagtcagtccctttcgccaaaggtcggagtcggtcggtcgacaatgcgttcattcccacaacagatggaaaaggacgagaaaattacaaatggacactcagaagaagcagtcaaaaaagttgtggtcatagcattttataggcccgcggggaactcaaatcgaagcggccaatttgagcttaatgtgccgaaaccaattgcgcaatgagttcattaattaaaacggaacaactaattaagcgaataaataattatttatgagcctatccatcattttttactctgtacaaacatagcaaaaattcacctaatccaagcaaatgaacaaaggtttttatgcggtcgctaaagtttcctttatttcgggatgactctccgcatatttcgccatgcgcctctccaattcaggacgaaaatgtcggatcagtccctaaattaagaaattcattaagaacacaaaaataaattaaaaagacccttctccccctctcgtgaaaaaatctgacacccggaaaatacatcatattgtaatacagtaattctaaaaataaaataaaattataaaaattttgaaaaccaccaaaatccgttgatgtttttcccattcaggtaattataaaaataaaattaccaccaactttttggcgaaatttacagtaaaattttttttgacctgtactggccaagcagctgcgtctcccaaagcgcaaatggtgtgcccctctatttgctttgtcagttcccacagcatgtcaatttcgctgggcactcctttgccctggacgaagcgccacattattttgttcagccaattgcacccctcccggcaaggcgtgcactgtccacaactttcgtgtttgtaaaactcggcaagacgcgcaatgcatttgacaacgtcacactgaaatgggaatggaacaatactcgcaatttagggcagttcgtttagcatgaatttctcacaaaaattctatgaagatttttaaaggccttaaaataaaagttcttaaattttccgattttcctttgtccctgtttttttaaaatttaattcgacgagtgcaatagacttgaagaggcggcattgtgttcaagggtatcggtgaacctgtttgttcataacaatgaccgccgctgtgccaagccccgaattcacttggacaagcgcatcgaaatccattagaacatcgtcacaaatgctaaaagacgaatctttagggccattgtcggaatgccaaataaacacctcttcggtaacaatgggacagatgaaccgccaggaatgatggccaaaaggttgtcccaaccaccgatcactccaccactgtgcctttcgatcaaatcgcgcaatgggatggacatttcctcctcaacggtggtcggatcattgacatggccggagatgcaatacaactga

SEQ ID NO: 63065 - DNA, 2353 bp, Heterodera glycines
caaagtttgggagtgcatttacaacgagaactgtttcaagtcgtccaccccctttggcattatgacactttgttttttcttaagacccgacccgaaattcgacaaaaagtttctcctccaaccgacgccaacgggtttatttttgcaattgccaccaattaaacatcgcaattcattgcctttgtcctttagggatgtgtttggagaagagagtgttctatcggctcatctccggccttcactcggccattaccgtttcgattgcggcccacaattacagaccgggtattatccgctttccagagacttatttttgcattatcttaattttccttttagcccccggcggtttcggcaccggcacttggtaccgaaatgttgaagtaaaacaaattttaattaatgctgacatcgcttgatttttctagttttttgaaaatcgcttcggtacgaaatggggcaaagaagggcccgaacggttgaggaatttgtacttcacttacatgctggtgagtggtggcccaaaaatcattggaaaatgagaaaatgaatggaaatgcgaaggaactgagggcattggtcaaagcgacgccgtacatccgaaaaagtcaactgttctacacgggcaacgagcaggtgaataatgaattgtgggcacaattgggaagggcaaaacgaagagggaaagggggcattagggacacgtgtccactcaagccaatcccgggaccatttctgggccaaaggaacgcataaacaaaataataccaaaactcgtaattgtcaggaagaccgagaaacgcagcaatccttggaacacttcctcgccgtgctcaaagagttccccaaccaattcgacgagactcaacttttctcggtaggcattggcccattttcattcattttttatttccttttttgcccttttcccaatcggatttgacttcaaatgcgtctttctttcagaatttccaagagtcccacgcccgtctgctgaaggaagagtttcgccagcacttttggaacatttcgcgtattatggactgtgtcggctgcgacaagtgccgactttggggcaaattgcaaacgcacggaatgggaacggcactgaaagtgctcttttcggaccttccgcggaacggaaacggagggaaagcgaacggaaggaaagagcaaacggaaaacggagaaagtgcagcgaacggcggacttttcaaattgacaaggtgaagaaaaggaattaaaaacgataagggatcaactgattcaggggccgatggatttgatctttttccctcttccacaaatttttccttattttcgttcaaaaatcgacttccaccatggcttcggctttcggtttgcattaaatttacgcctccggcttttgtgcctatgcccaaaagagcttcaaattctgattttgagtcataaatggcgacataaaaaacattaaaataacattattaatatttattagatttggcaaattcattcacaattaatgaagtaaatttgccattttccgtttagaaatgatttggtcgctctgttccaaagctttggcagatattcctccagcatttgggagatcgacggattcagaaaagagttccgacacgacgaattgtgaattgtccgctgaatttctttttcgtttcgcaaatgtcccatttttcctcctcctcatttcctctccttttgtacgatgagtccgattaatttatttctttttgcatttaattctctttgtgattccttttttaaccgccaacagaattttagtgaattatgtatttaaatttacaaaattattgtaaattccgccgcttagtcagtcattaaaatcgtgcattgttatacaaaagaaaaattttttttatttgtttttattttatttctttggctttttccaaaccgcgccgtctttcttttctctctctaattttaaatagagttgagcgggaccgggaattttgggcaaatacgggaccgggaccttttcgggttgaaaaaccgggaatttttggctgggaaaaccgggaaaaaaccgggactagtcccggtcaaaaccgtgacttcggtactcagttgtccgtattcaggtcccggtcccgctcaaccctaattttaataaataaattctctccatccgatggccaatggtgaattcattaatgatcgtgccgaattgtccatcgagcgtggtgagtcgtcctttttgcccttaggcaaaatgaaattcgccgtcagatttgcatcggatgactgaactgattggacggattctgcagaaaagcggcagggaaatgcccaatttggtgcgccttcagcaaaatatccaatcgccctt

SEQ ID NO: 63066 - DNA, 477 bp, Heterodera glycines
atggccaagccgtgtccgttttgggaagacgaagcgggccaatgctcctccaaagaatgttccatcggatattgcgacgacgaagtgccaccggcgctaaaggagcccatcgcgccattgtcggcggttcgttccgcaaatttttccacctccgccgatggaaatgtccgtacggtgggccttcgttttttgaaattacatcaaatttggattttaatggttttgttctgttcaattttgttttaagatgcctttttcaaccacaaaatgccttaaaatttggtgtcattctttttgttttcctttccacaaaatttatttctttttcctttcagtcaaattcgaatgattcgtgcggtggaagtgaaagtaacaaattcgacccgctggacgattcgctaagtgaatttgacagagcgcaactgcgcgaattggacatgtttgaggacaacagcaacaaattttgcgaagtcgaag

SEQ ID NO: 63067 - DNA, 432 bp, Heterodera glycines
atggcggccaattttcccaaattggtttttggcgtaatgttaccgtacccaatggttgagtaagtggttactgtaagaaggaggaaaggaatttgtgccatttttggcccaccgaccggccaaaaacatcgaattccaaaaggtccaactgggcgccaatgtgtgccgaagtccgacgaactcgttgaactcgcggatgctctttgtcagtttcgtctttttgtgatccgtcgagttcagttccacgcccaactcccaacaccgttcagccaactgaaaatgccaataattcgaaaccattcggtgctcacctgttcagtgtaatttttcagcgccacaattcttccaatgcttgacttggaagggctcaattggaaatgcgaccgccagtggcgctccgggttttttggatgaagcagagaggactttgga

SEQ ID NO: 63068 - DNA, 2138 bp, Heterodera glycines
atgttgatacgtaagaaggagatggtcgacagagaaggtgagcagcggaagtgaggggaagtcaattggaaagagtgccaaatgagacagactaattaactatttattagccgaagtaaaccattttgtttcacagagattcaaattttggccgaggtactgctggtcgaacaacgcattcgcgagatgactggccattacaatttggccaattctcagaatagggaccgattggagacattcgcgagcatttcggtgctttttgtccgcctatttaaaacatttttatccgattaattaatttctaatcagacgctaaagaaagagatgcgcaaatacaagcaatttgccatgaatcggatcagaaaagtgagaaaaaatgggcaattgggggatgaattggatggaatagaaatgattttcagaccatttattggtatgtgctgctggtgtacttcttgaccggtatttgttgattgaatccgtctctcattctttgcttgttcaattttcagatcagcagacatataaggtgataaagcacttaagtcagagtcactgctgataaatcactgattaatttccaacaatcattcattatttattccaaagtcctctctgcttcatccaaaaaacccggagcgccactggcggtcgcatttccaattgagcccttccaagtcaagcattggaagaattgtggcgctgaaaaattacactgaacaggtgagcaccgaatggtttcgaattattggcattttcagttggctgaacggtgttgggagttgggcgtggaactgaactcgacggatcacaaaaagacgaaactgacaaagagcatccgcgagttcaacgagttcgtcggacttcggcacacattggcgcccagttggaccttttggaattcgatgtttttggccggtcggtgggccaaaaatggcacaaattcctttcctccttcttacagtaaccacttactcaaccattgggtacggtaacattacgccaaaaaccaatttgggaaaattggccgccatggtgcgttttatgaattttatgaaactaatttgctgtaattctcgaattgtttgtcccctccctttatttaggtttatgccgccattggaattccgtaaaatgccatttgtctctcatttcgtctcaatttgaaatttccccttaaagaatgacttttatggttctgcacaaattgggccgtttctttttgctctgtttcgaacacttttggaacaaattgatttggttcatggaatttgtcagctgtgttaaggacgcggaaaagctgaagggaaaagtgcgcgggacgggccgaatgcccgtgcttttggtcggttccaagccattgaatttatcagcttctcactgttcggagttcctcgaacagacctgcaattaaagtcatccacccaaaatgatcattggttgaagtcaacatagctgatcactgatcagaattcctccattccccagctgatcactgatcggtgtcccttcccctttaggccatcggcgtggccttcgcttggatggtccgtcatttttacctcctttttcattttatgttttaatttctcagtttctttgtgcggccattttcctcaaattcgagaaggattgggactactttaagagcttttattttttcttttgctcattgaccaccatcggatacggtacttttgcgcattttaaaatttacttttcaaaatgtttctttttaaatgcgttttatcagcgaatgtttcaggcgatgtgacccccacaaattccgaggatatgttcatcattttcggcttcatcattgtcggactttccctggtctccgccattttttcctgctcgagactcttgaatttccaccgcttttcggccatttccctttttggccttcttaaacccatttccttctcccccgctcccaaataggtttcaatgtgcatcaatgtcattcaattgaaattggaggaattattcgaggaacttttgctgacgatgatggaagaatatgtggaggcaggcggaccaacggtggaagaaataaccgcaacgatgaagccgaagatgagcatggtcgacctgtggaaagtttggcagcggagaaggcaacgaaggagtaa

SEQ ID NO: 63069 - DNA, 1883 bp, Heterodera glycines
atgcaaacggatgtgtactgtgagggcggttcagtgggcttcttccgtggcgacatccgtttgcttgctgacgacatcaaaacactgcgtcccactgtgttgccggtggttccccgtgtgctcaatcgaatctatgacaaagtgttgggcgaggcaaacaaatccgtcttcacgcgtctgctctttgacgccgctgttggactgaaaacgcgcgagctgaacaagtaaattgttttttgttttaatttcttgacgacaaactcactaaatttttcaaaatttgaccaaaaaatgaaacaaaattgttatttttagtccgaaacttgtataaaagaaaactagcctccatatctataatttttaaaaaatcaaacatttttttttggtggccgaagagcaaaaagtcttcgtattccccgttttttccctggtttcgctccaggctggatttcgcccataaataaataactttcaacattattaggtcattttaaaacaaattctaatcaacttcttaaaaagattgatacgaatttaaaaatatttccatttactgtccaaattttcgtatatttgtccccttttcacagttggattgttcgcaacaattcgcttcttgaccaaattgtgttcaaaaaggtgcgcgaagggttgggcggtcgtgtcaaactgatgatcaccggttccgctccgctgtccgaaactgtgctcacattcatgcgctgtgcaaccggtgcccttgtgtgtgaaggctacggtcagacggagtgtgttgcggcagcaacggtaattttttaaaattaattttccagaaatttattccaaaaaaaaaatttcaaaaaattatgagcaaatggtggtctggtggtgtcgttagttgcagccgagaaattttttttttttttggaaatctaaatacaattttctgttctttccattctatgcattccctattttcattgcacagattaccatcgaaggtgacccagttccgggccatgttggtgtgccggttccgtgctgtgccgtcaagttgattgatgtgcccgagctcaactattttgccacgcatggtgcgggcgaagtgtgcatcaaggggcccaacgtgtttcgcggctactacaaaatggctgaacaaacggcggaaacgctggacacagacgggtggctgcacacgggtgacattggacgatggacagagcaggggacgctgaaaattgtggaccgcaagaagcacatcttcaagttggcccaggtgagagccccaacactgggagaggccatgaaattaaaaaaaaatttaatgaaaaaacgggtgtattttttgaactaacaaattgttaaaaacacataatacagaggggttgggtcgacctctccccatcacatgtcgatttacatactcgacaccctttcgaatttagcagagaattttgattgcctccccctccccccccccctaacggttttcatgtatcaacgtgaatatctttttaaaataggagtttttttaaaagaaattttatagatttattactagaaaaacctctaattgtaagaattttgaaaaaataaaaaaaattcaaatgtaataagaaaaaaacatgatttagggcgaatacgttgcacctgagaagattgaactcatctacatgcgttcaaaatacgtggcccaatgctttgtgcatggcgaaagtctgaagacatgtctggtggctgttgttgtgcccgactttgatgtgttgccggaggcggcaaaaaaacaattgggcattgagggaaaaacaatggaggaattgtgccgaaatcagcaagtgaaagcgatggtcatggaggacattcacgaagttggaaagaaggctgggctcttcacctttgaacag

SEQ ID NO: 63070 - DNA, 976 bp, Heterodera glycines
atggacgcatctgtgtcctttgatatccagaacaactttgtattggtggtgggttataccagtttttttttaatctcgacttggaaatttccgcattttttggtttcactgtttctatcttgtttccctggggcattcatttcccgttttcgatcccttatttacggtaaaattgatttcccgcacatccctcccgctactagctatcattcgctcgaatttttaaaatacatttttaagaattttttttaaaaaccccttttggaattttagaaagacctaattgtaagtaaaaattaaaattttaatggaagtgtgacagtttataatttttaatgcttttttcccacatgtaaatattttgatttgttttctttaagttttgcgacacagtcgctaaagtgaacgggttgttggaacgaaaatcagcgtgtccgtccttgaagtacatcgttttgatggcacccgcttacgacgaactcactgagtccgcgcgtgacattgctgctcagaatggtgtcaaactgttctcatttgacaactttgagcgcatgggtcttcatgaagaggtagaaggaaaatttttttaataaaaatttcatgaaaaaaataatttttttttttttgaaaattttctgaaaaatttttttgttaattcatcatgaaattttggagaaataatttacggcaagggggaacgtagtgtaaccaaaaaattgtatttttcattttgttaatggtttgtttgaatcaaatttttgacaatgtttaagcaatttgggggctcgtggtgccaaagggggaaaaaaattttttgtttttgatttttaatgatatgaaaagagtcaaaatgttttaaaatttgctatcacacacaaattttttttttaggttgcttcgttgtcagatgtgccaccgagcccggacgacttggccaccatttgctatacgtcgggcacaacaagtgtttccaagg

SEQ ID NO: 63071 - DNA, 711 bp, Heterodera glycines
aattgccgacatcagcgattggaatgaacagaacaacggcaacacttcactgctgtactcaattggcgccgccgccacaattggagcaatgggactgtggtgggtgtggtcctcacgaccgtcagcgaagaaaatggtgccgttggttgatcccgagtctcaaactcgtgaactgccggtgggttaaactggcggatgttaaaaatttatttgtgggcaaaattaattttggtattttcttgtttataggtaggtggcacgggaaaaaccaaagcgtgggtgatccttttggctcataaaaattataattggtttcattaatcagcgattctggacaaataaataggcttaaaaattagaaaccctccccctcgaaatttttaaatttttctatatttcatagatttttgtcataaaaaatatttaatgtatttttcatgacgatataatgaagagtgggtatctttttctccaggatggctcacgcgtgtgcaagtatttgaaaacggacgcgctgatgcgcttcactcacgcgaacgcaaagacaatttatgagggcgtacggcgcggggcgcatgtgtccaagaatgggccaatgctcggctttcgaaacagacaatgcgacggtgaaccgtacgaatggctgagttatggggacgcgttgcaccgttcggcgcttcttgcgcgcgccatacgttcgctcgggttgag

SEQ ID NO: 63072 - DNA, 248 bp, Heterodera glycines
ggcgcccccacaaagtgtccaagccacgaaatgtccaaaagagtaaaaacccacgaaatgtccaaaatttttcaaaatttataaaaacaaaatgagtctaatttaggatttttagggttttcggggtcgctgaatacgaatataacctttatattacccgttgcctaaccttaggcccatctgaataataaaaaaactcaaattcgagacttggacatttcgtgggctggacattttgtgggtcagcg

SEQ ID NO: 63073 - DNA, 740 bp, Heterodera glycines
atgtccagcccacgaaatgtccaagtctcgaatttgagtttttttattattcagatgggcctaaggttaggcaacgggtaatataaaggttatattcgtattcagcgaccccgaaaaccctaaaaatcctaaattagactcattttgtttttataaattttgaaaaattttggacatttcgtgggtttttactcttttggacatttcgtggcttggacactttgtgggggcgccgcaatgatttactaggttaactcattagctgtaaataacaaattttgatttaaactgccaaactctataaacaattagacaataaacatcatcgtttgaatctaattaaatgaaatcgtcgtcataaacttattttccttttcaagagataaaaaatattttatagttatgtaagaatataatttaaaatattttttttttgttaattagacgtggaaatcgatattaattctaaaaattccaagaaattaaaatgaatttttaatttttaaaatgggaaaggaatagagaaagagatatattgaacctgaataaaatctaatccaaaattccaatgactcagtgttaaaaaacatgaatagaaaccggcatgaaaacaagtttttattctcagggagctgggagttttaatcgaagcaacaggaatcgcgcaaatcctttatttttatctttttcggtggccattacattaaataatgttggcgaaaggagggaggagaagaaaa

SEQ ID NO: 63074 - DNA, 326 bp, Heterodera glycines
catttgtcacagggtttgcctgcagttaccatcgttggtttgcctgaggcggcggtgcgtgagagcaaagaccgcgtgcgctcggcaatcatcaatgcaggttttagctttcccaatcgccgcttgaccatcaaccttgcgcctgcagatctgcccaaagatggcgcacggctggatttaccgattgcgattgggattttggcagccagtggacagctcgacgacagccagctggcaggttatgaattgatcggcgaattggcactcaacggcgaattgcgtcccgtgacaggcgcactggcggtagcacgtgccatcaaaagcga

SEQ ID NO: 63075 - DNA, 458 bp, Heterodera glycines
agtttcttcagttctctttccgctggatgaacaaccttttaatgcgtgagattcctctgagggcgaccatccgtctttgggacacttatttggtcggtgcaggacaaattagataaaactcggccgggcccctcccccttctcgtattctttagttaatgatttcatttgtctggaacagagtgaacatgacgggttttcccaatttcacacgtacatttgtggtgctttcctgcgattgtggtcgaaacaactgttaaatgaaaaggactttcaggtgtatcagctcttaaataaataattggaatttaactttagggcataatgttacttcttcaaaatctcccaacaaaaggatggaatgaccagcaaatctgtgaactgaccgcggatgcctactcactcatgcagtttttccatcacgcgaagagccatttacaaacataatgcctgattatg

SEQ ID NO: 63076 - DNA, 795 bp, Heterodera glycines
tgatttgtgccaaagggctgagcgccaaagacaaaacgggcactggtgtgccgtacgtgacggcacaggtgggcaaagcgctcaagcggacgcgcaccattcaccagcagcagcaggagttgaaccacctgccggtgtggaacgagcagttcacattgtgagtggagcattaatattcaaaattgtcttaaattttgtccaaatttttgcgcctttttaaaaattatttttattattttatttgttttaagaatttcgtcgttaaaaatgaatgagttaaatattaaattattatttaaaaaataaattatttgttttaagaatttcgttaaaaatgaaataattaaatattattattattttaaaaataaaaatttgtatttcatggaaaatttttcaataaaaaaatcgtaaatacaaaaacttatttaaaaatttgtcaacaaaaataggtatgtacaaaaagtggtcaaaatatgtcataaatatgtaagaaaaatagccaaatatgtacgaaatatgtgcaaaaacccaaaatatgtaaataaaataataaataaataaataccattttccgcatttatgccactctgatcaaaaattactgcagcgaatgtgacaacatcactgatcggatcaaagtgcgcgtgtgggacgaggacaacgatctgttgctgaagagcagcagcaaactgaggcgaaagctgagccgtgaatcgtcggacgactttcttggccagacaatcatcgaaatgcgcactctgtgcggcgagacggacgtgtggtacaatttgg

SEQ ID NO: 63077 - DNA, 729 bp, Heterodera glycines
atgacattccaatctctgggactcaacccaccagcatttcaatctctgagactcaattctcaggctttccaatcgctgggactcaacccaccagcatttcaatctctgggactcaaatctccggcattccagacactgggactcaacccaccaactttcaatggcattccaatctctgggactcaacccaccagcatttcaatctctgggactcaacccaccagcatttcaatctctgggactcaacccaccagcatttcaatctctgggactcaaatctccggcattccagacactgggactcaacccaccagcattttaatttcattccaatctctgggactcaatccaccagcatttcaatctctgagactcaattctcaggctttccaatcgctgggactcaacccaccaacatttcaatctctgggactcaaatctccggcattccaaacactgggactcaacccaccaactttcaatggccttccaatctctgggactcaacccaccagctttcatggccttccaatctctgggactcaacccaccagcatttcaatctctgggactcaacccaccagcatttcaatcactgtgactcaaatctccggcattccagacattccactcaatgaaaatcaggccaccagcattccaatactgggactcaattctccggcattccaatctctgggactaaaatctccggcattccaaacaatgtga

SEQ ID NO: 63078 - DNA, 1567 bp, Heterodera glycines
atgagtgaacaacaacacgctggctcttcaaacacggcaaagtgtggccgtaaacgcgacttagccgcggtgcggcatgctttcgaaatgaataaaataaaagttgaaaaaagaaagctgagaatgcgacgcatggaagaagtggtccagcgagaacgagcattgataaagattcgccatgaataccgcaaagccaagtccgctgttttaagcggacagttccgattctcatgtagcgcttcttcaatggttatcacaataccacaaatggtaagttttatttttaatagaattattttcaaattttaataaatttatatagagattttcagtatcatattgcaaatttaaaaattttttttattctgtctattaatttgggcgtttattaaaacccgaaaactcttgtcttccattttgtacgcatttttaggattaatgtttaatattcaaactaaaatttttctttaattaaaagaatttttaggccaaagtggatggtcaggcggcagaatcgttcaccatcgttatcgcttatggaccagcagagcaaggaggaccaaatgttgcctcatctcatgctcagccggccgctcaaaaaaccgttacacaagattctcggccaactgacccgagaattgcgcgcggagtctgtaagtctactgttcatgttgaaaatgtgtttttctttgataataataataatgttattatagcttgtgcaaactctgctgctggttgtggtcccgttactggaaatggccgtgatggtgaagcaacccatcatatttctgtatgtaatttaacgtatcggattttcatgaaaatggatctgaaaaaaatagtcattgtaaaatacctgcatttttttgacaaattatttttaatggaataacaaacgtacaacaaatttaaataataattattttcataattataaaacatttttctaaaactattttctctaattttattaatttcagtttttttctgtatgaaaaaatgttttaaataaaaataattatagatagtgaaaatgttgaaaatgtccaaataattttaggaccatatcaaattctgaaaatagatagttaactaacgaaatttatttaatgtctttaattatcacaagcaaattatcacacgatcattgaccgcggttactggcaacgcaaagactgttgtgggtcagaattgcggtgtggtgtgtggtagcgtgggtgttcgtggtgcagttactggtaatacatgcgtcgtcagctcgattcccgatgggaggggctcttacgtttctcttcccggtgcagcttctgctacaagttctggtcgcacaagtgacttttgcgcaactccgctttcggctgcgtcttcggttctcaaattatcacagctaccggcaccgcccaaggctccagtgcttcgcagtggcggcccgacgcgaccatcaaaaaaacaaaaaatttactcgtctgatgacagttcgtcatctgacaatggagaccgttctgcttcaaaatgcccacttcgaattttggtgtcagatgatgacgagaaagttgaacaataa

SEQ ID NO: 63079 - DNA, 701 bp, Heterodera glycines
atgagcggattaaaaagattccaaattgtcccatcctctcaaaaaagagtgaccgaagattttccaacgaatccaaaagatcttcgtgccattattcaatttaactcccctggcctattctatgtccgtgccagaattgccgatcttcagttttccctatacaaggtttcgggtcgtctattctagccaacattataaagtagcacggatttaggcctgtccgttgaagaattttggcacattttgtaagaaaaagcttgacgaggagctgtattgtgccagttgtgcccaccatgctaacaaggcaatccgcagtatttacttgagattggagctccgcgactgtgaagatccggagatttgccagactgttactgtcttttccaccgtagcggaacattacctgggcctcaaggttgaacgatttgccaaaatggtagaagagcagcctgaacagctcgaagcgttgcttaaatctaagattgagcgtactgtcaccgccaaacttagtataaaggttcacaaatttactacgtatataaatattatctttttgaattttaaggcaaagggtgagctcaagacgatggactggattgttctgtccatacagcatgagaacggggaaaacgatggagatgatgagacggctcctgatgaacaaaagaaaactgacaatgataacgaagatggagaaataa

SEQ ID NO: 63080 - DNA, 638 bp, Heterodera glycines
atgtcgataaacacgcatctgggaaaggaacagagtcgtcgagatgacttggaagcgctcggacacatgtttatgtactttctacgtggctccttgccttggcagggcttgaaagcggacacactcaaagaaaggtatcagaaaatcggtgacacgaagcgcgcaactccgatcgaagtgctttgcgagggattccccggttcgtgtgcacattctaaaccgataaatttgtttctgcagatgaatttgctcaatatttgcgttatgctcgacgactcgatttttttgaaacccctgactatgaatattgttatggtcttttcaaaactgtgcttgaaaggactggtcacacttatgattatgagtttgactggacccataagctcaatcaggcggttcgtttccgttgtcctcctttattctcgtggttatctcagacaaccccaagtggttccattcacaccgccgttggcgtggaaggaggcgaactgcgaaagacgaggaccgattacgcaaaacgtgcatcagtcccgaaaccgcgtaactcggacgggctgttgaggagtggacagcaagtaaacagcacgacaaccggaggtgccatcggacaccacgggcctggcttcggttccacgcag

SEQ ID NO: 63081 - DNA, 446 bp, Heterodera glycines
gtgatgtgcgaacagtcgctctgtttgtctctgtccaacgaaaacgcgtgcgaaacgctcattttggccgacctgcactcggcggaacacctgaaaacgcaggctgttgagttcatcaacttgcacgccaacgaggttttggggaattggggcaaaattcggcgcatttatcgtcgtgggaacatttatagagaataatgacattacggcgatgaaaataggtgccgttgggaagaaattttgaatttattggaacatttcctcgcttttcgtcataattcaattcccccctctcccaggtgatggagtcggacgggtggaagattctggtcaaggagcacccgccgttgctcgagcaggtgttcaaggcgttggccacccagcagacgccgcccatcattctgaaccaaccgccccggaaaaggccgcgacaattctgagacgtt

SEQ ID NO: 63082 - DNA, 957 bp, Heterodera glycines
  unsure (1)..(957): unsure at all n locations
aaaaggtgccaaaggcaatcgaatgccancaatgcgctccctctcccattttaagctgaagcccggctcccaccgctttgtgtcgcggattttctgncagaggcaatgcncagcaaattcttttatatcagcaaaaggtcgcttttaggctcaactgatgaaacgtctgcgacacccaaaactgcttcagctttacgcggtgtgcactcgggaagagccatttttaatagcgacggaattaatgcagggtaagcaattaggggggagggggggggggatagacccgggctatagaccgctccaattcccaatggtatccaaatccaaagccacaaacatcgtaaacatagctatctttcgcattcagagaatctgctgcactttctgcaaggccatggccgagtgtgtaacgtcgcgcaggttgaagaagcgacgggcgcccttttcacttttctttttcagttggtcgacgtcgccgtgcaaattgcctctggcatgcgttatttggaggtgccaaagcgaaagtgtttaaatttccaattgttcgcaggagaaaaatttcattcaccgtgatctcgctgtgcgaaacattctcatctctcacccttcgatggtcaaaattgcggacttcggacttgctcggcttatccgcgagaacgaatacgaagcgcgagttgggcgcccgttttccgattaaagtcggcgccctttccctcactttttactttaaccattcagtggacgacacctgaggcggctaattacaacaaattcactgtcagatctgacgtttagtcctttggcattctgctcaccgaattggtcacttttggcaggataccgtacccgggtgggcaattttcgcctccaattatgataccgtagttttcctaacacaaaccaggcatgacaaacgcagaagtattgcacaaagtgagaatggatccgaatccatcc

SEQ ID NO: 63083 - DNA, 577 bp, Heterodera glycines
atgcattcgaacaatgtgaaatatgaggaaattaagcaattgatgacatttccattaacagtggccgaacatttcatgaagcggcttagcaaatttgtacaaaggtattttacttatattagccattggcttaactttcccaaaagtcgggaatttaattatgataatttttattcaaaattatataaaataataatttagatttgactcttataaaatttagagtccaccaagtgttagtgtgagttgcaattattttctaagaaattttcatatttggatgccctagattttggagcaaagcattaattaaaaaaggaccaaattttaaatatttttcccagcgacgtctgtcgtaaatgtcagattcttccgatgaattttttattatttaagtctaaggccaagaaattttttaaatttatatcataattttgaaatattcaagaaaattgtaggcggatactaatagactaccaacactagattttttgggtgaaattaattttaaatttaaaatcattttaataatttaaattcgagtaattggccaatcacattcagccggtacaggtaa

SEQ ID NO: 63084 - DNA, 175 bp, Heterodera glycines
tgcgacggttttgtcgagtttcactttgtgaaggcgcgccattgcgacgattcgctggcattcgcctgtcgcgtgcgttcgctgtttctgcagtcgcttgagcataaattgcgcagtgacgactacggcgactgtcgcgagttggagcggctgatcatcaaattcgcacgcctcc

SEQ ID NO: 63085 - DNA, 498 bp, Heterodera glycines
atggtgagagagcgagggacagagagagagaggagagatagagagagagtaacaaaaatatttctcacccttttaacacagtatccgaagacgaatagacccacccaggagcatggagtacggtgtgttcaccgccgatggaatgccgcacccgctctccgcctccgttgtgccgaccgccgatggccatggcattttggacgctgtggcggaagacgaagaagtaaacaattggaattgcttggacgcaacggagggagaatgctaattataatccaatttaaaaaggacgcggaattggacgaacaattggacaggcgaaaggcggaggaggaggagcagcagcgggcgaagggacgcgagtatttttgcgacatttgcggacggacactttggtttgcggacaatgtgcaggcgatcaaacacaaaaagggacaccagcaaaaggaggaggagaagccgaagcaggacgaagacggagaaagaacagatggatga

SEQ ID NO: 63086 - DNA, 813 bp, Heterodera glycines
  unsure (1)..(813): unsure at all n locations
aattggttgtgcggcgcaaatgtcgtcgcacagttttcaatgtcagccaattcagccgccgctgcattcgcaccgaaaatggcgcacncatctgatgtcacgccacaaatatctgatcgtcattggcactgtcctcttcgtggacatccttttcctcttcccttattccggcatccaaatggtcgctttgcttcacctcaacaatttgcttgccacttcccaaatgacaacactaattcggtggtgtcttcaggtaatgggccttcctttgctcctattagtactaattacttgcccgattagattctgatcggagttcactccgtttgtcagcctctttgttatttccgaatgacagtgagtaaagaaattgcacatgccaattgccttgtctgtaggaatttcgccgtcttgcctgttgtctgggccaaaagcgtcgttttgggggcagcggaagcagcgcgggcggatccgtttttggtggggcgacggccggcacaatcagtcgaacgacaaaagggaacagaaacgtcggcatcgacgagccccagccgaccacgaagagaagcatcgtattgaggacagtgttctcccagggaatggcccggacagaagaaatagcgacgatgggagaacgaacagagcgaagggaagagagcgccgattgggtaagagagagagagagagaaatgccaaaccaaacgatggcaaaggcaaagaagagcttcagacaatcccaaccgtggatgggccgcaaatgttgctgatcacccaaagacggagatggacgcgcaatctgagcttattgtgcaa

SEQ ID NO: 63087 - DNA, 612 bp, Heterodera glycines
gtcaaattggactacaaatttgaaaaaatactcaaggaacctaattatgatctgaagttgctgaatgaacacgaatttgaacaacttggaaaaattgggcaaaaccttgtaaaaaaatttaaagaaattaaattttttggaagccaaaatcaaacaaaacatttgacagcggaaaagggtaacaaaaaagaacttaccgtagctttactcacaacaggagaagagaaaagtgtgattaacactaatgaagaagcaattagcacacttaatgaagaatttgatgcaatgatgaaagaaaaggccgaaaaagttgactcggatgaagaatatggcaaaatgaacaaagaagcattgaaatggctggtacagtgattgctgattgcttttattcctatttttcactaaaatttctgtatttgaattcattttggcggggggagggagttaaggcatctcatccaaagcagggctgcacgcaagtggatttacaattacggaaatccgcaatccgcaattgcggcgattttctcagttgcggaaatccgcaatccgcaattacgggtgtccaaaaaccccgcaatttccgtaatttccgtaatccgcaatccgcaa

SEQ ID NO: 63088 - DNA, 94 bp, Heterodera glycines
agaaaatcttgcaaaacttttgtttcttcatcacaatttgcttttaactggtttctcaattgaatgattttgcttttataaatttgctttttaa

SEQ ID NO: 63089 - DNA, 831 bp, Heterodera glycines
  unsure (1)..(831): unsure at all n locations
atggacaactcagaaaatcatgacaattcgtttgaccaatcaaattgtcctagccagaaaaatcaaactaattattccgctgatacgtcaacagatttattaatgttaccaaatacagtaaatcattatattcattcaaatccaatgatgactttaagccaacaaaattactataatcaggaaaacccatcgacgtcaaccaatcaatcaacttatcctgatcacgcaaacacaatggctttgaacaatcaatcgatttatgctgatcaggcaaacacatatgcattgaacaatcactcaactttttctgatcaaacaaactcactggcattgaacaatcaatcaaattatcctgatcaggcaaactcattggcattgaacaatcaatcaaattatcctgatcaggcaaactcattgacattgaacaatcaatcaaattatcctgatcaggcaaactcattggcattgaacaatcaatcaaattatcctgatcaggcaaacccattggcattgggtaatcaatctacttatcctgatcgctcactatttatggcgaaccaaaacaatgaagttaacggtcttattccaacaattgattctgatcaagctgatcaaactattttgcaatcaaataaaggctccacgggacaacaactgcagcaaaatgtgcaagttcagcagggaaatcttccgacaatgctaagcatgacaacgccagtgcctgaacaaccattcgatgggacgcattcaatggtttctcaatatcgaatatttttgtacccattctttttgngggtttttgttttttatttaattattanaaaaacataa

SEQ ID NO: 63090 - DNA, 501 bp, Heterodera glycines
atgggttctttgaagaaatattcgatggttctcaaccacgccggccttcgccgtgaattggaacagaaaaaaacgcaccctcgggcgcagtcgcgtggcgccgccaacccgaaacagcaacaacaggaggagggacgaatccgagtgcaactcaaaggggacgacggagaaaatcggtcgggggacggggaaggaatccgacgacaaaaatatttttgaaaatcggaggaaatagaaaaatttacgaatggcaaacaaaaagaaaatcgtttttgtaactttgaccccattattcagtgggcgaaggggcggcacagccaaagttcatgacccgacaacaaatgatggaatacgctgcggaaatggtgcccaaactgaagacacggcagcagcaaacccaagtcgaacagaacgacgcgacggggaagcagaagaagcggaagtgaacgaacggacggacattcaaccaatgacatcaaatgtacaattaatacaattgtt

SEQ ID NO: 63091 - DNA, 240 bp, Heterodera glycines
tatgtgtataaaatttatcaaaaaaagagatagccatttttcttgggataacctctaaatataaaaatcctctgtgaaataaaatggcgattgtgcacagccctccgtctcatacgcaagcgcttttgtgaggtataaaatttctcaaaaaaagagatagccatttttctgggatagagtataaatttaaaaattccctcaaaaataaaaggtctattgcgcaccgccctccctatcatg

SEQ ID NO: 63092 - DNA, 304 bp, Heterodera glycines; identical to SEQ ID NO: 56071

SEQ ID NO: 63093 - DNA, 391 bp, Heterodera glycines
ctgcaaagcggcgggtgcgcatttcaatccgcacggaaaacgccacgggagcaaagaatcggaggaaagacacgtgggcgacctgggcaatgtgaaagccgctgtgagaaagagccattcattgggaaaggggatgaaatgccaataaatataatgttcaggagaatggggtggccgtggtggacattaaagactatttggtggcactgaacggcgtcaacagtgtggtcgggagggcattggtcgtacatgagaaggcggacgacatgggcaaggggggcaatgaggagagtgggaagacgggcaatgcgggaaaacggatcgcatgcggagtggtgggagtgatcagagaggaaccaatgaaagtgaccactgatcagaccaacggaat

SEQ ID NO: 63094 - DNA, 646 bp, Heterodera glycines
atgcgccgttttggagctgctggtccaagaaatcggtttgaagctgatgctgttctgctgatgattggtgcgattcagctaaaacaaaagaaattgtggatttatattcataaaagcataattaatggaataaaaaatttcgcttatttagaaaactaatgaaatacgaaagttatgactagagttcgacattttgaaaaagactgtgacatggattccatgctggacctggataaaaatccaggtccaggaaaaatccaggttcctcgagacctggattttttgaaactcattctggacctggttccaggaaaaatccaggcctggatccagcaggtccaggtcgagctctagttattacatctgttttaaaaatgcgcatttaagaccactaaaaaccctaactcggtctcgaatagcacatcggcatttcacacttcacaaaaagctaaaaagtgtgctgtgcaacaaaaaattctttcaactctctcatgaaaaacaacaaatattttaaaattaattgcttaaaattgaagaaaattcaaaggatcgtaattttatttcatttcatttttgtttttttttgcttcaaggagttttgatcaaattatttttgaatttgatttgatttaactcagaaaataaa

SEQ ID NO: 63095 - DNA, 950 bp, Heterodera glycines
atggacggctttcggttctggcggagcggctactgggcccagcatttggcgggccgcaaataccacatcagtgctctttacgtggtggatttggtcaaatttcggtgtgttgattttcaaaaatgttttttaatcatcaaattattaaatgctttgtaaatattttcagccaaattgccgccggcgatcgtctccgtggccaataccaagggctcagctccgacccgaactcgttgtcaaacctggaccaggatttgcccaacaacatggtgagttggcaagcaatttgttgacaaactttacaccaaaattcgtcaattctatgcatttttgagtttagtgtgtctgacggcgacatcagtcaccgccatcgttctcttccccgaaatttaaaaaaaaaatcacaaaccaaaatttttcaaaagaaattagagaattttttataagaaaattacaagtaagaacatttagaaaaaatcttaaagcgatttttcaaaattttatattgtattactaattttttcaaagattcgaaaaaacccctagaaaaatttttcaactaaatctttttcttgcaattttcttgtaaaaatattttctagaaaatttttttaatttctaagtttgaatttttttttcatttccgtgagtgggaaagttatgctctccaacttcggcctttctgatcccaagaattagattttttaagcgtttattttctgcgaaaaaaaaatcaaattctcatattttttacagaaaattcattccatttttatccccattcctcaatgtttcagattcaccaagtgcgcatccactcgctgccccaggaatggctgtggtgcgagacgtggtgtgacgacgtgtccaaggacagtgcgaagaccattgatcttgtaaacactattatttcgaaaatcacacaaattctcgaatattccattatttaa

SEQ ID NO: 63096 - DNA, 2479 bp, Heterodera glycines
atggcttatttcgaatttcccgaggtaaataattcatttatttaaaatccagaaacaatttgagattaaatgatcccctttcaggctgattttgacagtttggaagcactcgttgagtttgcgtacaccgcccgacttcgaattggaagtcgccgggtaaaggagctttaccgggtaaggagtgtttttgttgtgcttttttgttttccgtttgattcaccattttgattgacgtcctcaatcaatcaataatcaatcaatcgatcgattggtcagactgcctttgctctccaagtgtcctcggtggctcaggcgtgtgcccattggctagccgaacacctcaccgtcagcaactgcatcggtcttagcaaaaaagcaaatctctttcttaaacggttcaattcacatatgcacaggggccacttttccgttcccctccatttctcataaaggggggggagtatagaaagggttgaagaacacaaaattttgtcactgtttttgcaaatttttttccttgtgcatgtgtgatttaagttcttccagtgtttctgacaaatccaaaatttccaaaaattattctgcaaatctgtttcccgattttttttcataagaaagtacaattgaaacaccggttcattcctctttcttgggaccttaaaattcttatctcatcagtttttactggatcaagttgataattttttgctccataatgcaattaaattttattacctacagtatagtttttctgtcttgcactgttctttggtcttttgtcccttttttaattccattattttgtgggtcctttggtgactcattctctccattatcaatttatcactgattcgtttgttttttgttatctgatcatttaaggtattcatcgtcaagccaacctcaacaaagacgcttttctgttgagccgagtgaacactttcatccgtgacaatttcgaggcggtggtcggcgatagttcggagtttgcgcaattgccgtgtatcaaaagtcggattatcgtttcggcctccgacgggggaagagaatttggtgaattttgattcgaaattctaatgacacattgatttgctcttaattacgataagtaattattgtgtctatttgcatttgcagcagcacaaagtgaccaatcgcacctcaaagcgccccttctcccctcgggggatgaactcgccctgcgctgtcttcgctatttccagcacagcgcactccgcgcagcgggcgaacgcgtcgatgcgcacatcgaatcactggcggagaaaacgcaccttttggtgaccaactcggaggagcagcacaaaccactggcgaacaacaatgggggcgcaagcagtgcggcgccgacgatggcaaacaatggcaatgggcagcagcacaacaacggacgactgcaggacgccaacgaattggacgagaaagtgctgtggggggggggggaatgtgggatttgcaggaacacattaaaacaaaacacgacatgatgttacaaaactccgacaaaaaactttcatttcattggaaatccatggtaaattcggtttcagagtatgttgggatcgtgtgacctcgtcagggactacaaacggagcgcgagcatagcagcgagcgggaaaaagtcctttattgtagcatcatcaataccgaatttggatttttcctatttgttaggcttttgtcgagcaaaaccgaccaacagtcgtcgcttcacgtgatgggtgccaccccaattaagctgaacggtgccgacatgggaagactttcgaccaaggatgccattaaattcgcttcatggtgataaaaaagtgcgaaaatattttcttactaatttccaatcagtgagtcgctatgttcggtgggcagttgctgctccaacggaagcattccgtccgaaggcattgccgtaaacggcgattcgctcgccgccgtcaattccatcgcctgtcgtcagataatttgtgtactgcccactgctcccggcttctgggtttgtctggccctgctcttccaccggttggtccgcatcagcatccatctcagcgaggacgaggaactaatccgaaggcatcgcgaagatagagaaataattttgcattcactcccttttcagcagtcgtacaagttcagtcgcgagcagtacagatgggattggtgccgagtcggatggttcggtcacctcaaccgacgaccatggctccaccgacggcactgttgatggccgacgcgcagttctacctgcgcttggcgaagcacgttgtgccattggagcagcctttttggacggaaaaatcctgatttcgggcggatacgaccgaaatctttgcttacgaacatcggaggaattagacatttgtggcggagcggaagagtggcgacagttggcaccgatgtgttgcgaaagggcacgttttgacgcggcggtggtcaacggaaaagtctgggggaatcacaaaagata

SEQ ID NO: 63097 - DNA, 912 bp, Heterodera glycines
gtgttcgcagtgtgtggctccaacgggaacaacgacctttcctcctgcgaatgttttgacccgacgacgggacgatggaacgaagtgtgtccgttggagccggcaagaagccacaacggtaaggaaggaggaggagacggggacggcattttggcaaaatgggcaccacgagttcaggttgtgcttccctcagcggactgctctattgcattggcggctccactgatcacgcaactttgggcgattgcaggtgctacgacccggcgacaaacgaatggcgagagatcgcaccgctaaaggcacaacggtcacaggtgggcataaaaaatttaatgaatttttcgtaaaaaatttttaatgatggggggggctgatccgtggggaaagggcgggggaaaccagtgtatcatactaccacaggctggctgcacggcgtggcgtggtttggtcgtgtgcgttggcggctgcgacaagtggaactgtttggactcggtggaggcgtacgacccgcaaatggaccaatggcatcaccttgcgcgtctccgtacgcctcgtcgcggctgtgcggtcgctgtgctcggcaattcgttgtttgctattggcggtcacgatggtcacaacgtgctggccaccgtcgaagttttggactcgccaaacgcacagtggcgccctggcccatctatgcagcagagcgctcgtgttcaccaccacgcgatttccgcctcgggcattggcatttttgtcgtcggcggatttgacggcacacattttttggccagcatggaagtaatggagagcgaggagagtggtgagacggatgtttaaatgtggaaacaaattctaatttaaaattttaaaggttggcatttttcgcttgacgaccggaaggtggaagtggatccgacacttact

SEQ ID NO: 63098 - DNA, 1267 bp, Heterodera glycines
caaatttctccaacgctacccactgaccatcgaaaagaagcggcagcagaaagtgttcttcaaagagaagccgaggcaaaacaaaagggcgaggatcagcgcattattgttgtccatgccgaaagagagggcactgaaacggctgaaaggacgaccgtccacttcaagcgcaattggacatcgcatgcctccgcgttgacaacttcggcaccaatctgggacgggcgcatcgaaattgatgacatgagcagcaccgacgacggtgggtgtgaagagtatttaagtgcccaaatttgaattgttcatttccctttaacacctttcatctgcttattttctgttcttttgagaagctgaaattgacgccgtacttgcagacgcacagcgattgcgaaagattgcgttggaaagagaattgccaccaaccgctggtcagtgtattaatattacaattattccatcaaatttattgttgccacatcttcctgatgcattcattcatttcccctttagcgatgagtcgtcctctgttgtacaatccgttggacttttccctgtcctccgagtcgggactgatctcgcccagcgacgcggctcttctgcccgctgtcacttacaaacagttgatgctgctcaccggaggtggcagcggtccttctgaaaagcagcagcagtcgaacagcgtcagtggcaccggcacttccctcggctcgcccaccgtcattggtgacgacggcgtcaacactgtctccggcacttgcacttcgtcctccgcctctgctgaaggagcgcaaccaccgctacagcagcgaccgcacgcgacagttgcgcccaccaccacaatccaagcagcaccggccacaatgtataaaatgaatggggtacccaaaggggggggggctgaagggggctaaagcctcctctgaaatccaaaatttaaaaaaatgcaacgaaaaataggtttttaaaaagggaagaggctcgtaatattgaagtattccattttgcgtaggattgtccagcagcagtaccaataccaccaccaaaatccccaactccgtccccgttcgcatccgtactcccaaggctatgtgccaccgccggttgtaagtggttcagtaacactaacagaaaaagattgtcaaattcttgcaggggcatgcctatcgctaccaagtgagccgcgggtcagtgtccaaagtgtacacgggcggaaacaaaatgcaatttgccatccaacagcaaaatgtgccgttgggagacagag

SEQ ID NO: 63099 - DNA, 132 bp, Heterodera glycines
tatgttgctgtctcttgattatgtcgtcctgaaactttgcgacttcggcacaatcgctaagcatcggacggacatggcgagcacttgtggcacggccgcatggatggcacccgaagtgttcagaggggagag

SEQ ID NO: 63100 - DNA, 762 bp, Heterodera glycines
atgactacggaatcacttgtcatccccaaggacatagccaataaaagtaataaattaacaaggaaaacttagtgaaatcggaaatattgttttcgtttcattcctgaattttttttacactttttagattatttgaagggggagggtccggcaaatgcgacaagggaaaatctttggaaaataaagcaattatattaaaaaaaacagaaaattttcaaaatgtctatcaatttaattgaggaattcttacaataacaataggaataagacggtttctcaacaataacgaggcaaaactaattaaaagtcatttagtcatcgatgaactcgaccagaattcattcgaacgatggaaacgaaagggatgcgttctcgaaattgtttgtgaatttttgtttccttcatttttatttccccatttataaacagaagcagaggaacaacgtgcgcttgtttcttaatgggactttgacagaaaatgagtgagtgaaatcatttcgattttagtggaaattactcggactaaaattcttacttttttttattcttccaggactttgcttacaaatgaaatctttcccttgttcaaacaagcgcgagaagctcttggttcagacagttttatatttacgcttggtctgcttattccgaacccaaaatgcggctatgtgatcggcaaagaggggaaaaccgtccaaaaaattcaggttgtacagaactcgggtccacattattaacgttggattccgatgaaaatcaaaa

SEQ ID NO: 63101 - DNA, 2070 bp, Heterodera glycines
atgcgtttcaaaggccgccattctcagattcgtcgactcgaggcgcgttcattggagttcaatccgtacgcaatgccaagggacaacaaaaagcgatcggcggacggcaaatggatgacacagaatgaacgaatcaaattgccaccatttggacactttaccagcgaacagcaaatgcattttcgagaaattcaggtcgtcggaatgggaaatttcttgaaaaacgcggcaatttttcattttagtggcatttatttaatttaaaaaatttctgtagaaatcgtcggccatcaattgggttttcgatgagctgctcaatttgacggaggcgggcgacggacgctttgtgactttggaaggcgacgccgaattggtgctcagtgcgaagaagcgactggcaaaactgatcaccgaaattgaggtggcaaacaaaaggcttaagtcgtgccaaatttggcaattccctgccaaacaaattcccatttttctattatttttcaatggtcatattaggctcttctttcaggattcccatctccattcttcgtccgttcggctggccaattcgccgaccaccggccgaacgctctatcgaacggttgtcaaagtgccgtcgcccgcctggcgattagtcatcggaggcggtgggaagacaatcaaagggttgaaggtgggtgtcatcaacccaaatggctttgctaatacaacgaatgaatacttttaggagcgttttggcgtgtccatgcgctttttgggcgacaatttcgttgcctacccgcacttccgatcacttagcatctttggacacgatcaaatgaatgttcattcggctcgcgagcacattgagcgcgaatttgtggcgaaaaatgacgaatatttgggagtgcgtaaaaacttttccaattattaaattatttatttttaaaattggaaacaatcattataaatgggaattagcattttaagcaaaacacttcccaagcgaaagcaaaaggacgtaggaaattcctttccacgacggatgacccgaacaataacatcgatttgatcgatgcgaatgcatacggacacaaaacggagattggcggatgggaatcggacgaagtgaggcacaaagacagaactcgaattattttctcagcattctcccgatgattaataatgcataatgactcttttttttaataaaattaattatgttttacttcattttttctattttaaggaatcgtgggctgtagatgaaccgcatgtttgctctgatttcacaatgaatgaacagaaaactgatgaaacagtgtcaaattcggaggaggaattgctgaaatgggatgacgaagacaaagaagaagataaagaggaagaacaaaaggatgaaaagaagacaaaatccaacatttttggaggagagagaggacagaacggaggagacggaaacactgtgaaggaattgggaaaagaggcagagagtgcgaagaatgaagacagcggaattgtgggagacggagaggaggacgaactctttttgctcattgaggggaaagggacgcaaaaagacggggacgatgacgaagtcggaggaaggggaggacgaagtcaaagcggggagcaccagcaacagatcagcgccgaatttggcacgggcgaaataacaaagcgacgaacgaccaggtgaggaggagaagcatttgggattagttggcactcttccgaaacacagtctgagcgatggcattggcaattcctgcgtctcggccgcttcctccgccgatttctacgccgacgagacggtgcaacagctgatatttcagccattggatcgtaatgccttggcttgtcaattagaacgtgccaaagcgacgctgctcggcgatgaacatttgtcccgggagttggcgcgtacggtaggtgtttggggatactctcgtactgttttacagtacctatcaaaatgatattattgctcaatttcagcaagcccttctccgtgcccgggagcgcgagtgcgagcagttgcgtttggaaaatcagcgtctcaaacttcaattatcttcatcgaccgtagcataa

SEQ ID NO: 63102 - DNA, 407 bp, Heterodera glycines
atggcaaaggcgacgaaagcccgatgggccaagaaaagtgagttttttcactaattttaattcaagatcatttttttaaatttcagccgctccacagctgaatcccaatgccgaaattccaccgcaggacgaagcagggccgaggataggggcccgaagggaacaatttcgaaaaagggatttgaccggcaactcaataagaaaaattttggttcgcgctacagaaatggacgaacttttcacaatggaatggcccaaagctatttgtaggacactcgaacacctcggcaaaattcaaatttttttcaaaagtgttttgtccgattttattaagataaaatcataaattttaggcacaaattttgtccccaaatgacccaaggcccatcttctactcttccacttag

SEQ ID NO: 63103 - DNA, 306 bp, Heterodera glycines
ctccgaatgtgtcattgcggctccaattcgtttcccttgggcgttcgattgcgcgactgcacccatctcagctgcgttcaatgtttcgtcgcatatgctgaagaacttttgtcccggatgagtctaaaatggcacccccaagtcggttacaccgtcggatgccccttttacgggtgcaccggtaaaagcgcttaatttttcgctttttaaattggcatttttccattgccctttttgtttcacaattccaacgcacttcagctgtcgtcaccgatgttcacactttgtatttgctggacaagcatt

SEQ ID NO: 63104 - DNA, 76 bp, Heterodera glycines; identical to SEQ ID NO: 51705

SEQ ID NO: 63105 - DNA, 209 bp, Heterodera glycines
tttggtacagaagtgtccattttctctgggactcagttgtcccagtgcttagatggcattggttcgagtttataccttgttttttagacttagctcatcaagcgctttcgaatgataccaaatttgtccgaatttgagcgttttaaaaggtcaggaaccccccttttcactcaaattttcgagttttaaaccggttcaaaaaccggttt

SEQ ID NO: 63106 - DNA, 832 bp, Heterodera glycines
atggccatcgaattgaacaacaacaacgcatgtgcatcaaccgaagaggacacaagcagttcaccgaacgcggccaatttgaccggcacgcccagcggagaggcaatgagcggtgaggaaagcgcacgactcaaacgaaggttatttttgcggatgaaacagttcaatcctaaagaaactcattgagttggccgatgcgtcaataagtaaaacttaaaagaagcttttaaatgtttctgtggtttctgggtggcaatggacccgtaatcagagatgggggggggaagcattcctatgaaaaagtgaaaggaaaaaactaatttcctttgattttttcggttgtcataaaaataatacttttgagtcttttatgactttttaatcaaattttcatctctctggactattacattacaccagagtatggaaaacaattgtgctttttcgcatttaatttctatgcattttcccttttcttaattttttacctgaccatagtttattctgcaaaaaaaaattgaaattttttgttcagttatgttctgcaagaattggtggagtccgagcgcacttacgtccaggacctggcctctatctcaggttctaatcccttcgaatgccggacgaattcggaaatcgcaaaatgcgctcctttcagacggttacatcgcctccctgcgggaaatggaactgagcgacgaggacagagagaaagtgaagatcattttcgccaacatcgagcagattctcgactttcacaaaacattctttttgaaagaaattgaaaagagtttgaacgattacgaagcggcgggcattccttcattaatat

SEQ ID NO: 63107 - DNA, 234 bp, Heterodera glycines
aatcgaacgctaacggacgacctaatggaaaaaaatccccgaaggagagaatttaattaaatccattccttcgggggaccgtgccgggtgccgcggggtaagcagtgctggttcgtttcatcacggcaccgaaccttttggctagtcagcaatcgttgcttaacttgccagatcggacgggtgcgcatgattccactgttccaagcaccccaccaaaagcaaagcgatataacc

SEQ ID NO: 63108 - DNA, 145 bp, Heterodera glycines
aaaaatttaaaacttgatgctttattcaaagttttggctctaccagacgaagaattcgaagaatggctcagagaacttaagcttctacacaccacccgtttttgcgactgtggcaaggaaatgcgctacaaatggattaaaggac

SEQ ID NO: 63109 - DNA, 2648 bp, Heterodera glycines; identical to SEQ ID NO: 6853

SEQ ID NO: 63110 - DNA, 132 bp, Heterodera glycines
aaagcttctcaaccaattttagcgcatccaattccttctacaatcgcctttatacatcccattatgaacgctaaaattatcagagtgccgaaaatcgcatgtgatctacgcctagcaaaaaatggtgtaagt

SEQ ID NO: 63111 - DNA, 152 bp, Heterodera glycines
gtaacacccagatatgttcaacggcaaaattgtgcaaaggctttggtgaagttccaaagccatttggagaccttcgatttgaaggtttaattggacaggactaaatcctgtcaaagcaattacctttctcccagtatttcttagttggtaat

SEQ ID NO: 63112 - DNA, 180 bp, Heterodera glycines
gatccaatttaccaacaattggcagagcaaaaatatgcaattgacaatttcccgggattggatgacattttcaggaagacgcgcttttttcttgtaaattcacaacccgaagtggactttgacaattacagaagtgtcaagggcatggacaagtcaaattcatcggaggatttaatttaa

SEQ ID NO: 63113 - DNA, 816 bp, Heterodera glycines
atggttgagaagcataaaaagctggtccaacaaactcgtccggtgaaaattttcaaacttacaattataaaatttcaaaaaaaattttacaatttgaaaactgtaaacatcactcaaataaaaaaatgttcctttaattctttaaaaacttttttaaggtttttttttaaatttctaatatgtttgaaaaattttttaatttttgggcgaagaaacatggtgcaccccgttttactgctcacatcagcataaagcaattaccattaaaaacatttaatgcatttttctatttttttcagcttggtgttgaaataattgacaccgcaaagaagggtagggttattattaattaatgccaatatttaaattgtataaaattgattaaattaaactaattcccttttttcccccaaattttccagtggccagcggctgtgtgacgtgcattgtccgactgctcaacgaacgtggcgaagaatgcgcgggccgacccaagccggaccatggcacattcccaacactgttgcaacagatcccgcccaattacacactggtgaagaacgaccagctgttcatcctggaccaatacatcaaagaggcacagcacagagaaaatgtgagggttacaacaaaaaaaaaagttgaaaaattttcatgaataatttgtgatttttctttgaaaaatatttttttttttggattttcataaatataaattccatccttaaaaaacaagaatttttttaatcgctgagaccatctgctgattgtgaaccaggaactcattgccccaatcagaattaaaaaaaaaataaa

SEQ ID NO: 63114 - DNA, 2026 bp, Heterodera glycines
atgggcgcgcgtgcgctgctccgtcctctgctcacactgcaccccgtcaaacaagcggaagcgatgagacgcgtccatttgcattccgaggcgctgcgattggcggaaaaacgacggatacgcgcggatttagttgccacgatggaggagatgcgcgcacgacggaaggcagacgcaacgcgggacggagaggccaaatccgaagcatttggcacaaactatcagcaggagagtgagtattataataacatttatgggtcttttttcaccctcctcctcaggtgaaggcgcccgtttttccacgcttatgccactggacgaaaagggaagggaggaacggtcggtgccgtcctattgggagtacatatcactcgaggcaaagttgctgttctgtgcgcatcggccaaattgccccaagcacactttggagacgaattggcgacgcgcacttggcgaagtgatcggcgaggtcagcagcagacttgttggcaaatattaacacaaaatgctcattttgggaagaattttgggtaataattgaaaattataataaaaatggcgacgaatagttccaagatgtgccgtcgaatgaatttttaaccaaaaattgttatgcaaattatagttatttgatcggttcaacaccgacgcacaccatcgcggacgcacattgcatttccagcgcattcagtacggttatgtgcgagttcggcccacatacggggtggacatggtattggacataggtaagccagccattcggcggccaaatttcagacattgttccctccctcccatttgggtgttaccgttttatttggctccattcagccctttggtaccgccgtttccgtgccccgcgccgtgccgccacgctggcggtgcgtcggcacgcgtatgtgcagcgtcgcttcgggcacactgtcgcgcgcgttgcctccattttgccaataggtggcagcgacgcttcaaccgctggtgcgctgctgcgcagccctacgccaattcattttgtggtggcactgaagggccgtcccgacacttttgaacgatttgcacaaaatttgatggagctgcacagtgtttttggacgacaaagcggcacgcttcagctggtccttgtgttgtacaggtaaatgaaaaccaaaaaaatcacctaaatttttttaaacatcttaatttcaactaataatttaattggttcattaatctaattactatcaatgccattgatcaattatagacctaattcatatctgattttccttttttgtttgtttgtttttattacccataattgggtgcttaaaaaattttgaatttttaatgaaatttgttaagaaataaggcaattttccaaattgccaatgagaaaatttttaaagtttctgtttttatattcgatcgactttttcgctgacttttttttctctccctcatttttattttctccctcttcctcccttcaccccccccccccacctcgtacgatcgactgtctcgaacccttacgatcgactaagagaccccccctgactacccccttgcacaggtatacttcaaatggtcccccgttttcagctcttcattcgctgccgatgacctgcgcatcaatgcgacgctcacccgcctcgtccgcttcggttttggcactcgcacactgcgcatgccctccggcgctgtgttcagtcgcggcacggcactctccgcgggtgccgcactgctcccaccgggcgcactgctttttgtcaccgacgtcgacgtgctggtcaacgctgatgcaattgaccgcattcggctgaacactgtgcgaaattgccaagtcagtcgcatgagtgccgtggcaatgaatacgaattttctctttcatttccatatcataagggctgtttttacaaaaatatcagaattggaagatttttttcttttataaattaagcattaaaaaacatattcaggcatttgtgcctgcccatgtccaaaatcggatcaaacttaaatttttcaagctgatagcctaaaaaca

SEQ ID NO: 63115 - DNA, 1276 bp, Heterodera glycines
atgtcttccgcttcctccgcccgcttcgtcccttcgctgctcttcgccccgcgccatgcgcttcgccatcgttgcgcgctgctcgtcgccgcgcttttgctgctgttcggcctcgtcacagtgtgtgccggtgcgtccaccgacgggcaaaggtgcgaagaatgacgcaagcattgcctattggcatgattggcattagcaaatggttcggcactgtgccgaacttctcgggggatacgaagggcgaagccaatattaagctttactcctaatgggtttttgaattgttttgtttaacaaaattataagtcggattccgaggacaaatttgtgacattttggattcaaaattgaaatgcttacgatggcatttcaaatgttttttcgcaggtggagcaacggcgtgggcctttggggcaaacggagcgatgacctgacaaatttggcactgttcagtgatctcgttgatgtaagtgccctgtcaaatgacgaaacaattaaagccgattagcatatcattgttgaacaggatgcccgctcaatgcgcaagcggccggagcatggttggcacaaactgaacgccctgtggggaaaacggtgagaggcattgtgaagtgacaacaacattattgtccaaatggaatactgtagtggctttattccgatacggtagaaggtgtccaatcaatgccaagggactgacaattgggtcagcggatgaaagagtcaataaacggcaatgatagacaccgaataaattgacctggaccatcctcaagccacctctgatcggggcgacttctgttggcatatttcttgatcggaaatgattctcatagacaaagttcggcctctgatcagatgctaacccatcgttgctaactttgctctaacaaattcccatcaatttcagatcagccaactcaaattggcaaacagccaatggcctgtggggaaaacggtaaattttattttaaatttcatcaaaatgcattgcttttttaggtccgtcgtccctccgctgcaacaaatgggcgaagaggacggagaatgaaagcgacgacgactgattgtgagcggtgaaatgtttttgccgtatgaaaaagaaacccgacaaaatatacgcgtcaaattttggtttttcctccatttttcataaatgtcggattataaaacggcataacaattaattagttggaccttttgaatatggcggctaaattagcttttatcttcacgaaaaatatcatttatttttcatttctatataaataaa

SEQ ID NO: 63116 - DNA, 231 bp, Heterodera glycines
atgtgtccattcgtctttttagttgctccaattgcattgggtgagcaattaaaaaaggcatttaattttgtttaaataattaaaatttcgcttaatttaggccattgtctccgccaccgaaagaagaagaacaagaagcgggacaaagcagcgaaaaaggggcgtcgtctgctgacaattagtgacggacaaaagaacaaaaacagtgatcagccgcagaagaagaaatga

SEQ ID NO: 63117 - DNA, 1149 bp, Heterodera glycines
atggctcaacatggggctttttccactgcggcacgtacggaggaccaatgcgaagttggcaccagcaaaatcgcaaccgaaatttggggggaacagttgagttactgcttttgcgcagttggcgatgtcggggcgcacaattcaaatgtgaaagtggcatttcctgaggaattgtcctacggttggtcagggagagaggggggagggggaatatggggagccaaaatgagaccaaaatggcccaattggcggcaaaattgtgaaaaaaaagttaaatttctaatcacaaatacgcaaattgaccctaattggattgattaggtaattaagcgttgccaattaagtccatcttttattttgaaaatttgccaaatgttttcagtgagtcgcggcattcgttgtcgctgggaccattttttggtgctgatgatgctgtacgtgataacaaatattaatttgatgttttaaaagagtgttgcttattagagttgtgcattctgaaaaaagcctgacctggattttttctggacaaagaactaggaaaagccaggtccaggctctggacttggattttttgaaattgtttaaaaagcaaataaatttttaagaaaaatcaattatttcttaggaaaatcaaaaaaataaaaataaatgcaatgttttaaaatcgttttaacatttttgataaagaaataaaaaagggtcactcgaaataacaaatataaaaatattatccaggaaaaagattttcgtgattactggacctgggagcctggatccaggtccagaacaggtcgaactctaatgttgatgatgcattttgggccattgcgtcacggatattttgttgataaattattcattacttttattacataaatgatcattgtccctaacagcacacttaagtactgctgataaaaattaattcaactttgaaagcaagaaggtcttgtgccagaaatgaaaatttaaaagaattttcaaaataagaaatattggggggttcggcggaatatttttaacttcttttttttgaatttcataagtatttatttaataggttttacgctctttgaatgcttttctcaataataatttatactcacaaatttcaattttctctgaccaatgaattcaaataataaa

SEQ ID NO: 63118 - DNA, 164 bp, Heterodera glycines
atgcgcactttgcttcgcggcgacccttctgacttggaagcactgactgattttcttcgtgccaacggagtggtggagaacgcagcggcaatggccgcgtcgccacttttgaccgcggaaataagtttgggagaggggacggacagtgccaaaagcacggccag

SEQ ID NO: 63119 - DNA, 827 bp, Heterodera glycines
tgactgactgattgtgccgggtggcggaagggattgtgccgtctttaataattgcgatggcttttaggcggcccattggtattgcgtcaacttcggcttcatccctttcgcctacaggtgtcgtctctcgttaatcactttcggcatttccctttgtccctccttttcggcatttcccgcctttttctttcattttgtccttttatctttccgtttgtcccttcaggggcctcgagacgggaagtcgaaaaacggtggcatatgcagtgaaacaggacaaagtgaagtttaccgggggagaaggaacactcaccgcccaccaaccaaccgtttcagatcgtttttgtgttcgagtcggcactgctgcctaacaacggggaaatgagcgcacatttggccaaacatggcgatggtaagccataattggcataattaattcactttgatcactgatcatccatcctttgttcatttgattatttttgttgtgccgtttgaccattttttgatcacttttccttttaggtgtcaaggtcagttctccgccgttttctccgtcttcggcttttccccttcccttccactgattaccgccccccccccccccaatcaaaggatgttgcgttcgaagtggacaatttggactgggttttggacactgcgcgtcgtgcgggcgccgttgtggcggaagaaacggccgaggagagagaccaaaacggacacatccgaagggcatccatccgaacggtgggcattattttcgcttactgtactccccccaccttagtacggagacaccattcattcactgattgaacggcatcact

SEQ ID NO: 63120 - DNA, 716 bp, Heterodera glycines
atgccatcgacgacggaagaggcggaggacttggaggaagacgaagaggaacggcacaacgccaccgaagcaggaaacagcgttgtcaacacgcactactgctgtgagtggggggggggaagcgaagcaccaaccgacccccagcaatgcttttatccgaagttccctttccgcgaaaaacatgcatttttagatttggaaagtccttttaacgatgatttgtttgcgattatggtaatagaaagctactgtcctcgcatcgtcttctcaaatttcagcagaaccgctggaatttgagctgcgcttgtgcctctgccgatgggagcattgacaattcaaaggtccatttgggaagggacagatttattgttagaaacctttttcagatttatcgttttgatgttctccaatgcgtggatttagacgaatgtctctacgaagaatgccccaaaggttatttttttgttttttttttcactttggacaattcatcgtttttcaaggtcaacagtgtcttaacatgaacaaaggaaaaatctgcgcttgtcccgtgggctcttataaatctaaagacggaagaaactgcattaaagttccggtttccgggaatttaaaagaacttcttgaagctccattttattagtttgcactcggttatttgttgcacttgaaatacctaaataatatttgtacacacggcttattacatgaataaa

SEQ ID NO: 63121 - DNA, 142 bp, Heterodera glycines
atgtcgacaaagcctcccgctgataatgagtccaacaatgaaggtcaacagaagagcagtaactcactcgcacgagacgggaattatgaagatggaaatatgaagaatagagacaaacaaaaagagttcggaggacctgctg

SEQ ID NO: 63122 - DNA, 136 bp, Heterodera glycines
  unsure (1)..(136): unsure at all n locations
cacaaatntaaattatttgctgaatctaccgaatggtaaaaaaagagcgaagaaagattaaactctttttttcgtttttttttaaatatttttaattttatgttttttttactctaaaaatttccataaaattcgc

SEQ ID NO: 63123 - DNA, 2632 bp, Heterodera glycines
atggagtcggttccgttgcgctattttgttggtatcactcattccggccattccgtcactccgttccgtggcgacgactgttgggccaaacatcatcagcaggaggagcatgtcgaacaacatcaactcaacccggaggattaccatttggctgctgccactgtgtgctttgagccgctgcaacgtgttgaacgtgccaacgagttggagacgtatccacgccgtgcgtactgtcgtgatgtcaaaatgccaaaatcggcggatgaaagaggcgagccattgccatttgcaacacgaattggagcaattcttcatttgaaatcgacgaatcggacgacaaatcaatggcagccaccaccaatttccgtctacaatggcccacacaaattgttggcgccggctgaacaactgacacagaccgacattgaagcgtcaatttgccaaaatctgccgcccaattctgtgatgccgattaaatctgtcaaaaaagaggaggaggaggccactgataatgtcgcaattaacgctgccaatgccaacattgttcggcatggatcaaagaaaatggccaaaatttttgtcacgctcaaatccgttacaacgatgcgtgaagatcaagcagcaacagcatctgctggcaatgtgaatgcgctacaaatcatcataacgccaactgctcaaattgtacacgaactttgccccaccagcgaattattgtccgtccccattggttcatgcattgataaacagcagaaagatgatgatgacgccaaatcagcagacaacaaccaaataaacggaggaggaggaaagaaatttgtggcaaaaattactgtaacaacatctgccatcacgaagggtactgtagggcccacttcgtcccgtcataacgccaatgaagaagcaagagatggtcaactgcaacaattgcatttgcttaacaggaaagatgagttcatgggccaaccaatcgagcaaattgttgcaatggcaaataaacggtcaactcaagttggacaagatgatgatcagcagcagaaagtgaagacgacgtctcggaaaaaatatgccgccaaaattgtcttaaaaacaacccaaacaaatggggcaacaacatcaaaagaggccgaaaaaatgacaaacaaacaatttgaagcaccagcagcagaatggcatgtgcttaaccgagaaagcgagttaaagtgccatccaattggagaatttgttgctttgacaaaggctgctgaacaaaaacgcactgatgttgagaatgacgagccaaaaccggcgaattgcaagaagtacaacgtcaaaattgtcatgaaatccccttccgatgatcatgttgtgtgtccgccaacaacagatgaggaatgccatttgcttagtcggcactcggagttaaaatgccgaccaatgggcgaatttgtggcaccaataaagaacaaactgatggaagaaggaagaagtgacgtgcaaaaagcggcaccaacaaatggcaaaaaacttacggccaaaattgtgaccaccaaaacaattgctgctgttgaacaaacgcaacaacaattgctggaaaatgaaccgaaaaaccttcagcagcagcaacagatgcattcacttcaccgtaatgaagagttaaagtgccatccgattgccgaatttgtgacgtgtactgcttcaacttcagcaacagttgtagatgatgatgaagcgagtaaaaaggaagaattggaacagcaaggacaacagaacggaggattccctgctgttgatgaggaggggaagcgactgagtcgcaagcggaagagaccgtccgccaaaatggcacttcttgggggcttttggcaggtgctaattgattgattagagtttgatgattggttttggatgtgctgagtaaatgctttgaaccatttttattggaccaattttgaccattcaaatctgatcatgtttttcttggtacggtgggttcatttgtcctactgtactttatctctctctgtctctttcttttttctctctctcactgacaattctctccatttttctctctcacctctctctctcctttctctctccctctcactctctctttctttccctttctctttatctctctcctcctctcgattagatttttaccgttttttgtcccatatttaaatagaaaattgttcattaatcatggattgggtagaaggaatgaattaaaatttgaaatttaaatttaccattttaaatgagggtatgaattcgaatttgaaattaccattttaggtggaaaatgtgaattccttatttgaaaacttgattttagcaaattggcacctccaaggacaagcagaagaagaagggcaaaaagaagaaaacggaccatgagaagaaggcgaagaagcagaacgggcaaaaggcgacggcaactgctgccaccacaacgtcggcctcgagcagttcatcatcaccctcaagcagtgacgcggaggaaatccatgtactggtccaagacgaagagggcaagcagcagcagcaaatgcctgcaattaatgttagcatcgaaaaagcatcattaaaaattgcattgattgacgagagtttctcgactgaacaacataagcgtttttttttgtag

SEQ ID NO: 63124 - DNA, 510 bp, Heterodera glycines
atgcgtgtccatcgttttgcatggccgggcatcatcaaattctcacaccgtcgtcactatttcagcatcaaattgaaggcgggcgaggtttgtcaccagatttgggggtccatcccccaaataaaatttgatggcattttttagcccaatttttttcaggtggaccccaaaaaggagacatctttgacgtacactttggtcggtgggaaggaacatgccaaattgttgtgggaatgtgccgttgaacaccatggattcttcaggtatttttttctgttcgatttttttttttttttgcaaatttttccacaaaaagggggacttaaaaaaatttgtatcaaaaattgagagaagtttcacttttttaggtccagtttttgaaatgttgttacttcacgtttatgcactggggaaatacaaaaattttcaaatgtaaattttcagaaccaatctattcaaacgttgtttaagagagagaattgttacactcagttttttcccaaaaataaa

SEQ ID NO: 63125 - DNA, 245 bp, Heterodera glycines
gtccgttccaccacaatcacgcagtccagcactgggcctccagggcctattggtcagcggaattggtaaaaacaaaaataataaaaagaaaaatcgtatttaattacttaaattttaaacaaaataaaaaaatgaaaatatttttgcgcccctcaggcactttgccgtcaccagtgatttggggatggttggtggacagtgcatgtttggtgtgggacaatgaatgtgagcttggctcgtgtcaa

SEQ ID NO: 63126 - DNA, 734 bp, Heterodera glycines
atgccgatagaggaaaaagaggaaaaggatgtctctcgaattgtcgtttgggtaagtttaagcaaaaaaaaaatatatatatatacaaaaaaaaaaacgccttaatttcaggattcggaaacatcgcaggattcgatttataagggggaccagaaggaacatattattaattatatttcggtgagagtgacgtgtacggaatgctgtgacgacaaaaataggacaaattgtaaaatttgcggggaggagaggaccaaggattggagcgaggcggagggacacgagccgacgaaggattttgtggaatggattttaatggcctttacgaattacgatacgtacatttttgcgcataacgccgggcgttttgacggtaatttcaaaatttaatttttttttaaccctaaaattttaggacattttgtatttaattatctctgccgtaccgggaagaacccgctaccgctcatcaatggactgaaaatttatgaattcaaagtgcgaaactcgaagaaacattcaatgctgatatggagagactcatgcttattaatgccggtgaaactcgagtcgatgaaggcgacattcaatttgggctgtgaggacaaggcctttttcccctattactacaacaagaaagaaaattatggaatacgtttggaacatctaccaccgatggaggattacgcaccaggatctatgaataaagagaaatacgctaaattcgaaaaatg

SEQ ID NO: 63127 - DNA, 2676 bp, Heterodera glycines
atggaccgatttaaccgcgctaatcaccaaagccaaaatgcggaacaaaggcggctgaaaaaggaaaaagcggagagagcaatgcgtgacattgaactgtacgaagagctgcagaaattgaagaatgaaacgacagcaatcagcgagacagtcaaaaagaggaaaagccattcaatgtttttggtgagtgaatgccaaaaaagtaattttaaagaagggattgtctaatgcttttaaagtgacaaataagtgcgctaaaaataaaaaacacgaaaattgttaaatatggataaaaatgtttaatttggttaactttgacaaaagttatgacgattttttgtcgaaaagtgctaatttttgctgtctttttccaattttttatgccctttttgttatttcatacatttttatgcattttttcacttatttcatgcttttctgtgcttatttgaaagaattttcgtgcctaaaagtccggtccctattgtttaaatttttaatcactatgtctagaataatagtaaatgatatctcttaggattaaatctatctttttcaaaaaaaaatgaaaaatatcgcggtcacagcccccaatgacaattcatcaaataaattgcctatctttaaatttaatgattaatctcttagctatgccattttgcccatctttgtatgtatgtattatatgatcttccggtcttctctctcccatttgtacgctcatttcgttccgtttttatcatatttaccttgagcaaatttcacgggcattgggtccatgtcaaacactcaaatttaaatctcggaactgccaactgtgtcattagtggtgccatagtttgagtccggcctctgattgatattgctcatggcattttgcacatacgagtagatatataagaaagatttgcagaccatttttaaatttctccaattatttcttcattttcttaactctttgttttccatctcatccttccccatttctgttcatattggcaatcgaccatttttatgagatttttcgtcctcccgttttggcattttcataatacctttcagtcattcagcttcctcaatccgaacatggttgcacttttctgatcacacacactggctttgattacttttattgtaattatctttcccaaattcggttttcctacatttctgatcacatacattggcatttggttactttattgtaattagctgtccccaaattcggtttttccacctttctgatcacattagtctaaattgacaatctatcattttgtatggcaattgaatgtcctattgttttctcatttttatattaagtttcaattattcattgttttcaatccgaacatgcaacttttttgttagccaacattgacagaatttgatatccacgaaatttgacatgttctacatatctgatcagtgatcatgttgccaaaattgacatttaatcttttttaatgtaagttctttgtcccttccttcctattttggcattctcctaacatctttcaattcttcatcgtccgaaactcgattatgcaactcgaacacgatgcatattttctgatcacatgaccaaaattggcattcgatcactttatttgttttgccgttttcataatgctgttcaattattcatgttgctcattcctcacaccaaatttaccttaaagtttgtggcattcgatcatttaacggcatttctatgtcctcctgttttgcatcactttgaatgttacaaatctctgatcagaaagccgaactttggtactcgattattttggggcgccttttctgcatttctgtcattttactcttattgtccaatttgtagttccatttctatttaaaatttttgccacccaattttaacgcttcttcttcacccaatccgtcatccaaaactaattagtaaatttcacaatttttgtccagttaacttttgcaattgttctttttttcatttttttgacaaaataaggcataatatttcgctaactcttaacaaacaaaaaaattatgtcatcaaatactaccgcacccgaagaaaacccctctggggccgaaccctcgaaagaggaattgtcttataaatgttcttttcatcaagaaacaaaacaaaagatagaagccgagtctaatgagttgtttactgagctcgtagaaaaggtgtactaaaaaagtccatttttacatgttttaatcccccaaaaattttcaggatgcacaaactgtggaactcgaagcacaaaatgcagaacacatcaaaacgatcaacagacagaaattacaaatgaaagagaaagatgaagacattgcaaaagtgcgaaaacaaaacgaggagcaaacaaaaatggttggcacacttcaaacggagatcaaggaattgaaggccaaagtggagttgcgcgataccaatttggagataaaggaagagataatcaaaatacatgaacaaaaaattggcggaatggagaaggcaaatgttcaactggcagagacaaacaaaaaccttcatgaagaaattgccgtactcacggagaccaatcaaaatcaagaagaattaattgccggacagggagaaacaatcaaaaatcagcaagaaaaaatttccaaattggaagggatgctgatcaccaccggccatgtggagcagagcattggcat

SEQ ID NO: 63128 - DNA, 1879 bp, Heterodera glycines
gatgcacaaactgtggaactcgaagcacaaaatgcagaacacatcaaaatgatcaacagacagaaattacaaatgaaagagaaagatgaagacattgcaaaagtgcgaaaacaaaacgaggagcaagcaaaaatggttggcacacttcaaatggagatcaaggaattgaagtccaaagtggagttgcgcgataccaatttggagataaaggaagagataatcaaaatgcatgaacaaaaaattggcggaatggaggaggcaaatgttcaactggcagagacaaacaaaaaccttcatgaagaaattgccgtactcacggagaccaatcaaaatcaagaagaattaattgccggacagggagaaacaatcaaaaatcagcaagaaaaaatttccaaattggaggggatgctgatcaccaccggccatgtggagcagagcattggcatgtgagtgtaaattgtgccttttaaattgaaattagacaaatatttttttattagaataacatgcttttacaatttaaaattttgtttataatttaaaaaaattactccttttaccagaaacgatcatttttctttcaatggttaagttatagttagggtgccggtcttattttgtttgggttctctgaaatcctgatcataataaaatgtcaaaattttcaattaaatatgactataatttataggaatctgtcgcaaattcaaagtggacataaggtactgacattggcagacgaattggccgactgcgagcccaaagcggagttagataaggcggcaaaggacgacaagcaggaagaattggaattggagaaaaattggttggtttaattaattatggagttattaattaagcaattaattaatttaaatattagcttgattaatgaaatttaatttaaataaaaattatttggttggattaattgattgatttatttatggatattaattaatttaatcaatttaaattttttaataaaatttcaatttaaattcaatatggagatatttggttgattgattaattaatttatttatggagttattatttaaataattaatcaatttaaaatacggagtaattttaattatggaattacttttattgttaattttatctattaattatatagtgaaaaattttgtttcgggcttttagttgttttttagtttttcactttctcaaaagggattttttggtttttccgagccacgagtaaaaaaaggaataaaaaaaatttaaatattgaataaaagattcatcaaaatttatgtcaataattttgtagcaaattgccggcaccaacggaaagcgtagagggtaaccaattggagagcatccagagacagcaggagaaggatgaaggggggaagcaggagaaagggtaatttggctaaattaaatttattttacacaaatttatttttaattataaaaattaatgaaatttttttatgaaattttttttattgttccaaaaaggtgcattaataacaaaagataaatgaaaatattaaaattgtgatgttttaaccgtgaaaatattaaaattgtaatgttttaacaaatcaagatttagtacaacagatgaatgtggacaggaaaatcagcagcaggagaagggagagaaggacacggaagagagcaacaagtaaaaaataataaatattgaattaaaaataaaagaaaaattcattgaaattttttgtaaaatttttgctcattatttgtaagaaatttggcgacatcggaggacagtggcaatccgctcaaatcttccgaggaaaaccaaaaacagcagcagatggatgaaggagaagagaaggaagaggaggagtgcaaagagtaaaataaaattaatatttaatta

SEQ ID NO: 63129 - DNA, 161 bp, Heterodera glycines
atggctatctctatttttgagaaattttctatgcaacaaacgctttcgaacatgaaacgaagtgcggtgcgccatggccattttatttttcaaataatttttatatttaatagatattccagaaaaatgtattccagaaaaatggctatctctttttttga

SEQ ID NO: 63130 - DNA, 146 bp, Heterodera glycines; identical to SEQ ID NO: 56264

SEQ ID NO: 63131 - DNA, 161 bp, Heterodera glycines
atggctatctctatttttgagaaattttctatgcaacaaacgctttcgaacatgaaacgaagtgcggtgcgccatggccattttatttttcaaataatttttatatttaatagatattccagaaaaatgtattccagaaaaatggctatctctatttttga

SEQ ID NO: 63132 - DNA, 514 bp, Heterodera glycines
atgctttttgggacggaccacgaaattcaattcgtttttgtatcaactgattttgcgggtataatgtatcgaaataaatgtaattctaagaataggaatgctttttaaactaattttcatatgtaaacttttttttgtaagttgtctcgtttttcctcttctttaatctgtgtggtaatcttttcattgtgaagctggcaattgttgtgttatatattagagtcggatcggtacgggatatcaccgggattttaccgggattccgatcacgtctcatttccaaaaaagtccgggtcagggatcttggttgaatagagatttgattaacggtagcgagatccatatttcagcaatatcgggatttcaaaaacattaatccaataacgacctgaccacggccctcgctcccgtgctcgatgtagaggggtcggaatggcatagaaaagatcagaaagggcgggattcccctttttttggacttttttttaaatataaacattattcgaaaaataaa

SEQ ID NO: 63133 - DNA, 56 bp, Heterodera glycines; identical to SEQ ID NO: 52733

SEQ ID NO: 63134 - DNA, 71 bp, Heterodera glycines
attaaaaatttttagatttttattcatctccctttttgatagtgaaagcatctgagtgcctataataactt

SEQ ID NO: 63135 - DNA, 1208 bp, Heterodera glycines
atgaaaatttgggctgaatggtcagatgaaaatatgccttcttcaatagtacagtgtttaataagtttttcgttagaggttaagaccaggtcaagcaacgaatttccccttgtaggtccattggttgtattaatatatgagaatttgttaaaaaaagtcacaaaatatttcaccgagattactcattgttatatttctttattaattagaacaccacaaccaccaccacgttttaatatttttgattttctatgtgtttaatcgaaattataattttctacaatccatgggtaaaaggagcattcctcctttgtccatgtctcagtcagtaacaagatatctatttgattatttattatatttaaaaatatttcgttaattttattattaattgatctgatgttaattagacacgctttaacttgcccccgggagactattgtgtggccggaattttcagaatttttaggtgaatttgtttataagcgatccgatttcaagtcagttttccttatcagtgtcaatcaattgctgccgaaaactgtggacttcttctggaggatcacagcacccgcataaactatccattcttttccatccttctgtcgtttttcgacgcattgtaaatacagacgacgacgttcctccagctggaccttggtcagcgattcacggacccgaacattctgcagagagattggaacttcgaacagcggcggacttcttttgtcatgccaccaaagccagcttctggaaggcacgggacgacaaaagaactttcagcggtcgcggacttttttgggctgggtgataaggacggcccatccgataacaaatggtgccgcattcgacccccagcgagtcaaatataccgttaactgcggcacggtccatttcagccctctttgagggtgagttgtcggcctgttctgggaggcctatgacaacgacgcttcgctgtctctctaattcctctgctgagattggcagattagcacaagaagtgggagcggcggtgcggagctgagaaattgattgagtcagcaggtcaaattgggtggacagccaaagtggtgatttttactaaataccaagtccgctcatcacacattctctgagatggaattgtccgggttttgctgttcgttttcggttgcagttggcatttggtttcgttgtccagttttgtttaatttagcttaatcaga

SEQ ID NO: 63136 - DNA, 411 bp, Heterodera glycines
atgtacacagcagtggacaatttaaatatcgcagcaaacatcaaaaatgaacgtaattgatgataataattgccgggaaaagagataattaattaatataggagaaaaatttgttaattttcaaaattattttaataattaaaatcttactcattaatattcaattctatttcagctgacaagaaaaataagaggaacaggcgtaagaagcggttcgttgatctggcatctcttggcttcttagcttttcttatcgtattttctcttatcatatggtacatttctgggaaaattggcacatggctggccaaccaagactttgtccctaattggctggtcgtgtcaatttgccggtttcttgggccagaaatgcaatgactaactttcaacagaaaagaagtatgaaataaa

SEQ ID NO: 63137 - DNA, 540 bp, Heterodera glycines
atgaaatctattcttttctgccgcttttctctgatcgcttttgcttttccgctttttctcttcccaaaagaatgcttttcaatggatggacagaaaatgatggcacaaatggcggaggacatgaaaaatgaggtgaaaatgggagaatgggggaataatataattggaaacctgatacataagcattctttaataatttacatttaaataatttttttttgatttatgcatccgtaagtatttggttgtgcttttttagtcgctataaatcctttttacatgaatataaccatcagcagaattcatttaaaaaaactgatgactatgaagcggatttttagggttgaaaaattccaattaggggcctaaatgggggcaaaaaatggcgaaatagggacccaaaatggtaaaaattggtaagaaatttttctaaaatgccgaaataggtgcaaaaaagggtcgaatgctaaaatccgctccctactgatgacagtgcctataacctaaaatggagcaattttaaacgctaaattgattaaa

SEQ ID NO: 63138 - DNA, 2326 bp, Heterodera glycines
  unsure (1)..(2326): unsure at all n locations
atgggagttttttattttatgttattttctttggtgttattgaacggaatacaggtaaagattccgatctcatttaccaaattcgatttccagacatttttgttggccaatatactgatcaccgattcctgaaatattcaaagggcttagaaaaccaatttcaaagtgccgatcttaattcagatccttatttttgaacattgacttaaaacccaaacgttgaaaaaaaatttgagacgatttttacaattttttgatatttatcaacaccgccttaattcatatttaaattatacaaataatagccatacaaataacaataaaattgattattttattttgtctttaaaaatatttaaaatttgacaaagaataaaaaaagataataaaatatttatttttttcttcattattttanaattatttaagaacacacatttgttcgcaaaccattcgatttggctaaaatttattttaaacattatgtactcaaaacaatttacaaagtacttttatattaaatgttaaatgaatataaaagtattagaattcatcctttttactatttttattaaattaaattgtcattgactttcatttattcgttcttaaataatctttgcgttttaaaaccattaattaaaactttcgcccatcaattctttccccattagcaaaatgattttatttttttttttttgcctgtttttcacttttctccgcgctttccgcccaagaacataatattgatcaatcaaatttttattaaaattactaatgcacactaatccattcgcttcgtcagcaggtgcaaaacgggcggcctatgaaaacgcgccgtttttatttccccatttttaacttccaaaaacctttttttaaattataataaataaataaatgtttattcgaatgctatttaaaaaatgctgtattgattttttaaggctcaaaaaatgaaatgacataaaatttaataaataaaaataattttatttttcttatcgtctttcattgtgctatttatttgtgcaacaaattatatcaattatctaccgaaatttttgtgaaatttgtctgtgtgtttaatggacaaaactgctaataaccagggaagtgttattttaatgatttattatctctaattaatttcccatgcgaaatttttcttaaaaataaaataattattccaataagataaattttggttccaacaattgaaattaataaaagcgactgatcataatattttaaaaatatgttatttttctgtattaatgaacaaattctcaaattcttttaaaaaatgttactgccttttttaattatctttaagcctatttctgacacaatttttcgcttttatttggtccaatttccgtggctaaacaatttaacacttttaaattagcctaatttcagtacagtcaaattgtcccaaattaccattttaattgccaaataatggcttacccaataattaccctttcagaacccctcttaccgatgctttctccaaaaagtgacttggatttgcacactcggcggccttctgttcggctacgacacaggcgtgatcaacggcgcgttgccgttcatgcgcgacgagttggagctgaccgatctgaccattgggctggtgaccagctcgttgctgatcggtgccgcagttggcgcttttgtgtgcggtaaattgtctgatcgacttggccgaaagcgaacactgattattttgagcgtatttttttcattttaaatatttaagtatgtattactagtattaatataataatttatttgaaatgattaatcaacttaactaattaacaatattaatttaggtcatttttataattggcacaattggctcttctttaatgccaaaagtttgggtattctttttaaatatttatgttcaatattttttattattttaatttaattaaatgaatttaatcaaaataaaataattgaaaatatcgaaaaaatatttcttttagtctatccttccctttcgctttcttcttggctttgctgtaggcggtgcttctgccattgttccggtaagaatattaaattaactctattaaaactctattaattaatattattatgtaattaatctttttctattcctcaatttttattaaattaactattaattaatttacaaatatttttctatttttaggtttatttggccgaagtgtcgccggcgaagcggcgtggtcagctggtgacacgaaatgagctgatgattgtgactggacaactgttggcttatgtgatcaacgccattctgggcaacatttggagtgatcagtaa

SEQ ID NO: 63139 - DNA, 364 bp, Heterodera glycines
agtcagccgtggtctcgccagcatcaccttctgtgagagggaaatcggcattgaggaatcggctgtcattgattgtgcacactacatgcgcgaagtttgtgccagcttcattctgctccaacagcaacaccaaatcggcgggaacaacatgaccgtcgagatcgacgaagcgctgttcaccaacaaaaataatgttggccgtgtgctgccggagcagtgggtcttcggagcagggctgggcgaagctcggcttagcactcgaagccgaagccgaaggcgaagcccaatttttattcgaagccgaagtccgaagctcgaagcccaaaaacccgaagttttcgaaggtttcgaagccgaagccgaa

SEQ ID NO: 63140 - DNA, 104 bp, Heterodera glycines
gtcagtctaatccaggaacaatttgtgaaggctttgcaaatccatttgagccaatgcgaacatgggccccgactttccgagattctcacatggcatgtgtttga

SEQ ID NO: 63141 - DNA, 894 bp, Heterodera glycines
atggagccgaatgatgggattactgatcagccaactgatcaagatgggagtgatacagaagcaaccgattcgacgacagttggatcggatccaggaccaaatgacaatgatcagaatgccactgggccaactgatgaagatgaaacaggaacggaagcaaccgattcgacgacaacaacaactgaatcaaatgcaatagatgaagaaggtactgatcagaatgctacaaactcatctgatcagggagaaagtgatgcagaagcagaagcaaccgattcgacaacaaatggatcggatctggaaccaaatgatcaggatgaaaatggtgcggatgctgattcgacgacaacaaacggaatttgatcaaaatttactgaaacaaaactggcaatgatcagttgaattttttgatttgcagcgtggttgatcaattaatgacgaatgtcaatatcattttgatattgcaattaaaaccgatgtagttcatttgcgatacaattttttttcatgtgtacaacgaaacgtgaaaaaagtctattgggcttttttatatcatcaaaaaagaaaaaatgcaaaataatacaaaattattttaaaaaattaataattaaacgatccaaaattattattatttatttaattttgaaagttatcgcctcggttgtgattaaatttaattacagcaattaatttatttgaatatgggtgaaggacgacgctaataaggcaccaaaaacaattaaataattgagggacgacgctaataaggcaccaaaaaaaattaattaattgaaggacgacgctaataaggcaccaacaaaatgacaattaattaattgattgtgtatgcaaaacaagttgagtgagtgtcatgaaaaaattgacaacaataaa

SEQ ID NO: 63142 - DNA, 779 bp, Heterodera glycines
atggcaacagtcccgagggagaagaagagtcgaattgcggaggcagtgtgtgttcccttttttgattacccttaaatggtctgttaattttataggcttcgccttcgtctcttcgcgactgtcattctcgagcatcgaccaacgaacacaccaacatttctcatcactctcttcacgatgacaatgcaccaccgtatttttgtttttaaataacaaattttatattttaattggaatgtcttttataaactaataagtcaatttattttctcataatttaaatttattaaatgttttcatttaagttctccctccttggccaatatctcaacaaacattgaactccatccacacaacaatgcgcttggaggttcctcctctcataaattcatcaaaaggccattgaatgcttatatgatatggacaagacaggaaaggaagcgaattttaacggacgatcccaaaatgaaggtgagtggacgggcgaattaagaaaaaaaagaattgatcaatttgttagatgaacgaagtgagcaaagctgtgagtttttttatttgtttctctatttatcaatttgtattcgtgatgtgttgtgctgacatattgaccattacattgttagattcagatgggcgaaaaatggaagaaaatgtcggacaaggaaaaggtgacctttcccaaatttctcaaaaacgattgttttcagaaaccttacttcgaaatggcaaaaaaattctctgaagaacacaaattggtgagtaacacagatcaaaataaa

SEQ ID NO: 63143 - DNA, 762 bp, Heterodera glycines
  unsure (1)..(762): unsure at all n locations
atggttcttcagccaatcgaggcagttccaatctatcgaggtatttatgattattactttctatttaaatttgttttatttttgttgattaattgatagttcatttaattctgtttcatttcacctttaggttagtgggaaagctgcttcagtgcccgaaaatgaggaggagacggggatcgaagtgcgtgagactttgcctctcccggcatttgtcggtgttcgttgggtccccgattcggattgtgaccaatgtacatcttgttcgaggtaataattaattttctttttgtgcaatattttaattttatttttgtacatatttatttgaatttgaataattttgtatttcagtccgttcactttggtcagacgtcggcatcactgcagaaactgtggtcgaatattttggtgcaataaaaaatatatttgtaaatttatttattgccctttttcagcggtcaatgttccactaatgcaatcgctattcctgagcttggttatgacagaagggttcgttttgccccccccccaattgacacactattttaaaatgaagggattttatgggagtgttatgaaaattcatttttaaccatttttctttcttaccttattaggttcgagtttgcgatttatgctatgaaaatcggttgcgacaataccattccgagtccggcgatcaagaanatggttcgttttggagaggatggcgaaactgcaaatgctttggctgacaacggtccgacgactgcaggtccg

SEQ ID NO: 63144 - DNA, 354 bp, Heterodera glycines
atgaaaattaaggaggccatggagacaattggcacggacgtaaaagtcgaaaacggtacgttttcacatcccgaattatgatgaaaattaaaggggaataggcatttgttaaaagcccaaatagttacagcgcatgaagaggcttcctccgctcgtggtaaggacatgcagaacatttacgaggccgagaagaagcagaagcgtgaggaggagccaagcgaaggggggcgggaggagggcgcaccggcgaggccccctaacagcggggaagggggcagaacgacgaagaaaggcggacgaaagggcaaaagactgaccgacttggacattggcaatgcgtccgagtcggacacg

SEQ ID NO: 63145 - DNA, 252 bp, Heterodera glycines
  unsure (1)..(252): unsure at all n locations
aaaatgttttggtacttttttgtggctctttgccaaatcacctcgcagatcgccttncgnagggaagatactcgtcctccgatggttctgggtcctcttcattttcatctgcactgctcgccttccattcgtcctaattttctatgtctccggaatggcatttctcactaaccgtgtccgactcggacgcattgccaatgtccaagtcggtcagtcttttgccctttcgtccgcctttcttcgtcgttctgc

SEQ ID NO: 63146 - DNA, 696 bp, Heterodera glycines
atggcaagcctaatccaaaagggcatcacattcacactcaaggcgctggatagtgccagaacgaccacggcactttcactacatccagacgccgacctctcaaactgggaatacgcagtcaaattggagactcaatgcactcgcgtgaacagagaagtccaaacaatggaagcacaactggacaatctgcgcaacctctccaacaattggattgacctgctaaaccgcctcgaaggagcagaaaaagacaaaggcgaaaaggaatacgtgaaattcgacacgcatgagaaaattgccgaacgccatgacgcggctacaaccaaactccgggatctgggggatctcgaagcaatgctcagtgccgatgccaaactgtaccgaggcagagcagaaagagaagcaagagcagatcaacaggcaaatccgccaccacaagcagcaacgccacctatggcagcaccgacattcacggcaccgctctatcaattccagccaatccagctggacaaattcttcggccaaaagcgaaaatggcccgaattctacgagtctttcaaatcagccatcggcagccaaacaatcagcaaagcacagaagctgaacttgctccgcaatcttctgggcggagaagcacgggaactcattgctgggttccgccttgaggaccaaactacgagacggtcctccagctgctga

SEQ ID NO: 63147 - DNA, 5816 bp, Heterodera glycines
atgttggagaaaaagctgactccagcattcctacgcaacatcctcaacaaaaagggagaggatccggcaaattggacaacaacaaaattccgggacgttcttaacgaagcagttcgcaaggaagttcaaattcaagaggtgatgggtgagtacggacaccaccatcagccactcaatcggccagcaaggccgcaagcacaagcacatcaggttcagcgagcacgcatgccgacagcaaatttccggaacagaaatgcatctcccgccaatcgggaacgcactttcatgtcctcaacaattgaggaggttcagcaacgaatgaaccacagaccgcaactgcgaaagtcccaacagaggggatcaaggccaactcaagcgccttacaacgtgccaatccggaatggcacagcacaagcagggtcaaggaatccgccttcaccctgcatcttctgcaatggcactcactggaatgagaaatgccagaaactcagtaccgttcagcaacggtcagcctttgttcgagaaaagggcttatgctttaagtgcatgaaaacaaatcatcgggcaaacgaatgcccccgaccagcaaaatgctacaaatgcaaacggtcacacccaccagcactttgtcctgaaggtaacaactcaatgacacaacatgccgccgccgtcgttacagaacgaccccaaggcgaaagtgaatccacgaatcagacagcacaactgtgcaacgccatccaaagcaaggacacccgagcgctgttaatgacagcgaaggccacgatttacaatccggcacagccatgcctcagcatgatggcaacagtgttcatagacccgggaagccaccggtcattcgtctcatgcaacacagccaagcagttggaactgaccaaccttggaacggaagaatgcttcctcacaagctttggcgagcgagagccaaagagatacgtaagcgaccgcgtcgctattggctttttgtgtcccgacggggaccgattcatcttcaacctgaacgcactgaagttcttgttgaacaatttgccagtcttacaactcaatgaaatggacaacatgcagcttcaacagaagaagctttacataccacatgagtcaagacagcctgacgtcatgctgggtatggacgtgtggcacgaactgcaagtgcaacccgtcgaacgactgccaagcggcttcacgatttgtcaatcgaaaattggcaaaatcatcagcggatccgggcgcattgaactcagtcaaccgtccaacgtcacattcgtcgtcacagtgacggacgaaaatgtcttcaccacagaggaagacttgaaagccgacgatgaactcaacaagttctacggcttgaacatcatcggcatggacgattcatcaccaccgattgaccacgacgaagtcatgaaaaacttcaaacggaatttgtcgttcgtcaacgaccggtaccaaatcgcattgccgtggaatgacaaagtgacacagttgccaacgaattatcatcaggcgaaagcaaggctaataagcctcgtccgaaaactgcggacaatcaacttggtcgacgagtaccaagttattttggatgaacaactgcagaatggcatcattgaaagggctaacccagaccattcttgtggaccagtgcattatctgccacacagggcggtaattcgcacggacagagccacaacgaagattcggatcgtgatggatgcctcagcaaagcccaaatccactccatcggcaccatcactcaacgaatgcctgcacacgggtccgttactgctcaaggacttgacaggcattctgctccgcttccgtcaaatggaaaaagtcgtactggccgacattgaaaaagcattcctacaagtgggagtacgagagcaagacagagacgctacacgattcctttggttggcaaatccaaaggaggcaaacctcgaccaactcagaaaagaggacatccacattctccggttctgccgagttagcttcggcttgaccgtgtcgccatttcttctaaatgccacaatacgtgaacacatggcactctacgacacagatgtggcacaacggataagcaacaacctgtacgtggacaacatcatgatggaagtgaagccgggcgaaaacatccgagaaattgccacagaggcaaaaaacatttttgagtctgccgggatgcgaatccgtgaattctacgggagccacatcgaagagctaaaagagctcgactcctcagacttggccaacgaattggaagacactaaggtgttgggcatcaagtggaagccaaaatacgaccaactcgttttctccatgccacacttcgacagcccaatcaccaagcgaaacattctttcgcacattgccaaagtatatgacccactgggactcatttcaccggcacttctgccagcaaaacacttccttcaaatcgtccaaaacgcaaattacaaatgggacgacccgttggcagaggatttgaaattgatgtggctaaaactgatgcgtgcgtgggacggatttggattcaactcactcgtcgaattcccacgccacatcatcgctgggataagcgaagagttccattgcttttgtgatgcgagcaaatctggtctgggtatcgcgttgtaccaggtcgcagaaacgcattacaacaaaagggaaagcaatttgatcttcggcaaaagccacgtcaagccactcaaggtcgcggaccacgattcgaccatacccaaattggaactccaggcgctcactttgggagtcaaggctaccaagttcgtccaaacacagctcaactttgccgacagccaagtcattttgtggacggacagccaatgctcgattgagcggttgaaggaaaaccgcacccacgacagattcgtagtcaatcggctaaagaagataagagaggcaaacttcaaagtccgacacatccgaacagctgagaatccagcagacatcgcctcacgcggcacagacccgcaaagcctccaagcatcattgctttggcgatatgggccagcctggctcaccaagacacacaaatggccagaaacgaacgtcacttacactcccggagaagagacacgggaagagactgagccaccgatcgtcgagtggagtgcaacactccaagaagagcagaaattcagcccgtcaatccaatttgaaagattttcgaattggaaccggctcaaggcggcagccgcctatgccattcgtttcgctttggcacttcttcaaaaaagaaatgtcgttccggcgatcgattcacttctgtatcagcaagaaagacaagcggggctgctaacagcaaaggaattggaaaatgccgaaacatggattttgttggaaacccaacgtcttcactcgcccacagaaacagccacaaacaatttaaaattgtccagctcgagctccattgagccactgagatgccaggggcgattggaaaacgccgatctgccctacgaaagcaagcacccgacctttttaccaacagaagcctggaccaccaagctcatcgttatccactacgatcgggcgctgaaacactgcggcccacggacgcttctctcaaaactccgagaaaagtattggataccaaaaggccgacagacagtccaacacatcctcaactccaacaaattcggatgtttgaagtgcagacgggagagactcaagccatatgcttatccggacgctcctgacctgccaaaggagcgagtcacggaaacacgacccttcaatcataccggagttgactacttcggaccgctgaaagtcaagcaaggaaacacgactgtgaaagtgtatgtggcacttttcacatgcctcgtcatcagagcgattcatctcgaggtagccgaggactactcagctgaagcatttctgagagccttccggcgatttgctgcacggcgcggcattccaagtttgatgatgtccgaccaagggacaaatttcaccgccggcgccaaaacgatccaagaaaattggacaacgcaattgttcccaaatgaaatccgtggacaattggcacaccaaggagtcacatggctcttcaacacggcacacgcaccttggcgaggtggtgcctgggaacgacttgttggcataacaaaaaatgccttacgacgaagcatcggtcgaaatctcctcacgtgggaggaattctgcacactcaccgttgagattgaaacgatcgtcaattatcggccattgacattcgagtcggatcgtgaaccgagccccgtcattcgaccaatcgattttctgattccgtactggtctgcggaaacgaatttcccagtgattgacgtggatccagaggatcctgagtacacaccaactccaaacaaactgacggaaatgctgcataaaacggacaaaagactcacccgtttttgggatctgtggagatcagaatatctcctatcgctgcgcgaacggccaagtctaaaccaaaaccacggagcacacatgccccaagaaggggatgtggtgttggtcgaggaggatggcactcctcgatccgtctggacaatggccagaattcttaagcttcagaggggacgagacggggaaactcgttccgccctcattttgcttaatggaaaggaaaaatggagggcaacgaaccaacttttcccaatggaagttcaatccgaaattccagaaacccagctcatcgcattcatcatggacgtcgacatggattcagtctcactgcccggaagcgaagacgaagcttcagagcgatcggcacccaactttaaaattccaaagaagcgccgcgccttcttgcgaccgatcggtcaacagcatagccctttgcaagggcctcgtcgaaaaaagatggaacttggcgactccggactacgcaagctctttgccgcaataagcgaagagcaaggcggcagcaaggcgacgacaaatgcgataacggagagccgacagatggaaaaggccccggagcgcgtcagaaaggagcacgacaaggaaatggccagaagacaaagagaaaaggtccaacgaataccaacggaggaaatcaggcagaaattggccgccctcccacacatcacagtttcttcggagaatgccgaaacacagagaaaggagcgaaaggaaaacgaagtgcgtcgcaaaaacaatcagcagtccacaagcgaaggatggaagcaactcgccaagcaactggattatgacttgaaggatcagcccgatgaaccagccctggaacggcgaaaagctaccgaagaacagtcggtaaaaggaagagaagtcgaacggcgtcaaattgcacggaaaaaaggcatcgtgcaaatgaagaagcgcgcaaaaccgctgaagtttcccaccgaagatgaaaccttgctgagctacgtaaagcggttttacgacaaggataattgggttctctcttggaaaagccgacgtattctggacgaacttcatgacttggagaacgaaggacgttggttcttataccacgcagcaaatggcgctcaactcactatctcaagaacgttcgatggaacacgaccatttgcagaatttcgatatgtggaagaaggacacctcgtggatctgactccaaaccaagtcatcttccgccaaacggttccagatgagcccgaagagagtccagcgagcaataataaaaagttggaagagaaggcagaaaaaccggcacgcaacgacaaacgaacaactctggccactcggaaggtggaggagtattgcacggcagagatgaagcagaacagctactgctatgacatatttgaacc

SEQ ID NO: 63148 - DNA, 3407 bp, Heterodera glycines
atgtcaccagggcaagaatgcagaccacgacagagccaacaacacgcaccaggccggtcaaatcgtcaaaacgagacctcgggatcaaccgagatggccatgacattttctggtgttcggatcgcggaagcacgacccggcaacgaagtatcaagaatgcatgaagaactgatcaagcccaccacggaattggaagaagtggctaaacttttccacgacgaacaaatcgtgaaaaacaaacgcggactcgggaaggatcaacaagtgatgaaagtcatcgaaatctggagaaattcatgcgatcgcttcggagagcttttcaccaagccagcgatgcagcagatcaaattccggccaatcctgattgaacacaatggccagtataaccaatggatcaaccgccaaaacacgcgaatggcggaattattttccaaaatgcgaacgaaggctcagcatccgacctacttgagctacaactgcacaacggtgatcgtcggcgataacgtagcggaacttttcaccccactatttgatgatgccaaatggttcacgcatttcccagcggacacatgccgattgatacctgggccaaacgtcaaacatatcatcatgggatatcaagccacggacgagaacatggcggcgcagttggcaccgatgatccacaaattggcaaggacagaaatccaaacgactttgatcattggcaaggaggacaacgccaaatggatcatgaacaagaagcacctctttgatgtttgccgccagttgaaggcaggattcatcgtgttcaatcgtgagatgggagaagcccgaaaaatctctgatcggataaggcaacgaatggaagaaccaatggaaattgacaacgaaatagtgccgtccacctcgagtgttgtttcgagcagccaggcatccagagctaccatggcttcaagcagtgtcatcacactgatgttgctcagtcttctaggccttcttcttgtgccatcagtttccgcagctccactgcgaatacaccgagcaagtctgtcactaacagcacaaaattatttgaaagcaatgcataactactataacacgctcacgacgacaaattcaactgataccacgacagccacaagtttgccatggacaagcacaacttcaaattggccaatttcgactttgccgacactcacaacgacgatggtcacacgcacagctccaccagggaccacgacgacgactcagcgaacaacccttgcaacgagagcaaggacacggatccagtatgtcaccagggcaagaatgcagaccacgacagagccaacaacacgcaccaggccggtcaaatcgtcaaaacgagacctcgggatcaaccgagatggccatgacattttctggtgttcggatcgcggaagcacgatttgggaactcaagggcacggaaaattcacctttttgccgccccccgccatcactcactgctcaatggcacaacctggcaattgagctcttcgtaaaagtcatcaagcccgaacagatcacctttgcatggcattgttctgtaaagcgcactacggagcgctattacactaatcttttggccgataagttcgtcaccatcgagaaggagtttccaccggtcaacaagcggatctgcaaacaaatggccattcaccaggaatacccattcgccaaatctgaaatgacgaaccacgaaggacagctgtggtcgacgaacgacgagatggaagtcaacttccccggaccaatcgccggactgttcaaaggggaacaaatcagcacggcaaccaattgctttactcaaccagcaacactgttcgtcaaacggcacaacttacagatgttctcgccggtccaccatgttcaaaactgccaatacgccaccgaattctgccaactgcccgacaacacgactctcatttggaaatcaacctgcaatggcaatgaatgccaaacgtgtgactatgagaaagcggaaatcatcaacggcaaattcactgcggcctacggcgaatcaatggcaacttggatctccgaagatcaccaaaaggcattaacgttcgtcaaaaatgcgccagaattcatcgcctgtgatggcacacggatcgtcatgtccgaacagaatttcggaatcgccaaggatcagtacgaagacatcgtaagcacaacaacgagatggaaaagagggatccgaccagagcagctcgcatcacaactctcggcatcacaggtggcaacaagcgttgcgttgaatcagctctacacgcgggagtgccagcgaaacacgagagcagccaacccaactctccaagccagacgcttactacgacagcctaacgtccaggcgcgctggatcggagaaatgacaatggaagtgtttccatgcgtcaacgtttcgctccaggacatctcctaccgaccaatgaacgattgccgtgtctacattccagtgacagtgcatttccccgaccgagcgatagcagcattcctggaccccgaattacgcatcatttctttgacggcgcaatttgcaagctgcaacaatcaccgtttccatcatcttcaactgcgaagcaatccgaacatttggctactgatcgactcacgaaccgggattgcacgtcaaatgccaaaggactatacgcatgagctgtacgaaacgacactcaaccagtccaacagcaacatcgagcttcatcctctgatcttccacgcttggcagctggacaacgaatcagatgcgacacgttttccgcacattaacgagttcatcaacttggagcagttcaaggaaaagttggaacaacacatcacggcgagaaccgaggcgttaggtgccctaaaaggtggcatcgaaggactgaccatgcgctggctaaaaagcatgatcgacgaagtcatcacgtggtggattcgaatcgcctgtgtctactcaaccttcttgttcctgcgtgacattgtccttccatgcacactcgcctacttgttcaaccctgttcgggtcacatttttcagcttaatgggagttcgacgtcagccgcttcaaccaatgctcggcaaaacgctacgacaggaggaagtgccgcttcgagaagttctccgatcacctcagccacgcacttcaccgcaccgttctctgtcacccgtccacctggacgtgatcgctcgcagtgcccgttaccaacaaactcgagcgcaaagcgatgcaaatctggcagaagtcgacaccccgttcggacgacgaacgcgacgaagagaggagcactgaggaccacgaggatcaaggaacagacgagcccaccgagaaggaacagattagcccccacgagaacgaatgatggatgaacccatgcctcgggaatgtcgaaattttcgtaaaatcaaaatttgattttagca

SEQ ID NO: 63149 - DNA, 682 bp, Heterodera glycines
atgaacatggtggcacatcagcagcagcaacaacaacagtttgtgcagcagcaatcaaaacaacaacaacagcaacaacaacaggtggccgttcgggtttgggttatacagacttacaagtcgatcattggtttgtgttatcagatttacaatccgatcatcccccatgtaaggttttagcctaatttatataagggatcatttttgattatagctttaggaccggatcatttttgtgcaagttcattcatatatttaaggtctcatagccttatagccaaggaggaaaagctttcaaaattattaatcacagagtattgttaattttttcaggagctaatggaaatcgattcattccaacatcaagccgggggctatctggtggacccgctgttccaggtgaggcgctaatagttttattatttgaatataaccctaaaaaaaattcctattacatataatctgagtgttgcctaattttgattacagtattggttttgtggagttttagtaatcgtataccattcccaattttaggagctgtccactggtgatttgaatccgcatgagtttgacaaatatttgatcatcaacgacacggcgagggctgcagctcaacagcagcagcatcaccagcaacaacaacatcaacaaaacatggcgcaataaaacaaaaaataaa

SEQ ID NO: 63150 - DNA, 426 bp, Heterodera glycines
atgtgtcaagaattagcagaagaggccaaacaatcaatcgaaatagccaaaaattatcggcaagaaattgggcatatttatcggaccgcttactcgcagcccgatttaggcattggagacttggcaaataaactaaaagaaacaatgcgcgaaaaccaaatacggtttgaaaagcaaagacctcaggaagaatttagggatgaatttattgcttataaaatttaagaaaaaaaattcgagaaaatgaaactgcatgggaatcaaaggttgtgggacataaaccaaaaacaggtaaaaagggaaacaggtgaaaataggtgaaaaggaaacaggtgaaaacaggtgaaaataggtgaaatttcacctaaaaatatataggggcgtgtatttaatggggcatattagataatgtctcaactagtatca

SEQ ID NO: 63151 - DNA, 850 bp, Heterodera glycines
atgtcagccccgcaagtgttagccccgcaaatgtcagccccgcatatgtcagcgccgccaatgtcagcgccgcaaatgtcagcgccgcatatgtcagcgccgcaaatgtcagcgccgcgaatgtcagcgccgcaaatgtcagcgccgcaaatgtcagcgccgcaaatgtcagcgccgcatatgtcggccaatcttgaattgcaaattgaacctttttattctcttctttttgttacctacatttctctctctctcgctgtctctctctctgcctctctctccacggtttccgtgaataatttacactgtataaaattgaaaatttcagaattacataattgtttcattaaacaaaatctgctaagaaatcggggcaaaagtttcaaaaattcgtcggcggcgcctaacggcaccgccggcccttttccctatttctaaagtcacggcaaactcttaatatttcagttaatttagaaaattaatagttttaggtccaacggtgctgacatgtgccgccggatgaaaattcgaaaaatttgattcatttccgaaaatgaccgacttacggacagatagaagcgaagattcccggacgattaatccaattatttaaaattttaacaaacaattaaaatatttttttaatccagctcaatttaatattcatgtaaacaatttccggctaataccatcagaaaccgaaaaaattataaatatttattttattttatcgattctctcaggaaattaatcatttgaatgaagctgggttgacgcataatgggaaattgaaagcctcatatcgattatggatgaatttcatcatcatttatttggcaactataataaa

SEQ ID NO: 63152 - DNA, 328 bp, Heterodera glycines
ccgggactcaaatgtcccgctcaggccaaaatttttttctatttccgggaaaaaatcgaaatttttccgaaaaaaataccagtcgatagagctcgaaaaactatgttttggaagtggtcttcgtttttctgggaaaattcgttaaaaaatcctaaaattcaaaaacccgaaaaccgttttttaggcctagctcgaaaaattttgaaaattttcgaaattttaaaatctggaaaaatcgagctcaccgagctctacaataagtctgctggccaccctgcgctcaggtcaaagcctaatgagttattcaacggggactgaactgggcaaa

SEQ ID NO: 63153 - DNA, 370 bp, Heterodera glycines
atgcacgcgttttgcgctcgagctatttatcatcgggcttgtcaatccaaagcgaaacaacaaagatgctgttttgaacgaataaagggcataggttattttgaagaagtgtcaaagaacatgcagcaataagcctgcaaaatctaataagtggaaaatacatgagtatagaatttattttcagaaagtgtcaacagacttttggaaaaatatatttgcaatttatcaacaattttgagaagtgagttagaaatgataaacttcacgattcaaattagttttcggtgctctaattaaccgcgataaaaacatccgaatcaattaaatagcttctgagataataaggtttatcataaaatttcatttaaaa

SEQ ID NO: 63154 - DNA, 96 bp, Heterodera glycines
atgggggaagcaaaaatccaacgcagacattcaagtacaggctatagggaagctattcccgaaggattcggtctccccataaatctgggcgcatcg

SEQ ID NO: 63155 - DNA, 365 bp, Heterodera glycines
atgtcagttcggcagagaaattgccccttttacagtcgtccaatcctcgcacttacagtcgcacttcgtcgcgtgaggaggcgcggcccattgaccacaatgacccgctcaccggtgaagaaggggaggtccaggcaagtaaaagttaaataagacatattaaattgccggaaaatgcaccaaaattagaaattgcgtattttcttatttttaagggcggttttgtgtcctaccaacacggggacccaagaacaccgatgggacagggccaagcgcgcaatgtcaaccaaaatgggtcgccatcggatgtcggggaggaggacgacgaagactcgccgctaatgaaccgaggtctgttcgcgtaa

SEQ ID NO: 63156 - DNA, 2146 bp, Heterodera glycines
atgcccaacctcgttgcagttttggcatcggacgacatggagcgtcgttttgccgtcaagagcaatttcggcctcacaaacccggcacacaaccattggacctgtgaaatgcggttgatgattggggactttggggtgattttacgcgaacagacctcggttcattagcggcgagtcttcgtcgtcctcctccccgacatccgatggcgacccattttggttgacattgcgcgcttggccctgtcccatcggtgttcttgggtccccgtgttggtaggacacaaaaccgcccttaaaaataagaaaatacgcaatttctaattttggtgcattttccggcaatttaatatgtcttatttaacttttacttgcctggacctccccttcttcaccggtgagcgggtcattgtggtcaatgggccgcgcctcctcacgcgacgaagtgcgactgtaagtgcgaggattggacgactgtaaaaggggcaatttctctgccgaactgacatcacgggacattttgaatgtctgcaaaatgcttttaaacttcaaaatttctcaatgacaaatagaaaaattgataaagccggagtgaaaaggggcagaaaacagtgggaataagtaatcagcagccacagatgtttattttctcattttttaaataaaatgctaagcattatgccaaaaatgaaaaatacgaattttggcttttaacgcgctaaatgctagacacacaattgattttattactttttgaagacggtaatcgacagtaaagctttaaccagtattagtttaaccttgatcacatttataagctctaatttaattttaacttccattttatttaaggtttattatttgacaaatttcccgtcagtggctgggcatgaaatgattgtgctgatgaaagtttgttgaatggtgacacaaggtaaagcattttggagttaatttctaagaacaataattacaaatttatttcccatttgaatgaatcgacgcctttcttcgtatctttgtgatctaaaagacaccgatacatttataacatatccgttaattcgaggcttaacccaatgttaatgcaattttaagctttgtaatgatataaatttgagccttcccccatttgtacaagcttatcatgtatttgcaacgtttcggctagccgagcgtttgctcagattattttcataactttagatatcactatttttgctcggtttgatacgatttatttgattgattagaatcgatcgattcgaattccgtttatttcacacattcacgatttgttggtgtaggcagtgcattgagagagagaaagattctacgaaatagacacacttccgtacgtacgtaggcagaacacagacttcacagaagaagagaatggttattgcttttgccactaattctagttgaattaaaagtagtcaatttttatttgtttttttttattgtcaaatggattaaaaagtactgctagaaagccaattttgttttcacatttaggagcacgtaaagttggaatcaaatggaggcagcaaagcggagttggtcgacggggagcaatatcgcaaactgttcattggtattgttttttttggaatagtcaggctccaaatatacccagaattttgttttatctcatttatgtttttaggcgggctgtccctcaacaccacaaatgagacgctcagtgatttctactcgcaattcggctcattggttgactgtgtggtgatgcgcgatccgcagacgaaacggtcgcgtggctttggtttcgtctcgttttctagtctggaagaggttcggtttctttaacaatcggaattggcttttcaacaaccctaagcttgtttgtttttaggttgaccgtgcaatgactgcgcgtccgcataccattgacaaccgcgttgttgacccaaaaagagcggtgaatttttcccgtccatgtttaaatgtaaaaaaaccaattttgccacaggtaccacgggaaatggcaggcaaaggcgagtcaaacgtctccaccaagcgtttgtatgtgtcgggtgtgcgggatgaacacgacgaggattcgttcaaccgatacttttctgagtatggaccagtcattaaggtatattttaaattcattttatga

SEQ ID NO: 63157 - DNA, 660 bp, Heterodera glycines
ggtggtgttgcgtggaccgagcaaggacatcatcaacgaggtggagcgcaacattcaggacgcgttgcactgtgtgcgcaatgtgttgactaacccgcgtgttgtgcccggggctggtgcgctggaaatggccctttcgcatgtaaattacatattaatttgtcgaaggggggggggggtaatttttcgttgttggttttctttaaatcatattttctgtcgtcaggctttgttggagaaggccaagtccatcccgggcgtccgtgccggcccgtacaaggcggtggcacacgcgttggaaattgtgccgcgcacactcatccaaaactgcggcggctcctccaccatacgtcagctgaccgcactgcgtgccaagcacgcccaacagccggacaccaactggacatggggcatcaacgggcgggacgcgggcggcgagttggtcgacatggcgcagcccgagggcgtttgggactcgctcactgtgcgactgcaggccatcaaaacagccatcgagacggttgtgccaagacaaattacgaggggtatttcttggtggtaccgccacggtttcaggccattatgattttgcgcatcgatgacattgtcagtgggacgaagaagcgcgacaaagacgagaacggaggcggaggcggcggt

SEQ ID NO: 63158 - DNA, 419 bp, Heterodera glycines
atggaaatttcggcgcaaggagttgatgtgttggcactgacggcagcagattttgcggctatggatgaagcgcataggcaatgggagactgaacggcggcaacgaaaagaacaacgacaaagagagcaacaaaatcgcccgaaatggaagaggtctggtgaatggatggtgctccaaagagagtgggaagaagaaaaagaagaagaagaaaaagaccccaaaaatggaaaatggaaaaggaccagcaaattgaaaaatggaggcggcgaaactatgaactttggacgaaatcggcaggtgcgggtggcagcagcagcaacaacaaaaaatcggacgctgcccaatacgtttgggattgggccaaattgaaaaaacaagaaagagaaaaattggaaggcggtgggttgtggtaaaataaa

SEQ ID NO: 63159 - DNA, 519 bp, Heterodera glycines
atgagagaaatgaaccaaaaaagtacttcattcagtattcccatccgcctatggcagaaaagtggcgcccgccccacccgtccagccattcaggctgaggcaatgacgggtggagcggagaaggcggaggagacgccggagaaggagaggaaagcggagttggagaaggagggcaaaagcgacgcgggcagcagaaaaggccgagaaggggcggaaagcggcaaaggcggagatggggggaaaagcggagaatgagcggaaagcggtgacggcggagaaggagggcaacgcggagaaggagaaggagggcaaagtgacgcgggcagcggagaagggggagaaggccgaggaagcggagaagacaaagaagtcgggggagaagtcgaaaacggacggatcaaagccggggggaacgcttgaagcgcggcagaatatggtggcggtggggagagagagaacagaagtggcagtggcacattttgtgctggcgctaaataatcttgtaaattgtttaataaa

SEQ ID NO: 63160 - DNA, 1342 bp, Heterodera glycines
atggaagttgaattattgtctgcaacaaacacgtctggagggcacgaacgttatgctgtgtgcaatgcgctgctaacaaattctgaactggcgcgcgtccttgttgttgcatggcgtaatcgggcgcagcctgctgagcaagtgtttttggtgggtggaccaggatcattgtttcggcttaccaatcttgtgtggcgtgggactcgagagaggttgactgctaactacacgctggccattggatttgggtcttcaattgaattattacaggtttaaaaaaaaataaatttggattagaccaaatttattgttaagccaccggcaccgaatatatattcacagtttcatttgcaaacacctgctgtatcggaagcactaccagttcaaattcaatccaaccctgtgctgcatttggctcaacccagcaacaacgatgcggagctgattcaaagcataatgaacgagcttttaaatgcttcataaacacttgtttcttttatttaagtttttacatcttaaggacaacaatagtatggaaatgccacaaatcctcctgctatcactcaggcgcaatcgggaaatcatcaacaacaacaacaacaccaaccaaatgttcaattgggccaaatcccgactactattggcttggttgtaaaccaccagcagcagcaatcgctagttggcgcagaaatccagcaagggcaaagcgaggaaccgccacctggaccaatgacaaatcgtcatcagagccagcgccgcgagccaatacatggaagcactattgctgctgctgctgttgctgcttctgtggaagaagcaaacaccgtaagcattatgtttattaaatacttcaatgcagtatttttaaagaaccaaccggtgtttcggcgccgtcgaaacaacaacaacaattctggacgtggaaccactaatcgtgaaaatcctgttgaattggtgagaaacggttgagaaaacaaaagaaaaaaaaacttttaccaaatattttatttttcaataaattttgagcgacatgtgtatgtgtgtgtttaatattagggggcactgccaaccgtgagacgaaaccagtccgttgcaattagaacccaaccaattcggacccaactacgtcgaagaagaagggaacccattcctacttttgagattggagggggtctaactgctcaacaatgcgatagtattttgcccaacctggaagtgaaccaacaaatgctccaaaatgatgaaagatgcgttgtgtgccagattggatttactttgggatccttgaatgccacggaacttccttgccaacatttttatcatttaacatgcgctcgggaag

SEQ ID NO: 63161 - DNA, 279 bp, Heterodera glycines
atgacgtcatacaaaaaatggacaaggacgaaagaatgtgagcagacagcgtatgaacaatttcaaacaacggagaaactgaacacaaaaatggaagcagccaacacaaagctaacagagctgaaggacctggagatgcaggtggaagcgggagcaaagctgcaacgctccaaagcggacagagacgcgcgagtggagcaaagagaacatgcaaaagcaatgtcgaagtcgaatgcagaagcagacaaaggaaatagcgtgcgagaggcaatgaaatga

SEQ ID NO: 63162 - DNA, 189 bp, Heterodera glycines; identical to SEQ ID NO: 32946

SEQ ID NO: 63163 - DNA, 684 bp, Heterodera glycines
atggccgctgccgcagtaacgccgtgggcaccgtccgcttggcaatggagcgcagccgccactgagacggccgcgctgcttaacggaacatatggaggaggaggaggagcagcagggacgacgacggcgacaagttcggcacagtcaaacggaggatggaatggtgcgtcgtattttggcaacacttttggaggtgggacaattcggaggagggaaagacaaattaatgaataattgaaagaagtcgcttcatgggtggtaaaagttcaattgggtttccatttcgctcagttttattcgttttgccaggtttggtctccaaccaattgggggctaacattggaaatgcgtgctttttctcaaactctcaacctcaattcactcccaccacaacacatgccgattccggtttgaagaacaaaagttcaacaacagtaacggcggcacaacgaaacgccaaaaaagggagcaacagaacgccagaaaaagcaaagaatggcacaatgaaacagcaaatgccattggaaacaaacaatggatcagtgtcgacaaactctcatcgtgaagcatttaaatcaaatgcaaagggacaaaagcaacgagtgaaagccggggggaaaacgaaaagcaaaagcggtgggggaaaaacggggcgcaactgcgaatgtccgaattgcaaagcgg

SEQ ID NO: 63164 - DNA, 895 bp, Heterodera glycines
atgaagttatggcgatttccgccgttgctcctccctcctccattgtcgatgttccgaaaacggttgataccgccccgccgccgtctttgtctcagccggtggccgcaactgccgccgctgcaccaccaccaacatcggaacaacagccgaaccctgcggttgtcaccactgccgcggccaacaacaccaaacaatagttgggctcaaaggccaaagtctgtcgtggccggctcgtacgcggccattgccgctgccgcacgagggaatgggccgaacaatgttgataacatcgtgaccgtgcacgttcctgctgctgttgctgcaacgaatggtccgacggcacctactccgtcaaaggagattccacagcacaacaacaacatcgcaaagcacaatcccgaacaccaaattggtcaacttttttttaattatataaatttcaatcaactgggatgttttttacccatacattgtggtttttatactgtttgttttatataatatgtattttaaaccgtttattcactgatttacttaatcttttctttagctgtcaaacaacagcagcaaacgccgccatctctgccgcccgttttgaacatcgcgcctcgtcgggaatggacccatcgcatttacttcagccaattgaccaagccgggccgttttgtagactttaagctgggccagcaggagctgatgcgcgaaattcaaggtttgttcatttgaaaaacaaaaatttcttcaatttaatcctaattttttagccattaccgacggtgtggagtttgtgggcatcaaaccgaattctttgcgtcgtgagtatcgcactgcgttcggctttattgactttaccaccgcggcggacatgcaggcggtgtacgacgcgtgcaaacag

SEQ ID NO: 63165 - DNA, 2771 bp, Heterodera glycines
  unsure (1)..(2771): unsure at all n locations
gaggccaaccaggagcaattgtacaaccgcaacattgaagacgtggagctgtggctcagcgaattggagggccaattggccagcgaggacttcggcaaggacctgatctcagtgcaaaatctgcagaagaaacttggccttgtcgaaagtgactacaacgcgcaccaggtgggactaacgggaaaaatgatcaatgggagggaagggagaaaagtaaaggaatatagaaaaagtttcgagactcgactcgggttttttctgggaaataattggtatagttttatcgaaactggtgaaatctttgggttgagacccctatttttcttttctcattttgagtgaataaattgaatattttgttctaaaaataattgtttgccaataagatcaaaaatgtcaattcaggaggcccgactttgatttactagtctaaaattgtatttaataattttaatttttaaacatttatcactatcagagcgaaattttcgacatttcaggaacgcattgacgcgatcgggcatcagacgcgcgagtttcacgacacgggccacttcaacgcaccgttgatcggtaaaaagttcgaggcgttacgcgcccgcttcgaggcgttgcgcgagccgttgcagcgccggaagcaaaagttggccgagtcgctgcttggccaccagctgttccgcgacatcgacgacgaattggcatggattcgagagaaggaacaaattgcagcgtcgacaaaccgtggccgcgacttggtcggcgtgcagaacctcatcaagaagcagaacgcactgcacaccgaaattgctaaccacgagccgcagatggaacaggtgaggggcggggtgaaggtatactgtaaattacggtagtgagtggagcagaggttaacttccaagggcatttcgcttactgtacattacagtacaccatggtcttggattatcaaatagggaataccatgggcggattagttgttaatttccagtgaaatggcgtaaactgagaccgatagatcaagaaattaatgaattgaaattttgtttttatgggataaagaaaaaaggaagtgatgtcaaacaaatttttggaaaatttaacattaaaattgtgtggatgattttatcaacaaaaaatcatgtttttttanacacgtgcaggttgcacaatccgcggaacagatggtccaacgtggtcacttcttggcaccagacattcgcgacaagaaatgtgagacagaattttttttttttttacttattttgggctcggggaaatttcttgaatctcggagtcacaattttcgaactgataattgtcattctcgttttcgactagttaaaatataaatttagcccaactgcgcgaccaattggcgtgcactgaaaaccaaggcggacaagcgcaagcaggacttgcaagactcactgcaggcgcaccagtacctggccgacgcgaacgaggtgggcctttactttttttctcttttataccattaaaaaatttcaaaaaattttcctttaatgacacgcgcccattttcactcaattaattttgtctctttttcaggctgagtcatggatgcgcgacaaagagccgctcgtggtatgttattctgctttaacgctggaccccattgtgccattattttgtgaaaaattgtcccaaaaatggctaagatttgtcatttttggcgcaaaacgatacaaatccgttttttttccccggcgctgaaaattttgaaaaagaacactggctaaaaaaattttaaatcagtagatcaaaaaaaaagaactctttcgggtgcttggatacgggcctgctcttccttcattttttgatcaaccctgtgctaatggattttgaaatttcagggcagtacggattacggcaaggacgaggacagtgccgagtcgctgctgaagaagcaccgggcaatgatgagcgacttggaggcgttcaacaccaccattgacgagttgcgccgcgaggcgggacaatgcaaatatcaggagcagttggatggacagttgggcaaggagtgtgtggtggcactgtacgaggcaagtggcagatgggatggactgatcggattgatcgggtcaaatataaagtaatgaggtgtcaattattttttattgtggcactttgtgagggtagataaatagatattcattagttgatcagtcagaaatttacggaatttgctcatgaactgatcaggcaagtgggatttcttggtgatcaaacattggtggaaattattaatttttgaaatatgtttacgtagtgttgctcgagaccgataatttctcgacccagaaacccataaaacacatggcttttctcgaattatagctctgatccgttatttttgattagcattattatgtgccacatgtggtgcattttattcccctgattcgtttcttctctcccaaacctccatttaattctaaattccaattgttcatataaattactcctaccaaatctcagctcagctcttggggctgggtaattaggcctaaatgctaaggcaaattttcttaattaattgattaccattactatcaatcactaaacacttttcgtatctcttataaattatgtctttttttatttaagtacaccgaaaagtcgccgcgagaagtgtctatgaaaaagggcgacgtgctgacgctgctgaacgcgtccaacaaggactggtggaaggtggaggtcagcgaccgccagggcttcgtcccggccgcctatgtgaagcggattga

SEQ ID NO: 63166 - DNA, 737 bp, Heterodera glycines
attatcagcgcttcttgtccgactaccgtgatctgatgcaatgggtggacggaatggtccaattggtgtccagcgatgagttggccaacgatgtgactggcgctgaggtgggtagcctatcgaactcgcaataaaaaaccgagaacgctaattcgtttgtttcatcgttgttgtgttgcaggcactgcttgagcgtcaccaagactaccgtaccgagattgacgcgcgcgcgtccaccttccacgcgtttgagcagttcggcaaccaactgatccgcagcgaacactacgcggccgaggacgtgcgccaacgaatggacgaggtgaaaactgtataaaataggggggggggggtctattttaggaaacacggtatggcatggataaataaaattttctatttgtccggctcaatttttcgcttatttaattttttcttccgttctttttttaatcctttattttaaaaatttgcattaattttccgctttttttcactcctcttttttaccctgtctcgtgttatctacttctttttctctctgtctctgtttctctgttctcctctctattttctattattttcttctacagtattatttacagttatcgtatacaaaaatcattttcacttaaggtgaatgatgctcgacgtcggctggaggaggcgtgggtggagcggcgcaaggtgttggaccagtgcttggagttgcagctgttccatcgcgactgcgagca

SEQ ID NO: 63167 - DNA, 918 bp, Heterodera glycines
gcttttctgtcccaagaggacaccaccggggacaacgtcgagtcgctgatcaagaagcacgaggactttgacaaggcgatcgcgtcgcagcaagaaaagctgaacaacttggacatgttggcacgacagctggtccaagcagggcactacgcggcaccggcaagttgcttttaacagtgccaataatggcaatgccaatggacctccctgctgagtccggagcagaccctcgcacattccccccccccccctttctcccaaaaattacaaatttgatctaaaagattattttaaaacgattttttttgcgaattttcccgattttttcataaaatgagaattaagttaatttttttttaatttcttaaaatttcaagcaccatgaagttaatggcattttccccattttccagcaaatcactgccaaacgtgaccaaattttcgagcgctgggatcagcttaaggcggcactgatcgaaaaacggtcaaagttgggcgagtcgcaaaccctgcaacagttctcacgcgacgcggacgaagtggagaattggatagcggagaagttccaagtcgcgcaggaggagacctaccgggacccgaccaacattcagcagaaacaccaaaagcaacaggtggagtcgggagttggggacaaaggttttggcgccgagactcgatttctgagtggaattttctcaattttgggcaaagtttttcgtaattttgatcgtttgtcgaaataaaaaaaaacaatttttagtattttttgtgcatttctcatgctttttaggacagcaatttaccccattattaatttccatcatttcacgtttccaccctttatttgtcttaatattgccattaattttaattgctttctgcaggcatttgaagctgaactgtccgccaatgctgatc

SEQ ID NO: 63168 - DNA, 203 bp, Heterodera glycines
aaccggtttaaaactcgaaaatttgagtgaaaagggaggctcctgaccttttaaaacgcccaaattcggacaaatttggtatcattcgaaagctcttgatgagctaagtctaaaaaacaaggtataaactcgaaccaatgccatctaagcactgggacaactgagtcccagtgaaaatggacacttcagtaccaaaaaataaa

SEQ ID NO: 63169 - DNA, 203 bp, Heterodera glycines
catctgaagaagaaaacaatggaaaatgcgatgagaaaaatgtccgagggaataccaaattgtcagcatcaatacggagaatgtctaagtcaacaaataagaagcttatgccattttaaatacctatctccttaacctcaagcttaatataaaaaagaatttagctctatttatccttttaattcatatagtgttaagaaagc

SEQ ID NO: 63170 - DNA, 228 bp, Heterodera glycines
atggaattggaagtgtccgcggcattggccgagttggacggactgattgaacttgttcaccaagttgacgagcaaattgaggctcaggagaaccgcctattttccatcaaaaagcaactcgcaaaaatggacgaacaggcgaaattggtcggcgagagaatgcgaacgttggaaaaacgggctgaaagaatgggcggaaagggcacggctgacccaactccgatcatt

SEQ ID NO: 63171 - DNA, 329 bp, Heterodera glycines
atgtttttgatttttctgctcatcattttgctaacaattcttttatcggtgtttggacagaacatttcgggacaaggtcagtaaaactttattgaaaatataatttataaaaaaataataaatttaaatttaaaaattaaattattctttaataggaaaatcggaggaaaaattagattcaattaatgcaatgggaaaatttgacaaagttcggctgaatgaaaagaattatgggctcgttagaaacttgcacacgaattggtacgcgggtggcatcaaagcgattatgggcaaaatggggagagatttgttcagaaagttattgccga

SEQ ID NO: 63172 - DNA, 725 bp, Heterodera glycines
gccaaaggccagcagaattgagcagcgcgaaaggagcagctcatcagcatccaatgaacgcctggaaaatgcgcttggcgatgagtgagaaattaaaaatttaattttaaaataattttaatttttaactatttatgagtccctactgttttgcaaaaataattgtcattgtctaaaaatgttattaaattaatgggggggggggatttctcgaagcggattcgatgagactgagacacccaaaaaatccggggtttttccgagtccggtctcgaaatttgatgaggtcgagatcacccaaaaaaaaaattgggattttttctgaatttacgccgagacttcttttgaatgtcatttgattacgctcggcaccgtcgggactcgggaacacttttttttaatttaaaaacgaaaaaacatttcgccaaatattgattggttaggaaattatttgaaatttaagcttttcattaatttaaatttattcagatattttgacagttctttctacgccccagcttcttcatcctaccgacaatcatttgttgttgtcgtcaatgctttgttcaatttggcacttttggcactgtttttggcaatgattcagcattgaaagaacggcagaaaatacttaattaataagcttaattaccccctaattggcataaagaatttgatcagcatttatgaaaacataacatatgcataaagattttttcaataaa

SEQ ID NO: 63173 - DNA, 1219 bp, Heterodera glycines
atgacgatggcactgaagaaatcggcacaaccacaacaaaaagaacaacaagcatcagtcatactgtaagttggtttaattagcatactgtatttgtaatttatatataaatggtgggtgtactgtaatgatggagttggcttaattaagtacggtgttttcccaacttttcaaaatagggaaaaaccacaggattttggcaccaaagataagttaaagcgccaaaacattttaaaaaatcataaaaactgaaaattccaaaaaataaaaaattccaaactcaaaattaaggacaaataaggacacttggaacgcaatttttaagttaattttaatacatatttttcagccaaaaatgagattttatattattttattttttagaatttcgcttcggctcagagtttgtcatcgaaaaagtatttttttaaaaattattttttacccgaattttcaaattttcggctcacttcttcaacaagcacaaaaactgtgaactcattattccatcgtgcgcataaggagcaaaaaattgtaaaaaatatgtgtcaaaaaatggatgtaaaaaataattaaatttatttaaaaaaatgctttttttttaaattgacgaccctcataatttcgggggctatatttcttagacaacacccctgaaaagtggggtacaattacaggggggggggggaaaggaaaataattcagtaaatacggtaatttttaaatctcagcaaaaaccgcaaaattttgccattttttccaactccttcaattaagagcccggccaccgccgtcagaccaactacaccatcaaaatcggcaccatcattggcaccatcggctgcttcctcagcagcgatgccaaagccatcaaattcgtcttcaaaattgttgccgttgcagaacagcacggtgcaaagtgaatatgatcgacacaatcgggtccatgtcatccacgtgagcagccggtgggtaaagcagataaaaaatatatatataattagttaaaattagagcccgcaaatttcaaaagatccggattcagatctgcgggattgggactcaaagtttttgcggggccggagcccgcgggattaatccagcaaatccagcaatttccaaaaaaggcgtgattgcggactgggattccgtaaaatctcacgccgggattgggattcaaatttttgcaggacgggatcacgcgggattaattccgtaa

SEQ ID NO: 63174 - DNA, 691 bp, Heterodera glycines
atgccgtcactttctacgattatttggacagtaaccaatttgtctgtatgttgaagggcgaatttggggagcagcagggctccggctgtgtacggaaacgttcaggtggaaaaacaaattaattagaaaaattaaaatgttcgaaatccgaaccctaaatcccgaggggtcgattaattttccaaaaatccatttcactaaaatgtgaactcattatttcatctttagcataaggaacaaaaatagtgtaagaaaacatgtaaaaaatggatgaaaaccatggtggaaaaataattagtaaaattaaaatttcattcaaaattcaattgttaatatcggagtaagaaaaatttattcaaaaaaccaaaaaaaaatttcaagcttatttcggtcgctaatttcgcagcaaaaaattttttttttaattcagttgttaattggaaaaatggatttcagaaaatgagtgaatcttggcgcttccgtaaattttttgtttgtgaatgaaacattatatttcaaatttttcaaaaccctaggccttgcttaggcctgttggtcgaaagaaaaactcaaaatcaaaatttagggcgcaaaaaatgccatttttcaggcaacattcgctgctggtgttttggccgttccaattgcaacacggccgaaaattcgaagctgctttatgaggcgtttgtga

SEQ ID NO: 63175 - DNA, 782 bp, Heterodera glycines
atggccaccggagtcttggacaacgatcattcagttgatactgtagacctaagcaacgaaatgttcaacatcgacaacatggacaatgtgaaagaattttttggcatttttaaattaaaataaattaaaaaattttttttagaatccaattgccgaagaatgccaaaacagagccaaaaagcatggaaattcaatggcaaaactcacttggcatggcattagcataaaacttaacagacaaagtgctgggataaacacggcaattttggacacatcattctgcgagaaaaggtaaaatttgccatttatattgtaattttttgaaattcggtaattttgatctaccgtattacgatgatgaaaaactgtagtttttataaataatcgaaaatttgctattgcaatttagttacattgtgcccgatgtttttcgccaattcaacattcatttcggcaacaaaagccattttgctgcttacattacaattgatggtaaaaataatttaaaattatttttaaatttaattttaaaatgcatttatattttagaagaagggattgacattgaagatggaaaagttgcgcagtataagaaaatggcattaagtggtgccaaaatcaaagattttgtgggcttttgggtgctcggcttggacatgatcccatgggatgagcaaacgatgagacttttcgtcatccggcactgcaactgctcattggaagcatttgtaaaaaatgccaaaatcaaaaattgaatgccaaaatcgttttttttaaataaa

SEQ ID NO: 63176 - DNA, 150 bp, Heterodera glycines
atgggttttgtggaaccgtacttccattgctcaactcgcggtatcgccggcattcaaaaaggctcccggacatttggacagtggacacttcgacagtggacatttggcagttggacagaagcggacaactggacagtggacacttcgaca

SEQ ID NO: 63177 - DNA, 1619 bp, Heterodera glycines
atgagaacggatcagactgatcaaaattgcatttgtcacaacagagttttgttgtccgattactattccgatcacttcagacacttcccaaacaattctgaacatgatcagggaggagttgcccaaggagggctacgaaatgtggcagccgacactcggaggtcggtttattacactttctcttttttattgccatttgccccgatgtttaggcccgggtgtgctgcagcatcagcaaaagccggagattttcacggcatccagcagctcagcggccagctccagcacaacgttcagcaccgggcggggcagcggctcctccatggctgtgccggtgaccgcggcgggctccacccggtccaacacgccggccagctcgcaccagacaacgccgtcggcacggcacaaaaagtgattactgattgactgccgcggggggttttggacgggccgacggacgacgacgacgcaatttctgaccagtcggatcagatcgatggcgaaggcacaatgtgcccatccatgcacatctctcccggttttgtctccagctgctcctgctgtgcaacacaacacattcgttcacatttcttatccctcgcccccgtcccttttccccttaaattgaacaccgcgcacttatcgggttccaaaaaatgccacaatttttatgtgagtacaacaacaaaaacagcaggagaatctgcaaaaagcatttcccttggtgatattccttcacgtgtactgctcgagatttttgtctcgtttggtttttgactaaaattttagaggtaatttttgcgacaatctcatgcaaattttgggttgcattttaagtttcaaagtgagattaatcgagtctcgactcttctgtgagtacggtttttcccgccatttgttaccgtattttcccaccattttccaccgttgtgcattttgacagattctcctgcccccccccccccattaaacgacataattttggcgctcttttcccccaaagtgccttccttctcctcctccttccttcacacattattacctaattaaataattttttcgtcattttccaattaataaataatggctggtcaatccttcgctctcttctctctgcccgaggccactaaattcaccaaaaatattttaaatattattttaacaatttaaaatatgtattttaccaatatgttttttatattttattttgccaattgtattccgacgacaattccttctccgatttgacatggcaatataaatattacgtcatactgtgctgagccgaacctaaaaaaagactcaatgggacgaattaaaaaaagtatcaaatgatagtaataattaattaatattattattttaattttattttgcaaaataataaaccataacttacaaattagttcaaactattcaaaaaattaaacagtctaaaataataattaattaaacacaataatcattgatatgtttttaggttcgccccattggcacttttatggtccggcctagcaaattcacaaacaatttcatacataattcgtatagattgattattgatcagcaccagttttatttttttgttttttgtccgcccatttttcttagaaaataaa

SEQ ID NO: 63178 - DNA, 185 bp, Heterodera glycines
ctgaacccggcaataaaaaagagacgcggagaaacggggagaaaaatcggcgcctaagaaaatttgattgactttgtcttttttgacatggaattttgcacttttattatttttgctgtttttttttgtctcttttgctgcagctgagtgtctaactgtcgcgtaaaaataaatttgcttaaaca
